United States Patent Application Publication US 2018/0305689 A1 - sequence listing, part 163

SEQ ID NO: 2378674 - RNA, 19 nt, Artificial Sequence
  Description of Artificial Sequence: Synthetic oligonucleotide
  Sense strand starting at position 1025 of SEQ ID NO: 1885954
acagucaucuaccuaguaa

SEQ ID NO: 2378675 - RNA, 19 nt, Artificial Sequence
  Description of Artificial Sequence: Synthetic oligonucleotide
  Antisense strand to SEQ ID NO: 2378674
uuacuagguagaugacugu

SEQ ID NO: 2378676 - RNA, 19 nt, Artificial Sequence
  Description of Artificial Sequence: Synthetic oligonucleotide
  Sense strand starting at position 1038 of SEQ ID NO: 1885954
uaguaagugcuagaaagac

SEQ ID NO: 2378677 - RNA, 19 nt, Artificial Sequence
  Description of Artificial Sequence: Synthetic oligonucleotide
  Antisense strand to SEQ ID NO: 2378676
gucuuucuagcacuuacua

SEQ ID NO: 2378678 - RNA, 19 nt, Artificial Sequence
  Description of Artificial Sequence: Synthetic oligonucleotide
  Sense strand starting at position 1110 of SEQ ID NO: 1885954
cagaaugaggagugguuaa

SEQ ID NO: 2378679 - RNA, 19 nt, Artificial Sequence
  Description of Artificial Sequence: Synthetic oligonucleotide
  Antisense strand to SEQ ID NO: 2378678
uuaaccacuccucauucug

SEQ ID NO: 2378680 - RNA, 19 nt, Artificial Sequence
  Description of Artificial Sequence: Synthetic oligonucleotide
  Sense strand starting at position 1212 of SEQ ID NO: 1885954
gccauucuucuacaggaau

SEQ ID NO: 2378681 - RNA, 19 nt, Artificial Sequence
  Description of Artificial Sequence: Synthetic oligonucleotide
  Antisense strand to SEQ ID NO: 2378680
auuccuguagaagaauggc

SEQ ID NO: 2378682 - RNA, 19 nt, Artificial Sequence
  Description of Artificial Sequence: Synthetic oligonucleotide
  Sense strand starting at position 1215 of SEQ ID NO: 1885954
auucuucuacaggaauguu

SEQ ID NO: 2378683 - RNA, 19 nt, Artificial Sequence
  Description of Artificial Sequence: Synthetic oligonucleotide
  Antisense strand to SEQ ID NO: 2378682
aacauuccuguagaagaau

SEQ ID NO: 2378684 - RNA, 19 nt, Artificial Sequence
  Description of Artificial Sequence: Synthetic oligonucleotide
  Sense strand starting at position 1218 of SEQ ID NO: 1885954
cuucuacaggaauguugua

SEQ ID NO: 2378685 - RNA, 19 nt, Artificial Sequence
  Description of Artificial Sequence: Synthetic oligonucleotide
  Antisense strand to SEQ ID NO: 2378684
uacaacauuccuguagaag

SEQ ID NO: 2378686 - RNA, 19 nt, Artificial Sequence
  Description of Artificial Sequence: Synthetic oligonucleotide
  Sense strand starting at position 1367 of SEQ ID NO: 1885954
ccaugaaacuuugugaaac

SEQ ID NO: 2378687 - RNA, 19 nt, Artificial Sequence
  Description of Artificial Sequence: Synthetic oligonucleotide
  Antisense strand to SEQ ID NO: 2378686
guuucacaaaguuucaugg

SEQ ID NO: 2378688 - RNA, 19 nt, Artificial Sequence
  Description of Artificial Sequence: Synthetic oligonucleotide
  Sense strand starting at position 1496 of SEQ ID NO: 1885954
cagcacuuuggaggucaua

SEQ ID NO: 2378689 - RNA, 19 nt, Artificial Sequence
  Description of Artificial Sequence: Synthetic oligonucleotide
  Antisense strand to SEQ ID NO: 2378688
uaugaccuccaaagugcug

SEQ ID NO: 2378690 - RNA, 19 nt, Artificial Sequence
  Description of Artificial Sequence: Synthetic oligonucleotide
  Sense strand starting at position 1515 of SEQ ID NO: 1885954
gucugaggguuucuacuaa

SEQ ID NO: 2378691 - RNA, 19 nt, Artificial Sequence
  Description of Artificial Sequence: Synthetic oligonucleotide
  Antisense strand to SEQ ID NO: 2378690
uuaguagaaacccucagac

SEQ ID NO: 2378692 - RNA, 19 nt, Artificial Sequence
  Description of Artificial Sequence: Synthetic oligonucleotide
  Sense strand starting at position 1586 of SEQ ID NO: 1885954
uuaggcuuuccugggaaag

SEQ ID NO: 2378693 - RNA, 19 nt, Artificial Sequence
  Description of Artificial Sequence: Synthetic oligonucleotide
  Antisense strand to SEQ ID NO: 2378692
cuuucccaggaaagccuaa

SEQ ID NO: 2378694 - RNA, 19 nt, Artificial Sequence
  Description of Artificial Sequence: Synthetic oligonucleotide
  Sense strand starting at position 1706 of SEQ ID NO: 1885954
gaucacuauuggucuuuga

SEQ ID NO: 2378695 - RNA, 19 nt, Artificial Sequence
  Description of Artificial Sequence: Synthetic oligonucleotide
  Antisense strand to SEQ ID NO: 2378694
ucaaagaccaauagugauc

SEQ ID NO: 2378696 - RNA, 19 nt, Artificial Sequence
  Description of Artificial Sequence: Synthetic oligonucleotide
  Sense strand starting at position 1717 of SEQ ID NO: 1885954
gucuuugauuuaggauuua

SEQ ID NO: 2378697 - RNA, 19 nt, Artificial Sequence
  Description of Artificial Sequence: Synthetic oligonucleotide
  Antisense strand to SEQ ID NO: 2378696
uaaauccuaaaucaaagac

SEQ ID NO: 2378698 - RNA, 19 nt, Artificial Sequence
  Description of Artificial Sequence: Synthetic oligonucleotide
  Sense strand starting at position 1826 of SEQ ID NO: 1885954
ucuguuacagaguaucuaa

SEQ ID NO: 2378699 - RNA, 19 nt, Artificial Sequence
  Description of Artificial Sequence: Synthetic oligonucleotide
  Antisense strand to SEQ ID NO: 2378698
uuagauacucuguaacaga

SEQ ID NO: 2378700 - RNA, 19 nt, Artificial Sequence
  Description of Artificial Sequence: Synthetic oligonucleotide
  Sense strand starting at position 2232 of SEQ ID NO: 1885954
uagaaagccuuuguccaga

SEQ ID NO: 2378701 - RNA, 19 nt, Artificial Sequence
  Description of Artificial Sequence: Synthetic oligonucleotide
  Antisense strand to SEQ ID NO: 2378700
ucuggacaaaggcuuucua

SEQ ID NO: 2378702 - RNA, 19 nt, Artificial Sequence
  Description of Artificial Sequence: Synthetic oligonucleotide
  Sense strand starting at position 2253 of SEQ ID NO: 1885954
gucugaagucucugaucca

SEQ ID NO: 2378703 - RNA, 19 nt, Artificial Sequence
  Description of Artificial Sequence: Synthetic oligonucleotide
  Antisense strand to SEQ ID NO: 2378702
uggaucagagacuucagac

SEQ ID NO: 2378704 - RNA, 19 nt, Artificial Sequence
  Description of Artificial Sequence: Synthetic oligonucleotide
  Sense strand starting at position 2256 of SEQ ID NO: 1885954
ugaagucucugauccaggu

SEQ ID NO: 2378705 - RNA, 19 nt, Artificial Sequence
  Description of Artificial Sequence: Synthetic oligonucleotide
  Antisense strand to SEQ ID NO: 2378704
accuggaucagagacuuca

SEQ ID NO: 2378706 - RNA, 19 nt, Artificial Sequence
  Description of Artificial Sequence: Synthetic oligonucleotide
  Sense strand starting at position 2271 of SEQ ID NO: 1885954
aggugucuccaaugugaga

SEQ ID NO: 2378707 - RNA, 19 nt, Artificial Sequence
  Description of Artificial Sequence: Synthetic oligonucleotide
  Antisense strand to SEQ ID NO: 2378706
ucucacauuggagacaccu

SEQ ID NO: 2378708 - RNA, 19 nt, Artificial Sequence
  Description of Artificial Sequence: Synthetic oligonucleotide
  Sense strand starting at position 2273 of SEQ ID NO: 1885954
gugucuccaaugugagaag

SEQ ID NO: 2378709 - RNA, 19 nt, Artificial Sequence
  Description of Artificial Sequence: Synthetic oligonucleotide
  Antisense strand to SEQ ID NO: 2378708
cuucucacauuggagacac

SEQ ID NO: 2378710 - RNA, 19 nt, Artificial Sequence
  Description of Artificial Sequence: Synthetic oligonucleotide
  Sense strand starting at position 2333 of SEQ ID NO: 1885954
ggugcugagaacugaggaa

SEQ ID NO: 2378711 - RNA, 19 nt, Artificial Sequence
  Description of Artificial Sequence: Synthetic oligonucleotide
  Antisense strand to SEQ ID NO: 2378710
uuccucaguucucagcacc

SEQ ID NO: 2378712 - RNA, 19 nt, Artificial Sequence
  Description of Artificial Sequence: Synthetic oligonucleotide
  Sense strand starting at position 2367 of SEQ ID NO: 1885954
cagugcugccaagaaagaa

SEQ ID NO: 2378713 - RNA, 19 nt, Artificial Sequence
  Description of Artificial Sequence: Synthetic oligonucleotide
  Antisense strand to SEQ ID NO: 2378712
uucuuucuuggcagcacug

SEQ ID NO: 2378714 - RNA, 19 nt, Artificial Sequence
  Description of Artificial Sequence: Synthetic oligonucleotide
  Sense strand starting at position 2565 of SEQ ID NO: 1885954
gucagaauauaguuccauc

SEQ ID NO: 2378715 - RNA, 19 nt, Artificial Sequence
  Description of Artificial Sequence: Synthetic oligonucleotide
  Antisense strand to SEQ ID NO: 2378714
gauggaacuauauucugac

SEQ ID NO: 2378716 - RNA, 19 nt, Artificial Sequence
  Description of Artificial Sequence: Synthetic oligonucleotide
  Sense strand starting at position 2658 of SEQ ID NO: 1885954
guauguucuccgucacugu

SEQ ID NO: 2378717 - RNA, 19 nt, Artificial Sequence
  Description of Artificial Sequence: Synthetic oligonucleotide
  Antisense strand to SEQ ID NO: 2378716
acagugacggagaacauac

SEQ ID NO: 2378718 - RNA, 19 nt, Artificial Sequence
  Description of Artificial Sequence: Synthetic oligonucleotide
  Sense strand starting at position 2706 of SEQ ID NO: 1885954
augugaucacaaugucuau

SEQ ID NO: 2378719 - RNA, 19 nt, Artificial Sequence
  Description of Artificial Sequence: Synthetic oligonucleotide
  Antisense strand to SEQ ID NO: 2378718
auagacauugugaucacau

SEQ ID NO: 2378720 - RNA, 19 nt, Artificial Sequence
  Description of Artificial Sequence: Synthetic oligonucleotide
  Sense strand starting at position 2754 of SEQ ID NO: 1885954
gucuuugagggucauccaa

SEQ ID NO: 2378721 - RNA, 19 nt, Artificial Sequence
  Description of Artificial Sequence: Synthetic oligonucleotide
  Antisense strand to SEQ ID NO: 2378720
uuggaugacccucaaagac

SEQ ID NO: 2378722 - RNA, 19 nt, Artificial Sequence
  Description of Artificial Sequence: Synthetic oligonucleotide
  Sense strand starting at position 2756 of SEQ ID NO: 1885954
cuuugagggucauccaagu

SEQ ID NO: 2378723 - RNA, 19 nt, Artificial Sequence
  Description of Artificial Sequence: Synthetic oligonucleotide
  Antisense strand to SEQ ID NO: 2378722
acuuggaugacccucaaag

SEQ ID NO: 2378724 - RNA, 19 nt, Artificial Sequence
  Description of Artificial Sequence: Synthetic oligonucleotide
  Sense strand starting at position 2884 of SEQ ID NO: 1885954
ggugcuuaugaauagagcu

SEQ ID NO: 2378725 - RNA, 19 nt, Artificial Sequence
  Description of Artificial Sequence: Synthetic oligonucleotide
  Antisense strand to SEQ ID NO: 2378724
agcucuauucauaagcacc

SEQ ID NO: 2378726 - RNA, 19 nt, Artificial Sequence
  Description of Artificial Sequence: Synthetic oligonucleotide
  Sense strand starting at position 3047 of SEQ ID NO: 1885954
agcagcaagguaugagaau

SEQ ID NO: 2378727 - RNA, 19 nt, Artificial Sequence
  Description of Artificial Sequence: Synthetic oligonucleotide
  Antisense strand to SEQ ID NO: 2378726
auucucauaccuugcugcu

SEQ ID NO: 2378728 - RNA, 19 nt, Artificial Sequence
  Description of Artificial Sequence: Synthetic oligonucleotide
  Sense strand starting at position 3163 of SEQ ID NO: 1885954
uuuccuuaugguuaaagau

SEQ ID NO: 2378729 - RNA, 19 nt, Artificial Sequence
  Description of Artificial Sequence: Synthetic oligonucleotide
  Antisense strand to SEQ ID NO: 2378728
aucuuuaaccauaaggaaa

SEQ ID NO: 2378730 - RNA, 19 nt, Artificial Sequence
  Description of Artificial Sequence: Synthetic oligonucleotide
  Sense strand starting at position 3203 of SEQ ID NO: 1885954
uuaugucauccuuaaguaa

SEQ ID NO: 2378731 - RNA, 19 nt, Artificial Sequence
  Description of Artificial Sequence: Synthetic oligonucleotide
  Antisense strand to SEQ ID NO: 2378730
uuacuuaaggaugacauaa

SEQ ID NO: 2378732 - RNA, 19 nt, Artificial Sequence
  Description of Artificial Sequence: Synthetic oligonucleotide
  Sense strand starting at position 3214 of SEQ ID NO: 1885954
uuaaguaaucuuugaagca

SEQ ID NO: 2378733 - RNA, 19 nt, Artificial Sequence
  Description of Artificial Sequence: Synthetic oligonucleotide
  Antisense strand to SEQ ID NO: 2378732
ugcuucaaagauuacuuaa

SEQ ID NO: 2378734 - RNA, 19 nt, Artificial Sequence
  Description of Artificial Sequence: Synthetic oligonucleotide
  Sense strand starting at position 3475 of SEQ ID NO: 1885954
accucaggucaugaagguu

SEQ ID NO: 2378735 - RNA, 19 nt, Artificial Sequence
  Description of Artificial Sequence: Synthetic oligonucleotide
  Antisense strand to SEQ ID NO: 2378734
aaccuucaugaccugaggu

SEQ ID NO: 2378736 - RNA, 19 nt, Artificial Sequence
  Description of Artificial Sequence: Synthetic oligonucleotide
  Sense strand starting at position 3773 of SEQ ID NO: 1885954
ucccuuugccgauaccaua

SEQ ID NO: 2378737 - RNA, 19 nt, Artificial Sequence
  Description of Artificial Sequence: Synthetic oligonucleotide
  Antisense strand to SEQ ID NO: 2378736
uaugguaucggcaaaggga

SEQ ID NO: 2378738 - RNA, 19 nt, Artificial Sequence
  Description of Artificial Sequence: Synthetic oligonucleotide
  Sense strand starting at position 3787 of SEQ ID NO: 1885954
ccauacucgcuugauuacu

SEQ ID NO: 2378739 - RNA, 19 nt, Artificial Sequence
  Description of Artificial Sequence: Synthetic oligonucleotide
  Antisense strand to SEQ ID NO: 2378738
aguaaucaagcgaguaugg

SEQ ID NO: 2378740 - RNA, 19 nt, Artificial Sequence
  Description of Artificial Sequence: Synthetic oligonucleotide
  Sense strand starting at position 3983 of SEQ ID NO: 1885954
ugcaaagaauuagcauauu

SEQ ID NO: 2378741 - RNA, 19 nt, Artificial Sequence
  Description of Artificial Sequence: Synthetic oligonucleotide
  Antisense strand to SEQ ID NO: 2378740
aauaugcuaauucuuugca

SEQ ID NO: 2378742 - RNA, 19 nt, Artificial Sequence
  Description of Artificial Sequence: Synthetic oligonucleotide
  Sense strand starting at position 635 of SEQ ID NO: 1885955
acuggaaugcuuuggaaua

SEQ ID NO: 2378743 - RNA, 19 nt, Artificial Sequence
  Description of Artificial Sequence: Synthetic oligonucleotide
  Antisense strand to SEQ ID NO: 2378742
uauuccaaagcauuccagu

SEQ ID NO: 2378744 - RNA, 19 nt, Artificial Sequence
  Description of Artificial Sequence: Synthetic oligonucleotide
  Sense strand starting at position 640 of SEQ ID NO: 1885955
aaugcuuuggaauauguca

SEQ ID NO: 2378745 - RNA, 19 nt, Artificial Sequence
  Description of Artificial Sequence: Synthetic oligonucleotide
  Antisense strand to SEQ ID NO: 2378744
ugacauauuccaaagcauu

SEQ ID NO: 2378746 - RNA, 19 nt, Artificial Sequence
  Description of Artificial Sequence: Synthetic oligonucleotide
  Sense strand starting at position 696 of SEQ ID NO: 1885955
uccagaaacgugggcuuaa

SEQ ID NO: 2378747 - RNA, 19 nt, Artificial Sequence
  Description of Artificial Sequence: Synthetic oligonucleotide
  Antisense strand to SEQ ID NO: 2378746
uuaagcccacguuucugga

SEQ ID NO: 2378748 - RNA, 19 nt, Artificial Sequence
  Description of Artificial Sequence: Synthetic oligonucleotide
  Sense strand starting at position 856 of SEQ ID NO: 1885955
acauguucuagagaguguu

SEQ ID NO: 2378749 - RNA, 19 nt, Artificial Sequence
  Description of Artificial Sequence: Synthetic oligonucleotide
  Antisense strand to SEQ ID NO: 2378748
aacacucucuagaacaugu

SEQ ID NO: 2378750 - RNA, 19 nt, Artificial Sequence
  Description of Artificial Sequence: Synthetic oligonucleotide
  Sense strand starting at position 859 of SEQ ID NO: 1885955
uguucuagagaguguugga

SEQ ID NO: 2378751 - RNA, 19 nt, Artificial Sequence
  Description of Artificial Sequence: Synthetic oligonucleotide
  Antisense strand to SEQ ID NO: 2378750
uccaacacucucuagaaca

SEQ ID NO: 2378752 - RNA, 19 nt, Artificial Sequence
  Description of Artificial Sequence: Synthetic oligonucleotide
  Sense strand starting at position 959 of SEQ ID NO: 1885955
ggcuacugagagugacaaa

SEQ ID NO: 2378753 - RNA, 19 nt, Artificial Sequence
  Description of Artificial Sequence: Synthetic oligonucleotide
  Antisense strand to SEQ ID NO: 2378752
uuugucacucucaguagcc

SEQ ID NO: 2378754 - RNA, 19 nt, Artificial Sequence
  Description of Artificial Sequence: Synthetic oligonucleotide
  Sense strand starting at position 1000 of SEQ ID NO: 1885955
ugcugaccucaugaucaua

SEQ ID NO: 2378755 - RNA, 19 nt, Artificial Sequence
  Description of Artificial Sequence: Synthetic oligonucleotide
  Antisense strand to SEQ ID NO: 2378754
uaugaucaugaggucagca

SEQ ID NO: 2378756 - RNA, 19 nt, Artificial Sequence
  Description of Artificial Sequence: Synthetic oligonucleotide
  Sense strand starting at position 1111 of SEQ ID NO: 1885955
ggacacauccugugauagg

SEQ ID NO: 2378757 - RNA, 19 nt, Artificial Sequence
  Description of Artificial Sequence: Synthetic oligonucleotide
  Antisense strand to SEQ ID NO: 2378756
ccuaucacaggaugugucc

SEQ ID NO: 2378758 - RNA, 19 nt, Artificial Sequence
  Description of Artificial Sequence: Synthetic oligonucleotide
  Sense strand starting at position 1465 of SEQ ID NO: 1885955
cccagcaagcuugagagau

SEQ ID NO: 2378759 - RNA, 19 nt, Artificial Sequence
  Description of Artificial Sequence: Synthetic oligonucleotide
  Antisense strand to SEQ ID NO: 2378758
aucucucaagcuugcuggg

SEQ ID NO: 2378760 - RNA, 19 nt, Artificial Sequence
  Description of Artificial Sequence: Synthetic oligonucleotide
  Sense strand starting at position 1523 of SEQ ID NO: 1885955
gcucauagucaugagaggu

SEQ ID NO: 2378761 - RNA, 19 nt, Artificial Sequence
  Description of Artificial Sequence: Synthetic oligonucleotide
  Antisense strand to SEQ ID NO: 2378760
accucucaugacuaugagc

SEQ ID NO: 2378762 - RNA, 19 nt, Artificial Sequence
  Description of Artificial Sequence: Synthetic oligonucleotide
  Sense strand starting at position 1533 of SEQ ID NO: 1885955
augagagguacccaagcuu

SEQ ID NO: 2378763 - RNA, 19 nt, Artificial Sequence
  Description of Artificial Sequence: Synthetic oligonucleotide
  Antisense strand to SEQ ID NO: 2378762
aagcuuggguaccucucau

SEQ ID NO: 2378764 - RNA, 19 nt, Artificial Sequence
  Description of Artificial Sequence: Synthetic oligonucleotide
  Sense strand starting at position 1546 of SEQ ID NO: 1885955
aagcuuucucaggagguua

SEQ ID NO: 2378765 - RNA, 19 nt, Artificial Sequence
  Description of Artificial Sequence: Synthetic oligonucleotide
  Antisense strand to SEQ ID NO: 2378764
uaaccuccugagaaagcuu

SEQ ID NO: 2378766 - RNA, 19 nt, Artificial Sequence
  Description of Artificial Sequence: Synthetic oligonucleotide
  Sense strand starting at position 1619 of SEQ ID NO: 1885955
gaagaaaucccagguuucu

SEQ ID NO: 2378767 - RNA, 19 nt, Artificial Sequence
  Description of Artificial Sequence: Synthetic oligonucleotide
  Antisense strand to SEQ ID NO: 2378766
agaaaccugggauuucuuc

SEQ ID NO: 2378768 - RNA, 19 nt, Artificial Sequence
  Description of Artificial Sequence: Synthetic oligonucleotide
  Sense strand starting at position 1650 of SEQ ID NO: 1885955
aguucuguugugagccgua

SEQ ID NO: 2378769 - RNA, 19 nt, Artificial Sequence
  Description of Artificial Sequence: Synthetic oligonucleotide
  Antisense strand to SEQ ID NO: 2378768
uacggcucacaacagaacu

SEQ ID NO: 2378770 - RNA, 19 nt, Artificial Sequence
  Description of Artificial Sequence: Synthetic oligonucleotide
  Sense strand starting at position 1725 of SEQ ID NO: 1885955
ccauucugcggagaaguca

SEQ ID NO: 2378771 - RNA, 19 nt, Artificial Sequence
  Description of Artificial Sequence: Synthetic oligonucleotide
  Antisense strand to SEQ ID NO: 2378770
ugacuucuccgcagaaugg

SEQ ID NO: 2378772 - RNA, 19 nt, Artificial Sequence
  Description of Artificial Sequence: Synthetic oligonucleotide
  Sense strand starting at position 1781 of SEQ ID NO: 1885955
cuucuacaucugggcaaga

SEQ ID NO: 2378773 - RNA, 19 nt, Artificial Sequence
  Description of Artificial Sequence: Synthetic oligonucleotide
  Antisense strand to SEQ ID NO: 2378772
ucuugcccagauguagaag

SEQ ID NO: 2378774 - RNA, 19 nt, Artificial Sequence
  Description of Artificial Sequence: Synthetic oligonucleotide
  Sense strand starting at position 1782 of SEQ ID NO: 1885955
uucuacaucugggcaagaa

SEQ ID NO: 2378775 - RNA, 19 nt, Artificial Sequence
  Description of Artificial Sequence: Synthetic oligonucleotide
  Antisense strand to SEQ ID NO: 2378774
uucuugcccagauguagaa

SEQ ID NO: 2378776 - RNA, 19 nt, Artificial Sequence
  Description of Artificial Sequence: Synthetic oligonucleotide
  Sense strand starting at position 1865 of SEQ ID NO: 1885955
gcuuuaguguauuuacagu

SEQ ID NO: 2378777 - RNA, 19 nt, Artificial Sequence
  Description of Artificial Sequence: Synthetic oligonucleotide
  Antisense strand to SEQ ID NO: 2378776
acuguaaauacacuaaagc

SEQ ID NO: 2378778 - RNA, 19 nt, Artificial Sequence
  Description of Artificial Sequence: Synthetic oligonucleotide
  Sense strand starting at position 1871 of SEQ ID NO: 1885955
guguauuuacaguggagcu

SEQ ID NO: 2378779 - RNA, 19 nt, Artificial Sequence
  Description of Artificial Sequence: Synthetic oligonucleotide
  Antisense strand to SEQ ID NO: 2378778
agcuccacuguaaauacac

SEQ ID NO: 2378780 - RNA, 19 nt, Artificial Sequence
  Description of Artificial Sequence: Synthetic oligonucleotide
  Sense strand starting at position 2058 of SEQ ID NO: 1885955
ccaugaaugaggugauuau

SEQ ID NO: 2378781 - RNA, 19 nt, Artificial Sequence
  Description of Artificial Sequence: Synthetic oligonucleotide
  Antisense strand to SEQ ID NO: 2378780
auaaucaccucauucaugg

SEQ ID NO: 2378782 - RNA, 19 nt, Artificial Sequence
  Description of Artificial Sequence: Synthetic oligonucleotide
  Sense strand starting at position 2067 of SEQ ID NO: 1885955
aggugauuaugagcuaaga

SEQ ID NO: 2378783 - RNA, 19 nt, Artificial Sequence
  Description of Artificial Sequence: Synthetic oligonucleotide
  Antisense strand to SEQ ID NO: 2378782
ucuuagcucauaaucaccu

SEQ ID NO: 2378784 - RNA, 19 nt, Artificial Sequence
  Description of Artificial Sequence: Synthetic oligonucleotide
  Sense strand starting at position 2338 of SEQ ID NO: 1885955
gauggaaugugcucaaggu

SEQ ID NO: 2378785 - RNA, 19 nt, Artificial Sequence
  Description of Artificial Sequence: Synthetic oligonucleotide
  Antisense strand to SEQ ID NO: 2378784
accuugagcacauuccauc

SEQ ID NO: 2378786 - RNA, 19 nt, Artificial Sequence
  Description of Artificial Sequence: Synthetic oligonucleotide
  Sense strand starting at position 2419 of SEQ ID NO: 1885955
ccuugucauuucucagagu

SEQ ID NO: 2378787 - RNA, 19 nt, Artificial Sequence
  Description of Artificial Sequence: Synthetic oligonucleotide
  Antisense strand to SEQ ID NO: 2378786
acucugagaaaugacaagg

SEQ ID NO: 2378788 - RNA, 19 nt, Artificial Sequence
  Description of Artificial Sequence: Synthetic oligonucleotide
  Sense strand starting at position 2516 of SEQ ID NO: 1885955
ggaguucuguucccuaaau

SEQ ID NO: 2378789 - RNA, 19 nt, Artificial Sequence
  Description of Artificial Sequence: Synthetic oligonucleotide
  Antisense strand to SEQ ID NO: 2378788
auuuagggaacagaacucc

SEQ ID NO: 2378790 - RNA, 19 nt, Artificial Sequence
  Description of Artificial Sequence: Synthetic oligonucleotide
  Sense strand starting at position 2518 of SEQ ID NO: 1885955
aguucuguucccuaaauaa

SEQ ID NO: 2378791 - RNA, 19 nt, Artificial Sequence
  Description of Artificial Sequence: Synthetic oligonucleotide
  Antisense strand to SEQ ID NO: 2378790
uuauuuagggaacagaacu

SEQ ID NO: 2378792 - RNA, 19 nt, Artificial Sequence
  Description of Artificial Sequence: Synthetic oligonucleotide
  Sense strand starting at position 2741 of SEQ ID NO: 1885955
ggagucagcuaaucacuca

SEQ ID NO: 2378793 - RNA, 19 nt, Artificial Sequence
  Description of Artificial Sequence: Synthetic oligonucleotide
  Antisense strand to SEQ ID NO: 2378792
ugagugauuagcugacucc

SEQ ID NO: 2378794 - RNA, 19 nt, Artificial Sequence
  Description of Artificial Sequence: Synthetic oligonucleotide
  Sense strand starting at position 2808 of SEQ ID NO: 1885955
uucaguggucuccagggaa

SEQ ID NO: 2378795 - RNA, 19 nt, Artificial Sequence
  Description of Artificial Sequence: Synthetic oligonucleotide
  Antisense strand to SEQ ID NO: 2378794
uucccuggagaccacugaa

SEQ ID NO: 2378796 - RNA, 19 nt, Artificial Sequence
  Description of Artificial Sequence: Synthetic oligonucleotide
  Sense strand starting at position 3047 of SEQ ID NO: 1885955
cuguaaaugggauagcgau

SEQ ID NO: 2378797 - RNA, 19 nt, Artificial Sequence
  Description of Artificial Sequence: Synthetic oligonucleotide
  Antisense strand to SEQ ID NO: 2378796
aucgcuaucccauuuacag

SEQ ID NO: 2378798 - RNA, 19 nt, Artificial Sequence
  Description of Artificial Sequence: Synthetic oligonucleotide
  Sense strand starting at position 3077 of SEQ ID NO: 1885955
gggugguugugauuuguga

SEQ ID NO: 2378799 - RNA, 19 nt, Artificial Sequence
  Description of Artificial Sequence: Synthetic oligonucleotide
  Antisense strand to SEQ ID NO: 2378798
ucacaaaucacaaccaccc

SEQ ID NO: 2378800 - RNA, 19 nt, Artificial Sequence
  Description of Artificial Sequence: Synthetic oligonucleotide
  Sense strand starting at position 3079 of SEQ ID NO: 1885955
gugguugugauuugugaac

SEQ ID NO: 2378801 - RNA, 19 nt, Artificial Sequence
  Description of Artificial Sequence: Synthetic oligonucleotide
  Antisense strand to SEQ ID NO: 2378800
guucacaaaucacaaccac

SEQ ID NO: 2378802 - RNA, 19 nt, Artificial Sequence
  Description of Artificial Sequence: Synthetic oligonucleotide
  Sense strand starting at position 3208 of SEQ ID NO: 1885955
uuuguagggucaucuauaa

SEQ ID NO: 2378803 - RNA, 19 nt, Artificial Sequence
  Description of Artificial Sequence: Synthetic oligonucleotide
  Antisense strand to SEQ ID NO: 2378802
uuauagaugacccuacaaa

SEQ ID NO: 2378804 - RNA, 19 nt, Artificial Sequence
  Description of Artificial Sequence: Synthetic oligonucleotide
  Sense strand starting at position 3380 of SEQ ID NO: 1885955
ucacucagucaauauaugu

SEQ ID NO: 2378805 - RNA, 19 nt, Artificial Sequence
  Description of Artificial Sequence: Synthetic oligonucleotide
  Antisense strand to SEQ ID NO: 2378804
acauauauugacugaguga

SEQ ID NO: 2378806 - RNA, 19 nt, Artificial Sequence
  Description of Artificial Sequence: Synthetic oligonucleotide
  Sense strand starting at position 3430 of SEQ ID NO: 1885955
ggaaacuagcagugcauaa

SEQ ID NO: 2378807 - RNA, 19 nt, Artificial Sequence
  Description of Artificial Sequence: Synthetic oligonucleotide
  Antisense strand to SEQ ID NO: 2378806
uuaugcacugcuaguuucc

SEQ ID NO: 2378808 - RNA, 19 nt, Artificial Sequence
  Description of Artificial Sequence: Synthetic oligonucleotide
  Sense strand starting at position 3477 of SEQ ID NO: 1885955
gcgugugaugguagcuuua

SEQ ID NO: 2378809 - RNA, 19 nt, Artificial Sequence
  Description of Artificial Sequence: Synthetic oligonucleotide
  Antisense strand to SEQ ID NO: 2378808
uaaagcuaccaucacacgc

SEQ ID NO: 2378810 - RNA, 19 nt, Artificial Sequence
  Description of Artificial Sequence: Synthetic oligonucleotide
  Sense strand starting at position 3490 of SEQ ID NO: 1885955
gcuuuaagauagccacaaa

SEQ ID NO: 2378811 - RNA, 19 nt, Artificial Sequence
  Description of Artificial Sequence: Synthetic oligonucleotide
  Antisense strand to SEQ ID NO: 2378810
uuuguggcuaucuuaaagc

SEQ ID NO: 2378812 - RNA, 19 nt, Artificial Sequence
  Description of Artificial Sequence: Synthetic oligonucleotide
  Sense strand starting at position 3907 of SEQ ID NO: 1885955
cucacagcacugugagaaa

SEQ ID NO: 2378813 - RNA, 19 nt, Artificial Sequence
  Description of Artificial Sequence: Synthetic oligonucleotide
  Antisense strand to SEQ ID NO: 2378812
uuucucacagugcugugag

SEQ ID NO: 2378814 - RNA, 19 nt, Artificial Sequence
  Description of Artificial Sequence: Synthetic oligonucleotide
  Sense strand starting at position 3950 of SEQ ID NO: 1885955
cugcuaaauuucuaggaag

SEQ ID NO: 2378815 - RNA, 19 nt, Artificial Sequence
  Description of Artificial Sequence: Synthetic oligonucleotide
  Antisense strand to SEQ ID NO: 2378814
cuuccuagaaauuuagcag

SEQ ID NO: 2378816 - RNA, 19 nt, Artificial Sequence
  Description of Artificial Sequence: Synthetic oligonucleotide
  Sense strand starting at position 3953 of SEQ ID NO: 1885955
cuaaauuucuaggaaguau

SEQ ID NO: 2378817 - RNA, 19 nt, Artificial Sequence
  Description of Artificial Sequence: Synthetic oligonucleotide
  Antisense strand to SEQ ID NO: 2378816
auacuuccuagaaauuuag

SEQ ID NO: 2378818 - RNA, 19 nt, Artificial Sequence
  Description of Artificial Sequence: Synthetic oligonucleotide
  Sense strand starting at position 3964 of SEQ ID NO: 1885955
ggaaguauguuaccuggca

SEQ ID NO: 2378819 - RNA, 19 nt, Artificial Sequence
  Description of Artificial Sequence: Synthetic oligonucleotide
  Antisense strand to SEQ ID NO: 2378818
ugccagguaacauacuucc

SEQ ID NO: 2378820 - RNA, 19 nt, Artificial Sequence
  Description of Artificial Sequence: Synthetic oligonucleotide
  Sense strand starting at position 3965 of SEQ ID NO: 1885955
gaaguauguuaccuggcaa

SEQ ID NO: 2378821 - RNA, 19 nt, Artificial Sequence
  Description of Artificial Sequence: Synthetic oligonucleotide
  Antisense strand to SEQ ID NO: 2378820
uugccagguaacauacuuc

SEQ ID NO: 2378822 - RNA, 19 nt, Artificial Sequence
  Description of Artificial Sequence: Synthetic oligonucleotide
  Sense strand starting at position 81 of SEQ ID NO: 1885956
gcaagcaaucuggauauua

SEQ ID NO: 2378823 - RNA, 19 nt, Artificial Sequence
  Description of Artificial Sequence: Synthetic oligonucleotide
  Antisense strand to SEQ ID NO: 2378822
uaauauccagauugcuugc

SEQ ID NO: 2378824 - RNA, 19 nt, Artificial Sequence
  Description of Artificial Sequence: Synthetic oligonucleotide
  Sense strand starting at position 303 of SEQ ID NO: 1885956
ugcuaagugauugaugaua

SEQ ID NO: 2378825 - RNA, 19 nt, Artificial Sequence
  Description of Artificial Sequence: Synthetic oligonucleotide
  Antisense strand to SEQ ID NO: 2378824
uaucaucaaucacuuagca

SEQ ID NO: 2378826 - RNA, 19 nt, Artificial Sequence
  Description of Artificial Sequence: Synthetic oligonucleotide
  Sense strand starting at position 350 of SEQ ID NO: 1885956
acaucaaaucacuguugga

SEQ ID NO: 2378827 - RNA, 19 nt, Artificial Sequence
  Description of Artificial Sequence: Synthetic oligonucleotide
  Antisense strand to SEQ ID NO: 2378826
uccaacagugauuugaugu

SEQ ID NO: 2378828 - RNA, 19 nt, Artificial Sequence
  Description of Artificial Sequence: Synthetic oligonucleotide
  Sense strand starting at position 433 of SEQ ID NO: 1885956
accagaugaugaguuaauu

SEQ ID NO: 2378829 - RNA, 19 nt, Artificial Sequence
  Description of Artificial Sequence: Synthetic oligonucleotide
  Antisense strand to SEQ ID NO: 2378828
aauuaacucaucaucuggu

SEQ ID NO: 2378830 - RNA, 19 nt, Artificial Sequence
  Description of Artificial Sequence: Synthetic oligonucleotide
  Sense strand starting at position 647 of SEQ ID NO: 1885956
uggacaggguuauucuuua

SEQ ID NO: 2378831 - RNA, 19 nt, Artificial Sequence
  Description of Artificial Sequence: Synthetic oligonucleotide
  Antisense strand to SEQ ID NO: 2378830
uaaagaauaacccugucca

SEQ ID NO: 2378832 - RNA, 19 nt, Artificial Sequence
  Description of Artificial Sequence: Synthetic oligonucleotide
  Sense strand starting at position 652 of SEQ ID NO: 1885956
aggguuauucuuuaucucu

SEQ ID NO: 2378833 - RNA, 19 nt, Artificial Sequence
  Description of Artificial Sequence: Synthetic oligonucleotide
  Antisense strand to SEQ ID NO: 2378832
agagauaaagaauaacccu

SEQ ID NO: 2378834 - RNA, 19 nt, Artificial Sequence
  Description of Artificial Sequence: Synthetic oligonucleotide
  Sense strand starting at position 1045 of SEQ ID NO: 1885956
gucaaccuugcuuagaaga

SEQ ID NO: 2378835 - RNA, 19 nt, Artificial Sequence
  Description of Artificial Sequence: Synthetic oligonucleotide
  Antisense strand to SEQ ID NO: 2378834
ucuucuaagcaagguugac

SEQ ID NO: 2378836 - RNA, 19 nt, Artificial Sequence
  Description of Artificial Sequence: Synthetic oligonucleotide
  Sense strand starting at position 1066 of SEQ ID NO: 1885956
gcugauuugucucugacuu

SEQ ID NO: 2378837 - RNA, 19 nt, Artificial Sequence
  Description of Artificial Sequence: Synthetic oligonucleotide
  Antisense strand to SEQ ID NO: 2378836
aagucagagacaaaucagc

SEQ ID NO: 2378838 - RNA, 19 nt, Artificial Sequence
  Description of Artificial Sequence: Synthetic oligonucleotide
  Sense strand starting at position 1074 of SEQ ID NO: 1885956
gucucugacuuaucagaug

SEQ ID NO: 2378839 - RNA, 19 nt, Artificial Sequence
  Description of Artificial Sequence: Synthetic oligonucleotide
  Antisense strand to SEQ ID NO: 2378838
caucugauaagucagagac

SEQ ID NO: 2378840 - RNA, 19 nt, Artificial Sequence
  Description of Artificial Sequence: Synthetic oligonucleotide
  Sense strand starting at position 1080 of SEQ ID NO: 1885956
gacuuaucagaugguuaaa

SEQ ID NO: 2378841 - RNA, 19 nt, Artificial Sequence
  Description of Artificial Sequence: Synthetic oligonucleotide
  Antisense strand to SEQ ID NO: 2378840
uuuaaccaucugauaaguc

SEQ ID NO: 2378842 - RNA, 19 nt, Artificial Sequence
  Description of Artificial Sequence: Synthetic oligonucleotide
  Sense strand starting at position 1082 of SEQ ID NO: 1885956
cuuaucagaugguuaaagu

SEQ ID NO: 2378843 - RNA, 19 nt, Artificial Sequence
  Description of Artificial Sequence: Synthetic oligonucleotide
  Antisense strand to SEQ ID NO: 2378842
acuuuaaccaucugauaag

SEQ ID NO: 2378844 - RNA, 19 nt, Artificial Sequence
  Description of Artificial Sequence: Synthetic oligonucleotide
  Sense strand starting at position 1083 of SEQ ID NO: 1885956
uuaucagaugguuaaaguc

SEQ ID NO: 2378845 - RNA, 19 nt, Artificial Sequence
  Description of Artificial Sequence: Synthetic oligonucleotide
  Antisense strand to SEQ ID NO: 2378844
gacuuuaaccaucugauaa

SEQ ID NO: 2378846 - RNA, 19 nt, Artificial Sequence
  Description of Artificial Sequence: Synthetic oligonucleotide
  Sense strand starting at position 1097 of SEQ ID NO: 1885956
aagucugccuuauuugagu

SEQ ID NO: 2378847 - RNA, 19 nt, Artificial Sequence
  Description of Artificial Sequence: Synthetic oligonucleotide
  Antisense strand to SEQ ID NO: 2378846
acucaaauaaggcagacuu

SEQ ID NO: 2378848 - RNA, 19 nt, Artificial Sequence
  Description of Artificial Sequence: Synthetic oligonucleotide
  Sense strand starting at position 1102 of SEQ ID NO: 1885956
ugccuuauuugaguaagcu

SEQ ID NO: 2378849 - RNA, 19 nt, Artificial Sequence
  Description of Artificial Sequence: Synthetic oligonucleotide
  Antisense strand to SEQ ID NO: 2378848
agcuuacucaaauaaggca

SEQ ID NO: 2378850 - RNA, 19 nt, Artificial Sequence
  Description of Artificial Sequence: Synthetic oligonucleotide
  Sense strand starting at position 1106 of SEQ ID NO: 1885956
uuauuugaguaagcucuuu

SEQ ID NO: 2378851 - RNA, 19 nt, Artificial Sequence
  Description of Artificial Sequence: Synthetic oligonucleotide
  Antisense strand to SEQ ID NO: 2378850
aaagagcuuacucaaauaa

SEQ ID NO: 2378852 - RNA, 19 nt, Artificial Sequence
  Description of Artificial Sequence: Synthetic oligonucleotide
  Sense strand starting at position 1228 of SEQ ID NO: 1885956
uguugugcucuaguguaca

SEQ ID NO: 2378853 - RNA, 19 nt, Artificial Sequence
  Description of Artificial Sequence: Synthetic oligonucleotide
  Antisense strand to SEQ ID NO: 2378852
uguacacuagagcacaaca

SEQ ID NO: 2378854 - RNA, 19 nt, Artificial Sequence
  Description of Artificial Sequence: Synthetic oligonucleotide
  Sense strand starting at position 1316 of SEQ ID NO: 1885956
acagcacuuacgggagauu

SEQ ID NO: 2378855 - RNA, 19 nt, Artificial Sequence
  Description of Artificial Sequence: Synthetic oligonucleotide
  Antisense strand to SEQ ID NO: 2378854
aaucucccguaagugcugu

SEQ ID NO: 2378856 - RNA, 19 nt, Artificial Sequence
  Description of Artificial Sequence: Synthetic oligonucleotide
  Sense strand starting at position 1789 of SEQ ID NO: 1885956
gagaucucagcucaggcaa

SEQ ID NO: 2378857 - RNA, 19 nt, Artificial Sequence
  Description of Artificial Sequence: Synthetic oligonucleotide
  Antisense strand to SEQ ID NO: 2378856
uugccugagcugagaucuc

SEQ ID NO: 2378858 - RNA, 19 nt, Artificial Sequence
  Description of Artificial Sequence: Synthetic oligonucleotide
  Sense strand starting at position 1883 of SEQ ID NO: 1885956
uugcaauugcauuguauuu

SEQ ID NO: 2378859 - RNA, 19 nt, Artificial Sequence
  Description of Artificial Sequence: Synthetic oligonucleotide
  Antisense strand to SEQ ID NO: 2378858
aaauacaaugcaauugcaa

SEQ ID NO: 2378860 - RNA, 19 nt, Artificial Sequence
  Description of Artificial Sequence: Synthetic oligonucleotide
  Sense strand starting at position 2002 of SEQ ID NO: 1885956
ggugcuauacuagaauagu

SEQ ID NO: 2378861 - RNA, 19 nt, Artificial Sequence
  Description of Artificial Sequence: Synthetic oligonucleotide
  Antisense strand to SEQ ID NO: 2378860
acuauucuaguauagcacc

SEQ ID NO: 2378862 - RNA, 19 nt, Artificial Sequence
  Description of Artificial Sequence: Synthetic oligonucleotide
  Sense strand starting at position 2052 of SEQ ID NO: 1885956
acugcuuggagucaaagau

SEQ ID NO: 2378863 - RNA, 19 nt, Artificial Sequence
  Description of Artificial Sequence: Synthetic oligonucleotide
  Antisense strand to SEQ ID NO: 2378862
aucuuugacuccaagcagu

SEQ ID NO: 2378864 - RNA, 19 nt, Artificial Sequence
  Description of Artificial Sequence: Synthetic oligonucleotide
  Sense strand starting at position 2072 of SEQ ID NO: 1885956
gauaaagauauaggugguu

SEQ ID NO: 2378865 - RNA, 19 nt, Artificial Sequence
  Description of Artificial Sequence: Synthetic oligonucleotide
  Antisense strand to SEQ ID NO: 2378864
aaccaccuauaucuuuauc

SEQ ID NO: 2378866 - RNA, 19 nt, Artificial Sequence
  Description of Artificial Sequence: Synthetic oligonucleotide
  Sense strand starting at position 2173 of SEQ ID NO: 1885956
uguucugguccagaaguaa

SEQ ID NO: 2378867 - RNA, 19 nt, Artificial Sequence
  Description of Artificial Sequence: Synthetic oligonucleotide
  Antisense strand to SEQ ID NO: 2378866
uuacuucuggaccagaaca

SEQ ID NO: 2378868 - RNA, 19 nt, Artificial Sequence
  Description of Artificial Sequence: Synthetic oligonucleotide
  Sense strand starting at position 2184 of SEQ ID NO: 1885956
agaaguaagcaauggugaa

SEQ ID NO: 2378869 - RNA, 19 nt, Artificial Sequence
  Description of Artificial Sequence: Synthetic oligonucleotide
  Antisense strand to SEQ ID NO: 2378868
uucaccauugcuuacuucu

SEQ ID NO: 2378870 - RNA, 19 nt, Artificial Sequence
  Description of Artificial Sequence: Synthetic oligonucleotide
  Sense strand starting at position 2188 of SEQ ID NO: 1885956
guaagcaauggugaaaucu

SEQ ID NO: 2378871 - RNA, 19 nt, Artificial Sequence
  Description of Artificial Sequence: Synthetic oligonucleotide
  Antisense strand to SEQ ID NO: 2378870
agauuucaccauugcuuac

SEQ ID NO: 2378872 - RNA, 19 nt, Artificial Sequence
  Description of Artificial Sequence: Synthetic oligonucleotide
  Sense strand starting at position 2197 of SEQ ID NO: 1885956
ggugaaaucugagcaagac

SEQ ID NO: 2378873 - RNA, 19 nt, Artificial Sequence
  Description of Artificial Sequence: Synthetic oligonucleotide
  Antisense strand to SEQ ID NO: 2378872
gucuugcucagauuucacc

SEQ ID NO: 2378874 - RNA, 19 nt, Artificial Sequence
  Description of Artificial Sequence: Synthetic oligonucleotide
  Sense strand starting at position 2474 of SEQ ID NO: 1885956
agagaaugcagcuagccau

SEQ ID NO: 2378875 - RNA, 19 nt, Artificial Sequence
  Description of Artificial Sequence: Synthetic oligonucleotide
  Antisense strand to SEQ ID NO: 2378874
auggcuagcugcauucucu

SEQ ID NO: 2378876 - RNA, 19 nt, Artificial Sequence
  Description of Artificial Sequence: Synthetic oligonucleotide
  Sense strand starting at position 2565 of SEQ ID NO: 1885956
aucgauccuuaaccaagaa

SEQ ID NO: 2378877 - RNA, 19 nt, Artificial Sequence
  Description of Artificial Sequence: Synthetic oligonucleotide
  Antisense strand to SEQ ID NO: 2378876
uucuugguuaaggaucgau

SEQ ID NO: 2378878 - RNA, 19 nt, Artificial Sequence
  Description of Artificial Sequence: Synthetic oligonucleotide
  Sense strand starting at position 2708 of SEQ ID NO: 1885956
auguguguaauguaauaca

SEQ ID NO: 2378879 - RNA, 19 nt, Artificial Sequence
  Description of Artificial Sequence: Synthetic oligonucleotide
  Antisense strand to SEQ ID NO: 2378878
uguauuacauuacacacau

SEQ ID NO: 2378880 - RNA, 19 nt, Artificial Sequence
  Description of Artificial Sequence: Synthetic oligonucleotide
  Sense strand starting at position 2784 of SEQ ID NO: 1885956
uuugcauuacauuaucagu

SEQ ID NO: 2378881 - RNA, 19 nt, Artificial Sequence
  Description of Artificial Sequence: Synthetic oligonucleotide
  Antisense strand to SEQ ID NO: 2378880
acugauaauguaaugcaaa

SEQ ID NO: 2378882 - RNA, 19 nt, Artificial Sequence
  Description of Artificial Sequence: Synthetic oligonucleotide
  Sense strand starting at position 3241 of SEQ ID NO: 1885956
ugagaaguucugcauacuc

SEQ ID NO: 2378883 - RNA, 19 nt, Artificial Sequence
  Description of Artificial Sequence: Synthetic oligonucleotide
  Antisense strand to SEQ ID NO: 2378882
gaguaugcagaacuucuca

SEQ ID NO: 2378884 - RNA, 19 nt, Artificial Sequence
  Description of Artificial Sequence: Synthetic oligonucleotide
  Sense strand starting at position 3243 of SEQ ID NO: 1885956
agaaguucugcauacucuu

SEQ ID NO: 2378885 - RNA, 19 nt, Artificial Sequence
  Description of Artificial Sequence: Synthetic oligonucleotide
  Antisense strand to SEQ ID NO: 2378884
aagaguaugcagaacuucu

SEQ ID NO: 2378886 - RNA, 19 nt, Artificial Sequence
  Description of Artificial Sequence: Synthetic oligonucleotide
  Sense strand starting at position 3514 of SEQ ID NO: 1885956
uagaucaugguaugucuga

SEQ ID NO: 2378887 - RNA, 19 nt, Artificial Sequence
  Description of Artificial Sequence: Synthetic oligonucleotide
  Antisense strand to SEQ ID NO: 2378886
ucagacauaccaugaucua

SEQ ID NO: 2378888 - RNA, 19 nt, Artificial Sequence
  Description of Artificial Sequence: Synthetic oligonucleotide
  Sense strand starting at position 3515 of SEQ ID NO: 1885956
agaucaugguaugucugaa

SEQ ID NO: 2378889 - RNA, 19 nt, Artificial Sequence
  Description of Artificial Sequence: Synthetic oligonucleotide
  Antisense strand to SEQ ID NO: 2378888
uucagacauaccaugaucu

SEQ ID NO: 2378890 - RNA, 19 nt, Artificial Sequence
  Description of Artificial Sequence: Synthetic oligonucleotide
  Sense strand starting at position 3525 of SEQ ID NO: 1885956
augucugaacucuggacuu

SEQ ID NO: 2378891 - RNA, 19 nt, Artificial Sequence
  Description of Artificial Sequence: Synthetic oligonucleotide
  Antisense strand to SEQ ID NO: 2378890
aaguccagaguucagacau

SEQ ID NO: 2378892 - RNA, 19 nt, Artificial Sequence
  Description of Artificial Sequence: Synthetic oligonucleotide
  Sense strand starting at position 3544 of SEQ ID NO: 1885956
agaucuaucuagcuccaga

SEQ ID NO: 2378893 - RNA, 19 nt, Artificial Sequence
  Description of Artificial Sequence: Synthetic oligonucleotide
  Antisense strand to SEQ ID NO: 2378892
ucuggagcuagauagaucu

SEQ ID NO: 2378894 - RNA, 19 nt, Artificial Sequence
  Description of Artificial Sequence: Synthetic oligonucleotide
  Sense strand starting at position 3786 of SEQ ID NO: 1885956
ggcaaucuagaauaaguuu

SEQ ID NO: 2378895 - RNA, 19 nt, Artificial Sequence
  Description of Artificial Sequence: Synthetic oligonucleotide
  Antisense strand to SEQ ID NO: 2378894
aaacuuauucuagauugcc

SEQ ID NO: 2378896 - RNA, 19 nt, Artificial Sequence
  Description of Artificial Sequence: Synthetic oligonucleotide
  Sense strand starting at position 3860 of SEQ ID NO: 1885956
guaggcauccauuaaauca

SEQ ID NO: 2378897 - RNA, 19 nt, Artificial Sequence
  Description of Artificial Sequence: Synthetic oligonucleotide
  Antisense strand to SEQ ID NO: 2378896
ugauuuaauggaugccuac

SEQ ID NO: 2378898 - RNA, 19 nt, Artificial Sequence
  Description of Artificial Sequence: Synthetic oligonucleotide
  Sense strand starting at position 3920 of SEQ ID NO: 1885956
gguggaguaguauaaguaa

SEQ ID NO: 2378899 - RNA, 19 nt, Artificial Sequence
  Description of Artificial Sequence: Synthetic oligonucleotide
  Antisense strand to SEQ ID NO: 2378898
uuacuuauacuacuccacc

SEQ ID NO: 2378900 - RNA, 19 nt, Artificial Sequence
  Description of Artificial Sequence: Synthetic oligonucleotide
  Sense strand starting at position 3944 of SEQ ID NO: 1885956
aggcacauugacuauagua

SEQ ID NO: 2378901 - RNA, 19 nt, Artificial Sequence
  Description of Artificial Sequence: Synthetic oligonucleotide
  Antisense strand to SEQ ID NO: 2378900
uacuauagucaaugugccu

SEQ ID NO: 2378902 - RNA, 19 nt, Artificial Sequence
  Description of Artificial Sequence: Synthetic oligonucleotide
  Sense strand starting at position 341 of SEQ ID NO: 1885957
ggaauaacaccauguaucu

SEQ ID NO: 2378903 - RNA, 19 nt, Artificial Sequence
  Description of Artificial Sequence: Synthetic oligonucleotide
  Antisense strand to SEQ ID NO: 2378902
agauacaugguguuauucc

SEQ ID NO: 2378904 - RNA, 19 nt, Artificial Sequence
  Description of Artificial Sequence: Synthetic oligonucleotide
  Sense strand starting at position 589 of SEQ ID NO: 1885957
ucaagagcuauaugggauu

SEQ ID NO: 2378905 - RNA, 19 nt, Artificial Sequence
  Description of Artificial Sequence: Synthetic oligonucleotide
  Antisense strand to SEQ ID NO: 2378904
aaucccauauagcucuuga

SEQ ID NO: 2378906 - RNA, 19 nt, Artificial Sequence
  Description of Artificial Sequence: Synthetic oligonucleotide
  Sense strand starting at position 595 of SEQ ID NO: 1885957
gcuauaugggauugaugga

SEQ ID NO: 2378907 - RNA, 19 nt, Artificial Sequence
  Description of Artificial Sequence: Synthetic oligonucleotide
  Antisense strand to SEQ ID NO: 2378906
uccaucaaucccauauagc

SEQ ID NO: 2378908 - RNA, 19 nt, Artificial Sequence
  Description of Artificial Sequence: Synthetic oligonucleotide
  Sense strand starting at position 644 of SEQ ID NO: 1885957
agugcauugccaggaauug

SEQ ID NO: 2378909 - RNA, 19 nt, Artificial Sequence
  Description of Artificial Sequence: Synthetic oligonucleotide
  Antisense strand to SEQ ID NO: 2378908
caauuccuggcaaugcacu

SEQ ID NO: 2378910 - RNA, 19 nt, Artificial Sequence
  Description of Artificial Sequence: Synthetic oligonucleotide
  Sense strand starting at position 716 of SEQ ID NO: 1885957
gugcauacacauugcauua

SEQ ID NO: 2378911 - RNA, 19 nt, Artificial Sequence
  Description of Artificial Sequence: Synthetic oligonucleotide
  Antisense strand to SEQ ID NO: 2378910
uaaugcaauguguaugcac

SEQ ID NO: 2378912 - RNA, 19 nt, Artificial Sequence
  Description of Artificial Sequence: Synthetic oligonucleotide
  Sense strand starting at position 731 of SEQ ID NO: 1885957
auuaaaguacugugcaaug

SEQ ID NO: 2378913 - RNA, 19 nt, Artificial Sequence
  Description of Artificial Sequence: Synthetic oligonucleotide
  Antisense strand to SEQ ID NO: 2378912
cauugcacaguacuuuaau

SEQ ID NO: 2378914 - RNA, 19 nt, Artificial Sequence
  Description of Artificial Sequence: Synthetic oligonucleotide
  Sense strand starting at position 743 of SEQ ID NO: 1885957
ugcaaugugccagacauug

SEQ ID NO: 2378915 - RNA, 19 nt, Artificial Sequence
  Description of Artificial Sequence: Synthetic oligonucleotide
  Antisense strand to SEQ ID NO: 2378914
caaugucuggcacauugca

SEQ ID NO: 2378916 - RNA, 19 nt, Artificial Sequence
  Description of Artificial Sequence: Synthetic oligonucleotide
  Sense strand starting at position 748 of SEQ ID NO: 1885957
ugugccagacauuguauau

SEQ ID NO: 2378917 - RNA, 19 nt, Artificial Sequence
  Description of Artificial Sequence: Synthetic oligonucleotide
  Antisense strand to SEQ ID NO: 2378916
auauacaaugucuggcaca

SEQ ID NO: 2378918 - RNA, 19 nt, Artificial Sequence
  Description of Artificial Sequence: Synthetic oligonucleotide
  Sense strand starting at position 752 of SEQ ID NO: 1885957
ccagacauuguauauguua

SEQ ID NO: 2378919 - RNA, 19 nt, Artificial Sequence
  Description of Artificial Sequence: Synthetic oligonucleotide
  Antisense strand to SEQ ID NO: 2378918
uaacauauacaaugucugg

SEQ ID NO: 2378920 - RNA, 19 nt, Artificial Sequence
  Description of Artificial Sequence: Synthetic oligonucleotide
  Sense strand starting at position 776 of SEQ ID NO: 1885957
uuuaauccagaaugguaga

SEQ ID NO: 2378921 - RNA, 19 nt, Artificial Sequence
  Description of Artificial Sequence: Synthetic oligonucleotide
  Antisense strand to SEQ ID NO: 2378920
ucuaccauucuggauuaaa

SEQ ID NO: 2378922 - RNA, 19 nt, Artificial Sequence
  Description of Artificial Sequence: Synthetic oligonucleotide
  Sense strand starting at position 841 of SEQ ID NO: 1885957
gugauuauauuagucagcu

SEQ ID NO: 2378923 - RNA, 19 nt, Artificial Sequence
  Description of Artificial Sequence: Synthetic oligonucleotide
  Antisense strand to SEQ ID NO: 2378922
agcugacuaauauaaucac

SEQ ID NO: 2378924 - RNA, 19 nt, Artificial Sequence
  Description of Artificial Sequence: Synthetic oligonucleotide
  Sense strand starting at position 842 of SEQ ID NO: 1885957
ugauuauauuagucagcua

SEQ ID NO: 2378925 - RNA, 19 nt, Artificial Sequence
  Description of Artificial Sequence: Synthetic oligonucleotide
  Antisense strand to SEQ ID NO: 2378924
uagcugacuaauauaauca

SEQ ID NO: 2378926 - RNA, 19 nt, Artificial Sequence
  Description of Artificial Sequence: Synthetic oligonucleotide
  Sense strand starting at position 845 of SEQ ID NO: 1885957
uuauauuagucagcuagug

SEQ ID NO: 2378927 - RNA, 19 nt, Artificial Sequence
  Description of Artificial Sequence: Synthetic oligonucleotide
  Antisense strand to SEQ ID NO: 2378926
cacuagcugacuaauauaa

SEQ ID NO: 2378928 - RNA, 19 nt, Artificial Sequence
  Description of Artificial Sequence: Synthetic oligonucleotide
  Sense strand starting at position 1198 of SEQ ID NO: 1885957
aaaugugaauuugggugaa

SEQ ID NO: 2378929 - RNA, 19 nt, Artificial Sequence
  Description of Artificial Sequence: Synthetic oligonucleotide
  Antisense strand to SEQ ID NO: 2378928
uucacccaaauucacauuu

SEQ ID NO: 2378930 - RNA, 19 nt, Artificial Sequence
  Description of Artificial Sequence: Synthetic oligonucleotide
  Sense strand starting at position 1641 of SEQ ID NO: 1885957
aagagaugcuguuugaaug

SEQ ID NO: 2378931 - RNA, 19 nt, Artificial Sequence
  Description of Artificial Sequence: Synthetic oligonucleotide
  Antisense strand to SEQ ID NO: 2378930
cauucaaacagcaucucuu

SEQ ID NO: 2378932 - RNA, 19 nt, Artificial Sequence
  Description of Artificial Sequence: Synthetic oligonucleotide
  Sense strand starting at position 1642 of SEQ ID NO: 1885957
agagaugcuguuugaauga

SEQ ID NO: 2378933 - RNA, 19 nt, Artificial Sequence
  Description of Artificial Sequence: Synthetic oligonucleotide
  Antisense strand to SEQ ID NO: 2378932
ucauucaaacagcaucucu

SEQ ID NO: 2378934 - RNA, 19 nt, Artificial Sequence
  Description of Artificial Sequence: Synthetic oligonucleotide
  Sense strand starting at position 1667 of SEQ ID NO: 1885957
gcaaaugggucuucuccuu

SEQ ID NO: 2378935 - RNA, 19 nt, Artificial Sequence
  Description of Artificial Sequence: Synthetic oligonucleotide
  Antisense strand to SEQ ID NO: 2378934
aaggagaagacccauuugc

SEQ ID NO: 2378936 - RNA, 19 nt, Artificial Sequence
  Description of Artificial Sequence: Synthetic oligonucleotide
  Sense strand starting at position 1762 of SEQ ID NO: 1885957
augagagugccugaccgau

SEQ ID NO: 2378937 - RNA, 19 nt, Artificial Sequence
  Description of Artificial Sequence: Synthetic oligonucleotide
  Antisense strand to SEQ ID NO: 2378936
aucggucaggcacucucau

SEQ ID NO: 2378938 - RNA, 19 nt, Artificial Sequence
  Description of Artificial Sequence: Synthetic oligonucleotide
  Sense strand starting at position 1879 of SEQ ID NO: 1885957
ggcgucuuccacgucacau

SEQ ID NO: 2378939 - RNA, 19 nt, Artificial Sequence
  Description of Artificial Sequence: Synthetic oligonucleotide
  Antisense strand to SEQ ID NO: 2378938
augugacguggaagacgcc

SEQ ID NO: 2378940 - RNA, 19 nt, Artificial Sequence
  Description of Artificial Sequence: Synthetic oligonucleotide
  Sense strand starting at position 1880 of SEQ ID NO: 1885957
gcgucuuccacgucacaug

SEQ ID NO: 2378941 - RNA, 19 nt, Artificial Sequence
  Description of Artificial Sequence: Synthetic oligonucleotide
  Antisense strand to SEQ ID NO: 2378940
caugugacguggaagacgc

SEQ ID NO: 2378942 - RNA, 19 nt, Artificial Sequence
  Description of Artificial Sequence: Synthetic oligonucleotide
  Sense strand starting at position 2008 of SEQ ID NO: 1885957
ggagccagcuuagucauuu

SEQ ID NO: 2378943 - RNA, 19 nt, Artificial Sequence
  Description of Artificial Sequence: Synthetic oligonucleotide
  Antisense strand to SEQ ID NO: 2378942
aaaugacuaagcuggcucc

SEQ ID NO: 2378944 - RNA, 19 nt, Artificial Sequence
  Description of Artificial Sequence: Synthetic oligonucleotide
  Sense strand starting at position 2009 of SEQ ID NO: 1885957
gagccagcuuagucauuua

SEQ ID NO: 2378945 - RNA, 19 nt, Artificial Sequence
  Description of Artificial Sequence: Synthetic oligonucleotide
  Antisense strand to SEQ ID NO: 2378944
uaaaugacuaagcuggcuc

SEQ ID NO: 2378946 - RNA, 19 nt, Artificial Sequence
  Description of Artificial Sequence: Synthetic oligonucleotide
  Sense strand starting at position 2063 of SEQ ID NO: 1885957
gacugcugacgugauggau

SEQ ID NO: 2378947 - RNA, 19 nt, Artificial Sequence
  Description of Artificial Sequence: Synthetic oligonucleotide
  Antisense strand to SEQ ID NO: 2378946
auccaucacgucagcaguc

SEQ ID NO: 2378948 - RNA, 19 nt, Artificial Sequence
  Description of Artificial Sequence: Synthetic oligonucleotide
  Sense strand starting at position 2244 of SEQ ID NO: 1885957
gugcuaagaucuuuaaagc

SEQ ID NO: 2378949 - RNA, 19 nt, Artificial Sequence
  Description of Artificial Sequence: Synthetic oligonucleotide
  Antisense strand to SEQ ID NO: 2378948
gcuuuaaagaucuuagcac

SEQ ID NO: 2378950 - RNA, 19 nt, Artificial Sequence
  Description of Artificial Sequence: Synthetic oligonucleotide
  Sense strand starting at position 2286 of SEQ ID NO: 1885957
accugugaggcuugacuca

SEQ ID NO: 2378951 - RNA, 19 nt, Artificial Sequence
  Description of Artificial Sequence: Synthetic oligonucleotide
  Antisense strand to SEQ ID NO: 2378950
ugagucaagccucacaggu

SEQ ID NO: 2378952 - RNA, 19 nt, Artificial Sequence
  Description of Artificial Sequence: Synthetic oligonucleotide
  Sense strand starting at position 2393 of SEQ ID NO: 1885957
ccguuauuaggguaagcuu

SEQ ID NO: 2378953 - RNA, 19 nt, Artificial Sequence
  Description of Artificial Sequence: Synthetic oligonucleotide
  Antisense strand to SEQ ID NO: 2378952
aagcuuacccuaauaacgg

SEQ ID NO: 2378954 - RNA, 19 nt, Artificial Sequence
  Description of Artificial Sequence: Synthetic oligonucleotide
  Sense strand starting at position 2747 of SEQ ID NO: 1885957
gccaucugugcugggaaua

SEQ ID NO: 2378955 - RNA, 19 nt, Artificial Sequence
  Description of Artificial Sequence: Synthetic oligonucleotide
  Antisense strand to SEQ ID NO: 2378954
uauucccagcacagauggc

SEQ ID NO: 2378956 - RNA, 19 nt, Artificial Sequence
  Description of Artificial Sequence: Synthetic oligonucleotide
  Sense strand starting at position 2748 of SEQ ID NO: 1885957
ccaucugugcugggaauac

SEQ ID NO: 2378957 - RNA, 19 nt, Artificial Sequence
  Description of Artificial Sequence: Synthetic oligonucleotide
  Antisense strand to SEQ ID NO: 2378956
guauucccagcacagaugg

SEQ ID NO: 2378958 - RNA, 19 nt, Artificial Sequence
  Description of Artificial Sequence: Synthetic oligonucleotide
  Sense strand starting at position 2766 of SEQ ID NO: 1885957
caggguuguauuggaaaug

SEQ ID NO: 2378959 - RNA, 19 nt, Artificial Sequence
  Description of Artificial Sequence: Synthetic oligonucleotide
  Antisense strand to SEQ ID NO: 2378958
cauuuccaauacaacccug

SEQ ID NO: 2378960 - RNA, 19 nt, Artificial Sequence
  Description of Artificial Sequence: Synthetic oligonucleotide
  Sense strand starting at position 2776 of SEQ ID NO: 1885957
uuggaaauguucuuuacug

SEQ ID NO: 2378961 - RNA, 19 nt, Artificial Sequence
  Description of Artificial Sequence: Synthetic oligonucleotide
  Antisense strand to SEQ ID NO: 2378960
caguaaagaacauuuccaa

SEQ ID NO: 2378962 - RNA, 19 nt, Artificial Sequence
  Description of Artificial Sequence: Synthetic oligonucleotide
  Sense strand starting at position 2778 of SEQ ID NO: 1885957
ggaaauguucuuuacugca

SEQ ID NO: 2378963 - RNA, 19 nt, Artificial Sequence
  Description of Artificial Sequence: Synthetic oligonucleotide
  Antisense strand to SEQ ID NO: 2378962
ugcaguaaagaacauuucc

SEQ ID NO: 2378964 - RNA, 19 nt, Artificial Sequence
  Description of Artificial Sequence: Synthetic oligonucleotide
  Sense strand starting at position 2809 of SEQ ID NO: 1885957
gccuuuaauguguuugcau

SEQ ID NO: 2378965 - RNA, 19 nt, Artificial Sequence
  Description of Artificial Sequence: Synthetic oligonucleotide
  Antisense strand to SEQ ID NO: 2378964
augcaaacacauuaaaggc

SEQ ID NO: 2378966 - RNA, 19 nt, Artificial Sequence
  Description of Artificial Sequence: Synthetic oligonucleotide
  Sense strand starting at position 2816 of SEQ ID NO: 1885957
auguguuugcauuaauugu

SEQ ID NO: 2378967 - RNA, 19 nt, Artificial Sequence
  Description of Artificial Sequence: Synthetic oligonucleotide
  Antisense strand to SEQ ID NO: 2378966
acaauuaaugcaaacacau

SEQ ID NO: 2378968 - RNA, 19 nt, Artificial Sequence
  Description of Artificial Sequence: Synthetic oligonucleotide
  Sense strand starting at position 2859 of SEQ ID NO: 1885957
caguguuucccagacugag

SEQ ID NO: 2378969 - RNA, 19 nt, Artificial Sequence
  Description of Artificial Sequence: Synthetic oligonucleotide
  Antisense strand to SEQ ID NO: 2378968
cucagucugggaaacacug

SEQ ID NO: 2378970 - RNA, 19 nt, Artificial Sequence
  Description of Artificial Sequence: Synthetic oligonucleotide
  Sense strand starting at position 2952 of SEQ ID NO: 1885957
cucucauaaccucgagcuu

SEQ ID NO: 2378971 - RNA, 19 nt, Artificial Sequence
  Description of Artificial Sequence: Synthetic oligonucleotide
  Antisense strand to SEQ ID NO: 2378970
aagcucgagguuaugagag

SEQ ID NO: 2378972 - RNA, 19 nt, Artificial Sequence
  Description of Artificial Sequence: Synthetic oligonucleotide
  Sense strand starting at position 3050 of SEQ ID NO: 1885957
uuggaauccuggccuaaac

SEQ ID NO: 2378973 - RNA, 19 nt, Artificial Sequence
  Description of Artificial Sequence: Synthetic oligonucleotide
  Antisense strand to SEQ ID NO: 2378972
guuuaggccaggauuccaa

SEQ ID NO: 2378974 - RNA, 19 nt, Artificial Sequence
  Description of Artificial Sequence: Synthetic oligonucleotide
  Sense strand starting at position 3493 of SEQ ID NO: 1885957
gcgagugccauugagaacu

SEQ ID NO: 2378975 - RNA, 19 nt, Artificial Sequence
  Description of Artificial Sequence: Synthetic oligonucleotide
  Antisense strand to SEQ ID NO: 2378974
aguucucaauggcacucgc

SEQ ID NO: 2378976 - RNA, 19 nt, Artificial Sequence
  Description of Artificial Sequence: Synthetic oligonucleotide
  Sense strand starting at position 3645 of SEQ ID NO: 1885957
agccaaacguuugugaaca

SEQ ID NO: 2378977 - RNA, 19 nt, Artificial Sequence
  Description of Artificial Sequence: Synthetic oligonucleotide
  Antisense strand to SEQ ID NO: 2378976
uguucacaaacguuuggcu

SEQ ID NO: 2378978 - RNA, 19 nt, Artificial Sequence
  Description of Artificial Sequence: Synthetic oligonucleotide
  Sense strand starting at position 3650 of SEQ ID NO: 1885957
aacguuugugaacacaaua

SEQ ID NO: 2378979 - RNA, 19 nt, Artificial Sequence
  Description of Artificial Sequence: Synthetic oligonucleotide
  Antisense strand to SEQ ID NO: 2378978
uauuguguucacaaacguu

SEQ ID NO: 2378980 - RNA, 19 nt, Artificial Sequence
  Description of Artificial Sequence: Synthetic oligonucleotide
  Sense strand starting at position 3676 of SEQ ID NO: 1885957
cucugugucuaacuaaugu

SEQ ID NO: 2378981 - RNA, 19 nt, Artificial Sequence
  Description of Artificial Sequence: Synthetic oligonucleotide
  Antisense strand to SEQ ID NO: 2378980
acauuaguuagacacagag

SEQ ID NO: 2378982 - RNA, 19 nt, Artificial Sequence
  Description of Artificial Sequence: Synthetic oligonucleotide
  Sense strand starting at position 31 of SEQ ID NO: 1885958
ggaaauauagcuuauuguu

SEQ ID NO: 2378983 - RNA, 19 nt, Artificial Sequence
  Description of Artificial Sequence: Synthetic oligonucleotide
  Antisense strand to SEQ ID NO: 2378982
aacaauaagcuauauuucc

SEQ ID NO: 2378984 - RNA, 19 nt, Artificial Sequence
  Description of Artificial Sequence: Synthetic oligonucleotide
  Sense strand starting at position 541 of SEQ ID NO: 1885958
guaguaucugaacauugau

SEQ ID NO: 2378985 - RNA, 19 nt, Artificial Sequence
  Description of Artificial Sequence: Synthetic oligonucleotide
  Antisense strand to SEQ ID NO: 2378984
aucaauguucagauacuac

SEQ ID NO: 2378986 - RNA, 19 nt, Artificial Sequence
  Description of Artificial Sequence: Synthetic oligonucleotide
  Sense strand starting at position 544 of SEQ ID NO: 1885958
guaucugaacauugaugau

SEQ ID NO: 2378987 - RNA, 19 nt, Artificial Sequence
  Description of Artificial Sequence: Synthetic oligonucleotide
  Antisense strand to SEQ ID NO: 2378986
aucaucaauguucagauac

SEQ ID NO: 2378988 - RNA, 19 nt, Artificial Sequence
  Description of Artificial Sequence: Synthetic oligonucleotide
  Sense strand starting at position 671 of SEQ ID NO: 1885958
ugaggaauuaauuguauug

SEQ ID NO: 2378989 - RNA, 19 nt, Artificial Sequence
  Description of Artificial Sequence: Synthetic oligonucleotide
  Antisense strand to SEQ ID NO: 2378988
caauacaauuaauuccuca

SEQ ID NO: 2378990 - RNA, 19 nt, Artificial Sequence
  Description of Artificial Sequence: Synthetic oligonucleotide
  Sense strand starting at position 715 of SEQ ID NO: 1885958
uggaaauagucacuuacua

SEQ ID NO: 2378991 - RNA, 19 nt, Artificial Sequence
  Description of Artificial Sequence: Synthetic oligonucleotide
  Antisense strand to SEQ ID NO: 2378990
uaguaagugacuauuucca

SEQ ID NO: 2378992 - RNA, 19 nt, Artificial Sequence
  Description of Artificial Sequence: Synthetic oligonucleotide
  Sense strand starting at position 743 of SEQ ID NO: 1885958
gaguuuguuggccaaauau

SEQ ID NO: 2378993 - RNA, 19 nt, Artificial Sequence
  Description of Artificial Sequence: Synthetic oligonucleotide
  Antisense strand to SEQ ID NO: 2378992
auauuuggccaacaaacuc

SEQ ID NO: 2378994 - RNA, 19 nt, Artificial Sequence
  Description of Artificial Sequence: Synthetic oligonucleotide
  Sense strand starting at position 811 of SEQ ID NO: 1885958
uugacuucuaaguagugua

SEQ ID NO: 2378995 - RNA, 19 nt, Artificial Sequence
  Description of Artificial Sequence: Synthetic oligonucleotide
  Antisense strand to SEQ ID NO: 2378994
uacacuacuuagaagucaa

SEQ ID NO: 2378996 - RNA, 19 nt, Artificial Sequence
  Description of Artificial Sequence: Synthetic oligonucleotide
  Sense strand starting at position 824 of SEQ ID NO: 1885958
aguguaugugucagcugga

SEQ ID NO: 2378997 - RNA, 19 nt, Artificial Sequence
  Description of Artificial Sequence: Synthetic oligonucleotide
  Antisense strand to SEQ ID NO: 2378996
uccagcugacacauacacu

SEQ ID NO: 2378998 - RNA, 19 nt, Artificial Sequence
  Description of Artificial Sequence: Synthetic oligonucleotide
  Sense strand starting at position 829 of SEQ ID NO: 1885958
augugucagcuggauaacu

SEQ ID NO: 2378999 - RNA, 19 nt, Artificial Sequence
  Description of Artificial Sequence: Synthetic oligonucleotide
  Antisense strand to SEQ ID NO: 2378998
aguuauccagcugacacau

SEQ ID NO: 2379000 - RNA, 19 nt, Artificial Sequence
  Description of Artificial Sequence: Synthetic oligonucleotide
  Sense strand starting at position 831 of SEQ ID NO: 1885958
gugucagcuggauaacuau

SEQ ID NO: 2379001 - RNA, 19 nt, Artificial Sequence
  Description of Artificial Sequence: Synthetic oligonucleotide
  Antisense strand to SEQ ID NO: 2379000
auaguuauccagcugacac

SEQ ID NO: 2379002 - RNA, 19 nt, Artificial Sequence
  Description of Artificial Sequence: Synthetic oligonucleotide
  Sense strand starting at position 834 of SEQ ID NO: 1885958
ucagcuggauaacuauaua

SEQ ID NO: 2379003 - RNA, 19 nt, Artificial Sequence
  Description of Artificial Sequence: Synthetic oligonucleotide
  Antisense strand to SEQ ID NO: 2379002
uauauaguuauccagcuga

SEQ ID NO: 2379004 - RNA, 19 nt, Artificial Sequence
  Description of Artificial Sequence: Synthetic oligonucleotide
  Sense strand starting at position 837 of SEQ ID NO: 1885958
gcuggauaacuauauaagu

SEQ ID NO: 2379005 - RNA, 19 nt, Artificial Sequence
  Description of Artificial Sequence: Synthetic oligonucleotide
  Antisense strand to SEQ ID NO: 2379004
acuuauauaguuauccagc

SEQ ID NO: 2379006 - RNA, 19 nt, Artificial Sequence
  Description of Artificial Sequence: Synthetic oligonucleotide
  Sense strand starting at position 1070 of SEQ ID NO: 1885958
guugguugucuguuguaug

SEQ ID NO: 2379007 - RNA, 19 nt, Artificial Sequence
  Description of Artificial Sequence: Synthetic oligonucleotide
  Antisense strand to SEQ ID NO: 2379006
cauacaacagacaaccaac

SEQ ID NO: 2379008 - RNA, 19 nt, Artificial Sequence
  Description of Artificial Sequence: Synthetic oligonucleotide
  Sense strand starting at position 1141 of SEQ ID NO: 1885958
gucuguuuggaagaagguu

SEQ ID NO: 2379009 - RNA, 19 nt, Artificial Sequence
  Description of Artificial Sequence: Synthetic oligonucleotide
  Antisense strand to SEQ ID NO: 2379008
aaccuucuuccaaacagac

SEQ ID NO: 2379010 - RNA, 19 nt, Artificial Sequence
  Description of Artificial Sequence: Synthetic oligonucleotide
  Sense strand starting at position 1233 of SEQ ID NO: 1885958
uuaucuuaacuguagguaa

SEQ ID NO: 2379011 - RNA, 19 nt, Artificial Sequence
  Description of Artificial Sequence: Synthetic oligonucleotide
  Antisense strand to SEQ ID NO: 2379010
uuaccuacaguuaagauaa

SEQ ID NO: 2379012 - RNA, 19 nt, Artificial Sequence
  Description of Artificial Sequence: Synthetic oligonucleotide
  Sense strand starting at position 1279 of SEQ ID NO: 1885958
uggguaucagcugggaaga

SEQ ID NO: 2379013 - RNA, 19 nt, Artificial Sequence
  Description of Artificial Sequence: Synthetic oligonucleotide
  Antisense strand to SEQ ID NO: 2379012
ucuucccagcugauaccca

SEQ ID NO: 2379014 - RNA, 19 nt, Artificial Sequence
  Description of Artificial Sequence: Synthetic oligonucleotide
  Sense strand starting at position 1384 of SEQ ID NO: 1885958
auccuuugagguugauuau

SEQ ID NO: 2379015 - RNA, 19 nt, Artificial Sequence
  Description of Artificial Sequence: Synthetic oligonucleotide
  Antisense strand to SEQ ID NO: 2379014
auaaucaaccucaaaggau

SEQ ID NO: 2379016 - RNA, 19 nt, Artificial Sequence
  Description of Artificial Sequence: Synthetic oligonucleotide
  Sense strand starting at position 1385 of SEQ ID NO: 1885958
uccuuugagguugauuaua

SEQ ID NO: 2379017 - RNA, 19 nt, Artificial Sequence
  Description of Artificial Sequence: Synthetic oligonucleotide
  Antisense strand to SEQ ID NO: 2379016
uauaaucaaccucaaagga

SEQ ID NO: 2379018 - RNA, 19 nt, Artificial Sequence
  Description of Artificial Sequence: Synthetic oligonucleotide
  Sense strand starting at position 1387 of SEQ ID NO: 1885958
cuuugagguugauuauauu

SEQ ID NO: 2379019 - RNA, 19 nt, Artificial Sequence
  Description of Artificial Sequence: Synthetic oligonucleotide
  Antisense strand to SEQ ID NO: 2379018
aauauaaucaaccucaaag

SEQ ID NO: 2379020 - RNA, 19 nt, Artificial Sequence
  Description of Artificial Sequence: Synthetic oligonucleotide
  Sense strand starting at position 1497 of SEQ ID NO: 1885958
cuauacugcuucuuaagga

SEQ ID NO: 2379021 - RNA, 19 nt, Artificial Sequence
  Description of Artificial Sequence: Synthetic oligonucleotide
  Antisense strand to SEQ ID NO: 2379020
uccuuaagaagcaguauag

SEQ ID NO: 2379022 - RNA, 19 nt, Artificial Sequence
  Description of Artificial Sequence: Synthetic oligonucleotide
  Sense strand starting at position 1592 of SEQ ID NO: 1885958
agaguaguggucuggaauu

SEQ ID NO: 2379023 - RNA, 19 nt, Artificial Sequence
  Description of Artificial Sequence: Synthetic oligonucleotide
  Antisense strand to SEQ ID NO: 2379022
aauuccagaccacuacucu

SEQ ID NO: 2379024 - RNA, 19 nt, Artificial Sequence
  Description of Artificial Sequence: Synthetic oligonucleotide
  Sense strand starting at position 1594 of SEQ ID NO: 1885958
aguaguggucuggaauuag

SEQ ID NO: 2379025 - RNA, 19 nt, Artificial Sequence
  Description of Artificial Sequence: Synthetic oligonucleotide
  Antisense strand to SEQ ID NO: 2379024
cuaauuccagaccacuacu

SEQ ID NO: 2379026 - RNA, 19 nt, Artificial Sequence
  Description of Artificial Sequence: Synthetic oligonucleotide
  Sense strand starting at position 1621 of SEQ ID NO: 1885958
ucaaaucuggacugaguuu

SEQ ID NO: 2379027 - RNA, 19 nt, Artificial Sequence
  Description of Artificial Sequence: Synthetic oligonucleotide
  Antisense strand to SEQ ID NO: 2379026
aaacucaguccagauuuga

SEQ ID NO: 2379028 - RNA, 19 nt, Artificial Sequence
  Description of Artificial Sequence: Synthetic oligonucleotide
  Sense strand starting at position 1632 of SEQ ID NO: 1885958
cugaguuuacaaugucaug

SEQ ID NO: 2379029 - RNA, 19 nt, Artificial Sequence
  Description of Artificial Sequence: Synthetic oligonucleotide
  Antisense strand to SEQ ID NO: 2379028
caugacauuguaaacucag

SEQ ID NO: 2379030 - RNA, 19 nt, Artificial Sequence
  Description of Artificial Sequence: Synthetic oligonucleotide
  Sense strand starting at position 1905 of SEQ ID NO: 1885958
aaugacuaaccuugaguga

SEQ ID NO: 2379031 - RNA, 19 nt, Artificial Sequence
  Description of Artificial Sequence: Synthetic oligonucleotide
  Antisense strand to SEQ ID NO: 2379030
ucacucaagguuagucauu

SEQ ID NO: 2379032 - RNA, 19 nt, Artificial Sequence
  Description of Artificial Sequence: Synthetic oligonucleotide
  Sense strand starting at position 1908 of SEQ ID NO: 1885958
gacuaaccuugagugauau

SEQ ID NO: 2379033 - RNA, 19 nt, Artificial Sequence
  Description of Artificial Sequence: Synthetic oligonucleotide
  Antisense strand to SEQ ID NO: 2379032
auaucacucaagguuaguc

SEQ ID NO: 2379034 - RNA, 19 nt, Artificial Sequence
  Description of Artificial Sequence: Synthetic oligonucleotide
  Sense strand starting at position 1909 of SEQ ID NO: 1885958
acuaaccuugagugauaua

SEQ ID NO: 2379035 - RNA, 19 nt, Artificial Sequence
  Description of Artificial Sequence: Synthetic oligonucleotide
  Antisense strand to SEQ ID NO: 2379034
uauaucacucaagguuagu

SEQ ID NO: 2379036 - RNA, 19 nt, Artificial Sequence
  Description of Artificial Sequence: Synthetic oligonucleotide
  Sense strand starting at position 2177 of SEQ ID NO: 1885958
ggguuuagacgagguuuaa

SEQ ID NO: 2379037 - RNA, 19 nt, Artificial Sequence
  Description of Artificial Sequence: Synthetic oligonucleotide
  Antisense strand to SEQ ID NO: 2379036
uuaaaccucgucuaaaccc

SEQ ID NO: 2379038 - RNA, 19 nt, Artificial Sequence
  Description of Artificial Sequence: Synthetic oligonucleotide
  Sense strand starting at position 2188 of SEQ ID NO: 1885958
agguuuaaauccucuguga

SEQ ID NO: 2379039 - RNA, 19 nt, Artificial Sequence
  Description of Artificial Sequence: Synthetic oligonucleotide
  Antisense strand to SEQ ID NO: 2379038
ucacagaggauuuaaaccu

SEQ ID NO: 2379040 - RNA, 19 nt, Artificial Sequence
  Description of Artificial Sequence: Synthetic oligonucleotide
  Sense strand starting at position 2191 of SEQ ID NO: 1885958
uuuaaauccucugugagaa

SEQ ID NO: 2379041 - RNA, 19 nt, Artificial Sequence
  Description of Artificial Sequence: Synthetic oligonucleotide
  Antisense strand to SEQ ID NO: 2379040
uucucacagaggauuuaaa

SEQ ID NO: 2379042 - RNA, 19 nt, Artificial Sequence
  Description of Artificial Sequence: Synthetic oligonucleotide
  Sense strand starting at position 2192 of SEQ ID NO: 1885958
uuaaauccucugugagaau

SEQ ID NO: 2379043 - RNA, 19 nt, Artificial Sequence
  Description of Artificial Sequence: Synthetic oligonucleotide
  Antisense strand to SEQ ID NO: 2379042
auucucacagaggauuuaa

SEQ ID NO: 2379044 - RNA, 19 nt, Artificial Sequence
  Description of Artificial Sequence: Synthetic oligonucleotide
  Sense strand starting at position 2310 of SEQ ID NO: 1885958
uaguaucaagagugaauga

SEQ ID NO: 2379045 - RNA, 19 nt, Artificial Sequence
  Description of Artificial Sequence: Synthetic oligonucleotide
  Antisense strand to SEQ ID NO: 2379044
ucauucacucuugauacua

SEQ ID NO: 2379046 - RNA, 19 nt, Artificial Sequence
  Description of Artificial Sequence: Synthetic oligonucleotide
  Sense strand starting at position 2665 of SEQ ID NO: 1885958
aaguauguuucuuccagag

SEQ ID NO: 2379047 - RNA, 19 nt, Artificial Sequence
  Description of Artificial Sequence: Synthetic oligonucleotide
  Antisense strand to SEQ ID NO: 2379046
cucuggaagaaacauacuu

SEQ ID NO: 2379048 - RNA, 19 nt, Artificial Sequence
  Description of Artificial Sequence: Synthetic oligonucleotide
  Sense strand starting at position 2859 of SEQ ID NO: 1885958
uuguguuuccgagaacaca

SEQ ID NO: 2379049 - RNA, 19 nt, Artificial Sequence
  Description of Artificial Sequence: Synthetic oligonucleotide
  Antisense strand to SEQ ID NO: 2379048
uguguucucggaaacacaa

SEQ ID NO: 2379050 - RNA, 19 nt, Artificial Sequence
  Description of Artificial Sequence: Synthetic oligonucleotide
  Sense strand starting at position 3034 of SEQ ID NO: 1885958
ccugcagauuuguauuuaa

SEQ ID NO: 2379051 - RNA, 19 nt, Artificial Sequence
  Description of Artificial Sequence: Synthetic oligonucleotide
  Antisense strand to SEQ ID NO: 2379050
uuaaauacaaaucugcagg

SEQ ID NO: 2379052 - RNA, 19 nt, Artificial Sequence
  Description of Artificial Sequence: Synthetic oligonucleotide
  Sense strand starting at position 3282 of SEQ ID NO: 1885958
cugguuaauuuagccagua

SEQ ID NO: 2379053 - RNA, 19 nt, Artificial Sequence
  Description of Artificial Sequence: Synthetic oligonucleotide
  Antisense strand to SEQ ID NO: 2379052
uacuggcuaaauuaaccag

SEQ ID NO: 2379054 - RNA, 19 nt, Artificial Sequence
  Description of Artificial Sequence: Synthetic oligonucleotide
  Sense strand starting at position 3283 of SEQ ID NO: 1885958
ugguuaauuuagccaguau

SEQ ID NO: 2379055 - RNA, 19 nt, Artificial Sequence
  Description of Artificial Sequence: Synthetic oligonucleotide
  Antisense strand to SEQ ID NO: 2379054
auacuggcuaaauuaacca

SEQ ID NO: 2379056 - RNA, 19 nt, Artificial Sequence
  Description of Artificial Sequence: Synthetic oligonucleotide
  Sense strand starting at position 3339 of SEQ ID NO: 1885958
augaauaauuguccuuaug

SEQ ID NO: 2379057 - RNA, 19 nt, Artificial Sequence
  Description of Artificial Sequence: Synthetic oligonucleotide
  Antisense strand to SEQ ID NO: 2379056
cauaaggacaauuauucau

SEQ ID NO: 2379058 - RNA, 19 nt, Artificial Sequence
  Description of Artificial Sequence: Synthetic oligonucleotide
  Sense strand starting at position 3560 of SEQ ID NO: 1885958
ucuuguugaccuggagauc

SEQ ID NO: 2379059 - RNA, 19 nt, Artificial Sequence
  Description of Artificial Sequence: Synthetic oligonucleotide
  Antisense strand to SEQ ID NO: 2379058
gaucuccaggucaacaaga

SEQ ID NO: 2379060 - RNA, 19 nt, Artificial Sequence
  Description of Artificial Sequence: Synthetic oligonucleotide
  Sense strand starting at position 3778 of SEQ ID NO: 1885958
ucagcagaagccuggauaa

SEQ ID NO: 2379061 - RNA, 19 nt, Artificial Sequence
  Description of Artificial Sequence: Synthetic oligonucleotide
  Antisense strand to SEQ ID NO: 2379060
uuauccaggcuucugcuga

SEQ ID NO: 2379062 - RNA, 19 nt, Artificial Sequence
  Description of Artificial Sequence: Synthetic oligonucleotide
  Sense strand starting at position 136 of SEQ ID NO: 1885959
gaggcugaauucuccugaa

SEQ ID NO: 2379063 - RNA, 19 nt, Artificial Sequence
  Description of Artificial Sequence: Synthetic oligonucleotide
  Antisense strand to SEQ ID NO: 2379062
uucaggagaauucagccuc

SEQ ID NO: 2379064 - RNA, 19 nt, Artificial Sequence
  Description of Artificial Sequence: Synthetic oligonucleotide
  Sense strand starting at position 140 of SEQ ID NO: 1885959
cugaauucuccugaagcug

SEQ ID NO: 2379065 - RNA, 19 nt, Artificial Sequence
  Description of Artificial Sequence: Synthetic oligonucleotide
  Antisense strand to SEQ ID NO: 2379064
cagcuucaggagaauucag

SEQ ID NO: 2379066 - RNA, 19 nt, Artificial Sequence
  Description of Artificial Sequence: Synthetic oligonucleotide
  Sense strand starting at position 209 of SEQ ID NO: 1885959
uacugaaguuucuugguca

SEQ ID NO: 2379067 - RNA, 19 nt, Artificial Sequence
  Description of Artificial Sequence: Synthetic oligonucleotide
  Antisense strand to SEQ ID NO: 2379066
ugaccaagaaacuucagua

SEQ ID NO: 2379068 - RNA, 19 nt, Artificial Sequence
  Description of Artificial Sequence: Synthetic oligonucleotide
  Sense strand starting at position 220 of SEQ ID NO: 1885959
cuuggucacucugcauaua

SEQ ID NO: 2379069 - RNA, 19 nt, Artificial Sequence
  Description of Artificial Sequence: Synthetic oligonucleotide
  Antisense strand to SEQ ID NO: 2379068
uauaugcagagugaccaag

SEQ ID NO: 2379070 - RNA, 19 nt, Artificial Sequence
  Description of Artificial Sequence: Synthetic oligonucleotide
  Sense strand starting at position 221 of SEQ ID NO: 1885959
uuggucacucugcauauaa

SEQ ID NO: 2379071 - RNA, 19 nt, Artificial Sequence
  Description of Artificial Sequence: Synthetic oligonucleotide
  Antisense strand to SEQ ID NO: 2379070
uuauaugcagagugaccaa

SEQ ID NO: 2379072 - RNA, 19 nt, Artificial Sequence
  Description of Artificial Sequence: Synthetic oligonucleotide
  Sense strand starting at position 223 of SEQ ID NO: 1885959
ggucacucugcauauaaau

SEQ ID NO: 2379073 - RNA, 19 nt, Artificial Sequence
  Description of Artificial Sequence: Synthetic oligonucleotide
  Antisense strand to SEQ ID NO: 2379072
auuuauaugcagagugacc

SEQ ID NO: 2379074 - RNA, 19 nt, Artificial Sequence
  Description of Artificial Sequence: Synthetic oligonucleotide
  Sense strand starting at position 298 of SEQ ID NO: 1885959
aacagugauugugcuuaaa

SEQ ID NO: 2379075 - RNA, 19 nt, Artificial Sequence
  Description of Artificial Sequence: Synthetic oligonucleotide
  Antisense strand to SEQ ID NO: 2379074
uuuaagcacaaucacuguu

SEQ ID NO: 2379076 - RNA, 19 nt, Artificial Sequence
  Description of Artificial Sequence: Synthetic oligonucleotide
  Sense strand starting at position 300 of SEQ ID NO: 1885959
cagugauugugcuuaaauu

SEQ ID NO: 2379077 - RNA, 19 nt, Artificial Sequence
  Description of Artificial Sequence: Synthetic oligonucleotide
  Antisense strand to SEQ ID NO: 2379076
aauuuaagcacaaucacug

SEQ ID NO: 2379078 - RNA, 19 nt, Artificial Sequence
  Description of Artificial Sequence: Synthetic oligonucleotide
  Sense strand starting at position 301 of SEQ ID NO: 1885959
agugauugugcuuaaauua

SEQ ID NO: 2379079 - RNA, 19 nt, Artificial Sequence
  Description of Artificial Sequence: Synthetic oligonucleotide
  Antisense strand to SEQ ID NO: 2379078
uaauuuaagcacaaucacu

SEQ ID NO: 2379080 - RNA, 19 nt, Artificial Sequence
  Description of Artificial Sequence: Synthetic oligonucleotide
  Sense strand starting at position 1073 of SEQ ID NO: 1885959
cccucuucgcgcucucaaa

SEQ ID NO: 2379081 - RNA, 19 nt, Artificial Sequence
  Description of Artificial Sequence: Synthetic oligonucleotide
  Antisense strand to SEQ ID NO: 2379080
uuugagagcgcgaagaggg

SEQ ID NO: 2379082 - RNA, 19 nt, Artificial Sequence
  Description of Artificial Sequence: Synthetic oligonucleotide
  Sense strand starting at position 1322 of SEQ ID NO: 1885959
gugugaaucuuggaaagga

SEQ ID NO: 2379083 - RNA, 19 nt, Artificial Sequence
  Description of Artificial Sequence: Synthetic oligonucleotide
  Antisense strand to SEQ ID NO: 2379082
uccuuuccaagauucacac

SEQ ID NO: 2379084 - RNA, 19 nt, Artificial Sequence
  Description of Artificial Sequence: Synthetic oligonucleotide
  Sense strand starting at position 1332 of SEQ ID NO: 1885959
uggaaaggauucuuugcuu

SEQ ID NO: 2379085 - RNA, 19 nt, Artificial Sequence
  Description of Artificial Sequence: Synthetic oligonucleotide
  Antisense strand to SEQ ID NO: 2379084
aagcaaagaauccuuucca

SEQ ID NO: 2379086 - RNA, 19 nt, Artificial Sequence
  Description of Artificial Sequence: Synthetic oligonucleotide
  Sense strand starting at position 1598 of SEQ ID NO: 1885959
cgccguguucugccaaauu

SEQ ID NO: 2379087 - RNA, 19 nt, Artificial Sequence
  Description of Artificial Sequence: Synthetic oligonucleotide
  Antisense strand to SEQ ID NO: 2379086
aauuuggcagaacacggcg

SEQ ID NO: 2379088 - RNA, 19 nt, Artificial Sequence
  Description of Artificial Sequence: Synthetic oligonucleotide
  Sense strand starting at position 1637 of SEQ ID NO: 1885959
ccagcagguguaugguuaa

SEQ ID NO: 2379089 - RNA, 19 nt, Artificial Sequence
  Description of Artificial Sequence: Synthetic oligonucleotide
  Antisense strand to SEQ ID NO: 2379088
uuaaccauacaccugcugg

SEQ ID NO: 2379090 - RNA, 19 nt, Artificial Sequence
  Description of Artificial Sequence: Synthetic oligonucleotide
  Sense strand starting at position 2342 of SEQ ID NO: 1885959
agagcuggaucuccggaaa

SEQ ID NO: 2379091 - RNA, 19 nt, Artificial Sequence
  Description of Artificial Sequence: Synthetic oligonucleotide
  Antisense strand to SEQ ID NO: 2379090
uuuccggagauccagcucu

SEQ ID NO: 2379092 - RNA, 19 nt, Artificial Sequence
  Description of Artificial Sequence: Synthetic oligonucleotide
  Sense strand starting at position 2359 of SEQ ID NO: 1885959
aauggagaaccgugagguu

SEQ ID NO: 2379093 - RNA, 19 nt, Artificial Sequence
  Description of Artificial Sequence: Synthetic oligonucleotide
  Antisense strand to SEQ ID NO: 2379092
aaccucacgguucuccauu

SEQ ID NO: 2379094 - RNA, 19 nt, Artificial Sequence
  Description of Artificial Sequence: Synthetic oligonucleotide
  Sense strand starting at position 2802 of SEQ ID NO: 1885959
ccguccuucugugugauuu

SEQ ID NO: 2379095 - RNA, 19 nt, Artificial Sequence
  Description of Artificial Sequence: Synthetic oligonucleotide
  Antisense strand to SEQ ID NO: 2379094
aaaucacacagaaggacgg

SEQ ID NO: 2379096 - RNA, 19 nt, Artificial Sequence
  Description of Artificial Sequence: Synthetic oligonucleotide
  Sense strand starting at position 2803 of SEQ ID NO: 1885959
cguccuucugugugauuug

SEQ ID NO: 2379097 - RNA, 19 nt, Artificial Sequence
  Description of Artificial Sequence: Synthetic oligonucleotide
  Antisense strand to SEQ ID NO: 2379096
caaaucacacagaaggacg

SEQ ID NO: 2379098 - RNA, 19 nt, Artificial Sequence
  Description of Artificial Sequence: Synthetic oligonucleotide
  Sense strand starting at position 2952 of SEQ ID NO: 1885959
ggcacuuuauuugcauauu

SEQ ID NO: 2379099 - RNA, 19 nt, Artificial Sequence
  Description of Artificial Sequence: Synthetic oligonucleotide
  Antisense strand to SEQ ID NO: 2379098
aauaugcaaauaaagugcc

SEQ ID NO: 2379100 - RNA, 19 nt, Artificial Sequence
  Description of Artificial Sequence: Synthetic oligonucleotide
  Sense strand starting at position 2983 of SEQ ID NO: 1885959
cacauaacccuuggaggua

SEQ ID NO: 2379101 - RNA, 19 nt, Artificial Sequence
  Description of Artificial Sequence: Synthetic oligonucleotide
  Antisense strand to SEQ ID NO: 2379100
uaccuccaaggguuaugug

SEQ ID NO: 2379102 - RNA, 19 nt, Artificial Sequence
  Description of Artificial Sequence: Synthetic oligonucleotide
  Sense strand starting at position 2984 of SEQ ID NO: 1885959
acauaacccuuggagguau

SEQ ID NO: 2379103 - RNA, 19 nt, Artificial Sequence
  Description of Artificial Sequence: Synthetic oligonucleotide
  Antisense strand to SEQ ID NO: 2379102
auaccuccaaggguuaugu

SEQ ID NO: 2379104 - RNA, 19 nt, Artificial Sequence
  Description of Artificial Sequence: Synthetic oligonucleotide
  Sense strand starting at position 3025 of SEQ ID NO: 1885959
cccagagaugccugugacu

SEQ ID NO: 2379105 - RNA, 19 nt, Artificial Sequence
  Description of Artificial Sequence: Synthetic oligonucleotide
  Antisense strand to SEQ ID NO: 2379104
agucacaggcaucucuggg

SEQ ID NO: 2379106 - RNA, 19 nt, Artificial Sequence
  Description of Artificial Sequence: Synthetic oligonucleotide
  Sense strand starting at position 3027 of SEQ ID NO: 1885959
cagagaugccugugacuug

SEQ ID NO: 2379107 - RNA, 19 nt, Artificial Sequence
  Description of Artificial Sequence: Synthetic oligonucleotide
  Antisense strand to SEQ ID NO: 2379106
caagucacaggcaucucug

SEQ ID NO: 2379108 - RNA, 19 nt, Artificial Sequence
  Description of Artificial Sequence: Synthetic oligonucleotide
  Sense strand starting at position 3032 of SEQ ID NO: 1885959
augccugugacuugucaag

SEQ ID NO: 2379109 - RNA, 19 nt, Artificial Sequence
  Description of Artificial Sequence: Synthetic oligonucleotide
  Antisense strand to SEQ ID NO: 2379108
cuugacaagucacaggcau

SEQ ID NO: 2379110 - RNA, 19 nt, Artificial Sequence
  Description of Artificial Sequence: Synthetic oligonucleotide
  Sense strand starting at position 3034 of SEQ ID NO: 1885959
gccugugacuugucaagga

SEQ ID NO: 2379111 - RNA, 19 nt, Artificial Sequence
  Description of Artificial Sequence: Synthetic oligonucleotide
  Antisense strand to SEQ ID NO: 2379110
uccuugacaagucacaggc

SEQ ID NO: 2379112 - RNA, 19 nt, Artificial Sequence
  Description of Artificial Sequence: Synthetic oligonucleotide
  Sense strand starting at position 3038 of SEQ ID NO: 1885959
gugacuugucaaggauaca

SEQ ID NO: 2379113 - RNA, 19 nt, Artificial Sequence
  Description of Artificial Sequence: Synthetic oligonucleotide
  Antisense strand to SEQ ID NO: 2379112
uguauccuugacaagucac

SEQ ID NO: 2379114 - RNA, 19 nt, Artificial Sequence
  Description of Artificial Sequence: Synthetic oligonucleotide
  Sense strand starting at position 3049 of SEQ ID NO: 1885959
aggauacagagucguaaag

SEQ ID NO: 2379115 - RNA, 19 nt, Artificial Sequence
  Description of Artificial Sequence: Synthetic oligonucleotide
  Antisense strand to SEQ ID NO: 2379114
cuuuacgacucuguauccu

SEQ ID NO: 2379116 - RNA, 19 nt, Artificial Sequence
  Description of Artificial Sequence: Synthetic oligonucleotide
  Sense strand starting at position 3156 of SEQ ID NO: 1885959
uuauuaaccugguccugga

SEQ ID NO: 2379117 - RNA, 19 nt, Artificial Sequence
  Description of Artificial Sequence: Synthetic oligonucleotide
  Antisense strand to SEQ ID NO: 2379116
uccaggaccagguuaauaa

SEQ ID NO: 2379118 - RNA, 19 nt, Artificial Sequence
  Description of Artificial Sequence: Synthetic oligonucleotide
  Sense strand starting at position 3160 of SEQ ID NO: 1885959
uaaccugguccuggauagu

SEQ ID NO: 2379119 - RNA, 19 nt, Artificial Sequence
  Description of Artificial Sequence: Synthetic oligonucleotide
  Antisense strand to SEQ ID NO: 2379118
acuauccaggaccagguua

SEQ ID NO: 2379120 - RNA, 19 nt, Artificial Sequence
  Description of Artificial Sequence: Synthetic oligonucleotide
  Sense strand starting at position 3170 of SEQ ID NO: 1885959
cuggauaguccugagucuu

SEQ ID NO: 2379121 - RNA, 19 nt, Artificial Sequence
  Description of Artificial Sequence: Synthetic oligonucleotide
  Antisense strand to SEQ ID NO: 2379120
aagacucaggacuauccag

SEQ ID NO: 2379122 - RNA, 19 nt, Artificial Sequence
  Description of Artificial Sequence: Synthetic oligonucleotide
  Sense strand starting at position 3199 of SEQ ID NO: 1885959
gccucaaaucaggaauugu

SEQ ID NO: 2379123 - RNA, 19 nt, Artificial Sequence
  Description of Artificial Sequence: Synthetic oligonucleotide
  Antisense strand to SEQ ID NO: 2379122
acaauuccugauuugaggc

SEQ ID NO: 2379124 - RNA, 19 nt, Artificial Sequence
  Description of Artificial Sequence: Synthetic oligonucleotide
  Sense strand starting at position 3369 of SEQ ID NO: 1885959
gugccacacuguccaauaa

SEQ ID NO: 2379125 - RNA, 19 nt, Artificial Sequence
  Description of Artificial Sequence: Synthetic oligonucleotide
  Antisense strand to SEQ ID NO: 2379124
uuauuggacaguguggcac

SEQ ID NO: 2379126 - RNA, 19 nt, Artificial Sequence
  Description of Artificial Sequence: Synthetic oligonucleotide
  Sense strand starting at position 3409 of SEQ ID NO: 1885959
ccuagucuacacugucaaa

SEQ ID NO: 2379127 - RNA, 19 nt, Artificial Sequence
  Description of Artificial Sequence: Synthetic oligonucleotide
  Antisense strand to SEQ ID NO: 2379126
uuugacaguguagacuagg

SEQ ID NO: 2379128 - RNA, 19 nt, Artificial Sequence
  Description of Artificial Sequence: Synthetic oligonucleotide
  Sense strand starting at position 3427 of SEQ ID NO: 1885959
agaagugggugaucucuca

SEQ ID NO: 2379129 - RNA, 19 nt, Artificial Sequence
  Description of Artificial Sequence: Synthetic oligonucleotide
  Antisense strand to SEQ ID NO: 2379128
ugagagaucacccacuucu

SEQ ID NO: 2379130 - RNA, 19 nt, Artificial Sequence
  Description of Artificial Sequence: Synthetic oligonucleotide
  Sense strand starting at position 3434 of SEQ ID NO: 1885959
ggugaucucucauuaucag

SEQ ID NO: 2379131 - RNA, 19 nt, Artificial Sequence
  Description of Artificial Sequence: Synthetic oligonucleotide
  Antisense strand to SEQ ID NO: 2379130
cugauaaugagagaucacc

SEQ ID NO: 2379132 - RNA, 19 nt, Artificial Sequence
  Description of Artificial Sequence: Synthetic oligonucleotide
  Sense strand starting at position 3474 of SEQ ID NO: 1885959
ugagaugcauugucaggga

SEQ ID NO: 2379133 - RNA, 19 nt, Artificial Sequence
  Description of Artificial Sequence: Synthetic oligonucleotide
  Antisense strand to SEQ ID NO: 2379132
ucccugacaaugcaucuca

SEQ ID NO: 2379134 - RNA, 19 nt, Artificial Sequence
  Description of Artificial Sequence: Synthetic oligonucleotide
  Sense strand starting at position 3549 of SEQ ID NO: 1885959
aagaaagcauucugaggaa

SEQ ID NO: 2379135 - RNA, 19 nt, Artificial Sequence
  Description of Artificial Sequence: Synthetic oligonucleotide
  Antisense strand to SEQ ID NO: 2379134
uuccucagaaugcuuucuu

SEQ ID NO: 2379136 - RNA, 19 nt, Artificial Sequence
  Description of Artificial Sequence: Synthetic oligonucleotide
  Sense strand starting at position 3577 of SEQ ID NO: 1885959
ucuugaguuccuuacaagg

SEQ ID NO: 2379137 - RNA, 19 nt, Artificial Sequence
  Description of Artificial Sequence: Synthetic oligonucleotide
  Antisense strand to SEQ ID NO: 2379136
ccuuguaaggaacucaaga

SEQ ID NO: 2379138 - RNA, 19 nt, Artificial Sequence
  Description of Artificial Sequence: Synthetic oligonucleotide
  Sense strand starting at position 3676 of SEQ ID NO: 1885959
acguuaaugggacauuguu

SEQ ID NO: 2379139 - RNA, 19 nt, Artificial Sequence
  Description of Artificial Sequence: Synthetic oligonucleotide
  Antisense strand to SEQ ID NO: 2379138
aacaaugucccauuaacgu

SEQ ID NO: 2379140 - RNA, 19 nt, Artificial Sequence
  Description of Artificial Sequence: Synthetic oligonucleotide
  Sense strand starting at position 3911 of SEQ ID NO: 1885959
ccuguaggcugccugagau

SEQ ID NO: 2379141 - RNA, 19 nt, Artificial Sequence
  Description of Artificial Sequence: Synthetic oligonucleotide
  Antisense strand to SEQ ID NO: 2379140
aucucaggcagccuacagg

SEQ ID NO: 2379142 - RNA, 19 nt, Artificial Sequence
  Description of Artificial Sequence: Synthetic oligonucleotide
  Sense strand starting at position 7 of SEQ ID NO: 1885960
cugggaucaaucugccaug

SEQ ID NO: 2379143 - RNA, 19 nt, Artificial Sequence
  Description of Artificial Sequence: Synthetic oligonucleotide
  Antisense strand to SEQ ID NO: 2379142
cauggcagauugaucccag

SEQ ID NO: 2379144 - RNA, 19 nt, Artificial Sequence
  Description of Artificial Sequence: Synthetic oligonucleotide
  Sense strand starting at position 8 of SEQ ID NO: 1885960
ugggaucaaucugccauga

SEQ ID NO: 2379145 - RNA, 19 nt, Artificial Sequence
  Description of Artificial Sequence: Synthetic oligonucleotide
  Antisense strand to SEQ ID NO: 2379144
ucauggcagauugauccca

SEQ ID NO: 2379146 - RNA, 19 nt, Artificial Sequence
  Description of Artificial Sequence: Synthetic oligonucleotide
  Sense strand starting at position 12 of SEQ ID NO: 1885960
aucaaucugccaugaauag

SEQ ID NO: 2379147 - RNA, 19 nt, Artificial Sequence
  Description of Artificial Sequence: Synthetic oligonucleotide
  Antisense strand to SEQ ID NO: 2379146
cuauucauggcagauugau

SEQ ID NO: 2379148 - RNA, 19 nt, Artificial Sequence
  Description of Artificial Sequence: Synthetic oligonucleotide
  Sense strand starting at position 109 of SEQ ID NO: 1885960
agagaagacucacacccau

SEQ ID NO: 2379149 - RNA, 19 nt, Artificial Sequence
  Description of Artificial Sequence: Synthetic oligonucleotide
  Antisense strand to SEQ ID NO: 2379148
augggugugagucuucucu

SEQ ID NO: 2379150 - RNA, 19 nt, Artificial Sequence
  Description of Artificial Sequence: Synthetic oligonucleotide
  Sense strand starting at position 198 of SEQ ID NO: 1885960
cucccauuacacugugauu

SEQ ID NO: 2379151 - RNA, 19 nt, Artificial Sequence
  Description of Artificial Sequence: Synthetic oligonucleotide
  Antisense strand to SEQ ID NO: 2379150
aaucacaguguaaugggag

SEQ ID NO: 2379152 - RNA, 19 nt, Artificial Sequence
  Description of Artificial Sequence: Synthetic oligonucleotide
  Sense strand starting at position 281 of SEQ ID NO: 1885960
gccugaauuccugaaccau

SEQ ID NO: 2379153 - RNA, 19 nt, Artificial Sequence
  Description of Artificial Sequence: Synthetic oligonucleotide
  Antisense strand to SEQ ID NO: 2379152
augguucaggaauucaggc

SEQ ID NO: 2379154 - RNA, 19 nt, Artificial Sequence
  Description of Artificial Sequence: Synthetic oligonucleotide
  Sense strand starting at position 417 of SEQ ID NO: 1885960
gggucaauggcuggaggaa

SEQ ID NO: 2379155 - RNA, 19 nt, Artificial Sequence
  Description of Artificial Sequence: Synthetic oligonucleotide
  Antisense strand to SEQ ID NO: 2379154
uuccuccagccauugaccc

SEQ ID NO: 2379156 - RNA, 19 nt, Artificial Sequence
  Description of Artificial Sequence: Synthetic oligonucleotide
  Sense strand starting at position 463 of SEQ ID NO: 1885960
gacuccugucuuggugaga

SEQ ID NO: 2379157 - RNA, 19 nt, Artificial Sequence
  Description of Artificial Sequence: Synthetic oligonucleotide
  Antisense strand to SEQ ID NO: 2379156
ucucaccaagacaggaguc

SEQ ID NO: 2379158 - RNA, 19 nt, Artificial Sequence
  Description of Artificial Sequence: Synthetic oligonucleotide
  Sense strand starting at position 484 of SEQ ID NO: 1885960
cuccaaauggguugauuga

SEQ ID NO: 2379159 - RNA, 19 nt, Artificial Sequence
  Description of Artificial Sequence: Synthetic oligonucleotide
  Antisense strand to SEQ ID NO: 2379158
ucaaucaacccauuuggag

SEQ ID NO: 2379160 - RNA, 19 nt, Artificial Sequence
  Description of Artificial Sequence: Synthetic oligonucleotide
  Sense strand starting at position 680 of SEQ ID NO: 1885960
ggcccucucuggguuaacu

SEQ ID NO: 2379161 - RNA, 19 nt, Artificial Sequence
  Description of Artificial Sequence: Synthetic oligonucleotide
  Antisense strand to SEQ ID NO: 2379160
aguuaacccagagagggcc

SEQ ID NO: 2379162 - RNA, 19 nt, Artificial Sequence
  Description of Artificial Sequence: Synthetic oligonucleotide
  Sense strand starting at position 1239 of SEQ ID NO: 1885960
agccgagucuggccuauuu

SEQ ID NO: 2379163 - RNA, 19 nt, Artificial Sequence
  Description of Artificial Sequence: Synthetic oligonucleotide
  Antisense strand to SEQ ID NO: 2379162
aaauaggccagacucggcu

SEQ ID NO: 2379164 - RNA, 19 nt, Artificial Sequence
  Description of Artificial Sequence: Synthetic oligonucleotide
  Sense strand starting at position 1273 of SEQ ID NO: 1885960
uuaugaaaguuuccuaaug

SEQ ID NO: 2379165 - RNA, 19 nt, Artificial Sequence
  Description of Artificial Sequence: Synthetic oligonucleotide
  Antisense strand to SEQ ID NO: 2379164
cauuaggaaacuuucauaa

SEQ ID NO: 2379166 - RNA, 19 nt, Artificial Sequence
  Description of Artificial Sequence: Synthetic oligonucleotide
  Sense strand starting at position 1285 of SEQ ID NO: 1885960
ccuaaugcacaugaaagua

SEQ ID NO: 2379167 - RNA, 19 nt, Artificial Sequence
  Description of Artificial Sequence: Synthetic oligonucleotide
  Antisense strand to SEQ ID NO: 2379166
uacuuucaugugcauuagg

SEQ ID NO: 2379168 - RNA, 19 nt, Artificial Sequence
  Description of Artificial Sequence: Synthetic oligonucleotide
  Sense strand starting at position 1429 of SEQ ID NO: 1885960
ucauaugacuuacccguaa

SEQ ID NO: 2379169 - RNA, 19 nt, Artificial Sequence
  Description of Artificial Sequence: Synthetic oligonucleotide
  Antisense strand to SEQ ID NO: 2379168
uuacggguaagucauauga

SEQ ID NO: 2379170 - RNA, 19 nt, Artificial Sequence
  Description of Artificial Sequence: Synthetic oligonucleotide
  Sense strand starting at position 1433 of SEQ ID NO: 1885960
augacuuacccguaaacac

SEQ ID NO: 2379171 - RNA, 19 nt, Artificial Sequence
  Description of Artificial Sequence: Synthetic oligonucleotide
  Antisense strand to SEQ ID NO: 2379170
guguuuacggguaagucau

SEQ ID NO: 2379172 - RNA, 19 nt, Artificial Sequence
  Description of Artificial Sequence: Synthetic oligonucleotide
  Sense strand starting at position 2112 of SEQ ID NO: 1885960
accaguuuaugcucggaga

SEQ ID NO: 2379173 - RNA, 19 nt, Artificial Sequence
  Description of Artificial Sequence: Synthetic oligonucleotide
  Antisense strand to SEQ ID NO: 2379172
ucuccgagcauaaacuggu

SEQ ID NO: 2379174 - RNA, 19 nt, Artificial Sequence
  Description of Artificial Sequence: Synthetic oligonucleotide
  Sense strand starting at position 2113 of SEQ ID NO: 1885960
ccaguuuaugcucggagag

SEQ ID NO: 2379175 - RNA, 19 nt, Artificial Sequence
  Description of Artificial Sequence: Synthetic oligonucleotide
  Antisense strand to SEQ ID NO: 2379174
cucuccgagcauaaacugg

SEQ ID NO: 2379176 - RNA, 19 nt, Artificial Sequence
  Description of Artificial Sequence: Synthetic oligonucleotide
  Sense strand starting at position 2116 of SEQ ID NO: 1885960
guuuaugcucggagaggcu

SEQ ID NO: 2379177 - RNA, 19 nt, Artificial Sequence
  Description of Artificial Sequence: Synthetic oligonucleotide
  Antisense strand to SEQ ID NO: 2379176
agccucuccgagcauaaac

SEQ ID NO: 2379178 - RNA, 19 nt, Artificial Sequence
  Description of Artificial Sequence: Synthetic oligonucleotide
  Sense strand starting at position 2258 of SEQ ID NO: 1885960
ugaguuuagccugggcaag

SEQ ID NO: 2379179 - RNA, 19 nt, Artificial Sequence
  Description of Artificial Sequence: Synthetic oligonucleotide
  Antisense strand to SEQ ID NO: 2379178
cuugcccaggcuaaacuca

SEQ ID NO: 2379180 - RNA, 19 nt, Artificial Sequence
  Description of Artificial Sequence: Synthetic oligonucleotide
  Sense strand starting at position 2259 of SEQ ID NO: 1885960
gaguuuagccugggcaaga

SEQ ID NO: 2379181 - RNA, 19 nt, Artificial Sequence
  Description of Artificial Sequence: Synthetic oligonucleotide
  Antisense strand to SEQ ID NO: 2379180
ucuugcccaggcuaaacuc

SEQ ID NO: 2379182 - RNA, 19 nt, Artificial Sequence
  Description of Artificial Sequence: Synthetic oligonucleotide
  Sense strand starting at position 2270 of SEQ ID NO: 1885960
gggcaagagacugguccau

SEQ ID NO: 2379183 - RNA, 19 nt, Artificial Sequence
  Description of Artificial Sequence: Synthetic oligonucleotide
  Antisense strand to SEQ ID NO: 2379182
auggaccagucucuugccc

SEQ ID NO: 2379184 - RNA, 19 nt, Artificial Sequence
  Description of Artificial Sequence: Synthetic oligonucleotide
  Sense strand starting at position 2272 of SEQ ID NO: 1885960
gcaagagacugguccauaa

SEQ ID NO: 2379185 - RNA, 19 nt, Artificial Sequence
  Description of Artificial Sequence: Synthetic oligonucleotide
  Antisense strand to SEQ ID NO: 2379184
uuauggaccagucucuugc

SEQ ID NO: 2379186 - RNA, 19 nt, Artificial Sequence
  Description of Artificial Sequence: Synthetic oligonucleotide
  Sense strand starting at position 2546 of SEQ ID NO: 1885960
uggaucuccugucuuugau

SEQ ID NO: 2379187 - RNA, 19 nt, Artificial Sequence
  Description of Artificial Sequence: Synthetic oligonucleotide
  Antisense strand to SEQ ID NO: 2379186
aucaaagacaggagaucca

SEQ ID NO: 2379188 - RNA, 19 nt, Artificial Sequence
  Description of Artificial Sequence: Synthetic oligonucleotide
  Sense strand starting at position 2766 of SEQ ID NO: 1885960
ugggcagaucuggacaagu

SEQ ID NO: 2379189 - RNA, 19 nt, Artificial Sequence
  Description of Artificial Sequence: Synthetic oligonucleotide
  Antisense strand to SEQ ID NO: 2379188
acuuguccagaucugccca

SEQ ID NO: 2379190 - RNA, 19 nt, Artificial Sequence
  Description of Artificial Sequence: Synthetic oligonucleotide
  Sense strand starting at position 3007 of SEQ ID NO: 1885960
gcaccaaguccagaacguu

SEQ ID NO: 2379191 - RNA, 19 nt, Artificial Sequence
  Description of Artificial Sequence: Synthetic oligonucleotide
  Antisense strand to SEQ ID NO: 2379190
aacguucuggacuuggugc

SEQ ID NO: 2379192 - RNA, 19 nt, Artificial Sequence
  Description of Artificial Sequence: Synthetic oligonucleotide
  Sense strand starting at position 3044 of SEQ ID NO: 1885960
cagagacuuccugguucca

SEQ ID NO: 2379193 - RNA, 19 nt, Artificial Sequence
  Description of Artificial Sequence: Synthetic oligonucleotide
  Antisense strand to SEQ ID NO: 2379192
uggaaccaggaagucucug

SEQ ID NO: 2379194 - RNA, 19 nt, Artificial Sequence
  Description of Artificial Sequence: Synthetic oligonucleotide
  Sense strand starting at position 3046 of SEQ ID NO: 1885960
gagacuuccugguuccaga

SEQ ID NO: 2379195 - RNA, 19 nt, Artificial Sequence
  Description of Artificial Sequence: Synthetic oligonucleotide
  Antisense strand to SEQ ID NO: 2379194
ucuggaaccaggaagucuc

SEQ ID NO: 2379196 - RNA, 19 nt, Artificial Sequence
  Description of Artificial Sequence: Synthetic oligonucleotide
  Sense strand starting at position 3064 of SEQ ID NO: 1885960
aucagaaacugccuugagu

SEQ ID NO: 2379197 - RNA, 19 nt, Artificial Sequence
  Description of Artificial Sequence: Synthetic oligonucleotide
  Antisense strand to SEQ ID NO: 2379196
acucaaggcaguuucugau

SEQ ID NO: 2379198 - RNA, 19 nt, Artificial Sequence
  Description of Artificial Sequence: Synthetic oligonucleotide
  Sense strand starting at position 3066 of SEQ ID NO: 1885960
cagaaacugccuugaguag

SEQ ID NO: 2379199 - RNA, 19 nt, Artificial Sequence
  Description of Artificial Sequence: Synthetic oligonucleotide
  Antisense strand to SEQ ID NO: 2379198
cuacucaaggcaguuucug

SEQ ID NO: 2379200 - RNA, 19 nt, Artificial Sequence
  Description of Artificial Sequence: Synthetic oligonucleotide
  Sense strand starting at position 3083 of SEQ ID NO: 1885960
agcugcaucucuccagaca

SEQ ID NO: 2379201 - RNA, 19 nt, Artificial Sequence
  Description of Artificial Sequence: Synthetic oligonucleotide
  Antisense strand to SEQ ID NO: 2379200
ugucuggagagaugcagcu

SEQ ID NO: 2379202 - RNA, 19 nt, Artificial Sequence
  Description of Artificial Sequence: Synthetic oligonucleotide
  Sense strand starting at position 3219 of SEQ ID NO: 1885960
ccgcuuccuuagguagaga

SEQ ID NO: 2379203 - RNA, 19 nt, Artificial Sequence
  Description of Artificial Sequence: Synthetic oligonucleotide
  Antisense strand to SEQ ID NO: 2379202
ucucuaccuaaggaagcgg

SEQ ID NO: 2379204 - RNA, 19 nt, Artificial Sequence
  Description of Artificial Sequence: Synthetic oligonucleotide
  Sense strand starting at position 3220 of SEQ ID NO: 1885960
cgcuuccuuagguagagaa

SEQ ID NO: 2379205 - RNA, 19 nt, Artificial Sequence
  Description of Artificial Sequence: Synthetic oligonucleotide
  Antisense strand to SEQ ID NO: 2379204
uucucuaccuaaggaagcg

SEQ ID NO: 2379206 - RNA, 19 nt, Artificial Sequence
  Description of Artificial Sequence: Synthetic oligonucleotide
  Sense strand starting at position 3222 of SEQ ID NO: 1885960
cuuccuuagguagagaagu

SEQ ID NO: 2379207 - RNA, 19 nt, Artificial Sequence
  Description of Artificial Sequence: Synthetic oligonucleotide
  Antisense strand to SEQ ID NO: 2379206
acuucucuaccuaaggaag

SEQ ID NO: 2379208 - RNA, 19 nt, Artificial Sequence
  Description of Artificial Sequence: Synthetic oligonucleotide
  Sense strand starting at position 3270 of SEQ ID NO: 1885960
gcuaguguucgcccuucua

SEQ ID NO: 2379209 - RNA, 19 nt, Artificial Sequence
  Description of Artificial Sequence: Synthetic oligonucleotide
  Antisense strand to SEQ ID NO: 2379208
uagaagggcgaacacuagc

SEQ ID NO: 2379210 - RNA, 19 nt, Artificial Sequence
  Description of Artificial Sequence: Synthetic oligonucleotide
  Sense strand starting at position 3534 of SEQ ID NO: 1885960
agguuuccaaagggacauu

SEQ ID NO: 2379211 - RNA, 19 nt, Artificial Sequence
  Description of Artificial Sequence: Synthetic oligonucleotide
  Antisense strand to SEQ ID NO: 2379210
aaugucccuuuggaaaccu

SEQ ID NO: 2379212 - RNA, 19 nt, Artificial Sequence
  Description of Artificial Sequence: Synthetic oligonucleotide
  Sense strand starting at position 3787 of SEQ ID NO: 1885960
gcggauuccagacagcgau

SEQ ID NO: 2379213 - RNA, 19 nt, Artificial Sequence
  Description of Artificial Sequence: Synthetic oligonucleotide
  Antisense strand to SEQ ID NO: 2379212
aucgcugucuggaauccgc

SEQ ID NO: 2379214 - RNA, 19 nt, Artificial Sequence
  Description of Artificial Sequence: Synthetic oligonucleotide
  Sense strand starting at position 3791 of SEQ ID NO: 1885960
auuccagacagcgauugua

SEQ ID NO: 2379215 - RNA, 19 nt, Artificial Sequence
  Description of Artificial Sequence: Synthetic oligonucleotide
  Antisense strand to SEQ ID NO: 2379214
uacaaucgcugucuggaau

SEQ ID NO: 2379216 - RNA, 19 nt, Artificial Sequence
  Description of Artificial Sequence: Synthetic oligonucleotide
  Sense strand starting at position 3794 of SEQ ID NO: 1885960
ccagacagcgauuguauca

SEQ ID NO: 2379217 - RNA, 19 nt, Artificial Sequence
  Description of Artificial Sequence: Synthetic oligonucleotide
  Antisense strand to SEQ ID NO: 2379216
ugauacaaucgcugucugg

SEQ ID NO: 2379218 - RNA, 19 nt, Artificial Sequence
  Description of Artificial Sequence: Synthetic oligonucleotide
  Sense strand starting at position 3807 of SEQ ID NO: 1885960
guaucauucucucuguaaa

SEQ ID NO: 2379219 - RNA, 19 nt, Artificial Sequence
  Description of Artificial Sequence: Synthetic oligonucleotide
  Antisense strand to SEQ ID NO: 2379218
uuuacagagagaaugauac

SEQ ID NO: 2379220 - RNA, 19 nt, Artificial Sequence
  Description of Artificial Sequence: Synthetic oligonucleotide
  Sense strand starting at position 3945 of SEQ ID NO: 1885960
uaaaguggcuuguuuggau

SEQ ID NO: 2379221 - RNA, 19 nt, Artificial Sequence
  Description of Artificial Sequence: Synthetic oligonucleotide
  Antisense strand to SEQ ID NO: 2379220
auccaaacaagccacuuua

SEQ ID NO: 2379222 - RNA, 19 nt, Artificial Sequence
  Description of Artificial Sequence: Synthetic oligonucleotide
  Sense strand starting at position 155 of SEQ ID NO: 1885961
cuuuccagaugucuaucau

SEQ ID NO: 2379223 - RNA, 19 nt, Artificial Sequence
  Description of Artificial Sequence: Synthetic oligonucleotide
  Antisense strand to SEQ ID NO: 2379222
augauagacaucuggaaag

SEQ ID NO: 2379224 - RNA, 19 nt, Artificial Sequence
  Description of Artificial Sequence: Synthetic oligonucleotide
  Sense strand starting at position 169 of SEQ ID NO: 1885961
aucauuggccugcaaacau

SEQ ID NO: 2379225 - RNA, 19 nt, Artificial Sequence
  Description of Artificial Sequence: Synthetic oligonucleotide
  Antisense strand to SEQ ID NO: 2379224
auguuugcaggccaaugau

SEQ ID NO: 2379226 - RNA, 19 nt, Artificial Sequence
  Description of Artificial Sequence: Synthetic oligonucleotide
  Sense strand starting at position 297 of SEQ ID NO: 1885961
cugguuuguaauggaggau

SEQ ID NO: 2379227 - RNA, 19 nt, Artificial Sequence
  Description of Artificial Sequence: Synthetic oligonucleotide
  Antisense strand to SEQ ID NO: 2379226
auccuccauuacaaaccag

SEQ ID NO: 2379228 - RNA, 19 nt, Artificial Sequence
  Description of Artificial Sequence: Synthetic oligonucleotide
  Sense strand starting at position 300 of SEQ ID NO: 1885961
guuuguaauggaggaucuu

SEQ ID NO: 2379229 - RNA, 19 nt, Artificial Sequence
  Description of Artificial Sequence: Synthetic oligonucleotide
  Antisense strand to SEQ ID NO: 2379228
aagauccuccauuacaaac

SEQ ID NO: 2379230 - RNA, 19 nt, Artificial Sequence
  Description of Artificial Sequence: Synthetic oligonucleotide
  Sense strand starting at position 418 of SEQ ID NO: 1885961
auauguaguucucugagau

SEQ ID NO: 2379231 - RNA, 19 nt, Artificial Sequence
  Description of Artificial Sequence: Synthetic oligonucleotide
  Antisense strand to SEQ ID NO: 2379230
aucucagagaacuacauau

SEQ ID NO: 2379232 - RNA, 19 nt, Artificial Sequence
  Description of Artificial Sequence: Synthetic oligonucleotide
  Sense strand starting at position 419 of SEQ ID NO: 1885961
uauguaguucucugagaug

SEQ ID NO: 2379233 - RNA, 19 nt, Artificial Sequence
  Description of Artificial Sequence: Synthetic oligonucleotide
  Antisense strand to SEQ ID NO: 2379232
caucucagagaacuacaua

SEQ ID NO: 2379234 - RNA, 19 nt, Artificial Sequence
  Description of Artificial Sequence: Synthetic oligonucleotide
  Sense strand starting at position 567 of SEQ ID NO: 1885961
acuuuaagacucugccaug

SEQ ID NO: 2379235 - RNA, 19 nt, Artificial Sequence
  Description of Artificial Sequence: Synthetic oligonucleotide
  Antisense strand to SEQ ID NO: 2379234
cauggcagagucuuaaagu

SEQ ID NO: 2379236 - RNA, 19 nt, Artificial Sequence
  Description of Artificial Sequence: Synthetic oligonucleotide
  Sense strand starting at position 703 of SEQ ID NO: 1885961
aacagacauccguaucuga

SEQ ID NO: 2379237 - RNA, 19 nt, Artificial Sequence
  Description of Artificial Sequence: Synthetic oligonucleotide
  Antisense strand to SEQ ID NO: 2379236
ucagauacggaugucuguu

SEQ ID NO: 2379238 - RNA, 19 nt, Artificial Sequence
  Description of Artificial Sequence: Synthetic oligonucleotide
  Sense strand starting at position 788 of SEQ ID NO: 1885961
cuggauaugucagccuaag

SEQ ID NO: 2379239 - RNA, 19 nt, Artificial Sequence
  Description of Artificial Sequence: Synthetic oligonucleotide
  Antisense strand to SEQ ID NO: 2379238
cuuaggcugacauauccag

SEQ ID NO: 2379240 - RNA, 19 nt, Artificial Sequence
  Description of Artificial Sequence: Synthetic oligonucleotide
  Sense strand starting at position 817 of SEQ ID NO: 1885961
aguuucuggauaugagagu

SEQ ID NO: 2379241 - RNA, 19 nt, Artificial Sequence
  Description of Artificial Sequence: Synthetic oligonucleotide
  Antisense strand to SEQ ID NO: 2379240
acucucauauccagaaacu

SEQ ID NO: 2379242 - RNA, 19 nt, Artificial Sequence
  Description of Artificial Sequence: Synthetic oligonucleotide
  Sense strand starting at position 1070 of SEQ ID NO: 1885961
cguuaauuagagcaggaau

SEQ ID NO: 2379243 - RNA, 19 nt, Artificial Sequence
  Description of Artificial Sequence: Synthetic oligonucleotide
  Antisense strand to SEQ ID NO: 2379242
auuccugcucuaauuaacg

SEQ ID NO: 2379244 - RNA, 19 nt, Artificial Sequence
  Description of Artificial Sequence: Synthetic oligonucleotide
  Sense strand starting at position 1096 of SEQ ID NO: 1885961
ccgauucugaagugagacu

SEQ ID NO: 2379245 - RNA, 19 nt, Artificial Sequence
  Description of Artificial Sequence: Synthetic oligonucleotide
  Antisense strand to SEQ ID NO: 2379244
agucucacuucagaaucgg

SEQ ID NO: 2379246 - RNA, 19 nt, Artificial Sequence
  Description of Artificial Sequence: Synthetic oligonucleotide
  Sense strand starting at position 1097 of SEQ ID NO: 1885961
cgauucugaagugagacuu

SEQ ID NO: 2379247 - RNA, 19 nt, Artificial Sequence
  Description of Artificial Sequence: Synthetic oligonucleotide
  Antisense strand to SEQ ID NO: 2379246
aagucucacuucagaaucg

SEQ ID NO: 2379248 - RNA, 19 nt, Artificial Sequence
  Description of Artificial Sequence: Synthetic oligonucleotide
  Sense strand starting at position 1105 of SEQ ID NO: 1885961
aagugagacuuggcuguga

SEQ ID NO: 2379249 - RNA, 19 nt, Artificial Sequence
  Description of Artificial Sequence: Synthetic oligonucleotide
  Antisense strand to SEQ ID NO: 2379248
ucacagccaagucucacuu

SEQ ID NO: 2379250 - RNA, 19 nt, Artificial Sequence
  Description of Artificial Sequence: Synthetic oligonucleotide
  Sense strand starting at position 1172 of SEQ ID NO: 1885961
agggaagauucugcagcau

SEQ ID NO: 2379251 - RNA, 19 nt, Artificial Sequence
  Description of Artificial Sequence: Synthetic oligonucleotide
  Antisense strand to SEQ ID NO: 2379250
augcugcagaaucuucccu

SEQ ID NO: 2379252 - RNA, 19 nt, Artificial Sequence
  Description of Artificial Sequence: Synthetic oligonucleotide
  Sense strand starting at position 1348 of SEQ ID NO: 1885961
gugaauucuuucucauaag

SEQ ID NO: 2379253 - RNA, 19 nt, Artificial Sequence
  Description of Artificial Sequence: Synthetic oligonucleotide
  Antisense strand to SEQ ID NO: 2379252
cuuaugagaaagaauucac

SEQ ID NO: 2379254 - RNA, 19 nt, Artificial Sequence
  Description of Artificial Sequence: Synthetic oligonucleotide
  Sense strand starting at position 1439 of SEQ ID NO: 1885961
cguccuuuccauggacaua

SEQ ID NO: 2379255 - RNA, 19 nt, Artificial Sequence
  Description of Artificial Sequence: Synthetic oligonucleotide
  Antisense strand to SEQ ID NO: 2379254
uauguccauggaaaggacg

SEQ ID NO: 2379256 - RNA, 19 nt, Artificial Sequence
  Description of Artificial Sequence: Synthetic oligonucleotide
  Sense strand starting at position 1586 of SEQ ID NO: 1885961
uuguuaauuguccacuaga

SEQ ID NO: 2379257 - RNA, 19 nt, Artificial Sequence
  Description of Artificial Sequence: Synthetic oligonucleotide
  Antisense strand to SEQ ID NO: 2379256
ucuaguggacaauuaacaa

SEQ ID NO: 2379258 - RNA, 19 nt, Artificial Sequence
  Description of Artificial Sequence: Synthetic oligonucleotide
  Sense strand starting at position 1816 of SEQ ID NO: 1885961
uaggguggucucugaagga

SEQ ID NO: 2379259 - RNA, 19 nt, Artificial Sequence
  Description of Artificial Sequence: Synthetic oligonucleotide
  Antisense strand to SEQ ID NO: 2379258
uccuucagagaccacccua

SEQ ID NO: 2379260 - RNA, 19 nt, Artificial Sequence
  Description of Artificial Sequence: Synthetic oligonucleotide
  Sense strand starting at position 2605 of SEQ ID NO: 1885961
uuguuaacucugcagguca

SEQ ID NO: 2379261 - RNA, 19 nt, Artificial Sequence
  Description of Artificial Sequence: Synthetic oligonucleotide
  Antisense strand to SEQ ID NO: 2379260
ugaccugcagaguuaacaa

SEQ ID NO: 2379262 - RNA, 19 nt, Artificial Sequence
  Description of Artificial Sequence: Synthetic oligonucleotide
  Sense strand starting at position 2679 of SEQ ID NO: 1885961
cugauaagcccucaucaug

SEQ ID NO: 2379263 - RNA, 19 nt, Artificial Sequence
  Description of Artificial Sequence: Synthetic oligonucleotide
  Antisense strand to SEQ ID NO: 2379262
caugaugagggcuuaucag

SEQ ID NO: 2379264 - RNA, 19 nt, Artificial Sequence
  Description of Artificial Sequence: Synthetic oligonucleotide
  Sense strand starting at position 2794 of SEQ ID NO: 1885961
gccuuagucccacagagua

SEQ ID NO: 2379265 - RNA, 19 nt, Artificial Sequence
  Description of Artificial Sequence: Synthetic oligonucleotide
  Antisense strand to SEQ ID NO: 2379264
uacucugugggacuaaggc

SEQ ID NO: 2379266 - RNA, 19 nt, Artificial Sequence
  Description of Artificial Sequence: Synthetic oligonucleotide
  Sense strand starting at position 2834 of SEQ ID NO: 1885961
agguauccaugugcauuua

SEQ ID NO: 2379267 - RNA, 19 nt, Artificial Sequence
  Description of Artificial Sequence: Synthetic oligonucleotide
  Antisense strand to SEQ ID NO: 2379266
uaaaugcacauggauaccu

SEQ ID NO: 2379268 - RNA, 19 nt, Artificial Sequence
  Description of Artificial Sequence: Synthetic oligonucleotide
  Sense strand starting at position 2916 of SEQ ID NO: 1885961
aggacuguuugauuagaug

SEQ ID NO: 2379269 - RNA, 19 nt, Artificial Sequence
  Description of Artificial Sequence: Synthetic oligonucleotide
  Antisense strand to SEQ ID NO: 2379268
caucuaaucaaacaguccu

SEQ ID NO: 2379270 - RNA, 19 nt, Artificial Sequence
  Description of Artificial Sequence: Synthetic oligonucleotide
  Sense strand starting at position 2924 of SEQ ID NO: 1885961
uugauuagaugccugaguu

SEQ ID NO: 2379271 - RNA, 19 nt, Artificial Sequence
  Description of Artificial Sequence: Synthetic oligonucleotide
  Antisense strand to SEQ ID NO: 2379270
aacucaggcaucuaaucaa

SEQ ID NO: 2379272 - RNA, 19 nt, Artificial Sequence
  Description of Artificial Sequence: Synthetic oligonucleotide
  Sense strand starting at position 2925 of SEQ ID NO: 1885961
ugauuagaugccugaguug

SEQ ID NO: 2379273 - RNA, 19 nt, Artificial Sequence
  Description of Artificial Sequence: Synthetic oligonucleotide
  Antisense strand to SEQ ID NO: 2379272
caacucaggcaucuaauca

SEQ ID NO: 2379274 - RNA, 19 nt, Artificial Sequence
  Description of Artificial Sequence: Synthetic oligonucleotide
  Sense strand starting at position 3309 of SEQ ID NO: 1885961
acaugcucucuccagggaa

SEQ ID NO: 2379275 - RNA, 19 nt, Artificial Sequence
  Description of Artificial Sequence: Synthetic oligonucleotide
  Antisense strand to SEQ ID NO: 2379274
uucccuggagagagcaugu

SEQ ID NO: 2379276 - RNA, 19 nt, Artificial Sequence
  Description of Artificial Sequence: Synthetic oligonucleotide
  Sense strand starting at position 3311 of SEQ ID NO: 1885961
augcucucuccagggaaga

SEQ ID NO: 2379277 - RNA, 19 nt, Artificial Sequence
  Description of Artificial Sequence: Synthetic oligonucleotide
  Antisense strand to SEQ ID NO: 2379276
ucuucccuggagagagcau

SEQ ID NO: 2379278 - RNA, 19 nt, Artificial Sequence
  Description of Artificial Sequence: Synthetic oligonucleotide
  Sense strand starting at position 3366 of SEQ ID NO: 1885961
agggacaagugguuggaau

SEQ ID NO: 2379279 - RNA, 19 nt, Artificial Sequence
  Description of Artificial Sequence: Synthetic oligonucleotide
  Antisense strand to SEQ ID NO: 2379278
auuccaaccacuugucccu

SEQ ID NO: 2379280 - RNA, 19 nt, Artificial Sequence
  Description of Artificial Sequence: Synthetic oligonucleotide
  Sense strand starting at position 3367 of SEQ ID NO: 1885961
gggacaagugguuggaauc

SEQ ID NO: 2379281 - RNA, 19 nt, Artificial Sequence
  Description of Artificial Sequence: Synthetic oligonucleotide
  Antisense strand to SEQ ID NO: 2379280
gauuccaaccacuuguccc

SEQ ID NO: 2379282 - RNA, 19 nt, Artificial Sequence
  Description of Artificial Sequence: Synthetic oligonucleotide
  Sense strand starting at position 3368 of SEQ ID NO: 1885961
ggacaagugguuggaauca

SEQ ID NO: 2379283 - RNA, 19 nt, Artificial Sequence
  Description of Artificial Sequence: Synthetic oligonucleotide
  Antisense strand to SEQ ID NO: 2379282
ugauuccaaccacuugucc

SEQ ID NO: 2379284 - RNA, 19 nt, Artificial Sequence
  Description of Artificial Sequence: Synthetic oligonucleotide
  Sense strand starting at position 3410 of SEQ ID NO: 1885961
cuuaguuagaaauguagag

SEQ ID NO: 2379285 - RNA, 19 nt, Artificial Sequence
  Description of Artificial Sequence: Synthetic oligonucleotide
  Antisense strand to SEQ ID NO: 2379284
cucuacauuucuaacuaag

SEQ ID NO: 2379286 - RNA, 19 nt, Artificial Sequence
  Description of Artificial Sequence: Synthetic oligonucleotide
  Sense strand starting at position 3491 of SEQ ID NO: 1885961
cacugugcccucuggagaa

SEQ ID NO: 2379287 - RNA, 19 nt, Artificial Sequence
  Description of Artificial Sequence: Synthetic oligonucleotide
  Antisense strand to SEQ ID NO: 2379286
uucuccagagggcacagug

SEQ ID NO: 2379288 - RNA, 19 nt, Artificial Sequence
  Description of Artificial Sequence: Synthetic oligonucleotide
  Sense strand starting at position 3514 of SEQ ID NO: 1885961
ucugguuuccuggauauau

SEQ ID NO: 2379289 - RNA, 19 nt, Artificial Sequence
  Description of Artificial Sequence: Synthetic oligonucleotide
  Antisense strand to SEQ ID NO: 2379288
auauauccaggaaaccaga

SEQ ID NO: 2379290 - RNA, 19 nt, Artificial Sequence
  Description of Artificial Sequence: Synthetic oligonucleotide
  Sense strand starting at position 3516 of SEQ ID NO: 1885961
ugguuuccuggauauauca

SEQ ID NO: 2379291 - RNA, 19 nt, Artificial Sequence
  Description of Artificial Sequence: Synthetic oligonucleotide
  Antisense strand to SEQ ID NO: 2379290
ugauauauccaggaaacca

SEQ ID NO: 2379292 - RNA, 19 nt, Artificial Sequence
  Description of Artificial Sequence: Synthetic oligonucleotide
  Sense strand starting at position 3564 of SEQ ID NO: 1885961
uuccaaaucuggcucaagu

SEQ ID NO: 2379293 - RNA, 19 nt, Artificial Sequence
  Description of Artificial Sequence: Synthetic oligonucleotide
  Antisense strand to SEQ ID NO: 2379292
acuugagccagauuuggaa

SEQ ID NO: 2379294 - RNA, 19 nt, Artificial Sequence
  Description of Artificial Sequence: Synthetic oligonucleotide
  Sense strand starting at position 3706 of SEQ ID NO: 1885961
cuaauugugguggaugcaa

SEQ ID NO: 2379295 - RNA, 19 nt, Artificial Sequence
  Description of Artificial Sequence: Synthetic oligonucleotide
  Antisense strand to SEQ ID NO: 2379294
uugcauccaccacaauuag

SEQ ID NO: 2379296 - RNA, 19 nt, Artificial Sequence
  Description of Artificial Sequence: Synthetic oligonucleotide
  Sense strand starting at position 3820 of SEQ ID NO: 1885961
ugaggcugaccuuaugauu

SEQ ID NO: 2379297 - RNA, 19 nt, Artificial Sequence
  Description of Artificial Sequence: Synthetic oligonucleotide
  Antisense strand to SEQ ID NO: 2379296
aaucauaaggucagccuca

SEQ ID NO: 2379298 - RNA, 19 nt, Artificial Sequence
  Description of Artificial Sequence: Synthetic oligonucleotide
  Sense strand starting at position 3883 of SEQ ID NO: 1885961
uugaaaggaguuuaugcau

SEQ ID NO: 2379299 - RNA, 19 nt, Artificial Sequence
  Description of Artificial Sequence: Synthetic oligonucleotide
  Antisense strand to SEQ ID NO: 2379298
augcauaaacuccuuucaa

SEQ ID NO: 2379300 - RNA, 19 nt, Artificial Sequence
  Description of Artificial Sequence: Synthetic oligonucleotide
  Sense strand starting at position 3957 of SEQ ID NO: 1885961
agcccucugguugauaaga

SEQ ID NO: 2379301 - RNA, 19 nt, Artificial Sequence
  Description of Artificial Sequence: Synthetic oligonucleotide
  Antisense strand to SEQ ID NO: 2379300
ucuuaucaaccagagggcu

SEQ ID NO: 2379302 - RNA, 19 nt, Artificial Sequence
  Description of Artificial Sequence: Synthetic oligonucleotide
  Sense strand starting at position 212 of SEQ ID NO: 1885962
gcucucaacucauugaaga

SEQ ID NO: 2379303 - RNA, 19 nt, Artificial Sequence
  Description of Artificial Sequence: Synthetic oligonucleotide
  Antisense strand to SEQ ID NO: 2379302
ucuucaaugaguugagagc

SEQ ID NO: 2379304 - RNA, 19 nt, Artificial Sequence
  Description of Artificial Sequence: Synthetic oligonucleotide
  Sense strand starting at position 249 of SEQ ID NO: 1885962
gguggucaauuugaagaca

SEQ ID NO: 2379305 - RNA, 19 nt, Artificial Sequence
  Description of Artificial Sequence: Synthetic oligonucleotide
  Antisense strand to SEQ ID NO: 2379304
ugucuucaaauugaccacc

SEQ ID NO: 2379306 - RNA, 19 nt, Artificial Sequence
  Description of Artificial Sequence: Synthetic oligonucleotide
  Sense strand starting at position 276 of SEQ ID NO: 1885962
auagaagugccuuggugag

SEQ ID NO: 2379307 - RNA, 19 nt, Artificial Sequence
  Description of Artificial Sequence: Synthetic oligonucleotide
  Antisense strand to SEQ ID NO: 2379306
cucaccaaggcacuucuau

SEQ ID NO: 2379308 - RNA, 19 nt, Artificial Sequence
  Description of Artificial Sequence: Synthetic oligonucleotide
  Sense strand starting at position 379 of SEQ ID NO: 1885962
agucacaggugauuaaguu

SEQ ID NO: 2379309 - RNA, 19 nt, Artificial Sequence
  Description of Artificial Sequence: Synthetic oligonucleotide
  Antisense strand to SEQ ID NO: 2379308
aacuuaaucaccugugacu

SEQ ID NO: 2379310 - RNA, 19 nt, Artificial Sequence
  Description of Artificial Sequence: Synthetic oligonucleotide
  Sense strand starting at position 380 of SEQ ID NO: 1885962
gucacaggugauuaaguua

SEQ ID NO: 2379311 - RNA, 19 nt, Artificial Sequence
  Description of Artificial Sequence: Synthetic oligonucleotide
  Antisense strand to SEQ ID NO: 2379310
uaacuuaaucaccugugac

SEQ ID NO: 2379312 - RNA, 19 nt, Artificial Sequence
  Description of Artificial Sequence: Synthetic oligonucleotide
  Sense strand starting at position 454 of SEQ ID NO: 1885962
agcagaguaugggugagua

SEQ ID NO: 2379313 - RNA, 19 nt, Artificial Sequence
  Description of Artificial Sequence: Synthetic oligonucleotide
  Antisense strand to SEQ ID NO: 2379312
uacucacccauacucugcu

SEQ ID NO: 2379314 - RNA, 19 nt, Artificial Sequence
  Description of Artificial Sequence: Synthetic oligonucleotide
  Sense strand starting at position 710 of SEQ ID NO: 1885962
gggauugucugauccaacc

SEQ ID NO: 2379315 - RNA, 19 nt, Artificial Sequence
  Description of Artificial Sequence: Synthetic oligonucleotide
  Antisense strand to SEQ ID NO: 2379314
gguuggaucagacaauccc

SEQ ID NO: 2379316 - RNA, 19 nt, Artificial Sequence
  Description of Artificial Sequence: Synthetic oligonucleotide
  Sense strand starting at position 856 of SEQ ID NO: 1885962
agaggcaccuuccugaauu

SEQ ID NO: 2379317 - RNA, 19 nt, Artificial Sequence
  Description of Artificial Sequence: Synthetic oligonucleotide
  Antisense strand to SEQ ID NO: 2379316
aauucaggaaggugccucu

SEQ ID NO: 2379318 - RNA, 19 nt, Artificial Sequence
  Description of Artificial Sequence: Synthetic oligonucleotide
  Sense strand starting at position 1075 of SEQ ID NO: 1885962
gguuguggaccugacaacu

SEQ ID NO: 2379319 - RNA, 19 nt, Artificial Sequence
  Description of Artificial Sequence: Synthetic oligonucleotide
  Antisense strand to SEQ ID NO: 2379318
aguugucagguccacaacc

SEQ ID NO: 2379320 - RNA, 19 nt, Artificial Sequence
  Description of Artificial Sequence: Synthetic oligonucleotide
  Sense strand starting at position 1319 of SEQ ID NO: 1885962
ggugauacccacugaacca

SEQ ID NO: 2379321 - RNA, 19 nt, Artificial Sequence
  Description of Artificial Sequence: Synthetic oligonucleotide
  Antisense strand to SEQ ID NO: 2379320
ugguucaguggguaucacc

SEQ ID NO: 2379322 - RNA, 19 nt, Artificial Sequence
  Description of Artificial Sequence: Synthetic oligonucleotide
  Sense strand starting at position 1534 of SEQ ID NO: 1885962
ucugaaacguuaccuuaca

SEQ ID NO: 2379323 - RNA, 19 nt, Artificial Sequence
  Description of Artificial Sequence: Synthetic oligonucleotide
  Antisense strand to SEQ ID NO: 2379322
uguaagguaacguuucaga

SEQ ID NO: 2379324 - RNA, 19 nt, Artificial Sequence
  Description of Artificial Sequence: Synthetic oligonucleotide
  Sense strand starting at position 1613 of SEQ ID NO: 1885962
gccugagaugcuggauuuc

SEQ ID NO: 2379325 - RNA, 19 nt, Artificial Sequence
  Description of Artificial Sequence: Synthetic oligonucleotide
  Antisense strand to SEQ ID NO: 2379324
gaaauccagcaucucaggc

SEQ ID NO: 2379326 - RNA, 19 nt, Artificial Sequence
  Description of Artificial Sequence: Synthetic oligonucleotide
  Sense strand starting at position 1632 of SEQ ID NO: 1885962
ucacaagucccaggugaug

SEQ ID NO: 2379327 - RNA, 19 nt, Artificial Sequence
  Description of Artificial Sequence: Synthetic oligonucleotide
  Antisense strand to SEQ ID NO: 2379326
caucaccugggacuuguga

SEQ ID NO: 2379328 - RNA, 19 nt, Artificial Sequence
  Description of Artificial Sequence: Synthetic oligonucleotide
  Sense strand starting at position 1665 of SEQ ID NO: 1885962
ccaggugccacuuggaaua

SEQ ID NO: 2379329 - RNA, 19 nt, Artificial Sequence
  Description of Artificial Sequence: Synthetic oligonucleotide
  Antisense strand to SEQ ID NO: 2379328
uauuccaaguggcaccugg

SEQ ID NO: 2379330 - RNA, 19 nt, Artificial Sequence
  Description of Artificial Sequence: Synthetic oligonucleotide
  Sense strand starting at position 1715 of SEQ ID NO: 1885962
ccuccagagcaguaaucau

SEQ ID NO: 2379331 - RNA, 19 nt, Artificial Sequence
  Description of Artificial Sequence: Synthetic oligonucleotide
  Antisense strand to SEQ ID NO: 2379330
augauuacugcucuggagg

SEQ ID NO: 2379332 - RNA, 19 nt, Artificial Sequence
  Description of Artificial Sequence: Synthetic oligonucleotide
  Sense strand starting at position 1763 of SEQ ID NO: 1885962
uacugauugcagcagaugu

SEQ ID NO: 2379333 - RNA, 19 nt, Artificial Sequence
  Description of Artificial Sequence: Synthetic oligonucleotide
  Antisense strand to SEQ ID NO: 2379332
acaucugcugcaaucagua

SEQ ID NO: 2379334 - RNA, 19 nt, Artificial Sequence
  Description of Artificial Sequence: Synthetic oligonucleotide
  Sense strand starting at position 1862 of SEQ ID NO: 1885962
gagugaagagcccaugcua

SEQ ID NO: 2379335 - RNA, 19 nt, Artificial Sequence
  Description of Artificial Sequence: Synthetic oligonucleotide
  Antisense strand to SEQ ID NO: 2379334
uagcaugggcucuucacuc

SEQ ID NO: 2379336 - RNA, 19 nt, Artificial Sequence
  Description of Artificial Sequence: Synthetic oligonucleotide
  Sense strand starting at position 2055 of SEQ ID NO: 1885962
cauuguuuaggucacuaag

SEQ ID NO: 2379337 - RNA, 19 nt, Artificial Sequence
  Description of Artificial Sequence: Synthetic oligonucleotide
  Antisense strand to SEQ ID NO: 2379336
cuuagugaccuaaacaaug

SEQ ID NO: 2379338 - RNA, 19 nt, Artificial Sequence
  Description of Artificial Sequence: Synthetic oligonucleotide
  Sense strand starting at position 2058 of SEQ ID NO: 1885962
uguuuaggucacuaaguuu

SEQ ID NO: 2379339 - RNA, 19 nt, Artificial Sequence
  Description of Artificial Sequence: Synthetic oligonucleotide
  Antisense strand to SEQ ID NO: 2379338
aaacuuagugaccuaaaca

SEQ ID NO: 2379340 - RNA, 19 nt, Artificial Sequence
  Description of Artificial Sequence: Synthetic oligonucleotide
  Sense strand starting at position 2107 of SEQ ID NO: 1885962
cugauacacugguuuaaua

SEQ ID NO: 2379341 - RNA, 19 nt, Artificial Sequence
  Description of Artificial Sequence: Synthetic oligonucleotide
  Antisense strand to SEQ ID NO: 2379340
uauuaaaccaguguaucag

SEQ ID NO: 2379342 - RNA, 19 nt, Artificial Sequence
  Description of Artificial Sequence: Synthetic oligonucleotide
  Sense strand starting at position 2118 of SEQ ID NO: 1885962
guuuaauaucuauguuagg

SEQ ID NO: 2379343 - RNA, 19 nt, Artificial Sequence
  Description of Artificial Sequence: Synthetic oligonucleotide
  Antisense strand to SEQ ID NO: 2379342
ccuaacauagauauuaaac

SEQ ID NO: 2379344 - RNA, 19 nt, Artificial Sequence
  Description of Artificial Sequence: Synthetic oligonucleotide
  Sense strand starting at position 2302 of SEQ ID NO: 1885962
aaaguuaggguauguaauc

SEQ ID NO: 2379345 - RNA, 19 nt, Artificial Sequence
  Description of Artificial Sequence: Synthetic oligonucleotide
  Antisense strand to SEQ ID NO: 2379344
gauuacauacccuaacuuu

SEQ ID NO: 2379346 - RNA, 19 nt, Artificial Sequence
  Description of Artificial Sequence: Synthetic oligonucleotide
  Sense strand starting at position 2309 of SEQ ID NO: 1885962
ggguauguaauccagccua

SEQ ID NO: 2379347 - RNA, 19 nt, Artificial Sequence
  Description of Artificial Sequence: Synthetic oligonucleotide
  Antisense strand to SEQ ID NO: 2379346
uaggcuggauuacauaccc

SEQ ID NO: 2379348 - RNA, 19 nt, Artificial Sequence
  Description of Artificial Sequence: Synthetic oligonucleotide
  Sense strand starting at position 2314 of SEQ ID NO: 1885962
uguaauccagccuagguua

SEQ ID NO: 2379349 - RNA, 19 nt, Artificial Sequence
  Description of Artificial Sequence: Synthetic oligonucleotide
  Antisense strand to SEQ ID NO: 2379348
uaaccuaggcuggauuaca

SEQ ID NO: 2379350 - RNA, 19 nt, Artificial Sequence
  Description of Artificial Sequence: Synthetic oligonucleotide
  Sense strand starting at position 2344 of SEQ ID NO: 1885962
ccagucuacagugaucagu

SEQ ID NO: 2379351 - RNA, 19 nt, Artificial Sequence
  Description of Artificial Sequence: Synthetic oligonucleotide
  Antisense strand to SEQ ID NO: 2379350
acugaucacuguagacugg

SEQ ID NO: 2379352 - RNA, 19 nt, Artificial Sequence
  Description of Artificial Sequence: Synthetic oligonucleotide
  Sense strand starting at position 2346 of SEQ ID NO: 1885962
agucuacagugaucaguua

SEQ ID NO: 2379353 - RNA, 19 nt, Artificial Sequence
  Description of Artificial Sequence: Synthetic oligonucleotide
  Antisense strand to SEQ ID NO: 2379352
uaacugaucacuguagacu

SEQ ID NO: 2379354 - RNA, 19 nt, Artificial Sequence
  Description of Artificial Sequence: Synthetic oligonucleotide
  Sense strand starting at position 2347 of SEQ ID NO: 1885962
gucuacagugaucaguuaa

SEQ ID NO: 2379355 - RNA, 19 nt, Artificial Sequence
  Description of Artificial Sequence: Synthetic oligonucleotide
  Antisense strand to SEQ ID NO: 2379354
uuaacugaucacuguagac

SEQ ID NO: 2379356 - RNA, 19 nt, Artificial Sequence
  Description of Artificial Sequence: Synthetic oligonucleotide
  Sense strand starting at position 2369 of SEQ ID NO: 1885962
augagugugugaccuaauc

SEQ ID NO: 2379357 - RNA, 19 nt, Artificial Sequence
  Description of Artificial Sequence: Synthetic oligonucleotide
  Antisense strand to SEQ ID NO: 2379356
gauuaggucacacacucau

SEQ ID NO: 2379358 - RNA, 19 nt, Artificial Sequence
  Description of Artificial Sequence: Synthetic oligonucleotide
  Sense strand starting at position 2466 of SEQ ID NO: 1885962
gaagaaauauaggaauagu

SEQ ID NO: 2379359 - RNA, 19 nt, Artificial Sequence
  Description of Artificial Sequence: Synthetic oligonucleotide
  Antisense strand to SEQ ID NO: 2379358
acuauuccuauauuucuuc

SEQ ID NO: 2379360 - RNA, 19 nt, Artificial Sequence
  Description of Artificial Sequence: Synthetic oligonucleotide
  Sense strand starting at position 2628 of SEQ ID NO: 1885962
gcauuuaagcucugaguaa

SEQ ID NO: 2379361 - RNA, 19 nt, Artificial Sequence
  Description of Artificial Sequence: Synthetic oligonucleotide
  Antisense strand to SEQ ID NO: 2379360
uuacucagagcuuaaaugc

SEQ ID NO: 2379362 - RNA, 19 nt, Artificial Sequence
  Description of Artificial Sequence: Synthetic oligonucleotide
  Sense strand starting at position 2755 of SEQ ID NO: 1885962
gcaacagaaugcuuccuaa

SEQ ID NO: 2379363 - RNA, 19 nt, Artificial Sequence
  Description of Artificial Sequence: Synthetic oligonucleotide
  Antisense strand to SEQ ID NO: 2379362
uuaggaagcauucuguugc

SEQ ID NO: 2379364 - RNA, 19 nt, Artificial Sequence
  Description of Artificial Sequence: Synthetic oligonucleotide
  Sense strand starting at position 2758 of SEQ ID NO: 1885962
acagaaugcuuccuaacug

SEQ ID NO: 2379365 - RNA, 19 nt, Artificial Sequence
  Description of Artificial Sequence: Synthetic oligonucleotide
  Antisense strand to SEQ ID NO: 2379364
caguuaggaagcauucugu

SEQ ID NO: 2379366 - RNA, 19 nt, Artificial Sequence
  Description of Artificial Sequence: Synthetic oligonucleotide
  Sense strand starting at position 2780 of SEQ ID NO: 1885962
gaccuucuuucuucuggga

SEQ ID NO: 2379367 - RNA, 19 nt, Artificial Sequence
  Description of Artificial Sequence: Synthetic oligonucleotide
  Antisense strand to SEQ ID NO: 2379366
ucccagaagaaagaagguc

SEQ ID NO: 2379368 - RNA, 19 nt, Artificial Sequence
  Description of Artificial Sequence: Synthetic oligonucleotide
  Sense strand starting at position 2784 of SEQ ID NO: 1885962
uucuuucuucugggaaucu

SEQ ID NO: 2379369 - RNA, 19 nt, Artificial Sequence
  Description of Artificial Sequence: Synthetic oligonucleotide
  Antisense strand to SEQ ID NO: 2379368
agauucccagaagaaagaa

SEQ ID NO: 2379370 - RNA, 19 nt, Artificial Sequence
  Description of Artificial Sequence: Synthetic oligonucleotide
  Sense strand starting at position 2876 of SEQ ID NO: 1885962
gaaugaaucccugggugga

SEQ ID NO: 2379371 - RNA, 19 nt, Artificial Sequence
  Description of Artificial Sequence: Synthetic oligonucleotide
  Antisense strand to SEQ ID NO: 2379370
uccacccagggauucauuc

SEQ ID NO: 2379372 - RNA, 19 nt, Artificial Sequence
  Description of Artificial Sequence: Synthetic oligonucleotide
  Sense strand starting at position 2964 of SEQ ID NO: 1885962
cgucuuugaaucuauugga

SEQ ID NO: 2379373 - RNA, 19 nt, Artificial Sequence
  Description of Artificial Sequence: Synthetic oligonucleotide
  Antisense strand to SEQ ID NO: 2379372
uccaauagauucaaagacg

SEQ ID NO: 2379374 - RNA, 19 nt, Artificial Sequence
  Description of Artificial Sequence: Synthetic oligonucleotide
  Sense strand starting at position 3046 of SEQ ID NO: 1885962
auuccuaagcaguagauua

SEQ ID NO: 2379375 - RNA, 19 nt, Artificial Sequence
  Description of Artificial Sequence: Synthetic oligonucleotide
  Antisense strand to SEQ ID NO: 2379374
uaaucuacugcuuaggaau

SEQ ID NO: 2379376 - RNA, 19 nt, Artificial Sequence
  Description of Artificial Sequence: Synthetic oligonucleotide
  Sense strand starting at position 3048 of SEQ ID NO: 1885962
uccuaagcaguagauuaau

SEQ ID NO: 2379377 - RNA, 19 nt, Artificial Sequence
  Description of Artificial Sequence: Synthetic oligonucleotide
  Antisense strand to SEQ ID NO: 2379376
auuaaucuacugcuuagga

SEQ ID NO: 2379378 - RNA, 19 nt, Artificial Sequence
  Description of Artificial Sequence: Synthetic oligonucleotide
  Sense strand starting at position 3083 of SEQ ID NO: 1885962
aguuaugaacuauguaacu

SEQ ID NO: 2379379 - RNA, 19 nt, Artificial Sequence
  Description of Artificial Sequence: Synthetic oligonucleotide
  Antisense strand to SEQ ID NO: 2379378
aguuacauaguucauaacu

SEQ ID NO: 2379380 - RNA, 19 nt, Artificial Sequence
  Description of Artificial Sequence: Synthetic oligonucleotide
  Sense strand starting at position 3092 of SEQ ID NO: 1885962
cuauguaacuaacuaguuu

SEQ ID NO: 2379381 - RNA, 19 nt, Artificial Sequence
  Description of Artificial Sequence: Synthetic oligonucleotide
  Antisense strand to SEQ ID NO: 2379380
aaacuaguuaguuacauag

SEQ ID NO: 2379382 - RNA, 19 nt, Artificial Sequence
  Description of Artificial Sequence: Synthetic oligonucleotide
  Sense strand starting at position 154 of SEQ ID NO: 1885963
gggcuuaggucagcaaacu

SEQ ID NO: 2379383 - RNA, 19 nt, Artificial Sequence
  Description of Artificial Sequence: Synthetic oligonucleotide
  Antisense strand to SEQ ID NO: 2379382
aguuugcugaccuaagccc

SEQ ID NO: 2379384 - RNA, 19 nt, Artificial Sequence
  Description of Artificial Sequence: Synthetic oligonucleotide
  Sense strand starting at position 279 of SEQ ID NO: 1885963
caaagagguuuagucuaag

SEQ ID NO: 2379385 - RNA, 19 nt, Artificial Sequence
  Description of Artificial Sequence: Synthetic oligonucleotide
  Antisense strand to SEQ ID NO: 2379384
cuuagacuaaaccucuuug

SEQ ID NO: 2379386 - RNA, 19 nt, Artificial Sequence
  Description of Artificial Sequence: Synthetic oligonucleotide
  Sense strand starting at position 499 of SEQ ID NO: 1885963
ggaagauugugaccucaua

SEQ ID NO: 2379387 - RNA, 19 nt, Artificial Sequence
  Description of Artificial Sequence: Synthetic oligonucleotide
  Antisense strand to SEQ ID NO: 2379386
uaugaggucacaaucuucc

SEQ ID NO: 2379388 - RNA, 19 nt, Artificial Sequence
  Description of Artificial Sequence: Synthetic oligonucleotide
  Sense strand starting at position 518 of SEQ ID NO: 1885963
guagucagccuaugagaaa

SEQ ID NO: 2379389 - RNA, 19 nt, Artificial Sequence
  Description of Artificial Sequence: Synthetic oligonucleotide
  Antisense strand to SEQ ID NO: 2379388
uuucucauaggcugacuac

SEQ ID NO: 2379390 - RNA, 19 nt, Artificial Sequence
  Description of Artificial Sequence: Synthetic oligonucleotide
  Sense strand starting at position 564 of SEQ ID NO: 1885963
auaaauugcucguugaaac

SEQ ID NO: 2379391 - RNA, 19 nt, Artificial Sequence
  Description of Artificial Sequence: Synthetic oligonucleotide
  Antisense strand to SEQ ID NO: 2379390
guuucaacgagcaauuuau

SEQ ID NO: 2379392 - RNA, 19 nt, Artificial Sequence
  Description of Artificial Sequence: Synthetic oligonucleotide
  Sense strand starting at position 565 of SEQ ID NO: 1885963
uaaauugcucguugaaacu

SEQ ID NO: 2379393 - RNA, 19 nt, Artificial Sequence
  Description of Artificial Sequence: Synthetic oligonucleotide
  Antisense strand to SEQ ID NO: 2379392
aguuucaacgagcaauuua

SEQ ID NO: 2379394 - RNA, 19 nt, Artificial Sequence
  Description of Artificial Sequence: Synthetic oligonucleotide
  Sense strand starting at position 1164 of SEQ ID NO: 1885963
ucaagucuguuuccagaag

SEQ ID NO: 2379395 - RNA, 19 nt, Artificial Sequence
  Description of Artificial Sequence: Synthetic oligonucleotide
  Antisense strand to SEQ ID NO: 2379394
cuucuggaaacagacuuga

SEQ ID NO: 2379396 - RNA, 19 nt, Artificial Sequence
  Description of Artificial Sequence: Synthetic oligonucleotide
  Sense strand starting at position 1238 of SEQ ID NO: 1885963
ugauguaguuugguccauu

SEQ ID NO: 2379397 - RNA, 19 nt, Artificial Sequence
  Description of Artificial Sequence: Synthetic oligonucleotide
  Antisense strand to SEQ ID NO: 2379396
aauggaccaaacuacauca

SEQ ID NO: 2379398 - RNA, 19 nt, Artificial Sequence
  Description of Artificial Sequence: Synthetic oligonucleotide
  Sense strand starting at position 1239 of SEQ ID NO: 1885963
gauguaguuugguccauug

SEQ ID NO: 2379399 - RNA, 19 nt, Artificial Sequence
  Description of Artificial Sequence: Synthetic oligonucleotide
  Antisense strand to SEQ ID NO: 2379398
caauggaccaaacuacauc

SEQ ID NO: 2379400 - RNA, 19 nt, Artificial Sequence
  Description of Artificial Sequence: Synthetic oligonucleotide
  Sense strand starting at position 1484 of SEQ ID NO: 1885963
gaaguaugugaggagucca

SEQ ID NO: 2379401 - RNA, 19 nt, Artificial Sequence
  Description of Artificial Sequence: Synthetic oligonucleotide
  Antisense strand to SEQ ID NO: 2379400
uggacuccucacauacuuc

SEQ ID NO: 2379402 - RNA, 19 nt, Artificial Sequence
  Description of Artificial Sequence: Synthetic oligonucleotide
  Sense strand starting at position 1520 of SEQ ID NO: 1885963
gggccuuuaccuggacuaa

SEQ ID NO: 2379403 - RNA, 19 nt, Artificial Sequence
  Description of Artificial Sequence: Synthetic oligonucleotide
  Antisense strand to SEQ ID NO: 2379402
uuaguccagguaaaggccc

SEQ ID NO: 2379404 - RNA, 19 nt, Artificial Sequence
  Description of Artificial Sequence: Synthetic oligonucleotide
  Sense strand starting at position 1521 of SEQ ID NO: 1885963
ggccuuuaccuggacuaaa

SEQ ID NO: 2379405 - RNA, 19 nt, Artificial Sequence
  Description of Artificial Sequence: Synthetic oligonucleotide
  Antisense strand to SEQ ID NO: 2379404
uuuaguccagguaaaggcc

SEQ ID NO: 2379406 - RNA, 19 nt, Artificial Sequence
  Description of Artificial Sequence: Synthetic oligonucleotide
  Sense strand starting at position 1657 of SEQ ID NO: 1885963
guaauuauaccguggaaau

SEQ ID NO: 2379407 - RNA, 19 nt, Artificial Sequence
  Description of Artificial Sequence: Synthetic oligonucleotide
  Antisense strand to SEQ ID NO: 2379406
auuuccacgguauaauuac

SEQ ID NO: 2379408 - RNA, 19 nt, Artificial Sequence
  Description of Artificial Sequence: Synthetic oligonucleotide
  Sense strand starting at position 1658 of SEQ ID NO: 1885963
uaauuauaccguggaaauu

SEQ ID NO: 2379409 - RNA, 19 nt, Artificial Sequence
  Description of Artificial Sequence: Synthetic oligonucleotide
  Antisense strand to SEQ ID NO: 2379408
aauuuccacgguauaauua

SEQ ID NO: 2379410 - RNA, 19 nt, Artificial Sequence
  Description of Artificial Sequence: Synthetic oligonucleotide
  Sense strand starting at position 2099 of SEQ ID NO: 1885963
ccuacauuccgauagguuu

SEQ ID NO: 2379411 - RNA, 19 nt, Artificial Sequence
  Description of Artificial Sequence: Synthetic oligonucleotide
  Antisense strand to SEQ ID NO: 2379410
aaaccuaucggaauguagg

SEQ ID NO: 2379412 - RNA, 19 nt, Artificial Sequence
  Description of Artificial Sequence: Synthetic oligonucleotide
  Sense strand starting at position 2186 of SEQ ID NO: 1885963
cagaguccagcucaggaua

SEQ ID NO: 2379413 - RNA, 19 nt, Artificial Sequence
  Description of Artificial Sequence: Synthetic oligonucleotide
  Antisense strand to SEQ ID NO: 2379412
uauccugagcuggacucug

SEQ ID NO: 2379414 - RNA, 19 nt, Artificial Sequence
  Description of Artificial Sequence: Synthetic oligonucleotide
  Sense strand starting at position 2208 of SEQ ID NO: 1885963
cggaaucuaccauauggua

SEQ ID NO: 2379415 - RNA, 19 nt, Artificial Sequence
  Description of Artificial Sequence: Synthetic oligonucleotide
  Antisense strand to SEQ ID NO: 2379414
uaccauaugguagauuccg

SEQ ID NO: 2379416 - RNA, 19 nt, Artificial Sequence
  Description of Artificial Sequence: Synthetic oligonucleotide
  Sense strand starting at position 2234 of SEQ ID NO: 1885963
cuuugcaaucagugaggaa

SEQ ID NO: 2379417 - RNA, 19 nt, Artificial Sequence
  Description of Artificial Sequence: Synthetic oligonucleotide
  Antisense strand to SEQ ID NO: 2379416
uuccucacugauugcaaag

SEQ ID NO: 2379418 - RNA, 19 nt, Artificial Sequence
  Description of Artificial Sequence: Synthetic oligonucleotide
  Sense strand starting at position 2257 of SEQ ID NO: 1885963
uagguuaggccucaaauca

SEQ ID NO: 2379419 - RNA, 19 nt, Artificial Sequence
  Description of Artificial Sequence: Synthetic oligonucleotide
  Antisense strand to SEQ ID NO: 2379418
ugauuugaggccuaaccua

SEQ ID NO: 2379420 - RNA, 19 nt, Artificial Sequence
  Description of Artificial Sequence: Synthetic oligonucleotide
  Sense strand starting at position 2534 of SEQ ID NO: 1885963
ggauaagauuaagacaaau

SEQ ID NO: 2379421 - RNA, 19 nt, Artificial Sequence
  Description of Artificial Sequence: Synthetic oligonucleotide
  Antisense strand to SEQ ID NO: 2379420
auuugucuuaaucuuaucc

SEQ ID NO: 2379422 - RNA, 19 nt, Artificial Sequence
  Description of Artificial Sequence: Synthetic oligonucleotide
  Sense strand starting at position 2551 of SEQ ID NO: 1885963
auagccaacugaguuuaaa

SEQ ID NO: 2379423 - RNA, 19 nt, Artificial Sequence
  Description of Artificial Sequence: Synthetic oligonucleotide
  Antisense strand to SEQ ID NO: 2379422
uuuaaacucaguuggcuau

SEQ ID NO: 2379424 - RNA, 19 nt, Artificial Sequence
  Description of Artificial Sequence: Synthetic oligonucleotide
  Sense strand starting at position 2628 of SEQ ID NO: 1885963
ucaagacaggcggaucauu

SEQ ID NO: 2379425 - RNA, 19 nt, Artificial Sequence
  Description of Artificial Sequence: Synthetic oligonucleotide
  Antisense strand to SEQ ID NO: 2379424
aaugauccgccugucuuga

SEQ ID NO: 2379426 - RNA, 19 nt, Artificial Sequence
  Description of Artificial Sequence: Synthetic oligonucleotide
  Sense strand starting at position 2712 of SEQ ID NO: 1885963
aaauuagcgagguauggua

SEQ ID NO: 2379427 - RNA, 19 nt, Artificial Sequence
  Description of Artificial Sequence: Synthetic oligonucleotide
  Antisense strand to SEQ ID NO: 2379426
uaccauaccucgcuaauuu

SEQ ID NO: 2379428 - RNA, 19 nt, Artificial Sequence
  Description of Artificial Sequence: Synthetic oligonucleotide
  Sense strand starting at position 2770 of SEQ ID NO: 1885963
ccgagaaucacgugaaccu

SEQ ID NO: 2379429 - RNA, 19 nt, Artificial Sequence
  Description of Artificial Sequence: Synthetic oligonucleotide
  Antisense strand to SEQ ID NO: 2379428
agguucacgugauucucgg

SEQ ID NO: 2379430 - RNA, 19 nt, Artificial Sequence
  Description of Artificial Sequence: Synthetic oligonucleotide
  Sense strand starting at position 3013 of SEQ ID NO: 1885963
acauaaaguuuaucacgaa

SEQ ID NO: 2379431 - RNA, 19 nt, Artificial Sequence
  Description of Artificial Sequence: Synthetic oligonucleotide
  Antisense strand to SEQ ID NO: 2379430
uucgugauaaacuuuaugu

SEQ ID NO: 2379432 - RNA, 19 nt, Artificial Sequence
  Description of Artificial Sequence: Synthetic oligonucleotide
  Sense strand starting at position 3017 of SEQ ID NO: 1885963
aaaguuuaucacgaaggua

SEQ ID NO: 2379433 - RNA, 19 nt, Artificial Sequence
  Description of Artificial Sequence: Synthetic oligonucleotide
  Antisense strand to SEQ ID NO: 2379432
uaccuucgugauaaacuuu

SEQ ID NO: 2379434 - RNA, 19 nt, Artificial Sequence
  Description of Artificial Sequence: Synthetic oligonucleotide
  Sense strand starting at position 3020 of SEQ ID NO: 1885963
guuuaucacgaagguacaa

SEQ ID NO: 2379435 - RNA, 19 nt, Artificial Sequence
  Description of Artificial Sequence: Synthetic oligonucleotide
  Antisense strand to SEQ ID NO: 2379434
uuguaccuucgugauaaac

SEQ ID NO: 2379436 - RNA, 19 nt, Artificial Sequence
  Description of Artificial Sequence: Synthetic oligonucleotide
  Sense strand starting at position 3047 of SEQ ID NO: 1885963
guauuauuccagcacagaa

SEQ ID NO: 2379437 - RNA, 19 nt, Artificial Sequence
  Description of Artificial Sequence: Synthetic oligonucleotide
  Antisense strand to SEQ ID NO: 2379436
uucugugcuggaauaauac

SEQ ID NO: 2379438 - RNA, 19 nt, Artificial Sequence
  Description of Artificial Sequence: Synthetic oligonucleotide
  Sense strand starting at position 3113 of SEQ ID NO: 1885963
cacuguauccagggaguua

SEQ ID NO: 2379439 - RNA, 19 nt, Artificial Sequence
  Description of Artificial Sequence: Synthetic oligonucleotide
  Antisense strand to SEQ ID NO: 2379438
uaacucccuggauacagug

SEQ ID NO: 2379440 - RNA, 19 nt, Artificial Sequence
  Description of Artificial Sequence: Synthetic oligonucleotide
  Sense strand starting at position 3114 of SEQ ID NO: 1885963
acuguauccagggaguuau

SEQ ID NO: 2379441 - RNA, 19 nt, Artificial Sequence
  Description of Artificial Sequence: Synthetic oligonucleotide
  Antisense strand to SEQ ID NO: 2379440
auaacucccuggauacagu

SEQ ID NO: 2379442 - RNA, 19 nt, Artificial Sequence
  Description of Artificial Sequence: Synthetic oligonucleotide
  Sense strand starting at position 3174 of SEQ ID NO: 1885963
auaaaugaugcucagccaa

SEQ ID NO: 2379443 - RNA, 19 nt, Artificial Sequence
  Description of Artificial Sequence: Synthetic oligonucleotide
  Antisense strand to SEQ ID NO: 2379442
uuggcugagcaucauuuau

SEQ ID NO: 2379444 - RNA, 19 nt, Artificial Sequence
  Description of Artificial Sequence: Synthetic oligonucleotide
  Sense strand starting at position 3208 of SEQ ID NO: 1885963
gagaaacguuaagcuagau

SEQ ID NO: 2379445 - RNA, 19 nt, Artificial Sequence
  Description of Artificial Sequence: Synthetic oligonucleotide
  Antisense strand to SEQ ID NO: 2379444
aucuagcuuaacguuucuc

SEQ ID NO: 2379446 - RNA, 19 nt, Artificial Sequence
  Description of Artificial Sequence: Synthetic oligonucleotide
  Sense strand starting at position 3220 of SEQ ID NO: 1885963
gcuagauuucucugucaca

SEQ ID NO: 2379447 - RNA, 19 nt, Artificial Sequence
  Description of Artificial Sequence: Synthetic oligonucleotide
  Antisense strand to SEQ ID NO: 2379446
ugugacagagaaaucuagc

SEQ ID NO: 2379448 - RNA, 19 nt, Artificial Sequence
  Description of Artificial Sequence: Synthetic oligonucleotide
  Sense strand starting at position 3223 of SEQ ID NO: 1885963
agauuucucugucacaaga

SEQ ID NO: 2379449 - RNA, 19 nt, Artificial Sequence
  Description of Artificial Sequence: Synthetic oligonucleotide
  Antisense strand to SEQ ID NO: 2379448
ucuugugacagagaaaucu

SEQ ID NO: 2379450 - RNA, 19 nt, Artificial Sequence
  Description of Artificial Sequence: Synthetic oligonucleotide
  Sense strand starting at position 3748 of SEQ ID NO: 1885963
gaaguucuguagcuccauu

SEQ ID NO: 2379451 - RNA, 19 nt, Artificial Sequence
  Description of Artificial Sequence: Synthetic oligonucleotide
  Antisense strand to SEQ ID NO: 2379450
aauggagcuacagaacuuc

SEQ ID NO: 2379452 - RNA, 19 nt, Artificial Sequence
  Description of Artificial Sequence: Synthetic oligonucleotide
  Sense strand starting at position 3831 of SEQ ID NO: 1885963
ggcagucagaaguggguaa

SEQ ID NO: 2379453 - RNA, 19 nt, Artificial Sequence
  Description of Artificial Sequence: Synthetic oligonucleotide
  Antisense strand to SEQ ID NO: 2379452
uuacccacuucugacugcc

SEQ ID NO: 2379454 - RNA, 19 nt, Artificial Sequence
  Description of Artificial Sequence: Synthetic oligonucleotide
  Sense strand starting at position 3864 of SEQ ID NO: 1885963
aagaguacugaguguuaac

SEQ ID NO: 2379455 - RNA, 19 nt, Artificial Sequence
  Description of Artificial Sequence: Synthetic oligonucleotide
  Antisense strand to SEQ ID NO: 2379454
guuaacacucaguacucuu

SEQ ID NO: 2379456 - RNA, 19 nt, Artificial Sequence
  Description of Artificial Sequence: Synthetic oligonucleotide
  Sense strand starting at position 3957 of SEQ ID NO: 1885963
uuacaaagcguaggagaua

SEQ ID NO: 2379457 - RNA, 19 nt, Artificial Sequence
  Description of Artificial Sequence: Synthetic oligonucleotide
  Antisense strand to SEQ ID NO: 2379456
uaucuccuacgcuuuguaa

SEQ ID NO: 2379458 - RNA, 19 nt, Artificial Sequence
  Description of Artificial Sequence: Synthetic oligonucleotide
  Sense strand starting at position 3962 of SEQ ID NO: 1885963
aagcguaggagauaaagua

SEQ ID NO: 2379459 - RNA, 19 nt, Artificial Sequence
  Description of Artificial Sequence: Synthetic oligonucleotide
  Antisense strand to SEQ ID NO: 2379458
uacuuuaucuccuacgcuu

SEQ ID NO: 2379460 - RNA, 19 nt, Artificial Sequence
  Description of Artificial Sequence: Synthetic oligonucleotide
  Sense strand starting at position 3970 of SEQ ID NO: 1885963
gagauaaaguaucuaugug

SEQ ID NO: 2379461 - RNA, 19 nt, Artificial Sequence
  Description of Artificial Sequence: Synthetic oligonucleotide
  Antisense strand to SEQ ID NO: 2379460
cacauagauacuuuaucuc

SEQ ID NO: 2379462 - RNA, 19 nt, Artificial Sequence
  Description of Artificial Sequence: Synthetic oligonucleotide
  Sense strand starting at position 811 of SEQ ID NO: 1885964
auuagcuauuggucaggaa

SEQ ID NO: 2379463 - RNA, 19 nt, Artificial Sequence
  Description of Artificial Sequence: Synthetic oligonucleotide
  Antisense strand to SEQ ID NO: 2379462
uuccugaccaauagcuaau

SEQ ID NO: 2379464 - RNA, 19 nt, Artificial Sequence
  Description of Artificial Sequence: Synthetic oligonucleotide
  Sense strand starting at position 812 of SEQ ID NO: 1885964
uuagcuauuggucaggaau

SEQ ID NO: 2379465 - RNA, 19 nt, Artificial Sequence
  Description of Artificial Sequence: Synthetic oligonucleotide
  Antisense strand to SEQ ID NO: 2379464
auuccugaccaauagcuaa

SEQ ID NO: 2379466 - RNA, 19 nt, Artificial Sequence
  Description of Artificial Sequence: Synthetic oligonucleotide
  Sense strand starting at position 815 of SEQ ID NO: 1885964
gcuauuggucaggaauauu

SEQ ID NO: 2379467 - RNA, 19 nt, Artificial Sequence
  Description of Artificial Sequence: Synthetic oligonucleotide
  Antisense strand to SEQ ID NO: 2379466
aauauuccugaccaauagc

SEQ ID NO: 2379468 - RNA, 19 nt, Artificial Sequence
  Description of Artificial Sequence: Synthetic oligonucleotide
  Sense strand starting at position 914 of SEQ ID NO: 1885964
ggcucucaccuggacagua

SEQ ID NO: 2379469 - RNA, 19 nt, Artificial Sequence
  Description of Artificial Sequence: Synthetic oligonucleotide
  Antisense strand to SEQ ID NO: 2379468
uacuguccaggugagagcc

SEQ ID NO: 2379470 - RNA, 19 nt, Artificial Sequence
  Description of Artificial Sequence: Synthetic oligonucleotide
  Sense strand starting at position 1053 of SEQ ID NO: 1885964
cucuuaauucuccaccgga

SEQ ID NO: 2379471 - RNA, 19 nt, Artificial Sequence
  Description of Artificial Sequence: Synthetic oligonucleotide
  Antisense strand to SEQ ID NO: 2379470
uccgguggagaauuaagag

SEQ ID NO: 2379472 - RNA, 19 nt, Artificial Sequence
  Description of Artificial Sequence: Synthetic oligonucleotide
  Sense strand starting at position 1078 of SEQ ID NO: 1885964
ggcugccuuccucagggau

SEQ ID NO: 2379473 - RNA, 19 nt, Artificial Sequence
  Description of Artificial Sequence: Synthetic oligonucleotide
  Antisense strand to SEQ ID NO: 2379472
aucccugaggaaggcagcc

SEQ ID NO: 2379474 - RNA, 19 nt, Artificial Sequence
  Description of Artificial Sequence: Synthetic oligonucleotide
  Sense strand starting at position 1116 of SEQ ID NO: 1885964
cucgucuuccuccaagacu

SEQ ID NO: 2379475 - RNA, 19 nt, Artificial Sequence
  Description of Artificial Sequence: Synthetic oligonucleotide
  Antisense strand to SEQ ID NO: 2379474
agucuuggaggaagacgag

SEQ ID NO: 2379476 - RNA, 19 nt, Artificial Sequence
  Description of Artificial Sequence: Synthetic oligonucleotide
  Sense strand starting at position 1671 of SEQ ID NO: 1885964
guccuaguccaauaggguu

SEQ ID NO: 2379477 - RNA, 19 nt, Artificial Sequence
  Description of Artificial Sequence: Synthetic oligonucleotide
  Antisense strand to SEQ ID NO: 2379476
aacccuauuggacuaggac

SEQ ID NO: 2379478 - RNA, 19 nt, Artificial Sequence
  Description of Artificial Sequence: Synthetic oligonucleotide
  Sense strand starting at position 1745 of SEQ ID NO: 1885964
ccggguaagacucacacuu

SEQ ID NO: 2379479 - RNA, 19 nt, Artificial Sequence
  Description of Artificial Sequence: Synthetic oligonucleotide
  Antisense strand to SEQ ID NO: 2379478
aagugugagucuuacccgg

SEQ ID NO: 2379480 - RNA, 19 nt, Artificial Sequence
  Description of Artificial Sequence: Synthetic oligonucleotide
  Sense strand starting at position 1824 of SEQ ID NO: 1885964
cauggucacugagcucaau

SEQ ID NO: 2379481 - RNA, 19 nt, Artificial Sequence
  Description of Artificial Sequence: Synthetic oligonucleotide
  Antisense strand to SEQ ID NO: 2379480
auugagcucagugaccaug

SEQ ID NO: 2379482 - RNA, 19 nt, Artificial Sequence
  Description of Artificial Sequence: Synthetic oligonucleotide
  Sense strand starting at position 1880 of SEQ ID NO: 1885964
gagcuugugcuucugccaa

SEQ ID NO: 2379483 - RNA, 19 nt, Artificial Sequence
  Description of Artificial Sequence: Synthetic oligonucleotide
  Antisense strand to SEQ ID NO: 2379482
uuggcagaagcacaagcuc

SEQ ID NO: 2379484 - RNA, 19 nt, Artificial Sequence
  Description of Artificial Sequence: Synthetic oligonucleotide
  Sense strand starting at position 1910 of SEQ ID NO: 1885964
ucuacuagaugggucagau

SEQ ID NO: 2379485 - RNA, 19 nt, Artificial Sequence
  Description of Artificial Sequence: Synthetic oligonucleotide
  Antisense strand to SEQ ID NO: 2379484
aucugacccaucuaguaga

SEQ ID NO: 2379486 - RNA, 19 nt, Artificial Sequence
  Description of Artificial Sequence: Synthetic oligonucleotide
  Sense strand starting at position 1931 of SEQ ID NO: 1885964
guucucugacuugaugcaa

SEQ ID NO: 2379487 - RNA, 19 nt, Artificial Sequence
  Description of Artificial Sequence: Synthetic oligonucleotide
  Antisense strand to SEQ ID NO: 2379486
uugcaucaagucagagaac

SEQ ID NO: 2379488 - RNA, 19 nt, Artificial Sequence
  Description of Artificial Sequence: Synthetic oligonucleotide
  Sense strand starting at position 1980 of SEQ ID NO: 1885964
gcaucugagucagugggaa

SEQ ID NO: 2379489 - RNA, 19 nt, Artificial Sequence
  Description of Artificial Sequence: Synthetic oligonucleotide
  Antisense strand to SEQ ID NO: 2379488
uucccacugacucagaugc

SEQ ID NO: 2379490 - RNA, 19 nt, Artificial Sequence
  Description of Artificial Sequence: Synthetic oligonucleotide
  Sense strand starting at position 1982 of SEQ ID NO: 1885964
aucugagucagugggaaug

SEQ ID NO: 2379491 - RNA, 19 nt, Artificial Sequence
  Description of Artificial Sequence: Synthetic oligonucleotide
  Antisense strand to SEQ ID NO: 2379490
cauucccacugacucagau

SEQ ID NO: 2379492 - RNA, 19 nt, Artificial Sequence
  Description of Artificial Sequence: Synthetic oligonucleotide
  Sense strand starting at position 2191 of SEQ ID NO: 1885964
ucaaguguacaaugaggau

SEQ ID NO: 2379493 - RNA, 19 nt, Artificial Sequence
  Description of Artificial Sequence: Synthetic oligonucleotide
  Antisense strand to SEQ ID NO: 2379492
auccucauuguacacuuga

SEQ ID NO: 2379494 - RNA, 19 nt, Artificial Sequence
  Description of Artificial Sequence: Synthetic oligonucleotide
  Sense strand starting at position 2234 of SEQ ID NO: 1885964
cuucucugugauggacaga

SEQ ID NO: 2379495 - RNA, 19 nt, Artificial Sequence
  Description of Artificial Sequence: Synthetic oligonucleotide
  Antisense strand to SEQ ID NO: 2379494
ucuguccaucacagagaag

SEQ ID NO: 2379496 - RNA, 19 nt, Artificial Sequence
  Description of Artificial Sequence: Synthetic oligonucleotide
  Sense strand starting at position 2332 of SEQ ID NO: 1885964
aaaguugccgguggaauuu

SEQ ID NO: 2379497 - RNA, 19 nt, Artificial Sequence
  Description of Artificial Sequence: Synthetic oligonucleotide
  Antisense strand to SEQ ID NO: 2379496
aaauuccaccggcaacuuu

SEQ ID NO: 2379498 - RNA, 19 nt, Artificial Sequence
  Description of Artificial Sequence: Synthetic oligonucleotide
  Sense strand starting at position 2380 of SEQ ID NO: 1885964
ggagauuagccucgauuau

SEQ ID NO: 2379499 - RNA, 19 nt, Artificial Sequence
  Description of Artificial Sequence: Synthetic oligonucleotide
  Antisense strand to SEQ ID NO: 2379498
auaaucgaggcuaaucucc

SEQ ID NO: 2379500 - RNA, 19 nt, Artificial Sequence
  Description of Artificial Sequence: Synthetic oligonucleotide
  Sense strand starting at position 2381 of SEQ ID NO: 1885964
gagauuagccucgauuauc

SEQ ID NO: 2379501 - RNA, 19 nt, Artificial Sequence
  Description of Artificial Sequence: Synthetic oligonucleotide
  Antisense strand to SEQ ID NO: 2379500
gauaaucgaggcuaaucuc

SEQ ID NO: 2379502 - RNA, 19 nt, Artificial Sequence
  Description of Artificial Sequence: Synthetic oligonucleotide
  Sense strand starting at position 2393 of SEQ ID NO: 1885964
gauuaucagggugagcuua

SEQ ID NO: 2379503 - RNA, 19 nt, Artificial Sequence
  Description of Artificial Sequence: Synthetic oligonucleotide
  Antisense strand to SEQ ID NO: 2379502
uaagcucacccugauaauc

SEQ ID NO: 2379504 - RNA, 19 nt, Artificial Sequence
  Description of Artificial Sequence: Synthetic oligonucleotide
  Sense strand starting at position 2513 of SEQ ID NO: 1885964
aggccaugagccgaaggau

SEQ ID NO: 2379505 - RNA, 19 nt, Artificial Sequence
  Description of Artificial Sequence: Synthetic oligonucleotide
  Antisense strand to SEQ ID NO: 2379504
auccuucggcucauggccu

SEQ ID NO: 2379506 - RNA, 19 nt, Artificial Sequence
  Description of Artificial Sequence: Synthetic oligonucleotide
  Sense strand starting at position 2616 of SEQ ID NO: 1885964
gaacuuugccaguaguuug

SEQ ID NO: 2379507 - RNA, 19 nt, Artificial Sequence
  Description of Artificial Sequence: Synthetic oligonucleotide
  Antisense strand to SEQ ID NO: 2379506
caaacuacuggcaaaguuc

SEQ ID NO: 2379508 - RNA, 19 nt, Artificial Sequence
  Description of Artificial Sequence: Synthetic oligonucleotide
  Sense strand starting at position 2884 of SEQ ID NO: 1885964
acacgaguacaauguccua

SEQ ID NO: 2379509 - RNA, 19 nt, Artificial Sequence
  Description of Artificial Sequence: Synthetic oligonucleotide
  Antisense strand to SEQ ID NO: 2379508
uaggacauuguacucgugu

SEQ ID NO: 2379510 - RNA, 19 nt, Artificial Sequence
  Description of Artificial Sequence: Synthetic oligonucleotide
  Sense strand starting at position 3065 of SEQ ID NO: 1885964
gggagaugcugccuagaau

SEQ ID NO: 2379511 - RNA, 19 nt, Artificial Sequence
  Description of Artificial Sequence: Synthetic oligonucleotide
  Antisense strand to SEQ ID NO: 2379510
auucuaggcagcaucuccc

SEQ ID NO: 2379512 - RNA, 19 nt, Artificial Sequence
  Description of Artificial Sequence: Synthetic oligonucleotide
  Sense strand starting at position 3066 of SEQ ID NO: 1885964
ggagaugcugccuagaauc

SEQ ID NO: 2379513 - RNA, 19 nt, Artificial Sequence
  Description of Artificial Sequence: Synthetic oligonucleotide
  Antisense strand to SEQ ID NO: 2379512
gauucuaggcagcaucucc

SEQ ID NO: 2379514 - RNA, 19 nt, Artificial Sequence
  Description of Artificial Sequence: Synthetic oligonucleotide
  Sense strand starting at position 3076 of SEQ ID NO: 1885964
ccuagaauccuugaugccu

SEQ ID NO: 2379515 - RNA, 19 nt, Artificial Sequence
  Description of Artificial Sequence: Synthetic oligonucleotide
  Antisense strand to SEQ ID NO: 2379514
aggcaucaaggauucuagg

SEQ ID NO: 2379516 - RNA, 19 nt, Artificial Sequence
  Description of Artificial Sequence: Synthetic oligonucleotide
  Sense strand starting at position 3101 of SEQ ID NO: 1885964
uuagacuggaguuggauua

SEQ ID NO: 2379517 - RNA, 19 nt, Artificial Sequence
  Description of Artificial Sequence: Synthetic oligonucleotide
  Antisense strand to SEQ ID NO: 2379516
uaauccaacuccagucuaa

SEQ ID NO: 2379518 - RNA, 19 nt, Artificial Sequence
  Description of Artificial Sequence: Synthetic oligonucleotide
  Sense strand starting at position 3208 of SEQ ID NO: 1885964
ugguaucagacuugaugca

SEQ ID NO: 2379519 - RNA, 19 nt, Artificial Sequence
  Description of Artificial Sequence: Synthetic oligonucleotide
  Antisense strand to SEQ ID NO: 2379518
ugcaucaagucugauacca

SEQ ID NO: 2379520 - RNA, 19 nt, Artificial Sequence
  Description of Artificial Sequence: Synthetic oligonucleotide
  Sense strand starting at position 3359 of SEQ ID NO: 1885964
uuuguuagagauggcuaga

SEQ ID NO: 2379521 - RNA, 19 nt, Artificial Sequence
  Description of Artificial Sequence: Synthetic oligonucleotide
  Antisense strand to SEQ ID NO: 2379520
ucuagccaucucuaacaaa

SEQ ID NO: 2379522 - RNA, 19 nt, Artificial Sequence
  Description of Artificial Sequence: Synthetic oligonucleotide
  Sense strand starting at position 3496 of SEQ ID NO: 1885964
acugauagauagucuuuau

SEQ ID NO: 2379523 - RNA, 19 nt, Artificial Sequence
  Description of Artificial Sequence: Synthetic oligonucleotide
  Antisense strand to SEQ ID NO: 2379522
auaaagacuaucuaucagu

SEQ ID NO: 2379524 - RNA, 19 nt, Artificial Sequence
  Description of Artificial Sequence: Synthetic oligonucleotide
  Sense strand starting at position 3499 of SEQ ID NO: 1885964
gauagauagucuuuaugua

SEQ ID NO: 2379525 - RNA, 19 nt, Artificial Sequence
  Description of Artificial Sequence: Synthetic oligonucleotide
  Antisense strand to SEQ ID NO: 2379524
uacauaaagacuaucuauc

SEQ ID NO: 2379526 - RNA, 19 nt, Artificial Sequence
  Description of Artificial Sequence: Synthetic oligonucleotide
  Sense strand starting at position 3500 of SEQ ID NO: 1885964
auagauagucuuuauguag

SEQ ID NO: 2379527 - RNA, 19 nt, Artificial Sequence
  Description of Artificial Sequence: Synthetic oligonucleotide
  Antisense strand to SEQ ID NO: 2379526
cuacauaaagacuaucuau

SEQ ID NO: 2379528 - RNA, 19 nt, Artificial Sequence
  Description of Artificial Sequence: Synthetic oligonucleotide
  Sense strand starting at position 3503 of SEQ ID NO: 1885964
gauagucuuuauguagaug

SEQ ID NO: 2379529 - RNA, 19 nt, Artificial Sequence
  Description of Artificial Sequence: Synthetic oligonucleotide
  Antisense strand to SEQ ID NO: 2379528
caucuacauaaagacuauc

SEQ ID NO: 2379530 - RNA, 19 nt, Artificial Sequence
  Description of Artificial Sequence: Synthetic oligonucleotide
  Sense strand starting at position 3506 of SEQ ID NO: 1885964
agucuuuauguagaugaau

SEQ ID NO: 2379531 - RNA, 19 nt, Artificial Sequence
  Description of Artificial Sequence: Synthetic oligonucleotide
  Antisense strand to SEQ ID NO: 2379530
auucaucuacauaaagacu

SEQ ID NO: 2379532 - RNA, 19 nt, Artificial Sequence
  Description of Artificial Sequence: Synthetic oligonucleotide
  Sense strand starting at position 3530 of SEQ ID NO: 1885964
aaacucaaacgugagaguu

SEQ ID NO: 2379533 - RNA, 19 nt, Artificial Sequence
  Description of Artificial Sequence: Synthetic oligonucleotide
  Antisense strand to SEQ ID NO: 2379532
aacucucacguuugaguuu

SEQ ID NO: 2379534 - RNA, 19 nt, Artificial Sequence
  Description of Artificial Sequence: Synthetic oligonucleotide
  Sense strand starting at position 3620 of SEQ ID NO: 1885964
auauguugcguggaagacu

SEQ ID NO: 2379535 - RNA, 19 nt, Artificial Sequence
  Description of Artificial Sequence: Synthetic oligonucleotide
  Antisense strand to SEQ ID NO: 2379534
agucuuccacgcaacauau

SEQ ID NO: 2379536 - RNA, 19 nt, Artificial Sequence
  Description of Artificial Sequence: Synthetic oligonucleotide
  Sense strand starting at position 3678 of SEQ ID NO: 1885964
cugaauagugacugcugaa

SEQ ID NO: 2379537 - RNA, 19 nt, Artificial Sequence
  Description of Artificial Sequence: Synthetic oligonucleotide
  Antisense strand to SEQ ID NO: 2379536
uucagcagucacuauucag

SEQ ID NO: 2379538 - RNA, 19 nt, Artificial Sequence
  Description of Artificial Sequence: Synthetic oligonucleotide
  Sense strand starting at position 3735 of SEQ ID NO: 1885964
uuccuauuagauggaaugu

SEQ ID NO: 2379539 - RNA, 19 nt, Artificial Sequence
  Description of Artificial Sequence: Synthetic oligonucleotide
  Antisense strand to SEQ ID NO: 2379538
acauuccaucuaauaggaa

SEQ ID NO: 2379540 - RNA, 19 nt, Artificial Sequence
  Description of Artificial Sequence: Synthetic oligonucleotide
  Sense strand starting at position 3838 of SEQ ID NO: 1885964
accacacauuuagaguuau

SEQ ID NO: 2379541 - RNA, 19 nt, Artificial Sequence
  Description of Artificial Sequence: Synthetic oligonucleotide
  Antisense strand to SEQ ID NO: 2379540
auaacucuaaauguguggu

SEQ ID NO: 2379542 - RNA, 19 nt, Artificial Sequence
  Description of Artificial Sequence: Synthetic oligonucleotide
  Sense strand starting at position 181 of SEQ ID NO: 1885966
ggguguaaagguuagcuaa

SEQ ID NO: 2379543 - RNA, 19 nt, Artificial Sequence
  Description of Artificial Sequence: Synthetic oligonucleotide
  Antisense strand to SEQ ID NO: 2379542
uuagcuaaccuuuacaccc

SEQ ID NO: 2379544 - RNA, 19 nt, Artificial Sequence
  Description of Artificial Sequence: Synthetic oligonucleotide
  Sense strand starting at position 299 of SEQ ID NO: 1885966
uggcguguccauggaugua

SEQ ID NO: 2379545 - RNA, 19 nt, Artificial Sequence
  Description of Artificial Sequence: Synthetic oligonucleotide
  Antisense strand to SEQ ID NO: 2379544
uacauccauggacacgcca

SEQ ID NO: 2379546 - RNA, 19 nt, Artificial Sequence
  Description of Artificial Sequence: Synthetic oligonucleotide
  Sense strand starting at position 355 of SEQ ID NO: 1885966
acccucagucacugucaaa

SEQ ID NO: 2379547 - RNA, 19 nt, Artificial Sequence
  Description of Artificial Sequence: Synthetic oligonucleotide
  Antisense strand to SEQ ID NO: 2379546
uuugacagugacugagggu

SEQ ID NO: 2379548 - RNA, 19 nt, Artificial Sequence
  Description of Artificial Sequence: Synthetic oligonucleotide
  Sense strand starting at position 398 of SEQ ID NO: 1885966
gcaccauccugagaaucug

SEQ ID NO: 2379549 - RNA, 19 nt, Artificial Sequence
  Description of Artificial Sequence: Synthetic oligonucleotide
  Antisense strand to SEQ ID NO: 2379548
cagauucucaggauggugc

SEQ ID NO: 2379550 - RNA, 19 nt, Artificial Sequence
  Description of Artificial Sequence: Synthetic oligonucleotide
  Sense strand starting at position 406 of SEQ ID NO: 1885966
cugagaaucugcugagcuu

SEQ ID NO: 2379551 - RNA, 19 nt, Artificial Sequence
  Description of Artificial Sequence: Synthetic oligonucleotide
  Antisense strand to SEQ ID NO: 2379550
aagcucagcagauucucag

SEQ ID NO: 2379552 - RNA, 19 nt, Artificial Sequence
  Description of Artificial Sequence: Synthetic oligonucleotide
  Sense strand starting at position 407 of SEQ ID NO: 1885966
ugagaaucugcugagcuuu

SEQ ID NO: 2379553 - RNA, 19 nt, Artificial Sequence
  Description of Artificial Sequence: Synthetic oligonucleotide
  Antisense strand to SEQ ID NO: 2379552
aaagcucagcagauucuca

SEQ ID NO: 2379554 - RNA, 19 nt, Artificial Sequence
  Description of Artificial Sequence: Synthetic oligonucleotide
  Sense strand starting at position 415 of SEQ ID NO: 1885966
ugcugagcuuucuaacuag

SEQ ID NO: 2379555 - RNA, 19 nt, Artificial Sequence
  Description of Artificial Sequence: Synthetic oligonucleotide
  Antisense strand to SEQ ID NO: 2379554
cuaguuagaaagcucagca

SEQ ID NO: 2379556 - RNA, 19 nt, Artificial Sequence
  Description of Artificial Sequence: Synthetic oligonucleotide
  Sense strand starting at position 418 of SEQ ID NO: 1885966
ugagcuuucuaacuaguuu

SEQ ID NO: 2379557 - RNA, 19 nt, Artificial Sequence
  Description of Artificial Sequence: Synthetic oligonucleotide
  Antisense strand to SEQ ID NO: 2379556
aaacuaguuagaaagcuca

SEQ ID NO: 2379558 - RNA, 19 nt, Artificial Sequence
  Description of Artificial Sequence: Synthetic oligonucleotide
  Sense strand starting at position 429 of SEQ ID NO: 1885966
acuaguuuaucuguuguuu

SEQ ID NO: 2379559 - RNA, 19 nt, Artificial Sequence
  Description of Artificial Sequence: Synthetic oligonucleotide
  Antisense strand to SEQ ID NO: 2379558
aaacaacagauaaacuagu

SEQ ID NO: 2379560 - RNA, 19 nt, Artificial Sequence
  Description of Artificial Sequence: Synthetic oligonucleotide
  Sense strand starting at position 437 of SEQ ID NO: 1885966
aucuguuguuugcagugaa

SEQ ID NO: 2379561 - RNA, 19 nt, Artificial Sequence
  Description of Artificial Sequence: Synthetic oligonucleotide
  Antisense strand to SEQ ID NO: 2379560
uucacugcaaacaacagau

SEQ ID NO: 2379562 - RNA, 19 nt, Artificial Sequence
  Description of Artificial Sequence: Synthetic oligonucleotide
  Sense strand starting at position 440 of SEQ ID NO: 1885966
uguuguuugcagugaaaga

SEQ ID NO: 2379563 - RNA, 19 nt, Artificial Sequence
  Description of Artificial Sequence: Synthetic oligonucleotide
  Antisense strand to SEQ ID NO: 2379562
ucuuucacugcaaacaaca

SEQ ID NO: 2379564 - RNA, 19 nt, Artificial Sequence
  Description of Artificial Sequence: Synthetic oligonucleotide
  Sense strand starting at position 441 of SEQ ID NO: 1885966
guuguuugcagugaaagau

SEQ ID NO: 2379565 - RNA, 19 nt, Artificial Sequence
  Description of Artificial Sequence: Synthetic oligonucleotide
  Antisense strand to SEQ ID NO: 2379564
aucuuucacugcaaacaac

SEQ ID NO: 2379566 - RNA, 19 nt, Artificial Sequence
  Description of Artificial Sequence: Synthetic oligonucleotide
  Sense strand starting at position 450 of SEQ ID NO: 1885966
agugaaagaugcccugaaa

SEQ ID NO: 2379567 - RNA, 19 nt, Artificial Sequence
  Description of Artificial Sequence: Synthetic oligonucleotide
  Antisense strand to SEQ ID NO: 2379566
uuucagggcaucuuucacu

SEQ ID NO: 2379568 - RNA, 19 nt, Artificial Sequence
  Description of Artificial Sequence: Synthetic oligonucleotide
  Sense strand starting at position 550 of SEQ ID NO: 1885966
gggacucuaucuguaaaug

SEQ ID NO: 2379569 - RNA, 19 nt, Artificial Sequence
  Description of Artificial Sequence: Synthetic oligonucleotide
  Antisense strand to SEQ ID NO: 2379568
cauuuacagauagaguccc

SEQ ID NO: 2379570 - RNA, 19 nt, Artificial Sequence
  Description of Artificial Sequence: Synthetic oligonucleotide
  Sense strand starting at position 559 of SEQ ID NO: 1885966
ucuguaaaugcgggcucaa

SEQ ID NO: 2379571 - RNA, 19 nt, Artificial Sequence
  Description of Artificial Sequence: Synthetic oligonucleotide
  Antisense strand to SEQ ID NO: 2379570
uugagcccgcauuuacaga

SEQ ID NO: 2379572 - RNA, 19 nt, Artificial Sequence
  Description of Artificial Sequence: Synthetic oligonucleotide
  Sense strand starting at position 729 of SEQ ID NO: 1885966
ccgucaaagccugacucau

SEQ ID NO: 2379573 - RNA, 19 nt, Artificial Sequence
  Description of Artificial Sequence: Synthetic oligonucleotide
  Antisense strand to SEQ ID NO: 2379572
augagucaggcuuugacgg

SEQ ID NO: 2379574 - RNA, 19 nt, Artificial Sequence
  Description of Artificial Sequence: Synthetic oligonucleotide
  Sense strand starting at position 731 of SEQ ID NO: 1885966
gucaaagccugacucauua

SEQ ID NO: 2379575 - RNA, 19 nt, Artificial Sequence
  Description of Artificial Sequence: Synthetic oligonucleotide
  Antisense strand to SEQ ID NO: 2379574
uaaugagucaggcuuugac

SEQ ID NO: 2379576 - RNA, 19 nt, Artificial Sequence
  Description of Artificial Sequence: Synthetic oligonucleotide
  Sense strand starting at position 741 of SEQ ID NO: 1885966
gacucauuacuggaugcca

SEQ ID NO: 2379577 - RNA, 19 nt, Artificial Sequence
  Description of Artificial Sequence: Synthetic oligonucleotide
  Antisense strand to SEQ ID NO: 2379576
uggcauccaguaaugaguc

SEQ ID NO: 2379578 - RNA, 19 nt, Artificial Sequence
  Description of Artificial Sequence: Synthetic oligonucleotide
  Sense strand starting at position 963 of SEQ ID NO: 1885966
uugauuaacaaacgugaug

SEQ ID NO: 2379579 - RNA, 19 nt, Artificial Sequence
  Description of Artificial Sequence: Synthetic oligonucleotide
  Antisense strand to SEQ ID NO: 2379578
caucacguuuguuaaucaa

SEQ ID NO: 2379580 - RNA, 19 nt, Artificial Sequence
  Description of Artificial Sequence: Synthetic oligonucleotide
  Sense strand starting at position 974 of SEQ ID NO: 1885966
acgugauggcuucacugca

SEQ ID NO: 2379581 - RNA, 19 nt, Artificial Sequence
  Description of Artificial Sequence: Synthetic oligonucleotide
  Antisense strand to SEQ ID NO: 2379580
ugcagugaagccaucacgu

SEQ ID NO: 2379582 - RNA, 19 nt, Artificial Sequence
  Description of Artificial Sequence: Synthetic oligonucleotide
  Sense strand starting at position 1080 of SEQ ID NO: 1885966
gcaucuguuucggucugau

SEQ ID NO: 2379583 - RNA, 19 nt, Artificial Sequence
  Description of Artificial Sequence: Synthetic oligonucleotide
  Antisense strand to SEQ ID NO: 2379582
aucagaccgaaacagaugc

SEQ ID NO: 2379584 - RNA, 19 nt, Artificial Sequence
  Description of Artificial Sequence: Synthetic oligonucleotide
  Sense strand starting at position 1083 of SEQ ID NO: 1885966
ucuguuucggucugaugag

SEQ ID NO: 2379585 - RNA, 19 nt, Artificial Sequence
  Description of Artificial Sequence: Synthetic oligonucleotide
  Antisense strand to SEQ ID NO: 2379584
cucaucagaccgaaacaga

SEQ ID NO: 2379586 - RNA, 19 nt, Artificial Sequence
  Description of Artificial Sequence: Synthetic oligonucleotide
  Sense strand starting at position 1084 of SEQ ID NO: 1885966
cuguuucggucugaugaga

SEQ ID NO: 2379587 - RNA, 19 nt, Artificial Sequence
  Description of Artificial Sequence: Synthetic oligonucleotide
  Antisense strand to SEQ ID NO: 2379586
ucucaucagaccgaaacag

SEQ ID NO: 2379588 - RNA, 19 nt, Artificial Sequence
  Description of Artificial Sequence: Synthetic oligonucleotide
  Sense strand starting at position 1097 of SEQ ID NO: 1885966
augagauaauuuggauacu

SEQ ID NO: 2379589 - RNA, 19 nt, Artificial Sequence
  Description of Artificial Sequence: Synthetic oligonucleotide
  Antisense strand to SEQ ID NO: 2379588
aguauccaaauuaucucau

SEQ ID NO: 2379590 - RNA, 19 nt, Artificial Sequence
  Description of Artificial Sequence: Synthetic oligonucleotide
  Sense strand starting at position 1098 of SEQ ID NO: 1885966
ugagauaauuuggauacuu

SEQ ID NO: 2379591 - RNA, 19 nt, Artificial Sequence
  Description of Artificial Sequence: Synthetic oligonucleotide
  Antisense strand to SEQ ID NO: 2379590
aaguauccaaauuaucuca

SEQ ID NO: 2379592 - RNA, 19 nt, Artificial Sequence
  Description of Artificial Sequence: Synthetic oligonucleotide
  Sense strand starting at position 1106 of SEQ ID NO: 1885966
uuuggauacuugguuguua

SEQ ID NO: 2379593 - RNA, 19 nt, Artificial Sequence
  Description of Artificial Sequence: Synthetic oligonucleotide
  Antisense strand to SEQ ID NO: 2379592
uaacaaccaaguauccaaa

SEQ ID NO: 2379594 - RNA, 19 nt, Artificial Sequence
  Description of Artificial Sequence: Synthetic oligonucleotide
  Sense strand starting at position 1107 of SEQ ID NO: 1885966
uuggauacuugguuguuau

SEQ ID NO: 2379595 - RNA, 19 nt, Artificial Sequence
  Description of Artificial Sequence: Synthetic oligonucleotide
  Antisense strand to SEQ ID NO: 2379594
auaacaaccaaguauccaa

SEQ ID NO: 2379596 - RNA, 19 nt, Artificial Sequence
  Description of Artificial Sequence: Synthetic oligonucleotide
  Sense strand starting at position 1183 of SEQ ID NO: 1885966
gcuaauaauggcuaaagcu

SEQ ID NO: 2379597 - RNA, 19 nt, Artificial Sequence
  Description of Artificial Sequence: Synthetic oligonucleotide
  Antisense strand to SEQ ID NO: 2379596
agcuuuagccauuauuagc

SEQ ID NO: 2379598 - RNA, 19 nt, Artificial Sequence
  Description of Artificial Sequence: Synthetic oligonucleotide
  Sense strand starting at position 1275 of SEQ ID NO: 1885966
ggacuuuccugagccagaa

SEQ ID NO: 2379599 - RNA, 19 nt, Artificial Sequence
  Description of Artificial Sequence: Synthetic oligonucleotide
  Antisense strand to SEQ ID NO: 2379598
uucuggcucaggaaagucc

SEQ ID NO: 2379600 - RNA, 19 nt, Artificial Sequence
  Description of Artificial Sequence: Synthetic oligonucleotide
  Sense strand starting at position 1287 of SEQ ID NO: 1885966
gccagaaaguggcuuuaaa

SEQ ID NO: 2379601 - RNA, 19 nt, Artificial Sequence
  Description of Artificial Sequence: Synthetic oligonucleotide
  Antisense strand to SEQ ID NO: 2379600
uuuaaagccacuuucuggc

SEQ ID NO: 2379602 - RNA, 19 nt, Artificial Sequence
  Description of Artificial Sequence: Synthetic oligonucleotide
  Sense strand starting at position 1418 of SEQ ID NO: 1885966
gcuuaaagcugucaagcau

SEQ ID NO: 2379603 - RNA, 19 nt, Artificial Sequence
  Description of Artificial Sequence: Synthetic oligonucleotide
  Antisense strand to SEQ ID NO: 2379602
augcuugacagcuuuaagc

SEQ ID NO: 2379604 - RNA, 19 nt, Artificial Sequence
  Description of Artificial Sequence: Synthetic oligonucleotide
  Sense strand starting at position 1642 of SEQ ID NO: 1885966
uauugagcuggauauuacu

SEQ ID NO: 2379605 - RNA, 19 nt, Artificial Sequence
  Description of Artificial Sequence: Synthetic oligonucleotide
  Antisense strand to SEQ ID NO: 2379604
aguaauauccagcucaaua

SEQ ID NO: 2379606 - RNA, 19 nt, Artificial Sequence
  Description of Artificial Sequence: Synthetic oligonucleotide
  Sense strand starting at position 1651 of SEQ ID NO: 1885966
ggauauuacugagaacaaa

SEQ ID NO: 2379607 - RNA, 19 nt, Artificial Sequence
  Description of Artificial Sequence: Synthetic oligonucleotide
  Antisense strand to SEQ ID NO: 2379606
uuuguucucaguaauaucc

SEQ ID NO: 2379608 - RNA, 19 nt, Artificial Sequence
  Description of Artificial Sequence: Synthetic oligonucleotide
  Sense strand starting at position 2974 of SEQ ID NO: 1885966
cgcagugcucguuccugua

SEQ ID NO: 2379609 - RNA, 19 nt, Artificial Sequence
  Description of Artificial Sequence: Synthetic oligonucleotide
  Antisense strand to SEQ ID NO: 2379608
uacaggaacgagcacugcg

SEQ ID NO: 2379610 - RNA, 19 nt, Artificial Sequence
  Description of Artificial Sequence: Synthetic oligonucleotide
  Sense strand starting at position 2976 of SEQ ID NO: 1885966
cagugcucguuccuguaau

SEQ ID NO: 2379611 - RNA, 19 nt, Artificial Sequence
  Description of Artificial Sequence: Synthetic oligonucleotide
  Antisense strand to SEQ ID NO: 2379610
auuacaggaacgagcacug

SEQ ID NO: 2379612 - RNA, 19 nt, Artificial Sequence
  Description of Artificial Sequence: Synthetic oligonucleotide
  Sense strand starting at position 2977 of SEQ ID NO: 1885966
agugcucguuccuguaauc

SEQ ID NO: 2379613 - RNA, 19 nt, Artificial Sequence
  Description of Artificial Sequence: Synthetic oligonucleotide
  Antisense strand to SEQ ID NO: 2379612
gauuacaggaacgagcacu

SEQ ID NO: 2379614 - RNA, 19 nt, Artificial Sequence
  Description of Artificial Sequence: Synthetic oligonucleotide
  Sense strand starting at position 3670 of SEQ ID NO: 1885966
aggcuucuguaucaucuau

SEQ ID NO: 2379615 - RNA, 19 nt, Artificial Sequence
  Description of Artificial Sequence: Synthetic oligonucleotide
  Antisense strand to SEQ ID NO: 2379614
auagaugauacagaagccu

SEQ ID NO: 2379616 - RNA, 19 nt, Artificial Sequence
  Description of Artificial Sequence: Synthetic oligonucleotide
  Sense strand starting at position 3672 of SEQ ID NO: 1885966
gcuucuguaucaucuauuu

SEQ ID NO: 2379617 - RNA, 19 nt, Artificial Sequence
  Description of Artificial Sequence: Synthetic oligonucleotide
  Antisense strand to SEQ ID NO: 2379616
aaauagaugauacagaagc

SEQ ID NO: 2379618 - RNA, 19 nt, Artificial Sequence
  Description of Artificial Sequence: Synthetic oligonucleotide
  Sense strand starting at position 3839 of SEQ ID NO: 1885966
uuggucauguuaugcugua

SEQ ID NO: 2379619 - RNA, 19 nt, Artificial Sequence
  Description of Artificial Sequence: Synthetic oligonucleotide
  Antisense strand to SEQ ID NO: 2379618
uacagcauaacaugaccaa

SEQ ID NO: 2379620 - RNA, 19 nt, Artificial Sequence
  Description of Artificial Sequence: Synthetic oligonucleotide
  Sense strand starting at position 3840 of SEQ ID NO: 1885966
uggucauguuaugcuguau

SEQ ID NO: 2379621 - RNA, 19 nt, Artificial Sequence
  Description of Artificial Sequence: Synthetic oligonucleotide
  Antisense strand to SEQ ID NO: 2379620
auacagcauaacaugacca

SEQ ID NO: 2379622 - RNA, 19 nt, Artificial Sequence
  Description of Artificial Sequence: Synthetic oligonucleotide
  Sense strand starting at position 65 of SEQ ID NO: 1885965
gggacucuaucuguaaaug

SEQ ID NO: 2379623 - RNA, 19 nt, Artificial Sequence
  Description of Artificial Sequence: Synthetic oligonucleotide
  Antisense strand to SEQ ID NO: 2379622
cauuuacagauagaguccc

SEQ ID NO: 2379624 - RNA, 19 nt, Artificial Sequence
  Description of Artificial Sequence: Synthetic oligonucleotide
  Sense strand starting at position 74 of SEQ ID NO: 1885965
ucuguaaaugcgggcucaa

SEQ ID NO: 2379625 - RNA, 19 nt, Artificial Sequence
  Description of Artificial Sequence: Synthetic oligonucleotide
  Antisense strand to SEQ ID NO: 2379624
uugagcccgcauuuacaga

SEQ ID NO: 2379626 - RNA, 19 nt, Artificial Sequence
  Description of Artificial Sequence: Synthetic oligonucleotide
  Sense strand starting at position 244 of SEQ ID NO: 1885965
ccgucaaagccugacucau

SEQ ID NO: 2379627 - RNA, 19 nt, Artificial Sequence
  Description of Artificial Sequence: Synthetic oligonucleotide
  Antisense strand to SEQ ID NO: 2379626
augagucaggcuuugacgg

SEQ ID NO: 2379628 - RNA, 19 nt, Artificial Sequence
  Description of Artificial Sequence: Synthetic oligonucleotide
  Sense strand starting at position 246 of SEQ ID NO: 1885965
gucaaagccugacucauua

SEQ ID NO: 2379629 - RNA, 19 nt, Artificial Sequence
  Description of Artificial Sequence: Synthetic oligonucleotide
  Antisense strand to SEQ ID NO: 2379628
uaaugagucaggcuuugac

SEQ ID NO: 2379630 - RNA, 19 nt, Artificial Sequence
  Description of Artificial Sequence: Synthetic oligonucleotide
  Sense strand starting at position 256 of SEQ ID NO: 1885965
gacucauuacuggaugcca

SEQ ID NO: 2379631 - RNA, 19 nt, Artificial Sequence
  Description of Artificial Sequence: Synthetic oligonucleotide
  Antisense strand to SEQ ID NO: 2379630
uggcauccaguaaugaguc

SEQ ID NO: 2379632 - RNA, 19 nt, Artificial Sequence
  Description of Artificial Sequence: Synthetic oligonucleotide
  Sense strand starting at position 478 of SEQ ID NO: 1885965
uugauuaacaaacgugaug

SEQ ID NO: 2379633 - RNA, 19 nt, Artificial Sequence
  Description of Artificial Sequence: Synthetic oligonucleotide
  Antisense strand to SEQ ID NO: 2379632
caucacguuuguuaaucaa

SEQ ID NO: 2379634 - RNA, 19 nt, Artificial Sequence
  Description of Artificial Sequence: Synthetic oligonucleotide
  Sense strand starting at position 489 of SEQ ID NO: 1885965
acgugauggcuucacugca

SEQ ID NO: 2379635 - RNA, 19 nt, Artificial Sequence
  Description of Artificial Sequence: Synthetic oligonucleotide
  Antisense strand to SEQ ID NO: 2379634
ugcagugaagccaucacgu

SEQ ID NO: 2379636 - RNA, 19 nt, Artificial Sequence
  Description of Artificial Sequence: Synthetic oligonucleotide
  Sense strand starting at position 595 of SEQ ID NO: 1885965
gcaucuguuucggucugau

SEQ ID NO: 2379637 - RNA, 19 nt, Artificial Sequence
  Description of Artificial Sequence: Synthetic oligonucleotide
  Antisense strand to SEQ ID NO: 2379636
aucagaccgaaacagaugc

SEQ ID NO: 2379638 - RNA, 19 nt, Artificial Sequence
  Description of Artificial Sequence: Synthetic oligonucleotide
  Sense strand starting at position 598 of SEQ ID NO: 1885965
ucuguuucggucugaugag

SEQ ID NO: 2379639 - RNA, 19 nt, Artificial Sequence
  Description of Artificial Sequence: Synthetic oligonucleotide
  Antisense strand to SEQ ID NO: 2379638
cucaucagaccgaaacaga

SEQ ID NO: 2379640 - RNA, 19 nt, Artificial Sequence
  Description of Artificial Sequence: Synthetic oligonucleotide
  Sense strand starting at position 599 of SEQ ID NO: 1885965
cuguuucggucugaugaga

SEQ ID NO: 2379641 - RNA, 19 nt, Artificial Sequence
  Description of Artificial Sequence: Synthetic oligonucleotide
  Antisense strand to SEQ ID NO: 2379640
ucucaucagaccgaaacag

SEQ ID NO: 2379642 - RNA, 19 nt, Artificial Sequence
  Description of Artificial Sequence: Synthetic oligonucleotide
  Sense strand starting at position 612 of SEQ ID NO: 1885965
augagauaauuuggauacu

SEQ ID NO: 2379643 - RNA, 19 nt, Artificial Sequence
  Description of Artificial Sequence: Synthetic oligonucleotide
  Antisense strand to SEQ ID NO: 2379642
aguauccaaauuaucucau

SEQ ID NO: 2379644 - RNA, 19 nt, Artificial Sequence
  Description of Artificial Sequence: Synthetic oligonucleotide
  Sense strand starting at position 613 of SEQ ID NO: 1885965
ugagauaauuuggauacuu

SEQ ID NO: 2379645 - RNA, 19 nt, Artificial Sequence
  Description of Artificial Sequence: Synthetic oligonucleotide
  Antisense strand to SEQ ID NO: 2379644
aaguauccaaauuaucuca

SEQ ID NO: 2379646 - RNA, 19 nt, Artificial Sequence
  Description of Artificial Sequence: Synthetic oligonucleotide
  Sense strand starting at position 621 of SEQ ID NO: 1885965
uuuggauacuugguuguua

SEQ ID NO: 2379647 - RNA, 19 nt, Artificial Sequence
  Description of Artificial Sequence: Synthetic oligonucleotide
  Antisense strand to SEQ ID NO: 2379646
uaacaaccaaguauccaaa

SEQ ID NO: 2379648 - RNA, 19 nt, Artificial Sequence
  Description of Artificial Sequence: Synthetic oligonucleotide
  Sense strand starting at position 622 of SEQ ID NO: 1885965
uuggauacuugguuguuau

SEQ ID NO: 2379649 - RNA, 19 nt, Artificial Sequence
  Description of Artificial Sequence: Synthetic oligonucleotide
  Antisense strand to SEQ ID NO: 2379648
auaacaaccaaguauccaa

SEQ ID NO: 2379650 - RNA, 19 nt, Artificial Sequence
  Description of Artificial Sequence: Synthetic oligonucleotide
  Sense strand starting at position 698 of SEQ ID NO: 1885965
gcuaauaauggcuaaagcu

SEQ ID NO: 2379651 - RNA, 19 nt, Artificial Sequence
  Description of Artificial Sequence: Synthetic oligonucleotide
  Antisense strand to SEQ ID NO: 2379650
agcuuuagccauuauuagc

SEQ ID NO: 2379652 - RNA, 19 nt, Artificial Sequence
  Description of Artificial Sequence: Synthetic oligonucleotide
  Sense strand starting at position 790 of SEQ ID NO: 1885965
ggacuuuccugagccagaa

SEQ ID NO: 2379653 - RNA, 19 nt, Artificial Sequence
  Description of Artificial Sequence: Synthetic oligonucleotide
  Antisense strand to SEQ ID NO: 2379652
uucuggcucaggaaagucc

SEQ ID NO: 2379654 - RNA, 19 nt, Artificial Sequence
  Description of Artificial Sequence: Synthetic oligonucleotide
  Sense strand starting at position 802 of SEQ ID NO: 1885965
gccagaaaguggcuuuaaa

SEQ ID NO: 2379655 - RNA, 19 nt, Artificial Sequence
  Description of Artificial Sequence: Synthetic oligonucleotide
  Antisense strand to SEQ ID NO: 2379654
uuuaaagccacuuucuggc

SEQ ID NO: 2379656 - RNA, 19 nt, Artificial Sequence
  Description of Artificial Sequence: Synthetic oligonucleotide
  Sense strand starting at position 933 of SEQ ID NO: 1885965
gcuuaaagcugucaagcau

SEQ ID NO: 2379657 - RNA, 19 nt, Artificial Sequence
  Description of Artificial Sequence: Synthetic oligonucleotide
  Antisense strand to SEQ ID NO: 2379656
augcuugacagcuuuaagc

SEQ ID NO: 2379658 - RNA, 19 nt, Artificial Sequence
  Description of Artificial Sequence: Synthetic oligonucleotide
  Sense strand starting at position 1157 of SEQ ID NO: 1885965
uauugagcuggauauuacu

SEQ ID NO: 2379659 - RNA, 19 nt, Artificial Sequence
  Description of Artificial Sequence: Synthetic oligonucleotide
  Antisense strand to SEQ ID NO: 2379658
aguaauauccagcucaaua

SEQ ID NO: 2379660 - RNA, 19 nt, Artificial Sequence
  Description of Artificial Sequence: Synthetic oligonucleotide
  Sense strand starting at position 1166 of SEQ ID NO: 1885965
ggauauuacugagaacaaa

SEQ ID NO: 2379661 - RNA, 19 nt, Artificial Sequence
  Description of Artificial Sequence: Synthetic oligonucleotide
  Antisense strand to SEQ ID NO: 2379660
uuuguucucaguaauaucc

SEQ ID NO: 2379662 - RNA, 19 nt, Artificial Sequence
  Description of Artificial Sequence: Synthetic oligonucleotide
  Sense strand starting at position 2489 of SEQ ID NO: 1885965
cgcagugcucguuccugua

SEQ ID NO: 2379663 - RNA, 19 nt, Artificial Sequence
  Description of Artificial Sequence: Synthetic oligonucleotide
  Antisense strand to SEQ ID NO: 2379662
uacaggaacgagcacugcg

SEQ ID NO: 2379664 - RNA, 19 nt, Artificial Sequence
  Description of Artificial Sequence: Synthetic oligonucleotide
  Sense strand starting at position 2491 of SEQ ID NO: 1885965
cagugcucguuccuguaau

SEQ ID NO: 2379665 - RNA, 19 nt, Artificial Sequence
  Description of Artificial Sequence: Synthetic oligonucleotide
  Antisense strand to SEQ ID NO: 2379664
auuacaggaacgagcacug

SEQ ID NO: 2379666 - RNA, 19 nt, Artificial Sequence
  Description of Artificial Sequence: Synthetic oligonucleotide
  Sense strand starting at position 2492 of SEQ ID NO: 1885965
agugcucguuccuguaauc

SEQ ID NO: 2379667 - RNA, 19 nt, Artificial Sequence
  Description of Artificial Sequence: Synthetic oligonucleotide
  Antisense strand to SEQ ID NO: 2379666
gauuacaggaacgagcacu

SEQ ID NO: 2379668 - RNA, 19 nt, Artificial Sequence
  Description of Artificial Sequence: Synthetic oligonucleotide
  Sense strand starting at position 3185 of SEQ ID NO: 1885965
aggcuucuguaucaucuau

SEQ ID NO: 2379669 - RNA, 19 nt, Artificial Sequence
  Description of Artificial Sequence: Synthetic oligonucleotide
  Antisense strand to SEQ ID NO: 2379668
auagaugauacagaagccu

SEQ ID NO: 2379670 - RNA, 19 nt, Artificial Sequence
  Description of Artificial Sequence: Synthetic oligonucleotide
  Sense strand starting at position 3187 of SEQ ID NO: 1885965
gcuucuguaucaucuauuu

SEQ ID NO: 2379671 - RNA, 19 nt, Artificial Sequence
  Description of Artificial Sequence: Synthetic oligonucleotide
  Antisense strand to SEQ ID NO: 2379670
aaauagaugauacagaagc

SEQ ID NO: 2379672 - RNA, 19 nt, Artificial Sequence
  Description of Artificial Sequence: Synthetic oligonucleotide
  Sense strand starting at position 3354 of SEQ ID NO: 1885965
uuggucauguuaugcugua

SEQ ID NO: 2379673 - RNA, 19 nt, Artificial Sequence
  Description of Artificial Sequence: Synthetic oligonucleotide
  Antisense strand to SEQ ID NO: 2379672
uacagcauaacaugaccaa

SEQ ID NO: 2379674 - RNA, 19 nt, Artificial Sequence
  Description of Artificial Sequence: Synthetic oligonucleotide
  Sense strand starting at position 3355 of SEQ ID NO: 1885965
uggucauguuaugcuguau

SEQ ID NO: 2379675 - RNA, 19 nt, Artificial Sequence
  Description of Artificial Sequence: Synthetic oligonucleotide
  Antisense strand to SEQ ID NO: 2379674
auacagcauaacaugacca

SEQ ID NO: 2379676 - RNA, 19 nt, Artificial Sequence
  Description of Artificial Sequence: Synthetic oligonucleotide
  Sense strand starting at position 3872 of SEQ ID NO: 1885965
ugccucaguuugcuaacaa

SEQ ID NO: 2379677 - RNA, 19 nt, Artificial Sequence
  Description of Artificial Sequence: Synthetic oligonucleotide
  Antisense strand to SEQ ID NO: 2379676
uuguuagcaaacugaggca

SEQ ID NO: 2379678 - RNA, 19 nt, Artificial Sequence
  Description of Artificial Sequence: Synthetic oligonucleotide
  Sense strand starting at position 3873 of SEQ ID NO: 1885965
gccucaguuugcuaacaau

SEQ ID NO: 2379679 - RNA, 19 nt, Artificial Sequence
  Description of Artificial Sequence: Synthetic oligonucleotide
  Antisense strand to SEQ ID NO: 2379678
auuguuagcaaacugaggc

SEQ ID NO: 2379680 - RNA, 19 nt, Artificial Sequence
  Description of Artificial Sequence: Synthetic oligonucleotide
  Sense strand starting at position 3876 of SEQ ID NO: 1885965
ucaguuugcuaacaaugau

SEQ ID NO: 2379681 - RNA, 19 nt, Artificial Sequence
  Description of Artificial Sequence: Synthetic oligonucleotide
  Antisense strand to SEQ ID NO: 2379680
aucauuguuagcaaacuga

SEQ ID NO: 2379682 - RNA, 19 nt, Artificial Sequence
  Description of Artificial Sequence: Synthetic oligonucleotide
  Sense strand starting at position 3879 of SEQ ID NO: 1885965
guuugcuaacaaugauguu

SEQ ID NO: 2379683 - RNA, 19 nt, Artificial Sequence
  Description of Artificial Sequence: Synthetic oligonucleotide
  Antisense strand to SEQ ID NO: 2379682
aacaucauuguuagcaaac

SEQ ID NO: 2379684 - RNA, 19 nt, Artificial Sequence
  Description of Artificial Sequence: Synthetic oligonucleotide
  Sense strand starting at position 74 of SEQ ID NO: 1885967
guaggaacacuguaauguu

SEQ ID NO: 2379685 - RNA, 19 nt, Artificial Sequence
  Description of Artificial Sequence: Synthetic oligonucleotide
  Antisense strand to SEQ ID NO: 2379684
aacauuacaguguuccuac

SEQ ID NO: 2379686 - RNA, 19 nt, Artificial Sequence
  Description of Artificial Sequence: Synthetic oligonucleotide
  Sense strand starting at position 77 of SEQ ID NO: 1885967
ggaacacuguaauguuaga

SEQ ID NO: 2379687 - RNA, 19 nt, Artificial Sequence
  Description of Artificial Sequence: Synthetic oligonucleotide
  Antisense strand to SEQ ID NO: 2379686
ucuaacauuacaguguucc

SEQ ID NO: 2379688 - RNA, 19 nt, Artificial Sequence
  Description of Artificial Sequence: Synthetic oligonucleotide
  Sense strand starting at position 82 of SEQ ID NO: 1885967
acuguaauguuagaacuaa

SEQ ID NO: 2379689 - RNA, 19 nt, Artificial Sequence
  Description of Artificial Sequence: Synthetic oligonucleotide
  Antisense strand to SEQ ID NO: 2379688
uuaguucuaacauuacagu

SEQ ID NO: 2379690 - RNA, 19 nt, Artificial Sequence
  Description of Artificial Sequence: Synthetic oligonucleotide
  Sense strand starting at position 270 of SEQ ID NO: 1885967
ccuguagucccaggacuua

SEQ ID NO: 2379691 - RNA, 19 nt, Artificial Sequence
  Description of Artificial Sequence: Synthetic oligonucleotide
  Antisense strand to SEQ ID NO: 2379690
uaaguccugggacuacagg

SEQ ID NO: 2379692 - RNA, 19 nt, Artificial Sequence
  Description of Artificial Sequence: Synthetic oligonucleotide
  Sense strand starting at position 435 of SEQ ID NO: 1885967
agaacuaaguuggagagaa

SEQ ID NO: 2379693 - RNA, 19 nt, Artificial Sequence
  Description of Artificial Sequence: Synthetic oligonucleotide
  Antisense strand to SEQ ID NO: 2379692
uucucuccaacuuaguucu

SEQ ID NO: 2379694 - RNA, 19 nt, Artificial Sequence
  Description of Artificial Sequence: Synthetic oligonucleotide
  Sense strand starting at position 564 of SEQ ID NO: 1885967
cuaagaagauaugaagaaa

SEQ ID NO: 2379695 - RNA, 19 nt, Artificial Sequence
  Description of Artificial Sequence: Synthetic oligonucleotide
  Antisense strand to SEQ ID NO: 2379694
uuucuucauaucuucuuag

SEQ ID NO: 2379696 - RNA, 19 nt, Artificial Sequence
  Description of Artificial Sequence: Synthetic oligonucleotide
  Sense strand starting at position 576 of SEQ ID NO: 1885967
gaagaaauugccuggccag

SEQ ID NO: 2379697 - RNA, 19 nt, Artificial Sequence
  Description of Artificial Sequence: Synthetic oligonucleotide
  Antisense strand to SEQ ID NO: 2379696
cuggccaggcaauuucuuc

SEQ ID NO: 2379698 - RNA, 19 nt, Artificial Sequence
  Description of Artificial Sequence: Synthetic oligonucleotide
  Sense strand starting at position 577 of SEQ ID NO: 1885967
aagaaauugccuggccagu

SEQ ID NO: 2379699 - RNA, 19 nt, Artificial Sequence
  Description of Artificial Sequence: Synthetic oligonucleotide
  Antisense strand to SEQ ID NO: 2379698
acuggccaggcaauuucuu

SEQ ID NO: 2379700 - RNA, 19 nt, Artificial Sequence
  Description of Artificial Sequence: Synthetic oligonucleotide
  Sense strand starting at position 579 of SEQ ID NO: 1885967
gaaauugccuggccaguga

SEQ ID NO: 2379701 - RNA, 19 nt, Artificial Sequence
  Description of Artificial Sequence: Synthetic oligonucleotide
  Antisense strand to SEQ ID NO: 2379700
ucacuggccaggcaauuuc

SEQ ID NO: 2379702 - RNA, 19 nt, Artificial Sequence
  Description of Artificial Sequence: Synthetic oligonucleotide
  Sense strand starting at position 613 of SEQ ID NO: 1885967
ccacuuuggccaugguaga

SEQ ID NO: 2379703 - RNA, 19 nt, Artificial Sequence
  Description of Artificial Sequence: Synthetic oligonucleotide
  Antisense strand to SEQ ID NO: 2379702
ucuaccauggccaaagugg

SEQ ID NO: 2379704 - RNA, 19 nt, Artificial Sequence
  Description of Artificial Sequence: Synthetic oligonucleotide
  Sense strand starting at position 1103 of SEQ ID NO: 1885967
aguacuaugcucuggcuuu

SEQ ID NO: 2379705 - RNA, 19 nt, Artificial Sequence
  Description of Artificial Sequence: Synthetic oligonucleotide
  Antisense strand to SEQ ID NO: 2379704
aaagccagagcauaguacu

SEQ ID NO: 2379706 - RNA, 19 nt, Artificial Sequence
  Description of Artificial Sequence: Synthetic oligonucleotide
  Sense strand starting at position 1109 of SEQ ID NO: 1885967
augcucuggcuuugaauua

SEQ ID NO: 2379707 - RNA, 19 nt, Artificial Sequence
  Description of Artificial Sequence: Synthetic oligonucleotide
  Antisense strand to SEQ ID NO: 2379706
uaauucaaagccagagcau

SEQ ID NO: 2379708 - RNA, 19 nt, Artificial Sequence
  Description of Artificial Sequence: Synthetic oligonucleotide
  Sense strand starting at position 1120 of SEQ ID NO: 1885967
uugaauuaccaggguaggu

SEQ ID NO: 2379709 - RNA, 19 nt, Artificial Sequence
  Description of Artificial Sequence: Synthetic oligonucleotide
  Antisense strand to SEQ ID NO: 2379708
accuacccugguaauucaa

SEQ ID NO: 2379710 - RNA, 19 nt, Artificial Sequence
  Description of Artificial Sequence: Synthetic oligonucleotide
  Sense strand starting at position 1137 of SEQ ID NO: 1885967
gucagaaagucuuaauccu

SEQ ID NO: 2379711 - RNA, 19 nt, Artificial Sequence
  Description of Artificial Sequence: Synthetic oligonucleotide
  Antisense strand to SEQ ID NO: 2379710
aggauuaagacuuucugac

SEQ ID NO: 2379712 - RNA, 19 nt, Artificial Sequence
  Description of Artificial Sequence: Synthetic oligonucleotide
  Sense strand starting at position 1171 of SEQ ID NO: 1885967
gugaccuuggauuacuagu

SEQ ID NO: 2379713 - RNA, 19 nt, Artificial Sequence
  Description of Artificial Sequence: Synthetic oligonucleotide
  Antisense strand to SEQ ID NO: 2379712
acuaguaauccaaggucac

SEQ ID NO: 2379714 - RNA, 19 nt, Artificial Sequence
  Description of Artificial Sequence: Synthetic oligonucleotide
  Sense strand starting at position 1204 of SEQ ID NO: 1885967
ggcagaagcuaacuaaagu

SEQ ID NO: 2379715 - RNA, 19 nt, Artificial Sequence
  Description of Artificial Sequence: Synthetic oligonucleotide
  Antisense strand to SEQ ID NO: 2379714
acuuuaguuagcuucugcc

SEQ ID NO: 2379716 - RNA, 19 nt, Artificial Sequence
  Description of Artificial Sequence: Synthetic oligonucleotide
  Sense strand starting at position 1230 of SEQ ID NO: 1885967
gaaggaacgugacaucauu

SEQ ID NO: 2379717 - RNA, 19 nt, Artificial Sequence
  Description of Artificial Sequence: Synthetic oligonucleotide
  Antisense strand to SEQ ID NO: 2379716
aaugaugucacguuccuuc

SEQ ID NO: 2379718 - RNA, 19 nt, Artificial Sequence
  Description of Artificial Sequence: Synthetic oligonucleotide
  Sense strand starting at position 1239 of SEQ ID NO: 1885967
ugacaucauuuaggccuaa

SEQ ID NO: 2379719 - RNA, 19 nt, Artificial Sequence
  Description of Artificial Sequence: Synthetic oligonucleotide
  Antisense strand to SEQ ID NO: 2379718
uuaggccuaaaugauguca

SEQ ID NO: 2379720 - RNA, 19 nt, Artificial Sequence
  Description of Artificial Sequence: Synthetic oligonucleotide
  Sense strand starting at position 1323 of SEQ ID NO: 1885967
ggcaccuuaugccuguaau

SEQ ID NO: 2379721 - RNA, 19 nt, Artificial Sequence
  Description of Artificial Sequence: Synthetic oligonucleotide
  Antisense strand to SEQ ID NO: 2379720
auuacaggcauaaggugcc

SEQ ID NO: 2379722 - RNA, 19 nt, Artificial Sequence
  Description of Artificial Sequence: Synthetic oligonucleotide
  Sense strand starting at position 1324 of SEQ ID NO: 1885967
gcaccuuaugccuguaauu

SEQ ID NO: 2379723 - RNA, 19 nt, Artificial Sequence
  Description of Artificial Sequence: Synthetic oligonucleotide
  Antisense strand to SEQ ID NO: 2379722
aauuacaggcauaaggugc

SEQ ID NO: 2379724 - RNA, 19 nt, Artificial Sequence
  Description of Artificial Sequence: Synthetic oligonucleotide
  Sense strand starting at position 1761 of SEQ ID NO: 1885967
caguaugugcuguuauguu

SEQ ID NO: 2379725 - RNA, 19 nt, Artificial Sequence
  Description of Artificial Sequence: Synthetic oligonucleotide
  Antisense strand to SEQ ID NO: 2379724
aacauaacagcacauacug

SEQ ID NO: 2379726 - RNA, 19 nt, Artificial Sequence
  Description of Artificial Sequence: Synthetic oligonucleotide
  Sense strand starting at position 1768 of SEQ ID NO: 1885967
ugcuguuauguuuacucaa

SEQ ID NO: 2379727 - RNA, 19 nt, Artificial Sequence
  Description of Artificial Sequence: Synthetic oligonucleotide
  Antisense strand to SEQ ID NO: 2379726
uugaguaaacauaacagca

SEQ ID NO: 2379728 - RNA, 19 nt, Artificial Sequence
  Description of Artificial Sequence: Synthetic oligonucleotide
  Sense strand starting at position 2088 of SEQ ID NO: 1885967
ccgagaauagcacgggaaa

SEQ ID NO: 2379729 - RNA, 19 nt, Artificial Sequence
  Description of Artificial Sequence: Synthetic oligonucleotide
  Antisense strand to SEQ ID NO: 2379728
uuucccgugcuauucucgg

SEQ ID NO: 2379730 - RNA, 19 nt, Artificial Sequence
  Description of Artificial Sequence: Synthetic oligonucleotide
  Sense strand starting at position 2444 of SEQ ID NO: 1885967
agccauuccaaauggguga

SEQ ID NO: 2379731 - RNA, 19 nt, Artificial Sequence
  Description of Artificial Sequence: Synthetic oligonucleotide
  Antisense strand to SEQ ID NO: 2379730
ucacccauuuggaauggcu

SEQ ID NO: 2379732 - RNA, 19 nt, Artificial Sequence
  Description of Artificial Sequence: Synthetic oligonucleotide
  Sense strand starting at position 2778 of SEQ ID NO: 1885967
ggcucuacuggcugaggaa

SEQ ID NO: 2379733 - RNA, 19 nt, Artificial Sequence
  Description of Artificial Sequence: Synthetic oligonucleotide
  Antisense strand to SEQ ID NO: 2379732
uuccucagccaguagagcc

SEQ ID NO: 2379734 - RNA, 19 nt, Artificial Sequence
  Description of Artificial Sequence: Synthetic oligonucleotide
  Sense strand starting at position 2779 of SEQ ID NO: 1885967
gcucuacuggcugaggaaa

SEQ ID NO: 2379735 - RNA, 19 nt, Artificial Sequence
  Description of Artificial Sequence: Synthetic oligonucleotide
  Antisense strand to SEQ ID NO: 2379734
uuuccucagccaguagagc

SEQ ID NO: 2379736 - RNA, 19 nt, Artificial Sequence
  Description of Artificial Sequence: Synthetic oligonucleotide
  Sense strand starting at position 2868 of SEQ ID NO: 1885967
cauguuucgaugugccuga

SEQ ID NO: 2379737 - RNA, 19 nt, Artificial Sequence
  Description of Artificial Sequence: Synthetic oligonucleotide
  Antisense strand to SEQ ID NO: 2379736
ucaggcacaucgaaacaug

SEQ ID NO: 2379738 - RNA, 19 nt, Artificial Sequence
  Description of Artificial Sequence: Synthetic oligonucleotide
  Sense strand starting at position 2872 of SEQ ID NO: 1885967
uuucgaugugccugaacac

SEQ ID NO: 2379739 - RNA, 19 nt, Artificial Sequence
  Description of Artificial Sequence: Synthetic oligonucleotide
  Antisense strand to SEQ ID NO: 2379738
guguucaggcacaucgaaa

SEQ ID NO: 2379740 - RNA, 19 nt, Artificial Sequence
  Description of Artificial Sequence: Synthetic oligonucleotide
  Sense strand starting at position 2873 of SEQ ID NO: 1885967
uucgaugugccugaacaca

SEQ ID NO: 2379741 - RNA, 19 nt, Artificial Sequence
  Description of Artificial Sequence: Synthetic oligonucleotide
  Antisense strand to SEQ ID NO: 2379740
uguguucaggcacaucgaa

SEQ ID NO: 2379742 - RNA, 19 nt, Artificial Sequence
  Description of Artificial Sequence: Synthetic oligonucleotide
  Sense strand starting at position 2919 of SEQ ID NO: 1885967
guggaaaguaggcaucauu

SEQ ID NO: 2379743 - RNA, 19 nt, Artificial Sequence
  Description of Artificial Sequence: Synthetic oligonucleotide
  Antisense strand to SEQ ID NO: 2379742
aaugaugccuacuuuccac

SEQ ID NO: 2379744 - RNA, 19 nt, Artificial Sequence
  Description of Artificial Sequence: Synthetic oligonucleotide
  Sense strand starting at position 3163 of SEQ ID NO: 1885967
agcagagucuacucgagaa

SEQ ID NO: 2379745 - RNA, 19 nt, Artificial Sequence
  Description of Artificial Sequence: Synthetic oligonucleotide
  Antisense strand to SEQ ID NO: 2379744
uucucgaguagacucugcu

SEQ ID NO: 2379746 - RNA, 19 nt, Artificial Sequence
  Description of Artificial Sequence: Synthetic oligonucleotide
  Sense strand starting at position 3165 of SEQ ID NO: 1885967
cagagucuacucgagaauu

SEQ ID NO: 2379747 - RNA, 19 nt, Artificial Sequence
  Description of Artificial Sequence: Synthetic oligonucleotide
  Antisense strand to SEQ ID NO: 2379746
aauucucgaguagacucug

SEQ ID NO: 2379748 - RNA, 19 nt, Artificial Sequence
  Description of Artificial Sequence: Synthetic oligonucleotide
  Sense strand starting at position 3173 of SEQ ID NO: 1885967
acucgagaauuccaaaucu

SEQ ID NO: 2379749 - RNA, 19 nt, Artificial Sequence
  Description of Artificial Sequence: Synthetic oligonucleotide
  Antisense strand to SEQ ID NO: 2379748
agauuuggaauucucgagu

SEQ ID NO: 2379750 - RNA, 19 nt, Artificial Sequence
  Description of Artificial Sequence: Synthetic oligonucleotide
  Sense strand starting at position 3212 of SEQ ID NO: 1885967
gggagagguucuuggauca

SEQ ID NO: 2379751 - RNA, 19 nt, Artificial Sequence
  Description of Artificial Sequence: Synthetic oligonucleotide
  Antisense strand to SEQ ID NO: 2379750
ugauccaagaaccucuccc

SEQ ID NO: 2379752 - RNA, 19 nt, Artificial Sequence
  Description of Artificial Sequence: Synthetic oligonucleotide
  Sense strand starting at position 3246 of SEQ ID NO: 1885967
cccacauugugggaagaca

SEQ ID NO: 2379753 - RNA, 19 nt, Artificial Sequence
  Description of Artificial Sequence: Synthetic oligonucleotide
  Antisense strand to SEQ ID NO: 2379752
ugucuucccacaauguggg

SEQ ID NO: 2379754 - RNA, 19 nt, Artificial Sequence
  Description of Artificial Sequence: Synthetic oligonucleotide
  Sense strand starting at position 3436 of SEQ ID NO: 1885967
ggguucauggccuaacaga

SEQ ID NO: 2379755 - RNA, 19 nt, Artificial Sequence
  Description of Artificial Sequence: Synthetic oligonucleotide
  Antisense strand to SEQ ID NO: 2379754
ucuguuaggccaugaaccc

SEQ ID NO: 2379756 - RNA, 19 nt, Artificial Sequence
  Description of Artificial Sequence: Synthetic oligonucleotide
  Sense strand starting at position 3528 of SEQ ID NO: 1885967
agacaagugugguuuguuu

SEQ ID NO: 2379757 - RNA, 19 nt, Artificial Sequence
  Description of Artificial Sequence: Synthetic oligonucleotide
  Antisense strand to SEQ ID NO: 2379756
aaacaaaccacacuugucu

SEQ ID NO: 2379758 - RNA, 19 nt, Artificial Sequence
  Description of Artificial Sequence: Synthetic oligonucleotide
  Sense strand starting at position 3578 of SEQ ID NO: 1885967
gaggaagaauuugaagcua

SEQ ID NO: 2379759 - RNA, 19 nt, Artificial Sequence
  Description of Artificial Sequence: Synthetic oligonucleotide
  Antisense strand to SEQ ID NO: 2379758
uagcuucaaauucuuccuc

SEQ ID NO: 2379760 - RNA, 19 nt, Artificial Sequence
  Description of Artificial Sequence: Synthetic oligonucleotide
  Sense strand starting at position 3886 of SEQ ID NO: 1885967
accgcauccagcugagauu

SEQ ID NO: 2379761 - RNA, 19 nt, Artificial Sequence
  Description of Artificial Sequence: Synthetic oligonucleotide
  Antisense strand to SEQ ID NO: 2379760
aaucucagcuggaugcggu

SEQ ID NO: 2379762 - RNA, 19 nt, Artificial Sequence
  Description of Artificial Sequence: Synthetic oligonucleotide
  Sense strand starting at position 3946 of SEQ ID NO: 1885967
gaagaagaggccugagguu

SEQ ID NO: 2379763 - RNA, 19 nt, Artificial Sequence
  Description of Artificial Sequence: Synthetic oligonucleotide
  Antisense strand to SEQ ID NO: 2379762
aaccucaggccucuucuuc

SEQ ID NO: 2379764 - RNA, 19 nt, Artificial Sequence
  Description of Artificial Sequence: Synthetic oligonucleotide
  Sense strand starting at position 1606 of SEQ ID NO: 1885968
aguagugacaccuggaaua

SEQ ID NO: 2379765 - RNA, 19 nt, Artificial Sequence
  Description of Artificial Sequence: Synthetic oligonucleotide
  Antisense strand to SEQ ID NO: 2379764
uauuccaggugucacuacu

SEQ ID NO: 2379766 - RNA, 19 nt, Artificial Sequence
  Description of Artificial Sequence: Synthetic oligonucleotide
  Sense strand starting at position 2067 of SEQ ID NO: 1885968
acguucugauuggaugaga

SEQ ID NO: 2379767 - RNA, 19 nt, Artificial Sequence
  Description of Artificial Sequence: Synthetic oligonucleotide
  Antisense strand to SEQ ID NO: 2379766
ucucauccaaucagaacgu

SEQ ID NO: 2379768 - RNA, 19 nt, Artificial Sequence
  Description of Artificial Sequence: Synthetic oligonucleotide
  Sense strand starting at position 2262 of SEQ ID NO: 1885968
gagcuagaguugcacuauu

SEQ ID NO: 2379769 - RNA, 19 nt, Artificial Sequence
  Description of Artificial Sequence: Synthetic oligonucleotide
  Antisense strand to SEQ ID NO: 2379768
aauagugcaacucuagcuc

SEQ ID NO: 2379770 - RNA, 19 nt, Artificial Sequence
  Description of Artificial Sequence: Synthetic oligonucleotide
  Sense strand starting at position 3313 of SEQ ID NO: 1885968
uugucaagcguuuaagaua

SEQ ID NO: 2379771 - RNA, 19 nt, Artificial Sequence
  Description of Artificial Sequence: Synthetic oligonucleotide
  Antisense strand to SEQ ID NO: 2379770
uaucuuaaacgcuugacaa

SEQ ID NO: 2379772 - RNA, 19 nt, Artificial Sequence
  Description of Artificial Sequence: Synthetic oligonucleotide
  Sense strand starting at position 3316 of SEQ ID NO: 1885968
ucaagcguuuaagauacuu

SEQ ID NO: 2379773 - RNA, 19 nt, Artificial Sequence
  Description of Artificial Sequence: Synthetic oligonucleotide
  Antisense strand to SEQ ID NO: 2379772
aaguaucuuaaacgcuuga

SEQ ID NO: 2379774 - RNA, 19 nt, Artificial Sequence
  Description of Artificial Sequence: Synthetic oligonucleotide
  Sense strand starting at position 167 of SEQ ID NO: 1885969
ugcuaauagaacugaguag

SEQ ID NO: 2379775 - RNA, 19 nt, Artificial Sequence
  Description of Artificial Sequence: Synthetic oligonucleotide
  Antisense strand to SEQ ID NO: 2379774
cuacucaguucuauuagca

SEQ ID NO: 2379776 - RNA, 19 nt, Artificial Sequence
  Description of Artificial Sequence: Synthetic oligonucleotide
  Sense strand starting at position 168 of SEQ ID NO: 1885969
gcuaauagaacugaguagu

SEQ ID NO: 2379777 - RNA, 19 nt, Artificial Sequence
  Description of Artificial Sequence: Synthetic oligonucleotide
  Antisense strand to SEQ ID NO: 2379776
acuacucaguucuauuagc

SEQ ID NO: 2379778 - RNA, 19 nt, Artificial Sequence
  Description of Artificial Sequence: Synthetic oligonucleotide
  Sense strand starting at position 203 of SEQ ID NO: 1885969
gagagaucuuguuuaccca

SEQ ID NO: 2379779 - RNA, 19 nt, Artificial Sequence
  Description of Artificial Sequence: Synthetic oligonucleotide
  Antisense strand to SEQ ID NO: 2379778
uggguaaacaagaucucuc

SEQ ID NO: 2379780 - RNA, 19 nt, Artificial Sequence
  Description of Artificial Sequence: Synthetic oligonucleotide
  Sense strand starting at position 360 of SEQ ID NO: 1885969
ucucauguagcccaugaaa

SEQ ID NO: 2379781 - RNA, 19 nt, Artificial Sequence
  Description of Artificial Sequence: Synthetic oligonucleotide
  Antisense strand to SEQ ID NO: 2379780
uuucaugggcuacaugaga

SEQ ID NO: 2379782 - RNA, 19 nt, Artificial Sequence
  Description of Artificial Sequence: Synthetic oligonucleotide
  Sense strand starting at position 362 of SEQ ID NO: 1885969
ucauguagcccaugaaaca

SEQ ID NO: 2379783 - RNA, 19 nt, Artificial Sequence
  Description of Artificial Sequence: Synthetic oligonucleotide
  Antisense strand to SEQ ID NO: 2379782
uguuucaugggcuacauga

SEQ ID NO: 2379784 - RNA, 19 nt, Artificial Sequence
  Description of Artificial Sequence: Synthetic oligonucleotide
  Sense strand starting at position 623 of SEQ ID NO: 1885969
ggagguccuuagagaugag

SEQ ID NO: 2379785 - RNA, 19 nt, Artificial Sequence
  Description of Artificial Sequence: Synthetic oligonucleotide
  Antisense strand to SEQ ID NO: 2379784
cucaucucuaaggaccucc

SEQ ID NO: 2379786 - RNA, 19 nt, Artificial Sequence
  Description of Artificial Sequence: Synthetic oligonucleotide
  Sense strand starting at position 686 of SEQ ID NO: 1885969
uacagcucgccuguuuauu

SEQ ID NO: 2379787 - RNA, 19 nt, Artificial Sequence
  Description of Artificial Sequence: Synthetic oligonucleotide
  Antisense strand to SEQ ID NO: 2379786
aauaaacaggcgagcugua

SEQ ID NO: 2379788 - RNA, 19 nt, Artificial Sequence
  Description of Artificial Sequence: Synthetic oligonucleotide
  Sense strand starting at position 782 of SEQ ID NO: 1885969
auuuaugacucagaagcaa

SEQ ID NO: 2379789 - RNA, 19 nt, Artificial Sequence
  Description of Artificial Sequence: Synthetic oligonucleotide
  Antisense strand to SEQ ID NO: 2379788
uugcuucugagucauaaau

SEQ ID NO: 2379790 - RNA, 19 nt, Artificial Sequence
  Description of Artificial Sequence: Synthetic oligonucleotide
  Sense strand starting at position 1022 of SEQ ID NO: 1885969
uguucucauuuguucucaa

SEQ ID NO: 2379791 - RNA, 19 nt, Artificial Sequence
  Description of Artificial Sequence: Synthetic oligonucleotide
  Antisense strand to SEQ ID NO: 2379790
uugagaacaaaugagaaca

SEQ ID NO: 2379792 - RNA, 19 nt, Artificial Sequence
  Description of Artificial Sequence: Synthetic oligonucleotide
  Sense strand starting at position 1114 of SEQ ID NO: 1885969
acauguuagcaggacuuau

SEQ ID NO: 2379793 - RNA, 19 nt, Artificial Sequence
  Description of Artificial Sequence: Synthetic oligonucleotide
  Antisense strand to SEQ ID NO: 2379792
auaaguccugcuaacaugu

SEQ ID NO: 2379794 - RNA, 19 nt, Artificial Sequence
  Description of Artificial Sequence: Synthetic oligonucleotide
  Sense strand starting at position 1193 of SEQ ID NO: 1885969
agcggauugcacuacaaau

SEQ ID NO: 2379795 - RNA, 19 nt, Artificial Sequence
  Description of Artificial Sequence: Synthetic oligonucleotide
  Antisense strand to SEQ ID NO: 2379794
auuuguagugcaauccgcu

SEQ ID NO: 2379796 - RNA, 19 nt, Artificial Sequence
  Description of Artificial Sequence: Synthetic oligonucleotide
  Sense strand starting at position 1195 of SEQ ID NO: 1885969
cggauugcacuacaaauaa

SEQ ID NO: 2379797 - RNA, 19 nt, Artificial Sequence
  Description of Artificial Sequence: Synthetic oligonucleotide
  Antisense strand to SEQ ID NO: 2379796
uuauuuguagugcaauccg

SEQ ID NO: 2379798 - RNA, 19 nt, Artificial Sequence
  Description of Artificial Sequence: Synthetic oligonucleotide
  Sense strand starting at position 1229 of SEQ ID NO: 1885969
aaugaaagcuucucuguag

SEQ ID NO: 2379799 - RNA, 19 nt, Artificial Sequence
  Description of Artificial Sequence: Synthetic oligonucleotide
  Antisense strand to SEQ ID NO: 2379798
cuacagagaagcuuucauu

SEQ ID NO: 2379800 - RNA, 19 nt, Artificial Sequence
  Description of Artificial Sequence: Synthetic oligonucleotide
  Sense strand starting at position 1292 of SEQ ID NO: 1885969
guccuugaggucuagguua

SEQ ID NO: 2379801 - RNA, 19 nt, Artificial Sequence
  Description of Artificial Sequence: Synthetic oligonucleotide
  Antisense strand to SEQ ID NO: 2379800
uaaccuagaccucaaggac

SEQ ID NO: 2379802 - RNA, 19 nt, Artificial Sequence
  Description of Artificial Sequence: Synthetic oligonucleotide
  Sense strand starting at position 1334 of SEQ ID NO: 1885969
guauccuauggauacuauu

SEQ ID NO: 2379803 - RNA, 19 nt, Artificial Sequence
  Description of Artificial Sequence: Synthetic oligonucleotide
  Antisense strand to SEQ ID NO: 2379802
aauaguauccauaggauac

SEQ ID NO: 2379804 - RNA, 19 nt, Artificial Sequence
  Description of Artificial Sequence: Synthetic oligonucleotide
  Sense strand starting at position 1359 of SEQ ID NO: 1885969
uuaguauugagucaguauu

SEQ ID NO: 2379805 - RNA, 19 nt, Artificial Sequence
  Description of Artificial Sequence: Synthetic oligonucleotide
  Antisense strand to SEQ ID NO: 2379804
aauacugacucaauacuaa

SEQ ID NO: 2379806 - RNA, 19 nt, Artificial Sequence
  Description of Artificial Sequence: Synthetic oligonucleotide
  Sense strand starting at position 1395 of SEQ ID NO: 1885969
gggaauacugccugaagua

SEQ ID NO: 2379807 - RNA, 19 nt, Artificial Sequence
  Description of Artificial Sequence: Synthetic oligonucleotide
  Antisense strand to SEQ ID NO: 2379806
uacuucaggcaguauuccc

SEQ ID NO: 2379808 - RNA, 19 nt, Artificial Sequence
  Description of Artificial Sequence: Synthetic oligonucleotide
  Sense strand starting at position 1396 of SEQ ID NO: 1885969
ggaauacugccugaaguau

SEQ ID NO: 2379809 - RNA, 19 nt, Artificial Sequence
  Description of Artificial Sequence: Synthetic oligonucleotide
  Antisense strand to SEQ ID NO: 2379808
auacuucaggcaguauucc

SEQ ID NO: 2379810 - RNA, 19 nt, Artificial Sequence
  Description of Artificial Sequence: Synthetic oligonucleotide
  Sense strand starting at position 1587 of SEQ ID NO: 1885969
cccguauguccacaaauag

SEQ ID NO: 2379811 - RNA, 19 nt, Artificial Sequence
  Description of Artificial Sequence: Synthetic oligonucleotide
  Antisense strand to SEQ ID NO: 2379810
cuauuuguggacauacggg

SEQ ID NO: 2379812 - RNA, 19 nt, Artificial Sequence
  Description of Artificial Sequence: Synthetic oligonucleotide
  Sense strand starting at position 2049 of SEQ ID NO: 1885969
cuauuauaucucuguggga

SEQ ID NO: 2379813 - RNA, 19 nt, Artificial Sequence
  Description of Artificial Sequence: Synthetic oligonucleotide
  Antisense strand to SEQ ID NO: 2379812
ucccacagagauauaauag

SEQ ID NO: 2379814 - RNA, 19 nt, Artificial Sequence
  Description of Artificial Sequence: Synthetic oligonucleotide
  Sense strand starting at position 2050 of SEQ ID NO: 1885969
uauuauaucucugugggag

SEQ ID NO: 2379815 - RNA, 19 nt, Artificial Sequence
  Description of Artificial Sequence: Synthetic oligonucleotide
  Antisense strand to SEQ ID NO: 2379814
cucccacagagauauaaua

SEQ ID NO: 2379816 - RNA, 19 nt, Artificial Sequence
  Description of Artificial Sequence: Synthetic oligonucleotide
  Sense strand starting at position 2051 of SEQ ID NO: 1885969
auuauaucucugugggaga

SEQ ID NO: 2379817 - RNA, 19 nt, Artificial Sequence
  Description of Artificial Sequence: Synthetic oligonucleotide
  Antisense strand to SEQ ID NO: 2379816
ucucccacagagauauaau

SEQ ID NO: 2379818 - RNA, 19 nt, Artificial Sequence
  Description of Artificial Sequence: Synthetic oligonucleotide
  Sense strand starting at position 2053 of SEQ ID NO: 1885969
uauaucucugugggagaaa

SEQ ID NO: 2379819 - RNA, 19 nt, Artificial Sequence
  Description of Artificial Sequence: Synthetic oligonucleotide
  Antisense strand to SEQ ID NO: 2379818
uuucucccacagagauaua

SEQ ID NO: 2379820 - RNA, 19 nt, Artificial Sequence
  Description of Artificial Sequence: Synthetic oligonucleotide
  Sense strand starting at position 2227 of SEQ ID NO: 1885969
cccuaucaguaucugagaa

SEQ ID NO: 2379821 - RNA, 19 nt, Artificial Sequence
  Description of Artificial Sequence: Synthetic oligonucleotide
  Antisense strand to SEQ ID NO: 2379820
uucucagauacugauaggg

SEQ ID NO: 2379822 - RNA, 19 nt, Artificial Sequence
  Description of Artificial Sequence: Synthetic oligonucleotide
  Sense strand starting at position 2279 of SEQ ID NO: 1885969
ccuuaucucgggcaauauu

SEQ ID NO: 2379823 - RNA, 19 nt, Artificial Sequence
  Description of Artificial Sequence: Synthetic oligonucleotide
  Antisense strand to SEQ ID NO: 2379822
aauauugcccgagauaagg

SEQ ID NO: 2379824 - RNA, 19 nt, Artificial Sequence
  Description of Artificial Sequence: Synthetic oligonucleotide
  Sense strand starting at position 2371 of SEQ ID NO: 1885969
auaagauaauuggcuagua

SEQ ID NO: 2379825 - RNA, 19 nt, Artificial Sequence
  Description of Artificial Sequence: Synthetic oligonucleotide
  Antisense strand to SEQ ID NO: 2379824
uacuagccaauuaucuuau

SEQ ID NO: 2379826 - RNA, 19 nt, Artificial Sequence
  Description of Artificial Sequence: Synthetic oligonucleotide
  Sense strand starting at position 2429 of SEQ ID NO: 1885969
aaggaugugcccgauauau

SEQ ID NO: 2379827 - RNA, 19 nt, Artificial Sequence
  Description of Artificial Sequence: Synthetic oligonucleotide
  Antisense strand to SEQ ID NO: 2379826
auauaucgggcacauccuu

SEQ ID NO: 2379828 - RNA, 19 nt, Artificial Sequence
  Description of Artificial Sequence: Synthetic oligonucleotide
  Sense strand starting at position 2474 of SEQ ID NO: 1885969
agcacauuaggauaugcaa

SEQ ID NO: 2379829 - RNA, 19 nt, Artificial Sequence
  Description of Artificial Sequence: Synthetic oligonucleotide
  Antisense strand to SEQ ID NO: 2379828
uugcauauccuaaugugcu

SEQ ID NO: 2379830 - RNA, 19 nt, Artificial Sequence
  Description of Artificial Sequence: Synthetic oligonucleotide
  Sense strand starting at position 2571 of SEQ ID NO: 1885969
ggaugacggugcauuguuu

SEQ ID NO: 2379831 - RNA, 19 nt, Artificial Sequence
  Description of Artificial Sequence: Synthetic oligonucleotide
  Antisense strand to SEQ ID NO: 2379830
aaacaaugcaccgucaucc

SEQ ID NO: 2379832 - RNA, 19 nt, Artificial Sequence
  Description of Artificial Sequence: Synthetic oligonucleotide
  Sense strand starting at position 2661 of SEQ ID NO: 1885969
cgguuagcaggagagaaua

SEQ ID NO: 2379833 - RNA, 19 nt, Artificial Sequence
  Description of Artificial Sequence: Synthetic oligonucleotide
  Antisense strand to SEQ ID NO: 2379832
uauucucuccugcuaaccg

SEQ ID NO: 2379834 - RNA, 19 nt, Artificial Sequence
  Description of Artificial Sequence: Synthetic oligonucleotide
  Sense strand starting at position 2671 of SEQ ID NO: 1885969
gagagaauaagucgugaac

SEQ ID NO: 2379835 - RNA, 19 nt, Artificial Sequence
  Description of Artificial Sequence: Synthetic oligonucleotide
  Antisense strand to SEQ ID NO: 2379834
guucacgacuuauucucuc

SEQ ID NO: 2379836 - RNA, 19 nt, Artificial Sequence
  Description of Artificial Sequence: Synthetic oligonucleotide
  Sense strand starting at position 2674 of SEQ ID NO: 1885969
agaauaagucgugaaccac

SEQ ID NO: 2379837 - RNA, 19 nt, Artificial Sequence
  Description of Artificial Sequence: Synthetic oligonucleotide
  Antisense strand to SEQ ID NO: 2379836
gugguucacgacuuauucu

SEQ ID NO: 2379838 - RNA, 19 nt, Artificial Sequence
  Description of Artificial Sequence: Synthetic oligonucleotide
  Sense strand starting at position 2859 of SEQ ID NO: 1885969
auuuacuucugagaguaaa

SEQ ID NO: 2379839 - RNA, 19 nt, Artificial Sequence
  Description of Artificial Sequence: Synthetic oligonucleotide
  Antisense strand to SEQ ID NO: 2379838
uuuacucucagaaguaaau

SEQ ID NO: 2379840 - RNA, 19 nt, Artificial Sequence
  Description of Artificial Sequence: Synthetic oligonucleotide
  Sense strand starting at position 2989 of SEQ ID NO: 1885969
aagugaaagccauguuuaa

SEQ ID NO: 2379841 - RNA, 19 nt, Artificial Sequence
  Description of Artificial Sequence: Synthetic oligonucleotide
  Antisense strand to SEQ ID NO: 2379840
uuaaacauggcuuucacuu

SEQ ID NO: 2379842 - RNA, 19 nt, Artificial Sequence
  Description of Artificial Sequence: Synthetic oligonucleotide
  Sense strand starting at position 3240 of SEQ ID NO: 1885969
ugcuucuuacuagaauugu

SEQ ID NO: 2379843 - RNA, 19 nt, Artificial Sequence
  Description of Artificial Sequence: Synthetic oligonucleotide
  Antisense strand to SEQ ID NO: 2379842
acaauucuaguaagaagca

SEQ ID NO: 2379844 - RNA, 19 nt, Artificial Sequence
  Description of Artificial Sequence: Synthetic oligonucleotide
  Sense strand starting at position 3325 of SEQ ID NO: 1885969
cagcauuaugucgaaggga

SEQ ID NO: 2379845 - RNA, 19 nt, Artificial Sequence
  Description of Artificial Sequence: Synthetic oligonucleotide
  Antisense strand to SEQ ID NO: 2379844
ucccuucgacauaaugcug

SEQ ID NO: 2379846 - RNA, 19 nt, Artificial Sequence
  Description of Artificial Sequence: Synthetic oligonucleotide
  Sense strand starting at position 3328 of SEQ ID NO: 1885969
cauuaugucgaagggacuu

SEQ ID NO: 2379847 - RNA, 19 nt, Artificial Sequence
  Description of Artificial Sequence: Synthetic oligonucleotide
  Antisense strand to SEQ ID NO: 2379846
aagucccuucgacauaaug

SEQ ID NO: 2379848 - RNA, 19 nt, Artificial Sequence
  Description of Artificial Sequence: Synthetic oligonucleotide
  Sense strand starting at position 3434 of SEQ ID NO: 1885969
uuuccugauguuggauauu

SEQ ID NO: 2379849 - RNA, 19 nt, Artificial Sequence
  Description of Artificial Sequence: Synthetic oligonucleotide
  Antisense strand to SEQ ID NO: 2379848
aauauccaacaucaggaaa

SEQ ID NO: 2379850 - RNA, 19 nt, Artificial Sequence
  Description of Artificial Sequence: Synthetic oligonucleotide
  Sense strand starting at position 3555 of SEQ ID NO: 1885969
guggaauaaaugggccaua

SEQ ID NO: 2379851 - RNA, 19 nt, Artificial Sequence
  Description of Artificial Sequence: Synthetic oligonucleotide
  Antisense strand to SEQ ID NO: 2379850
uauggcccauuuauuccac

SEQ ID NO: 2379852 - RNA, 19 nt, Artificial Sequence
  Description of Artificial Sequence: Synthetic oligonucleotide
  Sense strand starting at position 3953 of SEQ ID NO: 1885969
uugaaauagcucugaaguu

SEQ ID NO: 2379853 - RNA, 19 nt, Artificial Sequence
  Description of Artificial Sequence: Synthetic oligonucleotide
  Antisense strand to SEQ ID NO: 2379852
aacuucagagcuauuucaa

SEQ ID NO: 2379854 - RNA, 19 nt, Artificial Sequence
  Description of Artificial Sequence: Synthetic oligonucleotide
  Sense strand starting at position 11 of SEQ ID NO: 1885970
acacgcaauucuguaaauc

SEQ ID NO: 2379855 - RNA, 19 nt, Artificial Sequence
  Description of Artificial Sequence: Synthetic oligonucleotide
  Antisense strand to SEQ ID NO: 2379854
gauuuacagaauugcgugu

SEQ ID NO: 2379856 - RNA, 19 nt, Artificial Sequence
  Description of Artificial Sequence: Synthetic oligonucleotide
  Sense strand starting at position 160 of SEQ ID NO: 1885970
acauguaauggcgagaaau

SEQ ID NO: 2379857 - RNA, 19 nt, Artificial Sequence
  Description of Artificial Sequence: Synthetic oligonucleotide
  Antisense strand to SEQ ID NO: 2379856
auuucucgccauuacaugu

SEQ ID NO: 2379858 - RNA, 19 nt, Artificial Sequence
  Description of Artificial Sequence: Synthetic oligonucleotide
  Sense strand starting at position 171 of SEQ ID NO: 1885970
cgagaaauuugcuauaauu

SEQ ID NO: 2379859 - RNA, 19 nt, Artificial Sequence
  Description of Artificial Sequence: Synthetic oligonucleotide
  Antisense strand to SEQ ID NO: 2379858
aauuauagcaaauuucucg

SEQ ID NO: 2379860 - RNA, 19 nt, Artificial Sequence
  Description of Artificial Sequence: Synthetic oligonucleotide
  Sense strand starting at position 198 of SEQ ID NO: 1885970
guauuuggguuagagauac

SEQ ID NO: 2379861 - RNA, 19 nt, Artificial Sequence
  Description of Artificial Sequence: Synthetic oligonucleotide
  Antisense strand to SEQ ID NO: 2379860
guaucucuaacccaaauac

SEQ ID NO: 2379862 - RNA, 19 nt, Artificial Sequence
  Description of Artificial Sequence: Synthetic oligonucleotide
  Sense strand starting at position 261 of SEQ ID NO: 1885970
uaaacaguguuacugggaa

SEQ ID NO: 2379863 - RNA, 19 nt, Artificial Sequence
  Description of Artificial Sequence: Synthetic oligonucleotide
  Antisense strand to SEQ ID NO: 2379862
uucccaguaacacuguuua

SEQ ID NO: 2379864 - RNA, 19 nt, Artificial Sequence
  Description of Artificial Sequence: Synthetic oligonucleotide
  Sense strand starting at position 378 of SEQ ID NO: 1885970
auguaaagucauuaguuuc

SEQ ID NO: 2379865 - RNA, 19 nt, Artificial Sequence
  Description of Artificial Sequence: Synthetic oligonucleotide
  Antisense strand to SEQ ID NO: 2379864
gaaacuaaugacuuuacau

SEQ ID NO: 2379866 - RNA, 19 nt, Artificial Sequence
  Description of Artificial Sequence: Synthetic oligonucleotide
  Sense strand starting at position 462 of SEQ ID NO: 1885970
auaucuuaugcugagccau

SEQ ID NO: 2379867 - RNA, 19 nt, Artificial Sequence
  Description of Artificial Sequence: Synthetic oligonucleotide
  Antisense strand to SEQ ID NO: 2379866
auggcucagcauaagauau

SEQ ID NO: 2379868 - RNA, 19 nt, Artificial Sequence
  Description of Artificial Sequence: Synthetic oligonucleotide
  Sense strand starting at position 523 of SEQ ID NO: 1885970
ccuuuaaagccuugaaugu

SEQ ID NO: 2379869 - RNA, 19 nt, Artificial Sequence
  Description of Artificial Sequence: Synthetic oligonucleotide
  Antisense strand to SEQ ID NO: 2379868
acauucaaggcuuuaaagg

SEQ ID NO: 2379870 - RNA, 19 nt, Artificial Sequence
  Description of Artificial Sequence: Synthetic oligonucleotide
  Sense strand starting at position 524 of SEQ ID NO: 1885970
cuuuaaagccuugaauguu

SEQ ID NO: 2379871 - RNA, 19 nt, Artificial Sequence
  Description of Artificial Sequence: Synthetic oligonucleotide
  Antisense strand to SEQ ID NO: 2379870
aacauucaaggcuuuaaag

SEQ ID NO: 2379872 - RNA, 19 nt, Artificial Sequence
  Description of Artificial Sequence: Synthetic oligonucleotide
  Sense strand starting at position 623 of SEQ ID NO: 1885970
gcuuaaugagggugaggga

SEQ ID NO: 2379873 - RNA, 19 nt, Artificial Sequence
  Description of Artificial Sequence: Synthetic oligonucleotide
  Antisense strand to SEQ ID NO: 2379872
ucccucacccucauuaagc

SEQ ID NO: 2379874 - RNA, 19 nt, Artificial Sequence
  Description of Artificial Sequence: Synthetic oligonucleotide
  Sense strand starting at position 732 of SEQ ID NO: 1885970
aguguuaauccagaaacuc

SEQ ID NO: 2379875 - RNA, 19 nt, Artificial Sequence
  Description of Artificial Sequence: Synthetic oligonucleotide
  Antisense strand to SEQ ID NO: 2379874
gaguuucuggauuaacacu

SEQ ID NO: 2379876 - RNA, 19 nt, Artificial Sequence
  Description of Artificial Sequence: Synthetic oligonucleotide
  Sense strand starting at position 747 of SEQ ID NO: 1885970
acucgaauccucugauuag

SEQ ID NO: 2379877 - RNA, 19 nt, Artificial Sequence
  Description of Artificial Sequence: Synthetic oligonucleotide
  Antisense strand to SEQ ID NO: 2379876
cuaaucagaggauucgagu

SEQ ID NO: 2379878 - RNA, 19 nt, Artificial Sequence
  Description of Artificial Sequence: Synthetic oligonucleotide
  Sense strand starting at position 750 of SEQ ID NO: 1885970
cgaauccucugauuagaau

SEQ ID NO: 2379879 - RNA, 19 nt, Artificial Sequence
  Description of Artificial Sequence: Synthetic oligonucleotide
  Antisense strand to SEQ ID NO: 2379878
auucuaaucagaggauucg

SEQ ID NO: 2379880 - RNA, 19 nt, Artificial Sequence
  Description of Artificial Sequence: Synthetic oligonucleotide
  Sense strand starting at position 802 of SEQ ID NO: 1885970
gcacgaguggguuagaaug

SEQ ID NO: 2379881 - RNA, 19 nt, Artificial Sequence
  Description of Artificial Sequence: Synthetic oligonucleotide
  Antisense strand to SEQ ID NO: 2379880
cauucuaacccacucgugc

SEQ ID NO: 2379882 - RNA, 19 nt, Artificial Sequence
  Description of Artificial Sequence: Synthetic oligonucleotide
  Sense strand starting at position 808 of SEQ ID NO: 1885970
guggguuagaauggaacuu

SEQ ID NO: 2379883 - RNA, 19 nt, Artificial Sequence
  Description of Artificial Sequence: Synthetic oligonucleotide
  Antisense strand to SEQ ID NO: 2379882
aaguuccauucuaacccac

SEQ ID NO: 2379884 - RNA, 19 nt, Artificial Sequence
  Description of Artificial Sequence: Synthetic oligonucleotide
  Sense strand starting at position 927 of SEQ ID NO: 1885970
ggugcaucagcuuggauuu

SEQ ID NO: 2379885 - RNA, 19 nt, Artificial Sequence
  Description of Artificial Sequence: Synthetic oligonucleotide
  Antisense strand to SEQ ID NO: 2379884
aaauccaagcugaugcacc

SEQ ID NO: 2379886 - RNA, 19 nt, Artificial Sequence
  Description of Artificial Sequence: Synthetic oligonucleotide
  Sense strand starting at position 983 of SEQ ID NO: 1885970
cggagacucuuaccaaauu

SEQ ID NO: 2379887 - RNA, 19 nt, Artificial Sequence
  Description of Artificial Sequence: Synthetic oligonucleotide
  Antisense strand to SEQ ID NO: 2379886
aauuugguaagagucuccg

SEQ ID NO: 2379888 - RNA, 19 nt, Artificial Sequence
  Description of Artificial Sequence: Synthetic oligonucleotide
  Sense strand starting at position 1073 of SEQ ID NO: 1885970
auaugaaagcguggauuag

SEQ ID NO: 2379889 - RNA, 19 nt, Artificial Sequence
  Description of Artificial Sequence: Synthetic oligonucleotide
  Antisense strand to SEQ ID NO: 2379888
cuaauccacgcuuucauau

SEQ ID NO: 2379890 - RNA, 19 nt, Artificial Sequence
  Description of Artificial Sequence: Synthetic oligonucleotide
  Sense strand starting at position 1279 of SEQ ID NO: 1885970
aggacuuucuaacuuugau

SEQ ID NO: 2379891 - RNA, 19 nt, Artificial Sequence
  Description of Artificial Sequence: Synthetic oligonucleotide
  Antisense strand to SEQ ID NO: 2379890
aucaaaguuagaaaguccu

SEQ ID NO: 2379892 - RNA, 19 nt, Artificial Sequence
  Description of Artificial Sequence: Synthetic oligonucleotide
  Sense strand starting at position 2105 of SEQ ID NO: 1885970
gggcuauuccaauaugcuc

SEQ ID NO: 2379893 - RNA, 19 nt, Artificial Sequence
  Description of Artificial Sequence: Synthetic oligonucleotide
  Antisense strand to SEQ ID NO: 2379892
gagcauauuggaauagccc

SEQ ID NO: 2379894 - RNA, 19 nt, Artificial Sequence
  Description of Artificial Sequence: Synthetic oligonucleotide
  Sense strand starting at position 2142 of SEQ ID NO: 1885970
agauauucucuuuacaguu

SEQ ID NO: 2379895 - RNA, 19 nt, Artificial Sequence
  Description of Artificial Sequence: Synthetic oligonucleotide
  Antisense strand to SEQ ID NO: 2379894
aacuguaaagagaauaucu

SEQ ID NO: 2379896 - RNA, 19 nt, Artificial Sequence
  Description of Artificial Sequence: Synthetic oligonucleotide
  Sense strand starting at position 2405 of SEQ ID NO: 1885970
auaugugaagcgggagaaa

SEQ ID NO: 2379897 - RNA, 19 nt, Artificial Sequence
  Description of Artificial Sequence: Synthetic oligonucleotide
  Antisense strand to SEQ ID NO: 2379896
uuucucccgcuucacauau

SEQ ID NO: 2379898 - RNA, 19 nt, Artificial Sequence
  Description of Artificial Sequence: Synthetic oligonucleotide
  Sense strand starting at position 2441 of SEQ ID NO: 1885970
gcggaugugauuguguagu

SEQ ID NO: 2379899 - RNA, 19 nt, Artificial Sequence
  Description of Artificial Sequence: Synthetic oligonucleotide
  Antisense strand to SEQ ID NO: 2379898
acuacacaaucacauccgc

SEQ ID NO: 2379900 - RNA, 19 nt, Artificial Sequence
  Description of Artificial Sequence: Synthetic oligonucleotide
  Sense strand starting at position 2447 of SEQ ID NO: 1885970
gugauuguguaguuggaaa

SEQ ID NO: 2379901 - RNA, 19 nt, Artificial Sequence
  Description of Artificial Sequence: Synthetic oligonucleotide
  Antisense strand to SEQ ID NO: 2379900
uuuccaacuacacaaucac

SEQ ID NO: 2379902 - RNA, 19 nt, Artificial Sequence
  Description of Artificial Sequence: Synthetic oligonucleotide
  Sense strand starting at position 2449 of SEQ ID NO: 1885970
gauuguguaguuggaaagu

SEQ ID NO: 2379903 - RNA, 19 nt, Artificial Sequence
  Description of Artificial Sequence: Synthetic oligonucleotide
  Antisense strand to SEQ ID NO: 2379902
acuuuccaacuacacaauc

SEQ ID NO: 2379904 - RNA, 19 nt, Artificial Sequence
  Description of Artificial Sequence: Synthetic oligonucleotide
  Sense strand starting at position 2466 of SEQ ID NO: 1885970
gugcaaacugaagauuguu

SEQ ID NO: 2379905 - RNA, 19 nt, Artificial Sequence
  Description of Artificial Sequence: Synthetic oligonucleotide
  Antisense strand to SEQ ID NO: 2379904
aacaaucuucaguuugcac

SEQ ID NO: 2379906 - RNA, 19 nt, Artificial Sequence
  Description of Artificial Sequence: Synthetic oligonucleotide
  Sense strand starting at position 2488 of SEQ ID NO: 1885970
auaauagccuuuccaagga

SEQ ID NO: 2379907 - RNA, 19 nt, Artificial Sequence
  Description of Artificial Sequence: Synthetic oligonucleotide
  Antisense strand to SEQ ID NO: 2379906
uccuuggaaaggcuauuau

SEQ ID NO: 2379908 - RNA, 19 nt, Artificial Sequence
  Description of Artificial Sequence: Synthetic oligonucleotide
  Sense strand starting at position 2721 of SEQ ID NO: 1885970
ccuuauucuugggcaagaa

SEQ ID NO: 2379909 - RNA, 19 nt, Artificial Sequence
  Description of Artificial Sequence: Synthetic oligonucleotide
  Antisense strand to SEQ ID NO: 2379908
uucuugcccaagaauaagg

SEQ ID NO: 2379910 - RNA, 19 nt, Artificial Sequence
  Description of Artificial Sequence: Synthetic oligonucleotide
  Sense strand starting at position 2739 of SEQ ID NO: 1885970
agaaguaaacacuguaauc

SEQ ID NO: 2379911 - RNA, 19 nt, Artificial Sequence
  Description of Artificial Sequence: Synthetic oligonucleotide
  Antisense strand to SEQ ID NO: 2379910
gauuacaguguuuacuucu

SEQ ID NO: 2379912 - RNA, 19 nt, Artificial Sequence
  Description of Artificial Sequence: Synthetic oligonucleotide
  Sense strand starting at position 2829 of SEQ ID NO: 1885970
uugacaugauucucagugu

SEQ ID NO: 2379913 - RNA, 19 nt, Artificial Sequence
  Description of Artificial Sequence: Synthetic oligonucleotide
  Antisense strand to SEQ ID NO: 2379912
acacugagaaucaugucaa

SEQ ID NO: 2379914 - RNA, 19 nt, Artificial Sequence
  Description of Artificial Sequence: Synthetic oligonucleotide
  Sense strand starting at position 2832 of SEQ ID NO: 1885970
acaugauucucagugucau

SEQ ID NO: 2379915 - RNA, 19 nt, Artificial Sequence
  Description of Artificial Sequence: Synthetic oligonucleotide
  Antisense strand to SEQ ID NO: 2379914
augacacugagaaucaugu

SEQ ID NO: 2379916 - RNA, 19 nt, Artificial Sequence
  Description of Artificial Sequence: Synthetic oligonucleotide
  Sense strand starting at position 2833 of SEQ ID NO: 1885970
caugauucucagugucaug

SEQ ID NO: 2379917 - RNA, 19 nt, Artificial Sequence
  Description of Artificial Sequence: Synthetic oligonucleotide
  Antisense strand to SEQ ID NO: 2379916
caugacacugagaaucaug

SEQ ID NO: 2379918 - RNA, 19 nt, Artificial Sequence
  Description of Artificial Sequence: Synthetic oligonucleotide
  Sense strand starting at position 2840 of SEQ ID NO: 1885970
cucagugucauguggaaga

SEQ ID NO: 2379919 - RNA, 19 nt, Artificial Sequence
  Description of Artificial Sequence: Synthetic oligonucleotide
  Antisense strand to SEQ ID NO: 2379918
ucuuccacaugacacugag

SEQ ID NO: 2379920 - RNA, 19 nt, Artificial Sequence
  Description of Artificial Sequence: Synthetic oligonucleotide
  Sense strand starting at position 2842 of SEQ ID NO: 1885970
cagugucauguggaagaau

SEQ ID NO: 2379921 - RNA, 19 nt, Artificial Sequence
  Description of Artificial Sequence: Synthetic oligonucleotide
  Antisense strand to SEQ ID NO: 2379920
auucuuccacaugacacug

SEQ ID NO: 2379922 - RNA, 19 nt, Artificial Sequence
  Description of Artificial Sequence: Synthetic oligonucleotide
  Sense strand starting at position 2910 of SEQ ID NO: 1885970
agcccugcuggauauuaaa

SEQ ID NO: 2379923 - RNA, 19 nt, Artificial Sequence
  Description of Artificial Sequence: Synthetic oligonucleotide
  Antisense strand to SEQ ID NO: 2379922
uuuaauauccagcagggcu

SEQ ID NO: 2379924 - RNA, 19 nt, Artificial Sequence
  Description of Artificial Sequence: Synthetic oligonucleotide
  Sense strand starting at position 3047 of SEQ ID NO: 1885970
cuaugaugcagguacugau

SEQ ID NO: 2379925 - RNA, 19 nt, Artificial Sequence
  Description of Artificial Sequence: Synthetic oligonucleotide
  Antisense strand to SEQ ID NO: 2379924
aucaguaccugcaucauag

SEQ ID NO: 2379926 - RNA, 19 nt, Artificial Sequence
  Description of Artificial Sequence: Synthetic oligonucleotide
  Sense strand starting at position 3258 of SEQ ID NO: 1885970
acauuacugguccggacau

SEQ ID NO: 2379927 - RNA, 19 nt, Artificial Sequence
  Description of Artificial Sequence: Synthetic oligonucleotide
  Antisense strand to SEQ ID NO: 2379926
auguccggaccaguaaugu

SEQ ID NO: 2379928 - RNA, 19 nt, Artificial Sequence
  Description of Artificial Sequence: Synthetic oligonucleotide
  Sense strand starting at position 3260 of SEQ ID NO: 1885970
auuacugguccggacauga

SEQ ID NO: 2379929 - RNA, 19 nt, Artificial Sequence
  Description of Artificial Sequence: Synthetic oligonucleotide
  Antisense strand to SEQ ID NO: 2379928
ucauguccggaccaguaau

SEQ ID NO: 2379930 - RNA, 19 nt, Artificial Sequence
  Description of Artificial Sequence: Synthetic oligonucleotide
  Sense strand starting at position 3271 of SEQ ID NO: 1885970
ggacaugacuguucaaugg

SEQ ID NO: 2379931 - RNA, 19 nt, Artificial Sequence
  Description of Artificial Sequence: Synthetic oligonucleotide
  Antisense strand to SEQ ID NO: 2379930
ccauugaacagucaugucc

SEQ ID NO: 2379932 - RNA, 19 nt, Artificial Sequence
  Description of Artificial Sequence: Synthetic oligonucleotide
  Sense strand starting at position 3664 of SEQ ID NO: 1885970
acgccuggcccagauaaau

SEQ ID NO: 2379933 - RNA, 19 nt, Artificial Sequence
  Description of Artificial Sequence: Synthetic oligonucleotide
  Antisense strand to SEQ ID NO: 2379932
auuuaucugggccaggcgu

SEQ ID NO: 2379934 - RNA, 19 nt, Artificial Sequence
  Description of Artificial Sequence: Synthetic oligonucleotide
  Sense strand starting at position 124 of SEQ ID NO: 1885971
uugacuuuguuccugcuua

SEQ ID NO: 2379935 - RNA, 19 nt, Artificial Sequence
  Description of Artificial Sequence: Synthetic oligonucleotide
  Antisense strand to SEQ ID NO: 2379934
uaagcaggaacaaagucaa

SEQ ID NO: 2379936 - RNA, 19 nt, Artificial Sequence
  Description of Artificial Sequence: Synthetic oligonucleotide
  Sense strand starting at position 129 of SEQ ID NO: 1885971
uuuguuccugcuuaaagga

SEQ ID NO: 2379937 - RNA, 19 nt, Artificial Sequence
  Description of Artificial Sequence: Synthetic oligonucleotide
  Antisense strand to SEQ ID NO: 2379936
uccuuuaagcaggaacaaa

SEQ ID NO: 2379938 - RNA, 19 nt, Artificial Sequence
  Description of Artificial Sequence: Synthetic oligonucleotide
  Sense strand starting at position 138 of SEQ ID NO: 1885971
gcuuaaaggacuugugagu

SEQ ID NO: 2379939 - RNA, 19 nt, Artificial Sequence
  Description of Artificial Sequence: Synthetic oligonucleotide
  Antisense strand to SEQ ID NO: 2379938
acucacaaguccuuuaagc

SEQ ID NO: 2379940 - RNA, 19 nt, Artificial Sequence
  Description of Artificial Sequence: Synthetic oligonucleotide
  Sense strand starting at position 143 of SEQ ID NO: 1885971
aaggacuugugagucauua

SEQ ID NO: 2379941 - RNA, 19 nt, Artificial Sequence
  Description of Artificial Sequence: Synthetic oligonucleotide
  Antisense strand to SEQ ID NO: 2379940
uaaugacucacaaguccuu

SEQ ID NO: 2379942 - RNA, 19 nt, Artificial Sequence
  Description of Artificial Sequence: Synthetic oligonucleotide
  Sense strand starting at position 145 of SEQ ID NO: 1885971
ggacuugugagucauuauu

SEQ ID NO: 2379943 - RNA, 19 nt, Artificial Sequence
  Description of Artificial Sequence: Synthetic oligonucleotide
  Antisense strand to SEQ ID NO: 2379942
aauaaugacucacaagucc

SEQ ID NO: 2379944 - RNA, 19 nt, Artificial Sequence
  Description of Artificial Sequence: Synthetic oligonucleotide
  Sense strand starting at position 598 of SEQ ID NO: 1885971
uccucuguccuugacagaa

SEQ ID NO: 2379945 - RNA, 19 nt, Artificial Sequence
  Description of Artificial Sequence: Synthetic oligonucleotide
  Antisense strand to SEQ ID NO: 2379944
uucugucaaggacagagga

SEQ ID NO: 2379946 - RNA, 19 nt, Artificial Sequence
  Description of Artificial Sequence: Synthetic oligonucleotide
  Sense strand starting at position 654 of SEQ ID NO: 1885971
uggucucuggcgcucaauu

SEQ ID NO: 2379947 - RNA, 19 nt, Artificial Sequence
  Description of Artificial Sequence: Synthetic oligonucleotide
  Antisense strand to SEQ ID NO: 2379946
aauugagcgccagagacca

SEQ ID NO: 2379948 - RNA, 19 nt, Artificial Sequence
  Description of Artificial Sequence: Synthetic oligonucleotide
  Sense strand starting at position 946 of SEQ ID NO: 1885971
gccaucagcucucuagaga

SEQ ID NO: 2379949 - RNA, 19 nt, Artificial Sequence
  Description of Artificial Sequence: Synthetic oligonucleotide
  Antisense strand to SEQ ID NO: 2379948
ucucuagagagcugauggc

SEQ ID NO: 2379950 - RNA, 19 nt, Artificial Sequence
  Description of Artificial Sequence: Synthetic oligonucleotide
  Sense strand starting at position 1671 of SEQ ID NO: 1885971
ccuguuuccuaccuggaca

SEQ ID NO: 2379951 - RNA, 19 nt, Artificial Sequence
  Description of Artificial Sequence: Synthetic oligonucleotide
  Antisense strand to SEQ ID NO: 2379950
uguccagguaggaaacagg

SEQ ID NO: 2379952 - RNA, 19 nt, Artificial Sequence
  Description of Artificial Sequence: Synthetic oligonucleotide
  Sense strand starting at position 2078 of SEQ ID NO: 1885971
ugugucugcuacuuggaaa

SEQ ID NO: 2379953 - RNA, 19 nt, Artificial Sequence
  Description of Artificial Sequence: Synthetic oligonucleotide
  Antisense strand to SEQ ID NO: 2379952
uuuccaaguagcagacaca

SEQ ID NO: 2379954 - RNA, 19 nt, Artificial Sequence
  Description of Artificial Sequence: Synthetic oligonucleotide
  Sense strand starting at position 2100 of SEQ ID NO: 1885971
gcaaguuccugugcucaac

SEQ ID NO: 2379955 - RNA, 19 nt, Artificial Sequence
  Description of Artificial Sequence: Synthetic oligonucleotide
  Antisense strand to SEQ ID NO: 2379954
guugagcacaggaacuugc

SEQ ID NO: 2379956 - RNA, 19 nt, Artificial Sequence
  Description of Artificial Sequence: Synthetic oligonucleotide
  Sense strand starting at position 2109 of SEQ ID NO: 1885971
ugugcucaacucugagcaa

SEQ ID NO: 2379957 - RNA, 19 nt, Artificial Sequence
  Description of Artificial Sequence: Synthetic oligonucleotide
  Antisense strand to SEQ ID NO: 2379956
uugcucagaguugagcaca

SEQ ID NO: 2379958 - RNA, 19 nt, Artificial Sequence
  Description of Artificial Sequence: Synthetic oligonucleotide
  Sense strand starting at position 2288 of SEQ ID NO: 1885971
cugcuuuacuuucuggagu

SEQ ID NO: 2379959 - RNA, 19 nt, Artificial Sequence
  Description of Artificial Sequence: Synthetic oligonucleotide
  Antisense strand to SEQ ID NO: 2379958
acuccagaaaguaaagcag

SEQ ID NO: 2379960 - RNA, 19 nt, Artificial Sequence
  Description of Artificial Sequence: Synthetic oligonucleotide
  Sense strand starting at position 2307 of SEQ ID NO: 1885971
cagguuuaacuguguccau

SEQ ID NO: 2379961 - RNA, 19 nt, Artificial Sequence
  Description of Artificial Sequence: Synthetic oligonucleotide
  Antisense strand to SEQ ID NO: 2379960
auggacacaguuaaaccug

SEQ ID NO: 2379962 - RNA, 19 nt, Artificial Sequence
  Description of Artificial Sequence: Synthetic oligonucleotide
  Sense strand starting at position 2308 of SEQ ID NO: 1885971
agguuuaacuguguccauu

SEQ ID NO: 2379963 - RNA, 19 nt, Artificial Sequence
  Description of Artificial Sequence: Synthetic oligonucleotide
  Antisense strand to SEQ ID NO: 2379962
aauggacacaguuaaaccu

SEQ ID NO: 2379964 - RNA, 19 nt, Artificial Sequence
  Description of Artificial Sequence: Synthetic oligonucleotide
  Sense strand starting at position 2430 of SEQ ID NO: 1885971
uagaucugguaucuaguaa

SEQ ID NO: 2379965 - RNA, 19 nt, Artificial Sequence
  Description of Artificial Sequence: Synthetic oligonucleotide
  Antisense strand to SEQ ID NO: 2379964
uuacuagauaccagaucua

SEQ ID NO: 2379966 - RNA, 19 nt, Artificial Sequence
  Description of Artificial Sequence: Synthetic oligonucleotide
  Sense strand starting at position 2558 of SEQ ID NO: 1885971
gcaguggugcggucauagu

SEQ ID NO: 2379967 - RNA, 19 nt, Artificial Sequence
  Description of Artificial Sequence: Synthetic oligonucleotide
  Antisense strand to SEQ ID NO: 2379966
acuaugaccgcaccacugc

SEQ ID NO: 2379968 - RNA, 19 nt, Artificial Sequence
  Description of Artificial Sequence: Synthetic oligonucleotide
  Sense strand starting at position 3096 of SEQ ID NO: 1885971
agcgacuucucacuguaac

SEQ ID NO: 2379969 - RNA, 19 nt, Artificial Sequence
  Description of Artificial Sequence: Synthetic oligonucleotide
  Antisense strand to SEQ ID NO: 2379968
guuacagugagaagucgcu

SEQ ID NO: 2379970 - RNA, 19 nt, Artificial Sequence
  Description of Artificial Sequence: Synthetic oligonucleotide
  Sense strand starting at position 3097 of SEQ ID NO: 1885971
gcgacuucucacuguaacc

SEQ ID NO: 2379971 - RNA, 19 nt, Artificial Sequence
  Description of Artificial Sequence: Synthetic oligonucleotide
  Antisense strand to SEQ ID NO: 2379970
gguuacagugagaagucgc

SEQ ID NO: 2379972 - RNA, 19 nt, Artificial Sequence
  Description of Artificial Sequence: Synthetic oligonucleotide
  Sense strand starting at position 3227 of SEQ ID NO: 1885971
uccuaauaucaucgacuug

SEQ ID NO: 2379973 - RNA, 19 nt, Artificial Sequence
  Description of Artificial Sequence: Synthetic oligonucleotide
  Antisense strand to SEQ ID NO: 2379972
caagucgaugauauuagga

SEQ ID NO: 2379974 - RNA, 19 nt, Artificial Sequence
  Description of Artificial Sequence: Synthetic oligonucleotide
  Sense strand starting at position 3232 of SEQ ID NO: 1885971
auaucaucgacuugagggu

SEQ ID NO: 2379975 - RNA, 19 nt, Artificial Sequence
  Description of Artificial Sequence: Synthetic oligonucleotide
  Antisense strand to SEQ ID NO: 2379974
acccucaagucgaugauau

SEQ ID NO: 2379976 - RNA, 19 nt, Artificial Sequence
  Description of Artificial Sequence: Synthetic oligonucleotide
  Sense strand starting at position 3239 of SEQ ID NO: 1885971
cgacuugaggguuaagauu

SEQ ID NO: 2379977 - RNA, 19 nt, Artificial Sequence
  Description of Artificial Sequence: Synthetic oligonucleotide
  Antisense strand to SEQ ID NO: 2379976
aaucuuaacccucaagucg

SEQ ID NO: 2379978 - RNA, 19 nt, Artificial Sequence
  Description of Artificial Sequence: Synthetic oligonucleotide
  Sense strand starting at position 3344 of SEQ ID NO: 1885971
gaaguuugacccuggguaa

SEQ ID NO: 2379979 - RNA, 19 nt, Artificial Sequence
  Description of Artificial Sequence: Synthetic oligonucleotide
  Antisense strand to SEQ ID NO: 2379978
uuacccagggucaaacuuc

SEQ ID NO: 2379980 - RNA, 19 nt, Artificial Sequence
  Description of Artificial Sequence: Synthetic oligonucleotide
  Sense strand starting at position 3345 of SEQ ID NO: 1885971
aaguuugacccuggguaau

SEQ ID NO: 2379981 - RNA, 19 nt, Artificial Sequence
  Description of Artificial Sequence: Synthetic oligonucleotide
  Antisense strand to SEQ ID NO: 2379980
auuacccagggucaaacuu

SEQ ID NO: 2379982 - RNA, 19 nt, Artificial Sequence
  Description of Artificial Sequence: Synthetic oligonucleotide
  Sense strand starting at position 3347 of SEQ ID NO: 1885971
guuugacccuggguaauga

SEQ ID NO: 2379983 - RNA, 19 nt, Artificial Sequence
  Description of Artificial Sequence: Synthetic oligonucleotide
  Antisense strand to SEQ ID NO: 2379982
ucauuacccagggucaaac

SEQ ID NO: 2379984 - RNA, 19 nt, Artificial Sequence
  Description of Artificial Sequence: Synthetic oligonucleotide
  Sense strand starting at position 3360 of SEQ ID NO: 1885971
uaaugaaaugagugguuag

SEQ ID NO: 2379985 - RNA, 19 nt, Artificial Sequence
  Description of Artificial Sequence: Synthetic oligonucleotide
  Antisense strand to SEQ ID NO: 2379984
cuaaccacucauuucauua

SEQ ID NO: 2379986 - RNA, 19 nt, Artificial Sequence
  Description of Artificial Sequence: Synthetic oligonucleotide
  Sense strand starting at position 3361 of SEQ ID NO: 1885971
aaugaaaugagugguuagu

SEQ ID NO: 2379987 - RNA, 19 nt, Artificial Sequence
  Description of Artificial Sequence: Synthetic oligonucleotide
  Antisense strand to SEQ ID NO: 2379986
acuaaccacucauuucauu

SEQ ID NO: 2379988 - RNA, 19 nt, Artificial Sequence
  Description of Artificial Sequence: Synthetic oligonucleotide
  Sense strand starting at position 3363 of SEQ ID NO: 1885971
ugaaaugagugguuaguug

SEQ ID NO: 2379989 - RNA, 19 nt, Artificial Sequence
  Description of Artificial Sequence: Synthetic oligonucleotide
  Antisense strand to SEQ ID NO: 2379988
caacuaaccacucauuuca

SEQ ID NO: 2379990 - RNA, 19 nt, Artificial Sequence
  Description of Artificial Sequence: Synthetic oligonucleotide
  Sense strand starting at position 3367 of SEQ ID NO: 1885971
augagugguuaguuguuca

SEQ ID NO: 2379991 - RNA, 19 nt, Artificial Sequence
  Description of Artificial Sequence: Synthetic oligonucleotide
  Antisense strand to SEQ ID NO: 2379990
ugaacaacuaaccacucau

SEQ ID NO: 2379992 - RNA, 19 nt, Artificial Sequence
  Description of Artificial Sequence: Synthetic oligonucleotide
  Sense strand starting at position 3370 of SEQ ID NO: 1885971
agugguuaguuguucaaau

SEQ ID NO: 2379993 - RNA, 19 nt, Artificial Sequence
  Description of Artificial Sequence: Synthetic oligonucleotide
  Antisense strand to SEQ ID NO: 2379992
auuugaacaacuaaccacu

SEQ ID NO: 2379994 - RNA, 19 nt, Artificial Sequence
  Description of Artificial Sequence: Synthetic oligonucleotide
  Sense strand starting at position 3372 of SEQ ID NO: 1885971
ugguuaguuguucaaaugu

SEQ ID NO: 2379995 - RNA, 19 nt, Artificial Sequence
  Description of Artificial Sequence: Synthetic oligonucleotide
  Antisense strand to SEQ ID NO: 2379994
acauuugaacaacuaacca

SEQ ID NO: 2379996 - RNA, 19 nt, Artificial Sequence
  Description of Artificial Sequence: Synthetic oligonucleotide
  Sense strand starting at position 3456 of SEQ ID NO: 1885971
gguggacugccuuggugau

SEQ ID NO: 2379997 - RNA, 19 nt, Artificial Sequence
  Description of Artificial Sequence: Synthetic oligonucleotide
  Antisense strand to SEQ ID NO: 2379996
aucaccaaggcaguccacc

SEQ ID NO: 2379998 - RNA, 19 nt, Artificial Sequence
  Description of Artificial Sequence: Synthetic oligonucleotide
  Sense strand starting at position 3547 of SEQ ID NO: 1885971
uuacaaaucucagugauug

SEQ ID NO: 2379999 - RNA, 19 nt, Artificial Sequence
  Description of Artificial Sequence: Synthetic oligonucleotide
  Antisense strand to SEQ ID NO: 2379998
caaucacugagauuuguaa

SEQ ID NO: 2380000 - RNA, 19 nt, Artificial Sequence
  Description of Artificial Sequence: Synthetic oligonucleotide
  Sense strand starting at position 3721 of SEQ ID NO: 1885971
uccugaacauccucgauua

SEQ ID NO: 2380001 - RNA, 19 nt, Artificial Sequence
  Description of Artificial Sequence: Synthetic oligonucleotide
  Antisense strand to SEQ ID NO: 2380000
uaaucgaggauguucagga

SEQ ID NO: 2380002 - RNA, 19 nt, Artificial Sequence
  Description of Artificial Sequence: Synthetic oligonucleotide
  Sense strand starting at position 3722 of SEQ ID NO: 1885971
ccugaacauccucgauuau

SEQ ID NO: 2380003 - RNA, 19 nt, Artificial Sequence
  Description of Artificial Sequence: Synthetic oligonucleotide
  Antisense strand to SEQ ID NO: 2380002
auaaucgaggauguucagg

SEQ ID NO: 2380004 - RNA, 19 nt, Artificial Sequence
  Description of Artificial Sequence: Synthetic oligonucleotide
  Sense strand starting at position 3733 of SEQ ID NO: 1885971
ucgauuauaacgcaggaau

SEQ ID NO: 2380005 - RNA, 19 nt, Artificial Sequence
  Description of Artificial Sequence: Synthetic oligonucleotide
  Antisense strand to SEQ ID NO: 2380004
auuccugcguuauaaucga

SEQ ID NO: 2380006 - RNA, 19 nt, Artificial Sequence
  Description of Artificial Sequence: Synthetic oligonucleotide
  Sense strand starting at position 3735 of SEQ ID NO: 1885971
gauuauaacgcaggaauaa

SEQ ID NO: 2380007 - RNA, 19 nt, Artificial Sequence
  Description of Artificial Sequence: Synthetic oligonucleotide
  Antisense strand to SEQ ID NO: 2380006
uuauuccugcguuauaauc

SEQ ID NO: 2380008 - RNA, 19 nt, Artificial Sequence
  Description of Artificial Sequence: Synthetic oligonucleotide
  Sense strand starting at position 3767 of SEQ ID NO: 1885971
augggauugccaggaggau

SEQ ID NO: 2380009 - RNA, 19 nt, Artificial Sequence
  Description of Artificial Sequence: Synthetic oligonucleotide
  Antisense strand to SEQ ID NO: 2380008
auccuccuggcaaucccau

SEQ ID NO: 2380010 - RNA, 19 nt, Artificial Sequence
  Description of Artificial Sequence: Synthetic oligonucleotide
  Sense strand starting at position 3776 of SEQ ID NO: 1885971
ccaggaggaucauagauua

SEQ ID NO: 2380011 - RNA, 19 nt, Artificial Sequence
  Description of Artificial Sequence: Synthetic oligonucleotide
  Antisense strand to SEQ ID NO: 2380010
uaaucuaugauccuccugg

SEQ ID NO: 2380012 - RNA, 19 nt, Artificial Sequence
  Description of Artificial Sequence: Synthetic oligonucleotide
  Sense strand starting at position 3834 of SEQ ID NO: 1885971
cacagaggguucucuaaag

SEQ ID NO: 2380013 - RNA, 19 nt, Artificial Sequence
  Description of Artificial Sequence: Synthetic oligonucleotide
  Antisense strand to SEQ ID NO: 2380012
cuuuagagaacccucugug

SEQ ID NO: 2380014 - RNA, 19 nt, Artificial Sequence
  Description of Artificial Sequence: Synthetic oligonucleotide
  Sense strand starting at position 171 of SEQ ID NO: 1885972
ggaagaagauuggcuguaa

SEQ ID NO: 2380015 - RNA, 19 nt, Artificial Sequence
  Description of Artificial Sequence: Synthetic oligonucleotide
  Antisense strand to SEQ ID NO: 2380014
uuacagccaaucuucuucc

SEQ ID NO: 2380016 - RNA, 19 nt, Artificial Sequence
  Description of Artificial Sequence: Synthetic oligonucleotide
  Sense strand starting at position 259 of SEQ ID NO: 1885972
guacaaguauuacugaaau

SEQ ID NO: 2380017 - RNA, 19 nt, Artificial Sequence
  Description of Artificial Sequence: Synthetic oligonucleotide
  Antisense strand to SEQ ID NO: 2380016
auuucaguaauacuuguac

SEQ ID NO: 2380018 - RNA, 19 nt, Artificial Sequence
  Description of Artificial Sequence: Synthetic oligonucleotide
  Sense strand starting at position 360 of SEQ ID NO: 1885972
cuuugauuacgcuagacca

SEQ ID NO: 2380019 - RNA, 19 nt, Artificial Sequence
  Description of Artificial Sequence: Synthetic oligonucleotide
  Antisense strand to SEQ ID NO: 2380018
uggucuagcguaaucaaag

SEQ ID NO: 2380020 - RNA, 19 nt, Artificial Sequence
  Description of Artificial Sequence: Synthetic oligonucleotide
  Sense strand starting at position 362 of SEQ ID NO: 1885972
uugauuacgcuagaccaua

SEQ ID NO: 2380021 - RNA, 19 nt, Artificial Sequence
  Description of Artificial Sequence: Synthetic oligonucleotide
  Antisense strand to SEQ ID NO: 2380020
uauggucuagcguaaucaa

SEQ ID NO: 2380022 - RNA, 19 nt, Artificial Sequence
  Description of Artificial Sequence: Synthetic oligonucleotide
  Sense strand starting at position 410 of SEQ ID NO: 1885972
uugauauguggccacuaac

SEQ ID NO: 2380023 - RNA, 19 nt, Artificial Sequence
  Description of Artificial Sequence: Synthetic oligonucleotide
  Antisense strand to SEQ ID NO: 2380022
guuaguggccacauaucaa

SEQ ID NO: 2380024 - RNA, 19 nt, Artificial Sequence
  Description of Artificial Sequence: Synthetic oligonucleotide
  Sense strand starting at position 427 of SEQ ID NO: 1885972
acaucagauuacuuuaguu

SEQ ID NO: 2380025 - RNA, 19 nt, Artificial Sequence
  Description of Artificial Sequence: Synthetic oligonucleotide
  Antisense strand to SEQ ID NO: 2380024
aacuaaaguaaucugaugu

SEQ ID NO: 2380026 - RNA, 19 nt, Artificial Sequence
  Description of Artificial Sequence: Synthetic oligonucleotide
  Sense strand starting at position 429 of SEQ ID NO: 1885972
aucagauuacuuuaguucu

SEQ ID NO: 2380027 - RNA, 19 nt, Artificial Sequence
  Description of Artificial Sequence: Synthetic oligonucleotide
  Antisense strand to SEQ ID NO: 2380026
agaacuaaaguaaucugau

SEQ ID NO: 2380028 - RNA, 19 nt, Artificial Sequence
  Description of Artificial Sequence: Synthetic oligonucleotide
  Sense strand starting at position 495 of SEQ ID NO: 1885972
ggauccuuuggaggcauua

SEQ ID NO: 2380029 - RNA, 19 nt, Artificial Sequence
  Description of Artificial Sequence: Synthetic oligonucleotide
  Antisense strand to SEQ ID NO: 2380028
uaaugccuccaaaggaucc

SEQ ID NO: 2380030 - RNA, 19 nt, Artificial Sequence
  Description of Artificial Sequence: Synthetic oligonucleotide
  Sense strand starting at position 506 of SEQ ID NO: 1885972
aggcauuaggcagacucua

SEQ ID NO: 2380031 - RNA, 19 nt, Artificial Sequence
  Description of Artificial Sequence: Synthetic oligonucleotide
  Antisense strand to SEQ ID NO: 2380030
uagagucugccuaaugccu

SEQ ID NO: 2380032 - RNA, 19 nt, Artificial Sequence
  Description of Artificial Sequence: Synthetic oligonucleotide
  Sense strand starting at position 679 of SEQ ID NO: 1885972
ugguaauauguccacgauc

SEQ ID NO: 2380033 - RNA, 19 nt, Artificial Sequence
  Description of Artificial Sequence: Synthetic oligonucleotide
  Antisense strand to SEQ ID NO: 2380032
gaucguggacauauuacca

SEQ ID NO: 2380034 - RNA, 19 nt, Artificial Sequence
  Description of Artificial Sequence: Synthetic oligonucleotide
  Sense strand starting at position 756 of SEQ ID NO: 1885972
cauggcuugcacuaaagga

SEQ ID NO: 2380035 - RNA, 19 nt, Artificial Sequence
  Description of Artificial Sequence: Synthetic oligonucleotide
  Antisense strand to SEQ ID NO: 2380034
uccuuuagugcaagccaug

SEQ ID NO: 2380036 - RNA, 19 nt, Artificial Sequence
  Description of Artificial Sequence: Synthetic oligonucleotide
  Sense strand starting at position 857 of SEQ ID NO: 1885972
ucacauuagguguaauuac

SEQ ID NO: 2380037 - RNA, 19 nt, Artificial Sequence
  Description of Artificial Sequence: Synthetic oligonucleotide
  Antisense strand to SEQ ID NO: 2380036
guaauuacaccuaauguga

SEQ ID NO: 2380038 - RNA, 19 nt, Artificial Sequence
  Description of Artificial Sequence: Synthetic oligonucleotide
  Sense strand starting at position 1013 of SEQ ID NO: 1885972
gguauacuugucuaucuaa

SEQ ID NO: 2380039 - RNA, 19 nt, Artificial Sequence
  Description of Artificial Sequence: Synthetic oligonucleotide
  Antisense strand to SEQ ID NO: 2380038
uuagauagacaaguauacc

SEQ ID NO: 2380040 - RNA, 19 nt, Artificial Sequence
  Description of Artificial Sequence: Synthetic oligonucleotide
  Sense strand starting at position 1248 of SEQ ID NO: 1885972
gagacaaauuuaggugaga

SEQ ID NO: 2380041 - RNA, 19 nt, Artificial Sequence
  Description of Artificial Sequence: Synthetic oligonucleotide
  Antisense strand to SEQ ID NO: 2380040
ucucaccuaaauuugucuc

SEQ ID NO: 2380042 - RNA, 19 nt, Artificial Sequence
  Description of Artificial Sequence: Synthetic oligonucleotide
  Sense strand starting at position 1423 of SEQ ID NO: 1885972
guauaagaagcuuagguuu

SEQ ID NO: 2380043 - RNA, 19 nt, Artificial Sequence
  Description of Artificial Sequence: Synthetic oligonucleotide
  Antisense strand to SEQ ID NO: 2380042
aaaccuaagcuucuuauac

SEQ ID NO: 2380044 - RNA, 19 nt, Artificial Sequence
  Description of Artificial Sequence: Synthetic oligonucleotide
  Sense strand starting at position 1476 of SEQ ID NO: 1885972
uuaugaaaugcaugaaggu

SEQ ID NO: 2380045 - RNA, 19 nt, Artificial Sequence
  Description of Artificial Sequence: Synthetic oligonucleotide
  Antisense strand to SEQ ID NO: 2380044
accuucaugcauuucauaa

SEQ ID NO: 2380046 - RNA, 19 nt, Artificial Sequence
  Description of Artificial Sequence: Synthetic oligonucleotide
  Sense strand starting at position 1499 of SEQ ID NO: 1885972
cugggaugggcuuauguga

SEQ ID NO: 2380047 - RNA, 19 nt, Artificial Sequence
  Description of Artificial Sequence: Synthetic oligonucleotide
  Antisense strand to SEQ ID NO: 2380046
ucacauaagcccaucccag

SEQ ID NO: 2380048 - RNA, 19 nt, Artificial Sequence
  Description of Artificial Sequence: Synthetic oligonucleotide
  Sense strand starting at position 1571 of SEQ ID NO: 1885972
ugguccuuuagagguuaga

SEQ ID NO: 2380049 - RNA, 19 nt, Artificial Sequence
  Description of Artificial Sequence: Synthetic oligonucleotide
  Antisense strand to SEQ ID NO: 2380048
ucuaaccucuaaaggacca

SEQ ID NO: 2380050 - RNA, 19 nt, Artificial Sequence
  Description of Artificial Sequence: Synthetic oligonucleotide
  Sense strand starting at position 1574 of SEQ ID NO: 1885972
uccuuuagagguuagagua

SEQ ID NO: 2380051 - RNA, 19 nt, Artificial Sequence
  Description of Artificial Sequence: Synthetic oligonucleotide
  Antisense strand to SEQ ID NO: 2380050
uacucuaaccucuaaagga

SEQ ID NO: 2380052 - RNA, 19 nt, Artificial Sequence
  Description of Artificial Sequence: Synthetic oligonucleotide
  Sense strand starting at position 1910 of SEQ ID NO: 1885972
aggcucaguccaggagaaa

SEQ ID NO: 2380053 - RNA, 19 nt, Artificial Sequence
  Description of Artificial Sequence: Synthetic oligonucleotide
  Antisense strand to SEQ ID NO: 2380052
uuucuccuggacugagccu

SEQ ID NO: 2380054 - RNA, 19 nt, Artificial Sequence
  Description of Artificial Sequence: Synthetic oligonucleotide
  Sense strand starting at position 2061 of SEQ ID NO: 1885972
gggcuuugaggucacuuga

SEQ ID NO: 2380055 - RNA, 19 nt, Artificial Sequence
  Description of Artificial Sequence: Synthetic oligonucleotide
  Antisense strand to SEQ ID NO: 2380054
ucaagugaccucaaagccc

SEQ ID NO: 2380056 - RNA, 19 nt, Artificial Sequence
  Description of Artificial Sequence: Synthetic oligonucleotide
  Sense strand starting at position 2094 of SEQ ID NO: 1885972
cccagcaaucuccagaguu

SEQ ID NO: 2380057 - RNA, 19 nt, Artificial Sequence
  Description of Artificial Sequence: Synthetic oligonucleotide
  Antisense strand to SEQ ID NO: 2380056
aacucuggagauugcuggg

SEQ ID NO: 2380058 - RNA, 19 nt, Artificial Sequence
  Description of Artificial Sequence: Synthetic oligonucleotide
  Sense strand starting at position 2104 of SEQ ID NO: 1885972
uccagaguucuccacagca

SEQ ID NO: 2380059 - RNA, 19 nt, Artificial Sequence
  Description of Artificial Sequence: Synthetic oligonucleotide
  Antisense strand to SEQ ID NO: 2380058
ugcuguggagaacucugga

SEQ ID NO: 2380060 - RNA, 19 nt, Artificial Sequence
  Description of Artificial Sequence: Synthetic oligonucleotide
  Sense strand starting at position 2106 of SEQ ID NO: 1885972
cagaguucuccacagcaga

SEQ ID NO: 2380061 - RNA, 19 nt, Artificial Sequence
  Description of Artificial Sequence: Synthetic oligonucleotide
  Antisense strand to SEQ ID NO: 2380060
ucugcuguggagaacucug

SEQ ID NO: 2380062 - RNA, 19 nt, Artificial Sequence
  Description of Artificial Sequence: Synthetic oligonucleotide
  Sense strand starting at position 2489 of SEQ ID NO: 1885972
ggaggaggaggucgucauu

SEQ ID NO: 2380063 - RNA, 19 nt, Artificial Sequence
  Description of Artificial Sequence: Synthetic oligonucleotide
  Antisense strand to SEQ ID NO: 2380062
aaugacgaccuccuccucc

SEQ ID NO: 2380064 - RNA, 19 nt, Artificial Sequence
  Description of Artificial Sequence: Synthetic oligonucleotide
  Sense strand starting at position 2492 of SEQ ID NO: 1885972
ggaggaggucgucauuauu

SEQ ID NO: 2380065 - RNA, 19 nt, Artificial Sequence
  Description of Artificial Sequence: Synthetic oligonucleotide
  Antisense strand to SEQ ID NO: 2380064
aauaaugacgaccuccucc

SEQ ID NO: 2380066 - RNA, 19 nt, Artificial Sequence
  Description of Artificial Sequence: Synthetic oligonucleotide
  Sense strand starting at position 2569 of SEQ ID NO: 1885972
gcagaagacuuucuaaucu

SEQ ID NO: 2380067 - RNA, 19 nt, Artificial Sequence
  Description of Artificial Sequence: Synthetic oligonucleotide
  Antisense strand to SEQ ID NO: 2380066
agauuagaaagucuucugc

SEQ ID NO: 2380068 - RNA, 19 nt, Artificial Sequence
  Description of Artificial Sequence: Synthetic oligonucleotide
  Sense strand starting at position 2947 of SEQ ID NO: 1885972
ucauguugucaugaaguua

SEQ ID NO: 2380069 - RNA, 19 nt, Artificial Sequence
  Description of Artificial Sequence: Synthetic oligonucleotide
  Antisense strand to SEQ ID NO: 2380068
uaacuucaugacaacauga

SEQ ID NO: 2380070 - RNA, 19 nt, Artificial Sequence
  Description of Artificial Sequence: Synthetic oligonucleotide
  Sense strand starting at position 2959 of SEQ ID NO: 1885972
gaaguuaguguuugaugaa

SEQ ID NO: 2380071 - RNA, 19 nt, Artificial Sequence
  Description of Artificial Sequence: Synthetic oligonucleotide
  Antisense strand to SEQ ID NO: 2380070
uucaucaaacacuaacuuc

SEQ ID NO: 2380072 - RNA, 19 nt, Artificial Sequence
  Description of Artificial Sequence: Synthetic oligonucleotide
  Sense strand starting at position 2994 of SEQ ID NO: 1885972
uugugagcuaaguaaggau

SEQ ID NO: 2380073 - RNA, 19 nt, Artificial Sequence
  Description of Artificial Sequence: Synthetic oligonucleotide
  Antisense strand to SEQ ID NO: 2380072
auccuuacuuagcucacaa

SEQ ID NO: 2380074 - RNA, 19 nt, Artificial Sequence
  Description of Artificial Sequence: Synthetic oligonucleotide
  Sense strand starting at position 3044 of SEQ ID NO: 1885972
uaaaguagguaugcagaaa

SEQ ID NO: 2380075 - RNA, 19 nt, Artificial Sequence
  Description of Artificial Sequence: Synthetic oligonucleotide
  Antisense strand to SEQ ID NO: 2380074
uuucugcauaccuacuuua

SEQ ID NO: 2380076 - RNA, 19 nt, Artificial Sequence
  Description of Artificial Sequence: Synthetic oligonucleotide
  Sense strand starting at position 3186 of SEQ ID NO: 1885972
cuuccauggcuguaaacua

SEQ ID NO: 2380077 - RNA, 19 nt, Artificial Sequence
  Description of Artificial Sequence: Synthetic oligonucleotide
  Antisense strand to SEQ ID NO: 2380076
uaguuuacagccauggaag

SEQ ID NO: 2380078 - RNA, 19 nt, Artificial Sequence
  Description of Artificial Sequence: Synthetic oligonucleotide
  Sense strand starting at position 3241 of SEQ ID NO: 1885972
cuuagaggacucugguaac

SEQ ID NO: 2380079 - RNA, 19 nt, Artificial Sequence
  Description of Artificial Sequence: Synthetic oligonucleotide
  Antisense strand to SEQ ID NO: 2380078
guuaccagaguccucuaag

SEQ ID NO: 2380080 - RNA, 19 nt, Artificial Sequence
  Description of Artificial Sequence: Synthetic oligonucleotide
  Sense strand starting at position 3247 of SEQ ID NO: 1885972
ggacucugguaacugauau

SEQ ID NO: 2380081 - RNA, 19 nt, Artificial Sequence
  Description of Artificial Sequence: Synthetic oligonucleotide
  Antisense strand to SEQ ID NO: 2380080
auaucaguuaccagagucc

SEQ ID NO: 2380082 - RNA, 19 nt, Artificial Sequence
  Description of Artificial Sequence: Synthetic oligonucleotide
  Sense strand starting at position 3308 of SEQ ID NO: 1885972
ucuguuaccucaccugaga

SEQ ID NO: 2380083 - RNA, 19 nt, Artificial Sequence
  Description of Artificial Sequence: Synthetic oligonucleotide
  Antisense strand to SEQ ID NO: 2380082
ucucaggugagguaacaga

SEQ ID NO: 2380084 - RNA, 19 nt, Artificial Sequence
  Description of Artificial Sequence: Synthetic oligonucleotide
  Sense strand starting at position 3454 of SEQ ID NO: 1885972
ggcagaagucagggcauaa

SEQ ID NO: 2380085 - RNA, 19 nt, Artificial Sequence
  Description of Artificial Sequence: Synthetic oligonucleotide
  Antisense strand to SEQ ID NO: 2380084
uuaugcccugacuucugcc

SEQ ID NO: 2380086 - RNA, 19 nt, Artificial Sequence
  Description of Artificial Sequence: Synthetic oligonucleotide
  Sense strand starting at position 3488 of SEQ ID NO: 1885972
uggagaauguaucugaguu

SEQ ID NO: 2380087 - RNA, 19 nt, Artificial Sequence
  Description of Artificial Sequence: Synthetic oligonucleotide
  Antisense strand to SEQ ID NO: 2380086
aacucagauacauucucca

SEQ ID NO: 2380088 - RNA, 19 nt, Artificial Sequence
  Description of Artificial Sequence: Synthetic oligonucleotide
  Sense strand starting at position 3489 of SEQ ID NO: 1885972
ggagaauguaucugaguug

SEQ ID NO: 2380089 - RNA, 19 nt, Artificial Sequence
  Description of Artificial Sequence: Synthetic oligonucleotide
  Antisense strand to SEQ ID NO: 2380088
caacucagauacauucucc

SEQ ID NO: 2380090 - RNA, 19 nt, Artificial Sequence
  Description of Artificial Sequence: Synthetic oligonucleotide
  Sense strand starting at position 3492 of SEQ ID NO: 1885972
gaauguaucugaguugaua

SEQ ID NO: 2380091 - RNA, 19 nt, Artificial Sequence
  Description of Artificial Sequence: Synthetic oligonucleotide
  Antisense strand to SEQ ID NO: 2380090
uaucaacucagauacauuc

SEQ ID NO: 2380092 - RNA, 19 nt, Artificial Sequence
  Description of Artificial Sequence: Synthetic oligonucleotide
  Sense strand starting at position 3494 of SEQ ID NO: 1885972
auguaucugaguugauaga

SEQ ID NO: 2380093 - RNA, 19 nt, Artificial Sequence
  Description of Artificial Sequence: Synthetic oligonucleotide
  Antisense strand to SEQ ID NO: 2380092
ucuaucaacucagauacau

SEQ ID NO: 2380094 - RNA, 19 nt, Artificial Sequence
  Description of Artificial Sequence: Synthetic oligonucleotide
  Sense strand starting at position 148 of SEQ ID NO: 1885973
ucaagauaugcgcaacuga

SEQ ID NO: 2380095 - RNA, 19 nt, Artificial Sequence
  Description of Artificial Sequence: Synthetic oligonucleotide
  Antisense strand to SEQ ID NO: 2380094
ucaguugcgcauaucuuga

SEQ ID NO: 2380096 - RNA, 19 nt, Artificial Sequence
  Description of Artificial Sequence: Synthetic oligonucleotide
  Sense strand starting at position 231 of SEQ ID NO: 1885973
uuagaaauauggucgaaua

SEQ ID NO: 2380097 - RNA, 19 nt, Artificial Sequence
  Description of Artificial Sequence: Synthetic oligonucleotide
  Antisense strand to SEQ ID NO: 2380096
uauucgaccauauuucuaa

SEQ ID NO: 2380098 - RNA, 19 nt, Artificial Sequence
  Description of Artificial Sequence: Synthetic oligonucleotide
  Sense strand starting at position 232 of SEQ ID NO: 1885973
uagaaauauggucgaauaa

SEQ ID NO: 2380099 - RNA, 19 nt, Artificial Sequence
  Description of Artificial Sequence: Synthetic oligonucleotide
  Antisense strand to SEQ ID NO: 2380098
uuauucgaccauauuucua

SEQ ID NO: 2380100 - RNA, 19 nt, Artificial Sequence
  Description of Artificial Sequence: Synthetic oligonucleotide
  Sense strand starting at position 265 of SEQ ID NO: 1885973
ucagauguacuauguaagu

SEQ ID NO: 2380101 - RNA, 19 nt, Artificial Sequence
  Description of Artificial Sequence: Synthetic oligonucleotide
  Antisense strand to SEQ ID NO: 2380100
acuuacauaguacaucuga

SEQ ID NO: 2380102 - RNA, 19 nt, Artificial Sequence
  Description of Artificial Sequence: Synthetic oligonucleotide
  Sense strand starting at position 267 of SEQ ID NO: 1885973
agauguacuauguaagucu

SEQ ID NO: 2380103 - RNA, 19 nt, Artificial Sequence
  Description of Artificial Sequence: Synthetic oligonucleotide
  Antisense strand to SEQ ID NO: 2380102
agacuuacauaguacaucu

SEQ ID NO: 2380104 - RNA, 19 nt, Artificial Sequence
  Description of Artificial Sequence: Synthetic oligonucleotide
  Sense strand starting at position 327 of SEQ ID NO: 1885973
aagagcuccgcagaaugaa

SEQ ID NO: 2380105 - RNA, 19 nt, Artificial Sequence
  Description of Artificial Sequence: Synthetic oligonucleotide
  Antisense strand to SEQ ID NO: 2380104
uucauucugcggagcucuu

SEQ ID NO: 2380106 - RNA, 19 nt, Artificial Sequence
  Description of Artificial Sequence: Synthetic oligonucleotide
  Sense strand starting at position 434 of SEQ ID NO: 1885973
uuucuaagauuagagacua

SEQ ID NO: 2380107 - RNA, 19 nt, Artificial Sequence
  Description of Artificial Sequence: Synthetic oligonucleotide
  Antisense strand to SEQ ID NO: 2380106
uagucucuaaucuuagaaa

SEQ ID NO: 2380108 - RNA, 19 nt, Artificial Sequence
  Description of Artificial Sequence: Synthetic oligonucleotide
  Sense strand starting at position 569 of SEQ ID NO: 1885973
gcccauuaccgagagcagu

SEQ ID NO: 2380109 - RNA, 19 nt, Artificial Sequence
  Description of Artificial Sequence: Synthetic oligonucleotide
  Antisense strand to SEQ ID NO: 2380108
acugcucucgguaaugggc

SEQ ID NO: 2380110 - RNA, 19 nt, Artificial Sequence
  Description of Artificial Sequence: Synthetic oligonucleotide
  Sense strand starting at position 632 of SEQ ID NO: 1885973
gagauuuggugucagaaug

SEQ ID NO: 2380111 - RNA, 19 nt, Artificial Sequence
  Description of Artificial Sequence: Synthetic oligonucleotide
  Antisense strand to SEQ ID NO: 2380110
cauucugacaccaaaucuc

SEQ ID NO: 2380112 - RNA, 19 nt, Artificial Sequence
  Description of Artificial Sequence: Synthetic oligonucleotide
  Sense strand starting at position 667 of SEQ ID NO: 1885973
uuucgaucauggcuuguga

SEQ ID NO: 2380113 - RNA, 19 nt, Artificial Sequence
  Description of Artificial Sequence: Synthetic oligonucleotide
  Antisense strand to SEQ ID NO: 2380112
ucacaagccaugaucgaaa

SEQ ID NO: 2380114 - RNA, 19 nt, Artificial Sequence
  Description of Artificial Sequence: Synthetic oligonucleotide
  Sense strand starting at position 669 of SEQ ID NO: 1885973
ucgaucauggcuugugaua

SEQ ID NO: 2380115 - RNA, 19 nt, Artificial Sequence
  Description of Artificial Sequence: Synthetic oligonucleotide
  Antisense strand to SEQ ID NO: 2380114
uaucacaagccaugaucga

SEQ ID NO: 2380116 - RNA, 19 nt, Artificial Sequence
  Description of Artificial Sequence: Synthetic oligonucleotide
  Sense strand starting at position 722 of SEQ ID NO: 1885973
uuuaaagacuaggaauuga

SEQ ID NO: 2380117 - RNA, 19 nt, Artificial Sequence
  Description of Artificial Sequence: Synthetic oligonucleotide
  Antisense strand to SEQ ID NO: 2380116
ucaauuccuagucuuuaaa

SEQ ID NO: 2380118 - RNA, 19 nt, Artificial Sequence
  Description of Artificial Sequence: Synthetic oligonucleotide
  Sense strand starting at position 833 of SEQ ID NO: 1885973
auuuaaauaucaggagauc

SEQ ID NO: 2380119 - RNA, 19 nt, Artificial Sequence
  Description of Artificial Sequence: Synthetic oligonucleotide
  Antisense strand to SEQ ID NO: 2380118
gaucuccugauauuuaaau

SEQ ID NO: 2380120 - RNA, 19 nt, Artificial Sequence
  Description of Artificial Sequence: Synthetic oligonucleotide
  Sense strand starting at position 850 of SEQ ID NO: 1885973
ucaaaugaucuuggcguca

SEQ ID NO: 2380121 - RNA, 19 nt, Artificial Sequence
  Description of Artificial Sequence: Synthetic oligonucleotide
  Antisense strand to SEQ ID NO: 2380120
ugacgccaagaucauuuga

SEQ ID NO: 2380122 - RNA, 19 nt, Artificial Sequence
  Description of Artificial Sequence: Synthetic oligonucleotide
  Sense strand starting at position 855 of SEQ ID NO: 1885973
ugaucuuggcgucauuacu

SEQ ID NO: 2380123 - RNA, 19 nt, Artificial Sequence
  Description of Artificial Sequence: Synthetic oligonucleotide
  Antisense strand to SEQ ID NO: 2380122
aguaaugacgccaagauca

SEQ ID NO: 2380124 - RNA, 19 nt, Artificial Sequence
  Description of Artificial Sequence: Synthetic oligonucleotide
  Sense strand starting at position 910 of SEQ ID NO: 1885973
uagcuagcaccguaauuau

SEQ ID NO: 2380125 - RNA, 19 nt, Artificial Sequence
  Description of Artificial Sequence: Synthetic oligonucleotide
  Antisense strand to SEQ ID NO: 2380124
auaauuacggugcuagcua

SEQ ID NO: 2380126 - RNA, 19 nt, Artificial Sequence
  Description of Artificial Sequence: Synthetic oligonucleotide
  Sense strand starting at position 913 of SEQ ID NO: 1885973
cuagcaccguaauuaucaa

SEQ ID NO: 2380127 - RNA, 19 nt, Artificial Sequence
  Description of Artificial Sequence: Synthetic oligonucleotide
  Antisense strand to SEQ ID NO: 2380126
uugauaauuacggugcuag

SEQ ID NO: 2380128 - RNA, 19 nt, Artificial Sequence
  Description of Artificial Sequence: Synthetic oligonucleotide
  Sense strand starting at position 970 of SEQ ID NO: 1885973
uugucuucguaauucugaa

SEQ ID NO: 2380129 - RNA, 19 nt, Artificial Sequence
  Description of Artificial Sequence: Synthetic oligonucleotide
  Antisense strand to SEQ ID NO: 2380128
uucagaauuacgaagacaa

SEQ ID NO: 2380130 - RNA, 19 nt, Artificial Sequence
  Description of Artificial Sequence: Synthetic oligonucleotide
  Sense strand starting at position 2443 of SEQ ID NO: 1885973
ccacgauuggcuggugaug

SEQ ID NO: 2380131 - RNA, 19 nt, Artificial Sequence
  Description of Artificial Sequence: Synthetic oligonucleotide
  Antisense strand to SEQ ID NO: 2380130
caucaccagccaaucgugg

SEQ ID NO: 2380132 - RNA, 19 nt, Artificial Sequence
  Description of Artificial Sequence: Synthetic oligonucleotide
  Sense strand starting at position 2525 of SEQ ID NO: 1885973
gcuggaggguuccugguau

SEQ ID NO: 2380133 - RNA, 19 nt, Artificial Sequence
  Description of Artificial Sequence: Synthetic oligonucleotide
  Antisense strand to SEQ ID NO: 2380132
auaccaggaacccuccagc

SEQ ID NO: 2380134 - RNA, 19 nt, Artificial Sequence
  Description of Artificial Sequence: Synthetic oligonucleotide
  Sense strand starting at position 2821 of SEQ ID NO: 1885973
caguauccgaguugagaug

SEQ ID NO: 2380135 - RNA, 19 nt, Artificial Sequence
  Description of Artificial Sequence: Synthetic oligonucleotide
  Antisense strand to SEQ ID NO: 2380134
caucucaacucggauacug

SEQ ID NO: 2380136 - RNA, 19 nt, Artificial Sequence
  Description of Artificial Sequence: Synthetic oligonucleotide
  Sense strand starting at position 2828 of SEQ ID NO: 1885973
cgaguugagaugcgauuua

SEQ ID NO: 2380137 - RNA, 19 nt, Artificial Sequence
  Description of Artificial Sequence: Synthetic oligonucleotide
  Antisense strand to SEQ ID NO: 2380136
uaaaucgcaucucaacucg

SEQ ID NO: 2380138 - RNA, 19 nt, Artificial Sequence
  Description of Artificial Sequence: Synthetic oligonucleotide
  Sense strand starting at position 2839 of SEQ ID NO: 1885973
gcgauuuauuuguggauuu

SEQ ID NO: 2380139 - RNA, 19 nt, Artificial Sequence
  Description of Artificial Sequence: Synthetic oligonucleotide
  Antisense strand to SEQ ID NO: 2380138
aaauccacaaauaaaucgc

SEQ ID NO: 2380140 - RNA, 19 nt, Artificial Sequence
  Description of Artificial Sequence: Synthetic oligonucleotide
  Sense strand starting at position 2874 of SEQ ID NO: 1885973
gcauuuaccugagagccua

SEQ ID NO: 2380141 - RNA, 19 nt, Artificial Sequence
  Description of Artificial Sequence: Synthetic oligonucleotide
  Antisense strand to SEQ ID NO: 2380140
uaggcucucagguaaaugc

SEQ ID NO: 2380142 - RNA, 19 nt, Artificial Sequence
  Description of Artificial Sequence: Synthetic oligonucleotide
  Sense strand starting at position 2908 of SEQ ID NO: 1885973
ucuugugagcugucgucau

SEQ ID NO: 2380143 - RNA, 19 nt, Artificial Sequence
  Description of Artificial Sequence: Synthetic oligonucleotide
  Antisense strand to SEQ ID NO: 2380142
augacgacagcucacaaga

SEQ ID NO: 2380144 - RNA, 19 nt, Artificial Sequence
  Description of Artificial Sequence: Synthetic oligonucleotide
  Sense strand starting at position 2912 of SEQ ID NO: 1885973
gugagcugucgucauggaa

SEQ ID NO: 2380145 - RNA, 19 nt, Artificial Sequence
  Description of Artificial Sequence: Synthetic oligonucleotide
  Antisense strand to SEQ ID NO: 2380144
uuccaugacgacagcucac

SEQ ID NO: 2380146 - RNA, 19 nt, Artificial Sequence
  Description of Artificial Sequence: Synthetic oligonucleotide
  Sense strand starting at position 2915 of SEQ ID NO: 1885973
agcugucgucauggaaauc

SEQ ID NO: 2380147 - RNA, 19 nt, Artificial Sequence
  Description of Artificial Sequence: Synthetic oligonucleotide
  Antisense strand to SEQ ID NO: 2380146
gauuuccaugacgacagcu

SEQ ID NO: 2380148 - RNA, 19 nt, Artificial Sequence
  Description of Artificial Sequence: Synthetic oligonucleotide
  Sense strand starting at position 2916 of SEQ ID NO: 1885973
gcugucgucauggaaauca

SEQ ID NO: 2380149 - RNA, 19 nt, Artificial Sequence
  Description of Artificial Sequence: Synthetic oligonucleotide
  Antisense strand to SEQ ID NO: 2380148
ugauuuccaugacgacagc

SEQ ID NO: 2380150 - RNA, 19 nt, Artificial Sequence
  Description of Artificial Sequence: Synthetic oligonucleotide
  Sense strand starting at position 3003 of SEQ ID NO: 1885973
uggauuccacccuguagga

SEQ ID NO: 2380151 - RNA, 19 nt, Artificial Sequence
  Description of Artificial Sequence: Synthetic oligonucleotide
  Antisense strand to SEQ ID NO: 2380150
uccuacaggguggaaucca

SEQ ID NO: 2380152 - RNA, 19 nt, Artificial Sequence
  Description of Artificial Sequence: Synthetic oligonucleotide
  Sense strand starting at position 3017 of SEQ ID NO: 1885973
uaggacaauguuuguuaga

SEQ ID NO: 2380153 - RNA, 19 nt, Artificial Sequence
  Description of Artificial Sequence: Synthetic oligonucleotide
  Antisense strand to SEQ ID NO: 2380152
ucuaacaaacauuguccua

SEQ ID NO: 2380154 - RNA, 19 nt, Artificial Sequence
  Description of Artificial Sequence: Synthetic oligonucleotide
  Sense strand starting at position 3018 of SEQ ID NO: 1885973
aggacaauguuuguuagag

SEQ ID NO: 2380155 - RNA, 19 nt, Artificial Sequence
  Description of Artificial Sequence: Synthetic oligonucleotide
  Antisense strand to SEQ ID NO: 2380154
cucuaacaaacauuguccu

SEQ ID NO: 2380156 - RNA, 19 nt, Artificial Sequence
  Description of Artificial Sequence: Synthetic oligonucleotide
  Sense strand starting at position 3019 of SEQ ID NO: 1885973
ggacaauguuuguuagagu

SEQ ID NO: 2380157 - RNA, 19 nt, Artificial Sequence
  Description of Artificial Sequence: Synthetic oligonucleotide
  Antisense strand to SEQ ID NO: 2380156
acucuaacaaacauugucc

SEQ ID NO: 2380158 - RNA, 19 nt, Artificial Sequence
  Description of Artificial Sequence: Synthetic oligonucleotide
  Sense strand starting at position 3110 of SEQ ID NO: 1885973
auuugcuuucggcaaaucu

SEQ ID NO: 2380159 - RNA, 19 nt, Artificial Sequence
  Description of Artificial Sequence: Synthetic oligonucleotide
  Antisense strand to SEQ ID NO: 2380158
agauuugccgaaagcaaau

SEQ ID NO: 2380160 - RNA, 19 nt, Artificial Sequence
  Description of Artificial Sequence: Synthetic oligonucleotide
  Sense strand starting at position 3152 of SEQ ID NO: 1885973
cuacuuuaacguggaaaca

SEQ ID NO: 2380161 - RNA, 19 nt, Artificial Sequence
  Description of Artificial Sequence: Synthetic oligonucleotide
  Antisense strand to SEQ ID NO: 2380160
uguuuccacguuaaaguag

SEQ ID NO: 2380162 - RNA, 19 nt, Artificial Sequence
  Description of Artificial Sequence: Synthetic oligonucleotide
  Sense strand starting at position 3254 of SEQ ID NO: 1885973
cguugccgguauuuagaaa

SEQ ID NO: 2380163 - RNA, 19 nt, Artificial Sequence
  Description of Artificial Sequence: Synthetic oligonucleotide
  Antisense strand to SEQ ID NO: 2380162
uuucuaaauaccggcaacg

SEQ ID NO: 2380164 - RNA, 19 nt, Artificial Sequence
  Description of Artificial Sequence: Synthetic oligonucleotide
  Sense strand starting at position 3473 of SEQ ID NO: 1885973
gacacaguuguugauugau

SEQ ID NO: 2380165 - RNA, 19 nt, Artificial Sequence
  Description of Artificial Sequence: Synthetic oligonucleotide
  Antisense strand to SEQ ID NO: 2380164
aucaaucaacaacuguguc

SEQ ID NO: 2380166 - RNA, 19 nt, Artificial Sequence
  Description of Artificial Sequence: Synthetic oligonucleotide
  Sense strand starting at position 3601 of SEQ ID NO: 1885973
ggcaguauacuuugaacuc

SEQ ID NO: 2380167 - RNA, 19 nt, Artificial Sequence
  Description of Artificial Sequence: Synthetic oligonucleotide
  Antisense strand to SEQ ID NO: 2380166
gaguucaaaguauacugcc

SEQ ID NO: 2380168 - RNA, 19 nt, Artificial Sequence
  Description of Artificial Sequence: Synthetic oligonucleotide
  Sense strand starting at position 3877 of SEQ ID NO: 1885973
cucugauugugccuuuaca

SEQ ID NO: 2380169 - RNA, 19 nt, Artificial Sequence
  Description of Artificial Sequence: Synthetic oligonucleotide
  Antisense strand to SEQ ID NO: 2380168
uguaaaggcacaaucagag

SEQ ID NO: 2380170 - RNA, 19 nt, Artificial Sequence
  Description of Artificial Sequence: Synthetic oligonucleotide
  Sense strand starting at position 3911 of SEQ ID NO: 1885973
augucuaugccagggaaac

SEQ ID NO: 2380171 - RNA, 19 nt, Artificial Sequence
  Description of Artificial Sequence: Synthetic oligonucleotide
  Antisense strand to SEQ ID NO: 2380170
guuucccuggcauagacau

SEQ ID NO: 2380172 - RNA, 19 nt, Artificial Sequence
  Description of Artificial Sequence: Synthetic oligonucleotide
  Sense strand starting at position 3912 of SEQ ID NO: 1885973
ugucuaugccagggaaaca

SEQ ID NO: 2380173 - RNA, 19 nt, Artificial Sequence
  Description of Artificial Sequence: Synthetic oligonucleotide
  Antisense strand to SEQ ID NO: 2380172
uguuucccuggcauagaca

SEQ ID NO: 2380174 - RNA, 19 nt, Artificial Sequence
  Description of Artificial Sequence: Synthetic oligonucleotide
  Sense strand starting at position 16 of SEQ ID NO: 1885974
agauuaacgcauugaauua

SEQ ID NO: 2380175 - RNA, 19 nt, Artificial Sequence
  Description of Artificial Sequence: Synthetic oligonucleotide
  Antisense strand to SEQ ID NO: 2380174
uaauucaaugcguuaaucu

SEQ ID NO: 2380176 - RNA, 19 nt, Artificial Sequence
  Description of Artificial Sequence: Synthetic oligonucleotide
  Sense strand starting at position 174 of SEQ ID NO: 1885974
ccuuaccauccggaaguau

SEQ ID NO: 2380177 - RNA, 19 nt, Artificial Sequence
  Description of Artificial Sequence: Synthetic oligonucleotide
  Antisense strand to SEQ ID NO: 2380176
auacuuccggaugguaagg

SEQ ID NO: 2380178 - RNA, 19 nt, Artificial Sequence
  Description of Artificial Sequence: Synthetic oligonucleotide
  Sense strand starting at position 254 of SEQ ID NO: 1885974
ggccacugguuacuuuaaa

SEQ ID NO: 2380179 - RNA, 19 nt, Artificial Sequence
  Description of Artificial Sequence: Synthetic oligonucleotide
  Antisense strand to SEQ ID NO: 2380178
uuuaaaguaaccaguggcc

SEQ ID NO: 2380180 - RNA, 19 nt, Artificial Sequence
  Description of Artificial Sequence: Synthetic oligonucleotide
  Sense strand starting at position 255 of SEQ ID NO: 1885974
gccacugguuacuuuaaau

SEQ ID NO: 2380181 - RNA, 19 nt, Artificial Sequence
  Description of Artificial Sequence: Synthetic oligonucleotide
  Antisense strand to SEQ ID NO: 2380180
auuuaaaguaaccaguggc

SEQ ID NO: 2380182 - RNA, 19 nt, Artificial Sequence
  Description of Artificial Sequence: Synthetic oligonucleotide
  Sense strand starting at position 307 of SEQ ID NO: 1885974
ggauacuagcuuugucucu

SEQ ID NO: 2380183 - RNA, 19 nt, Artificial Sequence
  Description of Artificial Sequence: Synthetic oligonucleotide
  Antisense strand to SEQ ID NO: 2380182
agagacaaagcuaguaucc

SEQ ID NO: 2380184 - RNA, 19 nt, Artificial Sequence
  Description of Artificial Sequence: Synthetic oligonucleotide
  Sense strand starting at position 601 of SEQ ID NO: 1885974
ucaagauaugcgcaacuga

SEQ ID NO: 2380185 - RNA, 19 nt, Artificial Sequence
  Description of Artificial Sequence: Synthetic oligonucleotide
  Antisense strand to SEQ ID NO: 2380184
ucaguugcgcauaucuuga

SEQ ID NO: 2380186 - RNA, 19 nt, Artificial Sequence
  Description of Artificial Sequence: Synthetic oligonucleotide
  Sense strand starting at position 684 of SEQ ID NO: 1885974
uuagaaauauggucgaaua

SEQ ID NO: 2380187 - RNA, 19 nt, Artificial Sequence
  Description of Artificial Sequence: Synthetic oligonucleotide
  Antisense strand to SEQ ID NO: 2380186
uauucgaccauauuucuaa

SEQ ID NO: 2380188 - RNA, 19 nt, Artificial Sequence
  Description of Artificial Sequence: Synthetic oligonucleotide
  Sense strand starting at position 685 of SEQ ID NO: 1885974
uagaaauauggucgaauaa

SEQ ID NO: 2380189 - RNA, 19 nt, Artificial Sequence
  Description of Artificial Sequence: Synthetic oligonucleotide
  Antisense strand to SEQ ID NO: 2380188
uuauucgaccauauuucua

SEQ ID NO: 2380190 - RNA, 19 nt, Artificial Sequence
  Description of Artificial Sequence: Synthetic oligonucleotide
  Sense strand starting at position 718 of SEQ ID NO: 1885974
ucagauguacuauguaagu

SEQ ID NO: 2380191 - RNA, 19 nt, Artificial Sequence
  Description of Artificial Sequence: Synthetic oligonucleotide
  Antisense strand to SEQ ID NO: 2380190
acuuacauaguacaucuga

SEQ ID NO: 2380192 - RNA, 19 nt, Artificial Sequence
  Description of Artificial Sequence: Synthetic oligonucleotide
  Sense strand starting at position 720 of SEQ ID NO: 1885974
agauguacuauguaagucu

SEQ ID NO: 2380193 - RNA, 19 nt, Artificial Sequence
  Description of Artificial Sequence: Synthetic oligonucleotide
  Antisense strand to SEQ ID NO: 2380192
agacuuacauaguacaucu

SEQ ID NO: 2380194 - RNA, 19 nt, Artificial Sequence
  Description of Artificial Sequence: Synthetic oligonucleotide
  Sense strand starting at position 780 of SEQ ID NO: 1885974
aagagcuccgcagaaugaa

SEQ ID NO: 2380195 - RNA, 19 nt, Artificial Sequence
  Description of Artificial Sequence: Synthetic oligonucleotide
  Antisense strand to SEQ ID NO: 2380194
uucauucugcggagcucuu

SEQ ID NO: 2380196 - RNA, 19 nt, Artificial Sequence
  Description of Artificial Sequence: Synthetic oligonucleotide
  Sense strand starting at position 887 of SEQ ID NO: 1885974
uuucuaagauuagagacua

SEQ ID NO: 2380197 - RNA, 19 nt, Artificial Sequence
  Description of Artificial Sequence: Synthetic oligonucleotide
  Antisense strand to SEQ ID NO: 2380196
uagucucuaaucuuagaaa

SEQ ID NO: 2380198 - RNA, 19 nt, Artificial Sequence
  Description of Artificial Sequence: Synthetic oligonucleotide
  Sense strand starting at position 1022 of SEQ ID NO: 1885974
gcccauuaccgagagcagu

SEQ ID NO: 2380199 - RNA, 19 nt, Artificial Sequence
  Description of Artificial Sequence: Synthetic oligonucleotide
  Antisense strand to SEQ ID NO: 2380198
acugcucucgguaaugggc

SEQ ID NO: 2380200 - RNA, 19 nt, Artificial Sequence
  Description of Artificial Sequence: Synthetic oligonucleotide
  Sense strand starting at position 1085 of SEQ ID NO: 1885974
gagauuuggugucagaaug

SEQ ID NO: 2380201 - RNA, 19 nt, Artificial Sequence
  Description of Artificial Sequence: Synthetic oligonucleotide
  Antisense strand to SEQ ID NO: 2380200
cauucugacaccaaaucuc

SEQ ID NO: 2380202 - RNA, 19 nt, Artificial Sequence
  Description of Artificial Sequence: Synthetic oligonucleotide
  Sense strand starting at position 1120 of SEQ ID NO: 1885974
uuucgaucauggcuuguga

SEQ ID NO: 2380203 - RNA, 19 nt, Artificial Sequence
  Description of Artificial Sequence: Synthetic oligonucleotide
  Antisense strand to SEQ ID NO: 2380202
ucacaagccaugaucgaaa

SEQ ID NO: 2380204 - RNA, 19 nt, Artificial Sequence
  Description of Artificial Sequence: Synthetic oligonucleotide
  Sense strand starting at position 1122 of SEQ ID NO: 1885974
ucgaucauggcuugugaua

SEQ ID NO: 2380205 - RNA, 19 nt, Artificial Sequence
  Description of Artificial Sequence: Synthetic oligonucleotide
  Antisense strand to SEQ ID NO: 2380204
uaucacaagccaugaucga

SEQ ID NO: 2380206 - RNA, 19 nt, Artificial Sequence
  Description of Artificial Sequence: Synthetic oligonucleotide
  Sense strand starting at position 1175 of SEQ ID NO: 1885974
uuuaaagacuaggaauuga

SEQ ID NO: 2380207 - RNA, 19 nt, Artificial Sequence
  Description of Artificial Sequence: Synthetic oligonucleotide
  Antisense strand to SEQ ID NO: 2380206
ucaauuccuagucuuuaaa

SEQ ID NO: 2380208 - RNA, 19 nt, Artificial Sequence
  Description of Artificial Sequence: Synthetic oligonucleotide
  Sense strand starting at position 1286 of SEQ ID NO: 1885974
auuuaaauaucaggagauc

SEQ ID NO: 2380209 - RNA, 19 nt, Artificial Sequence
  Description of Artificial Sequence: Synthetic oligonucleotide
  Antisense strand to SEQ ID NO: 2380208
gaucuccugauauuuaaau

SEQ ID NO: 2380210 - RNA, 19 nt, Artificial Sequence
  Description of Artificial Sequence: Synthetic oligonucleotide
  Sense strand starting at position 1303 of SEQ ID NO: 1885974
ucaaaugaucuuggcguca

SEQ ID NO: 2380211 - RNA, 19 nt, Artificial Sequence
  Description of Artificial Sequence: Synthetic oligonucleotide
  Antisense strand to SEQ ID NO: 2380210
ugacgccaagaucauuuga

SEQ ID NO: 2380212 - RNA, 19 nt, Artificial Sequence
  Description of Artificial Sequence: Synthetic oligonucleotide
  Sense strand starting at position 1308 of SEQ ID NO: 1885974
ugaucuuggcgucauuacu

SEQ ID NO: 2380213 - RNA, 19 nt, Artificial Sequence
  Description of Artificial Sequence: Synthetic oligonucleotide
  Antisense strand to SEQ ID NO: 2380212
aguaaugacgccaagauca

SEQ ID NO: 2380214 - RNA, 19 nt, Artificial Sequence
  Description of Artificial Sequence: Synthetic oligonucleotide
  Sense strand starting at position 1363 of SEQ ID NO: 1885974
uagcuagcaccguaauuau

SEQ ID NO: 2380215 - RNA, 19 nt, Artificial Sequence
  Description of Artificial Sequence: Synthetic oligonucleotide
  Antisense strand to SEQ ID NO: 2380214
auaauuacggugcuagcua

SEQ ID NO: 2380216 - RNA, 19 nt, Artificial Sequence
  Description of Artificial Sequence: Synthetic oligonucleotide
  Sense strand starting at position 1366 of SEQ ID NO: 1885974
cuagcaccguaauuaucaa

SEQ ID NO: 2380217 - RNA, 19 nt, Artificial Sequence
  Description of Artificial Sequence: Synthetic oligonucleotide
  Antisense strand to SEQ ID NO: 2380216
uugauaauuacggugcuag

SEQ ID NO: 2380218 - RNA, 19 nt, Artificial Sequence
  Description of Artificial Sequence: Synthetic oligonucleotide
  Sense strand starting at position 1423 of SEQ ID NO: 1885974
uugucuucguaauucugaa

SEQ ID NO: 2380219 - RNA, 19 nt, Artificial Sequence
  Description of Artificial Sequence: Synthetic oligonucleotide
  Antisense strand to SEQ ID NO: 2380218
uucagaauuacgaagacaa

SEQ ID NO: 2380220 - RNA, 19 nt, Artificial Sequence
  Description of Artificial Sequence: Synthetic oligonucleotide
  Sense strand starting at position 2896 of SEQ ID NO: 1885974
ccacgauuggcuggugaug

SEQ ID NO: 2380221 - RNA, 19 nt, Artificial Sequence
  Description of Artificial Sequence: Synthetic oligonucleotide
  Antisense strand to SEQ ID NO: 2380220
caucaccagccaaucgugg

SEQ ID NO: 2380222 - RNA, 19 nt, Artificial Sequence
  Description of Artificial Sequence: Synthetic oligonucleotide
  Sense strand starting at position 2978 of SEQ ID NO: 1885974
gcuggaggguuccugguau

SEQ ID NO: 2380223 - RNA, 19 nt, Artificial Sequence
  Description of Artificial Sequence: Synthetic oligonucleotide
  Antisense strand to SEQ ID NO: 2380222
auaccaggaacccuccagc

SEQ ID NO: 2380224 - RNA, 19 nt, Artificial Sequence
  Description of Artificial Sequence: Synthetic oligonucleotide
  Sense strand starting at position 3274 of SEQ ID NO: 1885974
caguauccgaguugagaug

SEQ ID NO: 2380225 - RNA, 19 nt, Artificial Sequence
  Description of Artificial Sequence: Synthetic oligonucleotide
  Antisense strand to SEQ ID NO: 2380224
caucucaacucggauacug

SEQ ID NO: 2380226 - RNA, 19 nt, Artificial Sequence
  Description of Artificial Sequence: Synthetic oligonucleotide
  Sense strand starting at position 3281 of SEQ ID NO: 1885974
cgaguugagaugcgauuua

SEQ ID NO: 2380227 - RNA, 19 nt, Artificial Sequence
  Description of Artificial Sequence: Synthetic oligonucleotide
  Antisense strand to SEQ ID NO: 2380226
uaaaucgcaucucaacucg

SEQ ID NO: 2380228 - RNA, 19 nt, Artificial Sequence
  Description of Artificial Sequence: Synthetic oligonucleotide
  Sense strand starting at position 3292 of SEQ ID NO: 1885974
gcgauuuauuuguggauuu

SEQ ID NO: 2380229 - RNA, 19 nt, Artificial Sequence
  Description of Artificial Sequence: Synthetic oligonucleotide
  Antisense strand to SEQ ID NO: 2380228
aaauccacaaauaaaucgc

SEQ ID NO: 2380230 - RNA, 19 nt, Artificial Sequence
  Description of Artificial Sequence: Synthetic oligonucleotide
  Sense strand starting at position 3327 of SEQ ID NO: 1885974
gcauuuaccugagagccua

SEQ ID NO: 2380231 - RNA, 19 nt, Artificial Sequence
  Description of Artificial Sequence: Synthetic oligonucleotide
  Antisense strand to SEQ ID NO: 2380230
uaggcucucagguaaaugc

SEQ ID NO: 2380232 - RNA, 19 nt, Artificial Sequence
  Description of Artificial Sequence: Synthetic oligonucleotide
  Sense strand starting at position 3361 of SEQ ID NO: 1885974
ucuugugagcugucgucau

SEQ ID NO: 2380233 - RNA, 19 nt, Artificial Sequence
  Description of Artificial Sequence: Synthetic oligonucleotide
  Antisense strand to SEQ ID NO: 2380232
augacgacagcucacaaga

SEQ ID NO: 2380234 - RNA, 19 nt, Artificial Sequence
  Description of Artificial Sequence: Synthetic oligonucleotide
  Sense strand starting at position 3365 of SEQ ID NO: 1885974
gugagcugucgucauggaa

SEQ ID NO: 2380235 - RNA, 19 nt, Artificial Sequence
  Description of Artificial Sequence: Synthetic oligonucleotide
  Antisense strand to SEQ ID NO: 2380234
uuccaugacgacagcucac

SEQ ID NO: 2380236 - RNA, 19 nt, Artificial Sequence
  Description of Artificial Sequence: Synthetic oligonucleotide
  Sense strand starting at position 3369 of SEQ ID NO: 1885974
gcugucgucauggaaauca

SEQ ID NO: 2380237 - RNA, 19 nt, Artificial Sequence
  Description of Artificial Sequence: Synthetic oligonucleotide
  Antisense strand to SEQ ID NO: 2380236
ugauuuccaugacgacagc

SEQ ID NO: 2380238 - RNA, 19 nt, Artificial Sequence
  Description of Artificial Sequence: Synthetic oligonucleotide
  Sense strand starting at position 3456 of SEQ ID NO: 1885974
uggauuccacccuguagga

SEQ ID NO: 2380239 - RNA, 19 nt, Artificial Sequence
  Description of Artificial Sequence: Synthetic oligonucleotide
  Antisense strand to SEQ ID NO: 2380238
uccuacaggguggaaucca

SEQ ID NO: 2380240 - RNA, 19 nt, Artificial Sequence
  Description of Artificial Sequence: Synthetic oligonucleotide
  Sense strand starting at position 3470 of SEQ ID NO: 1885974
uaggacaauguuuguuaga

SEQ ID NO: 2380241 - RNA, 19 nt, Artificial Sequence
  Description of Artificial Sequence: Synthetic oligonucleotide
  Antisense strand to SEQ ID NO: 2380240
ucuaacaaacauuguccua

SEQ ID NO: 2380242 - RNA, 19 nt, Artificial Sequence
  Description of Artificial Sequence: Synthetic oligonucleotide
  Sense strand starting at position 3471 of SEQ ID NO: 1885974
aggacaauguuuguuagag

SEQ ID NO: 2380243 - RNA, 19 nt, Artificial Sequence
  Description of Artificial Sequence: Synthetic oligonucleotide
  Antisense strand to SEQ ID NO: 2380242
cucuaacaaacauuguccu

SEQ ID NO: 2380244 - RNA, 19 nt, Artificial Sequence
  Description of Artificial Sequence: Synthetic oligonucleotide
  Sense strand starting at position 3472 of SEQ ID NO: 1885974
ggacaauguuuguuagagu

SEQ ID NO: 2380245 - RNA, 19 nt, Artificial Sequence
  Description of Artificial Sequence: Synthetic oligonucleotide
  Antisense strand to SEQ ID NO: 2380244
acucuaacaaacauugucc

SEQ ID NO: 2380246 - RNA, 19 nt, Artificial Sequence
  Description of Artificial Sequence: Synthetic oligonucleotide
  Sense strand starting at position 3563 of SEQ ID NO: 1885974
auuugcuuucggcaaaucu

SEQ ID NO: 2380247 - RNA, 19 nt, Artificial Sequence
  Description of Artificial Sequence: Synthetic oligonucleotide
  Antisense strand to SEQ ID NO: 2380246
agauuugccgaaagcaaau

SEQ ID NO: 2380248 - RNA, 19 nt, Artificial Sequence
  Description of Artificial Sequence: Synthetic oligonucleotide
  Sense strand starting at position 3605 of SEQ ID NO: 1885974
cuacuuuaacguggaaaca

SEQ ID NO: 2380249 - RNA, 19 nt, Artificial Sequence
  Description of Artificial Sequence: Synthetic oligonucleotide
  Antisense strand to SEQ ID NO: 2380248
uguuuccacguuaaaguag

SEQ ID NO: 2380250 - RNA, 19 nt, Artificial Sequence
  Description of Artificial Sequence: Synthetic oligonucleotide
  Sense strand starting at position 3707 of SEQ ID NO: 1885974
cguugccgguauuuagaaa

SEQ ID NO: 2380251 - RNA, 19 nt, Artificial Sequence
  Description of Artificial Sequence: Synthetic oligonucleotide
  Antisense strand to SEQ ID NO: 2380250
uuucuaaauaccggcaacg

SEQ ID NO: 2380252 - RNA, 19 nt, Artificial Sequence
  Description of Artificial Sequence: Synthetic oligonucleotide
  Sense strand starting at position 3926 of SEQ ID NO: 1885974
gacacaguuguugauugau

SEQ ID NO: 2380253 - RNA, 19 nt, Artificial Sequence
  Description of Artificial Sequence: Synthetic oligonucleotide
  Antisense strand to SEQ ID NO: 2380252
aucaaucaacaacuguguc

SEQ ID NO: 2380254 - RNA, 19 nt, Artificial Sequence
  Description of Artificial Sequence: Synthetic oligonucleotide
  Sense strand starting at position 6 of SEQ ID NO: 1885975
gcaauaauauuuguggcau

SEQ ID NO: 2380255 - RNA, 19 nt, Artificial Sequence
  Description of Artificial Sequence: Synthetic oligonucleotide
  Antisense strand to SEQ ID NO: 2380254
augccacaaauauuauugc

SEQ ID NO: 2380256 - RNA, 19 nt, Artificial Sequence
  Description of Artificial Sequence: Synthetic oligonucleotide
  Sense strand starting at position 37 of SEQ ID NO: 1885975
ggaagaucuacaggcauca

SEQ ID NO: 2380257 - RNA, 19 nt, Artificial Sequence
  Description of Artificial Sequence: Synthetic oligonucleotide
  Antisense strand to SEQ ID NO: 2380256
ugaugccuguagaucuucc

SEQ ID NO: 2380258 - RNA, 19 nt, Artificial Sequence
  Description of Artificial Sequence: Synthetic oligonucleotide
  Sense strand starting at position 113 of SEQ ID NO: 1885975
aaguauggaaguugaguaa

SEQ ID NO: 2380259 - RNA, 19 nt, Artificial Sequence
  Description of Artificial Sequence: Synthetic oligonucleotide
  Antisense strand to SEQ ID NO: 2380258
uuacucaacuuccauacuu

SEQ ID NO: 2380260 - RNA, 19 nt, Artificial Sequence
  Description of Artificial Sequence: Synthetic oligonucleotide
  Sense strand starting at position 116 of SEQ ID NO: 1885975
uauggaaguugaguaaauu

SEQ ID NO: 2380261 - RNA, 19 nt, Artificial Sequence
  Description of Artificial Sequence: Synthetic oligonucleotide
  Antisense strand to SEQ ID NO: 2380260
aauuuacucaacuuccaua

SEQ ID NO: 2380262 - RNA, 19 nt, Artificial Sequence
  Description of Artificial Sequence: Synthetic oligonucleotide
  Sense strand starting at position 122 of SEQ ID NO: 1885975
aguugaguaaauugucuuu

SEQ ID NO: 2380263 - RNA, 19 nt, Artificial Sequence
  Description of Artificial Sequence: Synthetic oligonucleotide
  Antisense strand to SEQ ID NO: 2380262
aaagacaauuuacucaacu

SEQ ID NO: 2380264 - RNA, 19 nt, Artificial Sequence
  Description of Artificial Sequence: Synthetic oligonucleotide
  Sense strand starting at position 242 of SEQ ID NO: 1885975
gugggagagugcucauuuc

SEQ ID NO: 2380265 - RNA, 19 nt, Artificial Sequence
  Description of Artificial Sequence: Synthetic oligonucleotide
  Antisense strand to SEQ ID NO: 2380264
gaaaugagcacucucccac

SEQ ID NO: 2380266 - RNA, 19 nt, Artificial Sequence
  Description of Artificial Sequence: Synthetic oligonucleotide
  Sense strand starting at position 267 of SEQ ID NO: 1885975
cagucugacuguucuugaa

SEQ ID NO: 2380267 - RNA, 19 nt, Artificial Sequence
  Description of Artificial Sequence: Synthetic oligonucleotide
  Antisense strand to SEQ ID NO: 2380266
uucaagaacagucagacug

SEQ ID NO: 2380268 - RNA, 19 nt, Artificial Sequence
  Description of Artificial Sequence: Synthetic oligonucleotide
  Sense strand starting at position 347 of SEQ ID NO: 1885975
gggaauauccauugucuau

SEQ ID NO: 2380269 - RNA, 19 nt, Artificial Sequence
  Description of Artificial Sequence: Synthetic oligonucleotide
  Antisense strand to SEQ ID NO: 2380268
auagacaauggauauuccc

SEQ ID NO: 2380270 - RNA, 19 nt, Artificial Sequence
  Description of Artificial Sequence: Synthetic oligonucleotide
  Sense strand starting at position 381 of SEQ ID NO: 1885975
ggacuugaguuaccuuauu

SEQ ID NO: 2380271 - RNA, 19 nt, Artificial Sequence
  Description of Artificial Sequence: Synthetic oligonucleotide
  Antisense strand to SEQ ID NO: 2380270
aauaagguaacucaagucc

SEQ ID NO: 2380272 - RNA, 19 nt, Artificial Sequence
  Description of Artificial Sequence: Synthetic oligonucleotide
  Sense strand starting at position 499 of SEQ ID NO: 1885975
uuagcucaugccugaacua

SEQ ID NO: 2380273 - RNA, 19 nt, Artificial Sequence
  Description of Artificial Sequence: Synthetic oligonucleotide
  Antisense strand to SEQ ID NO: 2380272
uaguucaggcaugagcuaa

SEQ ID NO: 2380274 - RNA, 19 nt, Artificial Sequence
  Description of Artificial Sequence: Synthetic oligonucleotide
  Sense strand starting at position 518 of SEQ ID NO: 1885975
guaugauagcauuguaaua

SEQ ID NO: 2380275 - RNA, 19 nt, Artificial Sequence
  Description of Artificial Sequence: Synthetic oligonucleotide
  Antisense strand to SEQ ID NO: 2380274
uauuacaaugcuaucauac

SEQ ID NO: 2380276 - RNA, 19 nt, Artificial Sequence
  Description of Artificial Sequence: Synthetic oligonucleotide
  Sense strand starting at position 577 of SEQ ID NO: 1885975
acuuuacugucagauuuag

SEQ ID NO: 2380277 - RNA, 19 nt, Artificial Sequence
  Description of Artificial Sequence: Synthetic oligonucleotide
  Antisense strand to SEQ ID NO: 2380276
cuaaaucugacaguaaagu

SEQ ID NO: 2380278 - RNA, 19 nt, Artificial Sequence
  Description of Artificial Sequence: Synthetic oligonucleotide
  Sense strand starting at position 635 of SEQ ID NO: 1885975
uuacaaauuugauggauuc

SEQ ID NO: 2380279 - RNA, 19 nt, Artificial Sequence
  Description of Artificial Sequence: Synthetic oligonucleotide
  Antisense strand to SEQ ID NO: 2380278
gaauccaucaaauuuguaa

SEQ ID NO: 2380280 - RNA, 19 nt, Artificial Sequence
  Description of Artificial Sequence: Synthetic oligonucleotide
  Sense strand starting at position 642 of SEQ ID NO: 1885975
uuugauggauuccuuuaaa

SEQ ID NO: 2380281 - RNA, 19 nt, Artificial Sequence
  Description of Artificial Sequence: Synthetic oligonucleotide
  Antisense strand to SEQ ID NO: 2380280
uuuaaaggaauccaucaaa

SEQ ID NO: 2380282 - RNA, 19 nt, Artificial Sequence
  Description of Artificial Sequence: Synthetic oligonucleotide
  Sense strand starting at position 680 of SEQ ID NO: 1885975
ggcauucaggaccguaaga

SEQ ID NO: 2380283 - RNA, 19 nt, Artificial Sequence
  Description of Artificial Sequence: Synthetic oligonucleotide
  Antisense strand to SEQ ID NO: 2380282
ucuuacgguccugaaugcc

SEQ ID NO: 2380284 - RNA, 19 nt, Artificial Sequence
  Description of Artificial Sequence: Synthetic oligonucleotide
  Sense strand starting at position 936 of SEQ ID NO: 1885975
gguguaucgcaccuguagu

SEQ ID NO: 2380285 - RNA, 19 nt, Artificial Sequence
  Description of Artificial Sequence: Synthetic oligonucleotide
  Antisense strand to SEQ ID NO: 2380284
acuacaggugcgauacacc

SEQ ID NO: 2380286 - RNA, 19 nt, Artificial Sequence
  Description of Artificial Sequence: Synthetic oligonucleotide
  Sense strand starting at position 1170 of SEQ ID NO: 1885975
auagacaugcuguagaguu

SEQ ID NO: 2380287 - RNA, 19 nt, Artificial Sequence
  Description of Artificial Sequence: Synthetic oligonucleotide
  Antisense strand to SEQ ID NO: 2380286
aacucuacagcaugucuau

SEQ ID NO: 2380288 - RNA, 19 nt, Artificial Sequence
  Description of Artificial Sequence: Synthetic oligonucleotide
  Sense strand starting at position 1172 of SEQ ID NO: 1885975
agacaugcuguagaguuau

SEQ ID NO: 2380289 - RNA, 19 nt, Artificial Sequence
  Description of Artificial Sequence: Synthetic oligonucleotide
  Antisense strand to SEQ ID NO: 2380288
auaacucuacagcaugucu

SEQ ID NO: 2380290 - RNA, 19 nt, Artificial Sequence
  Description of Artificial Sequence: Synthetic oligonucleotide
  Sense strand starting at position 1183 of SEQ ID NO: 1885975
agaguuauuacgggcauac

SEQ ID NO: 2380291 - RNA, 19 nt, Artificial Sequence
  Description of Artificial Sequence: Synthetic oligonucleotide
  Antisense strand to SEQ ID NO: 2380290
guaugcccguaauaacucu

SEQ ID NO: 2380292 - RNA, 19 nt, Artificial Sequence
  Description of Artificial Sequence: Synthetic oligonucleotide
  Sense strand starting at position 1211 of SEQ ID NO: 1885975
agcacauauguaugagcuu

SEQ ID NO: 2380293 - RNA, 19 nt, Artificial Sequence
  Description of Artificial Sequence: Synthetic oligonucleotide
  Antisense strand to SEQ ID NO: 2380292
aagcucauacauaugugcu

SEQ ID NO: 2380294 - RNA, 19 nt, Artificial Sequence
  Description of Artificial Sequence: Synthetic oligonucleotide
  Sense strand starting at position 1218 of SEQ ID NO: 1885975
auguaugagcuuuacauau

SEQ ID NO: 2380295 - RNA, 19 nt, Artificial Sequence
  Description of Artificial Sequence: Synthetic oligonucleotide
  Antisense strand to SEQ ID NO: 2380294
auauguaaagcucauacau

SEQ ID NO: 2380296 - RNA, 19 nt, Artificial Sequence
  Description of Artificial Sequence: Synthetic oligonucleotide
  Sense strand starting at position 1290 of SEQ ID NO: 1885975
ucacaauaguaauuguagu

SEQ ID NO: 2380297 - RNA, 19 nt, Artificial Sequence
  Description of Artificial Sequence: Synthetic oligonucleotide
  Antisense strand to SEQ ID NO: 2380296
acuacaauuacuauuguga

SEQ ID NO: 2380298 - RNA, 19 nt, Artificial Sequence
  Description of Artificial Sequence: Synthetic oligonucleotide
  Sense strand starting at position 2286 of SEQ ID NO: 1885975
gccuccauuuguccgcaau

SEQ ID NO: 2380299 - RNA, 19 nt, Artificial Sequence
  Description of Artificial Sequence: Synthetic oligonucleotide
  Antisense strand to SEQ ID NO: 2380298
auugcggacaaauggaggc

SEQ ID NO: 2380300 - RNA, 19 nt, Artificial Sequence
  Description of Artificial Sequence: Synthetic oligonucleotide
  Sense strand starting at position 2287 of SEQ ID NO: 1885975
ccuccauuuguccgcaaua

SEQ ID NO: 2380301 - RNA, 19 nt, Artificial Sequence
  Description of Artificial Sequence: Synthetic oligonucleotide
  Antisense strand to SEQ ID NO: 2380300
uauugcggacaaauggagg

SEQ ID NO: 2380302 - RNA, 19 nt, Artificial Sequence
  Description of Artificial Sequence: Synthetic oligonucleotide
  Sense strand starting at position 2288 of SEQ ID NO: 1885975
cuccauuuguccgcaauac

SEQ ID NO: 2380303 - RNA, 19 nt, Artificial Sequence
  Description of Artificial Sequence: Synthetic oligonucleotide
  Antisense strand to SEQ ID NO: 2380302
guauugcggacaaauggag

SEQ ID NO: 2380304 - RNA, 19 nt, Artificial Sequence
  Description of Artificial Sequence: Synthetic oligonucleotide
  Sense strand starting at position 2859 of SEQ ID NO: 1885975
agguuucuggcugaugaaa

SEQ ID NO: 2380305 - RNA, 19 nt, Artificial Sequence
  Description of Artificial Sequence: Synthetic oligonucleotide
  Antisense strand to SEQ ID NO: 2380304
uuucaucagccagaaaccu

SEQ ID NO: 2380306 - RNA, 19 nt, Artificial Sequence
  Description of Artificial Sequence: Synthetic oligonucleotide
  Sense strand starting at position 2891 of SEQ ID NO: 1885975
aucccaugacagcaguaau

SEQ ID NO: 2380307 - RNA, 19 nt, Artificial Sequence
  Description of Artificial Sequence: Synthetic oligonucleotide
  Antisense strand to SEQ ID NO: 2380306
auuacugcugucaugggau

SEQ ID NO: 2380308 - RNA, 19 nt, Artificial Sequence
  Description of Artificial Sequence: Synthetic oligonucleotide
  Sense strand starting at position 2894 of SEQ ID NO: 1885975
ccaugacagcaguaauagu

SEQ ID NO: 2380309 - RNA, 19 nt, Artificial Sequence
  Description of Artificial Sequence: Synthetic oligonucleotide
  Antisense strand to SEQ ID NO: 2380308
acuauuacugcugucaugg

SEQ ID NO: 2380310 - RNA, 19 nt, Artificial Sequence
  Description of Artificial Sequence: Synthetic oligonucleotide
  Sense strand starting at position 2916 of SEQ ID NO: 1885975
ugugguagcagucauaaua

SEQ ID NO: 2380311 - RNA, 19 nt, Artificial Sequence
  Description of Artificial Sequence: Synthetic oligonucleotide
  Antisense strand to SEQ ID NO: 2380310
uauuaugacugcuaccaca

SEQ ID NO: 2380312 - RNA, 19 nt, Artificial Sequence
  Description of Artificial Sequence: Synthetic oligonucleotide
  Sense strand starting at position 2952 of SEQ ID NO: 1885975
agacguaguaguuauaaca

SEQ ID NO: 2380313 - RNA, 19 nt, Artificial Sequence
  Description of Artificial Sequence: Synthetic oligonucleotide
  Antisense strand to SEQ ID NO: 2380312
uguuauaacuacuacgucu

SEQ ID NO: 2380314 - RNA, 19 nt, Artificial Sequence
  Description of Artificial Sequence: Synthetic oligonucleotide
  Sense strand starting at position 2987 of SEQ ID NO: 1885975
ucuuaauagcagugagagu

SEQ ID NO: 2380315 - RNA, 19 nt, Artificial Sequence
  Description of Artificial Sequence: Synthetic oligonucleotide
  Antisense strand to SEQ ID NO: 2380314
acucucacugcuauuaaga

SEQ ID NO: 2380316 - RNA, 19 nt, Artificial Sequence
  Description of Artificial Sequence: Synthetic oligonucleotide
  Sense strand starting at position 2988 of SEQ ID NO: 1885975
cuuaauagcagugagagua

SEQ ID NO: 2380317 - RNA, 19 nt, Artificial Sequence
  Description of Artificial Sequence: Synthetic oligonucleotide
  Antisense strand to SEQ ID NO: 2380316
uacucucacugcuauuaag

SEQ ID NO: 2380318 - RNA, 19 nt, Artificial Sequence
  Description of Artificial Sequence: Synthetic oligonucleotide
  Sense strand starting at position 2996 of SEQ ID NO: 1885975
cagugagaguaguuacagu

SEQ ID NO: 2380319 - RNA, 19 nt, Artificial Sequence
  Description of Artificial Sequence: Synthetic oligonucleotide
  Antisense strand to SEQ ID NO: 2380318
acuguaacuacucucacug

SEQ ID NO: 2380320 - RNA, 19 nt, Artificial Sequence
  Description of Artificial Sequence: Synthetic oligonucleotide
  Sense strand starting at position 3155 of SEQ ID NO: 1885975
ugagauaauugucuccuca

SEQ ID NO: 2380321 - RNA, 19 nt, Artificial Sequence
  Description of Artificial Sequence: Synthetic oligonucleotide
  Antisense strand to SEQ ID NO: 2380320
ugaggagacaauuaucuca

SEQ ID NO: 2380322 - RNA, 19 nt, Artificial Sequence
  Description of Artificial Sequence: Synthetic oligonucleotide
  Sense strand starting at position 3280 of SEQ ID NO: 1885975
ccaauauugugucuuacca

SEQ ID NO: 2380323 - RNA, 19 nt, Artificial Sequence
  Description of Artificial Sequence: Synthetic oligonucleotide
  Antisense strand to SEQ ID NO: 2380322
ugguaagacacaauauugg

SEQ ID NO: 2380324 - RNA, 19 nt, Artificial Sequence
  Description of Artificial Sequence: Synthetic oligonucleotide
  Sense strand starting at position 3288 of SEQ ID NO: 1885975
gugucuuaccaucauuaug

SEQ ID NO: 2380325 - RNA, 19 nt, Artificial Sequence
  Description of Artificial Sequence: Synthetic oligonucleotide
  Antisense strand to SEQ ID NO: 2380324
cauaaugaugguaagacac

SEQ ID NO: 2380326 - RNA, 19 nt, Artificial Sequence
  Description of Artificial Sequence: Synthetic oligonucleotide
  Sense strand starting at position 3290 of SEQ ID NO: 1885975
gucuuaccaucauuauguu

SEQ ID NO: 2380327 - RNA, 19 nt, Artificial Sequence
  Description of Artificial Sequence: Synthetic oligonucleotide
  Antisense strand to SEQ ID NO: 2380326
aacauaaugaugguaagac

SEQ ID NO: 2380328 - RNA, 19 nt, Artificial Sequence
  Description of Artificial Sequence: Synthetic oligonucleotide
  Sense strand starting at position 3357 of SEQ ID NO: 1885975
uguaucuaggacugacauu

SEQ ID NO: 2380329 - RNA, 19 nt, Artificial Sequence
  Description of Artificial Sequence: Synthetic oligonucleotide
  Antisense strand to SEQ ID NO: 2380328
aaugucaguccuagauaca

SEQ ID NO: 2380330 - RNA, 19 nt, Artificial Sequence
  Description of Artificial Sequence: Synthetic oligonucleotide
  Sense strand starting at position 3428 of SEQ ID NO: 1885975
gucuguaaacgguagggau

SEQ ID NO: 2380331 - RNA, 19 nt, Artificial Sequence
  Description of Artificial Sequence: Synthetic oligonucleotide
  Antisense strand to SEQ ID NO: 2380330
aucccuaccguuuacagac

SEQ ID NO: 2380332 - RNA, 19 nt, Artificial Sequence
  Description of Artificial Sequence: Synthetic oligonucleotide
  Sense strand starting at position 3852 of SEQ ID NO: 1885975
cacugacugcccugagcua

SEQ ID NO: 2380333 - RNA, 19 nt, Artificial Sequence
  Description of Artificial Sequence: Synthetic oligonucleotide
  Antisense strand to SEQ ID NO: 2380332
uagcucagggcagucagug

SEQ ID NO: 2380334 - RNA, 19 nt, Artificial Sequence
  Description of Artificial Sequence: Synthetic oligonucleotide
  Sense strand starting at position 19 of SEQ ID NO: 1885976
agaucucuucccugaagug

SEQ ID NO: 2380335 - RNA, 19 nt, Artificial Sequence
  Description of Artificial Sequence: Synthetic oligonucleotide
  Antisense strand to SEQ ID NO: 2380334
cacuucagggaagagaucu

SEQ ID NO: 2380336 - RNA, 19 nt, Artificial Sequence
  Description of Artificial Sequence: Synthetic oligonucleotide
  Sense strand starting at position 20 of SEQ ID NO: 1885976
gaucucuucccugaaguga

SEQ ID NO: 2380337 - RNA, 19 nt, Artificial Sequence
  Description of Artificial Sequence: Synthetic oligonucleotide
  Antisense strand to SEQ ID NO: 2380336
ucacuucagggaagagauc

SEQ ID NO: 2380338 - RNA, 19 nt, Artificial Sequence
  Description of Artificial Sequence: Synthetic oligonucleotide
  Sense strand starting at position 203 of SEQ ID NO: 1885976
aggugugcucaggagaaua

SEQ ID NO: 2380339 - RNA, 19 nt, Artificial Sequence
  Description of Artificial Sequence: Synthetic oligonucleotide
  Antisense strand to SEQ ID NO: 2380338
uauucuccugagcacaccu

SEQ ID NO: 2380340 - RNA, 19 nt, Artificial Sequence
  Description of Artificial Sequence: Synthetic oligonucleotide
  Sense strand starting at position 271 of SEQ ID NO: 1885976
gcagcacugggucaacaau

SEQ ID NO: 2380341 - RNA, 19 nt, Artificial Sequence
  Description of Artificial Sequence: Synthetic oligonucleotide
  Antisense strand to SEQ ID NO: 2380340
auuguugacccagugcugc

SEQ ID NO: 2380342 - RNA, 19 nt, Artificial Sequence
  Description of Artificial Sequence: Synthetic oligonucleotide
  Sense strand starting at position 389 of SEQ ID NO: 1885976
gaauauacaugagaaugag

SEQ ID NO: 2380343 - RNA, 19 nt, Artificial Sequence
  Description of Artificial Sequence: Synthetic oligonucleotide
  Antisense strand to SEQ ID NO: 2380342
cucauucucauguauauuc

SEQ ID NO: 2380344 - RNA, 19 nt, Artificial Sequence
  Description of Artificial Sequence: Synthetic oligonucleotide
  Sense strand starting at position 805 of SEQ ID NO: 1885976
uccgaucaauaauugugaa

SEQ ID NO: 2380345 - RNA, 19 nt, Artificial Sequence
  Description of Artificial Sequence: Synthetic oligonucleotide
  Antisense strand to SEQ ID NO: 2380344
uucacaauuauugaucgga

SEQ ID NO: 2380346 - RNA, 19 nt, Artificial Sequence
  Description of Artificial Sequence: Synthetic oligonucleotide
  Sense strand starting at position 813 of SEQ ID NO: 1885976
auaauugugaagggucuga

SEQ ID NO: 2380347 - RNA, 19 nt, Artificial Sequence
  Description of Artificial Sequence: Synthetic oligonucleotide
  Antisense strand to SEQ ID NO: 2380346
ucagacccuucacaauuau

SEQ ID NO: 2380348 - RNA, 19 nt, Artificial Sequence
  Description of Artificial Sequence: Synthetic oligonucleotide
  Sense strand starting at position 1093 of SEQ ID NO: 1885976
uauaaugaggcguaagcau

SEQ ID NO: 2380349 - RNA, 19 nt, Artificial Sequence
  Description of Artificial Sequence: Synthetic oligonucleotide
  Antisense strand to SEQ ID NO: 2380348
augcuuacgccucauuaua

SEQ ID NO: 2380350 - RNA, 19 nt, Artificial Sequence
  Description of Artificial Sequence: Synthetic oligonucleotide
  Sense strand starting at position 1262 of SEQ ID NO: 1885976
aggucuuauguccaaacuu

SEQ ID NO: 2380351 - RNA, 19 nt, Artificial Sequence
  Description of Artificial Sequence: Synthetic oligonucleotide
  Antisense strand to SEQ ID NO: 2380350
aaguuuggacauaagaccu

SEQ ID NO: 2380352 - RNA, 19 nt, Artificial Sequence
  Description of Artificial Sequence: Synthetic oligonucleotide
  Sense strand starting at position 1351 of SEQ ID NO: 1885976
caaggucauuucguggcaa

SEQ ID NO: 2380353 - RNA, 19 nt, Artificial Sequence
  Description of Artificial Sequence: Synthetic oligonucleotide
  Antisense strand to SEQ ID NO: 2380352
uugccacgaaaugaccuug

SEQ ID NO: 2380354 - RNA, 19 nt, Artificial Sequence
  Description of Artificial Sequence: Synthetic oligonucleotide
  Sense strand starting at position 1353 of SEQ ID NO: 1885976
aggucauuucguggcaaca

SEQ ID NO: 2380355 - RNA, 19 nt, Artificial Sequence
  Description of Artificial Sequence: Synthetic oligonucleotide
  Antisense strand to SEQ ID NO: 2380354
uguugccacgaaaugaccu

SEQ ID NO: 2380356 - RNA, 19 nt, Artificial Sequence
  Description of Artificial Sequence: Synthetic oligonucleotide
  Sense strand starting at position 1516 of SEQ ID NO: 1885976
ucaguaccuccacaagagu

SEQ ID NO: 2380357 - RNA, 19 nt, Artificial Sequence
  Description of Artificial Sequence: Synthetic oligonucleotide
  Antisense strand to SEQ ID NO: 2380356
acucuuguggagguacuga

SEQ ID NO: 2380358 - RNA, 19 nt, Artificial Sequence
  Description of Artificial Sequence: Synthetic oligonucleotide
  Sense strand starting at position 1569 of SEQ ID NO: 1885976
aguaaaguggaagguaaua

SEQ ID NO: 2380359 - RNA, 19 nt, Artificial Sequence
  Description of Artificial Sequence: Synthetic oligonucleotide
  Antisense strand to SEQ ID NO: 2380358
uauuaccuuccacuuuacu

SEQ ID NO: 2380360 - RNA, 19 nt, Artificial Sequence
  Description of Artificial Sequence: Synthetic oligonucleotide
  Sense strand starting at position 1601 of SEQ ID NO: 1885976
ugagcugugauugaagcaa

SEQ ID NO: 2380361 - RNA, 19 nt, Artificial Sequence
  Description of Artificial Sequence: Synthetic oligonucleotide
  Antisense strand to SEQ ID NO: 2380360
uugcuucaaucacagcuca

SEQ ID NO: 2380362 - RNA, 19 nt, Artificial Sequence
  Description of Artificial Sequence: Synthetic oligonucleotide
  Sense strand starting at position 1692 of SEQ ID NO: 1885976
aauagacugugaguguaau

SEQ ID NO: 2380363 - RNA, 19 nt, Artificial Sequence
  Description of Artificial Sequence: Synthetic oligonucleotide
  Antisense strand to SEQ ID NO: 2380362
auuacacucacagucuauu

SEQ ID NO: 2380364 - RNA, 19 nt, Artificial Sequence
  Description of Artificial Sequence: Synthetic oligonucleotide
  Sense strand starting at position 1693 of SEQ ID NO: 1885976
auagacugugaguguaauc

SEQ ID NO: 2380365 - RNA, 19 nt, Artificial Sequence
  Description of Artificial Sequence: Synthetic oligonucleotide
  Antisense strand to SEQ ID NO: 2380364
gauuacacucacagucuau

SEQ ID NO: 2380366 - RNA, 19 nt, Artificial Sequence
  Description of Artificial Sequence: Synthetic oligonucleotide
  Sense strand starting at position 1761 of SEQ ID NO: 1885976
gaacuuguucugggaguga

SEQ ID NO: 2380367 - RNA, 19 nt, Artificial Sequence
  Description of Artificial Sequence: Synthetic oligonucleotide
  Antisense strand to SEQ ID NO: 2380366
ucacucccagaacaaguuc

SEQ ID NO: 2380368 - RNA, 19 nt, Artificial Sequence
  Description of Artificial Sequence: Synthetic oligonucleotide
  Sense strand starting at position 1765 of SEQ ID NO: 1885976
uuguucugggagugaaaua

SEQ ID NO: 2380369 - RNA, 19 nt, Artificial Sequence
  Description of Artificial Sequence: Synthetic oligonucleotide
  Antisense strand to SEQ ID NO: 2380368
uauuucacucccagaacaa

SEQ ID NO: 2380370 - RNA, 19 nt, Artificial Sequence
  Description of Artificial Sequence: Synthetic oligonucleotide
  Sense strand starting at position 1807 of SEQ ID NO: 1885976
aagagaaaguuugcugauu

SEQ ID NO: 2380371 - RNA, 19 nt, Artificial Sequence
  Description of Artificial Sequence: Synthetic oligonucleotide
  Antisense strand to SEQ ID NO: 2380370
aaucagcaaacuuucucuu

SEQ ID NO: 2380372 - RNA, 19 nt, Artificial Sequence
  Description of Artificial Sequence: Synthetic oligonucleotide
  Sense strand starting at position 1808 of SEQ ID NO: 1885976
agagaaaguuugcugauuc

SEQ ID NO: 2380373 - RNA, 19 nt, Artificial Sequence
  Description of Artificial Sequence: Synthetic oligonucleotide
  Antisense strand to SEQ ID NO: 2380372
gaaucagcaaacuuucucu

SEQ ID NO: 2380374 - RNA, 19 nt, Artificial Sequence
  Description of Artificial Sequence: Synthetic oligonucleotide
  Sense strand starting at position 1839 of SEQ ID NO: 1885976
ccaggucauuaggcaaaga

SEQ ID NO: 2380375 - RNA, 19 nt, Artificial Sequence
  Description of Artificial Sequence: Synthetic oligonucleotide
  Antisense strand to SEQ ID NO: 2380374
ucuuugccuaaugaccugg

SEQ ID NO: 2380376 - RNA, 19 nt, Artificial Sequence
  Description of Artificial Sequence: Synthetic oligonucleotide
  Sense strand starting at position 1903 of SEQ ID NO: 1885976
accacaaagugcucaugau

SEQ ID NO: 2380377 - RNA, 19 nt, Artificial Sequence
  Description of Artificial Sequence: Synthetic oligonucleotide
  Antisense strand to SEQ ID NO: 2380376
aucaugagcacuuuguggu

SEQ ID NO: 2380378 - RNA, 19 nt, Artificial Sequence
  Description of Artificial Sequence: Synthetic oligonucleotide
  Sense strand starting at position 1904 of SEQ ID NO: 1885976
ccacaaagugcucaugaug

SEQ ID NO: 2380379 - RNA, 19 nt, Artificial Sequence
  Description of Artificial Sequence: Synthetic oligonucleotide
  Antisense strand to SEQ ID NO: 2380378
caucaugagcacuuugugg

SEQ ID NO: 2380380 - RNA, 19 nt, Artificial Sequence
  Description of Artificial Sequence: Synthetic oligonucleotide
  Sense strand starting at position 1907 of SEQ ID NO: 1885976
caaagugcucaugauggua

SEQ ID NO: 2380381 - RNA, 19 nt, Artificial Sequence
  Description of Artificial Sequence: Synthetic oligonucleotide
  Antisense strand to SEQ ID NO: 2380380
uaccaucaugagcacuuug

SEQ ID NO: 2380382 - RNA, 19 nt, Artificial Sequence
  Description of Artificial Sequence: Synthetic oligonucleotide
  Sense strand starting at position 1932 of SEQ ID NO: 1885976
uucugauaccugugaucug

SEQ ID NO: 2380383 - RNA, 19 nt, Artificial Sequence
  Description of Artificial Sequence: Synthetic oligonucleotide
  Antisense strand to SEQ ID NO: 2380382
cagaucacagguaucagaa

SEQ ID NO: 2380384 - RNA, 19 nt, Artificial Sequence
  Description of Artificial Sequence: Synthetic oligonucleotide
  Sense strand starting at position 1941 of SEQ ID NO: 1885976
cugugaucuggacagccau

SEQ ID NO: 2380385 - RNA, 19 nt, Artificial Sequence
  Description of Artificial Sequence: Synthetic oligonucleotide
  Antisense strand to SEQ ID NO: 2380384
auggcuguccagaucacag

SEQ ID NO: 2380386 - RNA, 19 nt, Artificial Sequence
  Description of Artificial Sequence: Synthetic oligonucleotide
  Sense strand starting at position 2434 of SEQ ID NO: 1885976
agcagaaguuuaccuagaa

SEQ ID NO: 2380387 - RNA, 19 nt, Artificial Sequence
  Description of Artificial Sequence: Synthetic oligonucleotide
  Antisense strand to SEQ ID NO: 2380386
uucuagguaaacuucugcu

SEQ ID NO: 2380388 - RNA, 19 nt, Artificial Sequence
  Description of Artificial Sequence: Synthetic oligonucleotide
  Sense strand starting at position 2435 of SEQ ID NO: 1885976
gcagaaguuuaccuagaag

SEQ ID NO: 2380389 - RNA, 19 nt, Artificial Sequence
  Description of Artificial Sequence: Synthetic oligonucleotide
  Antisense strand to SEQ ID NO: 2380388
cuucuagguaaacuucugc

SEQ ID NO: 2380390 - RNA, 19 nt, Artificial Sequence
  Description of Artificial Sequence: Synthetic oligonucleotide
  Sense strand starting at position 2461 of SEQ ID NO: 1885976
ugaggccucugaguauaua

SEQ ID NO: 2380391 - RNA, 19 nt, Artificial Sequence
  Description of Artificial Sequence: Synthetic oligonucleotide
  Antisense strand to SEQ ID NO: 2380390
uauauacucagaggccuca

SEQ ID NO: 2380392 - RNA, 19 nt, Artificial Sequence
  Description of Artificial Sequence: Synthetic oligonucleotide
  Sense strand starting at position 2462 of SEQ ID NO: 1885976
gaggccucugaguauauaa

SEQ ID NO: 2380393 - RNA, 19 nt, Artificial Sequence
  Description of Artificial Sequence: Synthetic oligonucleotide
  Antisense strand to SEQ ID NO: 2380392
uuauauacucagaggccuc

SEQ ID NO: 2380394 - RNA, 19 nt, Artificial Sequence
  Description of Artificial Sequence: Synthetic oligonucleotide
  Sense strand starting at position 2464 of SEQ ID NO: 1885976
ggccucugaguauauaaca

SEQ ID NO: 2380395 - RNA, 19 nt, Artificial Sequence
  Description of Artificial Sequence: Synthetic oligonucleotide
  Antisense strand to SEQ ID NO: 2380394
uguuauauacucagaggcc

SEQ ID NO: 2380396 - RNA, 19 nt, Artificial Sequence
  Description of Artificial Sequence: Synthetic oligonucleotide
  Sense strand starting at position 2472 of SEQ ID NO: 1885976
aguauauaacauugccaga

SEQ ID NO: 2380397 - RNA, 19 nt, Artificial Sequence
  Description of Artificial Sequence: Synthetic oligonucleotide
  Antisense strand to SEQ ID NO: 2380396
ucuggcaauguuauauacu

SEQ ID NO: 2380398 - RNA, 19 nt, Artificial Sequence
  Description of Artificial Sequence: Synthetic oligonucleotide
  Sense strand starting at position 2536 of SEQ ID NO: 1885976
acccaugaggccuggguua

SEQ ID NO: 2380399 - RNA, 19 nt, Artificial Sequence
  Description of Artificial Sequence: Synthetic oligonucleotide
  Antisense strand to SEQ ID NO: 2380398
uaacccaggccucaugggu

SEQ ID NO: 2380400 - RNA, 19 nt, Artificial Sequence
  Description of Artificial Sequence: Synthetic oligonucleotide
  Sense strand starting at position 2682 of SEQ ID NO: 1885976
gccugucauccucacaaug

SEQ ID NO: 2380401 - RNA, 19 nt, Artificial Sequence
  Description of Artificial Sequence: Synthetic oligonucleotide
  Antisense strand to SEQ ID NO: 2380400
cauugugaggaugacaggc

SEQ ID NO: 2380402 - RNA, 19 nt, Artificial Sequence
  Description of Artificial Sequence: Synthetic oligonucleotide
  Sense strand starting at position 2909 of SEQ ID NO: 1885976
cccauuaagguaggcauua

SEQ ID NO: 2380403 - RNA, 19 nt, Artificial Sequence
  Description of Artificial Sequence: Synthetic oligonucleotide
  Antisense strand to SEQ ID NO: 2380402
uaaugccuaccuuaauggg

SEQ ID NO: 2380404 - RNA, 19 nt, Artificial Sequence
  Description of Artificial Sequence: Synthetic oligonucleotide
  Sense strand starting at position 2910 of SEQ ID NO: 1885976
ccauuaagguaggcauuau

SEQ ID NO: 2380405 - RNA, 19 nt, Artificial Sequence
  Description of Artificial Sequence: Synthetic oligonucleotide
  Antisense strand to SEQ ID NO: 2380404
auaaugccuaccuuaaugg

SEQ ID NO: 2380406 - RNA, 19 nt, Artificial Sequence
  Description of Artificial Sequence: Synthetic oligonucleotide
  Sense strand starting at position 3121 of SEQ ID NO: 1885976
gcagcuucccucugauuug

SEQ ID NO: 2380407 - RNA, 19 nt, Artificial Sequence
  Description of Artificial Sequence: Synthetic oligonucleotide
  Antisense strand to SEQ ID NO: 2380406
caaaucagagggaagcugc

SEQ ID NO: 2380408 - RNA, 19 nt, Artificial Sequence
  Description of Artificial Sequence: Synthetic oligonucleotide
  Sense strand starting at position 3188 of SEQ ID NO: 1885976
cuuaaaugauccuugguug

SEQ ID NO: 2380409 - RNA, 19 nt, Artificial Sequence
  Description of Artificial Sequence: Synthetic oligonucleotide
  Antisense strand to SEQ ID NO: 2380408
caaccaaggaucauuuaag

SEQ ID NO: 2380410 - RNA, 19 nt, Artificial Sequence
  Description of Artificial Sequence: Synthetic oligonucleotide
  Sense strand starting at position 3274 of SEQ ID NO: 1885976
uguacagcucuugauaauc

SEQ ID NO: 2380411 - RNA, 19 nt, Artificial Sequence
  Description of Artificial Sequence: Synthetic oligonucleotide
  Antisense strand to SEQ ID NO: 2380410
gauuaucaagagcuguaca

SEQ ID NO: 2380412 - RNA, 19 nt, Artificial Sequence
  Description of Artificial Sequence: Synthetic oligonucleotide
  Sense strand starting at position 3733 of SEQ ID NO: 1885976
guacauaaggcauggaaac

SEQ ID NO: 2380413 - RNA, 19 nt, Artificial Sequence
  Description of Artificial Sequence: Synthetic oligonucleotide
  Antisense strand to SEQ ID NO: 2380412
guuuccaugccuuauguac

SEQ ID NO: 2380414 - RNA, 19 nt, Artificial Sequence
  Description of Artificial Sequence: Synthetic oligonucleotide
  Sense strand starting at position 128 of SEQ ID NO: 1885977
gagugaagucagcauaaau

SEQ ID NO: 2380415 - RNA, 19 nt, Artificial Sequence
  Description of Artificial Sequence: Synthetic oligonucleotide
  Antisense strand to SEQ ID NO: 2380414
auuuaugcugacuucacuc

SEQ ID NO: 2380416 - RNA, 19 nt, Artificial Sequence
  Description of Artificial Sequence: Synthetic oligonucleotide
  Sense strand starting at position 192 of SEQ ID NO: 1885977
ggagaaaguuggcaaagau

SEQ ID NO: 2380417 - RNA, 19 nt, Artificial Sequence
  Description of Artificial Sequence: Synthetic oligonucleotide
  Antisense strand to SEQ ID NO: 2380416
aucuuugccaacuuucucc

SEQ ID NO: 2380418 - RNA, 19 nt, Artificial Sequence
  Description of Artificial Sequence: Synthetic oligonucleotide
  Sense strand starting at position 202 of SEQ ID NO: 1885977
ggcaaagauuauuagaauc

SEQ ID NO: 2380419 - RNA, 19 nt, Artificial Sequence
  Description of Artificial Sequence: Synthetic oligonucleotide
  Antisense strand to SEQ ID NO: 2380418
gauucuaauaaucuuugcc

SEQ ID NO: 2380420 - RNA, 19 nt, Artificial Sequence
  Description of Artificial Sequence: Synthetic oligonucleotide
  Sense strand starting at position 502 of SEQ ID NO: 1885977
gucagaccugucugguaau

SEQ ID NO: 2380421 - RNA, 19 nt, Artificial Sequence
  Description of Artificial Sequence: Synthetic oligonucleotide
  Antisense strand to SEQ ID NO: 2380420
auuaccagacaggucugac

SEQ ID NO: 2380422 - RNA, 19 nt, Artificial Sequence
  Description of Artificial Sequence: Synthetic oligonucleotide
  Sense strand starting at position 513 of SEQ ID NO: 1885977
cugguaauacucuggaaga

SEQ ID NO: 2380423 - RNA, 19 nt, Artificial Sequence
  Description of Artificial Sequence: Synthetic oligonucleotide
  Antisense strand to SEQ ID NO: 2380422
ucuuccagaguauuaccag

SEQ ID NO: 2380424 - RNA, 19 nt, Artificial Sequence
  Description of Artificial Sequence: Synthetic oligonucleotide
  Sense strand starting at position 537 of SEQ ID NO: 1885977
caugcaagauugucuguau

SEQ ID NO: 2380425 - RNA, 19 nt, Artificial Sequence
  Description of Artificial Sequence: Synthetic oligonucleotide
  Antisense strand to SEQ ID NO: 2380424
auacagacaaucuugcaug

SEQ ID NO: 2380426 - RNA, 19 nt, Artificial Sequence
  Description of Artificial Sequence: Synthetic oligonucleotide
  Sense strand starting at position 538 of SEQ ID NO: 1885977
augcaagauugucuguauu

SEQ ID NO: 2380427 - RNA, 19 nt, Artificial Sequence
  Description of Artificial Sequence: Synthetic oligonucleotide
  Antisense strand to SEQ ID NO: 2380426
aauacagacaaucuugcau

SEQ ID NO: 2380428 - RNA, 19 nt, Artificial Sequence
  Description of Artificial Sequence: Synthetic oligonucleotide
  Sense strand starting at position 540 of SEQ ID NO: 1885977
gcaagauugucuguauuug

SEQ ID NO: 2380429 - RNA, 19 nt, Artificial Sequence
  Description of Artificial Sequence: Synthetic oligonucleotide
  Antisense strand to SEQ ID NO: 2380428
caaauacagacaaucuugc

SEQ ID NO: 2380430 - RNA, 19 nt, Artificial Sequence
  Description of Artificial Sequence: Synthetic oligonucleotide
  Sense strand starting at position 556 of SEQ ID NO: 1885977
uugaccugacuuggagauu

SEQ ID NO: 2380431 - RNA, 19 nt, Artificial Sequence
  Description of Artificial Sequence: Synthetic oligonucleotide
  Antisense strand to SEQ ID NO: 2380430
aaucuccaagucaggucaa

SEQ ID NO: 2380432 - RNA, 19 nt, Artificial Sequence
  Description of Artificial Sequence: Synthetic oligonucleotide
  Sense strand starting at position 557 of SEQ ID NO: 1885977
ugaccugacuuggagauuu

SEQ ID NO: 2380433 - RNA, 19 nt, Artificial Sequence
  Description of Artificial Sequence: Synthetic oligonucleotide
  Antisense strand to SEQ ID NO: 2380432
aaaucuccaagucagguca

SEQ ID NO: 2380434 - RNA, 19 nt, Artificial Sequence
  Description of Artificial Sequence: Synthetic oligonucleotide
  Sense strand starting at position 576 of SEQ ID NO: 1885977
acugguuucugguauuuac

SEQ ID NO: 2380435 - RNA, 19 nt, Artificial Sequence
  Description of Artificial Sequence: Synthetic oligonucleotide
  Antisense strand to SEQ ID NO: 2380434
guaaauaccagaaaccagu

SEQ ID NO: 2380436 - RNA, 19 nt, Artificial Sequence
  Description of Artificial Sequence: Synthetic oligonucleotide
  Sense strand starting at position 668 of SEQ ID NO: 1885977
gaguacagacuuuguagaa

SEQ ID NO: 2380437 - RNA, 19 nt, Artificial Sequence
  Description of Artificial Sequence: Synthetic oligonucleotide
  Antisense strand to SEQ ID NO: 2380436
uucuacaaagucuguacuc

SEQ ID NO: 2380438 - RNA, 19 nt, Artificial Sequence
  Description of Artificial Sequence: Synthetic oligonucleotide
  Sense strand starting at position 777 of SEQ ID NO: 1885977
ggugucacaauguauuauu

SEQ ID NO: 2380439 - RNA, 19 nt, Artificial Sequence
  Description of Artificial Sequence: Synthetic oligonucleotide
  Antisense strand to SEQ ID NO: 2380438
aauaauacauugugacacc

SEQ ID NO: 2380440 - RNA, 19 nt, Artificial Sequence
  Description of Artificial Sequence: Synthetic oligonucleotide
  Sense strand starting at position 811 of SEQ ID NO: 1885977
cagaaauuacaaggcaugu

SEQ ID NO: 2380441 - RNA, 19 nt, Artificial Sequence
  Description of Artificial Sequence: Synthetic oligonucleotide
  Antisense strand to SEQ ID NO: 2380440
acaugccuuguaauuucug

SEQ ID NO: 2380442 - RNA, 19 nt, Artificial Sequence
  Description of Artificial Sequence: Synthetic oligonucleotide
  Sense strand starting at position 843 of SEQ ID NO: 1885977
auggcucuauaauaggaaa

SEQ ID NO: 2380443 - RNA, 19 nt, Artificial Sequence
  Description of Artificial Sequence: Synthetic oligonucleotide
  Antisense strand to SEQ ID NO: 2380442
uuuccuauuauagagccau

SEQ ID NO: 2380444 - RNA, 19 nt, Artificial Sequence
  Description of Artificial Sequence: Synthetic oligonucleotide
  Sense strand starting at position 953 of SEQ ID NO: 1885977
gagcuaacagaaugugugu

SEQ ID NO: 2380445 - RNA, 19 nt, Artificial Sequence
  Description of Artificial Sequence: Synthetic oligonucleotide
  Antisense strand to SEQ ID NO: 2380444
acacacauucuguuagcuc

SEQ ID NO: 2380446 - RNA, 19 nt, Artificial Sequence
  Description of Artificial Sequence: Synthetic oligonucleotide
  Sense strand starting at position 958 of SEQ ID NO: 1885977
aacagaaugugugucuaaa

SEQ ID NO: 2380447 - RNA, 19 nt, Artificial Sequence
  Description of Artificial Sequence: Synthetic oligonucleotide
  Antisense strand to SEQ ID NO: 2380446
uuuagacacacauucuguu

SEQ ID NO: 2380448 - RNA, 19 nt, Artificial Sequence
  Description of Artificial Sequence: Synthetic oligonucleotide
  Sense strand starting at position 960 of SEQ ID NO: 1885977
cagaaugugugucuaaaca

SEQ ID NO: 2380449 - RNA, 19 nt, Artificial Sequence
  Description of Artificial Sequence: Synthetic oligonucleotide
  Antisense strand to SEQ ID NO: 2380448
uguuuagacacacauucug

SEQ ID NO: 2380450 - RNA, 19 nt, Artificial Sequence
  Description of Artificial Sequence: Synthetic oligonucleotide
  Sense strand starting at position 1174 of SEQ ID NO: 1885977
gauauuaucuaguuugaag

SEQ ID NO: 2380451 - RNA, 19 nt, Artificial Sequence
  Description of Artificial Sequence: Synthetic oligonucleotide
  Antisense strand to SEQ ID NO: 2380450
cuucaaacuagauaauauc

SEQ ID NO: 2380452 - RNA, 19 nt, Artificial Sequence
  Description of Artificial Sequence: Synthetic oligonucleotide
  Sense strand starting at position 1486 of SEQ ID NO: 1885977
caaggauccucaguaagcu

SEQ ID NO: 2380453 - RNA, 19 nt, Artificial Sequence
  Description of Artificial Sequence: Synthetic oligonucleotide
  Antisense strand to SEQ ID NO: 2380452
agcuuacugaggauccuug

SEQ ID NO: 2380454 - RNA, 19 nt, Artificial Sequence
  Description of Artificial Sequence: Synthetic oligonucleotide
  Sense strand starting at position 1954 of SEQ ID NO: 1885977
cccagagaguuugcaaaga

SEQ ID NO: 2380455 - RNA, 19 nt, Artificial Sequence
  Description of Artificial Sequence: Synthetic oligonucleotide
  Antisense strand to SEQ ID NO: 2380454
ucuuugcaaacucucuggg

SEQ ID NO: 2380456 - RNA, 19 nt, Artificial Sequence
  Description of Artificial Sequence: Synthetic oligonucleotide
  Sense strand starting at position 2224 of SEQ ID NO: 1885977
ccaguaagcuuccuagaag

SEQ ID NO: 2380457 - RNA, 19 nt, Artificial Sequence
  Description of Artificial Sequence: Synthetic oligonucleotide
  Antisense strand to SEQ ID NO: 2380456
cuucuaggaagcuuacugg

SEQ ID NO: 2380458 - RNA, 19 nt, Artificial Sequence
  Description of Artificial Sequence: Synthetic oligonucleotide
  Sense strand starting at position 2382 of SEQ ID NO: 1885977
caggacaucccguaaucuu

SEQ ID NO: 2380459 - RNA, 19 nt, Artificial Sequence
  Description of Artificial Sequence: Synthetic oligonucleotide
  Antisense strand to SEQ ID NO: 2380458
aagauuacgggauguccug

SEQ ID NO: 2380460 - RNA, 19 nt, Artificial Sequence
  Description of Artificial Sequence: Synthetic oligonucleotide
  Sense strand starting at position 2546 of SEQ ID NO: 1885977
uguuucugcguguuaucca

SEQ ID NO: 2380461 - RNA, 19 nt, Artificial Sequence
  Description of Artificial Sequence: Synthetic oligonucleotide
  Antisense strand to SEQ ID NO: 2380460
uggauaacacgcagaaaca

SEQ ID NO: 2380462 - RNA, 19 nt, Artificial Sequence
  Description of Artificial Sequence: Synthetic oligonucleotide
  Sense strand starting at position 2572 of SEQ ID NO: 1885977
guggaauacaguggugguu

SEQ ID NO: 2380463 - RNA, 19 nt, Artificial Sequence
  Description of Artificial Sequence: Synthetic oligonucleotide
  Antisense strand to SEQ ID NO: 2380462
aaccaccacuguauuccac

SEQ ID NO: 2380464 - RNA, 19 nt, Artificial Sequence
  Description of Artificial Sequence: Synthetic oligonucleotide
  Sense strand starting at position 2730 of SEQ ID NO: 1885977
acuguuucucaugagagca

SEQ ID NO: 2380465 - RNA, 19 nt, Artificial Sequence
  Description of Artificial Sequence: Synthetic oligonucleotide
  Antisense strand to SEQ ID NO: 2380464
ugcucucaugagaaacagu

SEQ ID NO: 2380466 - RNA, 19 nt, Artificial Sequence
  Description of Artificial Sequence: Synthetic oligonucleotide
  Sense strand starting at position 2814 of SEQ ID NO: 1885977
aggugcaaguguuuaggau

SEQ ID NO: 2380467 - RNA, 19 nt, Artificial Sequence
  Description of Artificial Sequence: Synthetic oligonucleotide
  Antisense strand to SEQ ID NO: 2380466
auccuaaacacuugcaccu

SEQ ID NO: 2380468 - RNA, 19 nt, Artificial Sequence
  Description of Artificial Sequence: Synthetic oligonucleotide
  Sense strand starting at position 2815 of SEQ ID NO: 1885977
ggugcaaguguuuaggauu

SEQ ID NO: 2380469 - RNA, 19 nt, Artificial Sequence
  Description of Artificial Sequence: Synthetic oligonucleotide
  Antisense strand to SEQ ID NO: 2380468
aauccuaaacacuugcacc

SEQ ID NO: 2380470 - RNA, 19 nt, Artificial Sequence
  Description of Artificial Sequence: Synthetic oligonucleotide
  Sense strand starting at position 2843 of SEQ ID NO: 1885977
ugaagccuguuaguaauga

SEQ ID NO: 2380471 - RNA, 19 nt, Artificial Sequence
  Description of Artificial Sequence: Synthetic oligonucleotide
  Antisense strand to SEQ ID NO: 2380470
ucauuacuaacaggcuuca

SEQ ID NO: 2380472 - RNA, 19 nt, Artificial Sequence
  Description of Artificial Sequence: Synthetic oligonucleotide
  Sense strand starting at position 2858 of SEQ ID NO: 1885977
augagaacuugugauaauc

SEQ ID NO: 2380473 - RNA, 19 nt, Artificial Sequence
  Description of Artificial Sequence: Synthetic oligonucleotide
  Antisense strand to SEQ ID NO: 2380472
gauuaucacaaguucucau

SEQ ID NO: 2380474 - RNA, 19 nt, Artificial Sequence
  Description of Artificial Sequence: Synthetic oligonucleotide
  Sense strand starting at position 3035 of SEQ ID NO: 1885977
acguuuguccuuucguuca

SEQ ID NO: 2380475 - RNA, 19 nt, Artificial Sequence
  Description of Artificial Sequence: Synthetic oligonucleotide
  Antisense strand to SEQ ID NO: 2380474
ugaacgaaaggacaaacgu

SEQ ID NO: 2380476 - RNA, 19 nt, Artificial Sequence
  Description of Artificial Sequence: Synthetic oligonucleotide
  Sense strand starting at position 3055 of SEQ ID NO: 1885977
uccuguaaugacggucuca

SEQ ID NO: 2380477 - RNA, 19 nt, Artificial Sequence
  Description of Artificial Sequence: Synthetic oligonucleotide
  Antisense strand to SEQ ID NO: 2380476
ugagaccgucauuacagga

SEQ ID NO: 2380478 - RNA, 19 nt, Artificial Sequence
  Description of Artificial Sequence: Synthetic oligonucleotide
  Sense strand starting at position 3190 of SEQ ID NO: 1885977
ucauuaaugucugcuguaa

SEQ ID NO: 2380479 - RNA, 19 nt, Artificial Sequence
  Description of Artificial Sequence: Synthetic oligonucleotide
  Antisense strand to SEQ ID NO: 2380478
uuacagcagacauuaauga

SEQ ID NO: 2380480 - RNA, 19 nt, Artificial Sequence
  Description of Artificial Sequence: Synthetic oligonucleotide
  Sense strand starting at position 3617 of SEQ ID NO: 1885977
agugaacaguuccuuuaaa

SEQ ID NO: 2380481 - RNA, 19 nt, Artificial Sequence
  Description of Artificial Sequence: Synthetic oligonucleotide
  Antisense strand to SEQ ID NO: 2380480
uuuaaaggaacuguucacu

SEQ ID NO: 2380482 - RNA, 19 nt, Artificial Sequence
  Description of Artificial Sequence: Synthetic oligonucleotide
  Sense strand starting at position 3650 of SEQ ID NO: 1885977
guguauacagcauauauaa

SEQ ID NO: 2380483 - RNA, 19 nt, Artificial Sequence
  Description of Artificial Sequence: Synthetic oligonucleotide
  Antisense strand to SEQ ID NO: 2380482
uuauauaugcuguauacac

SEQ ID NO: 2380484 - RNA, 19 nt, Artificial Sequence
  Description of Artificial Sequence: Synthetic oligonucleotide
  Sense strand starting at position 3711 of SEQ ID NO: 1885977
uuccaaagucaguauuagu

SEQ ID NO: 2380485 - RNA, 19 nt, Artificial Sequence
  Description of Artificial Sequence: Synthetic oligonucleotide
  Antisense strand to SEQ ID NO: 2380484
acuaauacugacuuuggaa

SEQ ID NO: 2380486 - RNA, 19 nt, Artificial Sequence
  Description of Artificial Sequence: Synthetic oligonucleotide
  Sense strand starting at position 3760 of SEQ ID NO: 1885977
uugugucucacaugaguaa

SEQ ID NO: 2380487 - RNA, 19 nt, Artificial Sequence
  Description of Artificial Sequence: Synthetic oligonucleotide
  Antisense strand to SEQ ID NO: 2380486
uuacucaugugagacacaa

SEQ ID NO: 2380488 - RNA, 19 nt, Artificial Sequence
  Description of Artificial Sequence: Synthetic oligonucleotide
  Sense strand starting at position 3764 of SEQ ID NO: 1885977
gucucacaugaguaacuuu

SEQ ID NO: 2380489 - RNA, 19 nt, Artificial Sequence
  Description of Artificial Sequence: Synthetic oligonucleotide
  Antisense strand to SEQ ID NO: 2380488
aaaguuacucaugugagac

SEQ ID NO: 2380490 - RNA, 19 nt, Artificial Sequence
  Description of Artificial Sequence: Synthetic oligonucleotide
  Sense strand starting at position 3903 of SEQ ID NO: 1885977
uggaucuagcuauaucuca

SEQ ID NO: 2380491 - RNA, 19 nt, Artificial Sequence
  Description of Artificial Sequence: Synthetic oligonucleotide
  Antisense strand to SEQ ID NO: 2380490
ugagauauagcuagaucca

SEQ ID NO: 2380492 - RNA, 19 nt, Artificial Sequence
  Description of Artificial Sequence: Synthetic oligonucleotide
  Sense strand starting at position 3942 of SEQ ID NO: 1885977
gguauauucuuucugcuac

SEQ ID NO: 2380493 - RNA, 19 nt, Artificial Sequence
  Description of Artificial Sequence: Synthetic oligonucleotide
  Antisense strand to SEQ ID NO: 2380492
guagcagaaagaauauacc

SEQ ID NO: 2380494 - RNA, 19 nt, Artificial Sequence
  Description of Artificial Sequence: Synthetic oligonucleotide
  Sense strand starting at position 27 of SEQ ID NO: 1885978
cagugauaugucugauuga

SEQ ID NO: 2380495 - RNA, 19 nt, Artificial Sequence
  Description of Artificial Sequence: Synthetic oligonucleotide
  Antisense strand to SEQ ID NO: 2380494
ucaaucagacauaucacug

SEQ ID NO: 2380496 - RNA, 19 nt, Artificial Sequence
  Description of Artificial Sequence: Synthetic oligonucleotide
  Sense strand starting at position 30 of SEQ ID NO: 1885978
ugauaugucugauugauug

SEQ ID NO: 2380497 - RNA, 19 nt, Artificial Sequence
  Description of Artificial Sequence: Synthetic oligonucleotide
  Antisense strand to SEQ ID NO: 2380496
caaucaaucagacauauca

SEQ ID NO: 2380498 - RNA, 19 nt, Artificial Sequence
  Description of Artificial Sequence: Synthetic oligonucleotide
  Sense strand starting at position 34 of SEQ ID NO: 1885978
augucugauugauugaaua

SEQ ID NO: 2380499 - RNA, 19 nt, Artificial Sequence
  Description of Artificial Sequence: Synthetic oligonucleotide
  Antisense strand to SEQ ID NO: 2380498
uauucaaucaaucagacau

SEQ ID NO: 2380500 - RNA, 19 nt, Artificial Sequence
  Description of Artificial Sequence: Synthetic oligonucleotide
  Sense strand starting at position 243 of SEQ ID NO: 1885978
agugcuauccuugauaaag

SEQ ID NO: 2380501 - RNA, 19 nt, Artificial Sequence
  Description of Artificial Sequence: Synthetic oligonucleotide
  Antisense strand to SEQ ID NO: 2380500
cuuuaucaaggauagcacu

SEQ ID NO: 2380502 - RNA, 19 nt, Artificial Sequence
  Description of Artificial Sequence: Synthetic oligonucleotide
  Sense strand starting at position 273 of SEQ ID NO: 1885978
ggauuuagaugggauaucu

SEQ ID NO: 2380503 - RNA, 19 nt, Artificial Sequence
  Description of Artificial Sequence: Synthetic oligonucleotide
  Antisense strand to SEQ ID NO: 2380502
agauaucccaucuaaaucc

SEQ ID NO: 2380504 - RNA, 19 nt, Artificial Sequence
  Description of Artificial Sequence: Synthetic oligonucleotide
  Sense strand starting at position 319 of SEQ ID NO: 1885978
agcagaaacuggcuaguua

SEQ ID NO: 2380505 - RNA, 19 nt, Artificial Sequence
  Description of Artificial Sequence: Synthetic oligonucleotide
  Antisense strand to SEQ ID NO: 2380504
uaacuagccaguuucugcu

SEQ ID NO: 2380506 - RNA, 19 nt, Artificial Sequence
  Description of Artificial Sequence: Synthetic oligonucleotide
  Sense strand starting at position 320 of SEQ ID NO: 1885978
gcagaaacuggcuaguuau

SEQ ID NO: 2380507 - RNA, 19 nt, Artificial Sequence
  Description of Artificial Sequence: Synthetic oligonucleotide
  Antisense strand to SEQ ID NO: 2380506
auaacuagccaguuucugc

SEQ ID NO: 2380508 - RNA, 19 nt, Artificial Sequence
  Description of Artificial Sequence: Synthetic oligonucleotide
  Sense strand starting at position 600 of SEQ ID NO: 1885978
cuuuaaauguagucuuauc

SEQ ID NO: 2380509 - RNA, 19 nt, Artificial Sequence
  Description of Artificial Sequence: Synthetic oligonucleotide
  Antisense strand to SEQ ID NO: 2380508
gauaagacuacauuuaaag

SEQ ID NO: 2380510 - RNA, 19 nt, Artificial Sequence
  Description of Artificial Sequence: Synthetic oligonucleotide
  Sense strand starting at position 658 of SEQ ID NO: 1885978
aggaauuaaucagacaaau

SEQ ID NO: 2380511 - RNA, 19 nt, Artificial Sequence
  Description of Artificial Sequence: Synthetic oligonucleotide
  Antisense strand to SEQ ID NO: 2380510
auuugucugauuaauuccu

SEQ ID NO: 2380512 - RNA, 19 nt, Artificial Sequence
  Description of Artificial Sequence: Synthetic oligonucleotide
  Sense strand starting at position 702 of SEQ ID NO: 1885978
uuggcagcacuauauauua

SEQ ID NO: 2380513 - RNA, 19 nt, Artificial Sequence
  Description of Artificial Sequence: Synthetic oligonucleotide
  Antisense strand to SEQ ID NO: 2380512
uaauauauagugcugccaa

SEQ ID NO: 2380514 - RNA, 19 nt, Artificial Sequence
  Description of Artificial Sequence: Synthetic oligonucleotide
  Sense strand starting at position 735 of SEQ ID NO: 1885978
gaggaaaucugugucuggu

SEQ ID NO: 2380515 - RNA, 19 nt, Artificial Sequence
  Description of Artificial Sequence: Synthetic oligonucleotide
  Antisense strand to SEQ ID NO: 2380514
accagacacagauuuccuc

SEQ ID NO: 2380516 - RNA, 19 nt, Artificial Sequence
  Description of Artificial Sequence: Synthetic oligonucleotide
  Sense strand starting at position 737 of SEQ ID NO: 1885978
ggaaaucugugucugguau

SEQ ID NO: 2380517 - RNA, 19 nt, Artificial Sequence
  Description of Artificial Sequence: Synthetic oligonucleotide
  Antisense strand to SEQ ID NO: 2380516
auaccagacacagauuucc

SEQ ID NO: 2380518 - RNA, 19 nt, Artificial Sequence
  Description of Artificial Sequence: Synthetic oligonucleotide
  Sense strand starting at position 749 of SEQ ID NO: 1885978
cugguauuagcggaaugau

SEQ ID NO: 2380519 - RNA, 19 nt, Artificial Sequence
  Description of Artificial Sequence: Synthetic oligonucleotide
  Antisense strand to SEQ ID NO: 2380518
aucauuccgcuaauaccag

SEQ ID NO: 2380520 - RNA, 19 nt, Artificial Sequence
  Description of Artificial Sequence: Synthetic oligonucleotide
  Sense strand starting at position 752 of SEQ ID NO: 1885978
guauuagcggaaugauuaa

SEQ ID NO: 2380521 - RNA, 19 nt, Artificial Sequence
  Description of Artificial Sequence: Synthetic oligonucleotide
  Antisense strand to SEQ ID NO: 2380520
uuaaucauuccgcuaauac

SEQ ID NO: 2380522 - RNA, 19 nt, Artificial Sequence
  Description of Artificial Sequence: Synthetic oligonucleotide
  Sense strand starting at position 889 of SEQ ID NO: 1885978
gcaacaugaguuuaagauu

SEQ ID NO: 2380523 - RNA, 19 nt, Artificial Sequence
  Description of Artificial Sequence: Synthetic oligonucleotide
  Antisense strand to SEQ ID NO: 2380522
aaucuuaaacucauguugc

SEQ ID NO: 2380524 - RNA, 19 nt, Artificial Sequence
  Description of Artificial Sequence: Synthetic oligonucleotide
  Sense strand starting at position 1245 of SEQ ID NO: 1885978
gacugacacuccuuggguu

SEQ ID NO: 2380525 - RNA, 19 nt, Artificial Sequence
  Description of Artificial Sequence: Synthetic oligonucleotide
  Antisense strand to SEQ ID NO: 2380524
aacccaaggagugucaguc

SEQ ID NO: 2380526 - RNA, 19 nt, Artificial Sequence
  Description of Artificial Sequence: Synthetic oligonucleotide
  Sense strand starting at position 1290 of SEQ ID NO: 1885978
uaguauucccagcauggau

SEQ ID NO: 2380527 - RNA, 19 nt, Artificial Sequence
  Description of Artificial Sequence: Synthetic oligonucleotide
  Antisense strand to SEQ ID NO: 2380526
auccaugcugggaauacua

SEQ ID NO: 2380528 - RNA, 19 nt, Artificial Sequence
  Description of Artificial Sequence: Synthetic oligonucleotide
  Sense strand starting at position 1292 of SEQ ID NO: 1885978
guauucccagcauggauua

SEQ ID NO: 2380529 - RNA, 19 nt, Artificial Sequence
  Description of Artificial Sequence: Synthetic oligonucleotide
  Antisense strand to SEQ ID NO: 2380528
uaauccaugcugggaauac

SEQ ID NO: 2380530 - RNA, 19 nt, Artificial Sequence
  Description of Artificial Sequence: Synthetic oligonucleotide
  Sense strand starting at position 1335 of SEQ ID NO: 1885978
gugaacaucuggguacuga

SEQ ID NO: 2380531 - RNA, 19 nt, Artificial Sequence
  Description of Artificial Sequence: Synthetic oligonucleotide
  Antisense strand to SEQ ID NO: 2380530
ucaguacccagauguucac

SEQ ID NO: 2380532 - RNA, 19 nt, Artificial Sequence
  Description of Artificial Sequence: Synthetic oligonucleotide
  Sense strand starting at position 1369 of SEQ ID NO: 1885978
aggcuucgggcuuauagau

SEQ ID NO: 2380533 - RNA, 19 nt, Artificial Sequence
  Description of Artificial Sequence: Synthetic oligonucleotide
  Antisense strand to SEQ ID NO: 2380532
aucuauaagcccgaagccu

SEQ ID NO: 2380534 - RNA, 19 nt, Artificial Sequence
  Description of Artificial Sequence: Synthetic oligonucleotide
  Sense strand starting at position 1376 of SEQ ID NO: 1885978
gggcuuauagauugcaacu

SEQ ID NO: 2380535 - RNA, 19 nt, Artificial Sequence
  Description of Artificial Sequence: Synthetic oligonucleotide
  Antisense strand to SEQ ID NO: 2380534
aguugcaaucuauaagccc

SEQ ID NO: 2380536 - RNA, 19 nt, Artificial Sequence
  Description of Artificial Sequence: Synthetic oligonucleotide
  Sense strand starting at position 1424 of SEQ ID NO: 1885978
cuccaugcucuugagaauc

SEQ ID NO: 2380537 - RNA, 19 nt, Artificial Sequence
  Description of Artificial Sequence: Synthetic oligonucleotide
  Antisense strand to SEQ ID NO: 2380536
gauucucaagagcauggag

SEQ ID NO: 2380538 - RNA, 19 nt, Artificial Sequence
  Description of Artificial Sequence: Synthetic oligonucleotide
  Sense strand starting at position 1444 of SEQ ID NO: 1885978
cuguguuuccauggacaau

SEQ ID NO: 2380539 - RNA, 19 nt, Artificial Sequence
  Description of Artificial Sequence: Synthetic oligonucleotide
  Antisense strand to SEQ ID NO: 2380538
auuguccauggaaacacag

SEQ ID NO: 2380540 - RNA, 19 nt, Artificial Sequence
  Description of Artificial Sequence: Synthetic oligonucleotide
  Sense strand starting at position 1515 of SEQ ID NO: 1885978
uggucagaacuguauccuu

SEQ ID NO: 2380541 - RNA, 19 nt, Artificial Sequence
  Description of Artificial Sequence: Synthetic oligonucleotide
  Antisense strand to SEQ ID NO: 2380540
aaggauacaguucugacca

SEQ ID NO: 2380542 - RNA, 19 nt, Artificial Sequence
  Description of Artificial Sequence: Synthetic oligonucleotide
  Sense strand starting at position 1520 of SEQ ID NO: 1885978
agaacuguauccuuuaugu

SEQ ID NO: 2380543 - RNA, 19 nt, Artificial Sequence
  Description of Artificial Sequence: Synthetic oligonucleotide
  Antisense strand to SEQ ID NO: 2380542
acauaaaggauacaguucu

SEQ ID NO: 2380544 - RNA, 19 nt, Artificial Sequence
  Description of Artificial Sequence: Synthetic oligonucleotide
  Sense strand starting at position 1615 of SEQ ID NO: 1885978
uugugagaaugucuugaaa

SEQ ID NO: 2380545 - RNA, 19 nt, Artificial Sequence
  Description of Artificial Sequence: Synthetic oligonucleotide
  Antisense strand to SEQ ID NO: 2380544
uuucaagacauucucacaa

SEQ ID NO: 2380546 - RNA, 19 nt, Artificial Sequence
  Description of Artificial Sequence: Synthetic oligonucleotide
  Sense strand starting at position 1626 of SEQ ID NO: 1885978
ucuugaaaguuuccuuuga

SEQ ID NO: 2380547 - RNA, 19 nt, Artificial Sequence
  Description of Artificial Sequence: Synthetic oligonucleotide
  Antisense strand to SEQ ID NO: 2380546
ucaaaggaaacuuucaaga

SEQ ID NO: 2380548 - RNA, 19 nt, Artificial Sequence
  Description of Artificial Sequence: Synthetic oligonucleotide
  Sense strand starting at position 1627 of SEQ ID NO: 1885978
cuugaaaguuuccuuugaa

SEQ ID NO: 2380549 - RNA, 19 nt, Artificial Sequence
  Description of Artificial Sequence: Synthetic oligonucleotide
  Antisense strand to SEQ ID NO: 2380548
uucaaaggaaacuuucaag

SEQ ID NO: 2380550 - RNA, 19 nt, Artificial Sequence
  Description of Artificial Sequence: Synthetic oligonucleotide
  Sense strand starting at position 1628 of SEQ ID NO: 1885978
uugaaaguuuccuuugaaa

SEQ ID NO: 2380551 - RNA, 19 nt, Artificial Sequence
  Description of Artificial Sequence: Synthetic oligonucleotide
  Antisense strand to SEQ ID NO: 2380550
uuucaaaggaaacuuucaa

SEQ ID NO: 2380552 - RNA, 19 nt, Artificial Sequence
  Description of Artificial Sequence: Synthetic oligonucleotide
  Sense strand starting at position 1745 of SEQ ID NO: 1885978
ggguauugaggacgugaga

SEQ ID NO: 2380553 - RNA, 19 nt, Artificial Sequence
  Description of Artificial Sequence: Synthetic oligonucleotide
  Antisense strand to SEQ ID NO: 2380552
ucucacguccucaauaccc

SEQ ID NO: 2380554 - RNA, 19 nt, Artificial Sequence
  Description of Artificial Sequence: Synthetic oligonucleotide
  Sense strand starting at position 1756 of SEQ ID NO: 1885978
acgugagacugauucucua

SEQ ID NO: 2380555 - RNA, 19 nt, Artificial Sequence
  Description of Artificial Sequence: Synthetic oligonucleotide
  Antisense strand to SEQ ID NO: 2380554
uagagaaucagucucacgu

SEQ ID NO: 2380556 - RNA, 19 nt, Artificial Sequence
  Description of Artificial Sequence: Synthetic oligonucleotide
  Sense strand starting at position 1838 of SEQ ID NO: 1885978
ugggaagguugagcuauaa

SEQ ID NO: 2380557 - RNA, 19 nt, Artificial Sequence
  Description of Artificial Sequence: Synthetic oligonucleotide
  Antisense strand to SEQ ID NO: 2380556
uuauagcucaaccuuccca

SEQ ID NO: 2380558 - RNA, 19 nt, Artificial Sequence
  Description of Artificial Sequence: Synthetic oligonucleotide
  Sense strand starting at position 2053 of SEQ ID NO: 1885978
gaguaaagugcauaauaau

SEQ ID NO: 2380559 - RNA, 19 nt, Artificial Sequence
  Description of Artificial Sequence: Synthetic oligonucleotide
  Antisense strand to SEQ ID NO: 2380558
auuauuaugcacuuuacuc

SEQ ID NO: 2380560 - RNA, 19 nt, Artificial Sequence
  Description of Artificial Sequence: Synthetic oligonucleotide
  Sense strand starting at position 2086 of SEQ ID NO: 1885978
gcuggaauuucucuuguug

SEQ ID NO: 2380561 - RNA, 19 nt, Artificial Sequence
  Description of Artificial Sequence: Synthetic oligonucleotide
  Antisense strand to SEQ ID NO: 2380560
caacaagagaaauuccagc

SEQ ID NO: 2380562 - RNA, 19 nt, Artificial Sequence
  Description of Artificial Sequence: Synthetic oligonucleotide
  Sense strand starting at position 2129 of SEQ ID NO: 1885978
agugguauaguauauucga

SEQ ID NO: 2380563 - RNA, 19 nt, Artificial Sequence
  Description of Artificial Sequence: Synthetic oligonucleotide
  Antisense strand to SEQ ID NO: 2380562
ucgaauauacuauaccacu

SEQ ID NO: 2380564 - RNA, 19 nt, Artificial Sequence
  Description of Artificial Sequence: Synthetic oligonucleotide
  Sense strand starting at position 2132 of SEQ ID NO: 1885978
gguauaguauauucgauug

SEQ ID NO: 2380565 - RNA, 19 nt, Artificial Sequence
  Description of Artificial Sequence: Synthetic oligonucleotide
  Antisense strand to SEQ ID NO: 2380564
caaucgaauauacuauacc

SEQ ID NO: 2380566 - RNA, 19 nt, Artificial Sequence
  Description of Artificial Sequence: Synthetic oligonucleotide
  Sense strand starting at position 2715 of SEQ ID NO: 1885978
auuucuaaugccugagcuu

SEQ ID NO: 2380567 - RNA, 19 nt, Artificial Sequence
  Description of Artificial Sequence: Synthetic oligonucleotide
  Antisense strand to SEQ ID NO: 2380566
aagcucaggcauuagaaau

SEQ ID NO: 2380568 - RNA, 19 nt, Artificial Sequence
  Description of Artificial Sequence: Synthetic oligonucleotide
  Sense strand starting at position 2808 of SEQ ID NO: 1885978
agcagagcucucuagccaa

SEQ ID NO: 2380569 - RNA, 19 nt, Artificial Sequence
  Description of Artificial Sequence: Synthetic oligonucleotide
  Antisense strand to SEQ ID NO: 2380568
uuggcuagagagcucugcu

SEQ ID NO: 2380570 - RNA, 19 nt, Artificial Sequence
  Description of Artificial Sequence: Synthetic oligonucleotide
  Sense strand starting at position 3920 of SEQ ID NO: 1885978
uuuagcuacuuagugauuu

SEQ ID NO: 2380571 - RNA, 19 nt, Artificial Sequence
  Description of Artificial Sequence: Synthetic oligonucleotide
  Antisense strand to SEQ ID NO: 2380570
aaaucacuaaguagcuaaa

SEQ ID NO: 2380572 - RNA, 19 nt, Artificial Sequence
  Description of Artificial Sequence: Synthetic oligonucleotide
  Sense strand starting at position 3924 of SEQ ID NO: 1885978
gcuacuuagugauuuccau

SEQ ID NO: 2380573 - RNA, 19 nt, Artificial Sequence
  Description of Artificial Sequence: Synthetic oligonucleotide
  Antisense strand to SEQ ID NO: 2380572
auggaaaucacuaaguagc

SEQ ID NO: 2380574 - RNA, 19 nt, Artificial Sequence
  Description of Artificial Sequence: Synthetic oligonucleotide
  Sense strand starting at position 18 of SEQ ID NO: 1885979
cugagcuuggugcaaauga

SEQ ID NO: 2380575 - RNA, 19 nt, Artificial Sequence
  Description of Artificial Sequence: Synthetic oligonucleotide
  Antisense strand to SEQ ID NO: 2380574
ucauuugcaccaagcucag

SEQ ID NO: 2380576 - RNA, 19 nt, Artificial Sequence
  Description of Artificial Sequence: Synthetic oligonucleotide
  Sense strand starting at position 87 of SEQ ID NO: 1885979
auucguauccuauaacgag

SEQ ID NO: 2380577 - RNA, 19 nt, Artificial Sequence
  Description of Artificial Sequence: Synthetic oligonucleotide
  Antisense strand to SEQ ID NO: 2380576
cucguuauaggauacgaau

SEQ ID NO: 2380578 - RNA, 19 nt, Artificial Sequence
  Description of Artificial Sequence: Synthetic oligonucleotide
  Sense strand starting at position 156 of SEQ ID NO: 1885979
ccucguucugaugagauuc

SEQ ID NO: 2380579 - RNA, 19 nt, Artificial Sequence
  Description of Artificial Sequence: Synthetic oligonucleotide
  Antisense strand to SEQ ID NO: 2380578
gaaucucaucagaacgagg

SEQ ID NO: 2380580 - RNA, 19 nt, Artificial Sequence
  Description of Artificial Sequence: Synthetic oligonucleotide
  Sense strand starting at position 189 of SEQ ID NO: 1885979
cugagcugucagugaauuu

SEQ ID NO: 2380581 - RNA, 19 nt, Artificial Sequence
  Description of Artificial Sequence: Synthetic oligonucleotide
  Antisense strand to SEQ ID NO: 2380580
aaauucacugacagcucag

SEQ ID NO: 2380582 - RNA, 19 nt, Artificial Sequence
  Description of Artificial Sequence: Synthetic oligonucleotide
  Sense strand starting at position 355 of SEQ ID NO: 1885979
agguaauaucuugacugcu

SEQ ID NO: 2380583 - RNA, 19 nt, Artificial Sequence
  Description of Artificial Sequence: Synthetic oligonucleotide
  Antisense strand to SEQ ID NO: 2380582
agcagucaagauauuaccu

SEQ ID NO: 2380584 - RNA, 19 nt, Artificial Sequence
  Description of Artificial Sequence: Synthetic oligonucleotide
  Sense strand starting at position 438 of SEQ ID NO: 1885979
ccucuugaaggauguuuga

SEQ ID NO: 2380585 - RNA, 19 nt, Artificial Sequence
  Description of Artificial Sequence: Synthetic oligonucleotide
  Antisense strand to SEQ ID NO: 2380584
ucaaacauccuucaagagg

SEQ ID NO: 2380586 - RNA, 19 nt, Artificial Sequence
  Description of Artificial Sequence: Synthetic oligonucleotide
  Sense strand starting at position 447 of SEQ ID NO: 1885979
ggauguuugagccaucuag

SEQ ID NO: 2380587 - RNA, 19 nt, Artificial Sequence
  Description of Artificial Sequence: Synthetic oligonucleotide
  Antisense strand to SEQ ID NO: 2380586
cuagauggcucaaacaucc

SEQ ID NO: 2380588 - RNA, 19 nt, Artificial Sequence
  Description of Artificial Sequence: Synthetic oligonucleotide
  Sense strand starting at position 574 of SEQ ID NO: 1885979
acuuuauucuagucuagac

SEQ ID NO: 2380589 - RNA, 19 nt, Artificial Sequence
  Description of Artificial Sequence: Synthetic oligonucleotide
  Antisense strand to SEQ ID NO: 2380588
gucuagacuagaauaaagu

SEQ ID NO: 2380590 - RNA, 19 nt, Artificial Sequence
  Description of Artificial Sequence: Synthetic oligonucleotide
  Sense strand starting at position 648 of SEQ ID NO: 1885979
ugugcauuuccuggcaaau

SEQ ID NO: 2380591 - RNA, 19 nt, Artificial Sequence
  Description of Artificial Sequence: Synthetic oligonucleotide
  Antisense strand to SEQ ID NO: 2380590
auuugccaggaaaugcaca

SEQ ID NO: 2380592 - RNA, 19 nt, Artificial Sequence
  Description of Artificial Sequence: Synthetic oligonucleotide
  Sense strand starting at position 735 of SEQ ID NO: 1885979
agaagaacauaucagaaau

SEQ ID NO: 2380593 - RNA, 19 nt, Artificial Sequence
  Description of Artificial Sequence: Synthetic oligonucleotide
  Antisense strand to SEQ ID NO: 2380592
auuucugauauguucuucu

SEQ ID NO: 2380594 - RNA, 19 nt, Artificial Sequence
  Description of Artificial Sequence: Synthetic oligonucleotide
  Sense strand starting at position 783 of SEQ ID NO: 1885979
agggccuuugaaugacaau

SEQ ID NO: 2380595 - RNA, 19 nt, Artificial Sequence
  Description of Artificial Sequence: Synthetic oligonucleotide
  Antisense strand to SEQ ID NO: 2380594
auugucauucaaaggcccu

SEQ ID NO: 2380596 - RNA, 19 nt, Artificial Sequence
  Description of Artificial Sequence: Synthetic oligonucleotide
  Sense strand starting at position 828 of SEQ ID NO: 1885979
uagugaaaugcucagaauu

SEQ ID NO: 2380597 - RNA, 19 nt, Artificial Sequence
  Description of Artificial Sequence: Synthetic oligonucleotide
  Antisense strand to SEQ ID NO: 2380596
aauucugagcauuucacua

SEQ ID NO: 2380598 - RNA, 19 nt, Artificial Sequence
  Description of Artificial Sequence: Synthetic oligonucleotide
  Sense strand starting at position 954 of SEQ ID NO: 1885979
cugacuugucagcacugga

SEQ ID NO: 2380599 - RNA, 19 nt, Artificial Sequence
  Description of Artificial Sequence: Synthetic oligonucleotide
  Antisense strand to SEQ ID NO: 2380598
uccagugcugacaagucag

SEQ ID NO: 2380600 - RNA, 19 nt, Artificial Sequence
  Description of Artificial Sequence: Synthetic oligonucleotide
  Sense strand starting at position 957 of SEQ ID NO: 1885979
acuugucagcacuggaaag

SEQ ID NO: 2380601 - RNA, 19 nt, Artificial Sequence
  Description of Artificial Sequence: Synthetic oligonucleotide
  Antisense strand to SEQ ID NO: 2380600
cuuuccagugcugacaagu

SEQ ID NO: 2380602 - RNA, 19 nt, Artificial Sequence
  Description of Artificial Sequence: Synthetic oligonucleotide
  Sense strand starting at position 1045 of SEQ ID NO: 1885979
acauaccauguguauguua

SEQ ID NO: 2380603 - RNA, 19 nt, Artificial Sequence
  Description of Artificial Sequence: Synthetic oligonucleotide
  Antisense strand to SEQ ID NO: 2380602
uaacauacacaugguaugu

SEQ ID NO: 2380604 - RNA, 19 nt, Artificial Sequence
  Description of Artificial Sequence: Synthetic oligonucleotide
  Sense strand starting at position 1056 of SEQ ID NO: 1885979
guauguuaagggcaaugau

SEQ ID NO: 2380605 - RNA, 19 nt, Artificial Sequence
  Description of Artificial Sequence: Synthetic oligonucleotide
  Antisense strand to SEQ ID NO: 2380604
aucauugcccuuaacauac

SEQ ID NO: 2380606 - RNA, 19 nt, Artificial Sequence
  Description of Artificial Sequence: Synthetic oligonucleotide
  Sense strand starting at position 1117 of SEQ ID NO: 1885979
agacucaucucuccaggau

SEQ ID NO: 2380607 - RNA, 19 nt, Artificial Sequence
  Description of Artificial Sequence: Synthetic oligonucleotide
  Antisense strand to SEQ ID NO: 2380606
auccuggagagaugagucu

SEQ ID NO: 2380608 - RNA, 19 nt, Artificial Sequence
  Description of Artificial Sequence: Synthetic oligonucleotide
  Sense strand starting at position 1403 of SEQ ID NO: 1885979
uugcauuuguucucucauu

SEQ ID NO: 2380609 - RNA, 19 nt, Artificial Sequence
  Description of Artificial Sequence: Synthetic oligonucleotide
  Antisense strand to SEQ ID NO: 2380608
aaugagagaacaaaugcaa

SEQ ID NO: 2380610 - RNA, 19 nt, Artificial Sequence
  Description of Artificial Sequence: Synthetic oligonucleotide
  Sense strand starting at position 1555 of SEQ ID NO: 1885979
uuacacagccaguaaagua

SEQ ID NO: 2380611 - RNA, 19 nt, Artificial Sequence
  Description of Artificial Sequence: Synthetic oligonucleotide
  Antisense strand to SEQ ID NO: 2380610
uacuuuacuggcuguguaa

SEQ ID NO: 2380612 - RNA, 19 nt, Artificial Sequence
  Description of Artificial Sequence: Synthetic oligonucleotide
  Sense strand starting at position 1608 of SEQ ID NO: 1885979
gcuaaagcugaaggauuau

SEQ ID NO: 2380613 - RNA, 19 nt, Artificial Sequence
  Description of Artificial Sequence: Synthetic oligonucleotide
  Antisense strand to SEQ ID NO: 2380612
auaauccuucagcuuuagc

SEQ ID NO: 2380614 - RNA, 19 nt, Artificial Sequence
  Description of Artificial Sequence: Synthetic oligonucleotide
  Sense strand starting at position 1742 of SEQ ID NO: 1885979
agagaugagcauugguuca

SEQ ID NO: 2380615 - RNA, 19 nt, Artificial Sequence
  Description of Artificial Sequence: Synthetic oligonucleotide
  Antisense strand to SEQ ID NO: 2380614
ugaaccaaugcucaucucu

SEQ ID NO: 2380616 - RNA, 19 nt, Artificial Sequence
  Description of Artificial Sequence: Synthetic oligonucleotide
  Sense strand starting at position 2027 of SEQ ID NO: 1885979
uucuuagaacuuuggacuu

SEQ ID NO: 2380617 - RNA, 19 nt, Artificial Sequence
  Description of Artificial Sequence: Synthetic oligonucleotide
  Antisense strand to SEQ ID NO: 2380616
aaguccaaaguucuaagaa

SEQ ID NO: 2380618 - RNA, 19 nt, Artificial Sequence
  Description of Artificial Sequence: Synthetic oligonucleotide
  Sense strand starting at position 2090 of SEQ ID NO: 1885979
ugggacuucucaccuccau

SEQ ID NO: 2380619 - RNA, 19 nt, Artificial Sequence
  Description of Artificial Sequence: Synthetic oligonucleotide
  Antisense strand to SEQ ID NO: 2380618
auggaggugagaaguccca

SEQ ID NO: 2380620 - RNA, 19 nt, Artificial Sequence
  Description of Artificial Sequence: Synthetic oligonucleotide
  Sense strand starting at position 2304 of SEQ ID NO: 1885979
aucaaagucuuguugaaga

SEQ ID NO: 2380621 - RNA, 19 nt, Artificial Sequence
  Description of Artificial Sequence: Synthetic oligonucleotide
  Antisense strand to SEQ ID NO: 2380620
ucuucaacaagacuuugau

SEQ ID NO: 2380622 - RNA, 19 nt, Artificial Sequence
  Description of Artificial Sequence: Synthetic oligonucleotide
  Sense strand starting at position 2306 of SEQ ID NO: 1885979
caaagucuuguugaagagu

SEQ ID NO: 2380623 - RNA, 19 nt, Artificial Sequence
  Description of Artificial Sequence: Synthetic oligonucleotide
  Antisense strand to SEQ ID NO: 2380622
acucuucaacaagacuuug

SEQ ID NO: 2380624 - RNA, 19 nt, Artificial Sequence
  Description of Artificial Sequence: Synthetic oligonucleotide
  Sense strand starting at position 2409 of SEQ ID NO: 1885979
aagaaaucuggaggugagu

SEQ ID NO: 2380625 - RNA, 19 nt, Artificial Sequence
  Description of Artificial Sequence: Synthetic oligonucleotide
  Antisense strand to SEQ ID NO: 2380624
acucaccuccagauuucuu

SEQ ID NO: 2380626 - RNA, 19 nt, Artificial Sequence
  Description of Artificial Sequence: Synthetic oligonucleotide
  Sense strand starting at position 2468 of SEQ ID NO: 1885979
ccugaugugaugcaugauu

SEQ ID NO: 2380627 - RNA, 19 nt, Artificial Sequence
  Description of Artificial Sequence: Synthetic oligonucleotide
  Antisense strand to SEQ ID NO: 2380626
aaucaugcaucacaucagg

SEQ ID NO: 2380628 - RNA, 19 nt, Artificial Sequence
  Description of Artificial Sequence: Synthetic oligonucleotide
  Sense strand starting at position 2481 of SEQ ID NO: 1885979
augauuaccugccuugaga

SEQ ID NO: 2380629 - RNA, 19 nt, Artificial Sequence
  Description of Artificial Sequence: Synthetic oligonucleotide
  Antisense strand to SEQ ID NO: 2380628
ucucaaggcagguaaucau

SEQ ID NO: 2380630 - RNA, 19 nt, Artificial Sequence
  Description of Artificial Sequence: Synthetic oligonucleotide
  Sense strand starting at position 2542 of SEQ ID NO: 1885979
auuggucuguuacuaagga

SEQ ID NO: 2380631 - RNA, 19 nt, Artificial Sequence
  Description of Artificial Sequence: Synthetic oligonucleotide
  Antisense strand to SEQ ID NO: 2380630
uccuuaguaacagaccaau

SEQ ID NO: 2380632 - RNA, 19 nt, Artificial Sequence
  Description of Artificial Sequence: Synthetic oligonucleotide
  Sense strand starting at position 2640 of SEQ ID NO: 1885979
ucagaagaagucugagugu

SEQ ID NO: 2380633 - RNA, 19 nt, Artificial Sequence
  Description of Artificial Sequence: Synthetic oligonucleotide
  Antisense strand to SEQ ID NO: 2380632
acacucagacuucuucuga

SEQ ID NO: 2380634 - RNA, 19 nt, Artificial Sequence
  Description of Artificial Sequence: Synthetic oligonucleotide
  Sense strand starting at position 2734 of SEQ ID NO: 1885979
gacuauuguguugagcaag

SEQ ID NO: 2380635 - RNA, 19 nt, Artificial Sequence
  Description of Artificial Sequence: Synthetic oligonucleotide
  Antisense strand to SEQ ID NO: 2380634
cuugcucaacacaauaguc

SEQ ID NO: 2380636 - RNA, 19 nt, Artificial Sequence
  Description of Artificial Sequence: Synthetic oligonucleotide
  Sense strand starting at position 2890 of SEQ ID NO: 1885979
aauguauaaugugcaauga

SEQ ID NO: 2380637 - RNA, 19 nt, Artificial Sequence
  Description of Artificial Sequence: Synthetic oligonucleotide
  Antisense strand to SEQ ID NO: 2380636
ucauugcacauuauacauu

SEQ ID NO: 2380638 - RNA, 19 nt, Artificial Sequence
  Description of Artificial Sequence: Synthetic oligonucleotide
  Sense strand starting at position 2891 of SEQ ID NO: 1885979
auguauaaugugcaaugau

SEQ ID NO: 2380639 - RNA, 19 nt, Artificial Sequence
  Description of Artificial Sequence: Synthetic oligonucleotide
  Antisense strand to SEQ ID NO: 2380638
aucauugcacauuauacau

SEQ ID NO: 2380640 - RNA, 19 nt, Artificial Sequence
  Description of Artificial Sequence: Synthetic oligonucleotide
  Sense strand starting at position 3059 of SEQ ID NO: 1885979
agcuuaauguaauuagaga

SEQ ID NO: 2380641 - RNA, 19 nt, Artificial Sequence
  Description of Artificial Sequence: Synthetic oligonucleotide
  Antisense strand to SEQ ID NO: 2380640
ucucuaauuacauuaagcu

SEQ ID NO: 2380642 - RNA, 19 nt, Artificial Sequence
  Description of Artificial Sequence: Synthetic oligonucleotide
  Sense strand starting at position 3163 of SEQ ID NO: 1885979
gggaaucuguaguuuagaa

SEQ ID NO: 2380643 - RNA, 19 nt, Artificial Sequence
  Description of Artificial Sequence: Synthetic oligonucleotide
  Antisense strand to SEQ ID NO: 2380642
uucuaaacuacagauuccc

SEQ ID NO: 2380644 - RNA, 19 nt, Artificial Sequence
  Description of Artificial Sequence: Synthetic oligonucleotide
  Sense strand starting at position 3189 of SEQ ID NO: 1885979
guguaacuccauuagugag

SEQ ID NO: 2380645 - RNA, 19 nt, Artificial Sequence
  Description of Artificial Sequence: Synthetic oligonucleotide
  Antisense strand to SEQ ID NO: 2380644
cucacuaauggaguuacac

SEQ ID NO: 2380646 - RNA, 19 nt, Artificial Sequence
  Description of Artificial Sequence: Synthetic oligonucleotide
  Sense strand starting at position 3296 of SEQ ID NO: 1885979
aguguuugugcugucacau

SEQ ID NO: 2380647 - RNA, 19 nt, Artificial Sequence
  Description of Artificial Sequence: Synthetic oligonucleotide
  Antisense strand to SEQ ID NO: 2380646
augugacagcacaaacacu

SEQ ID NO: 2380648 - RNA, 19 nt, Artificial Sequence
  Description of Artificial Sequence: Synthetic oligonucleotide
  Sense strand starting at position 3796 of SEQ ID NO: 1885979
ccuuuauuugguugcucua

SEQ ID NO: 2380649 - RNA, 19 nt, Artificial Sequence
  Description of Artificial Sequence: Synthetic oligonucleotide
  Antisense strand to SEQ ID NO: 2380648
uagagcaaccaaauaaagg

SEQ ID NO: 2380650 - RNA, 19 nt, Artificial Sequence
  Description of Artificial Sequence: Synthetic oligonucleotide
  Sense strand starting at position 3917 of SEQ ID NO: 1885979
uaagaaugcuuuccuggag

SEQ ID NO: 2380651 - RNA, 19 nt, Artificial Sequence
  Description of Artificial Sequence: Synthetic oligonucleotide
  Antisense strand to SEQ ID NO: 2380650
cuccaggaaagcauucuua

SEQ ID NO: 2380652 - RNA, 19 nt, Artificial Sequence
  Description of Artificial Sequence: Synthetic oligonucleotide
  Sense strand starting at position 3971 of SEQ ID NO: 1885979
aggaguucuucucuuggau

SEQ ID NO: 2380653 - RNA, 19 nt, Artificial Sequence
  Description of Artificial Sequence: Synthetic oligonucleotide
  Antisense strand to SEQ ID NO: 2380652
auccaagagaagaacuccu

SEQ ID NO: 2380654 - RNA, 19 nt, Artificial Sequence
  Description of Artificial Sequence: Synthetic oligonucleotide
  Sense strand starting at position 30 of SEQ ID NO: 1885980
aggauauggugaugaacaa

SEQ ID NO: 2380655 - RNA, 19 nt, Artificial Sequence
  Description of Artificial Sequence: Synthetic oligonucleotide
  Antisense strand to SEQ ID NO: 2380654
uuguucaucaccauauccu

SEQ ID NO: 2380656 - RNA, 19 nt, Artificial Sequence
  Description of Artificial Sequence: Synthetic oligonucleotide
  Sense strand starting at position 128 of SEQ ID NO: 1885980
gccagaaagcccugaaguu

SEQ ID NO: 2380657 - RNA, 19 nt, Artificial Sequence
  Description of Artificial Sequence: Synthetic oligonucleotide
  Antisense strand to SEQ ID NO: 2380656
aacuucagggcuuucuggc

SEQ ID NO: 2380658 - RNA, 19 nt, Artificial Sequence
  Description of Artificial Sequence: Synthetic oligonucleotide
  Sense strand starting at position 129 of SEQ ID NO: 1885980
ccagaaagcccugaaguuu

SEQ ID NO: 2380659 - RNA, 19 nt, Artificial Sequence
  Description of Artificial Sequence: Synthetic oligonucleotide
  Antisense strand to SEQ ID NO: 2380658
aaacuucagggcuuucugg

SEQ ID NO: 2380660 - RNA, 19 nt, Artificial Sequence
  Description of Artificial Sequence: Synthetic oligonucleotide
  Sense strand starting at position 225 of SEQ ID NO: 1885980
guuugugagugcaaggaug

SEQ ID NO: 2380661 - RNA, 19 nt, Artificial Sequence
  Description of Artificial Sequence: Synthetic oligonucleotide
  Antisense strand to SEQ ID NO: 2380660
cauccuugcacucacaaac

SEQ ID NO: 2380662 - RNA, 19 nt, Artificial Sequence
  Description of Artificial Sequence: Synthetic oligonucleotide
  Sense strand starting at position 250 of SEQ ID NO: 1885980
ggcagaugacgauguuaag

SEQ ID NO: 2380663 - RNA, 19 nt, Artificial Sequence
  Description of Artificial Sequence: Synthetic oligonucleotide
  Antisense strand to SEQ ID NO: 2380662
cuuaacaucgucaucugcc

SEQ ID NO: 2380664 - RNA, 19 nt, Artificial Sequence
  Description of Artificial Sequence: Synthetic oligonucleotide
  Sense strand starting at position 291 of SEQ ID NO: 1885980
aggccauggaguuagugua

SEQ ID NO: 2380665 - RNA, 19 nt, Artificial Sequence
  Description of Artificial Sequence: Synthetic oligonucleotide
  Antisense strand to SEQ ID NO: 2380664
uacacuaacuccauggccu

SEQ ID NO: 2380666 - RNA, 19 nt, Artificial Sequence
  Description of Artificial Sequence: Synthetic oligonucleotide
  Sense strand starting at position 301 of SEQ ID NO: 1885980
guuaguguagcaggagauu

SEQ ID NO: 2380667 - RNA, 19 nt, Artificial Sequence
  Description of Artificial Sequence: Synthetic oligonucleotide
  Antisense strand to SEQ ID NO: 2380666
aaucuccugcuacacuaac

SEQ ID NO: 2380668 - RNA, 19 nt, Artificial Sequence
  Description of Artificial Sequence: Synthetic oligonucleotide
  Sense strand starting at position 310 of SEQ ID NO: 1885980
gcaggagauuaacaauaau

SEQ ID NO: 2380669 - RNA, 19 nt, Artificial Sequence
  Description of Artificial Sequence: Synthetic oligonucleotide
  Antisense strand to SEQ ID NO: 2380668
auuauuguuaaucuccugc

SEQ ID NO: 2380670 - RNA, 19 nt, Artificial Sequence
  Description of Artificial Sequence: Synthetic oligonucleotide
  Sense strand starting at position 675 of SEQ ID NO: 1885980
aacugaugugaaugugguu

SEQ ID NO: 2380671 - RNA, 19 nt, Artificial Sequence
  Description of Artificial Sequence: Synthetic oligonucleotide
  Antisense strand to SEQ ID NO: 2380670
aaccacauucacaucaguu

SEQ ID NO: 2380672 - RNA, 19 nt, Artificial Sequence
  Description of Artificial Sequence: Synthetic oligonucleotide
  Sense strand starting at position 874 of SEQ ID NO: 1885980
ucuaaauaaucagagagug

SEQ ID NO: 2380673 - RNA, 19 nt, Artificial Sequence
  Description of Artificial Sequence: Synthetic oligonucleotide
  Antisense strand to SEQ ID NO: 2380672
cacucucugauuauuuaga

SEQ ID NO: 2380674 - RNA, 19 nt, Artificial Sequence
  Description of Artificial Sequence: Synthetic oligonucleotide
  Sense strand starting at position 924 of SEQ ID NO: 1885980
uuuguauuguuugugaaug

SEQ ID NO: 2380675 - RNA, 19 nt, Artificial Sequence
  Description of Artificial Sequence: Synthetic oligonucleotide
  Antisense strand to SEQ ID NO: 2380674
cauucacaaacaauacaaa

SEQ ID NO: 2380676 - RNA, 19 nt, Artificial Sequence
  Description of Artificial Sequence: Synthetic oligonucleotide
  Sense strand starting at position 1025 of SEQ ID NO: 1885980
ggaaguuauuagagggagu

SEQ ID NO: 2380677 - RNA, 19 nt, Artificial Sequence
  Description of Artificial Sequence: Synthetic oligonucleotide
  Antisense strand to SEQ ID NO: 2380676
acucccucuaauaacuucc

SEQ ID NO: 2380678 - RNA, 19 nt, Artificial Sequence
  Description of Artificial Sequence: Synthetic oligonucleotide
  Sense strand starting at position 1026 of SEQ ID NO: 1885980
gaaguuauuagagggagug

SEQ ID NO: 2380679 - RNA, 19 nt, Artificial Sequence
  Description of Artificial Sequence: Synthetic oligonucleotide
  Antisense strand to SEQ ID NO: 2380678
cacucccucuaauaacuuc

SEQ ID NO: 2380680 - RNA, 19 nt, Artificial Sequence
  Description of Artificial Sequence: Synthetic oligonucleotide
  Sense strand starting at position 1066 of SEQ ID NO: 1885980
gcuaaaucucauuaaagug

SEQ ID NO: 2380681 - RNA, 19 nt, Artificial Sequence
  Description of Artificial Sequence: Synthetic oligonucleotide
  Antisense strand to SEQ ID NO: 2380680
cacuuuaaugagauuuagc

SEQ ID NO: 2380682 - RNA, 19 nt, Artificial Sequence
  Description of Artificial Sequence: Synthetic oligonucleotide
  Sense strand starting at position 1074 of SEQ ID NO: 1885980
ucauuaaagugcccuugaa

SEQ ID NO: 2380683 - RNA, 19 nt, Artificial Sequence
  Description of Artificial Sequence: Synthetic oligonucleotide
  Antisense strand to SEQ ID NO: 2380682
uucaagggcacuuuaauga

SEQ ID NO: 2380684 - RNA, 19 nt, Artificial Sequence
  Description of Artificial Sequence: Synthetic oligonucleotide
  Sense strand starting at position 2069 of SEQ ID NO: 1885980
ugaccuauccuugaaaguu

SEQ ID NO: 2380685 - RNA, 19 nt, Artificial Sequence
  Description of Artificial Sequence: Synthetic oligonucleotide
  Antisense strand to SEQ ID NO: 2380684
aacuuucaaggauagguca

SEQ ID NO: 2380686 - RNA, 19 nt, Artificial Sequence
  Description of Artificial Sequence: Synthetic oligonucleotide
  Sense strand starting at position 2085 of SEQ ID NO: 1885980
guuauauaccgucacauug

SEQ ID NO: 2380687 - RNA, 19 nt, Artificial Sequence
  Description of Artificial Sequence: Synthetic oligonucleotide
  Antisense strand to SEQ ID NO: 2380686
caaugugacgguauauaac

SEQ ID NO: 2380688 - RNA, 19 nt, Artificial Sequence
  Description of Artificial Sequence: Synthetic oligonucleotide
  Sense strand starting at position 2114 of SEQ ID NO: 1885980
uugggucagcccuagucaa

SEQ ID NO: 2380689 - RNA, 19 nt, Artificial Sequence
  Description of Artificial Sequence: Synthetic oligonucleotide
  Antisense strand to SEQ ID NO: 2380688
uugacuagggcugacccaa

SEQ ID NO: 2380690 - RNA, 19 nt, Artificial Sequence
  Description of Artificial Sequence: Synthetic oligonucleotide
  Sense strand starting at position 2121 of SEQ ID NO: 1885980
agcccuagucaaugugaga

SEQ ID NO: 2380691 - RNA, 19 nt, Artificial Sequence
  Description of Artificial Sequence: Synthetic oligonucleotide
  Antisense strand to SEQ ID NO: 2380690
ucucacauugacuagggcu

SEQ ID NO: 2380692 - RNA, 19 nt, Artificial Sequence
  Description of Artificial Sequence: Synthetic oligonucleotide
  Sense strand starting at position 2143 of SEQ ID NO: 1885980
gcuacacaagaguguaaau

SEQ ID NO: 2380693 - RNA, 19 nt, Artificial Sequence
  Description of Artificial Sequence: Synthetic oligonucleotide
  Antisense strand to SEQ ID NO: 2380692
auuuacacucuuguguagc

SEQ ID NO: 2380694 - RNA, 19 nt, Artificial Sequence
  Description of Artificial Sequence: Synthetic oligonucleotide
  Sense strand starting at position 2214 of SEQ ID NO: 1885980
acuauauuauguccuguuu

SEQ ID NO: 2380695 - RNA, 19 nt, Artificial Sequence
  Description of Artificial Sequence: Synthetic oligonucleotide
  Antisense strand to SEQ ID NO: 2380694
aaacaggacauaauauagu

SEQ ID NO: 2380696 - RNA, 19 nt, Artificial Sequence
  Description of Artificial Sequence: Synthetic oligonucleotide
  Sense strand starting at position 2279 of SEQ ID NO: 1885980
gucuuaccaugaucugcaa

SEQ ID NO: 2380697 - RNA, 19 nt, Artificial Sequence
  Description of Artificial Sequence: Synthetic oligonucleotide
  Antisense strand to SEQ ID NO: 2380696
uugcagaucaugguaagac

SEQ ID NO: 2380698 - RNA, 19 nt, Artificial Sequence
  Description of Artificial Sequence: Synthetic oligonucleotide
  Sense strand starting at position 2444 of SEQ ID NO: 1885980
gaagucuccucgcccagau

SEQ ID NO: 2380699 - RNA, 19 nt, Artificial Sequence
  Description of Artificial Sequence: Synthetic oligonucleotide
  Antisense strand to SEQ ID NO: 2380698
aucugggcgaggagacuuc

SEQ ID NO: 2380700 - RNA, 19 nt, Artificial Sequence
  Description of Artificial Sequence: Synthetic oligonucleotide
  Sense strand starting at position 2469 of SEQ ID NO: 1885980
auggcuaguuccuucucau

SEQ ID NO: 2380701 - RNA, 19 nt, Artificial Sequence
  Description of Artificial Sequence: Synthetic oligonucleotide
  Antisense strand to SEQ ID NO: 2380700
augagaaggaacuagccau

SEQ ID NO: 2380702 - RNA, 19 nt, Artificial Sequence
  Description of Artificial Sequence: Synthetic oligonucleotide
  Sense strand starting at position 2564 of SEQ ID NO: 1885980
cugucacucugucuuacau

SEQ ID NO: 2380703 - RNA, 19 nt, Artificial Sequence
  Description of Artificial Sequence: Synthetic oligonucleotide
  Antisense strand to SEQ ID NO: 2380702
auguaagacagagugacag

SEQ ID NO: 2380704 - RNA, 19 nt, Artificial Sequence
  Description of Artificial Sequence: Synthetic oligonucleotide
  Sense strand starting at position 2605 of SEQ ID NO: 1885980
agcacugaucucuaucuga

SEQ ID NO: 2380705 - RNA, 19 nt, Artificial Sequence
  Description of Artificial Sequence: Synthetic oligonucleotide
  Antisense strand to SEQ ID NO: 2380704
ucagauagagaucagugcu

SEQ ID NO: 2380706 - RNA, 19 nt, Artificial Sequence
  Description of Artificial Sequence: Synthetic oligonucleotide
  Sense strand starting at position 2668 of SEQ ID NO: 1885980
aggaguccuuaauuacaag

SEQ ID NO: 2380707 - RNA, 19 nt, Artificial Sequence
  Description of Artificial Sequence: Synthetic oligonucleotide
  Antisense strand to SEQ ID NO: 2380706
cuuguaauuaaggacuccu

SEQ ID NO: 2380708 - RNA, 19 nt, Artificial Sequence
  Description of Artificial Sequence: Synthetic oligonucleotide
  Sense strand starting at position 2686 of SEQ ID NO: 1885980
gcaacagacugcucuuuag

SEQ ID NO: 2380709 - RNA, 19 nt, Artificial Sequence
  Description of Artificial Sequence: Synthetic oligonucleotide
  Antisense strand to SEQ ID NO: 2380708
cuaaagagcagucuguugc

SEQ ID NO: 2380710 - RNA, 19 nt, Artificial Sequence
  Description of Artificial Sequence: Synthetic oligonucleotide
  Sense strand starting at position 2720 of SEQ ID NO: 1885980
agaggaaccuauuaaagga

SEQ ID NO: 2380711 - RNA, 19 nt, Artificial Sequence
  Description of Artificial Sequence: Synthetic oligonucleotide
  Antisense strand to SEQ ID NO: 2380710
uccuuuaauagguuccucu

SEQ ID NO: 2380712 - RNA, 19 nt, Artificial Sequence
  Description of Artificial Sequence: Synthetic oligonucleotide
  Sense strand starting at position 2833 of SEQ ID NO: 1885980
ugcugucauccugacagaa

SEQ ID NO: 2380713 - RNA, 19 nt, Artificial Sequence
  Description of Artificial Sequence: Synthetic oligonucleotide
  Antisense strand to SEQ ID NO: 2380712
uucugucaggaugacagca

SEQ ID NO: 2380714 - RNA, 19 nt, Artificial Sequence
  Description of Artificial Sequence: Synthetic oligonucleotide
  Sense strand starting at position 2925 of SEQ ID NO: 1885980
guaugcugugcccaaucuu

SEQ ID NO: 2380715 - RNA, 19 nt, Artificial Sequence
  Description of Artificial Sequence: Synthetic oligonucleotide
  Antisense strand to SEQ ID NO: 2380714
aagauugggcacagcauac

SEQ ID NO: 2380716 - RNA, 19 nt, Artificial Sequence
  Description of Artificial Sequence: Synthetic oligonucleotide
  Sense strand starting at position 2974 of SEQ ID NO: 1885980
aucauaagcaggugugagu

SEQ ID NO: 2380717 - RNA, 19 nt, Artificial Sequence
  Description of Artificial Sequence: Synthetic oligonucleotide
  Antisense strand to SEQ ID NO: 2380716
acucacaccugcuuaugau

SEQ ID NO: 2380718 - RNA, 19 nt, Artificial Sequence
  Description of Artificial Sequence: Synthetic oligonucleotide
  Sense strand starting at position 3061 of SEQ ID NO: 1885980
gcuauuuggccucgacagu

SEQ ID NO: 2380719 - RNA, 19 nt, Artificial Sequence
  Description of Artificial Sequence: Synthetic oligonucleotide
  Antisense strand to SEQ ID NO: 2380718
acugucgaggccaaauagc

SEQ ID NO: 2380720 - RNA, 19 nt, Artificial Sequence
  Description of Artificial Sequence: Synthetic oligonucleotide
  Sense strand starting at position 3082 of SEQ ID NO: 1885980
acgccuuuagcugcuuaau

SEQ ID NO: 2380721 - RNA, 19 nt, Artificial Sequence
  Description of Artificial Sequence: Synthetic oligonucleotide
  Antisense strand to SEQ ID NO: 2380720
auuaagcagcuaaaggcgu

SEQ ID NO: 2380722 - RNA, 19 nt, Artificial Sequence
  Description of Artificial Sequence: Synthetic oligonucleotide
  Sense strand starting at position 3093 of SEQ ID NO: 1885980
ugcuuaaugucaucagcca

SEQ ID NO: 2380723 - RNA, 19 nt, Artificial Sequence
  Description of Artificial Sequence: Synthetic oligonucleotide
  Antisense strand to SEQ ID NO: 2380722
uggcugaugacauuaagca

SEQ ID NO: 2380724 - RNA, 19 nt, Artificial Sequence
  Description of Artificial Sequence: Synthetic oligonucleotide
  Sense strand starting at position 3551 of SEQ ID NO: 1885980
gcuauucucuugucaucuu

SEQ ID NO: 2380725 - RNA, 19 nt, Artificial Sequence
  Description of Artificial Sequence: Synthetic oligonucleotide
  Antisense strand to SEQ ID NO: 2380724
aagaugacaagagaauagc

SEQ ID NO: 2380726 - RNA, 19 nt, Artificial Sequence
  Description of Artificial Sequence: Synthetic oligonucleotide
  Sense strand starting at position 3559 of SEQ ID NO: 1885980
cuugucaucuugcucacau

SEQ ID NO: 2380727 - RNA, 19 nt, Artificial Sequence
  Description of Artificial Sequence: Synthetic oligonucleotide
  Antisense strand to SEQ ID NO: 2380726
augugagcaagaugacaag

SEQ ID NO: 2380728 - RNA, 19 nt, Artificial Sequence
  Description of Artificial Sequence: Synthetic oligonucleotide
  Sense strand starting at position 3560 of SEQ ID NO: 1885980
uugucaucuugcucacaua

SEQ ID NO: 2380729 - RNA, 19 nt, Artificial Sequence
  Description of Artificial Sequence: Synthetic oligonucleotide
  Antisense strand to SEQ ID NO: 2380728
uaugugagcaagaugacaa

SEQ ID NO: 2380730 - RNA, 19 nt, Artificial Sequence
  Description of Artificial Sequence: Synthetic oligonucleotide
  Sense strand starting at position 3561 of SEQ ID NO: 1885980
ugucaucuugcucacauau

SEQ ID NO: 2380731 - RNA, 19 nt, Artificial Sequence
  Description of Artificial Sequence: Synthetic oligonucleotide
  Antisense strand to SEQ ID NO: 2380730
auaugugagcaagaugaca

SEQ ID NO: 2380732 - RNA, 19 nt, Artificial Sequence
  Description of Artificial Sequence: Synthetic oligonucleotide
  Sense strand starting at position 3881 of SEQ ID NO: 1885980
cuggcugugccugagaguu

SEQ ID NO: 2380733 - RNA, 19 nt, Artificial Sequence
  Description of Artificial Sequence: Synthetic oligonucleotide
  Antisense strand to SEQ ID NO: 2380732
aacucucaggcacagccag

SEQ ID NO: 2380734 - RNA, 19 nt, Artificial Sequence
  Description of Artificial Sequence: Synthetic oligonucleotide
  Sense strand starting at position 397 of SEQ ID NO: 1885981
augcacauuuaaugaauga

SEQ ID NO: 2380735 - RNA, 19 nt, Artificial Sequence
  Description of Artificial Sequence: Synthetic oligonucleotide
  Antisense strand to SEQ ID NO: 2380734
ucauucauuaaaugugcau

SEQ ID NO: 2380736 - RNA, 19 nt, Artificial Sequence
  Description of Artificial Sequence: Synthetic oligonucleotide
  Sense strand starting at position 419 of SEQ ID NO: 1885981
cguaaaugugacuguguga

SEQ ID NO: 2380737 - RNA, 19 nt, Artificial Sequence
  Description of Artificial Sequence: Synthetic oligonucleotide
  Antisense strand to SEQ ID NO: 2380736
ucacacagucacauuuacg

SEQ ID NO: 2380738 - RNA, 19 nt, Artificial Sequence
  Description of Artificial Sequence: Synthetic oligonucleotide
  Sense strand starting at position 433 of SEQ ID NO: 1885981
ugugacagaguaugcauaa

SEQ ID NO: 2380739 - RNA, 19 nt, Artificial Sequence
  Description of Artificial Sequence: Synthetic oligonucleotide
  Antisense strand to SEQ ID NO: 2380738
uuaugcauacucugucaca

SEQ ID NO: 2380740 - RNA, 19 nt, Artificial Sequence
  Description of Artificial Sequence: Synthetic oligonucleotide
  Sense strand starting at position 458 of SEQ ID NO: 1885981
acuauaugucccuguuggu

SEQ ID NO: 2380741 - RNA, 19 nt, Artificial Sequence
  Description of Artificial Sequence: Synthetic oligonucleotide
  Antisense strand to SEQ ID NO: 2380740
accaacagggacauauagu

SEQ ID NO: 2380742 - RNA, 19 nt, Artificial Sequence
  Description of Artificial Sequence: Synthetic oligonucleotide
  Sense strand starting at position 679 of SEQ ID NO: 1885981
uaaagaaaguuccauguga

SEQ ID NO: 2380743 - RNA, 19 nt, Artificial Sequence
  Description of Artificial Sequence: Synthetic oligonucleotide
  Antisense strand to SEQ ID NO: 2380742
ucacauggaacuuucuuua

SEQ ID NO: 2380744 - RNA, 19 nt, Artificial Sequence
  Description of Artificial Sequence: Synthetic oligonucleotide
  Sense strand starting at position 681 of SEQ ID NO: 1885981
aagaaaguuccaugugauc

SEQ ID NO: 2380745 - RNA, 19 nt, Artificial Sequence
  Description of Artificial Sequence: Synthetic oligonucleotide
  Antisense strand to SEQ ID NO: 2380744
gaucacauggaacuuucuu

SEQ ID NO: 2380746 - RNA, 19 nt, Artificial Sequence
  Description of Artificial Sequence: Synthetic oligonucleotide
  Sense strand starting at position 686 of SEQ ID NO: 1885981
aguuccaugugauccaaua

SEQ ID NO: 2380747 - RNA, 19 nt, Artificial Sequence
  Description of Artificial Sequence: Synthetic oligonucleotide
  Antisense strand to SEQ ID NO: 2380746
uauuggaucacauggaacu

SEQ ID NO: 2380748 - RNA, 19 nt, Artificial Sequence
  Description of Artificial Sequence: Synthetic oligonucleotide
  Sense strand starting at position 696 of SEQ ID NO: 1885981
gauccaauaucugagugau

SEQ ID NO: 2380749 - RNA, 19 nt, Artificial Sequence
  Description of Artificial Sequence: Synthetic oligonucleotide
  Antisense strand to SEQ ID NO: 2380748
aucacucagauauuggauc

SEQ ID NO: 2380750 - RNA, 19 nt, Artificial Sequence
  Description of Artificial Sequence: Synthetic oligonucleotide
  Sense strand starting at position 702 of SEQ ID NO: 1885981
auaucugagugauaaauga

SEQ ID NO: 2380751 - RNA, 19 nt, Artificial Sequence
  Description of Artificial Sequence: Synthetic oligonucleotide
  Antisense strand to SEQ ID NO: 2380750
ucauuuaucacucagauau

SEQ ID NO: 2380752 - RNA, 19 nt, Artificial Sequence
  Description of Artificial Sequence: Synthetic oligonucleotide
  Sense strand starting at position 849 of SEQ ID NO: 1885981
cagauauuuguguguccgu

SEQ ID NO: 2380753 - RNA, 19 nt, Artificial Sequence
  Description of Artificial Sequence: Synthetic oligonucleotide
  Antisense strand to SEQ ID NO: 2380752
acggacacacaaauaucug

SEQ ID NO: 2380754 - RNA, 19 nt, Artificial Sequence
  Description of Artificial Sequence: Synthetic oligonucleotide
  Sense strand starting at position 1095 of SEQ ID NO: 1885981
ggauaagauugaugauaaa

SEQ ID NO: 2380755 - RNA, 19 nt, Artificial Sequence
  Description of Artificial Sequence: Synthetic oligonucleotide
  Antisense strand to SEQ ID NO: 2380754
uuuaucaucaaucuuaucc

SEQ ID NO: 2380756 - RNA, 19 nt, Artificial Sequence
  Description of Artificial Sequence: Synthetic oligonucleotide
  Sense strand starting at position 1239 of SEQ ID NO: 1885981
aggccaugacauggauauu

SEQ ID NO: 2380757 - RNA, 19 nt, Artificial Sequence
  Description of Artificial Sequence: Synthetic oligonucleotide
  Antisense strand to SEQ ID NO: 2380756
aauauccaugucauggccu

SEQ ID NO: 2380758 - RNA, 19 nt, Artificial Sequence
  Description of Artificial Sequence: Synthetic oligonucleotide
  Sense strand starting at position 1292 of SEQ ID NO: 1885981
agauuucucugugaacucu

SEQ ID NO: 2380759 - RNA, 19 nt, Artificial Sequence
  Description of Artificial Sequence: Synthetic oligonucleotide
  Antisense strand to SEQ ID NO: 2380758
agaguucacagagaaaucu

SEQ ID NO: 2380760 - RNA, 19 nt, Artificial Sequence
  Description of Artificial Sequence: Synthetic oligonucleotide
  Sense strand starting at position 1478 of SEQ ID NO: 1885981
ucaguuugucgugugugca

SEQ ID NO: 2380761 - RNA, 19 nt, Artificial Sequence
  Description of Artificial Sequence: Synthetic oligonucleotide
  Antisense strand to SEQ ID NO: 2380760
ugcacacacgacaaacuga

SEQ ID NO: 2380762 - RNA, 19 nt, Artificial Sequence
  Description of Artificial Sequence: Synthetic oligonucleotide
  Sense strand starting at position 1569 of SEQ ID NO: 1885981
gucgagagugagugagaau

SEQ ID NO: 2380763 - RNA, 19 nt, Artificial Sequence
  Description of Artificial Sequence: Synthetic oligonucleotide
  Antisense strand to SEQ ID NO: 2380762
auucucacucacucucgac

SEQ ID NO: 2380764 - RNA, 19 nt, Artificial Sequence
  Description of Artificial Sequence: Synthetic oligonucleotide
  Sense strand starting at position 1581 of SEQ ID NO: 1885981
ugagaauacgucugugagc

SEQ ID NO: 2380765 - RNA, 19 nt, Artificial Sequence
  Description of Artificial Sequence: Synthetic oligonucleotide
  Antisense strand to SEQ ID NO: 2380764
gcucacagacguauucuca

SEQ ID NO: 2380766 - RNA, 19 nt, Artificial Sequence
  Description of Artificial Sequence: Synthetic oligonucleotide
  Sense strand starting at position 1648 of SEQ ID NO: 1885981
aggaaauggcccugugaaa

SEQ ID NO: 2380767 - RNA, 19 nt, Artificial Sequence
  Description of Artificial Sequence: Synthetic oligonucleotide
  Antisense strand to SEQ ID NO: 2380766
uuucacagggccauuuccu

SEQ ID NO: 2380768 - RNA, 19 nt, Artificial Sequence
  Description of Artificial Sequence: Synthetic oligonucleotide
  Sense strand starting at position 1817 of SEQ ID NO: 1885981
gcacuaaugacggacucua

SEQ ID NO: 2380769 - RNA, 19 nt, Artificial Sequence
  Description of Artificial Sequence: Synthetic oligonucleotide
  Antisense strand to SEQ ID NO: 2380768
uagaguccgucauuagugc

SEQ ID NO: 2380770 - RNA, 19 nt, Artificial Sequence
  Description of Artificial Sequence: Synthetic oligonucleotide
  Sense strand starting at position 2040 of SEQ ID NO: 1885981
uggucucagcuuuaaagca

SEQ ID NO: 2380771 - RNA, 19 nt, Artificial Sequence
  Description of Artificial Sequence: Synthetic oligonucleotide
  Antisense strand to SEQ ID NO: 2380770
ugcuuuaaagcugagacca

SEQ ID NO: 2380772 - RNA, 19 nt, Artificial Sequence
  Description of Artificial Sequence: Synthetic oligonucleotide
  Sense strand starting at position 2146 of SEQ ID NO: 1885981
gccucagagaggcaaguau

SEQ ID NO: 2380773 - RNA, 19 nt, Artificial Sequence
  Description of Artificial Sequence: Synthetic oligonucleotide
  Antisense strand to SEQ ID NO: 2380772
auacuugccucucugaggc

SEQ ID NO: 2380774 - RNA, 19 nt, Artificial Sequence
  Description of Artificial Sequence: Synthetic oligonucleotide
  Sense strand starting at position 2416 of SEQ ID NO: 1885981
gccaacuggagcugauauu

SEQ ID NO: 2380775 - RNA, 19 nt, Artificial Sequence
  Description of Artificial Sequence: Synthetic oligonucleotide
  Antisense strand to SEQ ID NO: 2380774
aauaucagcuccaguuggc

SEQ ID NO: 2380776 - RNA, 19 nt, Artificial Sequence
  Description of Artificial Sequence: Synthetic oligonucleotide
  Sense strand starting at position 2426 of SEQ ID NO: 1885981
gcugauauucgggaagcua

SEQ ID NO: 2380777 - RNA, 19 nt, Artificial Sequence
  Description of Artificial Sequence: Synthetic oligonucleotide
  Antisense strand to SEQ ID NO: 2380776
uagcuucccgaauaucagc

SEQ ID NO: 2380778 - RNA, 19 nt, Artificial Sequence
  Description of Artificial Sequence: Synthetic oligonucleotide
  Sense strand starting at position 2499 of SEQ ID NO: 1885981
ccaaaugugccuugccaaa

SEQ ID NO: 2380779 - RNA, 19 nt, Artificial Sequence
  Description of Artificial Sequence: Synthetic oligonucleotide
  Antisense strand to SEQ ID NO: 2380778
uuuggcaaggcacauuugg

SEQ ID NO: 2380780 - RNA, 19 nt, Artificial Sequence
  Description of Artificial Sequence: Synthetic oligonucleotide
  Sense strand starting at position 2785 of SEQ ID NO: 1885981
ugacuuguugcaugcagaa

SEQ ID NO: 2380781 - RNA, 19 nt, Artificial Sequence
  Description of Artificial Sequence: Synthetic oligonucleotide
  Antisense strand to SEQ ID NO: 2380780
uucugcaugcaacaaguca

SEQ ID NO: 2380782 - RNA, 19 nt, Artificial Sequence
  Description of Artificial Sequence: Synthetic oligonucleotide
  Sense strand starting at position 2787 of SEQ ID NO: 1885981
acuuguugcaugcagaaga

SEQ ID NO: 2380783 - RNA, 19 nt, Artificial Sequence
  Description of Artificial Sequence: Synthetic oligonucleotide
  Antisense strand to SEQ ID NO: 2380782
ucuucugcaugcaacaagu

SEQ ID NO: 2380784 - RNA, 19 nt, Artificial Sequence
  Description of Artificial Sequence: Synthetic oligonucleotide
  Sense strand starting at position 2975 of SEQ ID NO: 1885981
ccgcaauugcagcaaauaa

SEQ ID NO: 2380785 - RNA, 19 nt, Artificial Sequence
  Description of Artificial Sequence: Synthetic oligonucleotide
  Antisense strand to SEQ ID NO: 2380784
uuauuugcugcaauugcgg

SEQ ID NO: 2380786 - RNA, 19 nt, Artificial Sequence
  Description of Artificial Sequence: Synthetic oligonucleotide
  Sense strand starting at position 3021 of SEQ ID NO: 1885981
gggauugcgcccugggaga

SEQ ID NO: 2380787 - RNA, 19 nt, Artificial Sequence
  Description of Artificial Sequence: Synthetic oligonucleotide
  Antisense strand to SEQ ID NO: 2380786
ucucccagggcgcaauccc

SEQ ID NO: 2380788 - RNA, 19 nt, Artificial Sequence
  Description of Artificial Sequence: Synthetic oligonucleotide
  Sense strand starting at position 3037 of SEQ ID NO: 1885981
agagcccuaucugcugaaa

SEQ ID NO: 2380789 - RNA, 19 nt, Artificial Sequence
  Description of Artificial Sequence: Synthetic oligonucleotide
  Antisense strand to SEQ ID NO: 2380788
uuucagcagauagggcucu

SEQ ID NO: 2380790 - RNA, 19 nt, Artificial Sequence
  Description of Artificial Sequence: Synthetic oligonucleotide
  Sense strand starting at position 3040 of SEQ ID NO: 1885981
gcccuaucugcugaaagag

SEQ ID NO: 2380791 - RNA, 19 nt, Artificial Sequence
  Description of Artificial Sequence: Synthetic oligonucleotide
  Antisense strand to SEQ ID NO: 2380790
cucuuucagcagauagggc

SEQ ID NO: 2380792 - RNA, 19 nt, Artificial Sequence
  Description of Artificial Sequence: Synthetic oligonucleotide
  Sense strand starting at position 3551 of SEQ ID NO: 1885981
ggcucugguguuccgugaa

SEQ ID NO: 2380793 - RNA, 19 nt, Artificial Sequence
  Description of Artificial Sequence: Synthetic oligonucleotide
  Antisense strand to SEQ ID NO: 2380792
uucacggaacaccagagcc

SEQ ID NO: 2380794 - RNA, 19 nt, Artificial Sequence
  Description of Artificial Sequence: Synthetic oligonucleotide
  Sense strand starting at position 3668 of SEQ ID NO: 1885981
ccuuaauaggagugaguga

SEQ ID NO: 2380795 - RNA, 19 nt, Artificial Sequence
  Description of Artificial Sequence: Synthetic oligonucleotide
  Antisense strand to SEQ ID NO: 2380794
ucacucacuccuauuaagg

SEQ ID NO: 2380796 - RNA, 19 nt, Artificial Sequence
  Description of Artificial Sequence: Synthetic oligonucleotide
  Sense strand starting at position 3713 of SEQ ID NO: 1885981
agauauugaagccgaggua

SEQ ID NO: 2380797 - RNA, 19 nt, Artificial Sequence
  Description of Artificial Sequence: Synthetic oligonucleotide
  Antisense strand to SEQ ID NO: 2380796
uaccucggcuucaauaucu

SEQ ID NO: 2380798 - RNA, 19 nt, Artificial Sequence
  Description of Artificial Sequence: Synthetic oligonucleotide
  Sense strand starting at position 3714 of SEQ ID NO: 1885981
gauauugaagccgagguaa

SEQ ID NO: 2380799 - RNA, 19 nt, Artificial Sequence
  Description of Artificial Sequence: Synthetic oligonucleotide
  Antisense strand to SEQ ID NO: 2380798
uuaccucggcuucaauauc

SEQ ID NO: 2380800 - RNA, 19 nt, Artificial Sequence
  Description of Artificial Sequence: Synthetic oligonucleotide
  Sense strand starting at position 3716 of SEQ ID NO: 1885981
uauugaagccgagguaaga

SEQ ID NO: 2380801 - RNA, 19 nt, Artificial Sequence
  Description of Artificial Sequence: Synthetic oligonucleotide
  Antisense strand to SEQ ID NO: 2380800
ucuuaccucggcuucaaua

SEQ ID NO: 2380802 - RNA, 19 nt, Artificial Sequence
  Description of Artificial Sequence: Synthetic oligonucleotide
  Sense strand starting at position 3758 of SEQ ID NO: 1885981
aacucaagcguggaugaaa

SEQ ID NO: 2380803 - RNA, 19 nt, Artificial Sequence
  Description of Artificial Sequence: Synthetic oligonucleotide
  Antisense strand to SEQ ID NO: 2380802
uuucauccacgcuugaguu

SEQ ID NO: 2380804 - RNA, 19 nt, Artificial Sequence
  Description of Artificial Sequence: Synthetic oligonucleotide
  Sense strand starting at position 3826 of SEQ ID NO: 1885981
caaagugaccuuuguauga

SEQ ID NO: 2380805 - RNA, 19 nt, Artificial Sequence
  Description of Artificial Sequence: Synthetic oligonucleotide
  Antisense strand to SEQ ID NO: 2380804
ucauacaaaggucacuuug

SEQ ID NO: 2380806 - RNA, 19 nt, Artificial Sequence
  Description of Artificial Sequence: Synthetic oligonucleotide
  Sense strand starting at position 3850 of SEQ ID NO: 1885981
aaagauuauuguuuggcca

SEQ ID NO: 2380807 - RNA, 19 nt, Artificial Sequence
  Description of Artificial Sequence: Synthetic oligonucleotide
  Antisense strand to SEQ ID NO: 2380806
uggccaaacaauaaucuuu

SEQ ID NO: 2380808 - RNA, 19 nt, Artificial Sequence
  Description of Artificial Sequence: Synthetic oligonucleotide
  Sense strand starting at position 3851 of SEQ ID NO: 1885981
aagauuauuguuuggccaa

SEQ ID NO: 2380809 - RNA, 19 nt, Artificial Sequence
  Description of Artificial Sequence: Synthetic oligonucleotide
  Antisense strand to SEQ ID NO: 2380808
uuggccaaacaauaaucuu

SEQ ID NO: 2380810 - RNA, 19 nt, Artificial Sequence
  Description of Artificial Sequence: Synthetic oligonucleotide
  Sense strand starting at position 3853 of SEQ ID NO: 1885981
gauuauuguuuggccaaga

SEQ ID NO: 2380811 - RNA, 19 nt, Artificial Sequence
  Description of Artificial Sequence: Synthetic oligonucleotide
  Antisense strand to SEQ ID NO: 2380810
ucuuggccaaacaauaauc

SEQ ID NO: 2380812 - RNA, 19 nt, Artificial Sequence
  Description of Artificial Sequence: Synthetic oligonucleotide
  Sense strand starting at position 3854 of SEQ ID NO: 1885981
auuauuguuuggccaagaa

SEQ ID NO: 2380813 - RNA, 19 nt, Artificial Sequence
  Description of Artificial Sequence: Synthetic oligonucleotide
  Antisense strand to SEQ ID NO: 2380812
uucuuggccaaacaauaau

SEQ ID NO: 2380814 - RNA, 19 nt, Artificial Sequence
  Description of Artificial Sequence: Synthetic oligonucleotide
  Sense strand starting at position 172 of SEQ ID NO: 1885982
uaaagaaaguuccauguga

SEQ ID NO: 2380815 - RNA, 19 nt, Artificial Sequence
  Description of Artificial Sequence: Synthetic oligonucleotide
  Antisense strand to SEQ ID NO: 2380814
ucacauggaacuuucuuua

SEQ ID NO: 2380816 - RNA, 19 nt, Artificial Sequence
  Description of Artificial Sequence: Synthetic oligonucleotide
  Sense strand starting at position 174 of SEQ ID NO: 1885982
aagaaaguuccaugugauc

SEQ ID NO: 2380817 - RNA, 19 nt, Artificial Sequence
  Description of Artificial Sequence: Synthetic oligonucleotide
  Antisense strand to SEQ ID NO: 2380816
gaucacauggaacuuucuu

SEQ ID NO: 2380818 - RNA, 19 nt, Artificial Sequence
  Description of Artificial Sequence: Synthetic oligonucleotide
  Sense strand starting at position 179 of SEQ ID NO: 1885982
aguuccaugugauccaaua

SEQ ID NO: 2380819 - RNA, 19 nt, Artificial Sequence
  Description of Artificial Sequence: Synthetic oligonucleotide
  Antisense strand to SEQ ID NO: 2380818
uauuggaucacauggaacu

SEQ ID NO: 2380820 - RNA, 19 nt, Artificial Sequence
  Description of Artificial Sequence: Synthetic oligonucleotide
  Sense strand starting at position 195 of SEQ ID NO: 1885982
auaucugagugauaaauga

SEQ ID NO: 2380821 - RNA, 19 nt, Artificial Sequence
  Description of Artificial Sequence: Synthetic oligonucleotide
  Antisense strand to SEQ ID NO: 2380820
ucauuuaucacucagauau

SEQ ID NO: 2380822 - RNA, 19 nt, Artificial Sequence
  Description of Artificial Sequence: Synthetic oligonucleotide
  Sense strand starting at position 342 of SEQ ID NO: 1885982
cagauauuuguguguccgu

SEQ ID NO: 2380823 - RNA, 19 nt, Artificial Sequence
  Description of Artificial Sequence: Synthetic oligonucleotide
  Antisense strand to SEQ ID NO: 2380822
acggacacacaaauaucug

SEQ ID NO: 2380824 - RNA, 19 nt, Artificial Sequence
  Description of Artificial Sequence: Synthetic oligonucleotide
  Sense strand starting at position 588 of SEQ ID NO: 1885982
ggauaagauugaugauaaa

SEQ ID NO: 2380825 - RNA, 19 nt, Artificial Sequence
  Description of Artificial Sequence: Synthetic oligonucleotide
  Antisense strand to SEQ ID NO: 2380824
uuuaucaucaaucuuaucc

SEQ ID NO: 2380826 - RNA, 19 nt, Artificial Sequence
  Description of Artificial Sequence: Synthetic oligonucleotide
  Sense strand starting at position 732 of SEQ ID NO: 1885982
aggccaugacauggauauu

SEQ ID NO: 2380827 - RNA, 19 nt, Artificial Sequence
  Description of Artificial Sequence: Synthetic oligonucleotide
  Antisense strand to SEQ ID NO: 2380826
aauauccaugucauggccu

SEQ ID NO: 2380828 - RNA, 19 nt, Artificial Sequence
  Description of Artificial Sequence: Synthetic oligonucleotide
  Sense strand starting at position 785 of SEQ ID NO: 1885982
agauuucucugugaacucu

SEQ ID NO: 2380829 - RNA, 19 nt, Artificial Sequence
  Description of Artificial Sequence: Synthetic oligonucleotide
  Antisense strand to SEQ ID NO: 2380828
agaguucacagagaaaucu

SEQ ID NO: 2380830 - RNA, 19 nt, Artificial Sequence
  Description of Artificial Sequence: Synthetic oligonucleotide
  Sense strand starting at position 971 of SEQ ID NO: 1885982
ucaguuugucgugugugca

SEQ ID NO: 2380831 - RNA, 19 nt, Artificial Sequence
  Description of Artificial Sequence: Synthetic oligonucleotide
  Antisense strand to SEQ ID NO: 2380830
ugcacacacgacaaacuga

SEQ ID NO: 2380832 - RNA, 19 nt, Artificial Sequence
  Description of Artificial Sequence: Synthetic oligonucleotide
  Sense strand starting at position 1062 of SEQ ID NO: 1885982
gucgagagugagugagaau

SEQ ID NO: 2380833 - RNA, 19 nt, Artificial Sequence
  Description of Artificial Sequence: Synthetic oligonucleotide
  Antisense strand to SEQ ID NO: 2380832
auucucacucacucucgac

SEQ ID NO: 2380834 - RNA, 19 nt, Artificial Sequence
  Description of Artificial Sequence: Synthetic oligonucleotide
  Sense strand starting at position 1074 of SEQ ID NO: 1885982
ugagaauacgucugugagc

SEQ ID NO: 2380835 - RNA, 19 nt, Artificial Sequence
  Description of Artificial Sequence: Synthetic oligonucleotide
  Antisense strand to SEQ ID NO: 2380834
gcucacagacguauucuca

SEQ ID NO: 2380836 - RNA, 19 nt, Artificial Sequence
  Description of Artificial Sequence: Synthetic oligonucleotide
  Sense strand starting at position 1141 of SEQ ID NO: 1885982
aggaaauggcccugugaaa

SEQ ID NO: 2380837 - RNA, 19 nt, Artificial Sequence
  Description of Artificial Sequence: Synthetic oligonucleotide
  Antisense strand to SEQ ID NO: 2380836
uuucacagggccauuuccu

SEQ ID NO: 2380838 - RNA, 19 nt, Artificial Sequence
  Description of Artificial Sequence: Synthetic oligonucleotide
  Sense strand starting at position 1310 of SEQ ID NO: 1885982
gcacuaaugacggacucua

SEQ ID NO: 2380839 - RNA, 19 nt, Artificial Sequence
  Description of Artificial Sequence: Synthetic oligonucleotide
  Antisense strand to SEQ ID NO: 2380838
uagaguccgucauuagugc

SEQ ID NO: 2380840 - RNA, 19 nt, Artificial Sequence
  Description of Artificial Sequence: Synthetic oligonucleotide
  Sense strand starting at position 1533 of SEQ ID NO: 1885982
uggucucagcuuuaaagca

SEQ ID NO: 2380841 - RNA, 19 nt, Artificial Sequence
  Description of Artificial Sequence: Synthetic oligonucleotide
  Antisense strand to SEQ ID NO: 2380840
ugcuuuaaagcugagacca

SEQ ID NO: 2380842 - RNA, 19 nt, Artificial Sequence
  Description of Artificial Sequence: Synthetic oligonucleotide
  Sense strand starting at position 1639 of SEQ ID NO: 1885982
gccucagagaggcaaguau

SEQ ID NO: 2380843 - RNA, 19 nt, Artificial Sequence
  Description of Artificial Sequence: Synthetic oligonucleotide
  Antisense strand to SEQ ID NO: 2380842
auacuugccucucugaggc

SEQ ID NO: 2380844 - RNA, 19 nt, Artificial Sequence
  Description of Artificial Sequence: Synthetic oligonucleotide
  Sense strand starting at position 1909 of SEQ ID NO: 1885982
gccaacuggagcugauauu

SEQ ID NO: 2380845 - RNA, 19 nt, Artificial Sequence
  Description of Artificial Sequence: Synthetic oligonucleotide
  Antisense strand to SEQ ID NO: 2380844
aauaucagcuccaguuggc

SEQ ID NO: 2380846 - RNA, 19 nt, Artificial Sequence
  Description of Artificial Sequence: Synthetic oligonucleotide
  Sense strand starting at position 1919 of SEQ ID NO: 1885982
gcugauauucgggaagcua

SEQ ID NO: 2380847 - RNA, 19 nt, Artificial Sequence
  Description of Artificial Sequence: Synthetic oligonucleotide
  Antisense strand to SEQ ID NO: 2380846
uagcuucccgaauaucagc

SEQ ID NO: 2380848 - RNA, 19 nt, Artificial Sequence
  Description of Artificial Sequence: Synthetic oligonucleotide
  Sense strand starting at position 1992 of SEQ ID NO: 1885982
ccaaaugugccuugccaaa

SEQ ID NO: 2380849 - RNA, 19 nt, Artificial Sequence
  Description of Artificial Sequence: Synthetic oligonucleotide
  Antisense strand to SEQ ID NO: 2380848
uuuggcaaggcacauuugg

SEQ ID NO: 2380850 - RNA, 19 nt, Artificial Sequence
  Description of Artificial Sequence: Synthetic oligonucleotide
  Sense strand starting at position 2278 of SEQ ID NO: 1885982
ugacuuguugcaugcagaa

SEQ ID NO: 2380851 - RNA, 19 nt, Artificial Sequence
  Description of Artificial Sequence: Synthetic oligonucleotide
  Antisense strand to SEQ ID NO: 2380850
uucugcaugcaacaaguca

SEQ ID NO: 2380852 - RNA, 19 nt, Artificial Sequence
  Description of Artificial Sequence: Synthetic oligonucleotide
  Sense strand starting at position 2280 of SEQ ID NO: 1885982
acuuguugcaugcagaaga

SEQ ID NO: 2380853 - RNA, 19 nt, Artificial Sequence
  Description of Artificial Sequence: Synthetic oligonucleotide
  Antisense strand to SEQ ID NO: 2380852
ucuucugcaugcaacaagu

SEQ ID NO: 2380854 - RNA, 19 nt, Artificial Sequence
  Description of Artificial Sequence: Synthetic oligonucleotide
  Sense strand starting at position 2468 of SEQ ID NO: 1885982
ccgcaauugcagcaaauaa

SEQ ID NO: 2380855 - RNA, 19 nt, Artificial Sequence
  Description of Artificial Sequence: Synthetic oligonucleotide
  Antisense strand to SEQ ID NO: 2380854
uuauuugcugcaauugcgg

SEQ ID NO: 2380856 - RNA, 19 nt, Artificial Sequence
  Description of Artificial Sequence: Synthetic oligonucleotide
  Sense strand starting at position 2514 of SEQ ID NO: 1885982
gggauugcgcccugggaga

SEQ ID NO: 2380857 - RNA, 19 nt, Artificial Sequence
  Description of Artificial Sequence: Synthetic oligonucleotide
  Antisense strand to SEQ ID NO: 2380856
ucucccagggcgcaauccc

SEQ ID NO: 2380858 - RNA, 19 nt, Artificial Sequence
  Description of Artificial Sequence: Synthetic oligonucleotide
  Sense strand starting at position 2530 of SEQ ID NO: 1885982
agagcccuaucugcugaaa

SEQ ID NO: 2380859 - RNA, 19 nt, Artificial Sequence
  Description of Artificial Sequence: Synthetic oligonucleotide
  Antisense strand to SEQ ID NO: 2380858
uuucagcagauagggcucu

SEQ ID NO: 2380860 - RNA, 19 nt, Artificial Sequence
  Description of Artificial Sequence: Synthetic oligonucleotide
  Sense strand starting at position 2533 of SEQ ID NO: 1885982
gcccuaucugcugaaagag

SEQ ID NO: 2380861 - RNA, 19 nt, Artificial Sequence
  Description of Artificial Sequence: Synthetic oligonucleotide
  Antisense strand to SEQ ID NO: 2380860
cucuuucagcagauagggc

SEQ ID NO: 2380862 - RNA, 19 nt, Artificial Sequence
  Description of Artificial Sequence: Synthetic oligonucleotide
  Sense strand starting at position 3044 of SEQ ID NO: 1885982
ggcucugguguuccgugaa

SEQ ID NO: 2380863 - RNA, 19 nt, Artificial Sequence
  Description of Artificial Sequence: Synthetic oligonucleotide
  Antisense strand to SEQ ID NO: 2380862
uucacggaacaccagagcc

SEQ ID NO: 2380864 - RNA, 19 nt, Artificial Sequence
  Description of Artificial Sequence: Synthetic oligonucleotide
  Sense strand starting at position 3161 of SEQ ID NO: 1885982
ccuuaauaggagugaguga

SEQ ID NO: 2380865 - RNA, 19 nt, Artificial Sequence
  Description of Artificial Sequence: Synthetic oligonucleotide
  Antisense strand to SEQ ID NO: 2380864
ucacucacuccuauuaagg

SEQ ID NO: 2380866 - RNA, 19 nt, Artificial Sequence
  Description of Artificial Sequence: Synthetic oligonucleotide
  Sense strand starting at position 3206 of SEQ ID NO: 1885982
agauauugaagccgaggua

SEQ ID NO: 2380867 - RNA, 19 nt, Artificial Sequence
  Description of Artificial Sequence: Synthetic oligonucleotide
  Antisense strand to SEQ ID NO: 2380866
uaccucggcuucaauaucu

SEQ ID NO: 2380868 - RNA, 19 nt, Artificial Sequence
  Description of Artificial Sequence: Synthetic oligonucleotide
  Sense strand starting at position 3207 of SEQ ID NO: 1885982
gauauugaagccgagguaa

SEQ ID NO: 2380869 - RNA, 19 nt, Artificial Sequence
  Description of Artificial Sequence: Synthetic oligonucleotide
  Antisense strand to SEQ ID NO: 2380868
uuaccucggcuucaauauc

SEQ ID NO: 2380870 - RNA, 19 nt, Artificial Sequence
  Description of Artificial Sequence: Synthetic oligonucleotide
  Sense strand starting at position 3209 of SEQ ID NO: 1885982
uauugaagccgagguaaga

SEQ ID NO: 2380871 - RNA, 19 nt, Artificial Sequence
  Description of Artificial Sequence: Synthetic oligonucleotide
  Antisense strand to SEQ ID NO: 2380870
ucuuaccucggcuucaaua

SEQ ID NO: 2380872 - RNA, 19 nt, Artificial Sequence
  Description of Artificial Sequence: Synthetic oligonucleotide
  Sense strand starting at position 3251 of SEQ ID NO: 1885982
aacucaagcguggaugaaa

SEQ ID NO: 2380873 - RNA, 19 nt, Artificial Sequence
  Description of Artificial Sequence: Synthetic oligonucleotide
  Antisense strand to SEQ ID NO: 2380872
uuucauccacgcuugaguu

SEQ ID NO: 2380874 - RNA, 19 nt, Artificial Sequence
  Description of Artificial Sequence: Synthetic oligonucleotide
  Sense strand starting at position 3319 of SEQ ID NO: 1885982
caaagugaccuuuguauga

SEQ ID NO: 2380875 - RNA, 19 nt, Artificial Sequence
  Description of Artificial Sequence: Synthetic oligonucleotide
  Antisense strand to SEQ ID NO: 2380874
ucauacaaaggucacuuug

SEQ ID NO: 2380876 - RNA, 19 nt, Artificial Sequence
  Description of Artificial Sequence: Synthetic oligonucleotide
  Sense strand starting at position 3343 of SEQ ID NO: 1885982
aaagauuauuguuuggcca

SEQ ID NO: 2380877 - RNA, 19 nt, Artificial Sequence
  Description of Artificial Sequence: Synthetic oligonucleotide
  Antisense strand to SEQ ID NO: 2380876
uggccaaacaauaaucuuu

SEQ ID NO: 2380878 - RNA, 19 nt, Artificial Sequence
  Description of Artificial Sequence: Synthetic oligonucleotide
  Sense strand starting at position 3344 of SEQ ID NO: 1885982
aagauuauuguuuggccaa

SEQ ID NO: 2380879 - RNA, 19 nt, Artificial Sequence
  Description of Artificial Sequence: Synthetic oligonucleotide
  Antisense strand to SEQ ID NO: 2380878
uuggccaaacaauaaucuu

SEQ ID NO: 2380880 - RNA, 19 nt, Artificial Sequence
  Description of Artificial Sequence: Synthetic oligonucleotide
  Sense strand starting at position 3346 of SEQ ID NO: 1885982
gauuauuguuuggccaaga

SEQ ID NO: 2380881 - RNA, 19 nt, Artificial Sequence
  Description of Artificial Sequence: Synthetic oligonucleotide
  Antisense strand to SEQ ID NO: 2380880
ucuuggccaaacaauaauc

SEQ ID NO: 2380882 - RNA, 19 nt, Artificial Sequence
  Description of Artificial Sequence: Synthetic oligonucleotide
  Sense strand starting at position 3347 of SEQ ID NO: 1885982
auuauuguuuggccaagaa

SEQ ID NO: 2380883 - RNA, 19 nt, Artificial Sequence
  Description of Artificial Sequence: Synthetic oligonucleotide
  Antisense strand to SEQ ID NO: 2380882
uucuuggccaaacaauaau

SEQ ID NO: 2380884 - RNA, 19 nt, Artificial Sequence
  Description of Artificial Sequence: Synthetic oligonucleotide
  Sense strand starting at position 3511 of SEQ ID NO: 1885982
ggcuuuggccacugauaau

SEQ ID NO: 2380885 - RNA, 19 nt, Artificial Sequence
  Description of Artificial Sequence: Synthetic oligonucleotide
  Antisense strand to SEQ ID NO: 2380884
auuaucaguggccaaagcc

SEQ ID NO: 2380886 - RNA, 19 nt, Artificial Sequence
  Description of Artificial Sequence: Synthetic oligonucleotide
  Sense strand starting at position 3520 of SEQ ID NO: 1885982
cacugauaaucagugagca

SEQ ID NO: 2380887 - RNA, 19 nt, Artificial Sequence
  Description of Artificial Sequence: Synthetic oligonucleotide
  Antisense strand to SEQ ID NO: 2380886
ugcucacugauuaucagug

SEQ ID NO: 2380888 - RNA, 19 nt, Artificial Sequence
  Description of Artificial Sequence: Synthetic oligonucleotide
  Sense strand starting at position 3530 of SEQ ID NO: 1885982
cagugagcaccuugacuau

SEQ ID NO: 2380889 - RNA, 19 nt, Artificial Sequence
  Description of Artificial Sequence: Synthetic oligonucleotide
  Antisense strand to SEQ ID NO: 2380888
auagucaaggugcucacug

SEQ ID NO: 2380890 - RNA, 19 nt, Artificial Sequence
  Description of Artificial Sequence: Synthetic oligonucleotide
  Sense strand starting at position 3913 of SEQ ID NO: 1885982
gugucuacuguagagagaa

SEQ ID NO: 2380891 - RNA, 19 nt, Artificial Sequence
  Description of Artificial Sequence: Synthetic oligonucleotide
  Antisense strand to SEQ ID NO: 2380890
uucucucuacaguagacac

SEQ ID NO: 2380892 - RNA, 19 nt, Artificial Sequence
  Description of Artificial Sequence: Synthetic oligonucleotide
  Sense strand starting at position 3933 of SEQ ID NO: 1885982
cuuucucccugguuugaua

SEQ ID NO: 2380893 - RNA, 19 nt, Artificial Sequence
  Description of Artificial Sequence: Synthetic oligonucleotide
  Antisense strand to SEQ ID NO: 2380892
uaucaaaccagggagaaag

SEQ ID NO: 2380894 - RNA, 19 nt, Artificial Sequence
  Description of Artificial Sequence: Synthetic oligonucleotide
  Sense strand starting at position 57 of SEQ ID NO: 1885983
ggguuaagcccugaaccau

SEQ ID NO: 2380895 - RNA, 19 nt, Artificial Sequence
  Description of Artificial Sequence: Synthetic oligonucleotide
  Antisense strand to SEQ ID NO: 2380894
augguucagggcuuaaccc

SEQ ID NO: 2380896 - RNA, 19 nt, Artificial Sequence
  Description of Artificial Sequence: Synthetic oligonucleotide
  Sense strand starting at position 119 of SEQ ID NO: 1885983
cccugugaugagggaguuu

SEQ ID NO: 2380897 - RNA, 19 nt, Artificial Sequence
  Description of Artificial Sequence: Synthetic oligonucleotide
  Antisense strand to SEQ ID NO: 2380896
aaacucccucaucacaggg

SEQ ID NO: 2380898 - RNA, 19 nt, Artificial Sequence
  Description of Artificial Sequence: Synthetic oligonucleotide
  Sense strand starting at position 610 of SEQ ID NO: 1885983
cugauaagcgggugacaga

SEQ ID NO: 2380899 - RNA, 19 nt, Artificial Sequence
  Description of Artificial Sequence: Synthetic oligonucleotide
  Antisense strand to SEQ ID NO: 2380898
ucugucacccgcuuaucag

SEQ ID NO: 2380900 - RNA, 19 nt, Artificial Sequence
  Description of Artificial Sequence: Synthetic oligonucleotide
  Sense strand starting at position 650 of SEQ ID NO: 1885983
gggaguucuugggcagaaa

SEQ ID NO: 2380901 - RNA, 19 nt, Artificial Sequence
  Description of Artificial Sequence: Synthetic oligonucleotide
  Antisense strand to SEQ ID NO: 2380900
uuucugcccaagaacuccc

SEQ ID NO: 2380902 - RNA, 19 nt, Artificial Sequence
  Description of Artificial Sequence: Synthetic oligonucleotide
  Sense strand starting at position 667 of SEQ ID NO: 1885983
aagagagcuccugggaaug

SEQ ID NO: 2380903 - RNA, 19 nt, Artificial Sequence
  Description of Artificial Sequence: Synthetic oligonucleotide
  Antisense strand to SEQ ID NO: 2380902
cauucccaggagcucucuu

SEQ ID NO: 2380904 - RNA, 19 nt, Artificial Sequence
  Description of Artificial Sequence: Synthetic oligonucleotide
  Sense strand starting at position 738 of SEQ ID NO: 1885983
ugucuccucccagagcuaa

SEQ ID NO: 2380905 - RNA, 19 nt, Artificial Sequence
  Description of Artificial Sequence: Synthetic oligonucleotide
  Antisense strand to SEQ ID NO: 2380904
uuagcucugggaggagaca

SEQ ID NO: 2380906 - RNA, 19 nt, Artificial Sequence
  Description of Artificial Sequence: Synthetic oligonucleotide
  Sense strand starting at position 991 of SEQ ID NO: 1885983
gaagcacuugcagaaguaa

SEQ ID NO: 2380907 - RNA, 19 nt, Artificial Sequence
  Description of Artificial Sequence: Synthetic oligonucleotide
  Antisense strand to SEQ ID NO: 2380906
uuacuucugcaagugcuuc

SEQ ID NO: 2380908 - RNA, 19 nt, Artificial Sequence
  Description of Artificial Sequence: Synthetic oligonucleotide
  Sense strand starting at position 1092 of SEQ ID NO: 1885983
ugugguauggagcagacua

SEQ ID NO: 2380909 - RNA, 19 nt, Artificial Sequence
  Description of Artificial Sequence: Synthetic oligonucleotide
  Antisense strand to SEQ ID NO: 2380908
uagucugcuccauaccaca

SEQ ID NO: 2380910 - RNA, 19 nt, Artificial Sequence
  Description of Artificial Sequence: Synthetic oligonucleotide
  Sense strand starting at position 1475 of SEQ ID NO: 1885983
uggugaagccuaggaugaa

SEQ ID NO: 2380911 - RNA, 19 nt, Artificial Sequence
  Description of Artificial Sequence: Synthetic oligonucleotide
  Antisense strand to SEQ ID NO: 2380910
uucauccuaggcuucacca

SEQ ID NO: 2380912 - RNA, 19 nt, Artificial Sequence
  Description of Artificial Sequence: Synthetic oligonucleotide
  Sense strand starting at position 1600 of SEQ ID NO: 1885983
ccucauuaggccugaucua

SEQ ID NO: 2380913 - RNA, 19 nt, Artificial Sequence
  Description of Artificial Sequence: Synthetic oligonucleotide
  Antisense strand to SEQ ID NO: 2380912
uagaucaggccuaaugagg

SEQ ID NO: 2380914 - RNA, 19 nt, Artificial Sequence
  Description of Artificial Sequence: Synthetic oligonucleotide
  Sense strand starting at position 1679 of SEQ ID NO: 1885983
gggccuacuguccacaaga

SEQ ID NO: 2380915 - RNA, 19 nt, Artificial Sequence
  Description of Artificial Sequence: Synthetic oligonucleotide
  Antisense strand to SEQ ID NO: 2380914
ucuuguggacaguaggccc

SEQ ID NO: 2380916 - RNA, 19 nt, Artificial Sequence
  Description of Artificial Sequence: Synthetic oligonucleotide
  Sense strand starting at position 1681 of SEQ ID NO: 1885983
gccuacuguccacaagaaa

SEQ ID NO: 2380917 - RNA, 19 nt, Artificial Sequence
  Description of Artificial Sequence: Synthetic oligonucleotide
  Antisense strand to SEQ ID NO: 2380916
uuucuuguggacaguaggc

SEQ ID NO: 2380918 - RNA, 19 nt, Artificial Sequence
  Description of Artificial Sequence: Synthetic oligonucleotide
  Sense strand starting at position 1740 of SEQ ID NO: 1885983
ccaagauaggcaugaguau

SEQ ID NO: 2380919 - RNA, 19 nt, Artificial Sequence
  Description of Artificial Sequence: Synthetic oligonucleotide
  Antisense strand to SEQ ID NO: 2380918
auacucaugccuaucuugg

SEQ ID NO: 2380920 - RNA, 19 nt, Artificial Sequence
  Description of Artificial Sequence: Synthetic oligonucleotide
  Sense strand starting at position 1795 of SEQ ID NO: 1885983
gcaggugacuuacccaaga

SEQ ID NO: 2380921 - RNA, 19 nt, Artificial Sequence
  Description of Artificial Sequence: Synthetic oligonucleotide
  Antisense strand to SEQ ID NO: 2380920
ucuuggguaagucaccugc

SEQ ID NO: 2380922 - RNA, 19 nt, Artificial Sequence
  Description of Artificial Sequence: Synthetic oligonucleotide
  Sense strand starting at position 2337 of SEQ ID NO: 1885983
ggugccucugcugauauuu

SEQ ID NO: 2380923 - RNA, 19 nt, Artificial Sequence
  Description of Artificial Sequence: Synthetic oligonucleotide
  Antisense strand to SEQ ID NO: 2380922
aaauaucagcagaggcacc

SEQ ID NO: 2380924 - RNA, 19 nt, Artificial Sequence
  Description of Artificial Sequence: Synthetic oligonucleotide
  Sense strand starting at position 2440 of SEQ ID NO: 1885983
cucuuaaucucucuggaga

SEQ ID NO: 2380925 - RNA, 19 nt, Artificial Sequence
  Description of Artificial Sequence: Synthetic oligonucleotide
  Antisense strand to SEQ ID NO: 2380924
ucuccagagagauuaagag

SEQ ID NO: 2380926 - RNA, 19 nt, Artificial Sequence
  Description of Artificial Sequence: Synthetic oligonucleotide
  Sense strand starting at position 2441 of SEQ ID NO: 1885983
ucuuaaucucucuggagag

SEQ ID NO: 2380927 - RNA, 19 nt, Artificial Sequence
  Description of Artificial Sequence: Synthetic oligonucleotide
  Antisense strand to SEQ ID NO: 2380926
cucuccagagagauuaaga

SEQ ID NO: 2380928 - RNA, 19 nt, Artificial Sequence
  Description of Artificial Sequence: Synthetic oligonucleotide
  Sense strand starting at position 2496 of SEQ ID NO: 1885983
ggacccaucagcuggagaa

SEQ ID NO: 2380929 - RNA, 19 nt, Artificial Sequence
  Description of Artificial Sequence: Synthetic oligonucleotide
  Antisense strand to SEQ ID NO: 2380928
uucuccagcugaugggucc

SEQ ID NO: 2380930 - RNA, 19 nt, Artificial Sequence
  Description of Artificial Sequence: Synthetic oligonucleotide
  Sense strand starting at position 2858 of SEQ ID NO: 1885983
ggcuuuggagccuagagaa

SEQ ID NO: 2380931 - RNA, 19 nt, Artificial Sequence
  Description of Artificial Sequence: Synthetic oligonucleotide
  Antisense strand to SEQ ID NO: 2380930
uucucuaggcuccaaagcc

SEQ ID NO: 2380932 - RNA, 19 nt, Artificial Sequence
  Description of Artificial Sequence: Synthetic oligonucleotide
  Sense strand starting at position 2883 of SEQ ID NO: 1885983
ggcaaauguuuggcauuug

SEQ ID NO: 2380933 - RNA, 19 nt, Artificial Sequence
  Description of Artificial Sequence: Synthetic oligonucleotide
  Antisense strand to SEQ ID NO: 2380932
caaaugccaaacauuugcc

SEQ ID NO: 2380934 - RNA, 19 nt, Artificial Sequence
  Description of Artificial Sequence: Synthetic oligonucleotide
  Sense strand starting at position 3168 of SEQ ID NO: 1885983
cugacaaucucagcuguca

SEQ ID NO: 2380935 - RNA, 19 nt, Artificial Sequence
  Description of Artificial Sequence: Synthetic oligonucleotide
  Antisense strand to SEQ ID NO: 2380934
ugacagcugagauugucag

SEQ ID NO: 2380936 - RNA, 19 nt, Artificial Sequence
  Description of Artificial Sequence: Synthetic oligonucleotide
  Sense strand starting at position 3260 of SEQ ID NO: 1885983
uacuuuacagggugugauu

SEQ ID NO: 2380937 - RNA, 19 nt, Artificial Sequence
  Description of Artificial Sequence: Synthetic oligonucleotide
  Antisense strand to SEQ ID NO: 2380936
aaucacacccuguaaagua

SEQ ID NO: 2380938 - RNA, 19 nt, Artificial Sequence
  Description of Artificial Sequence: Synthetic oligonucleotide
  Sense strand starting at position 3273 of SEQ ID NO: 1885983
gugauugaggcuuauauaa

SEQ ID NO: 2380939 - RNA, 19 nt, Artificial Sequence
  Description of Artificial Sequence: Synthetic oligonucleotide
  Antisense strand to SEQ ID NO: 2380938
uuauauaagccucaaucac

SEQ ID NO: 2380940 - RNA, 19 nt, Artificial Sequence
  Description of Artificial Sequence: Synthetic oligonucleotide
  Sense strand starting at position 3324 of SEQ ID NO: 1885983
gccagaggugcucaaguaa

SEQ ID NO: 2380941 - RNA, 19 nt, Artificial Sequence
  Description of Artificial Sequence: Synthetic oligonucleotide
  Antisense strand to SEQ ID NO: 2380940
uuacuugagcaccucuggc

SEQ ID NO: 2380942 - RNA, 19 nt, Artificial Sequence
  Description of Artificial Sequence: Synthetic oligonucleotide
  Sense strand starting at position 3361 of SEQ ID NO: 1885983
uugucuguccgugauuuga

SEQ ID NO: 2380943 - RNA, 19 nt, Artificial Sequence
  Description of Artificial Sequence: Synthetic oligonucleotide
  Antisense strand to SEQ ID NO: 2380942
ucaaaucacggacagacaa

SEQ ID NO: 2380944 - RNA, 19 nt, Artificial Sequence
  Description of Artificial Sequence: Synthetic oligonucleotide
  Sense strand starting at position 3401 of SEQ ID NO: 1885983
acugaauuacguuggauug

SEQ ID NO: 2380945 - RNA, 19 nt, Artificial Sequence
  Description of Artificial Sequence: Synthetic oligonucleotide
  Antisense strand to SEQ ID NO: 2380944
caauccaacguaauucagu

SEQ ID NO: 2380946 - RNA, 19 nt, Artificial Sequence
  Description of Artificial Sequence: Synthetic oligonucleotide
  Sense strand starting at position 3402 of SEQ ID NO: 1885983
cugaauuacguuggauuga

SEQ ID NO: 2380947 - RNA, 19 nt, Artificial Sequence
  Description of Artificial Sequence: Synthetic oligonucleotide
  Antisense strand to SEQ ID NO: 2380946
ucaauccaacguaauucag

SEQ ID NO: 2380948 - RNA, 19 nt, Artificial Sequence
  Description of Artificial Sequence: Synthetic oligonucleotide
  Sense strand starting at position 3411 of SEQ ID NO: 1885983
guuggauugaauugucuua

SEQ ID NO: 2380949 - RNA, 19 nt, Artificial Sequence
  Description of Artificial Sequence: Synthetic oligonucleotide
  Antisense strand to SEQ ID NO: 2380948
uaagacaauucaauccaac

SEQ ID NO: 2380950 - RNA, 19 nt, Artificial Sequence
  Description of Artificial Sequence: Synthetic oligonucleotide
  Sense strand starting at position 3413 of SEQ ID NO: 1885983
uggauugaauugucuuauu

SEQ ID NO: 2380951 - RNA, 19 nt, Artificial Sequence
  Description of Artificial Sequence: Synthetic oligonucleotide
  Antisense strand to SEQ ID NO: 2380950
aauaagacaauucaaucca

SEQ ID NO: 2380952 - RNA, 19 nt, Artificial Sequence
  Description of Artificial Sequence: Synthetic oligonucleotide
  Sense strand starting at position 3514 of SEQ ID NO: 1885983
gcaaauauuccagguugau

SEQ ID NO: 2380953 - RNA, 19 nt, Artificial Sequence
  Description of Artificial Sequence: Synthetic oligonucleotide
  Antisense strand to SEQ ID NO: 2380952
aucaaccuggaauauuugc

SEQ ID NO: 2380954 - RNA, 19 nt, Artificial Sequence
  Description of Artificial Sequence: Synthetic oligonucleotide
  Sense strand starting at position 3524 of SEQ ID NO: 1885983
cagguugauuaaucaagac

SEQ ID NO: 2380955 - RNA, 19 nt, Artificial Sequence
  Description of Artificial Sequence: Synthetic oligonucleotide
  Antisense strand to SEQ ID NO: 2380954
gucuugauuaaucaaccug

SEQ ID NO: 2380956 - RNA, 19 nt, Artificial Sequence
  Description of Artificial Sequence: Synthetic oligonucleotide
  Sense strand starting at position 3578 of SEQ ID NO: 1885983
aggagugagugucucccaa

SEQ ID NO: 2380957 - RNA, 19 nt, Artificial Sequence
  Description of Artificial Sequence: Synthetic oligonucleotide
  Antisense strand to SEQ ID NO: 2380956
uugggagacacucacuccu

SEQ ID NO: 2380958 - RNA, 19 nt, Artificial Sequence
  Description of Artificial Sequence: Synthetic oligonucleotide
  Sense strand starting at position 3631 of SEQ ID NO: 1885983
uguggacuccuccaaguua

SEQ ID NO: 2380959 - RNA, 19 nt, Artificial Sequence
  Description of Artificial Sequence: Synthetic oligonucleotide
  Antisense strand to SEQ ID NO: 2380958
uaacuuggaggaguccaca

SEQ ID NO: 2380960 - RNA, 19 nt, Artificial Sequence
  Description of Artificial Sequence: Synthetic oligonucleotide
  Sense strand starting at position 3689 of SEQ ID NO: 1885983
cuggaaagcccaggaauau

SEQ ID NO: 2380961 - RNA, 19 nt, Artificial Sequence
  Description of Artificial Sequence: Synthetic oligonucleotide
  Antisense strand to SEQ ID NO: 2380960
auauuccugggcuuuccag

SEQ ID NO: 2380962 - RNA, 19 nt, Artificial Sequence
  Description of Artificial Sequence: Synthetic oligonucleotide
  Sense strand starting at position 3698 of SEQ ID NO: 1885983
ccaggaauaucucccugga

SEQ ID NO: 2380963 - RNA, 19 nt, Artificial Sequence
  Description of Artificial Sequence: Synthetic oligonucleotide
  Antisense strand to SEQ ID NO: 2380962
uccagggagauauuccugg

SEQ ID NO: 2380964 - RNA, 19 nt, Artificial Sequence
  Description of Artificial Sequence: Synthetic oligonucleotide
  Sense strand starting at position 3700 of SEQ ID NO: 1885983
aggaauaucucccuggauu

SEQ ID NO: 2380965 - RNA, 19 nt, Artificial Sequence
  Description of Artificial Sequence: Synthetic oligonucleotide
  Antisense strand to SEQ ID NO: 2380964
aauccagggagauauuccu

SEQ ID NO: 2380966 - RNA, 19 nt, Artificial Sequence
  Description of Artificial Sequence: Synthetic oligonucleotide
  Sense strand starting at position 3701 of SEQ ID NO: 1885983
ggaauaucucccuggauuc

SEQ ID NO: 2380967 - RNA, 19 nt, Artificial Sequence
  Description of Artificial Sequence: Synthetic oligonucleotide
  Antisense strand to SEQ ID NO: 2380966
gaauccagggagauauucc

SEQ ID NO: 2380968 - RNA, 19 nt, Artificial Sequence
  Description of Artificial Sequence: Synthetic oligonucleotide
  Sense strand starting at position 3768 of SEQ ID NO: 1885983
gcccauagcguugcugaga

SEQ ID NO: 2380969 - RNA, 19 nt, Artificial Sequence
  Description of Artificial Sequence: Synthetic oligonucleotide
  Antisense strand to SEQ ID NO: 2380968
ucucagcaacgcuaugggc

SEQ ID NO: 2380970 - RNA, 19 nt, Artificial Sequence
  Description of Artificial Sequence: Synthetic oligonucleotide
  Sense strand starting at position 3913 of SEQ ID NO: 1885983
aggugacaguccucuggaa

SEQ ID NO: 2380971 - RNA, 19 nt, Artificial Sequence
  Description of Artificial Sequence: Synthetic oligonucleotide
  Antisense strand to SEQ ID NO: 2380970
uuccagaggacugucaccu

SEQ ID NO: 2380972 - RNA, 19 nt, Artificial Sequence
  Description of Artificial Sequence: Synthetic oligonucleotide
  Sense strand starting at position 3915 of SEQ ID NO: 1885983
gugacaguccucuggaauu

SEQ ID NO: 2380973 - RNA, 19 nt, Artificial Sequence
  Description of Artificial Sequence: Synthetic oligonucleotide
  Antisense strand to SEQ ID NO: 2380972
aauuccagaggacugucac

SEQ ID NO: 2380974 - RNA, 19 nt, Artificial Sequence
  Description of Artificial Sequence: Synthetic oligonucleotide
  Sense strand starting at position 100 of SEQ ID NO: 1885984
aggaguggcccaugaggau

SEQ ID NO: 2380975 - RNA, 19 nt, Artificial Sequence
  Description of Artificial Sequence: Synthetic oligonucleotide
  Antisense strand to SEQ ID NO: 2380974
auccucaugggccacuccu

SEQ ID NO: 2380976 - RNA, 19 nt, Artificial Sequence
  Description of Artificial Sequence: Synthetic oligonucleotide
  Sense strand starting at position 107 of SEQ ID NO: 1885984
gcccaugaggauugggaaa

SEQ ID NO: 2380977 - RNA, 19 nt, Artificial Sequence
  Description of Artificial Sequence: Synthetic oligonucleotide
  Antisense strand to SEQ ID NO: 2380976
uuucccaauccucaugggc

SEQ ID NO: 2380978 - RNA, 19 nt, Artificial Sequence
  Description of Artificial Sequence: Synthetic oligonucleotide
  Sense strand starting at position 109 of SEQ ID NO: 1885984
ccaugaggauugggaaaga

SEQ ID NO: 2380979 - RNA, 19 nt, Artificial Sequence
  Description of Artificial Sequence: Synthetic oligonucleotide
  Antisense strand to SEQ ID NO: 2380978
ucuuucccaauccucaugg

SEQ ID NO: 2380980 - RNA, 19 nt, Artificial Sequence
  Description of Artificial Sequence: Synthetic oligonucleotide
  Sense strand starting at position 523 of SEQ ID NO: 1885984
cuggcaaggcacugucauu

SEQ ID NO: 2380981 - RNA, 19 nt, Artificial Sequence
  Description of Artificial Sequence: Synthetic oligonucleotide
  Antisense strand to SEQ ID NO: 2380980
aaugacagugccuugccag

SEQ ID NO: 2380982 - RNA, 19 nt, Artificial Sequence
  Description of Artificial Sequence: Synthetic oligonucleotide
  Sense strand starting at position 591 of SEQ ID NO: 1885984
ggaggucuuccacagcuga

SEQ ID NO: 2380983 - RNA, 19 nt, Artificial Sequence
  Description of Artificial Sequence: Synthetic oligonucleotide
  Antisense strand to SEQ ID NO: 2380982
ucagcuguggaagaccucc

SEQ ID NO: 2380984 - RNA, 19 nt, Artificial Sequence
  Description of Artificial Sequence: Synthetic oligonucleotide
  Sense strand starting at position 726 of SEQ ID NO: 1885984
uucccaugcuguccaagaa

SEQ ID NO: 2380985 - RNA, 19 nt, Artificial Sequence
  Description of Artificial Sequence: Synthetic oligonucleotide
  Antisense strand to SEQ ID NO: 2380984
uucuuggacagcaugggaa

SEQ ID NO: 2380986 - RNA, 19 nt, Artificial Sequence
  Description of Artificial Sequence: Synthetic oligonucleotide
  Sense strand starting at position 1336 of SEQ ID NO: 1885984
ccaggaaggcacuguucua

SEQ ID NO: 2380987 - RNA, 19 nt, Artificial Sequence
  Description of Artificial Sequence: Synthetic oligonucleotide
  Antisense strand to SEQ ID NO: 2380986
uagaacagugccuuccugg

SEQ ID NO: 2380988 - RNA, 19 nt, Artificial Sequence
  Description of Artificial Sequence: Synthetic oligonucleotide
  Sense strand starting at position 1354 of SEQ ID NO: 1885984
aaacacugugcauguauga

SEQ ID NO: 2380989 - RNA, 19 nt, Artificial Sequence
  Description of Artificial Sequence: Synthetic oligonucleotide
  Antisense strand to SEQ ID NO: 2380988
ucauacaugcacaguguuu

SEQ ID NO: 2380990 - RNA, 19 nt, Artificial Sequence
  Description of Artificial Sequence: Synthetic oligonucleotide
  Sense strand starting at position 1404 of SEQ ID NO: 1885984
auuucuaauuggugggagu

SEQ ID NO: 2380991 - RNA, 19 nt, Artificial Sequence
  Description of Artificial Sequence: Synthetic oligonucleotide
  Antisense strand to SEQ ID NO: 2380990
acucccaccaauuagaaau

SEQ ID NO: 2380992 - RNA, 19 nt, Artificial Sequence
  Description of Artificial Sequence: Synthetic oligonucleotide
  Sense strand starting at position 1405 of SEQ ID NO: 1885984
uuucuaauuggugggaguu

SEQ ID NO: 2380993 - RNA, 19 nt, Artificial Sequence
  Description of Artificial Sequence: Synthetic oligonucleotide
  Antisense strand to SEQ ID NO: 2380992
aacucccaccaauuagaaa

SEQ ID NO: 2380994 - RNA, 19 nt, Artificial Sequence
  Description of Artificial Sequence: Synthetic oligonucleotide
  Sense strand starting at position 1406 of SEQ ID NO: 1885984
uucuaauuggugggaguuu

SEQ ID NO: 2380995 - RNA, 19 nt, Artificial Sequence
  Description of Artificial Sequence: Synthetic oligonucleotide
  Antisense strand to SEQ ID NO: 2380994
aaacucccaccaauuagaa

SEQ ID NO: 2380996 - RNA, 19 nt, Artificial Sequence
  Description of Artificial Sequence: Synthetic oligonucleotide
  Sense strand starting at position 1609 of SEQ ID NO: 1885984
accauucucccaugagaug

SEQ ID NO: 2380997 - RNA, 19 nt, Artificial Sequence
  Description of Artificial Sequence: Synthetic oligonucleotide
  Antisense strand to SEQ ID NO: 2380996
caucucaugggagaauggu

SEQ ID NO: 2380998 - RNA, 19 nt, Artificial Sequence
  Description of Artificial Sequence: Synthetic oligonucleotide
  Sense strand starting at position 1620 of SEQ ID NO: 1885984
augagaugccugcaagggu

SEQ ID NO: 2380999 - RNA, 19 nt, Artificial Sequence
  Description of Artificial Sequence: Synthetic oligonucleotide
  Antisense strand to SEQ ID NO: 2380998
acccuugcaggcaucucau

SEQ ID NO: 2381000 - RNA, 19 nt, Artificial Sequence
  Description of Artificial Sequence: Synthetic oligonucleotide
  Sense strand starting at position 1701 of SEQ ID NO: 1885984
cgccgaguaucaucacaca

SEQ ID NO: 2381001 - RNA, 19 nt, Artificial Sequence
  Description of Artificial Sequence: Synthetic oligonucleotide
  Antisense strand to SEQ ID NO: 2381000
ugugugaugauacucggcg

SEQ ID NO: 2381002 - RNA, 19 nt, Artificial Sequence
  Description of Artificial Sequence: Synthetic oligonucleotide
  Sense strand starting at position 1737 of SEQ ID NO: 1885984
gaaguaauguccucugagg

SEQ ID NO: 2381003 - RNA, 19 nt, Artificial Sequence
  Description of Artificial Sequence: Synthetic oligonucleotide
  Antisense strand to SEQ ID NO: 2381002
ccucagaggacauuacuuc

SEQ ID NO: 2381004 - RNA, 19 nt, Artificial Sequence
  Description of Artificial Sequence: Synthetic oligonucleotide
  Sense strand starting at position 1771 of SEQ ID NO: 1885984
acgucuuaccauggcugaa

SEQ ID NO: 2381005 - RNA, 19 nt, Artificial Sequence
  Description of Artificial Sequence: Synthetic oligonucleotide
  Antisense strand to SEQ ID NO: 2381004
uucagccaugguaagacgu

SEQ ID NO: 2381006 - RNA, 19 nt, Artificial Sequence
  Description of Artificial Sequence: Synthetic oligonucleotide
  Sense strand starting at position 1859 of SEQ ID NO: 1885984
gccuauuuaccaugagccu

SEQ ID NO: 2381007 - RNA, 19 nt, Artificial Sequence
  Description of Artificial Sequence: Synthetic oligonucleotide
  Antisense strand to SEQ ID NO: 2381006
aggcucaugguaaauaggc

SEQ ID NO: 2381008 - RNA, 19 nt, Artificial Sequence
  Description of Artificial Sequence: Synthetic oligonucleotide
  Sense strand starting at position 1998 of SEQ ID NO: 1885984
gaucucuuccuggagcaua

SEQ ID NO: 2381009 - RNA, 19 nt, Artificial Sequence
  Description of Artificial Sequence: Synthetic oligonucleotide
  Antisense strand to SEQ ID NO: 2381008
uaugcuccaggaagagauc

SEQ ID NO: 2381010 - RNA, 19 nt, Artificial Sequence
  Description of Artificial Sequence: Synthetic oligonucleotide
  Sense strand starting at position 2016 of SEQ ID NO: 1885984
aguguagggaaggguuuau

SEQ ID NO: 2381011 - RNA, 19 nt, Artificial Sequence
  Description of Artificial Sequence: Synthetic oligonucleotide
  Antisense strand to SEQ ID NO: 2381010
auaaacccuucccuacacu

SEQ ID NO: 2381012 - RNA, 19 nt, Artificial Sequence
  Description of Artificial Sequence: Synthetic oligonucleotide
  Sense strand starting at position 2020 of SEQ ID NO: 1885984
uagggaaggguuuauugca

SEQ ID NO: 2381013 - RNA, 19 nt, Artificial Sequence
  Description of Artificial Sequence: Synthetic oligonucleotide
  Antisense strand to SEQ ID NO: 2381012
ugcaauaaacccuucccua

SEQ ID NO: 2381014 - RNA, 19 nt, Artificial Sequence
  Description of Artificial Sequence: Synthetic oligonucleotide
  Sense strand starting at position 2036 of SEQ ID NO: 1885984
gcauucuaacaaggacuuu

SEQ ID NO: 2381015 - RNA, 19 nt, Artificial Sequence
  Description of Artificial Sequence: Synthetic oligonucleotide
  Antisense strand to SEQ ID NO: 2381014
aaaguccuuguuagaaugc

SEQ ID NO: 2381016 - RNA, 19 nt, Artificial Sequence
  Description of Artificial Sequence: Synthetic oligonucleotide
  Sense strand starting at position 2070 of SEQ ID NO: 1885984
aagaaugugcaauaauggu

SEQ ID NO: 2381017 - RNA, 19 nt, Artificial Sequence
  Description of Artificial Sequence: Synthetic oligonucleotide
  Antisense strand to SEQ ID NO: 2381016
accauuauugcacauucuu

SEQ ID NO: 2381018 - RNA, 19 nt, Artificial Sequence
  Description of Artificial Sequence: Synthetic oligonucleotide
  Sense strand starting at position 2246 of SEQ ID NO: 1885984
guaauacaguaauugaucu

SEQ ID NO: 2381019 - RNA, 19 nt, Artificial Sequence
  Description of Artificial Sequence: Synthetic oligonucleotide
  Antisense strand to SEQ ID NO: 2381018
agaucaauuacuguauuac

SEQ ID NO: 2381020 - RNA, 19 nt, Artificial Sequence
  Description of Artificial Sequence: Synthetic oligonucleotide
  Sense strand starting at position 2250 of SEQ ID NO: 1885984
uacaguaauugaucuggga

SEQ ID NO: 2381021 - RNA, 19 nt, Artificial Sequence
  Description of Artificial Sequence: Synthetic oligonucleotide
  Antisense strand to SEQ ID NO: 2381020
ucccagaucaauuacugua

SEQ ID NO: 2381022 - RNA, 19 nt, Artificial Sequence
  Description of Artificial Sequence: Synthetic oligonucleotide
  Sense strand starting at position 2254 of SEQ ID NO: 1885984
guaauugaucugggagacu

SEQ ID NO: 2381023 - RNA, 19 nt, Artificial Sequence
  Description of Artificial Sequence: Synthetic oligonucleotide
  Antisense strand to SEQ ID NO: 2381022
agucucccagaucaauuac

SEQ ID NO: 2381024 - RNA, 19 nt, Artificial Sequence
  Description of Artificial Sequence: Synthetic oligonucleotide
  Sense strand starting at position 2352 of SEQ ID NO: 1885984
cucuguuccugugugggaa

SEQ ID NO: 2381025 - RNA, 19 nt, Artificial Sequence
  Description of Artificial Sequence: Synthetic oligonucleotide
  Antisense strand to SEQ ID NO: 2381024
uucccacacaggaacagag

SEQ ID NO: 2381026 - RNA, 19 nt, Artificial Sequence
  Description of Artificial Sequence: Synthetic oligonucleotide
  Sense strand starting at position 2488 of SEQ ID NO: 1885984
uguggucucaggcaaacua

SEQ ID NO: 2381027 - RNA, 19 nt, Artificial Sequence
  Description of Artificial Sequence: Synthetic oligonucleotide
  Antisense strand to SEQ ID NO: 2381026
uaguuugccugagaccaca

SEQ ID NO: 2381028 - RNA, 19 nt, Artificial Sequence
  Description of Artificial Sequence: Synthetic oligonucleotide
  Sense strand starting at position 2553 of SEQ ID NO: 1885984
gucagauggccuuaaggau

SEQ ID NO: 2381029 - RNA, 19 nt, Artificial Sequence
  Description of Artificial Sequence: Synthetic oligonucleotide
  Antisense strand to SEQ ID NO: 2381028
auccuuaaggccaucugac

SEQ ID NO: 2381030 - RNA, 19 nt, Artificial Sequence
  Description of Artificial Sequence: Synthetic oligonucleotide
  Sense strand starting at position 2592 of SEQ ID NO: 1885984
ccgaaagaguguccauugu

SEQ ID NO: 2381031 - RNA, 19 nt, Artificial Sequence
  Description of Artificial Sequence: Synthetic oligonucleotide
  Antisense strand to SEQ ID NO: 2381030
acaauggacacucuuucgg

SEQ ID NO: 2381032 - RNA, 19 nt, Artificial Sequence
  Description of Artificial Sequence: Synthetic oligonucleotide
  Sense strand starting at position 2596 of SEQ ID NO: 1885984
aagaguguccauugugaug

SEQ ID NO: 2381033 - RNA, 19 nt, Artificial Sequence
  Description of Artificial Sequence: Synthetic oligonucleotide
  Antisense strand to SEQ ID NO: 2381032
caucacaauggacacucuu

SEQ ID NO: 2381034 - RNA, 19 nt, Artificial Sequence
  Description of Artificial Sequence: Synthetic oligonucleotide
  Sense strand starting at position 2622 of SEQ ID NO: 1885984
ccuugagaccucugcuuga

SEQ ID NO: 2381035 - RNA, 19 nt, Artificial Sequence
  Description of Artificial Sequence: Synthetic oligonucleotide
  Antisense strand to SEQ ID NO: 2381034
ucaagcagaggucucaagg

SEQ ID NO: 2381036 - RNA, 19 nt, Artificial Sequence
  Description of Artificial Sequence: Synthetic oligonucleotide
  Sense strand starting at position 2930 of SEQ ID NO: 1885984
gucccagcucccugaggaa

SEQ ID NO: 2381037 - RNA, 19 nt, Artificial Sequence
  Description of Artificial Sequence: Synthetic oligonucleotide
  Antisense strand to SEQ ID NO: 2381036
uuccucagggagcugggac

SEQ ID NO: 2381038 - RNA, 19 nt, Artificial Sequence
  Description of Artificial Sequence: Synthetic oligonucleotide
  Sense strand starting at position 3099 of SEQ ID NO: 1885984
aauugaauccugugacuag

SEQ ID NO: 2381039 - RNA, 19 nt, Artificial Sequence
  Description of Artificial Sequence: Synthetic oligonucleotide
  Antisense strand to SEQ ID NO: 2381038
cuagucacaggauucaauu

SEQ ID NO: 2381040 - RNA, 19 nt, Artificial Sequence
  Description of Artificial Sequence: Synthetic oligonucleotide
  Sense strand starting at position 3102 of SEQ ID NO: 1885984
ugaauccugugacuagaua

SEQ ID NO: 2381041 - RNA, 19 nt, Artificial Sequence
  Description of Artificial Sequence: Synthetic oligonucleotide
  Antisense strand to SEQ ID NO: 2381040
uaucuagucacaggauuca

SEQ ID NO: 2381042 - RNA, 19 nt, Artificial Sequence
  Description of Artificial Sequence: Synthetic oligonucleotide
  Sense strand starting at position 3278 of SEQ ID NO: 1885984
gcucaaguguacucaaccu

SEQ ID NO: 2381043 - RNA, 19 nt, Artificial Sequence
  Description of Artificial Sequence: Synthetic oligonucleotide
  Antisense strand to SEQ ID NO: 2381042
agguugaguacacuugagc

SEQ ID NO: 2381044 - RNA, 19 nt, Artificial Sequence
  Description of Artificial Sequence: Synthetic oligonucleotide
  Sense strand starting at position 3341 of SEQ ID NO: 1885984
aggugucuccuaggaugca

SEQ ID NO: 2381045 - RNA, 19 nt, Artificial Sequence
  Description of Artificial Sequence: Synthetic oligonucleotide
  Antisense strand to SEQ ID NO: 2381044
ugcauccuaggagacaccu

SEQ ID NO: 2381046 - RNA, 19 nt, Artificial Sequence
  Description of Artificial Sequence: Synthetic oligonucleotide
  Sense strand starting at position 3362 of SEQ ID NO: 1885984
acucuuagugcugaaagca

SEQ ID NO: 2381047 - RNA, 19 nt, Artificial Sequence
  Description of Artificial Sequence: Synthetic oligonucleotide
  Antisense strand to SEQ ID NO: 2381046
ugcuuucagcacuaagagu

SEQ ID NO: 2381048 - RNA, 19 nt, Artificial Sequence
  Description of Artificial Sequence: Synthetic oligonucleotide
  Sense strand starting at position 3401 of SEQ ID NO: 1885984
gaugauuggucacccucau

SEQ ID NO: 2381049 - RNA, 19 nt, Artificial Sequence
  Description of Artificial Sequence: Synthetic oligonucleotide
  Antisense strand to SEQ ID NO: 2381048
augagggugaccaaucauc

SEQ ID NO: 2381050 - RNA, 19 nt, Artificial Sequence
  Description of Artificial Sequence: Synthetic oligonucleotide
  Sense strand starting at position 3498 of SEQ ID NO: 1885984
ucuguuauuacuugcggau

SEQ ID NO: 2381051 - RNA, 19 nt, Artificial Sequence
  Description of Artificial Sequence: Synthetic oligonucleotide
  Antisense strand to SEQ ID NO: 2381050
auccgcaaguaauaacaga

SEQ ID NO: 2381052 - RNA, 19 nt, Artificial Sequence
  Description of Artificial Sequence: Synthetic oligonucleotide
  Sense strand starting at position 3908 of SEQ ID NO: 1885984
gugucacaguccucaccuu

SEQ ID NO: 2381053 - RNA, 19 nt, Artificial Sequence
  Description of Artificial Sequence: Synthetic oligonucleotide
  Antisense strand to SEQ ID NO: 2381052
aaggugaggacugugacac

SEQ ID NO: 2381054 - RNA, 19 nt, Artificial Sequence
  Description of Artificial Sequence: Synthetic oligonucleotide
  Sense strand starting at position 215 of SEQ ID NO: 1885985
ucacaagauugccucagau

SEQ ID NO: 2381055 - RNA, 19 nt, Artificial Sequence
  Description of Artificial Sequence: Synthetic oligonucleotide
  Antisense strand to SEQ ID NO: 2381054
aucugaggcaaucuuguga

SEQ ID NO: 2381056 - RNA, 19 nt, Artificial Sequence
  Description of Artificial Sequence: Synthetic oligonucleotide
  Sense strand starting at position 231 of SEQ ID NO: 1885985
gauggaagggcaugguaua

SEQ ID NO: 2381057 - RNA, 19 nt, Artificial Sequence
  Description of Artificial Sequence: Synthetic oligonucleotide
  Antisense strand to SEQ ID NO: 2381056
uauaccaugcccuuccauc

SEQ ID NO: 2381058 - RNA, 19 nt, Artificial Sequence
  Description of Artificial Sequence: Synthetic oligonucleotide
  Sense strand starting at position 328 of SEQ ID NO: 1885985
ugcagcuguccugacauua

SEQ ID NO: 2381059 - RNA, 19 nt, Artificial Sequence
  Description of Artificial Sequence: Synthetic oligonucleotide
  Antisense strand to SEQ ID NO: 2381058
uaaugucaggacagcugca

SEQ ID NO: 2381060 - RNA, 19 nt, Artificial Sequence
  Description of Artificial Sequence: Synthetic oligonucleotide
  Sense strand starting at position 369 of SEQ ID NO: 1885985
ucaugaagcuguuucucau

SEQ ID NO: 2381061 - RNA, 19 nt, Artificial Sequence
  Description of Artificial Sequence: Synthetic oligonucleotide
  Antisense strand to SEQ ID NO: 2381060
augagaaacagcuucauga

SEQ ID NO: 2381062 - RNA, 19 nt, Artificial Sequence
  Description of Artificial Sequence: Synthetic oligonucleotide
  Sense strand starting at position 395 of SEQ ID NO: 1885985
gggcucuuuguggaggaca

SEQ ID NO: 2381063 - RNA, 19 nt, Artificial Sequence
  Description of Artificial Sequence: Synthetic oligonucleotide
  Antisense strand to SEQ ID NO: 2381062
uguccuccacaaagagccc

SEQ ID NO: 2381064 - RNA, 19 nt, Artificial Sequence
  Description of Artificial Sequence: Synthetic oligonucleotide
  Sense strand starting at position 397 of SEQ ID NO: 1885985
gcucuuuguggaggacaga

SEQ ID NO: 2381065 - RNA, 19 nt, Artificial Sequence
  Description of Artificial Sequence: Synthetic oligonucleotide
  Antisense strand to SEQ ID NO: 2381064
ucuguccuccacaaagagc

SEQ ID NO: 2381066 - RNA, 19 nt, Artificial Sequence
  Description of Artificial Sequence: Synthetic oligonucleotide
  Sense strand starting at position 1389 of SEQ ID NO: 1885985
uagccaagugcucauugua

SEQ ID NO: 2381067 - RNA, 19 nt, Artificial Sequence
  Description of Artificial Sequence: Synthetic oligonucleotide
  Antisense strand to SEQ ID NO: 2381066
uacaaugagcacuuggcua

SEQ ID NO: 2381068 - RNA, 19 nt, Artificial Sequence
  Description of Artificial Sequence: Synthetic oligonucleotide
  Sense strand starting at position 1441 of SEQ ID NO: 1885985
uugucaaauggguaaugca

SEQ ID NO: 2381069 - RNA, 19 nt, Artificial Sequence
  Description of Artificial Sequence: Synthetic oligonucleotide
  Antisense strand to SEQ ID NO: 2381068
ugcauuacccauuugacaa

SEQ ID NO: 2381070 - RNA, 19 nt, Artificial Sequence
  Description of Artificial Sequence: Synthetic oligonucleotide
  Sense strand starting at position 1475 of SEQ ID NO: 1885985
cucuuagugacugggcuua

SEQ ID NO: 2381071 - RNA, 19 nt, Artificial Sequence
  Description of Artificial Sequence: Synthetic oligonucleotide
  Antisense strand to SEQ ID NO: 2381070
uaagcccagucacuaagag

SEQ ID NO: 2381072 - RNA, 19 nt, Artificial Sequence
  Description of Artificial Sequence: Synthetic oligonucleotide
  Sense strand starting at position 1485 of SEQ ID NO: 1885985
cugggcuuaugaucagaau

SEQ ID NO: 2381073 - RNA, 19 nt, Artificial Sequence
  Description of Artificial Sequence: Synthetic oligonucleotide
  Antisense strand to SEQ ID NO: 2381072
auucugaucauaagcccag

SEQ ID NO: 2381074 - RNA, 19 nt, Artificial Sequence
  Description of Artificial Sequence: Synthetic oligonucleotide
  Sense strand starting at position 1558 of SEQ ID NO: 1885985
cuggaucuggagugaaaug

SEQ ID NO: 2381075 - RNA, 19 nt, Artificial Sequence
  Description of Artificial Sequence: Synthetic oligonucleotide
  Antisense strand to SEQ ID NO: 2381074
cauuucacuccagauccag

SEQ ID NO: 2381076 - RNA, 19 nt, Artificial Sequence
  Description of Artificial Sequence: Synthetic oligonucleotide
  Sense strand starting at position 1569 of SEQ ID NO: 1885985
gugaaaugcccucagguug

SEQ ID NO: 2381077 - RNA, 19 nt, Artificial Sequence
  Description of Artificial Sequence: Synthetic oligonucleotide
  Antisense strand to SEQ ID NO: 2381076
caaccugagggcauuucac

SEQ ID NO: 2381078 - RNA, 19 nt, Artificial Sequence
  Description of Artificial Sequence: Synthetic oligonucleotide
  Sense strand starting at position 1782 of SEQ ID NO: 1885985
gggauaugcucacccacau

SEQ ID NO: 2381079 - RNA, 19 nt, Artificial Sequence
  Description of Artificial Sequence: Synthetic oligonucleotide
  Antisense strand to SEQ ID NO: 2381078
augugggugagcauauccc

SEQ ID NO: 2381080 - RNA, 19 nt, Artificial Sequence
  Description of Artificial Sequence: Synthetic oligonucleotide
  Sense strand starting at position 2075 of SEQ ID NO: 1885985
ugcacuggguuccuauuua

SEQ ID NO: 2381081 - RNA, 19 nt, Artificial Sequence
  Description of Artificial Sequence: Synthetic oligonucleotide
  Antisense strand to SEQ ID NO: 2381080
uaaauaggaacccagugca

SEQ ID NO: 2381082 - RNA, 19 nt, Artificial Sequence
  Description of Artificial Sequence: Synthetic oligonucleotide
  Sense strand starting at position 2083 of SEQ ID NO: 1885985
guuccuauuuauguguaac

SEQ ID NO: 2381083 - RNA, 19 nt, Artificial Sequence
  Description of Artificial Sequence: Synthetic oligonucleotide
  Antisense strand to SEQ ID NO: 2381082
guuacacauaaauaggaac

SEQ ID NO: 2381084 - RNA, 19 nt, Artificial Sequence
  Description of Artificial Sequence: Synthetic oligonucleotide
  Sense strand starting at position 2146 of SEQ ID NO: 1885985
cugguagaucaggacugua

SEQ ID NO: 2381085 - RNA, 19 nt, Artificial Sequence
  Description of Artificial Sequence: Synthetic oligonucleotide
  Antisense strand to SEQ ID NO: 2381084
uacaguccugaucuaccag

SEQ ID NO: 2381086 - RNA, 19 nt, Artificial Sequence
  Description of Artificial Sequence: Synthetic oligonucleotide
  Sense strand starting at position 2191 of SEQ ID NO: 1885985
gagagucucccaggcugaa

SEQ ID NO: 2381087 - RNA, 19 nt, Artificial Sequence
  Description of Artificial Sequence: Synthetic oligonucleotide
  Antisense strand to SEQ ID NO: 2381086
uucagccugggagacucuc

SEQ ID NO: 2381088 - RNA, 19 nt, Artificial Sequence
  Description of Artificial Sequence: Synthetic oligonucleotide
  Sense strand starting at position 2299 of SEQ ID NO: 1885985
aacacugaggucuguauau

SEQ ID NO: 2381089 - RNA, 19 nt, Artificial Sequence
  Description of Artificial Sequence: Synthetic oligonucleotide
  Antisense strand to SEQ ID NO: 2381088
auauacagaccucaguguu

SEQ ID NO: 2381090 - RNA, 19 nt, Artificial Sequence
  Description of Artificial Sequence: Synthetic oligonucleotide
  Sense strand starting at position 2301 of SEQ ID NO: 1885985
cacugaggucuguauauuc

SEQ ID NO: 2381091 - RNA, 19 nt, Artificial Sequence
  Description of Artificial Sequence: Synthetic oligonucleotide
  Antisense strand to SEQ ID NO: 2381090
gaauauacagaccucagug

SEQ ID NO: 2381092 - RNA, 19 nt, Artificial Sequence
  Description of Artificial Sequence: Synthetic oligonucleotide
  Sense strand starting at position 2758 of SEQ ID NO: 1885985
gggagaugcuauucagagu

SEQ ID NO: 2381093 - RNA, 19 nt, Artificial Sequence
  Description of Artificial Sequence: Synthetic oligonucleotide
  Antisense strand to SEQ ID NO: 2381092
acucugaauagcaucuccc

SEQ ID NO: 2381094 - RNA, 19 nt, Artificial Sequence
  Description of Artificial Sequence: Synthetic oligonucleotide
  Sense strand starting at position 2772 of SEQ ID NO: 1885985
agaguauguacaugagggu

SEQ ID NO: 2381095 - RNA, 19 nt, Artificial Sequence
  Description of Artificial Sequence: Synthetic oligonucleotide
  Antisense strand to SEQ ID NO: 2381094
acccucauguacauacucu

SEQ ID NO: 2381096 - RNA, 19 nt, Artificial Sequence
  Description of Artificial Sequence: Synthetic oligonucleotide
  Sense strand starting at position 3157 of SEQ ID NO: 1885985
gcacauaagcuugggcaua

SEQ ID NO: 2381097 - RNA, 19 nt, Artificial Sequence
  Description of Artificial Sequence: Synthetic oligonucleotide
  Antisense strand to SEQ ID NO: 2381096
uaugcccaagcuuaugugc

SEQ ID NO: 2381098 - RNA, 19 nt, Artificial Sequence
  Description of Artificial Sequence: Synthetic oligonucleotide
  Sense strand starting at position 3181 of SEQ ID NO: 1885985
cuugcuugugaggacugaa

SEQ ID NO: 2381099 - RNA, 19 nt, Artificial Sequence
  Description of Artificial Sequence: Synthetic oligonucleotide
  Antisense strand to SEQ ID NO: 2381098
uucaguccucacaagcaag

SEQ ID NO: 2381100 - RNA, 19 nt, Artificial Sequence
  Description of Artificial Sequence: Synthetic oligonucleotide
  Sense strand starting at position 3184 of SEQ ID NO: 1885985
gcuugugaggacugaaguu

SEQ ID NO: 2381101 - RNA, 19 nt, Artificial Sequence
  Description of Artificial Sequence: Synthetic oligonucleotide
  Antisense strand to SEQ ID NO: 2381100
aacuucaguccucacaagc

SEQ ID NO: 2381102 - RNA, 19 nt, Artificial Sequence
  Description of Artificial Sequence: Synthetic oligonucleotide
  Sense strand starting at position 3193 of SEQ ID NO: 1885985
gacugaaguuuguccagac

SEQ ID NO: 2381103 - RNA, 19 nt, Artificial Sequence
  Description of Artificial Sequence: Synthetic oligonucleotide
  Antisense strand to SEQ ID NO: 2381102
gucuggacaaacuucaguc

SEQ ID NO: 2381104 - RNA, 19 nt, Artificial Sequence
  Description of Artificial Sequence: Synthetic oligonucleotide
  Sense strand starting at position 3194 of SEQ ID NO: 1885985
acugaaguuuguccagaca

SEQ ID NO: 2381105 - RNA, 19 nt, Artificial Sequence
  Description of Artificial Sequence: Synthetic oligonucleotide
  Antisense strand to SEQ ID NO: 2381104
ugucuggacaaacuucagu

SEQ ID NO: 2381106 - RNA, 19 nt, Artificial Sequence
  Description of Artificial Sequence: Synthetic oligonucleotide
  Sense strand starting at position 3212 of SEQ ID NO: 1885985
agaugaggcuuugcucaac

SEQ ID NO: 2381107 - RNA, 19 nt, Artificial Sequence
  Description of Artificial Sequence: Synthetic oligonucleotide
  Antisense strand to SEQ ID NO: 2381106
guugagcaaagccucaucu

SEQ ID NO: 2381108 - RNA, 19 nt, Artificial Sequence
  Description of Artificial Sequence: Synthetic oligonucleotide
  Sense strand starting at position 3276 of SEQ ID NO: 1885985
auugcagauuggcugaauu

SEQ ID NO: 2381109 - RNA, 19 nt, Artificial Sequence
  Description of Artificial Sequence: Synthetic oligonucleotide
  Antisense strand to SEQ ID NO: 2381108
aauucagccaaucugcaau

SEQ ID NO: 2381110 - RNA, 19 nt, Artificial Sequence
  Description of Artificial Sequence: Synthetic oligonucleotide
  Sense strand starting at position 3346 of SEQ ID NO: 1885985
gggagacagugaguuauca

SEQ ID NO: 2381111 - RNA, 19 nt, Artificial Sequence
  Description of Artificial Sequence: Synthetic oligonucleotide
  Antisense strand to SEQ ID NO: 2381110
ugauaacucacugucuccc

SEQ ID NO: 2381112 - RNA, 19 nt, Artificial Sequence
  Description of Artificial Sequence: Synthetic oligonucleotide
  Sense strand starting at position 3356 of SEQ ID NO: 1885985
gaguuaucacagggcagcu

SEQ ID NO: 2381113 - RNA, 19 nt, Artificial Sequence
  Description of Artificial Sequence: Synthetic oligonucleotide
  Antisense strand to SEQ ID NO: 2381112
agcugcccugugauaacuc

SEQ ID NO: 2381114 - RNA, 19 nt, Artificial Sequence
  Description of Artificial Sequence: Synthetic oligonucleotide
  Sense strand starting at position 3376 of SEQ ID NO: 1885985
acguaauagguaugagcca

SEQ ID NO: 2381115 - RNA, 19 nt, Artificial Sequence
  Description of Artificial Sequence: Synthetic oligonucleotide
  Antisense strand to SEQ ID NO: 2381114
uggcucauaccuauuacgu

SEQ ID NO: 2381116 - RNA, 19 nt, Artificial Sequence
  Description of Artificial Sequence: Synthetic oligonucleotide
  Sense strand starting at position 3385 of SEQ ID NO: 1885985
guaugagccauccaugaga

SEQ ID NO: 2381117 - RNA, 19 nt, Artificial Sequence
  Description of Artificial Sequence: Synthetic oligonucleotide
  Antisense strand to SEQ ID NO: 2381116
ucucauggauggcucauac

SEQ ID NO: 2381118 - RNA, 19 nt, Artificial Sequence
  Description of Artificial Sequence: Synthetic oligonucleotide
  Sense strand starting at position 3387 of SEQ ID NO: 1885985
augagccauccaugagagu

SEQ ID NO: 2381119 - RNA, 19 nt, Artificial Sequence
  Description of Artificial Sequence: Synthetic oligonucleotide
  Antisense strand to SEQ ID NO: 2381118
acucucauggauggcucau

SEQ ID NO: 2381120 - RNA, 19 nt, Artificial Sequence
  Description of Artificial Sequence: Synthetic oligonucleotide
  Sense strand starting at position 3409 of SEQ ID NO: 1885985
ugcccacuccuagagaaca

SEQ ID NO: 2381121 - RNA, 19 nt, Artificial Sequence
  Description of Artificial Sequence: Synthetic oligonucleotide
  Antisense strand to SEQ ID NO: 2381120
uguucucuaggagugggca

SEQ ID NO: 2381122 - RNA, 19 nt, Artificial Sequence
  Description of Artificial Sequence: Synthetic oligonucleotide
  Sense strand starting at position 3485 of SEQ ID NO: 1885985
gagaacugugccgcgcuua

SEQ ID NO: 2381123 - RNA, 19 nt, Artificial Sequence
  Description of Artificial Sequence: Synthetic oligonucleotide
  Antisense strand to SEQ ID NO: 2381122
uaagcgcggcacaguucuc

SEQ ID NO: 2381124 - RNA, 19 nt, Artificial Sequence
  Description of Artificial Sequence: Synthetic oligonucleotide
  Sense strand starting at position 3488 of SEQ ID NO: 1885985
aacugugccgcgcuuaauu

SEQ ID NO: 2381125 - RNA, 19 nt, Artificial Sequence
  Description of Artificial Sequence: Synthetic oligonucleotide
  Antisense strand to SEQ ID NO: 2381124
aauuaagcgcggcacaguu

SEQ ID NO: 2381126 - RNA, 19 nt, Artificial Sequence
  Description of Artificial Sequence: Synthetic oligonucleotide
  Sense strand starting at position 3498 of SEQ ID NO: 1885985
cgcuuaauugaguauuccu

SEQ ID NO: 2381127 - RNA, 19 nt, Artificial Sequence
  Description of Artificial Sequence: Synthetic oligonucleotide
  Antisense strand to SEQ ID NO: 2381126
aggaauacucaauuaagcg

SEQ ID NO: 2381128 - RNA, 19 nt, Artificial Sequence
  Description of Artificial Sequence: Synthetic oligonucleotide
  Sense strand starting at position 3636 of SEQ ID NO: 1885985
uucucacuccacugaggua

SEQ ID NO: 2381129 - RNA, 19 nt, Artificial Sequence
  Description of Artificial Sequence: Synthetic oligonucleotide
  Antisense strand to SEQ ID NO: 2381128
uaccucaguggagugagaa

SEQ ID NO: 2381130 - RNA, 19 nt, Artificial Sequence
  Description of Artificial Sequence: Synthetic oligonucleotide
  Sense strand starting at position 3685 of SEQ ID NO: 1885985
uucugugaguuuccauuua

SEQ ID NO: 2381131 - RNA, 19 nt, Artificial Sequence
  Description of Artificial Sequence: Synthetic oligonucleotide
  Antisense strand to SEQ ID NO: 2381130
uaaauggaaacucacagaa

SEQ ID NO: 2381132 - RNA, 19 nt, Artificial Sequence
  Description of Artificial Sequence: Synthetic oligonucleotide
  Sense strand starting at position 3962 of SEQ ID NO: 1885985
agucacuugucacuuaaca

SEQ ID NO: 2381133 - RNA, 19 nt, Artificial Sequence
  Description of Artificial Sequence: Synthetic oligonucleotide
  Antisense strand to SEQ ID NO: 2381132
uguuaagugacaagugacu

SEQ ID NO: 2381134 - RNA, 19 nt, Artificial Sequence
  Description of Artificial Sequence: Synthetic oligonucleotide
  Sense strand starting at position 34 of SEQ ID NO: 1885986
cucaaacagguguaauauu

SEQ ID NO: 2381135 - RNA, 19 nt, Artificial Sequence
  Description of Artificial Sequence: Synthetic oligonucleotide
  Antisense strand to SEQ ID NO: 2381134
aauauuacaccuguuugag

SEQ ID NO: 2381136 - RNA, 19 nt, Artificial Sequence
  Description of Artificial Sequence: Synthetic oligonucleotide
  Sense strand starting at position 226 of SEQ ID NO: 1885986
augcaaguacuaugcuaaa

SEQ ID NO: 2381137 - RNA, 19 nt, Artificial Sequence
  Description of Artificial Sequence: Synthetic oligonucleotide
  Antisense strand to SEQ ID NO: 2381136
uuuagcauaguacuugcau

SEQ ID NO: 2381138 - RNA, 19 nt, Artificial Sequence
  Description of Artificial Sequence: Synthetic oligonucleotide
  Sense strand starting at position 281 of SEQ ID NO: 1885986
uuauuauacggaugggaac

SEQ ID NO: 2381139 - RNA, 19 nt, Artificial Sequence
  Description of Artificial Sequence: Synthetic oligonucleotide
  Antisense strand to SEQ ID NO: 2381138
guucccauccguauaauaa

SEQ ID NO: 2381140 - RNA, 19 nt, Artificial Sequence
  Description of Artificial Sequence: Synthetic oligonucleotide
  Sense strand starting at position 306 of SEQ ID NO: 1885986
gagaacuagcagugaauaa

SEQ ID NO: 2381141 - RNA, 19 nt, Artificial Sequence
  Description of Artificial Sequence: Synthetic oligonucleotide
  Antisense strand to SEQ ID NO: 2381140
uuauucacugcuaguucuc

SEQ ID NO: 2381142 - RNA, 19 nt, Artificial Sequence
  Description of Artificial Sequence: Synthetic oligonucleotide
  Sense strand starting at position 319 of SEQ ID NO: 1885986
gaauaagcaucugcuaugu

SEQ ID NO: 2381143 - RNA, 19 nt, Artificial Sequence
  Description of Artificial Sequence: Synthetic oligonucleotide
  Antisense strand to SEQ ID NO: 2381142
acauagcagaugcuuauuc

SEQ ID NO: 2381144 - RNA, 19 nt, Artificial Sequence
  Description of Artificial Sequence: Synthetic oligonucleotide
  Sense strand starting at position 329 of SEQ ID NO: 1885986
cugcuauguacggagaagu

SEQ ID NO: 2381145 - RNA, 19 nt, Artificial Sequence
  Description of Artificial Sequence: Synthetic oligonucleotide
  Antisense strand to SEQ ID NO: 2381144
acuucuccguacauagcag

SEQ ID NO: 2381146 - RNA, 19 nt, Artificial Sequence
  Description of Artificial Sequence: Synthetic oligonucleotide
  Sense strand starting at position 337 of SEQ ID NO: 1885986
uacggagaagucugcuaaa

SEQ ID NO: 2381147 - RNA, 19 nt, Artificial Sequence
  Description of Artificial Sequence: Synthetic oligonucleotide
  Antisense strand to SEQ ID NO: 2381146
uuuagcagacuucuccgua

SEQ ID NO: 2381148 - RNA, 19 nt, Artificial Sequence
  Description of Artificial Sequence: Synthetic oligonucleotide
  Sense strand starting at position 731 of SEQ ID NO: 1885986
agcagauccuaugaagaag

SEQ ID NO: 2381149 - RNA, 19 nt, Artificial Sequence
  Description of Artificial Sequence: Synthetic oligonucleotide
  Antisense strand to SEQ ID NO: 2381148
cuucuucauaggaucugcu

SEQ ID NO: 2381150 - RNA, 19 nt, Artificial Sequence
  Description of Artificial Sequence: Synthetic oligonucleotide
  Sense strand starting at position 1016 of SEQ ID NO: 1885986
ggagaaggcuugaguugga

SEQ ID NO: 2381151 - RNA, 19 nt, Artificial Sequence
  Description of Artificial Sequence: Synthetic oligonucleotide
  Antisense strand to SEQ ID NO: 2381150
uccaacucaagccuucucc

SEQ ID NO: 2381152 - RNA, 19 nt, Artificial Sequence
  Description of Artificial Sequence: Synthetic oligonucleotide
  Sense strand starting at position 1019 of SEQ ID NO: 1885986
gaaggcuugaguuggauca

SEQ ID NO: 2381153 - RNA, 19 nt, Artificial Sequence
  Description of Artificial Sequence: Synthetic oligonucleotide
  Antisense strand to SEQ ID NO: 2381152
ugauccaacucaagccuuc

SEQ ID NO: 2381154 - RNA, 19 nt, Artificial Sequence
  Description of Artificial Sequence: Synthetic oligonucleotide
  Sense strand starting at position 1020 of SEQ ID NO: 1885986
aaggcuugaguuggaucau

SEQ ID NO: 2381155 - RNA, 19 nt, Artificial Sequence
  Description of Artificial Sequence: Synthetic oligonucleotide
  Antisense strand to SEQ ID NO: 2381154
augauccaacucaagccuu

SEQ ID NO: 2381156 - RNA, 19 nt, Artificial Sequence
  Description of Artificial Sequence: Synthetic oligonucleotide
  Sense strand starting at position 1169 of SEQ ID NO: 1885986
ugggaauaagugugcccau

SEQ ID NO: 2381157 - RNA, 19 nt, Artificial Sequence
  Description of Artificial Sequence: Synthetic oligonucleotide
  Antisense strand to SEQ ID NO: 2381156
augggcacacuuauuccca

SEQ ID NO: 2381158 - RNA, 19 nt, Artificial Sequence
  Description of Artificial Sequence: Synthetic oligonucleotide
  Sense strand starting at position 1170 of SEQ ID NO: 1885986
gggaauaagugugcccauu

SEQ ID NO: 2381159 - RNA, 19 nt, Artificial Sequence
  Description of Artificial Sequence: Synthetic oligonucleotide
  Antisense strand to SEQ ID NO: 2381158
aaugggcacacuuauuccc

SEQ ID NO: 2381160 - RNA, 19 nt, Artificial Sequence
  Description of Artificial Sequence: Synthetic oligonucleotide
  Sense strand starting at position 1191 of SEQ ID NO: 1885986
aguugacuccugugaggau

SEQ ID NO: 2381161 - RNA, 19 nt, Artificial Sequence
  Description of Artificial Sequence: Synthetic oligonucleotide
  Antisense strand to SEQ ID NO: 2381160
auccucacaggagucaacu

SEQ ID NO: 2381162 - RNA, 19 nt, Artificial Sequence
  Description of Artificial Sequence: Synthetic oligonucleotide
  Sense strand starting at position 1288 of SEQ ID NO: 1885986
gacagaagucgcuaaacgu

SEQ ID NO: 2381163 - RNA, 19 nt, Artificial Sequence
  Description of Artificial Sequence: Synthetic oligonucleotide
  Antisense strand to SEQ ID NO: 2381162
acguuuagcgacuucuguc

SEQ ID NO: 2381164 - RNA, 19 nt, Artificial Sequence
  Description of Artificial Sequence: Synthetic oligonucleotide
  Sense strand starting at position 1363 of SEQ ID NO: 1885986
aagugagagguccgagaug

SEQ ID NO: 2381165 - RNA, 19 nt, Artificial Sequence
  Description of Artificial Sequence: Synthetic oligonucleotide
  Antisense strand to SEQ ID NO: 2381164
caucucggaccucucacuu

SEQ ID NO: 2381166 - RNA, 19 nt, Artificial Sequence
  Description of Artificial Sequence: Synthetic oligonucleotide
  Sense strand starting at position 1469 of SEQ ID NO: 1885986
accugauuccugcgugaag

SEQ ID NO: 2381167 - RNA, 19 nt, Artificial Sequence
  Description of Artificial Sequence: Synthetic oligonucleotide
  Antisense strand to SEQ ID NO: 2381166
cuucacgcaggaaucaggu

SEQ ID NO: 2381168 - RNA, 19 nt, Artificial Sequence
  Description of Artificial Sequence: Synthetic oligonucleotide
  Sense strand starting at position 1470 of SEQ ID NO: 1885986
ccugauuccugcgugaaga

SEQ ID NO: 2381169 - RNA, 19 nt, Artificial Sequence
  Description of Artificial Sequence: Synthetic oligonucleotide
  Antisense strand to SEQ ID NO: 2381168
ucuucacgcaggaaucagg

SEQ ID NO: 2381170 - RNA, 19 nt, Artificial Sequence
  Description of Artificial Sequence: Synthetic oligonucleotide
  Sense strand starting at position 1471 of SEQ ID NO: 1885986
cugauuccugcgugaagaa

SEQ ID NO: 2381171 - RNA, 19 nt, Artificial Sequence
  Description of Artificial Sequence: Synthetic oligonucleotide
  Antisense strand to SEQ ID NO: 2381170
uucuucacgcaggaaucag

SEQ ID NO: 2381172 - RNA, 19 nt, Artificial Sequence
  Description of Artificial Sequence: Synthetic oligonucleotide
  Sense strand starting at position 1472 of SEQ ID NO: 1885986
ugauuccugcgugaagaaa

SEQ ID NO: 2381173 - RNA, 19 nt, Artificial Sequence
  Description of Artificial Sequence: Synthetic oligonucleotide
  Antisense strand to SEQ ID NO: 2381172
uuucuucacgcaggaauca

SEQ ID NO: 2381174 - RNA, 19 nt, Artificial Sequence
  Description of Artificial Sequence: Synthetic oligonucleotide
  Sense strand starting at position 1523 of SEQ ID NO: 1885986
agagacuccgucugagaac

SEQ ID NO: 2381175 - RNA, 19 nt, Artificial Sequence
  Description of Artificial Sequence: Synthetic oligonucleotide
  Antisense strand to SEQ ID NO: 2381174
guucucagacggagucucu

SEQ ID NO: 2381176 - RNA, 19 nt, Artificial Sequence
  Description of Artificial Sequence: Synthetic oligonucleotide
  Sense strand starting at position 2684 of SEQ ID NO: 1885986
ggcuuucuccaucacuguu

SEQ ID NO: 2381177 - RNA, 19 nt, Artificial Sequence
  Description of Artificial Sequence: Synthetic oligonucleotide
  Antisense strand to SEQ ID NO: 2381176
aacagugauggagaaagcc

SEQ ID NO: 2381178 - RNA, 19 nt, Artificial Sequence
  Description of Artificial Sequence: Synthetic oligonucleotide
  Sense strand starting at position 2841 of SEQ ID NO: 1885986
guucguuuaaggcuguuua

SEQ ID NO: 2381179 - RNA, 19 nt, Artificial Sequence
  Description of Artificial Sequence: Synthetic oligonucleotide
  Antisense strand to SEQ ID NO: 2381178
uaaacagccuuaaacgaac

SEQ ID NO: 2381180 - RNA, 19 nt, Artificial Sequence
  Description of Artificial Sequence: Synthetic oligonucleotide
  Sense strand starting at position 2877 of SEQ ID NO: 1885986
ugugguggauuggcauaaa

SEQ ID NO: 2381181 - RNA, 19 nt, Artificial Sequence
  Description of Artificial Sequence: Synthetic oligonucleotide
  Antisense strand to SEQ ID NO: 2381180
uuuaugccaauccaccaca

SEQ ID NO: 2381182 - RNA, 19 nt, Artificial Sequence
  Description of Artificial Sequence: Synthetic oligonucleotide
  Sense strand starting at position 2946 of SEQ ID NO: 1885986
cagaacuggcucugugauu

SEQ ID NO: 2381183 - RNA, 19 nt, Artificial Sequence
  Description of Artificial Sequence: Synthetic oligonucleotide
  Antisense strand to SEQ ID NO: 2381182
aaucacagagccaguucug

SEQ ID NO: 2381184 - RNA, 19 nt, Artificial Sequence
  Description of Artificial Sequence: Synthetic oligonucleotide
  Sense strand starting at position 2966 of SEQ ID NO: 1885986
uuaugagugagcgauuaaa

SEQ ID NO: 2381185 - RNA, 19 nt, Artificial Sequence
  Description of Artificial Sequence: Synthetic oligonucleotide
  Antisense strand to SEQ ID NO: 2381184
uuuaaucgcucacucauaa

SEQ ID NO: 2381186 - RNA, 19 nt, Artificial Sequence
  Description of Artificial Sequence: Synthetic oligonucleotide
  Sense strand starting at position 2976 of SEQ ID NO: 1885986
gcgauuaaauagccagguu

SEQ ID NO: 2381187 - RNA, 19 nt, Artificial Sequence
  Description of Artificial Sequence: Synthetic oligonucleotide
  Antisense strand to SEQ ID NO: 2381186
aaccuggcuauuuaaucgc

SEQ ID NO: 2381188 - RNA, 19 nt, Artificial Sequence
  Description of Artificial Sequence: Synthetic oligonucleotide
  Sense strand starting at position 3018 of SEQ ID NO: 1885986
guuccuuuacuuugucaga

SEQ ID NO: 2381189 - RNA, 19 nt, Artificial Sequence
  Description of Artificial Sequence: Synthetic oligonucleotide
  Antisense strand to SEQ ID NO: 2381188
ucugacaaaguaaaggaac

SEQ ID NO: 2381190 - RNA, 19 nt, Artificial Sequence
  Description of Artificial Sequence: Synthetic oligonucleotide
  Sense strand starting at position 3204 of SEQ ID NO: 1885986
cuuuacauucuauguggaa

SEQ ID NO: 2381191 - RNA, 19 nt, Artificial Sequence
  Description of Artificial Sequence: Synthetic oligonucleotide
  Antisense strand to SEQ ID NO: 2381190
uuccacauagaauguaaag

SEQ ID NO: 2381192 - RNA, 19 nt, Artificial Sequence
  Description of Artificial Sequence: Synthetic oligonucleotide
  Sense strand starting at position 3205 of SEQ ID NO: 1885986
uuuacauucuauguggaau

SEQ ID NO: 2381193 - RNA, 19 nt, Artificial Sequence
  Description of Artificial Sequence: Synthetic oligonucleotide
  Antisense strand to SEQ ID NO: 2381192
auuccacauagaauguaaa

SEQ ID NO: 2381194 - RNA, 19 nt, Artificial Sequence
  Description of Artificial Sequence: Synthetic oligonucleotide
  Sense strand starting at position 3284 of SEQ ID NO: 1885986
aguggaugaccuggaucua

SEQ ID NO: 2381195 - RNA, 19 nt, Artificial Sequence
  Description of Artificial Sequence: Synthetic oligonucleotide
  Antisense strand to SEQ ID NO: 2381194
uagauccaggucauccacu

SEQ ID NO: 2381196 - RNA, 19 nt, Artificial Sequence
  Description of Artificial Sequence: Synthetic oligonucleotide
  Sense strand starting at position 3341 of SEQ ID NO: 1885986
gaggcacucuaagcuuaga

SEQ ID NO: 2381197 - RNA, 19 nt, Artificial Sequence
  Description of Artificial Sequence: Synthetic oligonucleotide
  Antisense strand to SEQ ID NO: 2381196
ucuaagcuuagagugccuc

SEQ ID NO: 2381198 - RNA, 19 nt, Artificial Sequence
  Description of Artificial Sequence: Synthetic oligonucleotide
  Sense strand starting at position 3344 of SEQ ID NO: 1885986
gcacucuaagcuuagaaau

SEQ ID NO: 2381199 - RNA, 19 nt, Artificial Sequence
  Description of Artificial Sequence: Synthetic oligonucleotide
  Antisense strand to SEQ ID NO: 2381198
auuucuaagcuuagagugc

SEQ ID NO: 2381200 - RNA, 19 nt, Artificial Sequence
  Description of Artificial Sequence: Synthetic oligonucleotide
  Sense strand starting at position 3402 of SEQ ID NO: 1885986
aguuaugcaaauugagagu

SEQ ID NO: 2381201 - RNA, 19 nt, Artificial Sequence
  Description of Artificial Sequence: Synthetic oligonucleotide
  Antisense strand to SEQ ID NO: 2381200
acucucaauuugcauaacu

SEQ ID NO: 2381202 - RNA, 19 nt, Artificial Sequence
  Description of Artificial Sequence: Synthetic oligonucleotide
  Sense strand starting at position 3530 of SEQ ID NO: 1885986
accuuagagcaguggcauu

SEQ ID NO: 2381203 - RNA, 19 nt, Artificial Sequence
  Description of Artificial Sequence: Synthetic oligonucleotide
  Antisense strand to SEQ ID NO: 2381202
aaugccacugcucuaaggu

SEQ ID NO: 2381204 - RNA, 19 nt, Artificial Sequence
  Description of Artificial Sequence: Synthetic oligonucleotide
  Sense strand starting at position 3909 of SEQ ID NO: 1885986
gggcguucuccagaaacuc

SEQ ID NO: 2381205 - RNA, 19 nt, Artificial Sequence
  Description of Artificial Sequence: Synthetic oligonucleotide
  Antisense strand to SEQ ID NO: 2381204
gaguuucuggagaacgccc

SEQ ID NO: 2381206 - RNA, 19 nt, Artificial Sequence
  Description of Artificial Sequence: Synthetic oligonucleotide
  Sense strand starting at position 3945 of SEQ ID NO: 1885986
ggcugcaugccuggauauu

SEQ ID NO: 2381207 - RNA, 19 nt, Artificial Sequence
  Description of Artificial Sequence: Synthetic oligonucleotide
  Antisense strand to SEQ ID NO: 2381206
aauauccaggcaugcagcc

SEQ ID NO: 2381208 - RNA, 19 nt, Artificial Sequence
  Description of Artificial Sequence: Synthetic oligonucleotide
  Sense strand starting at position 3946 of SEQ ID NO: 1885986
gcugcaugccuggauauuu

SEQ ID NO: 2381209 - RNA, 19 nt, Artificial Sequence
  Description of Artificial Sequence: Synthetic oligonucleotide
  Antisense strand to SEQ ID NO: 2381208
aaauauccaggcaugcagc

SEQ ID NO: 2381210 - RNA, 19 nt, Artificial Sequence
  Description of Artificial Sequence: Synthetic oligonucleotide
  Sense strand starting at position 3972 of SEQ ID NO: 1885986
uucugugaauuuguaaguu

SEQ ID NO: 2381211 - RNA, 19 nt, Artificial Sequence
  Description of Artificial Sequence: Synthetic oligonucleotide
  Antisense strand to SEQ ID NO: 2381210
aacuuacaaauucacagaa

SEQ ID NO: 2381212 - RNA, 19 nt, Artificial Sequence
  Description of Artificial Sequence: Synthetic oligonucleotide
  Sense strand starting at position 3981 of SEQ ID NO: 1885986
uuuguaaguugccuuaaga

SEQ ID NO: 2381213 - RNA, 19 nt, Artificial Sequence
  Description of Artificial Sequence: Synthetic oligonucleotide
  Antisense strand to SEQ ID NO: 2381212
ucuuaaggcaacuuacaaa

SEQ ID NO: 2381214 - RNA, 19 nt, Artificial Sequence
  Description of Artificial Sequence: Synthetic oligonucleotide
  Sense strand starting at position 205 of SEQ ID NO: 1885987
uguacuugguauccggaau

SEQ ID NO: 2381215 - RNA, 19 nt, Artificial Sequence
  Description of Artificial Sequence: Synthetic oligonucleotide
  Antisense strand to SEQ ID NO: 2381214
auuccggauaccaaguaca

SEQ ID NO: 2381216 - RNA, 19 nt, Artificial Sequence
  Description of Artificial Sequence: Synthetic oligonucleotide
  Sense strand starting at position 211 of SEQ ID NO: 1885987
ugguauccggaaugugaca

SEQ ID NO: 2381217 - RNA, 19 nt, Artificial Sequence
  Description of Artificial Sequence: Synthetic oligonucleotide
  Antisense strand to SEQ ID NO: 2381216
ugucacauuccggauacca

SEQ ID NO: 2381218 - RNA, 19 nt, Artificial Sequence
  Description of Artificial Sequence: Synthetic oligonucleotide
  Sense strand starting at position 213 of SEQ ID NO: 1885987
guauccggaaugugacauu

SEQ ID NO: 2381219 - RNA, 19 nt, Artificial Sequence
  Description of Artificial Sequence: Synthetic oligonucleotide
  Antisense strand to SEQ ID NO: 2381218
aaugucacauuccggauac

SEQ ID NO: 2381220 - RNA, 19 nt, Artificial Sequence
  Description of Artificial Sequence: Synthetic oligonucleotide
  Sense strand starting at position 267 of SEQ ID NO: 1885987
cugggaaguuacuuccuca

SEQ ID NO: 2381221 - RNA, 19 nt, Artificial Sequence
  Description of Artificial Sequence: Synthetic oligonucleotide
  Antisense strand to SEQ ID NO: 2381220
ugaggaaguaacuucccag

SEQ ID NO: 2381222 - RNA, 19 nt, Artificial Sequence
  Description of Artificial Sequence: Synthetic oligonucleotide
  Sense strand starting at position 270 of SEQ ID NO: 1885987
ggaaguuacuuccucaucu

SEQ ID NO: 2381223 - RNA, 19 nt, Artificial Sequence
  Description of Artificial Sequence: Synthetic oligonucleotide
  Antisense strand to SEQ ID NO: 2381222
agaugaggaaguaacuucc

SEQ ID NO: 2381224 - RNA, 19 nt, Artificial Sequence
  Description of Artificial Sequence: Synthetic oligonucleotide
  Sense strand starting at position 468 of SEQ ID NO: 1885987
cggcaucugggcugaaaga

SEQ ID NO: 2381225 - RNA, 19 nt, Artificial Sequence
  Description of Artificial Sequence: Synthetic oligonucleotide
  Antisense strand to SEQ ID NO: 2381224
ucuuucagcccagaugccg

SEQ ID NO: 2381226 - RNA, 19 nt, Artificial Sequence
  Description of Artificial Sequence: Synthetic oligonucleotide
  Sense strand starting at position 469 of SEQ ID NO: 1885987
ggcaucugggcugaaagaa

SEQ ID NO: 2381227 - RNA, 19 nt, Artificial Sequence
  Description of Artificial Sequence: Synthetic oligonucleotide
  Antisense strand to SEQ ID NO: 2381226
uucuuucagcccagaugcc

SEQ ID NO: 2381228 - RNA, 19 nt, Artificial Sequence
  Description of Artificial Sequence: Synthetic oligonucleotide
  Sense strand starting at position 870 of SEQ ID NO: 1885987
aaaugugauuugcugugca

SEQ ID NO: 2381229 - RNA, 19 nt, Artificial Sequence
  Description of Artificial Sequence: Synthetic oligonucleotide
  Antisense strand to SEQ ID NO: 2381228
ugcacagcaaaucacauuu

SEQ ID NO: 2381230 - RNA, 19 nt, Artificial Sequence
  Description of Artificial Sequence: Synthetic oligonucleotide
  Sense strand starting at position 873 of SEQ ID NO: 1885987
ugugauuugcugugcauuc

SEQ ID NO: 2381231 - RNA, 19 nt, Artificial Sequence
  Description of Artificial Sequence: Synthetic oligonucleotide
  Antisense strand to SEQ ID NO: 2381230
gaaugcacagcaaaucaca

SEQ ID NO: 2381232 - RNA, 19 nt, Artificial Sequence
  Description of Artificial Sequence: Synthetic oligonucleotide
  Sense strand starting at position 1800 of SEQ ID NO: 1885987
cggagaauccaugaugugu

SEQ ID NO: 2381233 - RNA, 19 nt, Artificial Sequence
  Description of Artificial Sequence: Synthetic oligonucleotide
  Antisense strand to SEQ ID NO: 2381232
acacaucauggauucuccg

SEQ ID NO: 2381234 - RNA, 19 nt, Artificial Sequence
  Description of Artificial Sequence: Synthetic oligonucleotide
  Sense strand starting at position 1806 of SEQ ID NO: 1885987
auccaugaugugugcauuu

SEQ ID NO: 2381235 - RNA, 19 nt, Artificial Sequence
  Description of Artificial Sequence: Synthetic oligonucleotide
  Antisense strand to SEQ ID NO: 2381234
aaaugcacacaucauggau

SEQ ID NO: 2381236 - RNA, 19 nt, Artificial Sequence
  Description of Artificial Sequence: Synthetic oligonucleotide
  Sense strand starting at position 2126 of SEQ ID NO: 1885987
cccuuaaacuguguucuag

SEQ ID NO: 2381237 - RNA, 19 nt, Artificial Sequence
  Description of Artificial Sequence: Synthetic oligonucleotide
  Antisense strand to SEQ ID NO: 2381236
cuagaacacaguuuaaggg

SEQ ID NO: 2381238 - RNA, 19 nt, Artificial Sequence
  Description of Artificial Sequence: Synthetic oligonucleotide
  Sense strand starting at position 2347 of SEQ ID NO: 1885987
gccggaguuauuuguagac

SEQ ID NO: 2381239 - RNA, 19 nt, Artificial Sequence
  Description of Artificial Sequence: Synthetic oligonucleotide
  Antisense strand to SEQ ID NO: 2381238
gucuacaaauaacuccggc

SEQ ID NO: 2381240 - RNA, 19 nt, Artificial Sequence
  Description of Artificial Sequence: Synthetic oligonucleotide
  Sense strand starting at position 2628 of SEQ ID NO: 1885987
ucggcucuuauagacagaa

SEQ ID NO: 2381241 - RNA, 19 nt, Artificial Sequence
  Description of Artificial Sequence: Synthetic oligonucleotide
  Antisense strand to SEQ ID NO: 2381240
uucugucuauaagagccga

SEQ ID NO: 2381242 - RNA, 19 nt, Artificial Sequence
  Description of Artificial Sequence: Synthetic oligonucleotide
  Sense strand starting at position 2644 of SEQ ID NO: 1885987
gaaauacagccucagcguu

SEQ ID NO: 2381243 - RNA, 19 nt, Artificial Sequence
  Description of Artificial Sequence: Synthetic oligonucleotide
  Antisense strand to SEQ ID NO: 2381242
aacgcugaggcuguauuuc

SEQ ID NO: 2381244 - RNA, 19 nt, Artificial Sequence
  Description of Artificial Sequence: Synthetic oligonucleotide
  Sense strand starting at position 2704 of SEQ ID NO: 1885987
ggugaccaccgauagguaa

SEQ ID NO: 2381245 - RNA, 19 nt, Artificial Sequence
  Description of Artificial Sequence: Synthetic oligonucleotide
  Antisense strand to SEQ ID NO: 2381244
uuaccuaucgguggucacc

SEQ ID NO: 2381246 - RNA, 19 nt, Artificial Sequence
  Description of Artificial Sequence: Synthetic oligonucleotide
  Sense strand starting at position 2706 of SEQ ID NO: 1885987
ugaccaccgauagguaauu

SEQ ID NO: 2381247 - RNA, 19 nt, Artificial Sequence
  Description of Artificial Sequence: Synthetic oligonucleotide
  Antisense strand to SEQ ID NO: 2381246
aauuaccuaucggugguca

SEQ ID NO: 2381248 - RNA, 19 nt, Artificial Sequence
  Description of Artificial Sequence: Synthetic oligonucleotide
  Sense strand starting at position 2725 of SEQ ID NO: 1885987
ggaucuccugcuggaaaga

SEQ ID NO: 2381249 - RNA, 19 nt, Artificial Sequence
  Description of Artificial Sequence: Synthetic oligonucleotide
  Antisense strand to SEQ ID NO: 2381248
ucuuuccagcaggagaucc

SEQ ID NO: 2381250 - RNA, 19 nt, Artificial Sequence
  Description of Artificial Sequence: Synthetic oligonucleotide
  Sense strand starting at position 2815 of SEQ ID NO: 1885987
acaaucuauuguguuaagu

SEQ ID NO: 2381251 - RNA, 19 nt, Artificial Sequence
  Description of Artificial Sequence: Synthetic oligonucleotide
  Antisense strand to SEQ ID NO: 2381250
acuuaacacaauagauugu

SEQ ID NO: 2381252 - RNA, 19 nt, Artificial Sequence
  Description of Artificial Sequence: Synthetic oligonucleotide
  Sense strand starting at position 3056 of SEQ ID NO: 1885987
agggaaagaucuuaagaaa

SEQ ID NO: 2381253 - RNA, 19 nt, Artificial Sequence
  Description of Artificial Sequence: Synthetic oligonucleotide
  Antisense strand to SEQ ID NO: 2381252
uuucuuaagaucuuucccu

SEQ ID NO: 2381254 - RNA, 19 nt, Artificial Sequence
  Description of Artificial Sequence: Synthetic oligonucleotide
  Sense strand starting at position 3104 of SEQ ID NO: 1885987
agucuauaacaguagguga

SEQ ID NO: 2381255 - RNA, 19 nt, Artificial Sequence
  Description of Artificial Sequence: Synthetic oligonucleotide
  Antisense strand to SEQ ID NO: 2381254
ucaccuacuguuauagacu

SEQ ID NO: 2381256 - RNA, 19 nt, Artificial Sequence
  Description of Artificial Sequence: Synthetic oligonucleotide
  Sense strand starting at position 3106 of SEQ ID NO: 1885987
ucuauaacaguaggugauu

SEQ ID NO: 2381257 - RNA, 19 nt, Artificial Sequence
  Description of Artificial Sequence: Synthetic oligonucleotide
  Antisense strand to SEQ ID NO: 2381256
aaucaccuacuguuauaga

SEQ ID NO: 2381258 - RNA, 19 nt, Artificial Sequence
  Description of Artificial Sequence: Synthetic oligonucleotide
  Sense strand starting at position 3123 of SEQ ID NO: 1885987
uuugauuacuaucucugga

SEQ ID NO: 2381259 - RNA, 19 nt, Artificial Sequence
  Description of Artificial Sequence: Synthetic oligonucleotide
  Antisense strand to SEQ ID NO: 2381258
uccagagauaguaaucaaa

SEQ ID NO: 2381260 - RNA, 19 nt, Artificial Sequence
  Description of Artificial Sequence: Synthetic oligonucleotide
  Sense strand starting at position 3125 of SEQ ID NO: 1885987
ugauuacuaucucuggaua

SEQ ID NO: 2381261 - RNA, 19 nt, Artificial Sequence
  Description of Artificial Sequence: Synthetic oligonucleotide
  Antisense strand to SEQ ID NO: 2381260
uauccagagauaguaauca

SEQ ID NO: 2381262 - RNA, 19 nt, Artificial Sequence
  Description of Artificial Sequence: Synthetic oligonucleotide
  Sense strand starting at position 3240 of SEQ ID NO: 1885987
guguuuaaccuccagguca

SEQ ID NO: 2381263 - RNA, 19 nt, Artificial Sequence
  Description of Artificial Sequence: Synthetic oligonucleotide
  Antisense strand to SEQ ID NO: 2381262
ugaccuggagguuaaacac

SEQ ID NO: 2381264 - RNA, 19 nt, Artificial Sequence
  Description of Artificial Sequence: Synthetic oligonucleotide
  Sense strand starting at position 3242 of SEQ ID NO: 1885987
guuuaaccuccaggucauu

SEQ ID NO: 2381265 - RNA, 19 nt, Artificial Sequence
  Description of Artificial Sequence: Synthetic oligonucleotide
  Antisense strand to SEQ ID NO: 2381264
aaugaccuggagguuaaac

SEQ ID NO: 2381266 - RNA, 19 nt, Artificial Sequence
  Description of Artificial Sequence: Synthetic oligonucleotide
  Sense strand starting at position 3361 of SEQ ID NO: 1885987
ggaaauccagguuggcuaa

SEQ ID NO: 2381267 - RNA, 19 nt, Artificial Sequence
  Description of Artificial Sequence: Synthetic oligonucleotide
  Antisense strand to SEQ ID NO: 2381266
uuagccaaccuggauuucc

SEQ ID NO: 2381268 - RNA, 19 nt, Artificial Sequence
  Description of Artificial Sequence: Synthetic oligonucleotide
  Sense strand starting at position 3375 of SEQ ID NO: 1885987
gcuaaugcggucuuuaugu

SEQ ID NO: 2381269 - RNA, 19 nt, Artificial Sequence
  Description of Artificial Sequence: Synthetic oligonucleotide
  Antisense strand to SEQ ID NO: 2381268
acauaaagaccgcauuagc

SEQ ID NO: 2381270 - RNA, 19 nt, Artificial Sequence
  Description of Artificial Sequence: Synthetic oligonucleotide
  Sense strand starting at position 3385 of SEQ ID NO: 1885987
ucuuuaugugaguaguuac

SEQ ID NO: 2381271 - RNA, 19 nt, Artificial Sequence
  Description of Artificial Sequence: Synthetic oligonucleotide
  Antisense strand to SEQ ID NO: 2381270
guaacuacucacauaaaga

SEQ ID NO: 2381272 - RNA, 19 nt, Artificial Sequence
  Description of Artificial Sequence: Synthetic oligonucleotide
  Sense strand starting at position 3388 of SEQ ID NO: 1885987
uuaugugaguaguuacaca

SEQ ID NO: 2381273 - RNA, 19 nt, Artificial Sequence
  Description of Artificial Sequence: Synthetic oligonucleotide
  Antisense strand to SEQ ID NO: 2381272
uguguaacuacucacauaa

SEQ ID NO: 2381274 - RNA, 19 nt, Artificial Sequence
  Description of Artificial Sequence: Synthetic oligonucleotide
  Sense strand starting at position 3490 of SEQ ID NO: 1885987
cagucugaauggucaagua

SEQ ID NO: 2381275 - RNA, 19 nt, Artificial Sequence
  Description of Artificial Sequence: Synthetic oligonucleotide
  Antisense strand to SEQ ID NO: 2381274
uacuugaccauucagacug

SEQ ID NO: 2381276 - RNA, 19 nt, Artificial Sequence
  Description of Artificial Sequence: Synthetic oligonucleotide
  Sense strand starting at position 3556 of SEQ ID NO: 1885987
ccaagaacugcuuguugac

SEQ ID NO: 2381277 - RNA, 19 nt, Artificial Sequence
  Description of Artificial Sequence: Synthetic oligonucleotide
  Antisense strand to SEQ ID NO: 2381276
gucaacaagcaguucuugg

SEQ ID NO: 2381278 - RNA, 19 nt, Artificial Sequence
  Description of Artificial Sequence: Synthetic oligonucleotide
  Sense strand starting at position 3583 of SEQ ID NO: 1885987
uguggaacauguuccacaa

SEQ ID NO: 2381279 - RNA, 19 nt, Artificial Sequence
  Description of Artificial Sequence: Synthetic oligonucleotide
  Antisense strand to SEQ ID NO: 2381278
uuguggaacauguuccaca

SEQ ID NO: 2381280 - RNA, 19 nt, Artificial Sequence
  Description of Artificial Sequence: Synthetic oligonucleotide
  Sense strand starting at position 3729 of SEQ ID NO: 1885987
ccgugucuucgaucugcaa

SEQ ID NO: 2381281 - RNA, 19 nt, Artificial Sequence
  Description of Artificial Sequence: Synthetic oligonucleotide
  Antisense strand to SEQ ID NO: 2381280
uugcagaucgaagacacgg

SEQ ID NO: 2381282 - RNA, 19 nt, Artificial Sequence
  Description of Artificial Sequence: Synthetic oligonucleotide
  Sense strand starting at position 3733 of SEQ ID NO: 1885987
gucuucgaucugcaaggaa

SEQ ID NO: 2381283 - RNA, 19 nt, Artificial Sequence
  Description of Artificial Sequence: Synthetic oligonucleotide
  Antisense strand to SEQ ID NO: 2381282
uuccuugcagaucgaagac

SEQ ID NO: 2381284 - RNA, 19 nt, Artificial Sequence
  Description of Artificial Sequence: Synthetic oligonucleotide
  Sense strand starting at position 3797 of SEQ ID NO: 1885987
aggaauuccugggacaaga

SEQ ID NO: 2381285 - RNA, 19 nt, Artificial Sequence
  Description of Artificial Sequence: Synthetic oligonucleotide
  Antisense strand to SEQ ID NO: 2381284
ucuugucccaggaauuccu

SEQ ID NO: 2381286 - RNA, 19 nt, Artificial Sequence
  Description of Artificial Sequence: Synthetic oligonucleotide
  Sense strand starting at position 3930 of SEQ ID NO: 1885987
gacagcacugggugucaau

SEQ ID NO: 2381287 - RNA, 19 nt, Artificial Sequence
  Description of Artificial Sequence: Synthetic oligonucleotide
  Antisense strand to SEQ ID NO: 2381286
auugacacccagugcuguc

SEQ ID NO: 2381288 - RNA, 19 nt, Artificial Sequence
  Description of Artificial Sequence: Synthetic oligonucleotide
  Sense strand starting at position 3944 of SEQ ID NO: 1885987
ucaauaggacagugguuaa

SEQ ID NO: 2381289 - RNA, 19 nt, Artificial Sequence
  Description of Artificial Sequence: Synthetic oligonucleotide
  Antisense strand to SEQ ID NO: 2381288
uuaaccacuguccuauuga

SEQ ID NO: 2381290 - RNA, 19 nt, Artificial Sequence
  Description of Artificial Sequence: Synthetic oligonucleotide
  Sense strand starting at position 3978 of SEQ ID NO: 1885987
gcuagauagaauuggguuu

SEQ ID NO: 2381291 - RNA, 19 nt, Artificial Sequence
  Description of Artificial Sequence: Synthetic oligonucleotide
  Antisense strand to SEQ ID NO: 2381290
aaacccaauucuaucuagc

SEQ ID NO: 2381292 - RNA, 19 nt, Artificial Sequence
  Description of Artificial Sequence: Synthetic oligonucleotide
  Sense strand starting at position 3979 of SEQ ID NO: 1885987
cuagauagaauuggguuua

SEQ ID NO: 2381293 - RNA, 19 nt, Artificial Sequence
  Description of Artificial Sequence: Synthetic oligonucleotide
  Antisense strand to SEQ ID NO: 2381292
uaaacccaauucuaucuag

SEQ ID NO: 2381294 - RNA, 19 nt, Artificial Sequence
  Description of Artificial Sequence: Synthetic oligonucleotide
  Sense strand starting at position 121 of SEQ ID NO: 1885988
gagagaccuugucucuaug

SEQ ID NO: 2381295 - RNA, 19 nt, Artificial Sequence
  Description of Artificial Sequence: Synthetic oligonucleotide
  Antisense strand to SEQ ID NO: 2381294
cauagagacaaggucucuc

SEQ ID NO: 2381296 - RNA, 19 nt, Artificial Sequence
  Description of Artificial Sequence: Synthetic oligonucleotide
  Sense strand starting at position 198 of SEQ ID NO: 1885988
aauuguauauuaggagaag

SEQ ID NO: 2381297 - RNA, 19 nt, Artificial Sequence
  Description of Artificial Sequence: Synthetic oligonucleotide
  Antisense strand to SEQ ID NO: 2381296
cuucuccuaauauacaauu

SEQ ID NO: 2381298 - RNA, 19 nt, Artificial Sequence
  Description of Artificial Sequence: Synthetic oligonucleotide
  Sense strand starting at position 266 of SEQ ID NO: 1885988
ugccuaugaguagagucau

SEQ ID NO: 2381299 - RNA, 19 nt, Artificial Sequence
  Description of Artificial Sequence: Synthetic oligonucleotide
  Antisense strand to SEQ ID NO: 2381298
augacucuacucauaggca

SEQ ID NO: 2381300 - RNA, 19 nt, Artificial Sequence
  Description of Artificial Sequence: Synthetic oligonucleotide
  Sense strand starting at position 272 of SEQ ID NO: 1885988
ugaguagagucaucauuau

SEQ ID NO: 2381301 - RNA, 19 nt, Artificial Sequence
  Description of Artificial Sequence: Synthetic oligonucleotide
  Antisense strand to SEQ ID NO: 2381300
auaaugaugacucuacuca

SEQ ID NO: 2381302 - RNA, 19 nt, Artificial Sequence
  Description of Artificial Sequence: Synthetic oligonucleotide
  Sense strand starting at position 278 of SEQ ID NO: 1885988
gagucaucauuaugucaga

SEQ ID NO: 2381303 - RNA, 19 nt, Artificial Sequence
  Description of Artificial Sequence: Synthetic oligonucleotide
  Antisense strand to SEQ ID NO: 2381302
ucugacauaaugaugacuc

SEQ ID NO: 2381304 - RNA, 19 nt, Artificial Sequence
  Description of Artificial Sequence: Synthetic oligonucleotide
  Sense strand starting at position 279 of SEQ ID NO: 1885988
agucaucauuaugucagaa

SEQ ID NO: 2381305 - RNA, 19 nt, Artificial Sequence
  Description of Artificial Sequence: Synthetic oligonucleotide
  Antisense strand to SEQ ID NO: 2381304
uucugacauaaugaugacu

SEQ ID NO: 2381306 - RNA, 19 nt, Artificial Sequence
  Description of Artificial Sequence: Synthetic oligonucleotide
  Sense strand starting at position 306 of SEQ ID NO: 1885988
gauaauuauuuaggacugu

SEQ ID NO: 2381307 - RNA, 19 nt, Artificial Sequence
  Description of Artificial Sequence: Synthetic oligonucleotide
  Antisense strand to SEQ ID NO: 2381306
acaguccuaaauaauuauc

SEQ ID NO: 2381308 - RNA, 19 nt, Artificial Sequence
  Description of Artificial Sequence: Synthetic oligonucleotide
  Sense strand starting at position 336 of SEQ ID NO: 1885988
guauguaugcuauaacuac

SEQ ID NO: 2381309 - RNA, 19 nt, Artificial Sequence
  Description of Artificial Sequence: Synthetic oligonucleotide
  Antisense strand to SEQ ID NO: 2381308
guaguuauagcauacauac

SEQ ID NO: 2381310 - RNA, 19 nt, Artificial Sequence
  Description of Artificial Sequence: Synthetic oligonucleotide
  Sense strand starting at position 549 of SEQ ID NO: 1885988
aaaggaaauuuaugcugua

SEQ ID NO: 2381311 - RNA, 19 nt, Artificial Sequence
  Description of Artificial Sequence: Synthetic oligonucleotide
  Antisense strand to SEQ ID NO: 2381310
uacagcauaaauuuccuuu

SEQ ID NO: 2381312 - RNA, 19 nt, Artificial Sequence
  Description of Artificial Sequence: Synthetic oligonucleotide
  Sense strand starting at position 552 of SEQ ID NO: 1885988
ggaaauuuaugcuguauac

SEQ ID NO: 2381313 - RNA, 19 nt, Artificial Sequence
  Description of Artificial Sequence: Synthetic oligonucleotide
  Antisense strand to SEQ ID NO: 2381312
guauacagcauaaauuucc

SEQ ID NO: 2381314 - RNA, 19 nt, Artificial Sequence
  Description of Artificial Sequence: Synthetic oligonucleotide
  Sense strand starting at position 725 of SEQ ID NO: 1885988
ccuuaauacuauccuggga

SEQ ID NO: 2381315 - RNA, 19 nt, Artificial Sequence
  Description of Artificial Sequence: Synthetic oligonucleotide
  Antisense strand to SEQ ID NO: 2381314
ucccaggauaguauuaagg

SEQ ID NO: 2381316 - RNA, 19 nt, Artificial Sequence
  Description of Artificial Sequence: Synthetic oligonucleotide
  Sense strand starting at position 730 of SEQ ID NO: 1885988
auacuauccugggagcaaa

SEQ ID NO: 2381317 - RNA, 19 nt, Artificial Sequence
  Description of Artificial Sequence: Synthetic oligonucleotide
  Antisense strand to SEQ ID NO: 2381316
uuugcucccaggauaguau

SEQ ID NO: 2381318 - RNA, 19 nt, Artificial Sequence
  Description of Artificial Sequence: Synthetic oligonucleotide
  Sense strand starting at position 815 of SEQ ID NO: 1885988
cguaauuccuuucugagga

SEQ ID NO: 2381319 - RNA, 19 nt, Artificial Sequence
  Description of Artificial Sequence: Synthetic oligonucleotide
  Antisense strand to SEQ ID NO: 2381318
uccucagaaaggaauuacg

SEQ ID NO: 2381320 - RNA, 19 nt, Artificial Sequence
  Description of Artificial Sequence: Synthetic oligonucleotide
  Sense strand starting at position 944 of SEQ ID NO: 1885988
acguaauauucccagagga

SEQ ID NO: 2381321 - RNA, 19 nt, Artificial Sequence
  Description of Artificial Sequence: Synthetic oligonucleotide
  Antisense strand to SEQ ID NO: 2381320
uccucugggaauauuacgu

SEQ ID NO: 2381322 - RNA, 19 nt, Artificial Sequence
  Description of Artificial Sequence: Synthetic oligonucleotide
  Sense strand starting at position 1112 of SEQ ID NO: 1885988
gucuuaugauaucacguuu

SEQ ID NO: 2381323 - RNA, 19 nt, Artificial Sequence
  Description of Artificial Sequence: Synthetic oligonucleotide
  Antisense strand to SEQ ID NO: 2381322
aaacgugauaucauaagac

SEQ ID NO: 2381324 - RNA, 19 nt, Artificial Sequence
  Description of Artificial Sequence: Synthetic oligonucleotide
  Sense strand starting at position 1261 of SEQ ID NO: 1885988
cuaggauuacacgagugca

SEQ ID NO: 2381325 - RNA, 19 nt, Artificial Sequence
  Description of Artificial Sequence: Synthetic oligonucleotide
  Antisense strand to SEQ ID NO: 2381324
ugcacucguguaauccuag

SEQ ID NO: 2381326 - RNA, 19 nt, Artificial Sequence
  Description of Artificial Sequence: Synthetic oligonucleotide
  Sense strand starting at position 1673 of SEQ ID NO: 1885988
ggauuaagcagacgauaau

SEQ ID NO: 2381327 - RNA, 19 nt, Artificial Sequence
  Description of Artificial Sequence: Synthetic oligonucleotide
  Antisense strand to SEQ ID NO: 2381326
auuaucgucugcuuaaucc

SEQ ID NO: 2381328 - RNA, 19 nt, Artificial Sequence
  Description of Artificial Sequence: Synthetic oligonucleotide
  Sense strand starting at position 2239 of SEQ ID NO: 1885988
aaagcagaugucuaaagca

SEQ ID NO: 2381329 - RNA, 19 nt, Artificial Sequence
  Description of Artificial Sequence: Synthetic oligonucleotide
  Antisense strand to SEQ ID NO: 2381328
ugcuuuagacaucugcuuu

SEQ ID NO: 2381330 - RNA, 19 nt, Artificial Sequence
  Description of Artificial Sequence: Synthetic oligonucleotide
  Sense strand starting at position 2255 of SEQ ID NO: 1885988
gcagaauugucccacaacc

SEQ ID NO: 2381331 - RNA, 19 nt, Artificial Sequence
  Description of Artificial Sequence: Synthetic oligonucleotide
  Antisense strand to SEQ ID NO: 2381330
gguugugggacaauucugc

SEQ ID NO: 2381332 - RNA, 19 nt, Artificial Sequence
  Description of Artificial Sequence: Synthetic oligonucleotide
  Sense strand starting at position 2289 of SEQ ID NO: 1885988
uguaaaguugaauacgacu

SEQ ID NO: 2381333 - RNA, 19 nt, Artificial Sequence
  Description of Artificial Sequence: Synthetic oligonucleotide
  Antisense strand to SEQ ID NO: 2381332
agucguauucaacuuuaca

SEQ ID NO: 2381334 - RNA, 19 nt, Artificial Sequence
  Description of Artificial Sequence: Synthetic oligonucleotide
  Sense strand starting at position 2295 of SEQ ID NO: 1885988
guugaauacgacugaagua

SEQ ID NO: 2381335 - RNA, 19 nt, Artificial Sequence
  Description of Artificial Sequence: Synthetic oligonucleotide
  Antisense strand to SEQ ID NO: 2381334
uacuucagucguauucaac

SEQ ID NO: 2381336 - RNA, 19 nt, Artificial Sequence
  Description of Artificial Sequence: Synthetic oligonucleotide
  Sense strand starting at position 2323 of SEQ ID NO: 1885988
agagccuuuguauaaauaa

SEQ ID NO: 2381337 - RNA, 19 nt, Artificial Sequence
  Description of Artificial Sequence: Synthetic oligonucleotide
  Antisense strand to SEQ ID NO: 2381336
uuauuuauacaaaggcucu

SEQ ID NO: 2381338 - RNA, 19 nt, Artificial Sequence
  Description of Artificial Sequence: Synthetic oligonucleotide
  Sense strand starting at position 2524 of SEQ ID NO: 1885988
uuuggcugaucucaaucuu

SEQ ID NO: 2381339 - RNA, 19 nt, Artificial Sequence
  Description of Artificial Sequence: Synthetic oligonucleotide
  Antisense strand to SEQ ID NO: 2381338
aagauugagaucagccaaa

SEQ ID NO: 2381340 - RNA, 19 nt, Artificial Sequence
  Description of Artificial Sequence: Synthetic oligonucleotide
  Sense strand starting at position 2610 of SEQ ID NO: 1885988
agguaauaauucucuaggu

SEQ ID NO: 2381341 - RNA, 19 nt, Artificial Sequence
  Description of Artificial Sequence: Synthetic oligonucleotide
  Antisense strand to SEQ ID NO: 2381340
accuagagaauuauuaccu

SEQ ID NO: 2381342 - RNA, 19 nt, Artificial Sequence
  Description of Artificial Sequence: Synthetic oligonucleotide
  Sense strand starting at position 2611 of SEQ ID NO: 1885988
gguaauaauucucuagguu

SEQ ID NO: 2381343 - RNA, 19 nt, Artificial Sequence
  Description of Artificial Sequence: Synthetic oligonucleotide
  Antisense strand to SEQ ID NO: 2381342
aaccuagagaauuauuacc

SEQ ID NO: 2381344 - RNA, 19 nt, Artificial Sequence
  Description of Artificial Sequence: Synthetic oligonucleotide
  Sense strand starting at position 2612 of SEQ ID NO: 1885988
guaauaauucucuagguuu

SEQ ID NO: 2381345 - RNA, 19 nt, Artificial Sequence
  Description of Artificial Sequence: Synthetic oligonucleotide
  Antisense strand to SEQ ID NO: 2381344
aaaccuagagaauuauuac

SEQ ID NO: 2381346 - RNA, 19 nt, Artificial Sequence
  Description of Artificial Sequence: Synthetic oligonucleotide
  Sense strand starting at position 2730 of SEQ ID NO: 1885988
cgguaauuagguugacuga

SEQ ID NO: 2381347 - RNA, 19 nt, Artificial Sequence
  Description of Artificial Sequence: Synthetic oligonucleotide
  Antisense strand to SEQ ID NO: 2381346
ucagucaaccuaauuaccg

SEQ ID NO: 2381348 - RNA, 19 nt, Artificial Sequence
  Description of Artificial Sequence: Synthetic oligonucleotide
  Sense strand starting at position 2731 of SEQ ID NO: 1885988
gguaauuagguugacugau

SEQ ID NO: 2381349 - RNA, 19 nt, Artificial Sequence
  Description of Artificial Sequence: Synthetic oligonucleotide
  Antisense strand to SEQ ID NO: 2381348
aucagucaaccuaauuacc

SEQ ID NO: 2381350 - RNA, 19 nt, Artificial Sequence
  Description of Artificial Sequence: Synthetic oligonucleotide
  Sense strand starting at position 2737 of SEQ ID NO: 1885988
uagguugacugauacaaac

SEQ ID NO: 2381351 - RNA, 19 nt, Artificial Sequence
  Description of Artificial Sequence: Synthetic oligonucleotide
  Antisense strand to SEQ ID NO: 2381350
guuuguaucagucaaccua

SEQ ID NO: 2381352 - RNA, 19 nt, Artificial Sequence
  Description of Artificial Sequence: Synthetic oligonucleotide
  Sense strand starting at position 2754 of SEQ ID NO: 1885988
acccuuagcuaguuuauuu

SEQ ID NO: 2381353 - RNA, 19 nt, Artificial Sequence
  Description of Artificial Sequence: Synthetic oligonucleotide
  Antisense strand to SEQ ID NO: 2381352
aaauaaacuagcuaagggu

SEQ ID NO: 2381354 - RNA, 19 nt, Artificial Sequence
  Description of Artificial Sequence: Synthetic oligonucleotide
  Sense strand starting at position 3212 of SEQ ID NO: 1885988
agcccagacucaugucaac

SEQ ID NO: 2381355 - RNA, 19 nt, Artificial Sequence
  Description of Artificial Sequence: Synthetic oligonucleotide
  Antisense strand to SEQ ID NO: 2381354
guugacaugagucugggcu

SEQ ID NO: 2381356 - RNA, 19 nt, Artificial Sequence
  Description of Artificial Sequence: Synthetic oligonucleotide
  Sense strand starting at position 3520 of SEQ ID NO: 1885988
auugauaugucuccuuaua

SEQ ID NO: 2381357 - RNA, 19 nt, Artificial Sequence
  Description of Artificial Sequence: Synthetic oligonucleotide
  Antisense strand to SEQ ID NO: 2381356
uauaaggagacauaucaau

SEQ ID NO: 2381358 - RNA, 19 nt, Artificial Sequence
  Description of Artificial Sequence: Synthetic oligonucleotide
  Sense strand starting at position 3522 of SEQ ID NO: 1885988
ugauaugucuccuuauaug

SEQ ID NO: 2381359 - RNA, 19 nt, Artificial Sequence
  Description of Artificial Sequence: Synthetic oligonucleotide
  Antisense strand to SEQ ID NO: 2381358
cauauaaggagacauauca

SEQ ID NO: 2381360 - RNA, 19 nt, Artificial Sequence
  Description of Artificial Sequence: Synthetic oligonucleotide
  Sense strand starting at position 3725 of SEQ ID NO: 1885988
uuggcuuacucuuuagaua

SEQ ID NO: 2381361 - RNA, 19 nt, Artificial Sequence
  Description of Artificial Sequence: Synthetic oligonucleotide
  Antisense strand to SEQ ID NO: 2381360
uaucuaaagaguaagccaa

SEQ ID NO: 2381362 - RNA, 19 nt, Artificial Sequence
  Description of Artificial Sequence: Synthetic oligonucleotide
  Sense strand starting at position 3726 of SEQ ID NO: 1885988
uggcuuacucuuuagauaa

SEQ ID NO: 2381363 - RNA, 19 nt, Artificial Sequence
  Description of Artificial Sequence: Synthetic oligonucleotide
  Antisense strand to SEQ ID NO: 2381362
uuaucuaaagaguaagcca

SEQ ID NO: 2381364 - RNA, 19 nt, Artificial Sequence
  Description of Artificial Sequence: Synthetic oligonucleotide
  Sense strand starting at position 3871 of SEQ ID NO: 1885988
cugacauucugguugggaa

SEQ ID NO: 2381365 - RNA, 19 nt, Artificial Sequence
  Description of Artificial Sequence: Synthetic oligonucleotide
  Antisense strand to SEQ ID NO: 2381364
uucccaaccagaaugucag

SEQ ID NO: 2381366 - RNA, 19 nt, Artificial Sequence
  Description of Artificial Sequence: Synthetic oligonucleotide
  Sense strand starting at position 3872 of SEQ ID NO: 1885988
ugacauucugguugggaag

SEQ ID NO: 2381367 - RNA, 19 nt, Artificial Sequence
  Description of Artificial Sequence: Synthetic oligonucleotide
  Antisense strand to SEQ ID NO: 2381366
cuucccaaccagaauguca

SEQ ID NO: 2381368 - RNA, 19 nt, Artificial Sequence
  Description of Artificial Sequence: Synthetic oligonucleotide
  Sense strand starting at position 3873 of SEQ ID NO: 1885988
gacauucugguugggaaga

SEQ ID NO: 2381369 - RNA, 19 nt, Artificial Sequence
  Description of Artificial Sequence: Synthetic oligonucleotide
  Antisense strand to SEQ ID NO: 2381368
ucuucccaaccagaauguc

SEQ ID NO: 2381370 - RNA, 19 nt, Artificial Sequence
  Description of Artificial Sequence: Synthetic oligonucleotide
  Sense strand starting at position 3874 of SEQ ID NO: 1885988
acauucugguugggaagau

SEQ ID NO: 2381371 - RNA, 19 nt, Artificial Sequence
  Description of Artificial Sequence: Synthetic oligonucleotide
  Antisense strand to SEQ ID NO: 2381370
aucuucccaaccagaaugu

SEQ ID NO: 2381372 - RNA, 19 nt, Artificial Sequence
  Description of Artificial Sequence: Synthetic oligonucleotide
  Sense strand starting at position 112 of SEQ ID NO: 1885990
guccuaacacuuugggagu

SEQ ID NO: 2381373 - RNA, 19 nt, Artificial Sequence
  Description of Artificial Sequence: Synthetic oligonucleotide
  Antisense strand to SEQ ID NO: 2381372
acucccaaaguguuaggac

SEQ ID NO: 2381374 - RNA, 19 nt, Artificial Sequence
  Description of Artificial Sequence: Synthetic oligonucleotide
  Sense strand starting at position 334 of SEQ ID NO: 1885990
aauugccuaugaguagauu

SEQ ID NO: 2381375 - RNA, 19 nt, Artificial Sequence
  Description of Artificial Sequence: Synthetic oligonucleotide
  Antisense strand to SEQ ID NO: 2381374
aaucuacucauaggcaauu

SEQ ID NO: 2381376 - RNA, 19 nt, Artificial Sequence
  Description of Artificial Sequence: Synthetic oligonucleotide
  Sense strand starting at position 667 of SEQ ID NO: 1885990
aaggcacuuguauaugaau

SEQ ID NO: 2381377 - RNA, 19 nt, Artificial Sequence
  Description of Artificial Sequence: Synthetic oligonucleotide
  Antisense strand to SEQ ID NO: 2381376
auucauauacaagugccuu

SEQ ID NO: 2381378 - RNA, 19 nt, Artificial Sequence
  Description of Artificial Sequence: Synthetic oligonucleotide
  Sense strand starting at position 670 of SEQ ID NO: 1885990
gcacuuguauaugaauaag

SEQ ID NO: 2381379 - RNA, 19 nt, Artificial Sequence
  Description of Artificial Sequence: Synthetic oligonucleotide
  Antisense strand to SEQ ID NO: 2381378
cuuauucauauacaagugc

SEQ ID NO: 2381380 - RNA, 19 nt, Artificial Sequence
  Description of Artificial Sequence: Synthetic oligonucleotide
  Sense strand starting at position 1997 of SEQ ID NO: 1885990
auccauugccaaggaaaga

SEQ ID NO: 2381381 - RNA, 19 nt, Artificial Sequence
  Description of Artificial Sequence: Synthetic oligonucleotide
  Antisense strand to SEQ ID NO: 2381380
ucuuuccuuggcaauggau

SEQ ID NO: 2381382 - RNA, 19 nt, Artificial Sequence
  Description of Artificial Sequence: Synthetic oligonucleotide
  Sense strand starting at position 2024 of SEQ ID NO: 1885990
aaaguaugaugaugagaaa

SEQ ID NO: 2381383 - RNA, 19 nt, Artificial Sequence
  Description of Artificial Sequence: Synthetic oligonucleotide
  Antisense strand to SEQ ID NO: 2381382
uuucucaucaucauacuuu

SEQ ID NO: 2381384 - RNA, 19 nt, Artificial Sequence
  Description of Artificial Sequence: Synthetic oligonucleotide
  Sense strand starting at position 3583 of SEQ ID NO: 1885990
auaaaucaaugaggacaga

SEQ ID NO: 2381385 - RNA, 19 nt, Artificial Sequence
  Description of Artificial Sequence: Synthetic oligonucleotide
  Antisense strand to SEQ ID NO: 2381384
ucuguccucauugauuuau

SEQ ID NO: 2381386 - RNA, 19 nt, Artificial Sequence
  Description of Artificial Sequence: Synthetic oligonucleotide
  Sense strand starting at position 287 of SEQ ID NO: 1885989
cuuguagucuacuguggaa

SEQ ID NO: 2381387 - RNA, 19 nt, Artificial Sequence
  Description of Artificial Sequence: Synthetic oligonucleotide
  Antisense strand to SEQ ID NO: 2381386
uuccacaguagacuacaag

SEQ ID NO: 2381388 - RNA, 19 nt, Artificial Sequence
  Description of Artificial Sequence: Synthetic oligonucleotide
  Sense strand starting at position 289 of SEQ ID NO: 1885989
uguagucuacuguggaaag

SEQ ID NO: 2381389 - RNA, 19 nt, Artificial Sequence
  Description of Artificial Sequence: Synthetic oligonucleotide
  Antisense strand to SEQ ID NO: 2381388
cuuuccacaguagacuaca

SEQ ID NO: 2381390 - RNA, 19 nt, Artificial Sequence
  Description of Artificial Sequence: Synthetic oligonucleotide
  Sense strand starting at position 290 of SEQ ID NO: 1885989
guagucuacuguggaaaga

SEQ ID NO: 2381391 - RNA, 19 nt, Artificial Sequence
  Description of Artificial Sequence: Synthetic oligonucleotide
  Antisense strand to SEQ ID NO: 2381390
ucuuuccacaguagacuac

SEQ ID NO: 2381392 - RNA, 19 nt, Artificial Sequence
  Description of Artificial Sequence: Synthetic oligonucleotide
  Sense strand starting at position 409 of SEQ ID NO: 1885989
cuauaaguuggucaucuca

SEQ ID NO: 2381393 - RNA, 19 nt, Artificial Sequence
  Description of Artificial Sequence: Synthetic oligonucleotide
  Antisense strand to SEQ ID NO: 2381392
ugagaugaccaacuuauag

SEQ ID NO: 2381394 - RNA, 19 nt, Artificial Sequence
  Description of Artificial Sequence: Synthetic oligonucleotide
  Sense strand starting at position 411 of SEQ ID NO: 1885989
auaaguuggucaucucaau

SEQ ID NO: 2381395 - RNA, 19 nt, Artificial Sequence
  Description of Artificial Sequence: Synthetic oligonucleotide
  Antisense strand to SEQ ID NO: 2381394
auugagaugaccaacuuau

SEQ ID NO: 2381396 - RNA, 19 nt, Artificial Sequence
  Description of Artificial Sequence: Synthetic oligonucleotide
  Sense strand starting at position 469 of SEQ ID NO: 1885989
gcugguggcuacuauacua

SEQ ID NO: 2381397 - RNA, 19 nt, Artificial Sequence
  Description of Artificial Sequence: Synthetic oligonucleotide
  Antisense strand to SEQ ID NO: 2381396
uaguauaguagccaccagc

SEQ ID NO: 2381398 - RNA, 19 nt, Artificial Sequence
  Description of Artificial Sequence: Synthetic oligonucleotide
  Sense strand starting at position 493 of SEQ ID NO: 1885989
cgcaacaaaucugaaacua

SEQ ID NO: 2381399 - RNA, 19 nt, Artificial Sequence
  Description of Artificial Sequence: Synthetic oligonucleotide
  Antisense strand to SEQ ID NO: 2381398
uaguuucagauuuguugcg

SEQ ID NO: 2381400 - RNA, 19 nt, Artificial Sequence
  Description of Artificial Sequence: Synthetic oligonucleotide
  Sense strand starting at position 1006 of SEQ ID NO: 1885989
aaauuagacuuaguggcau

SEQ ID NO: 2381401 - RNA, 19 nt, Artificial Sequence
  Description of Artificial Sequence: Synthetic oligonucleotide
  Antisense strand to SEQ ID NO: 2381400
augccacuaagucuaauuu

SEQ ID NO: 2381402 - RNA, 19 nt, Artificial Sequence
  Description of Artificial Sequence: Synthetic oligonucleotide
  Sense strand starting at position 1137 of SEQ ID NO: 1885989
gggauacuaucccagcaau

SEQ ID NO: 2381403 - RNA, 19 nt, Artificial Sequence
  Description of Artificial Sequence: Synthetic oligonucleotide
  Antisense strand to SEQ ID NO: 2381402
auugcugggauaguauccc

SEQ ID NO: 2381404 - RNA, 19 nt, Artificial Sequence
  Description of Artificial Sequence: Synthetic oligonucleotide
  Sense strand starting at position 1180 of SEQ ID NO: 1885989
agaggaaaguuuccaauuc

SEQ ID NO: 2381405 - RNA, 19 nt, Artificial Sequence
  Description of Artificial Sequence: Synthetic oligonucleotide
  Antisense strand to SEQ ID NO: 2381404
gaauuggaaacuuuccucu

SEQ ID NO: 2381406 - RNA, 19 nt, Artificial Sequence
  Description of Artificial Sequence: Synthetic oligonucleotide
  Sense strand starting at position 1726 of SEQ ID NO: 1885989
gucuguugaggugauaguu

SEQ ID NO: 2381407 - RNA, 19 nt, Artificial Sequence
  Description of Artificial Sequence: Synthetic oligonucleotide
  Antisense strand to SEQ ID NO: 2381406
aacuaucaccucaacagac

SEQ ID NO: 2381408 - RNA, 19 nt, Artificial Sequence
  Description of Artificial Sequence: Synthetic oligonucleotide
  Sense strand starting at position 1805 of SEQ ID NO: 1885989
guucuaaauuacggaauca

SEQ ID NO: 2381409 - RNA, 19 nt, Artificial Sequence
  Description of Artificial Sequence: Synthetic oligonucleotide
  Antisense strand to SEQ ID NO: 2381408
ugauuccguaauuuagaac

SEQ ID NO: 2381410 - RNA, 19 nt, Artificial Sequence
  Description of Artificial Sequence: Synthetic oligonucleotide
  Sense strand starting at position 2027 of SEQ ID NO: 1885989
cgaagagcauuagauguaa

SEQ ID NO: 2381411 - RNA, 19 nt, Artificial Sequence
  Description of Artificial Sequence: Synthetic oligonucleotide
  Antisense strand to SEQ ID NO: 2381410
uuacaucuaaugcucuucg

SEQ ID NO: 2381412 - RNA, 19 nt, Artificial Sequence
  Description of Artificial Sequence: Synthetic oligonucleotide
  Sense strand starting at position 2039 of SEQ ID NO: 1885989
gauguaagacugugaaaca

SEQ ID NO: 2381413 - RNA, 19 nt, Artificial Sequence
  Description of Artificial Sequence: Synthetic oligonucleotide
  Antisense strand to SEQ ID NO: 2381412
uguuucacagucuuacauc

SEQ ID NO: 2381414 - RNA, 19 nt, Artificial Sequence
  Description of Artificial Sequence: Synthetic oligonucleotide
  Sense strand starting at position 2040 of SEQ ID NO: 1885989
auguaagacugugaaacaa

SEQ ID NO: 2381415 - RNA, 19 nt, Artificial Sequence
  Description of Artificial Sequence: Synthetic oligonucleotide
  Antisense strand to SEQ ID NO: 2381414
uuguuucacagucuuacau

SEQ ID NO: 2381416 - RNA, 19 nt, Artificial Sequence
  Description of Artificial Sequence: Synthetic oligonucleotide
  Sense strand starting at position 2154 of SEQ ID NO: 1885989
cuguaaugacugcggcaau

SEQ ID NO: 2381417 - RNA, 19 nt, Artificial Sequence
  Description of Artificial Sequence: Synthetic oligonucleotide
  Antisense strand to SEQ ID NO: 2381416
auugccgcagucauuacag

SEQ ID NO: 2381418 - RNA, 19 nt, Artificial Sequence
  Description of Artificial Sequence: Synthetic oligonucleotide
  Sense strand starting at position 2155 of SEQ ID NO: 1885989
uguaaugacugcggcaauu

SEQ ID NO: 2381419 - RNA, 19 nt, Artificial Sequence
  Description of Artificial Sequence: Synthetic oligonucleotide
  Antisense strand to SEQ ID NO: 2381418
aauugccgcagucauuaca

SEQ ID NO: 2381420 - RNA, 19 nt, Artificial Sequence
  Description of Artificial Sequence: Synthetic oligonucleotide
  Sense strand starting at position 2168 of SEQ ID NO: 1885989
gcaauucugcaauagcaac

SEQ ID NO: 2381421 - RNA, 19 nt, Artificial Sequence
  Description of Artificial Sequence: Synthetic oligonucleotide
  Antisense strand to SEQ ID NO: 2381420
guugcuauugcagaauugc

SEQ ID NO: 2381422 - RNA, 19 nt, Artificial Sequence
  Description of Artificial Sequence: Synthetic oligonucleotide
  Sense strand starting at position 2321 of SEQ ID NO: 1885989
uucuaauuguuaguagauc

SEQ ID NO: 2381423 - RNA, 19 nt, Artificial Sequence
  Description of Artificial Sequence: Synthetic oligonucleotide
  Antisense strand to SEQ ID NO: 2381422
gaucuacuaacaauuagaa

SEQ ID NO: 2381424 - RNA, 19 nt, Artificial Sequence
  Description of Artificial Sequence: Synthetic oligonucleotide
  Sense strand starting at position 2322 of SEQ ID NO: 1885989
ucuaauuguuaguagauca

SEQ ID NO: 2381425 - RNA, 19 nt, Artificial Sequence
  Description of Artificial Sequence: Synthetic oligonucleotide
  Antisense strand to SEQ ID NO: 2381424
ugaucuacuaacaauuaga

SEQ ID NO: 2381426 - RNA, 19 nt, Artificial Sequence
  Description of Artificial Sequence: Synthetic oligonucleotide
  Sense strand starting at position 2337 of SEQ ID NO: 1885989
aucagugaguuucuaugua

SEQ ID NO: 2381427 - RNA, 19 nt, Artificial Sequence
  Description of Artificial Sequence: Synthetic oligonucleotide
  Antisense strand to SEQ ID NO: 2381426
uacauagaaacucacugau

SEQ ID NO: 2381428 - RNA, 19 nt, Artificial Sequence
  Description of Artificial Sequence: Synthetic oligonucleotide
  Sense strand starting at position 2341 of SEQ ID NO: 1885989
gugaguuucuauguaagug

SEQ ID NO: 2381429 - RNA, 19 nt, Artificial Sequence
  Description of Artificial Sequence: Synthetic oligonucleotide
  Antisense strand to SEQ ID NO: 2381428
cacuuacauagaaacucac

SEQ ID NO: 2381430 - RNA, 19 nt, Artificial Sequence
  Description of Artificial Sequence: Synthetic oligonucleotide
  Sense strand starting at position 2345 of SEQ ID NO: 1885989
guuucuauguaagugcuaa

SEQ ID NO: 2381431 - RNA, 19 nt, Artificial Sequence
  Description of Artificial Sequence: Synthetic oligonucleotide
  Antisense strand to SEQ ID NO: 2381430
uuagcacuuacauagaaac

SEQ ID NO: 2381432 - RNA, 19 nt, Artificial Sequence
  Description of Artificial Sequence: Synthetic oligonucleotide
  Sense strand starting at position 2349 of SEQ ID NO: 1885989
cuauguaagugcuaaauau

SEQ ID NO: 2381433 - RNA, 19 nt, Artificial Sequence
  Description of Artificial Sequence: Synthetic oligonucleotide
  Antisense strand to SEQ ID NO: 2381432
auauuuagcacuuacauag

SEQ ID NO: 2381434 - RNA, 19 nt, Artificial Sequence
  Description of Artificial Sequence: Synthetic oligonucleotide
  Sense strand starting at position 2382 of SEQ ID NO: 1885989
accuguaugcauuaaguuu

SEQ ID NO: 2381435 - RNA, 19 nt, Artificial Sequence
  Description of Artificial Sequence: Synthetic oligonucleotide
  Antisense strand to SEQ ID NO: 2381434
aaacuuaaugcauacaggu

SEQ ID NO: 2381436 - RNA, 19 nt, Artificial Sequence
  Description of Artificial Sequence: Synthetic oligonucleotide
  Sense strand starting at position 2459 of SEQ ID NO: 1885989
gucuuaaugagguguuccu

SEQ ID NO: 2381437 - RNA, 19 nt, Artificial Sequence
  Description of Artificial Sequence: Synthetic oligonucleotide
  Antisense strand to SEQ ID NO: 2381436
aggaacaccucauuaagac

SEQ ID NO: 2381438 - RNA, 19 nt, Artificial Sequence
  Description of Artificial Sequence: Synthetic oligonucleotide
  Sense strand starting at position 2474 of SEQ ID NO: 1885989
uccuuuaguguccagcaga

SEQ ID NO: 2381439 - RNA, 19 nt, Artificial Sequence
  Description of Artificial Sequence: Synthetic oligonucleotide
  Antisense strand to SEQ ID NO: 2381438
ucugcuggacacuaaagga

SEQ ID NO: 2381440 - RNA, 19 nt, Artificial Sequence
  Description of Artificial Sequence: Synthetic oligonucleotide
  Sense strand starting at position 2648 of SEQ ID NO: 1885989
ggguaaucaguauguaccu

SEQ ID NO: 2381441 - RNA, 19 nt, Artificial Sequence
  Description of Artificial Sequence: Synthetic oligonucleotide
  Antisense strand to SEQ ID NO: 2381440
agguacauacugauuaccc

SEQ ID NO: 2381442 - RNA, 19 nt, Artificial Sequence
  Description of Artificial Sequence: Synthetic oligonucleotide
  Sense strand starting at position 2649 of SEQ ID NO: 1885989
gguaaucaguauguaccuu

SEQ ID NO: 2381443 - RNA, 19 nt, Artificial Sequence
  Description of Artificial Sequence: Synthetic oligonucleotide
  Antisense strand to SEQ ID NO: 2381442
aagguacauacugauuacc

SEQ ID NO: 2381444 - RNA, 19 nt, Artificial Sequence
  Description of Artificial Sequence: Synthetic oligonucleotide
  Sense strand starting at position 3095 of SEQ ID NO: 1885989
acucuaacauacggaaaua

SEQ ID NO: 2381445 - RNA, 19 nt, Artificial Sequence
  Description of Artificial Sequence: Synthetic oligonucleotide
  Antisense strand to SEQ ID NO: 2381444
uauuuccguauguuagagu

SEQ ID NO: 2381446 - RNA, 19 nt, Artificial Sequence
  Description of Artificial Sequence: Synthetic oligonucleotide
  Sense strand starting at position 3580 of SEQ ID NO: 1885989
cuaacaacaugucaguuau

SEQ ID NO: 2381447 - RNA, 19 nt, Artificial Sequence
  Description of Artificial Sequence: Synthetic oligonucleotide
  Antisense strand to SEQ ID NO: 2381446
auaacugacauguuguuag

SEQ ID NO: 2381448 - RNA, 19 nt, Artificial Sequence
  Description of Artificial Sequence: Synthetic oligonucleotide
  Sense strand starting at position 133 of SEQ ID NO: 1885991
gcgagaaucucauccucag

SEQ ID NO: 2381449 - RNA, 19 nt, Artificial Sequence
  Description of Artificial Sequence: Synthetic oligonucleotide
  Antisense strand to SEQ ID NO: 2381448
cugaggaugagauucucgc

SEQ ID NO: 2381450 - RNA, 19 nt, Artificial Sequence
  Description of Artificial Sequence: Synthetic oligonucleotide
  Sense strand starting at position 185 of SEQ ID NO: 1885991
ugagucacucccugaaaca

SEQ ID NO: 2381451 - RNA, 19 nt, Artificial Sequence
  Description of Artificial Sequence: Synthetic oligonucleotide
  Antisense strand to SEQ ID NO: 2381450
uguuucagggagugacuca

SEQ ID NO: 2381452 - RNA, 19 nt, Artificial Sequence
  Description of Artificial Sequence: Synthetic oligonucleotide
  Sense strand starting at position 2584 of SEQ ID NO: 1885991
aagucagugugucuagauc

SEQ ID NO: 2381453 - RNA, 19 nt, Artificial Sequence
  Description of Artificial Sequence: Synthetic oligonucleotide
  Antisense strand to SEQ ID NO: 2381452
gaucuagacacacugacuu

SEQ ID NO: 2381454 - RNA, 19 nt, Artificial Sequence
  Description of Artificial Sequence: Synthetic oligonucleotide
  Sense strand starting at position 2592 of SEQ ID NO: 1885991
gugucuagauccucaggga

SEQ ID NO: 2381455 - RNA, 19 nt, Artificial Sequence
  Description of Artificial Sequence: Synthetic oligonucleotide
  Antisense strand to SEQ ID NO: 2381454
ucccugaggaucuagacac

SEQ ID NO: 2381456 - RNA, 19 nt, Artificial Sequence
  Description of Artificial Sequence: Synthetic oligonucleotide
  Sense strand starting at position 3200 of SEQ ID NO: 1885991
guaacacuguaguucuaua

SEQ ID NO: 2381457 - RNA, 19 nt, Artificial Sequence
  Description of Artificial Sequence: Synthetic oligonucleotide
  Antisense strand to SEQ ID NO: 2381456
uauagaacuacaguguuac

SEQ ID NO: 2381458 - RNA, 19 nt, Artificial Sequence
  Description of Artificial Sequence: Synthetic oligonucleotide
  Sense strand starting at position 3205 of SEQ ID NO: 1885991
acuguaguucuauauguac

SEQ ID NO: 2381459 - RNA, 19 nt, Artificial Sequence
  Description of Artificial Sequence: Synthetic oligonucleotide
  Antisense strand to SEQ ID NO: 2381458
guacauauagaacuacagu

SEQ ID NO: 2381460 - RNA, 19 nt, Artificial Sequence
  Description of Artificial Sequence: Synthetic oligonucleotide
  Sense strand starting at position 3429 of SEQ ID NO: 1885991
uggugaguccaguaaguua

SEQ ID NO: 2381461 - RNA, 19 nt, Artificial Sequence
  Description of Artificial Sequence: Synthetic oligonucleotide
  Antisense strand to SEQ ID NO: 2381460
uaacuuacuggacucacca

SEQ ID NO: 2381462 - RNA, 19 nt, Artificial Sequence
  Description of Artificial Sequence: Synthetic oligonucleotide
  Sense strand starting at position 3457 of SEQ ID NO: 1885991
uguugaaaucuguggcuuu

SEQ ID NO: 2381463 - RNA, 19 nt, Artificial Sequence
  Description of Artificial Sequence: Synthetic oligonucleotide
  Antisense strand to SEQ ID NO: 2381462
aaagccacagauuucaaca

SEQ ID NO: 2381464 - RNA, 19 nt, Artificial Sequence
  Description of Artificial Sequence: Synthetic oligonucleotide
  Sense strand starting at position 3458 of SEQ ID NO: 1885991
guugaaaucuguggcuuug

SEQ ID NO: 2381465 - RNA, 19 nt, Artificial Sequence
  Description of Artificial Sequence: Synthetic oligonucleotide
  Antisense strand to SEQ ID NO: 2381464
caaagccacagauuucaac

SEQ ID NO: 2381466 - RNA, 19 nt, Artificial Sequence
  Description of Artificial Sequence: Synthetic oligonucleotide
  Sense strand starting at position 3460 of SEQ ID NO: 1885991
ugaaaucuguggcuuuguu

SEQ ID NO: 2381467 - RNA, 19 nt, Artificial Sequence
  Description of Artificial Sequence: Synthetic oligonucleotide
  Antisense strand to SEQ ID NO: 2381466
aacaaagccacagauuuca

SEQ ID NO: 2381468 - RNA, 19 nt, Artificial Sequence
  Description of Artificial Sequence: Synthetic oligonucleotide
  Sense strand starting at position 3464 of SEQ ID NO: 1885991
aucuguggcuuuguucuaa

SEQ ID NO: 2381469 - RNA, 19 nt, Artificial Sequence
  Description of Artificial Sequence: Synthetic oligonucleotide
  Antisense strand to SEQ ID NO: 2381468
uuagaacaaagccacagau

SEQ ID NO: 2381470 - RNA, 19 nt, Artificial Sequence
  Description of Artificial Sequence: Synthetic oligonucleotide
  Sense strand starting at position 3468 of SEQ ID NO: 1885991
guggcuuuguucuaaacuu

SEQ ID NO: 2381471 - RNA, 19 nt, Artificial Sequence
  Description of Artificial Sequence: Synthetic oligonucleotide
  Antisense strand to SEQ ID NO: 2381470
aaguuuagaacaaagccac

SEQ ID NO: 2381472 - RNA, 19 nt, Artificial Sequence
  Description of Artificial Sequence: Synthetic oligonucleotide
  Sense strand starting at position 3475 of SEQ ID NO: 1885991
uguucuaaacuugagcaca

SEQ ID NO: 2381473 - RNA, 19 nt, Artificial Sequence
  Description of Artificial Sequence: Synthetic oligonucleotide
  Antisense strand to SEQ ID NO: 2381472
ugugcucaaguuuagaaca

SEQ ID NO: 2381474 - RNA, 19 nt, Artificial Sequence
  Description of Artificial Sequence: Synthetic oligonucleotide
  Sense strand starting at position 3498 of SEQ ID NO: 1885991
ucaugccacuuacgaaaua

SEQ ID NO: 2381475 - RNA, 19 nt, Artificial Sequence
  Description of Artificial Sequence: Synthetic oligonucleotide
  Antisense strand to SEQ ID NO: 2381474
uauuucguaaguggcauga

SEQ ID NO: 2381476 - RNA, 19 nt, Artificial Sequence
  Description of Artificial Sequence: Synthetic oligonucleotide
  Sense strand starting at position 3508 of SEQ ID NO: 1885991
uacgaaauaugcuuugucu

SEQ ID NO: 2381477 - RNA, 19 nt, Artificial Sequence
  Description of Artificial Sequence: Synthetic oligonucleotide
  Antisense strand to SEQ ID NO: 2381476
agacaaagcauauuucgua

SEQ ID NO: 2381478 - RNA, 19 nt, Artificial Sequence
  Description of Artificial Sequence: Synthetic oligonucleotide
  Sense strand starting at position 3510 of SEQ ID NO: 1885991
cgaaauaugcuuugucuuc

SEQ ID NO: 2381479 - RNA, 19 nt, Artificial Sequence
  Description of Artificial Sequence: Synthetic oligonucleotide
  Antisense strand to SEQ ID NO: 2381478
gaagacaaagcauauuucg

SEQ ID NO: 2381480 - RNA, 19 nt, Artificial Sequence
  Description of Artificial Sequence: Synthetic oligonucleotide
  Sense strand starting at position 3648 of SEQ ID NO: 1885991
gcuggcuaguccuugcaua

SEQ ID NO: 2381481 - RNA, 19 nt, Artificial Sequence
  Description of Artificial Sequence: Synthetic oligonucleotide
  Antisense strand to SEQ ID NO: 2381480
uaugcaaggacuagccagc

SEQ ID NO: 2381482 - RNA, 19 nt, Artificial Sequence
  Description of Artificial Sequence: Synthetic oligonucleotide
  Sense strand starting at position 3653 of SEQ ID NO: 1885991
cuaguccuugcauagauca

SEQ ID NO: 2381483 - RNA, 19 nt, Artificial Sequence
  Description of Artificial Sequence: Synthetic oligonucleotide
  Antisense strand to SEQ ID NO: 2381482
ugaucuaugcaaggacuag

SEQ ID NO: 2381484 - RNA, 19 nt, Artificial Sequence
  Description of Artificial Sequence: Synthetic oligonucleotide
  Sense strand starting at position 3744 of SEQ ID NO: 1885991
aagggcuauugagagagua

SEQ ID NO: 2381485 - RNA, 19 nt, Artificial Sequence
  Description of Artificial Sequence: Synthetic oligonucleotide
  Antisense strand to SEQ ID NO: 2381484
uacucucucaauagcccuu

SEQ ID NO: 2381486 - RNA, 19 nt, Artificial Sequence
  Description of Artificial Sequence: Synthetic oligonucleotide
  Sense strand starting at position 3776 of SEQ ID NO: 1885991
cccaguuaucaagggacgu

SEQ ID NO: 2381487 - RNA, 19 nt, Artificial Sequence
  Description of Artificial Sequence: Synthetic oligonucleotide
  Antisense strand to SEQ ID NO: 2381486
acgucccuugauaacuggg

SEQ ID NO: 2381488 - RNA, 19 nt, Artificial Sequence
  Description of Artificial Sequence: Synthetic oligonucleotide
  Sense strand starting at position 3778 of SEQ ID NO: 1885991
caguuaucaagggacgugu

SEQ ID NO: 2381489 - RNA, 19 nt, Artificial Sequence
  Description of Artificial Sequence: Synthetic oligonucleotide
  Antisense strand to SEQ ID NO: 2381488
acacgucccuugauaacug

SEQ ID NO: 2381490 - RNA, 19 nt, Artificial Sequence
  Description of Artificial Sequence: Synthetic oligonucleotide
  Sense strand starting at position 3789 of SEQ ID NO: 1885991
ggacgugugcauguguuca

SEQ ID NO: 2381491 - RNA, 19 nt, Artificial Sequence
  Description of Artificial Sequence: Synthetic oligonucleotide
  Antisense strand to SEQ ID NO: 2381490
ugaacacaugcacacgucc

SEQ ID NO: 2381492 - RNA, 19 nt, Artificial Sequence
  Description of Artificial Sequence: Synthetic oligonucleotide
  Sense strand starting at position 3791 of SEQ ID NO: 1885991
acgugugcauguguucauu

SEQ ID NO: 2381493 - RNA, 19 nt, Artificial Sequence
  Description of Artificial Sequence: Synthetic oligonucleotide
  Antisense strand to SEQ ID NO: 2381492
aaugaacacaugcacacgu

SEQ ID NO: 2381494 - RNA, 19 nt, Artificial Sequence
  Description of Artificial Sequence: Synthetic oligonucleotide
  Sense strand starting at position 384 of SEQ ID NO: 1885992
gauugccuucuaggaaaga

SEQ ID NO: 2381495 - RNA, 19 nt, Artificial Sequence
  Description of Artificial Sequence: Synthetic oligonucleotide
  Antisense strand to SEQ ID NO: 2381494
ucuuuccuagaaggcaauc

SEQ ID NO: 2381496 - RNA, 19 nt, Artificial Sequence
  Description of Artificial Sequence: Synthetic oligonucleotide
  Sense strand starting at position 410 of SEQ ID NO: 1885992
gaguucgagcauuagccau

SEQ ID NO: 2381497 - RNA, 19 nt, Artificial Sequence
  Description of Artificial Sequence: Synthetic oligonucleotide
  Antisense strand to SEQ ID NO: 2381496
auggcuaaugcucgaacuc

SEQ ID NO: 2381498 - RNA, 19 nt, Artificial Sequence
  Description of Artificial Sequence: Synthetic oligonucleotide
  Sense strand starting at position 414 of SEQ ID NO: 1885992
ucgagcauuagccauagaa

SEQ ID NO: 2381499 - RNA, 19 nt, Artificial Sequence
  Description of Artificial Sequence: Synthetic oligonucleotide
  Antisense strand to SEQ ID NO: 2381498
uucuauggcuaaugcucga

SEQ ID NO: 2381500 - RNA, 19 nt, Artificial Sequence
  Description of Artificial Sequence: Synthetic oligonucleotide
  Sense strand starting at position 444 of SEQ ID NO: 1885992
gggucuaggcucugugacu

SEQ ID NO: 2381501 - RNA, 19 nt, Artificial Sequence
  Description of Artificial Sequence: Synthetic oligonucleotide
  Antisense strand to SEQ ID NO: 2381500
agucacagagccuagaccc

SEQ ID NO: 2381502 - RNA, 19 nt, Artificial Sequence
  Description of Artificial Sequence: Synthetic oligonucleotide
  Sense strand starting at position 445 of SEQ ID NO: 1885992
ggucuaggcucugugacuu

SEQ ID NO: 2381503 - RNA, 19 nt, Artificial Sequence
  Description of Artificial Sequence: Synthetic oligonucleotide
  Antisense strand to SEQ ID NO: 2381502
aagucacagagccuagacc

SEQ ID NO: 2381504 - RNA, 19 nt, Artificial Sequence
  Description of Artificial Sequence: Synthetic oligonucleotide
  Sense strand starting at position 464 of SEQ ID NO: 1885992
uugagcaugugaccuagaa

SEQ ID NO: 2381505 - RNA, 19 nt, Artificial Sequence
  Description of Artificial Sequence: Synthetic oligonucleotide
  Antisense strand to SEQ ID NO: 2381504
uucuaggucacaugcucaa

SEQ ID NO: 2381506 - RNA, 19 nt, Artificial Sequence
  Description of Artificial Sequence: Synthetic oligonucleotide
  Sense strand starting at position 466 of SEQ ID NO: 1885992
gagcaugugaccuagaagu

SEQ ID NO: 2381507 - RNA, 19 nt, Artificial Sequence
  Description of Artificial Sequence: Synthetic oligonucleotide
  Antisense strand to SEQ ID NO: 2381506
acuucuaggucacaugcuc

SEQ ID NO: 2381508 - RNA, 19 nt, Artificial Sequence
  Description of Artificial Sequence: Synthetic oligonucleotide
  Sense strand starting at position 468 of SEQ ID NO: 1885992
gcaugugaccuagaaguua

SEQ ID NO: 2381509 - RNA, 19 nt, Artificial Sequence
  Description of Artificial Sequence: Synthetic oligonucleotide
  Antisense strand to SEQ ID NO: 2381508
uaacuucuaggucacaugc

SEQ ID NO: 2381510 - RNA, 19 nt, Artificial Sequence
  Description of Artificial Sequence: Synthetic oligonucleotide
  Sense strand starting at position 476 of SEQ ID NO: 1885992
ccuagaaguuaaguuguca

SEQ ID NO: 2381511 - RNA, 19 nt, Artificial Sequence
  Description of Artificial Sequence: Synthetic oligonucleotide
  Antisense strand to SEQ ID NO: 2381510
ugacaacuuaacuucuagg

SEQ ID NO: 2381512 - RNA, 19 nt, Artificial Sequence
  Description of Artificial Sequence: Synthetic oligonucleotide
  Sense strand starting at position 503 of SEQ ID NO: 1885992
gcauguaaaucuuuguaaa

SEQ ID NO: 2381513 - RNA, 19 nt, Artificial Sequence
  Description of Artificial Sequence: Synthetic oligonucleotide
  Antisense strand to SEQ ID NO: 2381512
uuuacaaagauuuacaugc

SEQ ID NO: 2381514 - RNA, 19 nt, Artificial Sequence
  Description of Artificial Sequence: Synthetic oligonucleotide
  Sense strand starting at position 548 of SEQ ID NO: 1885992
aaugcauagucauuaggga

SEQ ID NO: 2381515 - RNA, 19 nt, Artificial Sequence
  Description of Artificial Sequence: Synthetic oligonucleotide
  Antisense strand to SEQ ID NO: 2381514
ucccuaaugacuaugcauu

SEQ ID NO: 2381516 - RNA, 19 nt, Artificial Sequence
  Description of Artificial Sequence: Synthetic oligonucleotide
  Sense strand starting at position 597 of SEQ ID NO: 1885992
uuucguauccacuagaaug

SEQ ID NO: 2381517 - RNA, 19 nt, Artificial Sequence
  Description of Artificial Sequence: Synthetic oligonucleotide
  Antisense strand to SEQ ID NO: 2381516
cauucuaguggauacgaaa

SEQ ID NO: 2381518 - RNA, 19 nt, Artificial Sequence
  Description of Artificial Sequence: Synthetic oligonucleotide
  Sense strand starting at position 696 of SEQ ID NO: 1885992
uggagaacagccuaguagu

SEQ ID NO: 2381519 - RNA, 19 nt, Artificial Sequence
  Description of Artificial Sequence: Synthetic oligonucleotide
  Antisense strand to SEQ ID NO: 2381518
acuacuaggcuguucucca

SEQ ID NO: 2381520 - RNA, 19 nt, Artificial Sequence
  Description of Artificial Sequence: Synthetic oligonucleotide
  Sense strand starting at position 843 of SEQ ID NO: 1885992
uucucaguagccgaagagu

SEQ ID NO: 2381521 - RNA, 19 nt, Artificial Sequence
  Description of Artificial Sequence: Synthetic oligonucleotide
  Antisense strand to SEQ ID NO: 2381520
acucuucggcuacugagaa

SEQ ID NO: 2381522 - RNA, 19 nt, Artificial Sequence
  Description of Artificial Sequence: Synthetic oligonucleotide
  Sense strand starting at position 955 of SEQ ID NO: 1885992
agaacugauccuugcuaca

SEQ ID NO: 2381523 - RNA, 19 nt, Artificial Sequence
  Description of Artificial Sequence: Synthetic oligonucleotide
  Antisense strand to SEQ ID NO: 2381522
uguagcaaggaucaguucu

SEQ ID NO: 2381524 - RNA, 19 nt, Artificial Sequence
  Description of Artificial Sequence: Synthetic oligonucleotide
  Sense strand starting at position 1038 of SEQ ID NO: 1885992
augaaauacuaauaggcaa

SEQ ID NO: 2381525 - RNA, 19 nt, Artificial Sequence
  Description of Artificial Sequence: Synthetic oligonucleotide
  Antisense strand to SEQ ID NO: 2381524
uugccuauuaguauuucau

SEQ ID NO: 2381526 - RNA, 19 nt, Artificial Sequence
  Description of Artificial Sequence: Synthetic oligonucleotide
  Sense strand starting at position 1067 of SEQ ID NO: 1885992
acagaaagauuggugguuu

SEQ ID NO: 2381527 - RNA, 19 nt, Artificial Sequence
  Description of Artificial Sequence: Synthetic oligonucleotide
  Antisense strand to SEQ ID NO: 2381526
aaaccaccaaucuuucugu

SEQ ID NO: 2381528 - RNA, 19 nt, Artificial Sequence
  Description of Artificial Sequence: Synthetic oligonucleotide
  Sense strand starting at position 1071 of SEQ ID NO: 1885992
aaagauuggugguuuccua

SEQ ID NO: 2381529 - RNA, 19 nt, Artificial Sequence
  Description of Artificial Sequence: Synthetic oligonucleotide
  Antisense strand to SEQ ID NO: 2381528
uaggaaaccaccaaucuuu

SEQ ID NO: 2381530 - RNA, 19 nt, Artificial Sequence
  Description of Artificial Sequence: Synthetic oligonucleotide
  Sense strand starting at position 1232 of SEQ ID NO: 1885992
uuaauuguaugguuuguga

SEQ ID NO: 2381531 - RNA, 19 nt, Artificial Sequence
  Description of Artificial Sequence: Synthetic oligonucleotide
  Antisense strand to SEQ ID NO: 2381530
ucacaaaccauacaauuaa

SEQ ID NO: 2381532 - RNA, 19 nt, Artificial Sequence
  Description of Artificial Sequence: Synthetic oligonucleotide
  Sense strand starting at position 1234 of SEQ ID NO: 1885992
aauuguaugguuugugaac

SEQ ID NO: 2381533 - RNA, 19 nt, Artificial Sequence
  Description of Artificial Sequence: Synthetic oligonucleotide
  Antisense strand to SEQ ID NO: 2381532
guucacaaaccauacaauu

SEQ ID NO: 2381534 - RNA, 19 nt, Artificial Sequence
  Description of Artificial Sequence: Synthetic oligonucleotide
  Sense strand starting at position 1235 of SEQ ID NO: 1885992
auuguaugguuugugaacu

SEQ ID NO: 2381535 - RNA, 19 nt, Artificial Sequence
  Description of Artificial Sequence: Synthetic oligonucleotide
  Antisense strand to SEQ ID NO: 2381534
aguucacaaaccauacaau

SEQ ID NO: 2381536 - RNA, 19 nt, Artificial Sequence
  Description of Artificial Sequence: Synthetic oligonucleotide
  Sense strand starting at position 1428 of SEQ ID NO: 1885992
ccuacuuaccgagauggua

SEQ ID NO: 2381537 - RNA, 19 nt, Artificial Sequence
  Description of Artificial Sequence: Synthetic oligonucleotide
  Antisense strand to SEQ ID NO: 2381536
uaccaucucgguaaguagg

SEQ ID NO: 2381538 - RNA, 19 nt, Artificial Sequence
  Description of Artificial Sequence: Synthetic oligonucleotide
  Sense strand starting at position 2245 of SEQ ID NO: 1885992
aagugauucucagugguug

SEQ ID NO: 2381539 - RNA, 19 nt, Artificial Sequence
  Description of Artificial Sequence: Synthetic oligonucleotide
  Antisense strand to SEQ ID NO: 2381538
caaccacugagaaucacuu

SEQ ID NO: 2381540 - RNA, 19 nt, Artificial Sequence
  Description of Artificial Sequence: Synthetic oligonucleotide
  Sense strand starting at position 2259 of SEQ ID NO: 1885992
gguuguuccaaugaaguca

SEQ ID NO: 2381541 - RNA, 19 nt, Artificial Sequence
  Description of Artificial Sequence: Synthetic oligonucleotide
  Antisense strand to SEQ ID NO: 2381540
ugacuucauuggaacaacc

SEQ ID NO: 2381542 - RNA, 19 nt, Artificial Sequence
  Description of Artificial Sequence: Synthetic oligonucleotide
  Sense strand starting at position 2613 of SEQ ID NO: 1885992
aacagagacuccguccaaa

SEQ ID NO: 2381543 - RNA, 19 nt, Artificial Sequence
  Description of Artificial Sequence: Synthetic oligonucleotide
  Antisense strand to SEQ ID NO: 2381542
uuuggacggagucucuguu

SEQ ID NO: 2381544 - RNA, 19 nt, Artificial Sequence
  Description of Artificial Sequence: Synthetic oligonucleotide
  Sense strand starting at position 2662 of SEQ ID NO: 1885992
gcaccaaggacauguaaga

SEQ ID NO: 2381545 - RNA, 19 nt, Artificial Sequence
  Description of Artificial Sequence: Synthetic oligonucleotide
  Antisense strand to SEQ ID NO: 2381544
ucuuacauguccuuggugc

SEQ ID NO: 2381546 - RNA, 19 nt, Artificial Sequence
  Description of Artificial Sequence: Synthetic oligonucleotide
  Sense strand starting at position 2722 of SEQ ID NO: 1885992
uugaguauuuauugaccau

SEQ ID NO: 2381547 - RNA, 19 nt, Artificial Sequence
  Description of Artificial Sequence: Synthetic oligonucleotide
  Antisense strand to SEQ ID NO: 2381546
auggucaauaaauacucaa

SEQ ID NO: 2381548 - RNA, 19 nt, Artificial Sequence
  Description of Artificial Sequence: Synthetic oligonucleotide
  Sense strand starting at position 2890 of SEQ ID NO: 1885992
acuugaaucugagccauca

SEQ ID NO: 2381549 - RNA, 19 nt, Artificial Sequence
  Description of Artificial Sequence: Synthetic oligonucleotide
  Antisense strand to SEQ ID NO: 2381548
ugauggcucagauucaagu

SEQ ID NO: 2381550 - RNA, 19 nt, Artificial Sequence
  Description of Artificial Sequence: Synthetic oligonucleotide
  Sense strand starting at position 3098 of SEQ ID NO: 1885992
gggaaagggagcuguugaa

SEQ ID NO: 2381551 - RNA, 19 nt, Artificial Sequence
  Description of Artificial Sequence: Synthetic oligonucleotide
  Antisense strand to SEQ ID NO: 2381550
uucaacagcucccuuuccc

SEQ ID NO: 2381552 - RNA, 19 nt, Artificial Sequence
  Description of Artificial Sequence: Synthetic oligonucleotide
  Sense strand starting at position 3105 of SEQ ID NO: 1885992
ggagcuguugaauaugauu

SEQ ID NO: 2381553 - RNA, 19 nt, Artificial Sequence
  Description of Artificial Sequence: Synthetic oligonucleotide
  Antisense strand to SEQ ID NO: 2381552
aaucauauucaacagcucc

SEQ ID NO: 2381554 - RNA, 19 nt, Artificial Sequence
  Description of Artificial Sequence: Synthetic oligonucleotide
  Sense strand starting at position 3192 of SEQ ID NO: 1885992
cuuggauacugaguuucua

SEQ ID NO: 2381555 - RNA, 19 nt, Artificial Sequence
  Description of Artificial Sequence: Synthetic oligonucleotide
  Antisense strand to SEQ ID NO: 2381554
uagaaacucaguauccaag

SEQ ID NO: 2381556 - RNA, 19 nt, Artificial Sequence
  Description of Artificial Sequence: Synthetic oligonucleotide
  Sense strand starting at position 3200 of SEQ ID NO: 1885992
cugaguuucuauccuagaa

SEQ ID NO: 2381557 - RNA, 19 nt, Artificial Sequence
  Description of Artificial Sequence: Synthetic oligonucleotide
  Antisense strand to SEQ ID NO: 2381556
uucuaggauagaaacucag

SEQ ID NO: 2381558 - RNA, 19 nt, Artificial Sequence
  Description of Artificial Sequence: Synthetic oligonucleotide
  Sense strand starting at position 3215 of SEQ ID NO: 1885992
agaaaucugucagauaagg

SEQ ID NO: 2381559 - RNA, 19 nt, Artificial Sequence
  Description of Artificial Sequence: Synthetic oligonucleotide
  Antisense strand to SEQ ID NO: 2381558
ccuuaucugacagauuucu

SEQ ID NO: 2381560 - RNA, 19 nt, Artificial Sequence
  Description of Artificial Sequence: Synthetic oligonucleotide
  Sense strand starting at position 3294 of SEQ ID NO: 1885992
cuuuccuggccucaguaaa

SEQ ID NO: 2381561 - RNA, 19 nt, Artificial Sequence
  Description of Artificial Sequence: Synthetic oligonucleotide
  Antisense strand to SEQ ID NO: 2381560
uuuacugaggccaggaaag

SEQ ID NO: 2381562 - RNA, 19 nt, Artificial Sequence
  Description of Artificial Sequence: Synthetic oligonucleotide
  Sense strand starting at position 3407 of SEQ ID NO: 1885992
agggccaucuuguuacuga

SEQ ID NO: 2381563 - RNA, 19 nt, Artificial Sequence
  Description of Artificial Sequence: Synthetic oligonucleotide
  Antisense strand to SEQ ID NO: 2381562
ucaguaacaagauggcccu

SEQ ID NO: 2381564 - RNA, 19 nt, Artificial Sequence
  Description of Artificial Sequence: Synthetic oligonucleotide
  Sense strand starting at position 3442 of SEQ ID NO: 1885992
gggauucucccguaguuuc

SEQ ID NO: 2381565 - RNA, 19 nt, Artificial Sequence
  Description of Artificial Sequence: Synthetic oligonucleotide
  Antisense strand to SEQ ID NO: 2381564
gaaacuacgggagaauccc

SEQ ID NO: 2381566 - RNA, 19 nt, Artificial Sequence
  Description of Artificial Sequence: Synthetic oligonucleotide
  Sense strand starting at position 3745 of SEQ ID NO: 1885992
ugugguaauuugcucuaau

SEQ ID NO: 2381567 - RNA, 19 nt, Artificial Sequence
  Description of Artificial Sequence: Synthetic oligonucleotide
  Antisense strand to SEQ ID NO: 2381566
auuagagcaaauuaccaca

SEQ ID NO: 2381568 - RNA, 19 nt, Artificial Sequence
  Description of Artificial Sequence: Synthetic oligonucleotide
  Sense strand starting at position 3746 of SEQ ID NO: 1885992
gugguaauuugcucuaaug

SEQ ID NO: 2381569 - RNA, 19 nt, Artificial Sequence
  Description of Artificial Sequence: Synthetic oligonucleotide
  Antisense strand to SEQ ID NO: 2381568
cauuagagcaaauuaccac

SEQ ID NO: 2381570 - RNA, 19 nt, Artificial Sequence
  Description of Artificial Sequence: Synthetic oligonucleotide
  Sense strand starting at position 3756 of SEQ ID NO: 1885992
gcucuaaugagcugugaaa

SEQ ID NO: 2381571 - RNA, 19 nt, Artificial Sequence
  Description of Artificial Sequence: Synthetic oligonucleotide
  Antisense strand to SEQ ID NO: 2381570
uuucacagcucauuagagc

SEQ ID NO: 2381572 - RNA, 19 nt, Artificial Sequence
  Description of Artificial Sequence: Synthetic oligonucleotide
  Sense strand starting at position 3983 of SEQ ID NO: 1885992
agggucaagucagcaauau

SEQ ID NO: 2381573 - RNA, 19 nt, Artificial Sequence
  Description of Artificial Sequence: Synthetic oligonucleotide
  Antisense strand to SEQ ID NO: 2381572
auauugcugacuugacccu

SEQ ID NO: 2381574 - RNA, 19 nt, Artificial Sequence
  Description of Artificial Sequence: Synthetic oligonucleotide
  Sense strand starting at position 12 of SEQ ID NO: 1885993
cuuaaauauugggucuuua

SEQ ID NO: 2381575 - RNA, 19 nt, Artificial Sequence
  Description of Artificial Sequence: Synthetic oligonucleotide
  Antisense strand to SEQ ID NO: 2381574
uaaagacccaauauuuaag

SEQ ID NO: 2381576 - RNA, 19 nt, Artificial Sequence
  Description of Artificial Sequence: Synthetic oligonucleotide
  Sense strand starting at position 72 of SEQ ID NO: 1885993
ggacauaaauuguuuaacu

SEQ ID NO: 2381577 - RNA, 19 nt, Artificial Sequence
  Description of Artificial Sequence: Synthetic oligonucleotide
  Antisense strand to SEQ ID NO: 2381576
aguuaaacaauuuaugucc

SEQ ID NO: 2381578 - RNA, 19 nt, Artificial Sequence
  Description of Artificial Sequence: Synthetic oligonucleotide
  Sense strand starting at position 533 of SEQ ID NO: 1885993
aagagcucgccagagcaaa

SEQ ID NO: 2381579 - RNA, 19 nt, Artificial Sequence
  Description of Artificial Sequence: Synthetic oligonucleotide
  Antisense strand to SEQ ID NO: 2381578
uuugcucuggcgagcucuu

SEQ ID NO: 2381580 - RNA, 19 nt, Artificial Sequence
  Description of Artificial Sequence: Synthetic oligonucleotide
  Sense strand starting at position 575 of SEQ ID NO: 1885993
gaugaaaugugaccuccau

SEQ ID NO: 2381581 - RNA, 19 nt, Artificial Sequence
  Description of Artificial Sequence: Synthetic oligonucleotide
  Antisense strand to SEQ ID NO: 2381580
auggaggucacauuucauc

SEQ ID NO: 2381582 - RNA, 19 nt, Artificial Sequence
  Description of Artificial Sequence: Synthetic oligonucleotide
  Sense strand starting at position 581 of SEQ ID NO: 1885993
augugaccuccauaccuga

SEQ ID NO: 2381583 - RNA, 19 nt, Artificial Sequence
  Description of Artificial Sequence: Synthetic oligonucleotide
  Antisense strand to SEQ ID NO: 2381582
ucagguauggaggucacau

SEQ ID NO: 2381584 - RNA, 19 nt, Artificial Sequence
  Description of Artificial Sequence: Synthetic oligonucleotide
  Sense strand starting at position 734 of SEQ ID NO: 1885993
gcagauggauucccugaga

SEQ ID NO: 2381585 - RNA, 19 nt, Artificial Sequence
  Description of Artificial Sequence: Synthetic oligonucleotide
  Antisense strand to SEQ ID NO: 2381584
ucucagggaauccaucugc

SEQ ID NO: 2381586 - RNA, 19 nt, Artificial Sequence
  Description of Artificial Sequence: Synthetic oligonucleotide
  Sense strand starting at position 1600 of SEQ ID NO: 1885993
gacaguucuugagccacaa

SEQ ID NO: 2381587 - RNA, 19 nt, Artificial Sequence
  Description of Artificial Sequence: Synthetic oligonucleotide
  Antisense strand to SEQ ID NO: 2381586
uuguggcucaagaacuguc

SEQ ID NO: 2381588 - RNA, 19 nt, Artificial Sequence
  Description of Artificial Sequence: Synthetic oligonucleotide
  Sense strand starting at position 1604 of SEQ ID NO: 1885993
guucuugagccacaaggua

SEQ ID NO: 2381589 - RNA, 19 nt, Artificial Sequence
  Description of Artificial Sequence: Synthetic oligonucleotide
  Antisense strand to SEQ ID NO: 2381588
uaccuuguggcucaagaac

SEQ ID NO: 2381590 - RNA, 19 nt, Artificial Sequence
  Description of Artificial Sequence: Synthetic oligonucleotide
  Sense strand starting at position 1668 of SEQ ID NO: 1885993
cacaauguauguuugugaa

SEQ ID NO: 2381591 - RNA, 19 nt, Artificial Sequence
  Description of Artificial Sequence: Synthetic oligonucleotide
  Antisense strand to SEQ ID NO: 2381590
uucacaaacauacauugug

SEQ ID NO: 2381592 - RNA, 19 nt, Artificial Sequence
  Description of Artificial Sequence: Synthetic oligonucleotide
  Sense strand starting at position 1670 of SEQ ID NO: 1885993
caauguauguuugugaaag

SEQ ID NO: 2381593 - RNA, 19 nt, Artificial Sequence
  Description of Artificial Sequence: Synthetic oligonucleotide
  Antisense strand to SEQ ID NO: 2381592
cuuucacaaacauacauug

SEQ ID NO: 2381594 - RNA, 19 nt, Artificial Sequence
  Description of Artificial Sequence: Synthetic oligonucleotide
  Sense strand starting at position 1758 of SEQ ID NO: 1885993
uugacauuacugugguuaa

SEQ ID NO: 2381595 - RNA, 19 nt, Artificial Sequence
  Description of Artificial Sequence: Synthetic oligonucleotide
  Antisense strand to SEQ ID NO: 2381594
uuaaccacaguaaugucaa

SEQ ID NO: 2381596 - RNA, 19 nt, Artificial Sequence
  Description of Artificial Sequence: Synthetic oligonucleotide
  Sense strand starting at position 1761 of SEQ ID NO: 1885993
acauuacugugguuaacua

SEQ ID NO: 2381597 - RNA, 19 nt, Artificial Sequence
  Description of Artificial Sequence: Synthetic oligonucleotide
  Antisense strand to SEQ ID NO: 2381596
uaguuaaccacaguaaugu

SEQ ID NO: 2381598 - RNA, 19 nt, Artificial Sequence
  Description of Artificial Sequence: Synthetic oligonucleotide
  Sense strand starting at position 1849 of SEQ ID NO: 1885993
gugaauuaauguucuggaa

SEQ ID NO: 2381599 - RNA, 19 nt, Artificial Sequence
  Description of Artificial Sequence: Synthetic oligonucleotide
  Antisense strand to SEQ ID NO: 2381598
uuccagaacauuaauucac

SEQ ID NO: 2381600 - RNA, 19 nt, Artificial Sequence
  Description of Artificial Sequence: Synthetic oligonucleotide
  Sense strand starting at position 1898 of SEQ ID NO: 1885993
ggauaaagcuuagcaaaca

SEQ ID NO: 2381601 - RNA, 19 nt, Artificial Sequence
  Description of Artificial Sequence: Synthetic oligonucleotide
  Antisense strand to SEQ ID NO: 2381600
uguuugcuaagcuuuaucc

SEQ ID NO: 2381602 - RNA, 19 nt, Artificial Sequence
  Description of Artificial Sequence: Synthetic oligonucleotide
  Sense strand starting at position 2079 of SEQ ID NO: 1885993
augucucacugguuacuaa

SEQ ID NO: 2381603 - RNA, 19 nt, Artificial Sequence
  Description of Artificial Sequence: Synthetic oligonucleotide
  Antisense strand to SEQ ID NO: 2381602
uuaguaaccagugagacau

SEQ ID NO: 2381604 - RNA, 19 nt, Artificial Sequence
  Description of Artificial Sequence: Synthetic oligonucleotide
  Sense strand starting at position 2082 of SEQ ID NO: 1885993
ucucacugguuacuaagaa

SEQ ID NO: 2381605 - RNA, 19 nt, Artificial Sequence
  Description of Artificial Sequence: Synthetic oligonucleotide
  Antisense strand to SEQ ID NO: 2381604
uucuuaguaaccagugaga

SEQ ID NO: 2381606 - RNA, 19 nt, Artificial Sequence
  Description of Artificial Sequence: Synthetic oligonucleotide
  Sense strand starting at position 2237 of SEQ ID NO: 1885993
gaaagcugacugggcuaaa

SEQ ID NO: 2381607 - RNA, 19 nt, Artificial Sequence
  Description of Artificial Sequence: Synthetic oligonucleotide
  Antisense strand to SEQ ID NO: 2381606
uuuagcccagucagcuuuc

SEQ ID NO: 2381608 - RNA, 19 nt, Artificial Sequence
  Description of Artificial Sequence: Synthetic oligonucleotide
  Sense strand starting at position 2374 of SEQ ID NO: 1885993
gagagaugcagaugccaga

SEQ ID NO: 2381609 - RNA, 19 nt, Artificial Sequence
  Description of Artificial Sequence: Synthetic oligonucleotide
  Antisense strand to SEQ ID NO: 2381608
ucuggcaucugcaucucuc

SEQ ID NO: 2381610 - RNA, 19 nt, Artificial Sequence
  Description of Artificial Sequence: Synthetic oligonucleotide
  Sense strand starting at position 2536 of SEQ ID NO: 1885993
agaaaugucuuccugacua

SEQ ID NO: 2381611 - RNA, 19 nt, Artificial Sequence
  Description of Artificial Sequence: Synthetic oligonucleotide
  Antisense strand to SEQ ID NO: 2381610
uagucaggaagacauuucu

SEQ ID NO: 2381612 - RNA, 19 nt, Artificial Sequence
  Description of Artificial Sequence: Synthetic oligonucleotide
  Sense strand starting at position 2541 of SEQ ID NO: 1885993
ugucuuccugacuauagga

SEQ ID NO: 2381613 - RNA, 19 nt, Artificial Sequence
  Description of Artificial Sequence: Synthetic oligonucleotide
  Antisense strand to SEQ ID NO: 2381612
uccuauagucaggaagaca

SEQ ID NO: 2381614 - RNA, 19 nt, Artificial Sequence
  Description of Artificial Sequence: Synthetic oligonucleotide
  Sense strand starting at position 2622 of SEQ ID NO: 1885993
gagagagcauggcuauaaa

SEQ ID NO: 2381615 - RNA, 19 nt, Artificial Sequence
  Description of Artificial Sequence: Synthetic oligonucleotide
  Antisense strand to SEQ ID NO: 2381614
uuuauagccaugcucucuc

SEQ ID NO: 2381616 - RNA, 19 nt, Artificial Sequence
  Description of Artificial Sequence: Synthetic oligonucleotide
  Sense strand starting at position 2666 of SEQ ID NO: 1885993
gugccaggcagucaaauau

SEQ ID NO: 2381617 - RNA, 19 nt, Artificial Sequence
  Description of Artificial Sequence: Synthetic oligonucleotide
  Antisense strand to SEQ ID NO: 2381616
auauuugacugccuggcac

SEQ ID NO: 2381618 - RNA, 19 nt, Artificial Sequence
  Description of Artificial Sequence: Synthetic oligonucleotide
  Sense strand starting at position 2744 of SEQ ID NO: 1885993
uuaggaugcuauucuagga

SEQ ID NO: 2381619 - RNA, 19 nt, Artificial Sequence
  Description of Artificial Sequence: Synthetic oligonucleotide
  Antisense strand to SEQ ID NO: 2381618
uccuagaauagcauccuaa

SEQ ID NO: 2381620 - RNA, 19 nt, Artificial Sequence
  Description of Artificial Sequence: Synthetic oligonucleotide
  Sense strand starting at position 2748 of SEQ ID NO: 1885993
gaugcuauucuaggagaga

SEQ ID NO: 2381621 - RNA, 19 nt, Artificial Sequence
  Description of Artificial Sequence: Synthetic oligonucleotide
  Antisense strand to SEQ ID NO: 2381620
ucucuccuagaauagcauc

SEQ ID NO: 2381622 - RNA, 19 nt, Artificial Sequence
  Description of Artificial Sequence: Synthetic oligonucleotide
  Sense strand starting at position 2820 of SEQ ID NO: 1885993
gauguucuguguguuauuu

SEQ ID NO: 2381623 - RNA, 19 nt, Artificial Sequence
  Description of Artificial Sequence: Synthetic oligonucleotide
  Antisense strand to SEQ ID NO: 2381622
aaauaacacacagaacauc

SEQ ID NO: 2381624 - RNA, 19 nt, Artificial Sequence
  Description of Artificial Sequence: Synthetic oligonucleotide
  Sense strand starting at position 2826 of SEQ ID NO: 1885993
cuguguguuauuugaauuc

SEQ ID NO: 2381625 - RNA, 19 nt, Artificial Sequence
  Description of Artificial Sequence: Synthetic oligonucleotide
  Antisense strand to SEQ ID NO: 2381624
gaauucaaauaacacacag

SEQ ID NO: 2381626 - RNA, 19 nt, Artificial Sequence
  Description of Artificial Sequence: Synthetic oligonucleotide
  Sense strand starting at position 2907 of SEQ ID NO: 1885993
aaauuagugugauugcaac

SEQ ID NO: 2381627 - RNA, 19 nt, Artificial Sequence
  Description of Artificial Sequence: Synthetic oligonucleotide
  Antisense strand to SEQ ID NO: 2381626
guugcaaucacacuaauuu

SEQ ID NO: 2381628 - RNA, 19 nt, Artificial Sequence
  Description of Artificial Sequence: Synthetic oligonucleotide
  Sense strand starting at position 2952 of SEQ ID NO: 1885993
agcuguccuuauuuauagu

SEQ ID NO: 2381629 - RNA, 19 nt, Artificial Sequence
  Description of Artificial Sequence: Synthetic oligonucleotide
  Antisense strand to SEQ ID NO: 2381628
acuauaaauaaggacagcu

SEQ ID NO: 2381630 - RNA, 19 nt, Artificial Sequence
  Description of Artificial Sequence: Synthetic oligonucleotide
  Sense strand starting at position 3384 of SEQ ID NO: 1885993
ggacaaauccugcaggcuu

SEQ ID NO: 2381631 - RNA, 19 nt, Artificial Sequence
  Description of Artificial Sequence: Synthetic oligonucleotide
  Antisense strand to SEQ ID NO: 2381630
aagccugcaggauuugucc

SEQ ID NO: 2381632 - RNA, 19 nt, Artificial Sequence
  Description of Artificial Sequence: Synthetic oligonucleotide
  Sense strand starting at position 3412 of SEQ ID NO: 1885993
uauacugaucaauguggau

SEQ ID NO: 2381633 - RNA, 19 nt, Artificial Sequence
  Description of Artificial Sequence: Synthetic oligonucleotide
  Antisense strand to SEQ ID NO: 2381632
auccacauugaucaguaua

SEQ ID NO: 2381634 - RNA, 19 nt, Artificial Sequence
  Description of Artificial Sequence: Synthetic oligonucleotide
  Sense strand starting at position 3437 of SEQ ID NO: 1885993
accuacauucugggcuaua

SEQ ID NO: 2381635 - RNA, 19 nt, Artificial Sequence
  Description of Artificial Sequence: Synthetic oligonucleotide
  Antisense strand to SEQ ID NO: 2381634
uauagcccagaauguaggu

SEQ ID NO: 2381636 - RNA, 19 nt, Artificial Sequence
  Description of Artificial Sequence: Synthetic oligonucleotide
  Sense strand starting at position 3438 of SEQ ID NO: 1885993
ccuacauucugggcuauaa

SEQ ID NO: 2381637 - RNA, 19 nt, Artificial Sequence
  Description of Artificial Sequence: Synthetic oligonucleotide
  Antisense strand to SEQ ID NO: 2381636
uuauagcccagaauguagg

SEQ ID NO: 2381638 - RNA, 19 nt, Artificial Sequence
  Description of Artificial Sequence: Synthetic oligonucleotide
  Sense strand starting at position 3483 of SEQ ID NO: 1885993
ugaacuggcucccugacaa

SEQ ID NO: 2381639 - RNA, 19 nt, Artificial Sequence
  Description of Artificial Sequence: Synthetic oligonucleotide
  Antisense strand to SEQ ID NO: 2381638
uugucagggagccaguuca

SEQ ID NO: 2381640 - RNA, 19 nt, Artificial Sequence
  Description of Artificial Sequence: Synthetic oligonucleotide
  Sense strand starting at position 3504 of SEQ ID NO: 1885993
agcagcuuggaguaaacuu

SEQ ID NO: 2381641 - RNA, 19 nt, Artificial Sequence
  Description of Artificial Sequence: Synthetic oligonucleotide
  Antisense strand to SEQ ID NO: 2381640
aaguuuacuccaagcugcu

SEQ ID NO: 2381642 - RNA, 19 nt, Artificial Sequence
  Description of Artificial Sequence: Synthetic oligonucleotide
  Sense strand starting at position 3597 of SEQ ID NO: 1885993
caaguaaucgugucggugu

SEQ ID NO: 2381643 - RNA, 19 nt, Artificial Sequence
  Description of Artificial Sequence: Synthetic oligonucleotide
  Antisense strand to SEQ ID NO: 2381642
acaccgacacgauuacuug

SEQ ID NO: 2381644 - RNA, 19 nt, Artificial Sequence
  Description of Artificial Sequence: Synthetic oligonucleotide
  Sense strand starting at position 3610 of SEQ ID NO: 1885993
cgguguaauaguuaccuaa

SEQ ID NO: 2381645 - RNA, 19 nt, Artificial Sequence
  Description of Artificial Sequence: Synthetic oligonucleotide
  Antisense strand to SEQ ID NO: 2381644
uuagguaacuauuacaccg

SEQ ID NO: 2381646 - RNA, 19 nt, Artificial Sequence
  Description of Artificial Sequence: Synthetic oligonucleotide
  Sense strand starting at position 3612 of SEQ ID NO: 1885993
guguaauaguuaccuaaag

SEQ ID NO: 2381647 - RNA, 19 nt, Artificial Sequence
  Description of Artificial Sequence: Synthetic oligonucleotide
  Antisense strand to SEQ ID NO: 2381646
cuuuagguaacuauuacac

SEQ ID NO: 2381648 - RNA, 19 nt, Artificial Sequence
  Description of Artificial Sequence: Synthetic oligonucleotide
  Sense strand starting at position 3628 of SEQ ID NO: 1885993
aagguaaguuuggauuuaa

SEQ ID NO: 2381649 - RNA, 19 nt, Artificial Sequence
  Description of Artificial Sequence: Synthetic oligonucleotide
  Antisense strand to SEQ ID NO: 2381648
uuaaauccaaacuuaccuu

SEQ ID NO: 2381650 - RNA, 19 nt, Artificial Sequence
  Description of Artificial Sequence: Synthetic oligonucleotide
  Sense strand starting at position 3683 of SEQ ID NO: 1885993
uaaacagguggauguaauu

SEQ ID NO: 2381651 - RNA, 19 nt, Artificial Sequence
  Description of Artificial Sequence: Synthetic oligonucleotide
  Antisense strand to SEQ ID NO: 2381650
aauuacauccaccuguuua

SEQ ID NO: 2381652 - RNA, 19 nt, Artificial Sequence
  Description of Artificial Sequence: Synthetic oligonucleotide
  Sense strand starting at position 3858 of SEQ ID NO: 1885993
gcuagauccugaccucaua

SEQ ID NO: 2381653 - RNA, 19 nt, Artificial Sequence
  Description of Artificial Sequence: Synthetic oligonucleotide
  Antisense strand to SEQ ID NO: 2381652
uaugaggucaggaucuagc

SEQ ID NO: 2381654 - RNA, 19 nt, Artificial Sequence
  Description of Artificial Sequence: Synthetic oligonucleotide
  Sense strand starting at position 203 of SEQ ID NO: 1885994
ccugucugaccucacuauu

SEQ ID NO: 2381655 - RNA, 19 nt, Artificial Sequence
  Description of Artificial Sequence: Synthetic oligonucleotide
  Antisense strand to SEQ ID NO: 2381654
aauagugaggucagacagg

SEQ ID NO: 2381656 - RNA, 19 nt, Artificial Sequence
  Description of Artificial Sequence: Synthetic oligonucleotide
  Sense strand starting at position 606 of SEQ ID NO: 1885994
uuucuaaugcaggguaaac

SEQ ID NO: 2381657 - RNA, 19 nt, Artificial Sequence
  Description of Artificial Sequence: Synthetic oligonucleotide
  Antisense strand to SEQ ID NO: 2381656
guuuacccugcauuagaaa

SEQ ID NO: 2381658 - RNA, 19 nt, Artificial Sequence
  Description of Artificial Sequence: Synthetic oligonucleotide
  Sense strand starting at position 772 of SEQ ID NO: 1885994
gccugaacgacugaccauu

SEQ ID NO: 2381659 - RNA, 19 nt, Artificial Sequence
  Description of Artificial Sequence: Synthetic oligonucleotide
  Antisense strand to SEQ ID NO: 2381658
aauggucagucguucaggc

SEQ ID NO: 2381660 - RNA, 19 nt, Artificial Sequence
  Description of Artificial Sequence: Synthetic oligonucleotide
  Sense strand starting at position 821 of SEQ ID NO: 1885994
gggccgagugcuugaagga

SEQ ID NO: 2381661 - RNA, 19 nt, Artificial Sequence
  Description of Artificial Sequence: Synthetic oligonucleotide
  Antisense strand to SEQ ID NO: 2381660
uccuucaagcacucggccc

SEQ ID NO: 2381662 - RNA, 19 nt, Artificial Sequence
  Description of Artificial Sequence: Synthetic oligonucleotide
  Sense strand starting at position 960 of SEQ ID NO: 1885994
gccaguuaaggguggaaca

SEQ ID NO: 2381663 - RNA, 19 nt, Artificial Sequence
  Description of Artificial Sequence: Synthetic oligonucleotide
  Antisense strand to SEQ ID NO: 2381662
uguuccacccuuaacuggc

SEQ ID NO: 2381664 - RNA, 19 nt, Artificial Sequence
  Description of Artificial Sequence: Synthetic oligonucleotide
  Sense strand starting at position 1035 of SEQ ID NO: 1885994
ggcaguucuuugcuuuaua

SEQ ID NO: 2381665 - RNA, 19 nt, Artificial Sequence
  Description of Artificial Sequence: Synthetic oligonucleotide
  Antisense strand to SEQ ID NO: 2381664
uauaaagcaaagaacugcc

SEQ ID NO: 2381666 - RNA, 19 nt, Artificial Sequence
  Description of Artificial Sequence: Synthetic oligonucleotide
  Sense strand starting at position 1036 of SEQ ID NO: 1885994
gcaguucuuugcuuuauac

SEQ ID NO: 2381667 - RNA, 19 nt, Artificial Sequence
  Description of Artificial Sequence: Synthetic oligonucleotide
  Antisense strand to SEQ ID NO: 2381666
guauaaagcaaagaacugc

SEQ ID NO: 2381668 - RNA, 19 nt, Artificial Sequence
  Description of Artificial Sequence: Synthetic oligonucleotide
  Sense strand starting at position 1038 of SEQ ID NO: 1885994
aguucuuugcuuuauacag

SEQ ID NO: 2381669 - RNA, 19 nt, Artificial Sequence
  Description of Artificial Sequence: Synthetic oligonucleotide
  Antisense strand to SEQ ID NO: 2381668
cuguauaaagcaaagaacu

SEQ ID NO: 2381670 - RNA, 19 nt, Artificial Sequence
  Description of Artificial Sequence: Synthetic oligonucleotide
  Sense strand starting at position 1259 of SEQ ID NO: 1885994
aagcccuuggucuguaauu

SEQ ID NO: 2381671 - RNA, 19 nt, Artificial Sequence
  Description of Artificial Sequence: Synthetic oligonucleotide
  Antisense strand to SEQ ID NO: 2381670
aauuacagaccaagggcuu

SEQ ID NO: 2381672 - RNA, 19 nt, Artificial Sequence
  Description of Artificial Sequence: Synthetic oligonucleotide
  Sense strand starting at position 1261 of SEQ ID NO: 1885994
gcccuuggucuguaauugu

SEQ ID NO: 2381673 - RNA, 19 nt, Artificial Sequence
  Description of Artificial Sequence: Synthetic oligonucleotide
  Antisense strand to SEQ ID NO: 2381672
acaauuacagaccaagggc

SEQ ID NO: 2381674 - RNA, 19 nt, Artificial Sequence
  Description of Artificial Sequence: Synthetic oligonucleotide
  Sense strand starting at position 1264 of SEQ ID NO: 1885994
cuuggucuguaauuguaaa

SEQ ID NO: 2381675 - RNA, 19 nt, Artificial Sequence
  Description of Artificial Sequence: Synthetic oligonucleotide
  Antisense strand to SEQ ID NO: 2381674
uuuacaauuacagaccaag

SEQ ID NO: 2381676 - RNA, 19 nt, Artificial Sequence
  Description of Artificial Sequence: Synthetic oligonucleotide
  Sense strand starting at position 1311 of SEQ ID NO: 1885994
ccacgagccuuucuaauau

SEQ ID NO: 2381677 - RNA, 19 nt, Artificial Sequence
  Description of Artificial Sequence: Synthetic oligonucleotide
  Antisense strand to SEQ ID NO: 2381676
auauuagaaaggcucgugg

SEQ ID NO: 2381678 - RNA, 19 nt, Artificial Sequence
  Description of Artificial Sequence: Synthetic oligonucleotide
  Sense strand starting at position 1519 of SEQ ID NO: 1885994
cccucugguuucucuuaca

SEQ ID NO: 2381679 - RNA, 19 nt, Artificial Sequence
  Description of Artificial Sequence: Synthetic oligonucleotide
  Antisense strand to SEQ ID NO: 2381678
uguaagagaaaccagaggg

SEQ ID NO: 2381680 - RNA, 19 nt, Artificial Sequence
  Description of Artificial Sequence: Synthetic oligonucleotide
  Sense strand starting at position 1586 of SEQ ID NO: 1885994
aagagaugucaguggucug

SEQ ID NO: 2381681 - RNA, 19 nt, Artificial Sequence
  Description of Artificial Sequence: Synthetic oligonucleotide
  Antisense strand to SEQ ID NO: 2381680
cagaccacugacaucucuu

SEQ ID NO: 2381682 - RNA, 19 nt, Artificial Sequence
  Description of Artificial Sequence: Synthetic oligonucleotide
  Sense strand starting at position 1591 of SEQ ID NO: 1885994
augucaguggucuggagga

SEQ ID NO: 2381683 - RNA, 19 nt, Artificial Sequence
  Description of Artificial Sequence: Synthetic oligonucleotide
  Antisense strand to SEQ ID NO: 2381682
uccuccagaccacugacau

SEQ ID NO: 2381684 - RNA, 19 nt, Artificial Sequence
  Description of Artificial Sequence: Synthetic oligonucleotide
  Sense strand starting at position 1834 of SEQ ID NO: 1885994
ccgcuaugcaggcagaagu

SEQ ID NO: 2381685 - RNA, 19 nt, Artificial Sequence
  Description of Artificial Sequence: Synthetic oligonucleotide
  Antisense strand to SEQ ID NO: 2381684
acuucugccugcauagcgg

SEQ ID NO: 2381686 - RNA, 19 nt, Artificial Sequence
  Description of Artificial Sequence: Synthetic oligonucleotide
  Sense strand starting at position 2010 of SEQ ID NO: 1885994
gacggcucucccugggaga

SEQ ID NO: 2381687 - RNA, 19 nt, Artificial Sequence
  Description of Artificial Sequence: Synthetic oligonucleotide
  Antisense strand to SEQ ID NO: 2381686
ucucccagggagagccguc

SEQ ID NO: 2381688 - RNA, 19 nt, Artificial Sequence
  Description of Artificial Sequence: Synthetic oligonucleotide
  Sense strand starting at position 2041 of SEQ ID NO: 1885994
ccugcuuuccgucaggauu

SEQ ID NO: 2381689 - RNA, 19 nt, Artificial Sequence
  Description of Artificial Sequence: Synthetic oligonucleotide
  Antisense strand to SEQ ID NO: 2381688
aauccugacggaaagcagg

SEQ ID NO: 2381690 - RNA, 19 nt, Artificial Sequence
  Description of Artificial Sequence: Synthetic oligonucleotide
  Sense strand starting at position 2546 of SEQ ID NO: 1885994
gaacuuaucgugcauuguu

SEQ ID NO: 2381691 - RNA, 19 nt, Artificial Sequence
  Description of Artificial Sequence: Synthetic oligonucleotide
  Antisense strand to SEQ ID NO: 2381690
aacaaugcacgauaaguuc

SEQ ID NO: 2381692 - RNA, 19 nt, Artificial Sequence
  Description of Artificial Sequence: Synthetic oligonucleotide
  Sense strand starting at position 2592 of SEQ ID NO: 1885994
uagggaacuuaucaggcau

SEQ ID NO: 2381693 - RNA, 19 nt, Artificial Sequence
  Description of Artificial Sequence: Synthetic oligonucleotide
  Antisense strand to SEQ ID NO: 2381692
augccugauaaguucccua

SEQ ID NO: 2381694 - RNA, 19 nt, Artificial Sequence
  Description of Artificial Sequence: Synthetic oligonucleotide
  Sense strand starting at position 2775 of SEQ ID NO: 1885994
ggaggaugccugugguucu

SEQ ID NO: 2381695 - RNA, 19 nt, Artificial Sequence
  Description of Artificial Sequence: Synthetic oligonucleotide
  Antisense strand to SEQ ID NO: 2381694
agaaccacaggcauccucc

SEQ ID NO: 2381696 - RNA, 19 nt, Artificial Sequence
  Description of Artificial Sequence: Synthetic oligonucleotide
  Sense strand starting at position 3120 of SEQ ID NO: 1885994
cccugaaauccagggcauu

SEQ ID NO: 2381697 - RNA, 19 nt, Artificial Sequence
  Description of Artificial Sequence: Synthetic oligonucleotide
  Antisense strand to SEQ ID NO: 2381696
aaugcccuggauuucaggg

SEQ ID NO: 2381698 - RNA, 19 nt, Artificial Sequence
  Description of Artificial Sequence: Synthetic oligonucleotide
  Sense strand starting at position 3130 of SEQ ID NO: 1885994
cagggcauuugacaaauga

SEQ ID NO: 2381699 - RNA, 19 nt, Artificial Sequence
  Description of Artificial Sequence: Synthetic oligonucleotide
  Antisense strand to SEQ ID NO: 2381698
ucauuugucaaaugcccug

SEQ ID NO: 2381700 - RNA, 19 nt, Artificial Sequence
  Description of Artificial Sequence: Synthetic oligonucleotide
  Sense strand starting at position 3150 of SEQ ID NO: 1885994
agugauuaucacuguuuaa

SEQ ID NO: 2381701 - RNA, 19 nt, Artificial Sequence
  Description of Artificial Sequence: Synthetic oligonucleotide
  Antisense strand to SEQ ID NO: 2381700
uuaaacagugauaaucacu

SEQ ID NO: 2381702 - RNA, 19 nt, Artificial Sequence
  Description of Artificial Sequence: Synthetic oligonucleotide
  Sense strand starting at position 3171 of SEQ ID NO: 1885994
ccaaguucucccuggauug

SEQ ID NO: 2381703 - RNA, 19 nt, Artificial Sequence
  Description of Artificial Sequence: Synthetic oligonucleotide
  Antisense strand to SEQ ID NO: 2381702
caauccagggagaacuugg

SEQ ID NO: 2381704 - RNA, 19 nt, Artificial Sequence
  Description of Artificial Sequence: Synthetic oligonucleotide
  Sense strand starting at position 3178 of SEQ ID NO: 1885994
cucccuggauugcuauauu

SEQ ID NO: 2381705 - RNA, 19 nt, Artificial Sequence
  Description of Artificial Sequence: Synthetic oligonucleotide
  Antisense strand to SEQ ID NO: 2381704
aauauagcaauccagggag

SEQ ID NO: 2381706 - RNA, 19 nt, Artificial Sequence
  Description of Artificial Sequence: Synthetic oligonucleotide
  Sense strand starting at position 3196 of SEQ ID NO: 1885994
uuaauuaucugagaaccag

SEQ ID NO: 2381707 - RNA, 19 nt, Artificial Sequence
  Description of Artificial Sequence: Synthetic oligonucleotide
  Antisense strand to SEQ ID NO: 2381706
cugguucucagauaauuaa

SEQ ID NO: 2381708 - RNA, 19 nt, Artificial Sequence
  Description of Artificial Sequence: Synthetic oligonucleotide
  Sense strand starting at position 3214 of SEQ ID NO: 1885994
gcugacugguuaccaugaa

SEQ ID NO: 2381709 - RNA, 19 nt, Artificial Sequence
  Description of Artificial Sequence: Synthetic oligonucleotide
  Antisense strand to SEQ ID NO: 2381708
uucaugguaaccagucagc

SEQ ID NO: 2381710 - RNA, 19 nt, Artificial Sequence
  Description of Artificial Sequence: Synthetic oligonucleotide
  Sense strand starting at position 3222 of SEQ ID NO: 1885994
guuaccaugaaggguuuaa

SEQ ID NO: 2381711 - RNA, 19 nt, Artificial Sequence
  Description of Artificial Sequence: Synthetic oligonucleotide
  Antisense strand to SEQ ID NO: 2381710
uuaaacccuucaugguaac

SEQ ID NO: 2381712 - RNA, 19 nt, Artificial Sequence
  Description of Artificial Sequence: Synthetic oligonucleotide
  Sense strand starting at position 3302 of SEQ ID NO: 1885994
guggcaaguuuccuccauu

SEQ ID NO: 2381713 - RNA, 19 nt, Artificial Sequence
  Description of Artificial Sequence: Synthetic oligonucleotide
  Antisense strand to SEQ ID NO: 2381712
aauggaggaaacuugccac

SEQ ID NO: 2381714 - RNA, 19 nt, Artificial Sequence
  Description of Artificial Sequence: Synthetic oligonucleotide
  Sense strand starting at position 3303 of SEQ ID NO: 1885994
uggcaaguuuccuccauua

SEQ ID NO: 2381715 - RNA, 19 nt, Artificial Sequence
  Description of Artificial Sequence: Synthetic oligonucleotide
  Antisense strand to SEQ ID NO: 2381714
uaauggaggaaacuugcca

SEQ ID NO: 2381716 - RNA, 19 nt, Artificial Sequence
  Description of Artificial Sequence: Synthetic oligonucleotide
  Sense strand starting at position 3340 of SEQ ID NO: 1885994
ggcugaugcuugccgagau

SEQ ID NO: 2381717 - RNA, 19 nt, Artificial Sequence
  Description of Artificial Sequence: Synthetic oligonucleotide
  Antisense strand to SEQ ID NO: 2381716
aucucggcaagcaucagcc

SEQ ID NO: 2381718 - RNA, 19 nt, Artificial Sequence
  Description of Artificial Sequence: Synthetic oligonucleotide
  Sense strand starting at position 3344 of SEQ ID NO: 1885994
gaugcuugccgagauacgu

SEQ ID NO: 2381719 - RNA, 19 nt, Artificial Sequence
  Description of Artificial Sequence: Synthetic oligonucleotide
  Antisense strand to SEQ ID NO: 2381718
acguaucucggcaagcauc

SEQ ID NO: 2381720 - RNA, 19 nt, Artificial Sequence
  Description of Artificial Sequence: Synthetic oligonucleotide
  Sense strand starting at position 3618 of SEQ ID NO: 1885994
cccgauaugguuugaacau

SEQ ID NO: 2381721 - RNA, 19 nt, Artificial Sequence
  Description of Artificial Sequence: Synthetic oligonucleotide
  Antisense strand to SEQ ID NO: 2381720
auguucaaaccauaucggg

SEQ ID NO: 2381722 - RNA, 19 nt, Artificial Sequence
  Description of Artificial Sequence: Synthetic oligonucleotide
  Sense strand starting at position 3648 of SEQ ID NO: 1885994
aagugucaugaugagaugu

SEQ ID NO: 2381723 - RNA, 19 nt, Artificial Sequence
  Description of Artificial Sequence: Synthetic oligonucleotide
  Antisense strand to SEQ ID NO: 2381722
acaucucaucaugacacuu

SEQ ID NO: 2381724 - RNA, 19 nt, Artificial Sequence
  Description of Artificial Sequence: Synthetic oligonucleotide
  Sense strand starting at position 3771 of SEQ ID NO: 1885994
gugagagcugcuuguuuaa

SEQ ID NO: 2381725 - RNA, 19 nt, Artificial Sequence
  Description of Artificial Sequence: Synthetic oligonucleotide
  Antisense strand to SEQ ID NO: 2381724
uuaaacaagcagcucucac

SEQ ID NO: 2381726 - RNA, 19 nt, Artificial Sequence
  Description of Artificial Sequence: Synthetic oligonucleotide
  Sense strand starting at position 3784 of SEQ ID NO: 1885994
guuuaaagguguguggcaa

SEQ ID NO: 2381727 - RNA, 19 nt, Artificial Sequence
  Description of Artificial Sequence: Synthetic oligonucleotide
  Antisense strand to SEQ ID NO: 2381726
uugccacacaccuuuaaac

SEQ ID NO: 2381728 - RNA, 19 nt, Artificial Sequence
  Description of Artificial Sequence: Synthetic oligonucleotide
  Sense strand starting at position 3921 of SEQ ID NO: 1885994
cucagccuccuguaagacu

SEQ ID NO: 2381729 - RNA, 19 nt, Artificial Sequence
  Description of Artificial Sequence: Synthetic oligonucleotide
  Antisense strand to SEQ ID NO: 2381728
agucuuacaggaggcugag

SEQ ID NO: 2381730 - RNA, 19 nt, Artificial Sequence
  Description of Artificial Sequence: Synthetic oligonucleotide
  Sense strand starting at position 3928 of SEQ ID NO: 1885994
uccuguaagacugggauua

SEQ ID NO: 2381731 - RNA, 19 nt, Artificial Sequence
  Description of Artificial Sequence: Synthetic oligonucleotide
  Antisense strand to SEQ ID NO: 2381730
uaaucccagucuuacagga

SEQ ID NO: 2381732 - RNA, 19 nt, Artificial Sequence
  Description of Artificial Sequence: Synthetic oligonucleotide
  Sense strand starting at position 3930 of SEQ ID NO: 1885994
cuguaagacugggauuaca

SEQ ID NO: 2381733 - RNA, 19 nt, Artificial Sequence
  Description of Artificial Sequence: Synthetic oligonucleotide
  Antisense strand to SEQ ID NO: 2381732
uguaaucccagucuuacag

SEQ ID NO: 2381734 - RNA, 19 nt, Artificial Sequence
  Description of Artificial Sequence: Synthetic oligonucleotide
  Sense strand starting at position 40 of SEQ ID NO: 1885995
uauguuauggaccaguguu

SEQ ID NO: 2381735 - RNA, 19 nt, Artificial Sequence
  Description of Artificial Sequence: Synthetic oligonucleotide
  Antisense strand to SEQ ID NO: 2381734
aacacugguccauaacaua

SEQ ID NO: 2381736 - RNA, 19 nt, Artificial Sequence
  Description of Artificial Sequence: Synthetic oligonucleotide
  Sense strand starting at position 135 of SEQ ID NO: 1885995
ccaggugucucuguugaaa

SEQ ID NO: 2381737 - RNA, 19 nt, Artificial Sequence
  Description of Artificial Sequence: Synthetic oligonucleotide
  Antisense strand to SEQ ID NO: 2381736
uuucaacagagacaccugg

SEQ ID NO: 2381738 - RNA, 19 nt, Artificial Sequence
  Description of Artificial Sequence: Synthetic oligonucleotide
  Sense strand starting at position 147 of SEQ ID NO: 1885995
guugaaacugcuggucaua

SEQ ID NO: 2381739 - RNA, 19 nt, Artificial Sequence
  Description of Artificial Sequence: Synthetic oligonucleotide
  Antisense strand to SEQ ID NO: 2381738
uaugaccagcaguuucaac

SEQ ID NO: 2381740 - RNA, 19 nt, Artificial Sequence
  Description of Artificial Sequence: Synthetic oligonucleotide
  Sense strand starting at position 149 of SEQ ID NO: 1885995
ugaaacugcuggucauaaa

SEQ ID NO: 2381741 - RNA, 19 nt, Artificial Sequence
  Description of Artificial Sequence: Synthetic oligonucleotide
  Antisense strand to SEQ ID NO: 2381740
uuuaugaccagcaguuuca

SEQ ID NO: 2381742 - RNA, 19 nt, Artificial Sequence
  Description of Artificial Sequence: Synthetic oligonucleotide
  Sense strand starting at position 150 of SEQ ID NO: 1885995
gaaacugcuggucauaaau

SEQ ID NO: 2381743 - RNA, 19 nt, Artificial Sequence
  Description of Artificial Sequence: Synthetic oligonucleotide
  Antisense strand to SEQ ID NO: 2381742
auuuaugaccagcaguuuc

SEQ ID NO: 2381744 - RNA, 19 nt, Artificial Sequence
  Description of Artificial Sequence: Synthetic oligonucleotide
  Sense strand starting at position 721 of SEQ ID NO: 1885995
uugagcuacaugugugaaa

SEQ ID NO: 2381745 - RNA, 19 nt, Artificial Sequence
  Description of Artificial Sequence: Synthetic oligonucleotide
  Antisense strand to SEQ ID NO: 2381744
uuucacacauguagcucaa

SEQ ID NO: 2381746 - RNA, 19 nt, Artificial Sequence
  Description of Artificial Sequence: Synthetic oligonucleotide
  Sense strand starting at position 775 of SEQ ID NO: 1885995
ggauaugacgagugcugaa

SEQ ID NO: 2381747 - RNA, 19 nt, Artificial Sequence
  Description of Artificial Sequence: Synthetic oligonucleotide
  Antisense strand to SEQ ID NO: 2381746
uucagcacucgucauaucc

SEQ ID NO: 2381748 - RNA, 19 nt, Artificial Sequence
  Description of Artificial Sequence: Synthetic oligonucleotide
  Sense strand starting at position 891 of SEQ ID NO: 1885995
ccuuaagaguuauugaaua

SEQ ID NO: 2381749 - RNA, 19 nt, Artificial Sequence
  Description of Artificial Sequence: Synthetic oligonucleotide
  Antisense strand to SEQ ID NO: 2381748
uauucaauaacucuuaagg

SEQ ID NO: 2381750 - RNA, 19 nt, Artificial Sequence
  Description of Artificial Sequence: Synthetic oligonucleotide
  Sense strand starting at position 1023 of SEQ ID NO: 1885995
uguguaacucuguaguuaa

SEQ ID NO: 2381751 - RNA, 19 nt, Artificial Sequence
  Description of Artificial Sequence: Synthetic oligonucleotide
  Antisense strand to SEQ ID NO: 2381750
uuaacuacagaguuacaca

SEQ ID NO: 2381752 - RNA, 19 nt, Artificial Sequence
  Description of Artificial Sequence: Synthetic oligonucleotide
  Sense strand starting at position 1087 of SEQ ID NO: 1885995
ggccaagaguuuccauucu

SEQ ID NO: 2381753 - RNA, 19 nt, Artificial Sequence
  Description of Artificial Sequence: Synthetic oligonucleotide
  Antisense strand to SEQ ID NO: 2381752
agaauggaaacucuuggcc

SEQ ID NO: 2381754 - RNA, 19 nt, Artificial Sequence
  Description of Artificial Sequence: Synthetic oligonucleotide
  Sense strand starting at position 1242 of SEQ ID NO: 1885995
agaugacuugcucauacac

SEQ ID NO: 2381755 - RNA, 19 nt, Artificial Sequence
  Description of Artificial Sequence: Synthetic oligonucleotide
  Antisense strand to SEQ ID NO: 2381754
guguaugagcaagucaucu

SEQ ID NO: 2381756 - RNA, 19 nt, Artificial Sequence
  Description of Artificial Sequence: Synthetic oligonucleotide
  Sense strand starting at position 1285 of SEQ ID NO: 1885995
aggguucucuccuucgaga

SEQ ID NO: 2381757 - RNA, 19 nt, Artificial Sequence
  Description of Artificial Sequence: Synthetic oligonucleotide
  Antisense strand to SEQ ID NO: 2381756
ucucgaaggagagaacccu

SEQ ID NO: 2381758 - RNA, 19 nt, Artificial Sequence
  Description of Artificial Sequence: Synthetic oligonucleotide
  Sense strand starting at position 1298 of SEQ ID NO: 1885995
ucgagacuacaguaauucu

SEQ ID NO: 2381759 - RNA, 19 nt, Artificial Sequence
  Description of Artificial Sequence: Synthetic oligonucleotide
  Antisense strand to SEQ ID NO: 2381758
agaauuacuguagucucga

SEQ ID NO: 2381760 - RNA, 19 nt, Artificial Sequence
  Description of Artificial Sequence: Synthetic oligonucleotide
  Sense strand starting at position 1309 of SEQ ID NO: 1885995
guaauucucuuuguauuuc

SEQ ID NO: 2381761 - RNA, 19 nt, Artificial Sequence
  Description of Artificial Sequence: Synthetic oligonucleotide
  Antisense strand to SEQ ID NO: 2381760
gaaauacaaagagaauuac

SEQ ID NO: 2381762 - RNA, 19 nt, Artificial Sequence
  Description of Artificial Sequence: Synthetic oligonucleotide
  Sense strand starting at position 1422 of SEQ ID NO: 1885995
uuuagauaucuuggauuag

SEQ ID NO: 2381763 - RNA, 19 nt, Artificial Sequence
  Description of Artificial Sequence: Synthetic oligonucleotide
  Antisense strand to SEQ ID NO: 2381762
cuaauccaagauaucuaaa

SEQ ID NO: 2381764 - RNA, 19 nt, Artificial Sequence
  Description of Artificial Sequence: Synthetic oligonucleotide
  Sense strand starting at position 1510 of SEQ ID NO: 1885995
ucaguuggugacugucaga

SEQ ID NO: 2381765 - RNA, 19 nt, Artificial Sequence
  Description of Artificial Sequence: Synthetic oligonucleotide
  Antisense strand to SEQ ID NO: 2381764
ucugacagucaccaacuga

SEQ ID NO: 2381766 - RNA, 19 nt, Artificial Sequence
  Description of Artificial Sequence: Synthetic oligonucleotide
  Sense strand starting at position 1568 of SEQ ID NO: 1885995
agagaaggguguccuuaug

SEQ ID NO: 2381767 - RNA, 19 nt, Artificial Sequence
  Description of Artificial Sequence: Synthetic oligonucleotide
  Antisense strand to SEQ ID NO: 2381766
cauaaggacacccuucucu

SEQ ID NO: 2381768 - RNA, 19 nt, Artificial Sequence
  Description of Artificial Sequence: Synthetic oligonucleotide
  Sense strand starting at position 1574 of SEQ ID NO: 1885995
ggguguccuuauguaucaa

SEQ ID NO: 2381769 - RNA, 19 nt, Artificial Sequence
  Description of Artificial Sequence: Synthetic oligonucleotide
  Antisense strand to SEQ ID NO: 2381768
uugauacauaaggacaccc

SEQ ID NO: 2381770 - RNA, 19 nt, Artificial Sequence
  Description of Artificial Sequence: Synthetic oligonucleotide
  Sense strand starting at position 1575 of SEQ ID NO: 1885995
gguguccuuauguaucaac

SEQ ID NO: 2381771 - RNA, 19 nt, Artificial Sequence
  Description of Artificial Sequence: Synthetic oligonucleotide
  Antisense strand to SEQ ID NO: 2381770
guugauacauaaggacacc

SEQ ID NO: 2381772 - RNA, 19 nt, Artificial Sequence
  Description of Artificial Sequence: Synthetic oligonucleotide
  Sense strand starting at position 1644 of SEQ ID NO: 1885995
ggaagaugauuccuaggca

SEQ ID NO: 2381773 - RNA, 19 nt, Artificial Sequence
  Description of Artificial Sequence: Synthetic oligonucleotide
  Antisense strand to SEQ ID NO: 2381772
ugccuaggaaucaucuucc

SEQ ID NO: 2381774 - RNA, 19 nt, Artificial Sequence
  Description of Artificial Sequence: Synthetic oligonucleotide
  Sense strand starting at position 1647 of SEQ ID NO: 1885995
agaugauuccuaggcacgu

SEQ ID NO: 2381775 - RNA, 19 nt, Artificial Sequence
  Description of Artificial Sequence: Synthetic oligonucleotide
  Antisense strand to SEQ ID NO: 2381774
acgugccuaggaaucaucu

SEQ ID NO: 2381776 - RNA, 19 nt, Artificial Sequence
  Description of Artificial Sequence: Synthetic oligonucleotide
  Sense strand starting at position 2674 of SEQ ID NO: 1885995
aaguuaagagccuagugua

SEQ ID NO: 2381777 - RNA, 19 nt, Artificial Sequence
  Description of Artificial Sequence: Synthetic oligonucleotide
  Antisense strand to SEQ ID NO: 2381776
uacacuaggcucuuaacuu

SEQ ID NO: 2381778 - RNA, 19 nt, Artificial Sequence
  Description of Artificial Sequence: Synthetic oligonucleotide
  Sense strand starting at position 2752 of SEQ ID NO: 1885995
ggauguuguaacgggaaau

SEQ ID NO: 2381779 - RNA, 19 nt, Artificial Sequence
  Description of Artificial Sequence: Synthetic oligonucleotide
  Antisense strand to SEQ ID NO: 2381778
auuucccguuacaacaucc

SEQ ID NO: 2381780 - RNA, 19 nt, Artificial Sequence
  Description of Artificial Sequence: Synthetic oligonucleotide
  Sense strand starting at position 2753 of SEQ ID NO: 1885995
gauguuguaacgggaaaug

SEQ ID NO: 2381781 - RNA, 19 nt, Artificial Sequence
  Description of Artificial Sequence: Synthetic oligonucleotide
  Antisense strand to SEQ ID NO: 2381780
cauuucccguuacaacauc

SEQ ID NO: 2381782 - RNA, 19 nt, Artificial Sequence
  Description of Artificial Sequence: Synthetic oligonucleotide
  Sense strand starting at position 2965 of SEQ ID NO: 1885995
gguagaaagugagcuuuau

SEQ ID NO: 2381783 - RNA, 19 nt, Artificial Sequence
  Description of Artificial Sequence: Synthetic oligonucleotide
  Antisense strand to SEQ ID NO: 2381782
auaaagcucacuuucuacc

SEQ ID NO: 2381784 - RNA, 19 nt, Artificial Sequence
  Description of Artificial Sequence: Synthetic oligonucleotide
  Sense strand starting at position 3023 of SEQ ID NO: 1885995
agagguaguuugagagagu

SEQ ID NO: 2381785 - RNA, 19 nt, Artificial Sequence
  Description of Artificial Sequence: Synthetic oligonucleotide
  Antisense strand to SEQ ID NO: 2381784
acucucucaaacuaccucu

SEQ ID NO: 2381786 - RNA, 19 nt, Artificial Sequence
  Description of Artificial Sequence: Synthetic oligonucleotide
  Sense strand starting at position 3026 of SEQ ID NO: 1885995
gguaguuugagagaguaau

SEQ ID NO: 2381787 - RNA, 19 nt, Artificial Sequence
  Description of Artificial Sequence: Synthetic oligonucleotide
  Antisense strand to SEQ ID NO: 2381786
auuacucucucaaacuacc

SEQ ID NO: 2381788 - RNA, 19 nt, Artificial Sequence
  Description of Artificial Sequence: Synthetic oligonucleotide
  Sense strand starting at position 3036 of SEQ ID NO: 1885995
gagaguaauugagugguaa

SEQ ID NO: 2381789 - RNA, 19 nt, Artificial Sequence
  Description of Artificial Sequence: Synthetic oligonucleotide
  Antisense strand to SEQ ID NO: 2381788
uuaccacucaauuacucuc

SEQ ID NO: 2381790 - RNA, 19 nt, Artificial Sequence
  Description of Artificial Sequence: Synthetic oligonucleotide
  Sense strand starting at position 3037 of SEQ ID NO: 1885995
agaguaauugagugguaaa

SEQ ID NO: 2381791 - RNA, 19 nt, Artificial Sequence
  Description of Artificial Sequence: Synthetic oligonucleotide
  Antisense strand to SEQ ID NO: 2381790
uuuaccacucaauuacucu

SEQ ID NO: 2381792 - RNA, 19 nt, Artificial Sequence
  Description of Artificial Sequence: Synthetic oligonucleotide
  Sense strand starting at position 3038 of SEQ ID NO: 1885995
gaguaauugagugguaaac

SEQ ID NO: 2381793 - RNA, 19 nt, Artificial Sequence
  Description of Artificial Sequence: Synthetic oligonucleotide
  Antisense strand to SEQ ID NO: 2381792
guuuaccacucaauuacuc

SEQ ID NO: 2381794 - RNA, 19 nt, Artificial Sequence
  Description of Artificial Sequence: Synthetic oligonucleotide
  Sense strand starting at position 3048 of SEQ ID NO: 1885995
gugguaaacuuacugaacu

SEQ ID NO: 2381795 - RNA, 19 nt, Artificial Sequence
  Description of Artificial Sequence: Synthetic oligonucleotide
  Antisense strand to SEQ ID NO: 2381794
aguucaguaaguuuaccac

SEQ ID NO: 2381796 - RNA, 19 nt, Artificial Sequence
  Description of Artificial Sequence: Synthetic oligonucleotide
  Sense strand starting at position 3105 of SEQ ID NO: 1885995
gagaaaguaugccuucuaa

SEQ ID NO: 2381797 - RNA, 19 nt, Artificial Sequence
  Description of Artificial Sequence: Synthetic oligonucleotide
  Antisense strand to SEQ ID NO: 2381796
uuagaaggcauacuuucuc

SEQ ID NO: 2381798 - RNA, 19 nt, Artificial Sequence
  Description of Artificial Sequence: Synthetic oligonucleotide
  Sense strand starting at position 3327 of SEQ ID NO: 1885995
ugagcuuuauguguaaaug

SEQ ID NO: 2381799 - RNA, 19 nt, Artificial Sequence
  Description of Artificial Sequence: Synthetic oligonucleotide
  Antisense strand to SEQ ID NO: 2381798
cauuuacacauaaagcuca

SEQ ID NO: 2381800 - RNA, 19 nt, Artificial Sequence
  Description of Artificial Sequence: Synthetic oligonucleotide
  Sense strand starting at position 3328 of SEQ ID NO: 1885995
gagcuuuauguguaaaugu

SEQ ID NO: 2381801 - RNA, 19 nt, Artificial Sequence
  Description of Artificial Sequence: Synthetic oligonucleotide
  Antisense strand to SEQ ID NO: 2381800
acauuuacacauaaagcuc

SEQ ID NO: 2381802 - RNA, 19 nt, Artificial Sequence
  Description of Artificial Sequence: Synthetic oligonucleotide
  Sense strand starting at position 3335 of SEQ ID NO: 1885995
auguguaaaugucuacaca

SEQ ID NO: 2381803 - RNA, 19 nt, Artificial Sequence
  Description of Artificial Sequence: Synthetic oligonucleotide
  Antisense strand to SEQ ID NO: 2381802
uguguagacauuuacacau

SEQ ID NO: 2381804 - RNA, 19 nt, Artificial Sequence
  Description of Artificial Sequence: Synthetic oligonucleotide
  Sense strand starting at position 3336 of SEQ ID NO: 1885995
uguguaaaugucuacacac

SEQ ID NO: 2381805 - RNA, 19 nt, Artificial Sequence
  Description of Artificial Sequence: Synthetic oligonucleotide
  Antisense strand to SEQ ID NO: 2381804
guguguagacauuuacaca

SEQ ID NO: 2381806 - RNA, 19 nt, Artificial Sequence
  Description of Artificial Sequence: Synthetic oligonucleotide
  Sense strand starting at position 3377 of SEQ ID NO: 1885995
acuuuagacuaugaggaaa

SEQ ID NO: 2381807 - RNA, 19 nt, Artificial Sequence
  Description of Artificial Sequence: Synthetic oligonucleotide
  Antisense strand to SEQ ID NO: 2381806
uuuccucauagucuaaagu

SEQ ID NO: 2381808 - RNA, 19 nt, Artificial Sequence
  Description of Artificial Sequence: Synthetic oligonucleotide
  Sense strand starting at position 3518 of SEQ ID NO: 1885995
acucuugguuucucacaga

SEQ ID NO: 2381809 - RNA, 19 nt, Artificial Sequence
  Description of Artificial Sequence: Synthetic oligonucleotide
  Antisense strand to SEQ ID NO: 2381808
ucugugagaaaccaagagu

SEQ ID NO: 2381810 - RNA, 19 nt, Artificial Sequence
  Description of Artificial Sequence: Synthetic oligonucleotide
  Sense strand starting at position 3525 of SEQ ID NO: 1885995
guuucucacagagauaggu

SEQ ID NO: 2381811 - RNA, 19 nt, Artificial Sequence
  Description of Artificial Sequence: Synthetic oligonucleotide
  Antisense strand to SEQ ID NO: 2381810
accuaucucugugagaaac

SEQ ID NO: 2381812 - RNA, 19 nt, Artificial Sequence
  Description of Artificial Sequence: Synthetic oligonucleotide
  Sense strand starting at position 3538 of SEQ ID NO: 1885995
auaggugguuucuccuuaa

SEQ ID NO: 2381813 - RNA, 19 nt, Artificial Sequence
  Description of Artificial Sequence: Synthetic oligonucleotide
  Antisense strand to SEQ ID NO: 2381812
uuaaggagaaaccaccuau

SEQ ID NO: 2381814 - RNA, 19 nt, Artificial Sequence
  Description of Artificial Sequence: Synthetic oligonucleotide
  Sense strand starting at position 1614 of SEQ ID NO: 1885996
uaguuagaucuugaggcuu

SEQ ID NO: 2381815 - RNA, 19 nt, Artificial Sequence
  Description of Artificial Sequence: Synthetic oligonucleotide
  Antisense strand to SEQ ID NO: 2381814
aagccucaagaucuaacua

SEQ ID NO: 2381816 - RNA, 19 nt, Artificial Sequence
  Description of Artificial Sequence: Synthetic oligonucleotide
  Sense strand starting at position 1620 of SEQ ID NO: 1885996
gaucuugaggcuugauuag

SEQ ID NO: 2381817 - RNA, 19 nt, Artificial Sequence
  Description of Artificial Sequence: Synthetic oligonucleotide
  Antisense strand to SEQ ID NO: 2381816
cuaaucaagccucaagauc

SEQ ID NO: 2381818 - RNA, 19 nt, Artificial Sequence
  Description of Artificial Sequence: Synthetic oligonucleotide
  Sense strand starting at position 1656 of SEQ ID NO: 1885996
aggugaugcucuguauuuc

SEQ ID NO: 2381819 - RNA, 19 nt, Artificial Sequence
  Description of Artificial Sequence: Synthetic oligonucleotide
  Antisense strand to SEQ ID NO: 2381818
gaaauacagagcaucaccu

SEQ ID NO: 2381820 - RNA, 19 nt, Artificial Sequence
  Description of Artificial Sequence: Synthetic oligonucleotide
  Sense strand starting at position 1666 of SEQ ID NO: 1885996
cuguauuuccuaugcaucu

SEQ ID NO: 2381821 - RNA, 19 nt, Artificial Sequence
  Description of Artificial Sequence: Synthetic oligonucleotide
  Antisense strand to SEQ ID NO: 2381820
agaugcauaggaaauacag

SEQ ID NO: 2381822 - RNA, 19 nt, Artificial Sequence
  Description of Artificial Sequence: Synthetic oligonucleotide
  Sense strand starting at position 1675 of SEQ ID NO: 1885996
cuaugcaucucaccaggaa

SEQ ID NO: 2381823 - RNA, 19 nt, Artificial Sequence
  Description of Artificial Sequence: Synthetic oligonucleotide
  Antisense strand to SEQ ID NO: 2381822
uuccuggugagaugcauag

SEQ ID NO: 2381824 - RNA, 19 nt, Artificial Sequence
  Description of Artificial Sequence: Synthetic oligonucleotide
  Sense strand starting at position 1689 of SEQ ID NO: 1885996
aggaaaugauaugauggua

SEQ ID NO: 2381825 - RNA, 19 nt, Artificial Sequence
  Description of Artificial Sequence: Synthetic oligonucleotide
  Antisense strand to SEQ ID NO: 2381824
uaccaucauaucauuuccu

SEQ ID NO: 2381826 - RNA, 19 nt, Artificial Sequence
  Description of Artificial Sequence: Synthetic oligonucleotide
  Sense strand starting at position 1703 of SEQ ID NO: 1885996
ugguaugauugaucagagu

SEQ ID NO: 2381827 - RNA, 19 nt, Artificial Sequence
  Description of Artificial Sequence: Synthetic oligonucleotide
  Antisense strand to SEQ ID NO: 2381826
acucugaucaaucauacca

SEQ ID NO: 2381828 - RNA, 19 nt, Artificial Sequence
  Description of Artificial Sequence: Synthetic oligonucleotide
  Sense strand starting at position 1710 of SEQ ID NO: 1885996
auugaucagaguugaggua

SEQ ID NO: 2381829 - RNA, 19 nt, Artificial Sequence
  Description of Artificial Sequence: Synthetic oligonucleotide
  Antisense strand to SEQ ID NO: 2381828
uaccucaacucugaucaau

SEQ ID NO: 2381830 - RNA, 19 nt, Artificial Sequence
  Description of Artificial Sequence: Synthetic oligonucleotide
  Sense strand starting at position 2411 of SEQ ID NO: 1885996
cugacuucuccaugcugaa

SEQ ID NO: 2381831 - RNA, 19 nt, Artificial Sequence
  Description of Artificial Sequence: Synthetic oligonucleotide
  Antisense strand to SEQ ID NO: 2381830
uucagcauggagaagucag

SEQ ID NO: 2381832 - RNA, 19 nt, Artificial Sequence
  Description of Artificial Sequence: Synthetic oligonucleotide
  Sense strand starting at position 2439 of SEQ ID NO: 1885996
ucgagaccagcucaucuau

SEQ ID NO: 2381833 - RNA, 19 nt, Artificial Sequence
  Description of Artificial Sequence: Synthetic oligonucleotide
  Antisense strand to SEQ ID NO: 2381832
auagaugagcuggucucga

SEQ ID NO: 2381834 - RNA, 19 nt, Artificial Sequence
  Description of Artificial Sequence: Synthetic oligonucleotide
  Sense strand starting at position 2510 of SEQ ID NO: 1885996
gcacucauuggaugcacau

SEQ ID NO: 2381835 - RNA, 19 nt, Artificial Sequence
  Description of Artificial Sequence: Synthetic oligonucleotide
  Antisense strand to SEQ ID NO: 2381834
augugcauccaaugagugc

SEQ ID NO: 2381836 - RNA, 19 nt, Artificial Sequence
  Description of Artificial Sequence: Synthetic oligonucleotide
  Sense strand starting at position 2739 of SEQ ID NO: 1885996
caucuuugccauuagggau

SEQ ID NO: 2381837 - RNA, 19 nt, Artificial Sequence
  Description of Artificial Sequence: Synthetic oligonucleotide
  Antisense strand to SEQ ID NO: 2381836
aucccuaauggcaaagaug

SEQ ID NO: 2381838 - RNA, 19 nt, Artificial Sequence
  Description of Artificial Sequence: Synthetic oligonucleotide
  Sense strand starting at position 2766 of SEQ ID NO: 1885996
uccaguaggagcuguauga

SEQ ID NO: 2381839 - RNA, 19 nt, Artificial Sequence
  Description of Artificial Sequence: Synthetic oligonucleotide
  Antisense strand to SEQ ID NO: 2381838
ucauacagcuccuacugga

SEQ ID NO: 2381840 - RNA, 19 nt, Artificial Sequence
  Description of Artificial Sequence: Synthetic oligonucleotide
  Sense strand starting at position 2777 of SEQ ID NO: 1885996
cuguaugaagcacaaauua

SEQ ID NO: 2381841 - RNA, 19 nt, Artificial Sequence
  Description of Artificial Sequence: Synthetic oligonucleotide
  Antisense strand to SEQ ID NO: 2381840
uaauuugugcuucauacag

SEQ ID NO: 2381842 - RNA, 19 nt, Artificial Sequence
  Description of Artificial Sequence: Synthetic oligonucleotide
  Sense strand starting at position 2805 of SEQ ID NO: 1885996
ggugguaaaugagugauag

SEQ ID NO: 2381843 - RNA, 19 nt, Artificial Sequence
  Description of Artificial Sequence: Synthetic oligonucleotide
  Antisense strand to SEQ ID NO: 2381842
cuaucacucauuuaccacc

SEQ ID NO: 2381844 - RNA, 19 nt, Artificial Sequence
  Description of Artificial Sequence: Synthetic oligonucleotide
  Sense strand starting at position 2806 of SEQ ID NO: 1885996
gugguaaaugagugauaga

SEQ ID NO: 2381845 - RNA, 19 nt, Artificial Sequence
  Description of Artificial Sequence: Synthetic oligonucleotide
  Antisense strand to SEQ ID NO: 2381844
ucuaucacucauuuaccac

SEQ ID NO: 2381846 - RNA, 19 nt, Artificial Sequence
  Description of Artificial Sequence: Synthetic oligonucleotide
  Sense strand starting at position 2815 of SEQ ID NO: 1885996
gagugauagagcuagugua

SEQ ID NO: 2381847 - RNA, 19 nt, Artificial Sequence
  Description of Artificial Sequence: Synthetic oligonucleotide
  Antisense strand to SEQ ID NO: 2381846
uacacuagcucuaucacuc

SEQ ID NO: 2381848 - RNA, 19 nt, Artificial Sequence
  Description of Artificial Sequence: Synthetic oligonucleotide
  Sense strand starting at position 2823 of SEQ ID NO: 1885996
gagcuaguguacccgaaga

SEQ ID NO: 2381849 - RNA, 19 nt, Artificial Sequence
  Description of Artificial Sequence: Synthetic oligonucleotide
  Antisense strand to SEQ ID NO: 2381848
ucuucggguacacuagcuc

SEQ ID NO: 2381850 - RNA, 19 nt, Artificial Sequence
  Description of Artificial Sequence: Synthetic oligonucleotide
  Sense strand starting at position 2870 of SEQ ID NO: 1885996
gggugaugaucuaggagcu

SEQ ID NO: 2381851 - RNA, 19 nt, Artificial Sequence
  Description of Artificial Sequence: Synthetic oligonucleotide
  Antisense strand to SEQ ID NO: 2381850
agcuccuagaucaucaccc

SEQ ID NO: 2381852 - RNA, 19 nt, Artificial Sequence
  Description of Artificial Sequence: Synthetic oligonucleotide
  Sense strand starting at position 2871 of SEQ ID NO: 1885996
ggugaugaucuaggagcuu

SEQ ID NO: 2381853 - RNA, 19 nt, Artificial Sequence
  Description of Artificial Sequence: Synthetic oligonucleotide
  Antisense strand to SEQ ID NO: 2381852
aagcuccuagaucaucacc

SEQ ID NO: 2381854 - RNA, 19 nt, Artificial Sequence
  Description of Artificial Sequence: Synthetic oligonucleotide
  Sense strand starting at position 2895 of SEQ ID NO: 1885996
aagugagugugaguaauaa

SEQ ID NO: 2381855 - RNA, 19 nt, Artificial Sequence
  Description of Artificial Sequence: Synthetic oligonucleotide
  Antisense strand to SEQ ID NO: 2381854
uuauuacucacacucacuu

SEQ ID NO: 2381856 - RNA, 19 nt, Artificial Sequence
  Description of Artificial Sequence: Synthetic oligonucleotide
  Sense strand starting at position 2946 of SEQ ID NO: 1885996
ggcagauagauugguagga

SEQ ID NO: 2381857 - RNA, 19 nt, Artificial Sequence
  Description of Artificial Sequence: Synthetic oligonucleotide
  Antisense strand to SEQ ID NO: 2381856
uccuaccaaucuaucugcc

SEQ ID NO: 2381858 - RNA, 19 nt, Artificial Sequence
  Description of Artificial Sequence: Synthetic oligonucleotide
  Sense strand starting at position 2950 of SEQ ID NO: 1885996
gauagauugguaggagcaa

SEQ ID NO: 2381859 - RNA, 19 nt, Artificial Sequence
  Description of Artificial Sequence: Synthetic oligonucleotide
  Antisense strand to SEQ ID NO: 2381858
uugcuccuaccaaucuauc

SEQ ID NO: 2381860 - RNA, 19 nt, Artificial Sequence
  Description of Artificial Sequence: Synthetic oligonucleotide
  Sense strand starting at position 3097 of SEQ ID NO: 1885996
gugugugguggcguaaaug

SEQ ID NO: 2381861 - RNA, 19 nt, Artificial Sequence
  Description of Artificial Sequence: Synthetic oligonucleotide
  Antisense strand to SEQ ID NO: 2381860
cauuuacgccaccacacac

SEQ ID NO: 2381862 - RNA, 19 nt, Artificial Sequence
  Description of Artificial Sequence: Synthetic oligonucleotide
  Sense strand starting at position 3194 of SEQ ID NO: 1885996
gaaggaaagugauggauuu

SEQ ID NO: 2381863 - RNA, 19 nt, Artificial Sequence
  Description of Artificial Sequence: Synthetic oligonucleotide
  Antisense strand to SEQ ID NO: 2381862
aaauccaucacuuuccuuc

SEQ ID NO: 2381864 - RNA, 19 nt, Artificial Sequence
  Description of Artificial Sequence: Synthetic oligonucleotide
  Sense strand starting at position 3238 of SEQ ID NO: 1885996
aagacuuacugauugguua

SEQ ID NO: 2381865 - RNA, 19 nt, Artificial Sequence
  Description of Artificial Sequence: Synthetic oligonucleotide
  Antisense strand to SEQ ID NO: 2381864
uaaccaaucaguaagucuu

SEQ ID NO: 2381866 - RNA, 19 nt, Artificial Sequence
  Description of Artificial Sequence: Synthetic oligonucleotide
  Sense strand starting at position 3239 of SEQ ID NO: 1885996
agacuuacugauugguuau

SEQ ID NO: 2381867 - RNA, 19 nt, Artificial Sequence
  Description of Artificial Sequence: Synthetic oligonucleotide
  Antisense strand to SEQ ID NO: 2381866
auaaccaaucaguaagucu

SEQ ID NO: 2381868 - RNA, 19 nt, Artificial Sequence
  Description of Artificial Sequence: Synthetic oligonucleotide
  Sense strand starting at position 3241 of SEQ ID NO: 1885996
acuuacugauugguuauaa

SEQ ID NO: 2381869 - RNA, 19 nt, Artificial Sequence
  Description of Artificial Sequence: Synthetic oligonucleotide
  Antisense strand to SEQ ID NO: 2381868
uuauaaccaaucaguaagu

SEQ ID NO: 2381870 - RNA, 19 nt, Artificial Sequence
  Description of Artificial Sequence: Synthetic oligonucleotide
  Sense strand starting at position 3242 of SEQ ID NO: 1885996
cuuacugauugguuauaaa

SEQ ID NO: 2381871 - RNA, 19 nt, Artificial Sequence
  Description of Artificial Sequence: Synthetic oligonucleotide
  Antisense strand to SEQ ID NO: 2381870
uuuauaaccaaucaguaag

SEQ ID NO: 2381872 - RNA, 19 nt, Artificial Sequence
  Description of Artificial Sequence: Synthetic oligonucleotide
  Sense strand starting at position 3294 of SEQ ID NO: 1885996
uaaccuggguuauuaggaa

SEQ ID NO: 2381873 - RNA, 19 nt, Artificial Sequence
  Description of Artificial Sequence: Synthetic oligonucleotide
  Antisense strand to SEQ ID NO: 2381872
uuccuaauaacccagguua

SEQ ID NO: 2381874 - RNA, 19 nt, Artificial Sequence
  Description of Artificial Sequence: Synthetic oligonucleotide
  Sense strand starting at position 3338 of SEQ ID NO: 1885996
uggauuacuuguguaauca

SEQ ID NO: 2381875 - RNA, 19 nt, Artificial Sequence
  Description of Artificial Sequence: Synthetic oligonucleotide
  Antisense strand to SEQ ID NO: 2381874
ugauuacacaaguaaucca

SEQ ID NO: 2381876 - RNA, 19 nt, Artificial Sequence
  Description of Artificial Sequence: Synthetic oligonucleotide
  Sense strand starting at position 3339 of SEQ ID NO: 1885996
ggauuacuuguguaaucau

SEQ ID NO: 2381877 - RNA, 19 nt, Artificial Sequence
  Description of Artificial Sequence: Synthetic oligonucleotide
  Antisense strand to SEQ ID NO: 2381876
augauuacacaaguaaucc

SEQ ID NO: 2381878 - RNA, 19 nt, Artificial Sequence
  Description of Artificial Sequence: Synthetic oligonucleotide
  Sense strand starting at position 3373 of SEQ ID NO: 1885996
augucuguauuccucauua

SEQ ID NO: 2381879 - RNA, 19 nt, Artificial Sequence
  Description of Artificial Sequence: Synthetic oligonucleotide
  Antisense strand to SEQ ID NO: 2381878
uaaugaggaauacagacau

SEQ ID NO: 2381880 - RNA, 19 nt, Artificial Sequence
  Description of Artificial Sequence: Synthetic oligonucleotide
  Sense strand starting at position 3375 of SEQ ID NO: 1885996
gucuguauuccucauuaga

SEQ ID NO: 2381881 - RNA, 19 nt, Artificial Sequence
  Description of Artificial Sequence: Synthetic oligonucleotide
  Antisense strand to SEQ ID NO: 2381880
ucuaaugaggaauacagac

SEQ ID NO: 2381882 - RNA, 19 nt, Artificial Sequence
  Description of Artificial Sequence: Synthetic oligonucleotide
  Sense strand starting at position 3377 of SEQ ID NO: 1885996
cuguauuccucauuagacu

SEQ ID NO: 2381883 - RNA, 19 nt, Artificial Sequence
  Description of Artificial Sequence: Synthetic oligonucleotide
  Antisense strand to SEQ ID NO: 2381882
agucuaaugaggaauacag

SEQ ID NO: 2381884 - RNA, 19 nt, Artificial Sequence
  Description of Artificial Sequence: Synthetic oligonucleotide
  Sense strand starting at position 3555 of SEQ ID NO: 1885996
aguugauuuguuuggguuu

SEQ ID NO: 2381885 - RNA, 19 nt, Artificial Sequence
  Description of Artificial Sequence: Synthetic oligonucleotide
  Antisense strand to SEQ ID NO: 2381884
aaacccaaacaaaucaacu

SEQ ID NO: 2381886 - RNA, 19 nt, Artificial Sequence
  Description of Artificial Sequence: Synthetic oligonucleotide
  Sense strand starting at position 3584 of SEQ ID NO: 1885996
aguuaagaugcccguaaga

SEQ ID NO: 2381887 - RNA, 19 nt, Artificial Sequence
  Description of Artificial Sequence: Synthetic oligonucleotide
  Antisense strand to SEQ ID NO: 2381886
ucuuacgggcaucuuaacu

SEQ ID NO: 2381888 - RNA, 19 nt, Artificial Sequence
  Description of Artificial Sequence: Synthetic oligonucleotide
  Sense strand starting at position 3586 of SEQ ID NO: 1885996
uuaagaugcccguaagaaa

SEQ ID NO: 2381889 - RNA, 19 nt, Artificial Sequence
  Description of Artificial Sequence: Synthetic oligonucleotide
  Antisense strand to SEQ ID NO: 2381888
uuucuuacgggcaucuuaa

SEQ ID NO: 2381890 - RNA, 19 nt, Artificial Sequence
  Description of Artificial Sequence: Synthetic oligonucleotide
  Sense strand starting at position 3593 of SEQ ID NO: 1885996
gcccguaagaaauauagcu

SEQ ID NO: 2381891 - RNA, 19 nt, Artificial Sequence
  Description of Artificial Sequence: Synthetic oligonucleotide
  Antisense strand to SEQ ID NO: 2381890
agcuauauuucuuacgggc

SEQ ID NO: 2381892 - RNA, 19 nt, Artificial Sequence
  Description of Artificial Sequence: Synthetic oligonucleotide
  Sense strand starting at position 3600 of SEQ ID NO: 1885996
agaaauauagcuuguaaca

SEQ ID NO: 2381893 - RNA, 19 nt, Artificial Sequence
  Description of Artificial Sequence: Synthetic oligonucleotide
  Antisense strand to SEQ ID NO: 2381892
uguuacaagcuauauuucu

SEQ ID NO: 2381894 - RNA, 19 nt, Artificial Sequence
  Description of Artificial Sequence: Synthetic oligonucleotide
  Sense strand starting at position 32 of SEQ ID NO: 1885997
ggaauauacucuuaugaca

SEQ ID NO: 2381895 - RNA, 19 nt, Artificial Sequence
  Description of Artificial Sequence: Synthetic oligonucleotide
  Antisense strand to SEQ ID NO: 2381894
ugucauaagaguauauucc

SEQ ID NO: 2381896 - RNA, 19 nt, Artificial Sequence
  Description of Artificial Sequence: Synthetic oligonucleotide
  Sense strand starting at position 249 of SEQ ID NO: 1885997
gagcuuugucucugaucuu

SEQ ID NO: 2381897 - RNA, 19 nt, Artificial Sequence
  Description of Artificial Sequence: Synthetic oligonucleotide
  Antisense strand to SEQ ID NO: 2381896
aagaucagagacaaagcuc

SEQ ID NO: 2381898 - RNA, 19 nt, Artificial Sequence
  Description of Artificial Sequence: Synthetic oligonucleotide
  Sense strand starting at position 355 of SEQ ID NO: 1885997
uucuuaaacuggucuuugu

SEQ ID NO: 2381899 - RNA, 19 nt, Artificial Sequence
  Description of Artificial Sequence: Synthetic oligonucleotide
  Antisense strand to SEQ ID NO: 2381898
acaaagaccaguuuaagaa

SEQ ID NO: 2381900 - RNA, 19 nt, Artificial Sequence
  Description of Artificial Sequence: Synthetic oligonucleotide
  Sense strand starting at position 483 of SEQ ID NO: 1885997
gugggacaauuaguuaacu

SEQ ID NO: 2381901 - RNA, 19 nt, Artificial Sequence
  Description of Artificial Sequence: Synthetic oligonucleotide
  Antisense strand to SEQ ID NO: 2381900
aguuaacuaauugucccac

SEQ ID NO: 2381902 - RNA, 19 nt, Artificial Sequence
  Description of Artificial Sequence: Synthetic oligonucleotide
  Sense strand starting at position 484 of SEQ ID NO: 1885997
ugggacaauuaguuaacua

SEQ ID NO: 2381903 - RNA, 19 nt, Artificial Sequence
  Description of Artificial Sequence: Synthetic oligonucleotide
  Antisense strand to SEQ ID NO: 2381902
uaguuaacuaauuguccca

SEQ ID NO: 2381904 - RNA, 19 nt, Artificial Sequence
  Description of Artificial Sequence: Synthetic oligonucleotide
  Sense strand starting at position 1008 of SEQ ID NO: 1885997
gaaaguccauuguugcuua

SEQ ID NO: 2381905 - RNA, 19 nt, Artificial Sequence
  Description of Artificial Sequence: Synthetic oligonucleotide
  Antisense strand to SEQ ID NO: 2381904
uaagcaacaauggacuuuc

SEQ ID NO: 2381906 - RNA, 19 nt, Artificial Sequence
  Description of Artificial Sequence: Synthetic oligonucleotide
  Sense strand starting at position 1049 of SEQ ID NO: 1885997
uaaagagcaugcuuagagu

SEQ ID NO: 2381907 - RNA, 19 nt, Artificial Sequence
  Description of Artificial Sequence: Synthetic oligonucleotide
  Antisense strand to SEQ ID NO: 2381906
acucuaagcaugcucuuua

SEQ ID NO: 2381908 - RNA, 19 nt, Artificial Sequence
  Description of Artificial Sequence: Synthetic oligonucleotide
  Sense strand starting at position 1097 of SEQ ID NO: 1885997
uauaccaaucaugggagua

SEQ ID NO: 2381909 - RNA, 19 nt, Artificial Sequence
  Description of Artificial Sequence: Synthetic oligonucleotide
  Antisense strand to SEQ ID NO: 2381908
uacucccaugauugguaua

SEQ ID NO: 2381910 - RNA, 19 nt, Artificial Sequence
  Description of Artificial Sequence: Synthetic oligonucleotide
  Sense strand starting at position 1099 of SEQ ID NO: 1885997
uaccaaucaugggaguaga

SEQ ID NO: 2381911 - RNA, 19 nt, Artificial Sequence
  Description of Artificial Sequence: Synthetic oligonucleotide
  Antisense strand to SEQ ID NO: 2381910
ucuacucccaugauuggua

SEQ ID NO: 2381912 - RNA, 19 nt, Artificial Sequence
  Description of Artificial Sequence: Synthetic oligonucleotide
  Sense strand starting at position 1120 of SEQ ID NO: 1885997
gugcuaucaucuuucugga

SEQ ID NO: 2381913 - RNA, 19 nt, Artificial Sequence
  Description of Artificial Sequence: Synthetic oligonucleotide
  Antisense strand to SEQ ID NO: 2381912
uccagaaagaugauagcac

SEQ ID NO: 2381914 - RNA, 19 nt, Artificial Sequence
  Description of Artificial Sequence: Synthetic oligonucleotide
  Sense strand starting at position 1127 of SEQ ID NO: 1885997
caucuuucuggaggucagu

SEQ ID NO: 2381915 - RNA, 19 nt, Artificial Sequence
  Description of Artificial Sequence: Synthetic oligonucleotide
  Antisense strand to SEQ ID NO: 2381914
acugaccuccagaaagaug

SEQ ID NO: 2381916 - RNA, 19 nt, Artificial Sequence
  Description of Artificial Sequence: Synthetic oligonucleotide
  Sense strand starting at position 1152 of SEQ ID NO: 1885997
gacaauuucuaccgagagu

SEQ ID NO: 2381917 - RNA, 19 nt, Artificial Sequence
  Description of Artificial Sequence: Synthetic oligonucleotide
  Antisense strand to SEQ ID NO: 2381916
acucucgguagaaauuguc

SEQ ID NO: 2381918 - RNA, 19 nt, Artificial Sequence
  Description of Artificial Sequence: Synthetic oligonucleotide
  Sense strand starting at position 1561 of SEQ ID NO: 1885997
cauguauacgaagauaucu

SEQ ID NO: 2381919 - RNA, 19 nt, Artificial Sequence
  Description of Artificial Sequence: Synthetic oligonucleotide
  Antisense strand to SEQ ID NO: 2381918
agauaucuucguauacaug

SEQ ID NO: 2381920 - RNA, 19 nt, Artificial Sequence
  Description of Artificial Sequence: Synthetic oligonucleotide
  Sense strand starting at position 1566 of SEQ ID NO: 1885997
auacgaagauaucuguaca

SEQ ID NO: 2381921 - RNA, 19 nt, Artificial Sequence
  Description of Artificial Sequence: Synthetic oligonucleotide
  Antisense strand to SEQ ID NO: 2381920
uguacagauaucuucguau

SEQ ID NO: 2381922 - RNA, 19 nt, Artificial Sequence
  Description of Artificial Sequence: Synthetic oligonucleotide
  Sense strand starting at position 1614 of SEQ ID NO: 1885997
agugaaacauugguauauu

SEQ ID NO: 2381923 - RNA, 19 nt, Artificial Sequence
  Description of Artificial Sequence: Synthetic oligonucleotide
  Antisense strand to SEQ ID NO: 2381922
aauauaccaauguuucacu

SEQ ID NO: 2381924 - RNA, 19 nt, Artificial Sequence
  Description of Artificial Sequence: Synthetic oligonucleotide
  Sense strand starting at position 2061 of SEQ ID NO: 1885997
cuggcaacacuguaaauau

SEQ ID NO: 2381925 - RNA, 19 nt, Artificial Sequence
  Description of Artificial Sequence: Synthetic oligonucleotide
  Antisense strand to SEQ ID NO: 2381924
auauuuacaguguugccag

SEQ ID NO: 2381926 - RNA, 19 nt, Artificial Sequence
  Description of Artificial Sequence: Synthetic oligonucleotide
  Sense strand starting at position 2082 of SEQ ID NO: 1885997
aguggucaaaugugaaacu

SEQ ID NO: 2381927 - RNA, 19 nt, Artificial Sequence
  Description of Artificial Sequence: Synthetic oligonucleotide
  Antisense strand to SEQ ID NO: 2381926
aguuucacauuugaccacu

SEQ ID NO: 2381928 - RNA, 19 nt, Artificial Sequence
  Description of Artificial Sequence: Synthetic oligonucleotide
  Sense strand starting at position 2169 of SEQ ID NO: 1885997
ucauuaauggcauacagca

SEQ ID NO: 2381929 - RNA, 19 nt, Artificial Sequence
  Description of Artificial Sequence: Synthetic oligonucleotide
  Antisense strand to SEQ ID NO: 2381928
ugcuguaugccauuaauga

SEQ ID NO: 2381930 - RNA, 19 nt, Artificial Sequence
  Description of Artificial Sequence: Synthetic oligonucleotide
  Sense strand starting at position 2575 of SEQ ID NO: 1885997
ggcauuacaucuguaacca

SEQ ID NO: 2381931 - RNA, 19 nt, Artificial Sequence
  Description of Artificial Sequence: Synthetic oligonucleotide
  Antisense strand to SEQ ID NO: 2381930
ugguuacagauguaaugcc

SEQ ID NO: 2381932 - RNA, 19 nt, Artificial Sequence
  Description of Artificial Sequence: Synthetic oligonucleotide
  Sense strand starting at position 2670 of SEQ ID NO: 1885997
ggaauugacucauuacuuc

SEQ ID NO: 2381933 - RNA, 19 nt, Artificial Sequence
  Description of Artificial Sequence: Synthetic oligonucleotide
  Antisense strand to SEQ ID NO: 2381932
gaaguaaugagucaauucc

SEQ ID NO: 2381934 - RNA, 19 nt, Artificial Sequence
  Description of Artificial Sequence: Synthetic oligonucleotide
  Sense strand starting at position 2721 of SEQ ID NO: 1885997
ugugaauauuuguuugccu

SEQ ID NO: 2381935 - RNA, 19 nt, Artificial Sequence
  Description of Artificial Sequence: Synthetic oligonucleotide
  Antisense strand to SEQ ID NO: 2381934
aggcaaacaaauauucaca

SEQ ID NO: 2381936 - RNA, 19 nt, Artificial Sequence
  Description of Artificial Sequence: Synthetic oligonucleotide
  Sense strand starting at position 2765 of SEQ ID NO: 1885997
ugcacaaaugaaugaagua

SEQ ID NO: 2381937 - RNA, 19 nt, Artificial Sequence
  Description of Artificial Sequence: Synthetic oligonucleotide
  Antisense strand to SEQ ID NO: 2381936
uacuucauucauuugugca

SEQ ID NO: 2381938 - RNA, 19 nt, Artificial Sequence
  Description of Artificial Sequence: Synthetic oligonucleotide
  Sense strand starting at position 2790 of SEQ ID NO: 1885997
agauucagagccuggugau

SEQ ID NO: 2381939 - RNA, 19 nt, Artificial Sequence
  Description of Artificial Sequence: Synthetic oligonucleotide
  Antisense strand to SEQ ID NO: 2381938
aucaccaggcucugaaucu

SEQ ID NO: 2381940 - RNA, 19 nt, Artificial Sequence
  Description of Artificial Sequence: Synthetic oligonucleotide
  Sense strand starting at position 2907 of SEQ ID NO: 1885997
uggucaaugucuuuccaua

SEQ ID NO: 2381941 - RNA, 19 nt, Artificial Sequence
  Description of Artificial Sequence: Synthetic oligonucleotide
  Antisense strand to SEQ ID NO: 2381940
uauggaaagacauugacca

SEQ ID NO: 2381942 - RNA, 19 nt, Artificial Sequence
  Description of Artificial Sequence: Synthetic oligonucleotide
  Sense strand starting at position 2909 of SEQ ID NO: 1885997
gucaaugucuuuccauaca

SEQ ID NO: 2381943 - RNA, 19 nt, Artificial Sequence
  Description of Artificial Sequence: Synthetic oligonucleotide
  Antisense strand to SEQ ID NO: 2381942
uguauggaaagacauugac

SEQ ID NO: 2381944 - RNA, 19 nt, Artificial Sequence
  Description of Artificial Sequence: Synthetic oligonucleotide
  Sense strand starting at position 2969 of SEQ ID NO: 1885997
cuacuauacuguguaccau

SEQ ID NO: 2381945 - RNA, 19 nt, Artificial Sequence
  Description of Artificial Sequence: Synthetic oligonucleotide
  Antisense strand to SEQ ID NO: 2381944
augguacacaguauaguag

SEQ ID NO: 2381946 - RNA, 19 nt, Artificial Sequence
  Description of Artificial Sequence: Synthetic oligonucleotide
  Sense strand starting at position 3030 of SEQ ID NO: 1885997
ggagauuacugcuuucuaa

SEQ ID NO: 2381947 - RNA, 19 nt, Artificial Sequence
  Description of Artificial Sequence: Synthetic oligonucleotide
  Antisense strand to SEQ ID NO: 2381946
uuagaaagcaguaaucucc

SEQ ID NO: 2381948 - RNA, 19 nt, Artificial Sequence
  Description of Artificial Sequence: Synthetic oligonucleotide
  Sense strand starting at position 3233 of SEQ ID NO: 1885997
caaugcgauguccagaacu

SEQ ID NO: 2381949 - RNA, 19 nt, Artificial Sequence
  Description of Artificial Sequence: Synthetic oligonucleotide
  Antisense strand to SEQ ID NO: 2381948
aguucuggacaucgcauug

SEQ ID NO: 2381950 - RNA, 19 nt, Artificial Sequence
  Description of Artificial Sequence: Synthetic oligonucleotide
  Sense strand starting at position 3235 of SEQ ID NO: 1885997
augcgauguccagaacucu

SEQ ID NO: 2381951 - RNA, 19 nt, Artificial Sequence
  Description of Artificial Sequence: Synthetic oligonucleotide
  Antisense strand to SEQ ID NO: 2381950
agaguucuggacaucgcau

SEQ ID NO: 2381952 - RNA, 19 nt, Artificial Sequence
  Description of Artificial Sequence: Synthetic oligonucleotide
  Sense strand starting at position 3262 of SEQ ID NO: 1885997
cugauacaguuaucacaug

SEQ ID NO: 2381953 - RNA, 19 nt, Artificial Sequence
  Description of Artificial Sequence: Synthetic oligonucleotide
  Antisense strand to SEQ ID NO: 2381952
caugugauaacuguaucag

SEQ ID NO: 2381954 - RNA, 19 nt, Artificial Sequence
  Description of Artificial Sequence: Synthetic oligonucleotide
  Sense strand starting at position 3278 of SEQ ID NO: 1885997
augccauaucuguaugcau

SEQ ID NO: 2381955 - RNA, 19 nt, Artificial Sequence
  Description of Artificial Sequence: Synthetic oligonucleotide
  Antisense strand to SEQ ID NO: 2381954
augcauacagauauggcau

SEQ ID NO: 2381956 - RNA, 19 nt, Artificial Sequence
  Description of Artificial Sequence: Synthetic oligonucleotide
  Sense strand starting at position 3280 of SEQ ID NO: 1885997
gccauaucuguaugcauuu

SEQ ID NO: 2381957 - RNA, 19 nt, Artificial Sequence
  Description of Artificial Sequence: Synthetic oligonucleotide
  Antisense strand to SEQ ID NO: 2381956
aaaugcauacagauauggc

SEQ ID NO: 2381958 - RNA, 19 nt, Artificial Sequence
  Description of Artificial Sequence: Synthetic oligonucleotide
  Sense strand starting at position 3307 of SEQ ID NO: 1885997
ugugguaacagauguguac

SEQ ID NO: 2381959 - RNA, 19 nt, Artificial Sequence
  Description of Artificial Sequence: Synthetic oligonucleotide
  Antisense strand to SEQ ID NO: 2381958
guacacaucuguuaccaca

SEQ ID NO: 2381960 - RNA, 19 nt, Artificial Sequence
  Description of Artificial Sequence: Synthetic oligonucleotide
  Sense strand starting at position 3311 of SEQ ID NO: 1885997
guaacagauguguacacau

SEQ ID NO: 2381961 - RNA, 19 nt, Artificial Sequence
  Description of Artificial Sequence: Synthetic oligonucleotide
  Antisense strand to SEQ ID NO: 2381960
auguguacacaucuguuac

SEQ ID NO: 2381962 - RNA, 19 nt, Artificial Sequence
  Description of Artificial Sequence: Synthetic oligonucleotide
  Sense strand starting at position 3330 of SEQ ID NO: 1885997
augguuuaauguguacaga

SEQ ID NO: 2381963 - RNA, 19 nt, Artificial Sequence
  Description of Artificial Sequence: Synthetic oligonucleotide
  Antisense strand to SEQ ID NO: 2381962
ucuguacacauuaaaccau

SEQ ID NO: 2381964 - RNA, 19 nt, Artificial Sequence
  Description of Artificial Sequence: Synthetic oligonucleotide
  Sense strand starting at position 3331 of SEQ ID NO: 1885997
ugguuuaauguguacagaa

SEQ ID NO: 2381965 - RNA, 19 nt, Artificial Sequence
  Description of Artificial Sequence: Synthetic oligonucleotide
  Antisense strand to SEQ ID NO: 2381964
uucuguacacauuaaacca

SEQ ID NO: 2381966 - RNA, 19 nt, Artificial Sequence
  Description of Artificial Sequence: Synthetic oligonucleotide
  Sense strand starting at position 3333 of SEQ ID NO: 1885997
guuuaauguguacagaaug

SEQ ID NO: 2381967 - RNA, 19 nt, Artificial Sequence
  Description of Artificial Sequence: Synthetic oligonucleotide
  Antisense strand to SEQ ID NO: 2381966
cauucuguacacauuaaac

SEQ ID NO: 2381968 - RNA, 19 nt, Artificial Sequence
  Description of Artificial Sequence: Synthetic oligonucleotide
  Sense strand starting at position 3610 of SEQ ID NO: 1885997
ggcugauuugguugcaggu

SEQ ID NO: 2381969 - RNA, 19 nt, Artificial Sequence
  Description of Artificial Sequence: Synthetic oligonucleotide
  Antisense strand to SEQ ID NO: 2381968
accugcaaccaaaucagcc

SEQ ID NO: 2381970 - RNA, 19 nt, Artificial Sequence
  Description of Artificial Sequence: Synthetic oligonucleotide
  Sense strand starting at position 3834 of SEQ ID NO: 1885997
gggcuaggucugcaagaua

SEQ ID NO: 2381971 - RNA, 19 nt, Artificial Sequence
  Description of Artificial Sequence: Synthetic oligonucleotide
  Antisense strand to SEQ ID NO: 2381970
uaucuugcagaccuagccc

SEQ ID NO: 2381972 - RNA, 19 nt, Artificial Sequence
  Description of Artificial Sequence: Synthetic oligonucleotide
  Sense strand starting at position 3837 of SEQ ID NO: 1885997
cuaggucugcaagauauaa

SEQ ID NO: 2381973 - RNA, 19 nt, Artificial Sequence
  Description of Artificial Sequence: Synthetic oligonucleotide
  Antisense strand to SEQ ID NO: 2381972
uuauaucuugcagaccuag

SEQ ID NO: 2381974 - RNA, 19 nt, Artificial Sequence
  Description of Artificial Sequence: Synthetic oligonucleotide
  Sense strand starting at position 2946 of SEQ ID NO: 1885998
ucaguccuugaaugagauu

SEQ ID NO: 2381975 - RNA, 19 nt, Artificial Sequence
  Description of Artificial Sequence: Synthetic oligonucleotide
  Antisense strand to SEQ ID NO: 2381974
aaucucauucaaggacuga

SEQ ID NO: 2381976 - RNA, 19 nt, Artificial Sequence
  Description of Artificial Sequence: Synthetic oligonucleotide
  Sense strand starting at position 1848 of SEQ ID NO: 1885999
auggcuuccugucccaaga

SEQ ID NO: 2381977 - RNA, 19 nt, Artificial Sequence
  Description of Artificial Sequence: Synthetic oligonucleotide
  Antisense strand to SEQ ID NO: 2381976
ucuugggacaggaagccau

SEQ ID NO: 2381978 - RNA, 19 nt, Artificial Sequence
  Description of Artificial Sequence: Synthetic oligonucleotide
  Sense strand starting at position 1850 of SEQ ID NO: 1885999
ggcuuccugucccaagaaa

SEQ ID NO: 2381979 - RNA, 19 nt, Artificial Sequence
  Description of Artificial Sequence: Synthetic oligonucleotide
  Antisense strand to SEQ ID NO: 2381978
uuucuugggacaggaagcc

SEQ ID NO: 2381980 - RNA, 19 nt, Artificial Sequence
  Description of Artificial Sequence: Synthetic oligonucleotide
  Sense strand starting at position 1923 of SEQ ID NO: 1885999
ugccuuaccugacaauagu

SEQ ID NO: 2381981 - RNA, 19 nt, Artificial Sequence
  Description of Artificial Sequence: Synthetic oligonucleotide
  Antisense strand to SEQ ID NO: 2381980
acuauugucagguaaggca

SEQ ID NO: 2381982 - RNA, 19 nt, Artificial Sequence
  Description of Artificial Sequence: Synthetic oligonucleotide
  Sense strand starting at position 3107 of SEQ ID NO: 1885999
cacagaaugucugacugaa

SEQ ID NO: 2381983 - RNA, 19 nt, Artificial Sequence
  Description of Artificial Sequence: Synthetic oligonucleotide
  Antisense strand to SEQ ID NO: 2381982
uucagucagacauucugug

SEQ ID NO: 2381984 - RNA, 19 nt, Artificial Sequence
  Description of Artificial Sequence: Synthetic oligonucleotide
  Sense strand starting at position 3183 of SEQ ID NO: 1885999
ggagacugcucaucacuau

SEQ ID NO: 2381985 - RNA, 19 nt, Artificial Sequence
  Description of Artificial Sequence: Synthetic oligonucleotide
  Antisense strand to SEQ ID NO: 2381984
auagugaugagcagucucc

SEQ ID NO: 2381986 - RNA, 19 nt, Artificial Sequence
  Description of Artificial Sequence: Synthetic oligonucleotide
  Sense strand starting at position 96 of SEQ ID NO: 1886000
cuaggaguaauuggcuauu

SEQ ID NO: 2381987 - RNA, 19 nt, Artificial Sequence
  Description of Artificial Sequence: Synthetic oligonucleotide
  Antisense strand to SEQ ID NO: 2381986
aauagccaauuacuccuag

SEQ ID NO: 2381988 - RNA, 19 nt, Artificial Sequence
  Description of Artificial Sequence: Synthetic oligonucleotide
  Sense strand starting at position 99 of SEQ ID NO: 1886000
ggaguaauuggcuauucca

SEQ ID NO: 2381989 - RNA, 19 nt, Artificial Sequence
  Description of Artificial Sequence: Synthetic oligonucleotide
  Antisense strand to SEQ ID NO: 2381988
uggaauagccaauuacucc

SEQ ID NO: 2381990 - RNA, 19 nt, Artificial Sequence
  Description of Artificial Sequence: Synthetic oligonucleotide
  Sense strand starting at position 515 of SEQ ID NO: 1886000
aaacuuuagugggugcaaa

SEQ ID NO: 2381991 - RNA, 19 nt, Artificial Sequence
  Description of Artificial Sequence: Synthetic oligonucleotide
  Antisense strand to SEQ ID NO: 2381990
uuugcacccacuaaaguuu

SEQ ID NO: 2381992 - RNA, 19 nt, Artificial Sequence
  Description of Artificial Sequence: Synthetic oligonucleotide
  Sense strand starting at position 533 of SEQ ID NO: 1886000
aucacaugaggaugucauu

SEQ ID NO: 2381993 - RNA, 19 nt, Artificial Sequence
  Description of Artificial Sequence: Synthetic oligonucleotide
  Antisense strand to SEQ ID NO: 2381992
aaugacauccucaugugau

SEQ ID NO: 2381994 - RNA, 19 nt, Artificial Sequence
  Description of Artificial Sequence: Synthetic oligonucleotide
  Sense strand starting at position 566 of SEQ ID NO: 1886000
aauauaguaugucuggaau

SEQ ID NO: 2381995 - RNA, 19 nt, Artificial Sequence
  Description of Artificial Sequence: Synthetic oligonucleotide
  Antisense strand to SEQ ID NO: 2381994
auuccagacauacuauauu

SEQ ID NO: 2381996 - RNA, 19 nt, Artificial Sequence
  Description of Artificial Sequence: Synthetic oligonucleotide
  Sense strand starting at position 572 of SEQ ID NO: 1886000
guaugucuggaaugaaucu

SEQ ID NO: 2381997 - RNA, 19 nt, Artificial Sequence
  Description of Artificial Sequence: Synthetic oligonucleotide
  Antisense strand to SEQ ID NO: 2381996
agauucauuccagacauac

SEQ ID NO: 2381998 - RNA, 19 nt, Artificial Sequence
  Description of Artificial Sequence: Synthetic oligonucleotide
  Sense strand starting at position 851 of SEQ ID NO: 1886000
aggaauuaugcucagcaaa

SEQ ID NO: 2381999 - RNA, 19 nt, Artificial Sequence
  Description of Artificial Sequence: Synthetic oligonucleotide
  Antisense strand to SEQ ID NO: 2381998
uuugcugagcauaauuccu

SEQ ID NO: 2382000 - RNA, 19 nt, Artificial Sequence
  Description of Artificial Sequence: Synthetic oligonucleotide
  Sense strand starting at position 1242 of SEQ ID NO: 1886000
uuaaguaaugagugaacca

SEQ ID NO: 2382001 - RNA, 19 nt, Artificial Sequence
  Description of Artificial Sequence: Synthetic oligonucleotide
  Antisense strand to SEQ ID NO: 2382000
ugguucacucauuacuuaa

SEQ ID NO: 2382002 - RNA, 19 nt, Artificial Sequence
  Description of Artificial Sequence: Synthetic oligonucleotide
  Sense strand starting at position 1264 of SEQ ID NO: 1886000
agauguuacgaucaguaug

SEQ ID NO: 2382003 - RNA, 19 nt, Artificial Sequence
  Description of Artificial Sequence: Synthetic oligonucleotide
  Antisense strand to SEQ ID NO: 2382002
cauacugaucguaacaucu

SEQ ID NO: 2382004 - RNA, 19 nt, Artificial Sequence
  Description of Artificial Sequence: Synthetic oligonucleotide
  Sense strand starting at position 1269 of SEQ ID NO: 1886000
uuacgaucaguaugaggga

SEQ ID NO: 2382005 - RNA, 19 nt, Artificial Sequence
  Description of Artificial Sequence: Synthetic oligonucleotide
  Antisense strand to SEQ ID NO: 2382004
ucccucauacugaucguaa

SEQ ID NO: 2382006 - RNA, 19 nt, Artificial Sequence
  Description of Artificial Sequence: Synthetic oligonucleotide
  Sense strand starting at position 1354 of SEQ ID NO: 1886000
auaguuacugggcaauaau

SEQ ID NO: 2382007 - RNA, 19 nt, Artificial Sequence
  Description of Artificial Sequence: Synthetic oligonucleotide
  Antisense strand to SEQ ID NO: 2382006
auuauugcccaguaacuau

SEQ ID NO: 2382008 - RNA, 19 nt, Artificial Sequence
  Description of Artificial Sequence: Synthetic oligonucleotide
  Sense strand starting at position 1357 of SEQ ID NO: 1886000
guuacugggcaauaauaca

SEQ ID NO: 2382009 - RNA, 19 nt, Artificial Sequence
  Description of Artificial Sequence: Synthetic oligonucleotide
  Antisense strand to SEQ ID NO: 2382008
uguauuauugcccaguaac

SEQ ID NO: 2382010 - RNA, 19 nt, Artificial Sequence
  Description of Artificial Sequence: Synthetic oligonucleotide
  Sense strand starting at position 1375 of SEQ ID NO: 1886000
auuugauucuacuggacaa

SEQ ID NO: 2382011 - RNA, 19 nt, Artificial Sequence
  Description of Artificial Sequence: Synthetic oligonucleotide
  Antisense strand to SEQ ID NO: 2382010
uuguccaguagaaucaaau

SEQ ID NO: 2382012 - RNA, 19 nt, Artificial Sequence
  Description of Artificial Sequence: Synthetic oligonucleotide
  Sense strand starting at position 1812 of SEQ ID NO: 1886000
ccacauagauguucucuuu

SEQ ID NO: 2382013 - RNA, 19 nt, Artificial Sequence
  Description of Artificial Sequence: Synthetic oligonucleotide
  Antisense strand to SEQ ID NO: 2382012
aaagagaacaucuaugugg

SEQ ID NO: 2382014 - RNA, 19 nt, Artificial Sequence
  Description of Artificial Sequence: Synthetic oligonucleotide
  Sense strand starting at position 2064 of SEQ ID NO: 1886000
acuauuaugaggugguaaa

SEQ ID NO: 2382015 - RNA, 19 nt, Artificial Sequence
  Description of Artificial Sequence: Synthetic oligonucleotide
  Antisense strand to SEQ ID NO: 2382014
uuuaccaccucauaauagu

SEQ ID NO: 2382016 - RNA, 19 nt, Artificial Sequence
  Description of Artificial Sequence: Synthetic oligonucleotide
  Sense strand starting at position 2065 of SEQ ID NO: 1886000
cuauuaugaggugguaaau

SEQ ID NO: 2382017 - RNA, 19 nt, Artificial Sequence
  Description of Artificial Sequence: Synthetic oligonucleotide
  Antisense strand to SEQ ID NO: 2382016
auuuaccaccucauaauag

SEQ ID NO: 2382018 - RNA, 19 nt, Artificial Sequence
  Description of Artificial Sequence: Synthetic oligonucleotide
  Sense strand starting at position 2117 of SEQ ID NO: 1886000
cucuuagagcuuuagcacu

SEQ ID NO: 2382019 - RNA, 19 nt, Artificial Sequence
  Description of Artificial Sequence: Synthetic oligonucleotide
  Antisense strand to SEQ ID NO: 2382018
agugcuaaagcucuaagag

SEQ ID NO: 2382020 - RNA, 19 nt, Artificial Sequence
  Description of Artificial Sequence: Synthetic oligonucleotide
  Sense strand starting at position 2263 of SEQ ID NO: 1886000
gccucugcuccucaugaga

SEQ ID NO: 2382021 - RNA, 19 nt, Artificial Sequence
  Description of Artificial Sequence: Synthetic oligonucleotide
  Antisense strand to SEQ ID NO: 2382020
ucucaugaggagcagaggc

SEQ ID NO: 2382022 - RNA, 19 nt, Artificial Sequence
  Description of Artificial Sequence: Synthetic oligonucleotide
  Sense strand starting at position 2342 of SEQ ID NO: 1886000
agaacugaaaggugaguuu

SEQ ID NO: 2382023 - RNA, 19 nt, Artificial Sequence
  Description of Artificial Sequence: Synthetic oligonucleotide
  Antisense strand to SEQ ID NO: 2382022
aaacucaccuuucaguucu

SEQ ID NO: 2382024 - RNA, 19 nt, Artificial Sequence
  Description of Artificial Sequence: Synthetic oligonucleotide
  Sense strand starting at position 2408 of SEQ ID NO: 1886000
guacauuaccuguagcaaa

SEQ ID NO: 2382025 - RNA, 19 nt, Artificial Sequence
  Description of Artificial Sequence: Synthetic oligonucleotide
  Antisense strand to SEQ ID NO: 2382024
uuugcuacagguaauguac

SEQ ID NO: 2382026 - RNA, 19 nt, Artificial Sequence
  Description of Artificial Sequence: Synthetic oligonucleotide
  Sense strand starting at position 2575 of SEQ ID NO: 1886000
caggcaaaguaaucagcau

SEQ ID NO: 2382027 - RNA, 19 nt, Artificial Sequence
  Description of Artificial Sequence: Synthetic oligonucleotide
  Antisense strand to SEQ ID NO: 2382026
augcugauuacuuugccug

SEQ ID NO: 2382028 - RNA, 19 nt, Artificial Sequence
  Description of Artificial Sequence: Synthetic oligonucleotide
  Sense strand starting at position 2581 of SEQ ID NO: 1886000
aaguaaucagcaugacgaa

SEQ ID NO: 2382029 - RNA, 19 nt, Artificial Sequence
  Description of Artificial Sequence: Synthetic oligonucleotide
  Antisense strand to SEQ ID NO: 2382028
uucgucaugcugauuacuu

SEQ ID NO: 2382030 - RNA, 19 nt, Artificial Sequence
  Description of Artificial Sequence: Synthetic oligonucleotide
  Sense strand starting at position 2582 of SEQ ID NO: 1886000
aguaaucagcaugacgaau

SEQ ID NO: 2382031 - RNA, 19 nt, Artificial Sequence
  Description of Artificial Sequence: Synthetic oligonucleotide
  Antisense strand to SEQ ID NO: 2382030
auucgucaugcugauuacu

SEQ ID NO: 2382032 - RNA, 19 nt, Artificial Sequence
  Description of Artificial Sequence: Synthetic oligonucleotide
  Sense strand starting at position 2609 of SEQ ID NO: 1886000
gugauuuggucuccuacuc

SEQ ID NO: 2382033 - RNA, 19 nt, Artificial Sequence
  Description of Artificial Sequence: Synthetic oligonucleotide
  Antisense strand to SEQ ID NO: 2382032
gaguaggagaccaaaucac

SEQ ID NO: 2382034 - RNA, 19 nt, Artificial Sequence
  Description of Artificial Sequence: Synthetic oligonucleotide
  Sense strand starting at position 2654 of SEQ ID NO: 1886000
cucuuagaggcucagagua

SEQ ID NO: 2382035 - RNA, 19 nt, Artificial Sequence
  Description of Artificial Sequence: Synthetic oligonucleotide
  Antisense strand to SEQ ID NO: 2382034
uacucugagccucuaagag

SEQ ID NO: 2382036 - RNA, 19 nt, Artificial Sequence
  Description of Artificial Sequence: Synthetic oligonucleotide
  Sense strand starting at position 2666 of SEQ ID NO: 1886000
cagaguaucccaggcugga

SEQ ID NO: 2382037 - RNA, 19 nt, Artificial Sequence
  Description of Artificial Sequence: Synthetic oligonucleotide
  Antisense strand to SEQ ID NO: 2382036
uccagccugggauacucug

SEQ ID NO: 2382038 - RNA, 19 nt, Artificial Sequence
  Description of Artificial Sequence: Synthetic oligonucleotide
  Sense strand starting at position 2680 of SEQ ID NO: 1886000
cuggacggagucugauaaa

SEQ ID NO: 2382039 - RNA, 19 nt, Artificial Sequence
  Description of Artificial Sequence: Synthetic oligonucleotide
  Antisense strand to SEQ ID NO: 2382038
uuuaucagacuccguccag

SEQ ID NO: 2382040 - RNA, 19 nt, Artificial Sequence
  Description of Artificial Sequence: Synthetic oligonucleotide
  Sense strand starting at position 2690 of SEQ ID NO: 1886000
ucugauaaacuccgugaau

SEQ ID NO: 2382041 - RNA, 19 nt, Artificial Sequence
  Description of Artificial Sequence: Synthetic oligonucleotide
  Antisense strand to SEQ ID NO: 2382040
auucacggaguuuaucaga

SEQ ID NO: 2382042 - RNA, 19 nt, Artificial Sequence
  Description of Artificial Sequence: Synthetic oligonucleotide
  Sense strand starting at position 2691 of SEQ ID NO: 1886000
cugauaaacuccgugaaug

SEQ ID NO: 2382043 - RNA, 19 nt, Artificial Sequence
  Description of Artificial Sequence: Synthetic oligonucleotide
  Antisense strand to SEQ ID NO: 2382042
cauucacggaguuuaucag

SEQ ID NO: 2382044 - RNA, 19 nt, Artificial Sequence
  Description of Artificial Sequence: Synthetic oligonucleotide
  Sense strand starting at position 2693 of SEQ ID NO: 1886000
gauaaacuccgugaaugug

SEQ ID NO: 2382045 - RNA, 19 nt, Artificial Sequence
  Description of Artificial Sequence: Synthetic oligonucleotide
  Antisense strand to SEQ ID NO: 2382044
cacauucacggaguuuauc

SEQ ID NO: 2382046 - RNA, 19 nt, Artificial Sequence
  Description of Artificial Sequence: Synthetic oligonucleotide
  Sense strand starting at position 3044 of SEQ ID NO: 1886000
uguuacaauugcuuaagga

SEQ ID NO: 2382047 - RNA, 19 nt, Artificial Sequence
  Description of Artificial Sequence: Synthetic oligonucleotide
  Antisense strand to SEQ ID NO: 2382046
uccuuaagcaauuguaaca

SEQ ID NO: 2382048 - RNA, 19 nt, Artificial Sequence
  Description of Artificial Sequence: Synthetic oligonucleotide
  Sense strand starting at position 3089 of SEQ ID NO: 1886000
acgugugugcaugucacaa

SEQ ID NO: 2382049 - RNA, 19 nt, Artificial Sequence
  Description of Artificial Sequence: Synthetic oligonucleotide
  Antisense strand to SEQ ID NO: 2382048
uugugacaugcacacacgu

SEQ ID NO: 2382050 - RNA, 19 nt, Artificial Sequence
  Description of Artificial Sequence: Synthetic oligonucleotide
  Sense strand starting at position 3293 of SEQ ID NO: 1886000
ugaauuuggucugauugaa

SEQ ID NO: 2382051 - RNA, 19 nt, Artificial Sequence
  Description of Artificial Sequence: Synthetic oligonucleotide
  Antisense strand to SEQ ID NO: 2382050
uucaaucagaccaaauuca

SEQ ID NO: 2382052 - RNA, 19 nt, Artificial Sequence
  Description of Artificial Sequence: Synthetic oligonucleotide
  Sense strand starting at position 3490 of SEQ ID NO: 1886000
agguuuauuugacauccaa

SEQ ID NO: 2382053 - RNA, 19 nt, Artificial Sequence
  Description of Artificial Sequence: Synthetic oligonucleotide
  Antisense strand to SEQ ID NO: 2382052
uuggaugucaaauaaaccu

SEQ ID NO: 2382054 - RNA, 19 nt, Artificial Sequence
  Description of Artificial Sequence: Synthetic oligonucleotide
  Sense strand starting at position 3560 of SEQ ID NO: 1886000
ugugauuaauaagccuaga

SEQ ID NO: 2382055 - RNA, 19 nt, Artificial Sequence
  Description of Artificial Sequence: Synthetic oligonucleotide
  Antisense strand to SEQ ID NO: 2382054
ucuaggcuuauuaaucaca

SEQ ID NO: 2382056 - RNA, 19 nt, Artificial Sequence
  Description of Artificial Sequence: Synthetic oligonucleotide
  Sense strand starting at position 3571 of SEQ ID NO: 1886000
agccuagagccuuaucaau

SEQ ID NO: 2382057 - RNA, 19 nt, Artificial Sequence
  Description of Artificial Sequence: Synthetic oligonucleotide
  Antisense strand to SEQ ID NO: 2382056
auugauaaggcucuaggcu

SEQ ID NO: 2382058 - RNA, 19 nt, Artificial Sequence
  Description of Artificial Sequence: Synthetic oligonucleotide
  Sense strand starting at position 3737 of SEQ ID NO: 1886000
agccauguaacaggaguua

SEQ ID NO: 2382059 - RNA, 19 nt, Artificial Sequence
  Description of Artificial Sequence: Synthetic oligonucleotide
  Antisense strand to SEQ ID NO: 2382058
uaacuccuguuacauggcu

SEQ ID NO: 2382060 - RNA, 19 nt, Artificial Sequence
  Description of Artificial Sequence: Synthetic oligonucleotide
  Sense strand starting at position 3787 of SEQ ID NO: 1886000
ucucuaucucagcagguau

SEQ ID NO: 2382061 - RNA, 19 nt, Artificial Sequence
  Description of Artificial Sequence: Synthetic oligonucleotide
  Antisense strand to SEQ ID NO: 2382060
auaccugcugagauagaga

SEQ ID NO: 2382062 - RNA, 19 nt, Artificial Sequence
  Description of Artificial Sequence: Synthetic oligonucleotide
  Sense strand starting at position 3917 of SEQ ID NO: 1886000
ucagccagucucuaagaua

SEQ ID NO: 2382063 - RNA, 19 nt, Artificial Sequence
  Description of Artificial Sequence: Synthetic oligonucleotide
  Antisense strand to SEQ ID NO: 2382062
uaucuuagagacuggcuga

SEQ ID NO: 2382064 - RNA, 19 nt, Artificial Sequence
  Description of Artificial Sequence: Synthetic oligonucleotide
  Sense strand starting at position 3925 of SEQ ID NO: 1886000
ucucuaagauaguuggaau

SEQ ID NO: 2382065 - RNA, 19 nt, Artificial Sequence
  Description of Artificial Sequence: Synthetic oligonucleotide
  Antisense strand to SEQ ID NO: 2382064
auuccaacuaucuuagaga

SEQ ID NO: 2382066 - RNA, 19 nt, Artificial Sequence
  Description of Artificial Sequence: Synthetic oligonucleotide
  Sense strand starting at position 30 of SEQ ID NO: 1886001
caggaugcuguugaaacau

SEQ ID NO: 2382067 - RNA, 19 nt, Artificial Sequence
  Description of Artificial Sequence: Synthetic oligonucleotide
  Antisense strand to SEQ ID NO: 2382066
auguuucaacagcauccug

SEQ ID NO: 2382068 - RNA, 19 nt, Artificial Sequence
  Description of Artificial Sequence: Synthetic oligonucleotide
  Sense strand starting at position 178 of SEQ ID NO: 1886001
cccuuagaaucucuguaag

SEQ ID NO: 2382069 - RNA, 19 nt, Artificial Sequence
  Description of Artificial Sequence: Synthetic oligonucleotide
  Antisense strand to SEQ ID NO: 2382068
cuuacagagauucuaaggg

SEQ ID NO: 2382070 - RNA, 19 nt, Artificial Sequence
  Description of Artificial Sequence: Synthetic oligonucleotide
  Sense strand starting at position 181 of SEQ ID NO: 1886001
uuagaaucucuguaagcua

SEQ ID NO: 2382071 - RNA, 19 nt, Artificial Sequence
  Description of Artificial Sequence: Synthetic oligonucleotide
  Antisense strand to SEQ ID NO: 2382070
uagcuuacagagauucuaa

SEQ ID NO: 2382072 - RNA, 19 nt, Artificial Sequence
  Description of Artificial Sequence: Synthetic oligonucleotide
  Sense strand starting at position 188 of SEQ ID NO: 1886001
cucuguaagcuacagaaau

SEQ ID NO: 2382073 - RNA, 19 nt, Artificial Sequence
  Description of Artificial Sequence: Synthetic oligonucleotide
  Antisense strand to SEQ ID NO: 2382072
auuucuguagcuuacagag

SEQ ID NO: 2382074 - RNA, 19 nt, Artificial Sequence
  Description of Artificial Sequence: Synthetic oligonucleotide
  Sense strand starting at position 675 of SEQ ID NO: 1886001
ugaucaguuggguagaagu

SEQ ID NO: 2382075 - RNA, 19 nt, Artificial Sequence
  Description of Artificial Sequence: Synthetic oligonucleotide
  Antisense strand to SEQ ID NO: 2382074
acuucuacccaacugauca

SEQ ID NO: 2382076 - RNA, 19 nt, Artificial Sequence
  Description of Artificial Sequence: Synthetic oligonucleotide
  Sense strand starting at position 698 of SEQ ID NO: 1886001
agauauacauuguuuggga

SEQ ID NO: 2382077 - RNA, 19 nt, Artificial Sequence
  Description of Artificial Sequence: Synthetic oligonucleotide
  Antisense strand to SEQ ID NO: 2382076
ucccaaacaauguauaucu

SEQ ID NO: 2382078 - RNA, 19 nt, Artificial Sequence
  Description of Artificial Sequence: Synthetic oligonucleotide
  Sense strand starting at position 699 of SEQ ID NO: 1886001
gauauacauuguuugggag

SEQ ID NO: 2382079 - RNA, 19 nt, Artificial Sequence
  Description of Artificial Sequence: Synthetic oligonucleotide
  Antisense strand to SEQ ID NO: 2382078
cucccaaacaauguauauc

SEQ ID NO: 2382080 - RNA, 19 nt, Artificial Sequence
  Description of Artificial Sequence: Synthetic oligonucleotide
  Sense strand starting at position 705 of SEQ ID NO: 1886001
cauuguuugggaggagauc

SEQ ID NO: 2382081 - RNA, 19 nt, Artificial Sequence
  Description of Artificial Sequence: Synthetic oligonucleotide
  Antisense strand to SEQ ID NO: 2382080
gaucuccucccaaacaaug

SEQ ID NO: 2382082 - RNA, 19 nt, Artificial Sequence
  Description of Artificial Sequence: Synthetic oligonucleotide
  Sense strand starting at position 839 of SEQ ID NO: 1886001
auaacauugcgucagauau

SEQ ID NO: 2382083 - RNA, 19 nt, Artificial Sequence
  Description of Artificial Sequence: Synthetic oligonucleotide
  Antisense strand to SEQ ID NO: 2382082
auaucugacgcaauguuau

SEQ ID NO: 2382084 - RNA, 19 nt, Artificial Sequence
  Description of Artificial Sequence: Synthetic oligonucleotide
  Sense strand starting at position 956 of SEQ ID NO: 1886001
uuguuauugaauugggaac

SEQ ID NO: 2382085 - RNA, 19 nt, Artificial Sequence
  Description of Artificial Sequence: Synthetic oligonucleotide
  Antisense strand to SEQ ID NO: 2382084
guucccaauucaauaacaa

SEQ ID NO: 2382086 - RNA, 19 nt, Artificial Sequence
  Description of Artificial Sequence: Synthetic oligonucleotide
  Sense strand starting at position 957 of SEQ ID NO: 1886001
uguuauugaauugggaaca

SEQ ID NO: 2382087 - RNA, 19 nt, Artificial Sequence
  Description of Artificial Sequence: Synthetic oligonucleotide
  Antisense strand to SEQ ID NO: 2382086
uguucccaauucaauaaca

SEQ ID NO: 2382088 - RNA, 19 nt, Artificial Sequence
  Description of Artificial Sequence: Synthetic oligonucleotide
  Sense strand starting at position 1186 of SEQ ID NO: 1886001
cuaaauguacucuaaaugu

SEQ ID NO: 2382089 - RNA, 19 nt, Artificial Sequence
  Description of Artificial Sequence: Synthetic oligonucleotide
  Antisense strand to SEQ ID NO: 2382088
acauuuagaguacauuuag

SEQ ID NO: 2382090 - RNA, 19 nt, Artificial Sequence
  Description of Artificial Sequence: Synthetic oligonucleotide
  Sense strand starting at position 1254 of SEQ ID NO: 1886001
guuuauaagaaguagcaug

SEQ ID NO: 2382091 - RNA, 19 nt, Artificial Sequence
  Description of Artificial Sequence: Synthetic oligonucleotide
  Antisense strand to SEQ ID NO: 2382090
caugcuacuucuuauaaac

SEQ ID NO: 2382092 - RNA, 19 nt, Artificial Sequence
  Description of Artificial Sequence: Synthetic oligonucleotide
  Sense strand starting at position 1343 of SEQ ID NO: 1886001
ugagaauguugacuugagu

SEQ ID NO: 2382093 - RNA, 19 nt, Artificial Sequence
  Description of Artificial Sequence: Synthetic oligonucleotide
  Antisense strand to SEQ ID NO: 2382092
acucaagucaacauucuca

SEQ ID NO: 2382094 - RNA, 19 nt, Artificial Sequence
  Description of Artificial Sequence: Synthetic oligonucleotide
  Sense strand starting at position 1352 of SEQ ID NO: 1886001
ugacuugaguaccuagagu

SEQ ID NO: 2382095 - RNA, 19 nt, Artificial Sequence
  Description of Artificial Sequence: Synthetic oligonucleotide
  Antisense strand to SEQ ID NO: 2382094
acucuagguacucaaguca

SEQ ID NO: 2382096 - RNA, 19 nt, Artificial Sequence
  Description of Artificial Sequence: Synthetic oligonucleotide
  Sense strand starting at position 1584 of SEQ ID NO: 1886001
caauguuggcaacaucuga

SEQ ID NO: 2382097 - RNA, 19 nt, Artificial Sequence
  Description of Artificial Sequence: Synthetic oligonucleotide
  Antisense strand to SEQ ID NO: 2382096
ucagauguugccaacauug

SEQ ID NO: 2382098 - RNA, 19 nt, Artificial Sequence
  Description of Artificial Sequence: Synthetic oligonucleotide
  Sense strand starting at position 1612 of SEQ ID NO: 1886001
cggcauguucaggagagaa

SEQ ID NO: 2382099 - RNA, 19 nt, Artificial Sequence
  Description of Artificial Sequence: Synthetic oligonucleotide
  Antisense strand to SEQ ID NO: 2382098
uucucuccugaacaugccg

SEQ ID NO: 2382100 - RNA, 19 nt, Artificial Sequence
  Description of Artificial Sequence: Synthetic oligonucleotide
  Sense strand starting at position 1689 of SEQ ID NO: 1886001
gaguguauucuguaaauuc

SEQ ID NO: 2382101 - RNA, 19 nt, Artificial Sequence
  Description of Artificial Sequence: Synthetic oligonucleotide
  Antisense strand to SEQ ID NO: 2382100
gaauuuacagaauacacuc

SEQ ID NO: 2382102 - RNA, 19 nt, Artificial Sequence
  Description of Artificial Sequence: Synthetic oligonucleotide
  Sense strand starting at position 2167 of SEQ ID NO: 1886001
cacaaacuccguuaaugga

SEQ ID NO: 2382103 - RNA, 19 nt, Artificial Sequence
  Description of Artificial Sequence: Synthetic oligonucleotide
  Antisense strand to SEQ ID NO: 2382102
uccauuaacggaguuugug

SEQ ID NO: 2382104 - RNA, 19 nt, Artificial Sequence
  Description of Artificial Sequence: Synthetic oligonucleotide
  Sense strand starting at position 2289 of SEQ ID NO: 1886001
acacaugaaucaguuguca

SEQ ID NO: 2382105 - RNA, 19 nt, Artificial Sequence
  Description of Artificial Sequence: Synthetic oligonucleotide
  Antisense strand to SEQ ID NO: 2382104
ugacaacugauucaugugu

SEQ ID NO: 2382106 - RNA, 19 nt, Artificial Sequence
  Description of Artificial Sequence: Synthetic oligonucleotide
  Sense strand starting at position 2297 of SEQ ID NO: 1886001
aucaguugucaccaccaca

SEQ ID NO: 2382107 - RNA, 19 nt, Artificial Sequence
  Description of Artificial Sequence: Synthetic oligonucleotide
  Antisense strand to SEQ ID NO: 2382106
ugugguggugacaacugau

SEQ ID NO: 2382108 - RNA, 19 nt, Artificial Sequence
  Description of Artificial Sequence: Synthetic oligonucleotide
  Sense strand starting at position 2585 of SEQ ID NO: 1886001
guagcacaagcagaauauu

SEQ ID NO: 2382109 - RNA, 19 nt, Artificial Sequence
  Description of Artificial Sequence: Synthetic oligonucleotide
  Antisense strand to SEQ ID NO: 2382108
aauauucugcuugugcuac

SEQ ID NO: 2382110 - RNA, 19 nt, Artificial Sequence
  Description of Artificial Sequence: Synthetic oligonucleotide
  Sense strand starting at position 2690 of SEQ ID NO: 1886001
ggaugugcucgagaacacu

SEQ ID NO: 2382111 - RNA, 19 nt, Artificial Sequence
  Description of Artificial Sequence: Synthetic oligonucleotide
  Antisense strand to SEQ ID NO: 2382110
aguguucucgagcacaucc

SEQ ID NO: 2382112 - RNA, 19 nt, Artificial Sequence
  Description of Artificial Sequence: Synthetic oligonucleotide
  Sense strand starting at position 2719 of SEQ ID NO: 1886001
uccaaagccuggucauaag

SEQ ID NO: 2382113 - RNA, 19 nt, Artificial Sequence
  Description of Artificial Sequence: Synthetic oligonucleotide
  Antisense strand to SEQ ID NO: 2382112
cuuaugaccaggcuuugga

SEQ ID NO: 2382114 - RNA, 19 nt, Artificial Sequence
  Description of Artificial Sequence: Synthetic oligonucleotide
  Sense strand starting at position 2815 of SEQ ID NO: 1886001
gcguuacaugaagaacaga

SEQ ID NO: 2382115 - RNA, 19 nt, Artificial Sequence
  Description of Artificial Sequence: Synthetic oligonucleotide
  Antisense strand to SEQ ID NO: 2382114
ucuguucuucauguaacgc

SEQ ID NO: 2382116 - RNA, 19 nt, Artificial Sequence
  Description of Artificial Sequence: Synthetic oligonucleotide
  Sense strand starting at position 2908 of SEQ ID NO: 1886001
guuguugcucuuguguuau

SEQ ID NO: 2382117 - RNA, 19 nt, Artificial Sequence
  Description of Artificial Sequence: Synthetic oligonucleotide
  Antisense strand to SEQ ID NO: 2382116
auaacacaagagcaacaac

SEQ ID NO: 2382118 - RNA, 19 nt, Artificial Sequence
  Description of Artificial Sequence: Synthetic oligonucleotide
  Sense strand starting at position 2914 of SEQ ID NO: 1886001
gcucuuguguuauuuagga

SEQ ID NO: 2382119 - RNA, 19 nt, Artificial Sequence
  Description of Artificial Sequence: Synthetic oligonucleotide
  Antisense strand to SEQ ID NO: 2382118
uccuaaauaacacaagagc

SEQ ID NO: 2382120 - RNA, 19 nt, Artificial Sequence
  Description of Artificial Sequence: Synthetic oligonucleotide
  Sense strand starting at position 2930 of SEQ ID NO: 1886001
ggauucagucagggaagua

SEQ ID NO: 2382121 - RNA, 19 nt, Artificial Sequence
  Description of Artificial Sequence: Synthetic oligonucleotide
  Antisense strand to SEQ ID NO: 2382120
uacuucccugacugaaucc

SEQ ID NO: 2382122 - RNA, 19 nt, Artificial Sequence
  Description of Artificial Sequence: Synthetic oligonucleotide
  Sense strand starting at position 3097 of SEQ ID NO: 1886001
aguugaaauccgugaggac

SEQ ID NO: 2382123 - RNA, 19 nt, Artificial Sequence
  Description of Artificial Sequence: Synthetic oligonucleotide
  Antisense strand to SEQ ID NO: 2382122
guccucacggauuucaacu

SEQ ID NO: 2382124 - RNA, 19 nt, Artificial Sequence
  Description of Artificial Sequence: Synthetic oligonucleotide
  Sense strand starting at position 3098 of SEQ ID NO: 1886001
guugaaauccgugaggaca

SEQ ID NO: 2382125 - RNA, 19 nt, Artificial Sequence
  Description of Artificial Sequence: Synthetic oligonucleotide
  Antisense strand to SEQ ID NO: 2382124
uguccucacggauuucaac

SEQ ID NO: 2382126 - RNA, 19 nt, Artificial Sequence
  Description of Artificial Sequence: Synthetic oligonucleotide
  Sense strand starting at position 3254 of SEQ ID NO: 1886001
uggccuaagacuugaagag

SEQ ID NO: 2382127 - RNA, 19 nt, Artificial Sequence
  Description of Artificial Sequence: Synthetic oligonucleotide
  Antisense strand to SEQ ID NO: 2382126
cucuucaagucuuaggcca

SEQ ID NO: 2382128 - RNA, 19 nt, Artificial Sequence
  Description of Artificial Sequence: Synthetic oligonucleotide
  Sense strand starting at position 3551 of SEQ ID NO: 1886001
ccacuuugccuugagaauc

SEQ ID NO: 2382129 - RNA, 19 nt, Artificial Sequence
  Description of Artificial Sequence: Synthetic oligonucleotide
  Antisense strand to SEQ ID NO: 2382128
gauucucaaggcaaagugg

SEQ ID NO: 2382130 - RNA, 19 nt, Artificial Sequence
  Description of Artificial Sequence: Synthetic oligonucleotide
  Sense strand starting at position 3589 of SEQ ID NO: 1886001
guggguuccauacaucagu

SEQ ID NO: 2382131 - RNA, 19 nt, Artificial Sequence
  Description of Artificial Sequence: Synthetic oligonucleotide
  Antisense strand to SEQ ID NO: 2382130
acugauguauggaacccac

SEQ ID NO: 2382132 - RNA, 19 nt, Artificial Sequence
  Description of Artificial Sequence: Synthetic oligonucleotide
  Sense strand starting at position 3661 of SEQ ID NO: 1886001
gaguuaggcauggagucaa

SEQ ID NO: 2382133 - RNA, 19 nt, Artificial Sequence
  Description of Artificial Sequence: Synthetic oligonucleotide
  Antisense strand to SEQ ID NO: 2382132
uugacuccaugccuaacuc

SEQ ID NO: 2382134 - RNA, 19 nt, Artificial Sequence
  Description of Artificial Sequence: Synthetic oligonucleotide
  Sense strand starting at position 3669 of SEQ ID NO: 1886001
cauggagucaagugaugga

SEQ ID NO: 2382135 - RNA, 19 nt, Artificial Sequence
  Description of Artificial Sequence: Synthetic oligonucleotide
  Antisense strand to SEQ ID NO: 2382134
uccaucacuugacuccaug

SEQ ID NO: 2382136 - RNA, 19 nt, Artificial Sequence
  Description of Artificial Sequence: Synthetic oligonucleotide
  Sense strand starting at position 3673 of SEQ ID NO: 1886001
gagucaagugauggaauua

SEQ ID NO: 2382137 - RNA, 19 nt, Artificial Sequence
  Description of Artificial Sequence: Synthetic oligonucleotide
  Antisense strand to SEQ ID NO: 2382136
uaauuccaucacuugacuc

SEQ ID NO: 2382138 - RNA, 19 nt, Artificial Sequence
  Description of Artificial Sequence: Synthetic oligonucleotide
  Sense strand starting at position 3691 of SEQ ID NO: 1886001
acaagauggccuggaguga

SEQ ID NO: 2382139 - RNA, 19 nt, Artificial Sequence
  Description of Artificial Sequence: Synthetic oligonucleotide
  Antisense strand to SEQ ID NO: 2382138
ucacuccaggccaucuugu

SEQ ID NO: 2382140 - RNA, 19 nt, Artificial Sequence
  Description of Artificial Sequence: Synthetic oligonucleotide
  Sense strand starting at position 3695 of SEQ ID NO: 1886001
gauggccuggagugaaaua

SEQ ID NO: 2382141 - RNA, 19 nt, Artificial Sequence
  Description of Artificial Sequence: Synthetic oligonucleotide
  Antisense strand to SEQ ID NO: 2382140
uauuucacuccaggccauc

SEQ ID NO: 2382142 - RNA, 19 nt, Artificial Sequence
  Description of Artificial Sequence: Synthetic oligonucleotide
  Sense strand starting at position 3700 of SEQ ID NO: 1886001
ccuggagugaaauaugguu

SEQ ID NO: 2382143 - RNA, 19 nt, Artificial Sequence
  Description of Artificial Sequence: Synthetic oligonucleotide
  Antisense strand to SEQ ID NO: 2382142
aaccauauuucacuccagg

SEQ ID NO: 2382144 - RNA, 19 nt, Artificial Sequence
  Description of Artificial Sequence: Synthetic oligonucleotide
  Sense strand starting at position 3888 of SEQ ID NO: 1886001
acauauuaucugggacuuu

SEQ ID NO: 2382145 - RNA, 19 nt, Artificial Sequence
  Description of Artificial Sequence: Synthetic oligonucleotide
  Antisense strand to SEQ ID NO: 2382144
aaagucccagauaauaugu

SEQ ID NO: 2382146 - RNA, 19 nt, Artificial Sequence
  Description of Artificial Sequence: Synthetic oligonucleotide
  Sense strand starting at position 95 of SEQ ID NO: 1886002
gaguuaaugcgguaaagag

SEQ ID NO: 2382147 - RNA, 19 nt, Artificial Sequence
  Description of Artificial Sequence: Synthetic oligonucleotide
  Antisense strand to SEQ ID NO: 2382146
cucuuuaccgcauuaacuc

SEQ ID NO: 2382148 - RNA, 19 nt, Artificial Sequence
  Description of Artificial Sequence: Synthetic oligonucleotide
  Sense strand starting at position 174 of SEQ ID NO: 1886002
ggaaaucaagucuggguua

SEQ ID NO: 2382149 - RNA, 19 nt, Artificial Sequence
  Description of Artificial Sequence: Synthetic oligonucleotide
  Antisense strand to SEQ ID NO: 2382148
uaacccagacuugauuucc

SEQ ID NO: 2382150 - RNA, 19 nt, Artificial Sequence
  Description of Artificial Sequence: Synthetic oligonucleotide
  Sense strand starting at position 176 of SEQ ID NO: 1886002
aaaucaagucuggguuauc

SEQ ID NO: 2382151 - RNA, 19 nt, Artificial Sequence
  Description of Artificial Sequence: Synthetic oligonucleotide
  Antisense strand to SEQ ID NO: 2382150
gauaacccagacuugauuu

SEQ ID NO: 2382152 - RNA, 19 nt, Artificial Sequence
  Description of Artificial Sequence: Synthetic oligonucleotide
  Sense strand starting at position 179 of SEQ ID NO: 1886002
ucaagucuggguuaucgga

SEQ ID NO: 2382153 - RNA, 19 nt, Artificial Sequence
  Description of Artificial Sequence: Synthetic oligonucleotide
  Antisense strand to SEQ ID NO: 2382152
uccgauaacccagacuuga

SEQ ID NO: 2382154 - RNA, 19 nt, Artificial Sequence
  Description of Artificial Sequence: Synthetic oligonucleotide
  Sense strand starting at position 195 of SEQ ID NO: 1886002
ggacuuacugcugagugau

SEQ ID NO: 2382155 - RNA, 19 nt, Artificial Sequence
  Description of Artificial Sequence: Synthetic oligonucleotide
  Antisense strand to SEQ ID NO: 2382154
aucacucagcaguaagucc

SEQ ID NO: 2382156 - RNA, 19 nt, Artificial Sequence
  Description of Artificial Sequence: Synthetic oligonucleotide
  Sense strand starting at position 458 of SEQ ID NO: 1886002
cucaguaauggcuaacaug

SEQ ID NO: 2382157 - RNA, 19 nt, Artificial Sequence
  Description of Artificial Sequence: Synthetic oligonucleotide
  Antisense strand to SEQ ID NO: 2382156
cauguuagccauuacugag

SEQ ID NO: 2382158 - RNA, 19 nt, Artificial Sequence
  Description of Artificial Sequence: Synthetic oligonucleotide
  Sense strand starting at position 485 of SEQ ID NO: 1886002
acacguggcaaagauagua

SEQ ID NO: 2382159 - RNA, 19 nt, Artificial Sequence
  Description of Artificial Sequence: Synthetic oligonucleotide
  Antisense strand to SEQ ID NO: 2382158
uacuaucuuugccacgugu

SEQ ID NO: 2382160 - RNA, 19 nt, Artificial Sequence
  Description of Artificial Sequence: Synthetic oligonucleotide
  Sense strand starting at position 559 of SEQ ID NO: 1886002
acacaaauguaugcagaua

SEQ ID NO: 2382161 - RNA, 19 nt, Artificial Sequence
  Description of Artificial Sequence: Synthetic oligonucleotide
  Antisense strand to SEQ ID NO: 2382160
uaucugcauacauuugugu

SEQ ID NO: 2382162 - RNA, 19 nt, Artificial Sequence
  Description of Artificial Sequence: Synthetic oligonucleotide
  Sense strand starting at position 574 of SEQ ID NO: 1886002
gauauuuaguaagcgcuca

SEQ ID NO: 2382163 - RNA, 19 nt, Artificial Sequence
  Description of Artificial Sequence: Synthetic oligonucleotide
  Antisense strand to SEQ ID NO: 2382162
ugagcgcuuacuaaauauc

SEQ ID NO: 2382164 - RNA, 19 nt, Artificial Sequence
  Description of Artificial Sequence: Synthetic oligonucleotide
  Sense strand starting at position 634 of SEQ ID NO: 1886002
aggcaacaccucuauguuu

SEQ ID NO: 2382165 - RNA, 19 nt, Artificial Sequence
  Description of Artificial Sequence: Synthetic oligonucleotide
  Antisense strand to SEQ ID NO: 2382164
aaacauagagguguugccu

SEQ ID NO: 2382166 - RNA, 19 nt, Artificial Sequence
  Description of Artificial Sequence: Synthetic oligonucleotide
  Sense strand starting at position 812 of SEQ ID NO: 1886002
ucugaauauuuagacaaag

SEQ ID NO: 2382167 - RNA, 19 nt, Artificial Sequence
  Description of Artificial Sequence: Synthetic oligonucleotide
  Antisense strand to SEQ ID NO: 2382166
cuuugucuaaauauucaga

SEQ ID NO: 2382168 - RNA, 19 nt, Artificial Sequence
  Description of Artificial Sequence: Synthetic oligonucleotide
  Sense strand starting at position 844 of SEQ ID NO: 1886002
cuuguugcacuagaaguaa

SEQ ID NO: 2382169 - RNA, 19 nt, Artificial Sequence
  Description of Artificial Sequence: Synthetic oligonucleotide
  Antisense strand to SEQ ID NO: 2382168
uuacuucuagugcaacaag

SEQ ID NO: 2382170 - RNA, 19 nt, Artificial Sequence
  Description of Artificial Sequence: Synthetic oligonucleotide
  Sense strand starting at position 914 of SEQ ID NO: 1886002
cuacaucuucugggugaca

SEQ ID NO: 2382171 - RNA, 19 nt, Artificial Sequence
  Description of Artificial Sequence: Synthetic oligonucleotide
  Antisense strand to SEQ ID NO: 2382170
ugucacccagaagauguag

SEQ ID NO: 2382172 - RNA, 19 nt, Artificial Sequence
  Description of Artificial Sequence: Synthetic oligonucleotide
  Sense strand starting at position 915 of SEQ ID NO: 1886002
uacaucuucugggugacaa

SEQ ID NO: 2382173 - RNA, 19 nt, Artificial Sequence
  Description of Artificial Sequence: Synthetic oligonucleotide
  Antisense strand to SEQ ID NO: 2382172
uugucacccagaagaugua

SEQ ID NO: 2382174 - RNA, 19 nt, Artificial Sequence
  Description of Artificial Sequence: Synthetic oligonucleotide
  Sense strand starting at position 916 of SEQ ID NO: 1886002
acaucuucugggugacaag

SEQ ID NO: 2382175 - RNA, 19 nt, Artificial Sequence
  Description of Artificial Sequence: Synthetic oligonucleotide
  Antisense strand to SEQ ID NO: 2382174
cuugucacccagaagaugu

SEQ ID NO: 2382176 - RNA, 19 nt, Artificial Sequence
  Description of Artificial Sequence: Synthetic oligonucleotide
  Sense strand starting at position 969 of SEQ ID NO: 1886002
uuuacuucgguauaaacau

SEQ ID NO: 2382177 - RNA, 19 nt, Artificial Sequence
  Description of Artificial Sequence: Synthetic oligonucleotide
  Antisense strand to SEQ ID NO: 2382176
auguuuauaccgaaguaaa

SEQ ID NO: 2382178 - RNA, 19 nt, Artificial Sequence
  Description of Artificial Sequence: Synthetic oligonucleotide
  Sense strand starting at position 975 of SEQ ID NO: 1886002
ucgguauaaacauauguga

SEQ ID NO: 2382179 - RNA, 19 nt, Artificial Sequence
  Description of Artificial Sequence: Synthetic oligonucleotide
  Antisense strand to SEQ ID NO: 2382178
ucacauauguuuauaccga

SEQ ID NO: 2382180 - RNA, 19 nt, Artificial Sequence
  Description of Artificial Sequence: Synthetic oligonucleotide
  Sense strand starting at position 1370 of SEQ ID NO: 1886002
aucucagacuguuccugaa

SEQ ID NO: 2382181 - RNA, 19 nt, Artificial Sequence
  Description of Artificial Sequence: Synthetic oligonucleotide
  Antisense strand to SEQ ID NO: 2382180
uucaggaacagucugagau

SEQ ID NO: 2382182 - RNA, 19 nt, Artificial Sequence
  Description of Artificial Sequence: Synthetic oligonucleotide
  Sense strand starting at position 1374 of SEQ ID NO: 1886002
cagacuguuccugaaguuu

SEQ ID NO: 2382183 - RNA, 19 nt, Artificial Sequence
  Description of Artificial Sequence: Synthetic oligonucleotide
  Antisense strand to SEQ ID NO: 2382182
aaacuucaggaacagucug

SEQ ID NO: 2382184 - RNA, 19 nt, Artificial Sequence
  Description of Artificial Sequence: Synthetic oligonucleotide
  Sense strand starting at position 1617 of SEQ ID NO: 1886002
cucugucaggcucaacuaa

SEQ ID NO: 2382185 - RNA, 19 nt, Artificial Sequence
  Description of Artificial Sequence: Synthetic oligonucleotide
  Antisense strand to SEQ ID NO: 2382184
uuaguugagccugacagag

SEQ ID NO: 2382186 - RNA, 19 nt, Artificial Sequence
  Description of Artificial Sequence: Synthetic oligonucleotide
  Sense strand starting at position 1987 of SEQ ID NO: 1886002
ucagcuugauaaguacaga

SEQ ID NO: 2382187 - RNA, 19 nt, Artificial Sequence
  Description of Artificial Sequence: Synthetic oligonucleotide
  Antisense strand to SEQ ID NO: 2382186
ucuguacuuaucaagcuga

SEQ ID NO: 2382188 - RNA, 19 nt, Artificial Sequence
  Description of Artificial Sequence: Synthetic oligonucleotide
  Sense strand starting at position 1992 of SEQ ID NO: 1886002
uugauaaguacagaacguu

SEQ ID NO: 2382189 - RNA, 19 nt, Artificial Sequence
  Description of Artificial Sequence: Synthetic oligonucleotide
  Antisense strand to SEQ ID NO: 2382188
aacguucuguacuuaucaa

SEQ ID NO: 2382190 - RNA, 19 nt, Artificial Sequence
  Description of Artificial Sequence: Synthetic oligonucleotide
  Sense strand starting at position 2019 of SEQ ID NO: 1886002
gguucuguucuuugaauuu

SEQ ID NO: 2382191 - RNA, 19 nt, Artificial Sequence
  Description of Artificial Sequence: Synthetic oligonucleotide
  Antisense strand to SEQ ID NO: 2382190
aaauucaaagaacagaacc

SEQ ID NO: 2382192 - RNA, 19 nt, Artificial Sequence
  Description of Artificial Sequence: Synthetic oligonucleotide
  Sense strand starting at position 2200 of SEQ ID NO: 1886002
gagagaauuugguaaguaa

SEQ ID NO: 2382193 - RNA, 19 nt, Artificial Sequence
  Description of Artificial Sequence: Synthetic oligonucleotide
  Antisense strand to SEQ ID NO: 2382192
uuacuuaccaaauucucuc

SEQ ID NO: 2382194 - RNA, 19 nt, Artificial Sequence
  Description of Artificial Sequence: Synthetic oligonucleotide
  Sense strand starting at position 2396 of SEQ ID NO: 1886002
uagcucugagacugacuau

SEQ ID NO: 2382195 - RNA, 19 nt, Artificial Sequence
  Description of Artificial Sequence: Synthetic oligonucleotide
  Antisense strand to SEQ ID NO: 2382194
auagucagucucagagcua

SEQ ID NO: 2382196 - RNA, 19 nt, Artificial Sequence
  Description of Artificial Sequence: Synthetic oligonucleotide
  Sense strand starting at position 2461 of SEQ ID NO: 1886002
gccagucuacgacauaaug

SEQ ID NO: 2382197 - RNA, 19 nt, Artificial Sequence
  Description of Artificial Sequence: Synthetic oligonucleotide
  Antisense strand to SEQ ID NO: 2382196
cauuaugucguagacuggc

SEQ ID NO: 2382198 - RNA, 19 nt, Artificial Sequence
  Description of Artificial Sequence: Synthetic oligonucleotide
  Sense strand starting at position 2552 of SEQ ID NO: 1886002
cuugaaauaguuugaggac

SEQ ID NO: 2382199 - RNA, 19 nt, Artificial Sequence
  Description of Artificial Sequence: Synthetic oligonucleotide
  Antisense strand to SEQ ID NO: 2382198
guccucaaacuauuucaag

SEQ ID NO: 2382200 - RNA, 19 nt, Artificial Sequence
  Description of Artificial Sequence: Synthetic oligonucleotide
  Sense strand starting at position 2741 of SEQ ID NO: 1886002
caagaacuagcuugaguau

SEQ ID NO: 2382201 - RNA, 19 nt, Artificial Sequence
  Description of Artificial Sequence: Synthetic oligonucleotide
  Antisense strand to SEQ ID NO: 2382200
auacucaagcuaguucuug

SEQ ID NO: 2382202 - RNA, 19 nt, Artificial Sequence
  Description of Artificial Sequence: Synthetic oligonucleotide
  Sense strand starting at position 2742 of SEQ ID NO: 1886002
aagaacuagcuugaguauu

SEQ ID NO: 2382203 - RNA, 19 nt, Artificial Sequence
  Description of Artificial Sequence: Synthetic oligonucleotide
  Antisense strand to SEQ ID NO: 2382202
aauacucaagcuaguucuu

SEQ ID NO: 2382204 - RNA, 19 nt, Artificial Sequence
  Description of Artificial Sequence: Synthetic oligonucleotide
  Sense strand starting at position 2778 of SEQ ID NO: 1886002
aagguuauauggucucaau

SEQ ID NO: 2382205 - RNA, 19 nt, Artificial Sequence
  Description of Artificial Sequence: Synthetic oligonucleotide
  Antisense strand to SEQ ID NO: 2382204
auugagaccauauaaccuu

SEQ ID NO: 2382206 - RNA, 19 nt, Artificial Sequence
  Description of Artificial Sequence: Synthetic oligonucleotide
  Sense strand starting at position 2870 of SEQ ID NO: 1886002
uuaagagacaaugguguua

SEQ ID NO: 2382207 - RNA, 19 nt, Artificial Sequence
  Description of Artificial Sequence: Synthetic oligonucleotide
  Antisense strand to SEQ ID NO: 2382206
uaacaccauugucucuuaa

SEQ ID NO: 2382208 - RNA, 19 nt, Artificial Sequence
  Description of Artificial Sequence: Synthetic oligonucleotide
  Sense strand starting at position 3408 of SEQ ID NO: 1886002
ggugcaaaggucuggaaga

SEQ ID NO: 2382209 - RNA, 19 nt, Artificial Sequence
  Description of Artificial Sequence: Synthetic oligonucleotide
  Antisense strand to SEQ ID NO: 2382208
ucuuccagaccuuugcacc

SEQ ID NO: 2382210 - RNA, 19 nt, Artificial Sequence
  Description of Artificial Sequence: Synthetic oligonucleotide
  Sense strand starting at position 3519 of SEQ ID NO: 1886002
gaucaauggcauuaauugu

SEQ ID NO: 2382211 - RNA, 19 nt, Artificial Sequence
  Description of Artificial Sequence: Synthetic oligonucleotide
  Antisense strand to SEQ ID NO: 2382210
acaauuaaugccauugauc

SEQ ID NO: 2382212 - RNA, 19 nt, Artificial Sequence
  Description of Artificial Sequence: Synthetic oligonucleotide
  Sense strand starting at position 3552 of SEQ ID NO: 1886002
agaugccaucuaggacaaa

SEQ ID NO: 2382213 - RNA, 19 nt, Artificial Sequence
  Description of Artificial Sequence: Synthetic oligonucleotide
  Antisense strand to SEQ ID NO: 2382212
uuuguccuagauggcaucu

SEQ ID NO: 2382214 - RNA, 19 nt, Artificial Sequence
  Description of Artificial Sequence: Synthetic oligonucleotide
  Sense strand starting at position 3567 of SEQ ID NO: 1886002
caaagaagucauugcucag

SEQ ID NO: 2382215 - RNA, 19 nt, Artificial Sequence
  Description of Artificial Sequence: Synthetic oligonucleotide
  Antisense strand to SEQ ID NO: 2382214
cugagcaaugacuucuuug

SEQ ID NO: 2382216 - RNA, 19 nt, Artificial Sequence
  Description of Artificial Sequence: Synthetic oligonucleotide
  Sense strand starting at position 3632 of SEQ ID NO: 1886002
ccuagcuuuguugaauuaa

SEQ ID NO: 2382217 - RNA, 19 nt, Artificial Sequence
  Description of Artificial Sequence: Synthetic oligonucleotide
  Antisense strand to SEQ ID NO: 2382216
uuaauucaacaaagcuagg

SEQ ID NO: 2382218 - RNA, 19 nt, Artificial Sequence
  Description of Artificial Sequence: Synthetic oligonucleotide
  Sense strand starting at position 3714 of SEQ ID NO: 1886002
acuacagagguuuacugua

SEQ ID NO: 2382219 - RNA, 19 nt, Artificial Sequence
  Description of Artificial Sequence: Synthetic oligonucleotide
  Antisense strand to SEQ ID NO: 2382218
uacaguaaaccucuguagu

SEQ ID NO: 2382220 - RNA, 19 nt, Artificial Sequence
  Description of Artificial Sequence: Synthetic oligonucleotide
  Sense strand starting at position 3719 of SEQ ID NO: 1886002
agagguuuacuguaagcca

SEQ ID NO: 2382221 - RNA, 19 nt, Artificial Sequence
  Description of Artificial Sequence: Synthetic oligonucleotide
  Antisense strand to SEQ ID NO: 2382220
uggcuuacaguaaaccucu

SEQ ID NO: 2382222 - RNA, 19 nt, Artificial Sequence
  Description of Artificial Sequence: Synthetic oligonucleotide
  Sense strand starting at position 3923 of SEQ ID NO: 1886002
uuugcaauagaguagaagu

SEQ ID NO: 2382223 - RNA, 19 nt, Artificial Sequence
  Description of Artificial Sequence: Synthetic oligonucleotide
  Antisense strand to SEQ ID NO: 2382222
acuucuacucuauugcaaa

SEQ ID NO: 2382224 - RNA, 19 nt, Artificial Sequence
  Description of Artificial Sequence: Synthetic oligonucleotide
  Sense strand starting at position 3962 of SEQ ID NO: 1886002
agaaucagucugggauagu

SEQ ID NO: 2382225 - RNA, 19 nt, Artificial Sequence
  Description of Artificial Sequence: Synthetic oligonucleotide
  Antisense strand to SEQ ID NO: 2382224
acuaucccagacugauucu

SEQ ID NO: 2382226 - RNA, 19 nt, Artificial Sequence
  Description of Artificial Sequence: Synthetic oligonucleotide
  Sense strand starting at position 27 of SEQ ID NO: 1886003
auaguagcccuaugaacaa

SEQ ID NO: 2382227 - RNA, 19 nt, Artificial Sequence
  Description of Artificial Sequence: Synthetic oligonucleotide
  Antisense strand to SEQ ID NO: 2382226
uuguucauagggcuacuau

SEQ ID NO: 2382228 - RNA, 19 nt, Artificial Sequence
  Description of Artificial Sequence: Synthetic oligonucleotide
  Sense strand starting at position 207 of SEQ ID NO: 1886003
aguacucaauagguauuau

SEQ ID NO: 2382229 - RNA, 19 nt, Artificial Sequence
  Description of Artificial Sequence: Synthetic oligonucleotide
  Antisense strand to SEQ ID NO: 2382228
auaauaccuauugaguacu

SEQ ID NO: 2382230 - RNA, 19 nt, Artificial Sequence
  Description of Artificial Sequence: Synthetic oligonucleotide
  Sense strand starting at position 235 of SEQ ID NO: 1886003
uuagguaaguucuugauca

SEQ ID NO: 2382231 - RNA, 19 nt, Artificial Sequence
  Description of Artificial Sequence: Synthetic oligonucleotide
  Antisense strand to SEQ ID NO: 2382230
ugaucaagaacuuaccuaa

SEQ ID NO: 2382232 - RNA, 19 nt, Artificial Sequence
  Description of Artificial Sequence: Synthetic oligonucleotide
  Sense strand starting at position 237 of SEQ ID NO: 1886003
agguaaguucuugaucauu

SEQ ID NO: 2382233 - RNA, 19 nt, Artificial Sequence
  Description of Artificial Sequence: Synthetic oligonucleotide
  Antisense strand to SEQ ID NO: 2382232
aaugaucaagaacuuaccu

SEQ ID NO: 2382234 - RNA, 19 nt, Artificial Sequence
  Description of Artificial Sequence: Synthetic oligonucleotide
  Sense strand starting at position 239 of SEQ ID NO: 1886003
guaaguucuugaucauuaa

SEQ ID NO: 2382235 - RNA, 19 nt, Artificial Sequence
  Description of Artificial Sequence: Synthetic oligonucleotide
  Antisense strand to SEQ ID NO: 2382234
uuaaugaucaagaacuuac

SEQ ID NO: 2382236 - RNA, 19 nt, Artificial Sequence
  Description of Artificial Sequence: Synthetic oligonucleotide
  Sense strand starting at position 367 of SEQ ID NO: 1886003
cucuauuaguauucugaag

SEQ ID NO: 2382237 - RNA, 19 nt, Artificial Sequence
  Description of Artificial Sequence: Synthetic oligonucleotide
  Antisense strand to SEQ ID NO: 2382236
cuucagaauacuaauagag

SEQ ID NO: 2382238 - RNA, 19 nt, Artificial Sequence
  Description of Artificial Sequence: Synthetic oligonucleotide
  Sense strand starting at position 382 of SEQ ID NO: 1886003
gaagguaugccauaucaca

SEQ ID NO: 2382239 - RNA, 19 nt, Artificial Sequence
  Description of Artificial Sequence: Synthetic oligonucleotide
  Antisense strand to SEQ ID NO: 2382238
ugugauauggcauaccuuc

SEQ ID NO: 2382240 - RNA, 19 nt, Artificial Sequence
  Description of Artificial Sequence: Synthetic oligonucleotide
  Sense strand starting at position 427 of SEQ ID NO: 1886003
ggcauacucuagcuuuaaa

SEQ ID NO: 2382241 - RNA, 19 nt, Artificial Sequence
  Description of Artificial Sequence: Synthetic oligonucleotide
  Antisense strand to SEQ ID NO: 2382240
uuuaaagcuagaguaugcc

SEQ ID NO: 2382242 - RNA, 19 nt, Artificial Sequence
  Description of Artificial Sequence: Synthetic oligonucleotide
  Sense strand starting at position 475 of SEQ ID NO: 1886003
ucaauacaugauuggguau

SEQ ID NO: 2382243 - RNA, 19 nt, Artificial Sequence
  Description of Artificial Sequence: Synthetic oligonucleotide
  Antisense strand to SEQ ID NO: 2382242
auacccaaucauguauuga

SEQ ID NO: 2382244 - RNA, 19 nt, Artificial Sequence
  Description of Artificial Sequence: Synthetic oligonucleotide
  Sense strand starting at position 859 of SEQ ID NO: 1886003
acuugcaugugaucaagau

SEQ ID NO: 2382245 - RNA, 19 nt, Artificial Sequence
  Description of Artificial Sequence: Synthetic oligonucleotide
  Antisense strand to SEQ ID NO: 2382244
aucuugaucacaugcaagu

SEQ ID NO: 2382246 - RNA, 19 nt, Artificial Sequence
  Description of Artificial Sequence: Synthetic oligonucleotide
  Sense strand starting at position 860 of SEQ ID NO: 1886003
cuugcaugugaucaagaug

SEQ ID NO: 2382247 - RNA, 19 nt, Artificial Sequence
  Description of Artificial Sequence: Synthetic oligonucleotide
  Antisense strand to SEQ ID NO: 2382246
caucuugaucacaugcaag

SEQ ID NO: 2382248 - RNA, 19 nt, Artificial Sequence
  Description of Artificial Sequence: Synthetic oligonucleotide
  Sense strand starting at position 896 of SEQ ID NO: 1886003
gcaguucacgugggaggaa

SEQ ID NO: 2382249 - RNA, 19 nt, Artificial Sequence
  Description of Artificial Sequence: Synthetic oligonucleotide
  Antisense strand to SEQ ID NO: 2382248
uuccucccacgugaacugc

SEQ ID NO: 2382250 - RNA, 19 nt, Artificial Sequence
  Description of Artificial Sequence: Synthetic oligonucleotide
  Sense strand starting at position 960 of SEQ ID NO: 1886003
ucauuaguguuucuccaga

SEQ ID NO: 2382251 - RNA, 19 nt, Artificial Sequence
  Description of Artificial Sequence: Synthetic oligonucleotide
  Antisense strand to SEQ ID NO: 2382250
ucuggagaaacacuaauga

SEQ ID NO: 2382252 - RNA, 19 nt, Artificial Sequence
  Description of Artificial Sequence: Synthetic oligonucleotide
  Sense strand starting at position 965 of SEQ ID NO: 1886003
aguguuucuccagaagcca

SEQ ID NO: 2382253 - RNA, 19 nt, Artificial Sequence
  Description of Artificial Sequence: Synthetic oligonucleotide
  Antisense strand to SEQ ID NO: 2382252
uggcuucuggagaaacacu

SEQ ID NO: 2382254 - RNA, 19 nt, Artificial Sequence
  Description of Artificial Sequence: Synthetic oligonucleotide
  Sense strand starting at position 986 of SEQ ID NO: 1886003
ccaauauuaggcugcacau

SEQ ID NO: 2382255 - RNA, 19 nt, Artificial Sequence
  Description of Artificial Sequence: Synthetic oligonucleotide
  Antisense strand to SEQ ID NO: 2382254
augugcagccuaauauugg

SEQ ID NO: 2382256 - RNA, 19 nt, Artificial Sequence
  Description of Artificial Sequence: Synthetic oligonucleotide
  Sense strand starting at position 999 of SEQ ID NO: 1886003
gcacauaaagacuguccaa

SEQ ID NO: 2382257 - RNA, 19 nt, Artificial Sequence
  Description of Artificial Sequence: Synthetic oligonucleotide
  Antisense strand to SEQ ID NO: 2382256
uuggacagucuuuaugugc

SEQ ID NO: 2382258 - RNA, 19 nt, Artificial Sequence
  Description of Artificial Sequence: Synthetic oligonucleotide
  Sense strand starting at position 1064 of SEQ ID NO: 1886003
ugcucauauggccaucaaa

SEQ ID NO: 2382259 - RNA, 19 nt, Artificial Sequence
  Description of Artificial Sequence: Synthetic oligonucleotide
  Antisense strand to SEQ ID NO: 2382258
uuugauggccauaugagca

SEQ ID NO: 2382260 - RNA, 19 nt, Artificial Sequence
  Description of Artificial Sequence: Synthetic oligonucleotide
  Sense strand starting at position 1085 of SEQ ID NO: 1886003
ugacauaggcucuggaaac

SEQ ID NO: 2382261 - RNA, 19 nt, Artificial Sequence
  Description of Artificial Sequence: Synthetic oligonucleotide
  Antisense strand to SEQ ID NO: 2382260
guuuccagagccuauguca

SEQ ID NO: 2382262 - RNA, 19 nt, Artificial Sequence
  Description of Artificial Sequence: Synthetic oligonucleotide
  Sense strand starting at position 1274 of SEQ ID NO: 1886003
agcugaagccuagaaggua

SEQ ID NO: 2382263 - RNA, 19 nt, Artificial Sequence
  Description of Artificial Sequence: Synthetic oligonucleotide
  Antisense strand to SEQ ID NO: 2382262
uaccuucuaggcuucagcu

SEQ ID NO: 2382264 - RNA, 19 nt, Artificial Sequence
  Description of Artificial Sequence: Synthetic oligonucleotide
  Sense strand starting at position 1290 of SEQ ID NO: 1886003
guagcaguuugaguacaau

SEQ ID NO: 2382265 - RNA, 19 nt, Artificial Sequence
  Description of Artificial Sequence: Synthetic oligonucleotide
  Antisense strand to SEQ ID NO: 2382264
auuguacucaaacugcuac

SEQ ID NO: 2382266 - RNA, 19 nt, Artificial Sequence
  Description of Artificial Sequence: Synthetic oligonucleotide
  Sense strand starting at position 1293 of SEQ ID NO: 1886003
gcaguuugaguacaauaca

SEQ ID NO: 2382267 - RNA, 19 nt, Artificial Sequence
  Description of Artificial Sequence: Synthetic oligonucleotide
  Antisense strand to SEQ ID NO: 2382266
uguauuguacucaaacugc

SEQ ID NO: 2382268 - RNA, 19 nt, Artificial Sequence
  Description of Artificial Sequence: Synthetic oligonucleotide
  Sense strand starting at position 1425 of SEQ ID NO: 1886003
gguauaugaagcugugaaa

SEQ ID NO: 2382269 - RNA, 19 nt, Artificial Sequence
  Description of Artificial Sequence: Synthetic oligonucleotide
  Antisense strand to SEQ ID NO: 2382268
uuucacagcuucauauacc

SEQ ID NO: 2382270 - RNA, 19 nt, Artificial Sequence
  Description of Artificial Sequence: Synthetic oligonucleotide
  Sense strand starting at position 1563 of SEQ ID NO: 1886003
gagcuucucggccaucaaa

SEQ ID NO: 2382271 - RNA, 19 nt, Artificial Sequence
  Description of Artificial Sequence: Synthetic oligonucleotide
  Antisense strand to SEQ ID NO: 2382270
uuugauggccgagaagcuc

SEQ ID NO: 2382272 - RNA, 19 nt, Artificial Sequence
  Description of Artificial Sequence: Synthetic oligonucleotide
  Sense strand starting at position 1889 of SEQ ID NO: 1886003
gguaaaguguacuuaccaa

SEQ ID NO: 2382273 - RNA, 19 nt, Artificial Sequence
  Description of Artificial Sequence: Synthetic oligonucleotide
  Antisense strand to SEQ ID NO: 2382272
uugguaaguacacuuuacc

SEQ ID NO: 2382274 - RNA, 19 nt, Artificial Sequence
  Description of Artificial Sequence: Synthetic oligonucleotide
  Sense strand starting at position 1926 of SEQ ID NO: 1886003
guucucuuaagguguagaa

SEQ ID NO: 2382275 - RNA, 19 nt, Artificial Sequence
  Description of Artificial Sequence: Synthetic oligonucleotide
  Antisense strand to SEQ ID NO: 2382274
uucuacaccuuaagagaac

SEQ ID NO: 2382276 - RNA, 19 nt, Artificial Sequence
  Description of Artificial Sequence: Synthetic oligonucleotide
  Sense strand starting at position 1968 of SEQ ID NO: 1886003
cuuuguuguaaguggacaa

SEQ ID NO: 2382277 - RNA, 19 nt, Artificial Sequence
  Description of Artificial Sequence: Synthetic oligonucleotide
  Antisense strand to SEQ ID NO: 2382276
uuguccacuuacaacaaag

SEQ ID NO: 2382278 - RNA, 19 nt, Artificial Sequence
  Description of Artificial Sequence: Synthetic oligonucleotide
  Sense strand starting at position 1969 of SEQ ID NO: 1886003
uuuguuguaaguggacaau

SEQ ID NO: 2382279 - RNA, 19 nt, Artificial Sequence
  Description of Artificial Sequence: Synthetic oligonucleotide
  Antisense strand to SEQ ID NO: 2382278
auuguccacuuacaacaaa

SEQ ID NO: 2382280 - RNA, 19 nt, Artificial Sequence
  Description of Artificial Sequence: Synthetic oligonucleotide
  Sense strand starting at position 2049 of SEQ ID NO: 1886003
gguauucgaguccagaucu

SEQ ID NO: 2382281 - RNA, 19 nt, Artificial Sequence
  Description of Artificial Sequence: Synthetic oligonucleotide
  Antisense strand to SEQ ID NO: 2382280
agaucuggacucgaauacc

SEQ ID NO: 2382282 - RNA, 19 nt, Artificial Sequence
  Description of Artificial Sequence: Synthetic oligonucleotide
  Sense strand starting at position 2335 of SEQ ID NO: 1886003
uuguuugugaauuggagca

SEQ ID NO: 2382283 - RNA, 19 nt, Artificial Sequence
  Description of Artificial Sequence: Synthetic oligonucleotide
  Antisense strand to SEQ ID NO: 2382282
ugcuccaauucacaaacaa

SEQ ID NO: 2382284 - RNA, 19 nt, Artificial Sequence
  Description of Artificial Sequence: Synthetic oligonucleotide
  Sense strand starting at position 2340 of SEQ ID NO: 1886003
ugugaauuggagcaguuua

SEQ ID NO: 2382285 - RNA, 19 nt, Artificial Sequence
  Description of Artificial Sequence: Synthetic oligonucleotide
  Antisense strand to SEQ ID NO: 2382284
uaaacugcuccaauucaca

SEQ ID NO: 2382286 - RNA, 19 nt, Artificial Sequence
  Description of Artificial Sequence: Synthetic oligonucleotide
  Sense strand starting at position 2839 of SEQ ID NO: 1886003
guuucugaggacugugagu

SEQ ID NO: 2382287 - RNA, 19 nt, Artificial Sequence
  Description of Artificial Sequence: Synthetic oligonucleotide
  Antisense strand to SEQ ID NO: 2382286
acucacaguccucagaaac

SEQ ID NO: 2382288 - RNA, 19 nt, Artificial Sequence
  Description of Artificial Sequence: Synthetic oligonucleotide
  Sense strand starting at position 3123 of SEQ ID NO: 1886003
cuugcuacuuggucugaaa

SEQ ID NO: 2382289 - RNA, 19 nt, Artificial Sequence
  Description of Artificial Sequence: Synthetic oligonucleotide
  Antisense strand to SEQ ID NO: 2382288
uuucagaccaaguagcaag

SEQ ID NO: 2382290 - RNA, 19 nt, Artificial Sequence
  Description of Artificial Sequence: Synthetic oligonucleotide
  Sense strand starting at position 3181 of SEQ ID NO: 1886003
uguccugacccauaagauc

SEQ ID NO: 2382291 - RNA, 19 nt, Artificial Sequence
  Description of Artificial Sequence: Synthetic oligonucleotide
  Antisense strand to SEQ ID NO: 2382290
gaucuuaugggucaggaca

SEQ ID NO: 2382292 - RNA, 19 nt, Artificial Sequence
  Description of Artificial Sequence: Synthetic oligonucleotide
  Sense strand starting at position 3471 of SEQ ID NO: 1886003
gccugucguguguucgaga

SEQ ID NO: 2382293 - RNA, 19 nt, Artificial Sequence
  Description of Artificial Sequence: Synthetic oligonucleotide
  Antisense strand to SEQ ID NO: 2382292
ucucgaacacacgacaggc

SEQ ID NO: 2382294 - RNA, 19 nt, Artificial Sequence
  Description of Artificial Sequence: Synthetic oligonucleotide
  Sense strand starting at position 3644 of SEQ ID NO: 1886003
agccuugcccuguaggaga

SEQ ID NO: 2382295 - RNA, 19 nt, Artificial Sequence
  Description of Artificial Sequence: Synthetic oligonucleotide
  Antisense strand to SEQ ID NO: 2382294
ucuccuacagggcaaggcu

SEQ ID NO: 2382296 - RNA, 19 nt, Artificial Sequence
  Description of Artificial Sequence: Synthetic oligonucleotide
  Sense strand starting at position 3649 of SEQ ID NO: 1886003
ugcccuguaggagauaaua

SEQ ID NO: 2382297 - RNA, 19 nt, Artificial Sequence
  Description of Artificial Sequence: Synthetic oligonucleotide
  Antisense strand to SEQ ID NO: 2382296
uauuaucuccuacagggca

SEQ ID NO: 2382298 - RNA, 19 nt, Artificial Sequence
  Description of Artificial Sequence: Synthetic oligonucleotide
  Sense strand starting at position 3816 of SEQ ID NO: 1886003
agcguuucagggugauaag

SEQ ID NO: 2382299 - RNA, 19 nt, Artificial Sequence
  Description of Artificial Sequence: Synthetic oligonucleotide
  Antisense strand to SEQ ID NO: 2382298
cuuaucacccugaaacgcu

SEQ ID NO: 2382300 - RNA, 19 nt, Artificial Sequence
  Description of Artificial Sequence: Synthetic oligonucleotide
  Sense strand starting at position 3826 of SEQ ID NO: 1886003
ggugauaaggauuaaacgu

SEQ ID NO: 2382301 - RNA, 19 nt, Artificial Sequence
  Description of Artificial Sequence: Synthetic oligonucleotide
  Antisense strand to SEQ ID NO: 2382300
acguuuaauccuuaucacc

SEQ ID NO: 2382302 - RNA, 19 nt, Artificial Sequence
  Description of Artificial Sequence: Synthetic oligonucleotide
  Sense strand starting at position 3835 of SEQ ID NO: 1886003
gauuaaacguuaucgugaa

SEQ ID NO: 2382303 - RNA, 19 nt, Artificial Sequence
  Description of Artificial Sequence: Synthetic oligonucleotide
  Antisense strand to SEQ ID NO: 2382302
uucacgauaacguuuaauc

SEQ ID NO: 2382304 - RNA, 19 nt, Artificial Sequence
  Description of Artificial Sequence: Synthetic oligonucleotide
  Sense strand starting at position 3839 of SEQ ID NO: 1886003
aaacguuaucgugaauguc

SEQ ID NO: 2382305 - RNA, 19 nt, Artificial Sequence
  Description of Artificial Sequence: Synthetic oligonucleotide
  Antisense strand to SEQ ID NO: 2382304
gacauucacgauaacguuu

SEQ ID NO: 2382306 - RNA, 19 nt, Artificial Sequence
  Description of Artificial Sequence: Synthetic oligonucleotide
  Sense strand starting at position 13 of SEQ ID NO: 1886004
ggcauacucuagcuuuaaa

SEQ ID NO: 2382307 - RNA, 19 nt, Artificial Sequence
  Description of Artificial Sequence: Synthetic oligonucleotide
  Antisense strand to SEQ ID NO: 2382306
uuuaaagcuagaguaugcc

SEQ ID NO: 2382308 - RNA, 19 nt, Artificial Sequence
  Description of Artificial Sequence: Synthetic oligonucleotide
  Sense strand starting at position 61 of SEQ ID NO: 1886004
ucaauacaugauuggguau

SEQ ID NO: 2382309 - RNA, 19 nt, Artificial Sequence
  Description of Artificial Sequence: Synthetic oligonucleotide
  Antisense strand to SEQ ID NO: 2382308
auacccaaucauguauuga

SEQ ID NO: 2382310 - RNA, 19 nt, Artificial Sequence
  Description of Artificial Sequence: Synthetic oligonucleotide
  Sense strand starting at position 76 of SEQ ID NO: 1886004
guauuacaauuggaaggaa

SEQ ID NO: 2382311 - RNA, 19 nt, Artificial Sequence
  Description of Artificial Sequence: Synthetic oligonucleotide
  Antisense strand to SEQ ID NO: 2382310
uuccuuccaauuguaauac

SEQ ID NO: 2382312 - RNA, 19 nt, Artificial Sequence
  Description of Artificial Sequence: Synthetic oligonucleotide
  Sense strand starting at position 445 of SEQ ID NO: 1886004
acuugcaugugaucaagau

SEQ ID NO: 2382313 - RNA, 19 nt, Artificial Sequence
  Description of Artificial Sequence: Synthetic oligonucleotide
  Antisense strand to SEQ ID NO: 2382312
aucuugaucacaugcaagu

SEQ ID NO: 2382314 - RNA, 19 nt, Artificial Sequence
  Description of Artificial Sequence: Synthetic oligonucleotide
  Sense strand starting at position 446 of SEQ ID NO: 1886004
cuugcaugugaucaagaug

SEQ ID NO: 2382315 - RNA, 19 nt, Artificial Sequence
  Description of Artificial Sequence: Synthetic oligonucleotide
  Antisense strand to SEQ ID NO: 2382314
caucuugaucacaugcaag

SEQ ID NO: 2382316 - RNA, 19 nt, Artificial Sequence
  Description of Artificial Sequence: Synthetic oligonucleotide
  Sense strand starting at position 482 of SEQ ID NO: 1886004
gcaguucacgugggaggaa

SEQ ID NO: 2382317 - RNA, 19 nt, Artificial Sequence
  Description of Artificial Sequence: Synthetic oligonucleotide
  Antisense strand to SEQ ID NO: 2382316
uuccucccacgugaacugc

SEQ ID NO: 2382318 - RNA, 19 nt, Artificial Sequence
  Description of Artificial Sequence: Synthetic oligonucleotide
  Sense strand starting at position 546 of SEQ ID NO: 1886004
ucauuaguguuucuccaga

SEQ ID NO: 2382319 - RNA, 19 nt, Artificial Sequence
  Description of Artificial Sequence: Synthetic oligonucleotide
  Antisense strand to SEQ ID NO: 2382318
ucuggagaaacacuaauga

SEQ ID NO: 2382320 - RNA, 19 nt, Artificial Sequence
  Description of Artificial Sequence: Synthetic oligonucleotide
  Sense strand starting at position 551 of SEQ ID NO: 1886004
aguguuucuccagaagcca

SEQ ID NO: 2382321 - RNA, 19 nt, Artificial Sequence
  Description of Artificial Sequence: Synthetic oligonucleotide
  Antisense strand to SEQ ID NO: 2382320
uggcuucuggagaaacacu

SEQ ID NO: 2382322 - RNA, 19 nt, Artificial Sequence
  Description of Artificial Sequence: Synthetic oligonucleotide
  Sense strand starting at position 572 of SEQ ID NO: 1886004
ccaauauuaggcugcacau

SEQ ID NO: 2382323 - RNA, 19 nt, Artificial Sequence
  Description of Artificial Sequence: Synthetic oligonucleotide
  Antisense strand to SEQ ID NO: 2382322
augugcagccuaauauugg

SEQ ID NO: 2382324 - RNA, 19 nt, Artificial Sequence
  Description of Artificial Sequence: Synthetic oligonucleotide
  Sense strand starting at position 585 of SEQ ID NO: 1886004
gcacauaaagacuguccaa

SEQ ID NO: 2382325 - RNA, 19 nt, Artificial Sequence
  Description of Artificial Sequence: Synthetic oligonucleotide
  Antisense strand to SEQ ID NO: 2382324
uuggacagucuuuaugugc

SEQ ID NO: 2382326 - RNA, 19 nt, Artificial Sequence
  Description of Artificial Sequence: Synthetic oligonucleotide
  Sense strand starting at position 650 of SEQ ID NO: 1886004
ugcucauauggccaucaaa

SEQ ID NO: 2382327 - RNA, 19 nt, Artificial Sequence
  Description of Artificial Sequence: Synthetic oligonucleotide
  Antisense strand to SEQ ID NO: 2382326
uuugauggccauaugagca

SEQ ID NO: 2382328 - RNA, 19 nt, Artificial Sequence
  Description of Artificial Sequence: Synthetic oligonucleotide
  Sense strand starting at position 671 of SEQ ID NO: 1886004
ugacauaggcucuggaaac

SEQ ID NO: 2382329 - RNA, 19 nt, Artificial Sequence
  Description of Artificial Sequence: Synthetic oligonucleotide
  Antisense strand to SEQ ID NO: 2382328
guuuccagagccuauguca

SEQ ID NO: 2382330 - RNA, 19 nt, Artificial Sequence
  Description of Artificial Sequence: Synthetic oligonucleotide
  Sense strand starting at position 820 of SEQ ID NO: 1886004
gacuuauucuaggcggguu

SEQ ID NO: 2382331 - RNA, 19 nt, Artificial Sequence
  Description of Artificial Sequence: Synthetic oligonucleotide
  Antisense strand to SEQ ID NO: 2382330
aacccgccuagaauaaguc

SEQ ID NO: 2382332 - RNA, 19 nt, Artificial Sequence
  Description of Artificial Sequence: Synthetic oligonucleotide
  Sense strand starting at position 860 of SEQ ID NO: 1886004
agcugaagccuagaaggua

SEQ ID NO: 2382333 - RNA, 19 nt, Artificial Sequence
  Description of Artificial Sequence: Synthetic oligonucleotide
  Antisense strand to SEQ ID NO: 2382332
uaccuucuaggcuucagcu

SEQ ID NO: 2382334 - RNA, 19 nt, Artificial Sequence
  Description of Artificial Sequence: Synthetic oligonucleotide
  Sense strand starting at position 876 of SEQ ID NO: 1886004
guagcaguuugaguacaau

SEQ ID NO: 2382335 - RNA, 19 nt, Artificial Sequence
  Description of Artificial Sequence: Synthetic oligonucleotide
  Antisense strand to SEQ ID NO: 2382334
auuguacucaaacugcuac

SEQ ID NO: 2382336 - RNA, 19 nt, Artificial Sequence
  Description of Artificial Sequence: Synthetic oligonucleotide
  Sense strand starting at position 879 of SEQ ID NO: 1886004
gcaguuugaguacaauaca

SEQ ID NO: 2382337 - RNA, 19 nt, Artificial Sequence
  Description of Artificial Sequence: Synthetic oligonucleotide
  Antisense strand to SEQ ID NO: 2382336
uguauuguacucaaacugc

SEQ ID NO: 2382338 - RNA, 19 nt, Artificial Sequence
  Description of Artificial Sequence: Synthetic oligonucleotide
  Sense strand starting at position 1011 of SEQ ID NO: 1886004
gguauaugaagcugugaaa

SEQ ID NO: 2382339 - RNA, 19 nt, Artificial Sequence
  Description of Artificial Sequence: Synthetic oligonucleotide
  Antisense strand to SEQ ID NO: 2382338
uuucacagcuucauauacc

SEQ ID NO: 2382340 - RNA, 19 nt, Artificial Sequence
  Description of Artificial Sequence: Synthetic oligonucleotide
  Sense strand starting at position 1149 of SEQ ID NO: 1886004
gagcuucucggccaucaaa

SEQ ID NO: 2382341 - RNA, 19 nt, Artificial Sequence
  Description of Artificial Sequence: Synthetic oligonucleotide
  Antisense strand to SEQ ID NO: 2382340
uuugauggccgagaagcuc

SEQ ID NO: 2382342 - RNA, 19 nt, Artificial Sequence
  Description of Artificial Sequence: Synthetic oligonucleotide
  Sense strand starting at position 1475 of SEQ ID NO: 1886004
gguaaaguguacuuaccaa

SEQ ID NO: 2382343 - RNA, 19 nt, Artificial Sequence
  Description of Artificial Sequence: Synthetic oligonucleotide
  Antisense strand to SEQ ID NO: 2382342
uugguaaguacacuuuacc

SEQ ID NO: 2382344 - RNA, 19 nt, Artificial Sequence
  Description of Artificial Sequence: Synthetic oligonucleotide
  Sense strand starting at position 1512 of SEQ ID NO: 1886004
guucucuuaagguguagaa

SEQ ID NO: 2382345 - RNA, 19 nt, Artificial Sequence
  Description of Artificial Sequence: Synthetic oligonucleotide
  Antisense strand to SEQ ID NO: 2382344
uucuacaccuuaagagaac

SEQ ID NO: 2382346 - RNA, 19 nt, Artificial Sequence
  Description of Artificial Sequence: Synthetic oligonucleotide
  Sense strand starting at position 1554 of SEQ ID NO: 1886004
cuuuguuguaaguggacaa

SEQ ID NO: 2382347 - RNA, 19 nt, Artificial Sequence
  Description of Artificial Sequence: Synthetic oligonucleotide
  Antisense strand to SEQ ID NO: 2382346
uuguccacuuacaacaaag

SEQ ID NO: 2382348 - RNA, 19 nt, Artificial Sequence
  Description of Artificial Sequence: Synthetic oligonucleotide
  Sense strand starting at position 1555 of SEQ ID NO: 1886004
uuuguuguaaguggacaau

SEQ ID NO: 2382349 - RNA, 19 nt, Artificial Sequence
  Description of Artificial Sequence: Synthetic oligonucleotide
  Antisense strand to SEQ ID NO: 2382348
auuguccacuuacaacaaa

SEQ ID NO: 2382350 - RNA, 19 nt, Artificial Sequence
  Description of Artificial Sequence: Synthetic oligonucleotide
  Sense strand starting at position 1635 of SEQ ID NO: 1886004
gguauucgaguccagaucu

SEQ ID NO: 2382351 - RNA, 19 nt, Artificial Sequence
  Description of Artificial Sequence: Synthetic oligonucleotide
  Antisense strand to SEQ ID NO: 2382350
agaucuggacucgaauacc

SEQ ID NO: 2382352 - RNA, 19 nt, Artificial Sequence
  Description of Artificial Sequence: Synthetic oligonucleotide
  Sense strand starting at position 1921 of SEQ ID NO: 1886004
uuguuugugaauuggagca

SEQ ID NO: 2382353 - RNA, 19 nt, Artificial Sequence
  Description of Artificial Sequence: Synthetic oligonucleotide
  Antisense strand to SEQ ID NO: 2382352
ugcuccaauucacaaacaa

SEQ ID NO: 2382354 - RNA, 19 nt, Artificial Sequence
  Description of Artificial Sequence: Synthetic oligonucleotide
  Sense strand starting at position 1926 of SEQ ID NO: 1886004
ugugaauuggagcaguuua

SEQ ID NO: 2382355 - RNA, 19 nt, Artificial Sequence
  Description of Artificial Sequence: Synthetic oligonucleotide
  Antisense strand to SEQ ID NO: 2382354
uaaacugcuccaauucaca

SEQ ID NO: 2382356 - RNA, 19 nt, Artificial Sequence
  Description of Artificial Sequence: Synthetic oligonucleotide
  Sense strand starting at position 2425 of SEQ ID NO: 1886004
guuucugaggacugugagu

SEQ ID NO: 2382357 - RNA, 19 nt, Artificial Sequence
  Description of Artificial Sequence: Synthetic oligonucleotide
  Antisense strand to SEQ ID NO: 2382356
acucacaguccucagaaac

SEQ ID NO: 2382358 - RNA, 19 nt, Artificial Sequence
  Description of Artificial Sequence: Synthetic oligonucleotide
  Sense strand starting at position 2709 of SEQ ID NO: 1886004
cuugcuacuuggucugaaa

SEQ ID NO: 2382359 - RNA, 19 nt, Artificial Sequence
  Description of Artificial Sequence: Synthetic oligonucleotide
  Antisense strand to SEQ ID NO: 2382358
uuucagaccaaguagcaag

SEQ ID NO: 2382360 - RNA, 19 nt, Artificial Sequence
  Description of Artificial Sequence: Synthetic oligonucleotide
  Sense strand starting at position 2767 of SEQ ID NO: 1886004
uguccugacccauaagauc

SEQ ID NO: 2382361 - RNA, 19 nt, Artificial Sequence
  Description of Artificial Sequence: Synthetic oligonucleotide
  Antisense strand to SEQ ID NO: 2382360
gaucuuaugggucaggaca

SEQ ID NO: 2382362 - RNA, 19 nt, Artificial Sequence
  Description of Artificial Sequence: Synthetic oligonucleotide
  Sense strand starting at position 2776 of SEQ ID NO: 1886004
ccauaagaucggcguugga

SEQ ID NO: 2382363 - RNA, 19 nt, Artificial Sequence
  Description of Artificial Sequence: Synthetic oligonucleotide
  Antisense strand to SEQ ID NO: 2382362
uccaacgccgaucuuaugg

SEQ ID NO: 2382364 - RNA, 19 nt, Artificial Sequence
  Description of Artificial Sequence: Synthetic oligonucleotide
  Sense strand starting at position 3057 of SEQ ID NO: 1886004
gccugucguguguucgaga

SEQ ID NO: 2382365 - RNA, 19 nt, Artificial Sequence
  Description of Artificial Sequence: Synthetic oligonucleotide
  Antisense strand to SEQ ID NO: 2382364
ucucgaacacacgacaggc

SEQ ID NO: 2382366 - RNA, 19 nt, Artificial Sequence
  Description of Artificial Sequence: Synthetic oligonucleotide
  Sense strand starting at position 3230 of SEQ ID NO: 1886004
agccuugcccuguaggaga

SEQ ID NO: 2382367 - RNA, 19 nt, Artificial Sequence
  Description of Artificial Sequence: Synthetic oligonucleotide
  Antisense strand to SEQ ID NO: 2382366
ucuccuacagggcaaggcu

SEQ ID NO: 2382368 - RNA, 19 nt, Artificial Sequence
  Description of Artificial Sequence: Synthetic oligonucleotide
  Sense strand starting at position 3235 of SEQ ID NO: 1886004
ugcccuguaggagauaaua

SEQ ID NO: 2382369 - RNA, 19 nt, Artificial Sequence
  Description of Artificial Sequence: Synthetic oligonucleotide
  Antisense strand to SEQ ID NO: 2382368
uauuaucuccuacagggca

SEQ ID NO: 2382370 - RNA, 19 nt, Artificial Sequence
  Description of Artificial Sequence: Synthetic oligonucleotide
  Sense strand starting at position 3402 of SEQ ID NO: 1886004
agcguuucagggugauaag

SEQ ID NO: 2382371 - RNA, 19 nt, Artificial Sequence
  Description of Artificial Sequence: Synthetic oligonucleotide
  Antisense strand to SEQ ID NO: 2382370
cuuaucacccugaaacgcu

SEQ ID NO: 2382372 - RNA, 19 nt, Artificial Sequence
  Description of Artificial Sequence: Synthetic oligonucleotide
  Sense strand starting at position 3412 of SEQ ID NO: 1886004
ggugauaaggauuaaacgu

SEQ ID NO: 2382373 - RNA, 19 nt, Artificial Sequence
  Description of Artificial Sequence: Synthetic oligonucleotide
  Antisense strand to SEQ ID NO: 2382372
acguuuaauccuuaucacc

SEQ ID NO: 2382374 - RNA, 19 nt, Artificial Sequence
  Description of Artificial Sequence: Synthetic oligonucleotide
  Sense strand starting at position 3421 of SEQ ID NO: 1886004
gauuaaacguuaucgugaa

SEQ ID NO: 2382375 - RNA, 19 nt, Artificial Sequence
  Description of Artificial Sequence: Synthetic oligonucleotide
  Antisense strand to SEQ ID NO: 2382374
uucacgauaacguuuaauc

SEQ ID NO: 2382376 - RNA, 19 nt, Artificial Sequence
  Description of Artificial Sequence: Synthetic oligonucleotide
  Sense strand starting at position 3425 of SEQ ID NO: 1886004
aaacguuaucgugaauguc

SEQ ID NO: 2382377 - RNA, 19 nt, Artificial Sequence
  Description of Artificial Sequence: Synthetic oligonucleotide
  Antisense strand to SEQ ID NO: 2382376
gacauucacgauaacguuu

SEQ ID NO: 2382378 - RNA, 19 nt, Artificial Sequence
  Description of Artificial Sequence: Synthetic oligonucleotide
  Sense strand starting at position 3575 of SEQ ID NO: 1886004
augaccuggucuucgaaga

SEQ ID NO: 2382379 - RNA, 19 nt, Artificial Sequence
  Description of Artificial Sequence: Synthetic oligonucleotide
  Antisense strand to SEQ ID NO: 2382378
ucuucgaagaccaggucau

SEQ ID NO: 2382380 - RNA, 19 nt, Artificial Sequence
  Description of Artificial Sequence: Synthetic oligonucleotide
  Sense strand starting at position 3576 of SEQ ID NO: 1886004
ugaccuggucuucgaagau

SEQ ID NO: 2382381 - RNA, 19 nt, Artificial Sequence
  Description of Artificial Sequence: Synthetic oligonucleotide
  Antisense strand to SEQ ID NO: 2382380
aucuucgaagaccagguca

SEQ ID NO: 2382382 - RNA, 19 nt, Artificial Sequence
  Description of Artificial Sequence: Synthetic oligonucleotide
  Sense strand starting at position 3580 of SEQ ID NO: 1886004
cuggucuucgaagaucaca

SEQ ID NO: 2382383 - RNA, 19 nt, Artificial Sequence
  Description of Artificial Sequence: Synthetic oligonucleotide
  Antisense strand to SEQ ID NO: 2382382
ugugaucuucgaagaccag

SEQ ID NO: 2382384 - RNA, 19 nt, Artificial Sequence
  Description of Artificial Sequence: Synthetic oligonucleotide
  Sense strand starting at position 3981 of SEQ ID NO: 1886004
ccuuguguccuccaugauc

SEQ ID NO: 2382385 - RNA, 19 nt, Artificial Sequence
  Description of Artificial Sequence: Synthetic oligonucleotide
  Antisense strand to SEQ ID NO: 2382384
gaucauggaggacacaagg

SEQ ID NO: 2382386 - RNA, 19 nt, Artificial Sequence
  Description of Artificial Sequence: Synthetic oligonucleotide
  Sense strand starting at position 8 of SEQ ID NO: 1886005
gaggaaguacaauguagua

SEQ ID NO: 2382387 - RNA, 19 nt, Artificial Sequence
  Description of Artificial Sequence: Synthetic oligonucleotide
  Antisense strand to SEQ ID NO: 2382386
uacuacauuguacuuccuc

SEQ ID NO: 2382388 - RNA, 19 nt, Artificial Sequence
  Description of Artificial Sequence: Synthetic oligonucleotide
  Sense strand starting at position 72 of SEQ ID NO: 1886005
cugaagugugguggugaga

SEQ ID NO: 2382389 - RNA, 19 nt, Artificial Sequence
  Description of Artificial Sequence: Synthetic oligonucleotide
  Antisense strand to SEQ ID NO: 2382388
ucucaccaccacacuucag

SEQ ID NO: 2382390 - RNA, 19 nt, Artificial Sequence
  Description of Artificial Sequence: Synthetic oligonucleotide
  Sense strand starting at position 75 of SEQ ID NO: 1886005
aagugugguggugagacua

SEQ ID NO: 2382391 - RNA, 19 nt, Artificial Sequence
  Description of Artificial Sequence: Synthetic oligonucleotide
  Antisense strand to SEQ ID NO: 2382390
uagucucaccaccacacuu

SEQ ID NO: 2382392 - RNA, 19 nt, Artificial Sequence
  Description of Artificial Sequence: Synthetic oligonucleotide
  Sense strand starting at position 197 of SEQ ID NO: 1886005
acauguuuauauguggaau

SEQ ID NO: 2382393 - RNA, 19 nt, Artificial Sequence
  Description of Artificial Sequence: Synthetic oligonucleotide
  Antisense strand to SEQ ID NO: 2382392
auuccacauauaaacaugu

SEQ ID NO: 2382394 - RNA, 19 nt, Artificial Sequence
  Description of Artificial Sequence: Synthetic oligonucleotide
  Sense strand starting at position 200 of SEQ ID NO: 1886005
uguuuauauguggaaucua

SEQ ID NO: 2382395 - RNA, 19 nt, Artificial Sequence
  Description of Artificial Sequence: Synthetic oligonucleotide
  Antisense strand to SEQ ID NO: 2382394
uagauuccacauauaaaca

SEQ ID NO: 2382396 - RNA, 19 nt, Artificial Sequence
  Description of Artificial Sequence: Synthetic oligonucleotide
  Sense strand starting at position 209 of SEQ ID NO: 1886005
guggaaucuauauggcaua

SEQ ID NO: 2382397 - RNA, 19 nt, Artificial Sequence
  Description of Artificial Sequence: Synthetic oligonucleotide
  Antisense strand to SEQ ID NO: 2382396
uaugccauauagauuccac

SEQ ID NO: 2382398 - RNA, 19 nt, Artificial Sequence
  Description of Artificial Sequence: Synthetic oligonucleotide
  Sense strand starting at position 293 of SEQ ID NO: 1886005
uugcauuuccugcagucua

SEQ ID NO: 2382399 - RNA, 19 nt, Artificial Sequence
  Description of Artificial Sequence: Synthetic oligonucleotide
  Antisense strand to SEQ ID NO: 2382398
uagacugcaggaaaugcaa

SEQ ID NO: 2382400 - RNA, 19 nt, Artificial Sequence
  Description of Artificial Sequence: Synthetic oligonucleotide
  Sense strand starting at position 305 of SEQ ID NO: 1886005
cagucuauguucuuaggau

SEQ ID NO: 2382401 - RNA, 19 nt, Artificial Sequence
  Description of Artificial Sequence: Synthetic oligonucleotide
  Antisense strand to SEQ ID NO: 2382400
auccuaagaacauagacug

SEQ ID NO: 2382402 - RNA, 19 nt, Artificial Sequence
  Description of Artificial Sequence: Synthetic oligonucleotide
  Sense strand starting at position 321 of SEQ ID NO: 1886005
gaucauaaucuuuaacggu

SEQ ID NO: 2382403 - RNA, 19 nt, Artificial Sequence
  Description of Artificial Sequence: Synthetic oligonucleotide
  Antisense strand to SEQ ID NO: 2382402
accguuaaagauuaugauc

SEQ ID NO: 2382404 - RNA, 19 nt, Artificial Sequence
  Description of Artificial Sequence: Synthetic oligonucleotide
  Sense strand starting at position 329 of SEQ ID NO: 1886005
ucuuuaacgguuugggaaa

SEQ ID NO: 2382405 - RNA, 19 nt, Artificial Sequence
  Description of Artificial Sequence: Synthetic oligonucleotide
  Antisense strand to SEQ ID NO: 2382404
uuucccaaaccguuaaaga

SEQ ID NO: 2382406 - RNA, 19 nt, Artificial Sequence
  Description of Artificial Sequence: Synthetic oligonucleotide
  Sense strand starting at position 437 of SEQ ID NO: 1886005
ucacuucuuggcuaagauc

SEQ ID NO: 2382407 - RNA, 19 nt, Artificial Sequence
  Description of Artificial Sequence: Synthetic oligonucleotide
  Antisense strand to SEQ ID NO: 2382406
gaucuuagccaagaaguga

SEQ ID NO: 2382408 - RNA, 19 nt, Artificial Sequence
  Description of Artificial Sequence: Synthetic oligonucleotide
  Sense strand starting at position 627 of SEQ ID NO: 1886005
ccguguucagaaggaaacu

SEQ ID NO: 2382409 - RNA, 19 nt, Artificial Sequence
  Description of Artificial Sequence: Synthetic oligonucleotide
  Antisense strand to SEQ ID NO: 2382408
aguuuccuucugaacacgg

SEQ ID NO: 2382410 - RNA, 19 nt, Artificial Sequence
  Description of Artificial Sequence: Synthetic oligonucleotide
  Sense strand starting at position 726 of SEQ ID NO: 1886005
agaugucaacccuagcaga

SEQ ID NO: 2382411 - RNA, 19 nt, Artificial Sequence
  Description of Artificial Sequence: Synthetic oligonucleotide
  Antisense strand to SEQ ID NO: 2382410
ucugcuaggguugacaucu

SEQ ID NO: 2382412 - RNA, 19 nt, Artificial Sequence
  Description of Artificial Sequence: Synthetic oligonucleotide
  Sense strand starting at position 739 of SEQ ID NO: 1886005
agcagaggauuucagugau

SEQ ID NO: 2382413 - RNA, 19 nt, Artificial Sequence
  Description of Artificial Sequence: Synthetic oligonucleotide
  Antisense strand to SEQ ID NO: 2382412
aucacugaaauccucugcu

SEQ ID NO: 2382414 - RNA, 19 nt, Artificial Sequence
  Description of Artificial Sequence: Synthetic oligonucleotide
  Sense strand starting at position 804 of SEQ ID NO: 1886005
gaagaaguacacugugagu

SEQ ID NO: 2382415 - RNA, 19 nt, Artificial Sequence
  Description of Artificial Sequence: Synthetic oligonucleotide
  Antisense strand to SEQ ID NO: 2382414
acucacaguguacuucuuc

SEQ ID NO: 2382416 - RNA, 19 nt, Artificial Sequence
  Description of Artificial Sequence: Synthetic oligonucleotide
  Sense strand starting at position 886 of SEQ ID NO: 1886005
ucgguuguuccagaaguga

SEQ ID NO: 2382417 - RNA, 19 nt, Artificial Sequence
  Description of Artificial Sequence: Synthetic oligonucleotide
  Antisense strand to SEQ ID NO: 2382416
ucacuucuggaacaaccga

SEQ ID NO: 2382418 - RNA, 19 nt, Artificial Sequence
  Description of Artificial Sequence: Synthetic oligonucleotide
  Sense strand starting at position 913 of SEQ ID NO: 1886005
caugguguggcuuauguaa

SEQ ID NO: 2382419 - RNA, 19 nt, Artificial Sequence
  Description of Artificial Sequence: Synthetic oligonucleotide
  Antisense strand to SEQ ID NO: 2382418
uuacauaagccacaccaug

SEQ ID NO: 2382420 - RNA, 19 nt, Artificial Sequence
  Description of Artificial Sequence: Synthetic oligonucleotide
  Sense strand starting at position 942 of SEQ ID NO: 1886005
ugcuaugaucccuguggau

SEQ ID NO: 2382421 - RNA, 19 nt, Artificial Sequence
  Description of Artificial Sequence: Synthetic oligonucleotide
  Antisense strand to SEQ ID NO: 2382420
auccacagggaucauagca

SEQ ID NO: 2382422 - RNA, 19 nt, Artificial Sequence
  Description of Artificial Sequence: Synthetic oligonucleotide
  Sense strand starting at position 944 of SEQ ID NO: 1886005
cuaugaucccuguggauaa

SEQ ID NO: 2382423 - RNA, 19 nt, Artificial Sequence
  Description of Artificial Sequence: Synthetic oligonucleotide
  Antisense strand to SEQ ID NO: 2382422
uuauccacagggaucauag

SEQ ID NO: 2382424 - RNA, 19 nt, Artificial Sequence
  Description of Artificial Sequence: Synthetic oligonucleotide
  Sense strand starting at position 965 of SEQ ID NO: 1886005
aaggcuaggucccuuuaua

SEQ ID NO: 2382425 - RNA, 19 nt, Artificial Sequence
  Description of Artificial Sequence: Synthetic oligonucleotide
  Antisense strand to SEQ ID NO: 2382424
uauaaagggaccuagccuu

SEQ ID NO: 2382426 - RNA, 19 nt, Artificial Sequence
  Description of Artificial Sequence: Synthetic oligonucleotide
  Sense strand starting at position 976 of SEQ ID NO: 1886005
ccuuuauaugccuaggaca

SEQ ID NO: 2382427 - RNA, 19 nt, Artificial Sequence
  Description of Artificial Sequence: Synthetic oligonucleotide
  Antisense strand to SEQ ID NO: 2382426
uguccuaggcauauaaagg

SEQ ID NO: 2382428 - RNA, 19 nt, Artificial Sequence
  Description of Artificial Sequence: Synthetic oligonucleotide
  Sense strand starting at position 978 of SEQ ID NO: 1886005
uuuauaugccuaggacaag

SEQ ID NO: 2382429 - RNA, 19 nt, Artificial Sequence
  Description of Artificial Sequence: Synthetic oligonucleotide
  Antisense strand to SEQ ID NO: 2382428
cuuguccuaggcauauaaa

SEQ ID NO: 2382430 - RNA, 19 nt, Artificial Sequence
  Description of Artificial Sequence: Synthetic oligonucleotide
  Sense strand starting at position 1164 of SEQ ID NO: 1886005
guaguugcucuagacagaa

SEQ ID NO: 2382431 - RNA, 19 nt, Artificial Sequence
  Description of Artificial Sequence: Synthetic oligonucleotide
  Antisense strand to SEQ ID NO: 2382430
uucugucuagagcaacuac

SEQ ID NO: 2382432 - RNA, 19 nt, Artificial Sequence
  Description of Artificial Sequence: Synthetic oligonucleotide
  Sense strand starting at position 1296 of SEQ ID NO: 1886005
agcagaauacugggucuua

SEQ ID NO: 2382433 - RNA, 19 nt, Artificial Sequence
  Description of Artificial Sequence: Synthetic oligonucleotide
  Antisense strand to SEQ ID NO: 2382432
uaagacccaguauucugcu

SEQ ID NO: 2382434 - RNA, 19 nt, Artificial Sequence
  Description of Artificial Sequence: Synthetic oligonucleotide
  Sense strand starting at position 1297 of SEQ ID NO: 1886005
gcagaauacugggucuuaa

SEQ ID NO: 2382435 - RNA, 19 nt, Artificial Sequence
  Description of Artificial Sequence: Synthetic oligonucleotide
  Antisense strand to SEQ ID NO: 2382434
uuaagacccaguauucugc

SEQ ID NO: 2382436 - RNA, 19 nt, Artificial Sequence
  Description of Artificial Sequence: Synthetic oligonucleotide
  Sense strand starting at position 1329 of SEQ ID NO: 1886005
cacaguuuaccugacgagu

SEQ ID NO: 2382437 - RNA, 19 nt, Artificial Sequence
  Description of Artificial Sequence: Synthetic oligonucleotide
  Antisense strand to SEQ ID NO: 2382436
acucgucagguaaacugug

SEQ ID NO: 2382438 - RNA, 19 nt, Artificial Sequence
  Description of Artificial Sequence: Synthetic oligonucleotide
  Sense strand starting at position 1718 of SEQ ID NO: 1886005
aguugucuccaggaggcaa

SEQ ID NO: 2382439 - RNA, 19 nt, Artificial Sequence
  Description of Artificial Sequence: Synthetic oligonucleotide
  Antisense strand to SEQ ID NO: 2382438
uugccuccuggagacaacu

SEQ ID NO: 2382440 - RNA, 19 nt, Artificial Sequence
  Description of Artificial Sequence: Synthetic oligonucleotide
  Sense strand starting at position 2482 of SEQ ID NO: 1886005
cuuuaauugggaggcaauu

SEQ ID NO: 2382441 - RNA, 19 nt, Artificial Sequence
  Description of Artificial Sequence: Synthetic oligonucleotide
  Antisense strand to SEQ ID NO: 2382440
aauugccucccaauuaaag

SEQ ID NO: 2382442 - RNA, 19 nt, Artificial Sequence
  Description of Artificial Sequence: Synthetic oligonucleotide
  Sense strand starting at position 2644 of SEQ ID NO: 1886005
gcagcacuccacuaugauc

SEQ ID NO: 2382443 - RNA, 19 nt, Artificial Sequence
  Description of Artificial Sequence: Synthetic oligonucleotide
  Antisense strand to SEQ ID NO: 2382442
gaucauaguggagugcugc

SEQ ID NO: 2382444 - RNA, 19 nt, Artificial Sequence
  Description of Artificial Sequence: Synthetic oligonucleotide
  Sense strand starting at position 3021 of SEQ ID NO: 1886005
aggauugcauuuggacaga

SEQ ID NO: 2382445 - RNA, 19 nt, Artificial Sequence
  Description of Artificial Sequence: Synthetic oligonucleotide
  Antisense strand to SEQ ID NO: 2382444
ucuguccaaaugcaauccu

SEQ ID NO: 2382446 - RNA, 19 nt, Artificial Sequence
  Description of Artificial Sequence: Synthetic oligonucleotide
  Sense strand starting at position 3113 of SEQ ID NO: 1886005
aacuuauuuggcgguguaa

SEQ ID NO: 2382447 - RNA, 19 nt, Artificial Sequence
  Description of Artificial Sequence: Synthetic oligonucleotide
  Antisense strand to SEQ ID NO: 2382446
uuacaccgccaaauaaguu

SEQ ID NO: 2382448 - RNA, 19 nt, Artificial Sequence
  Description of Artificial Sequence: Synthetic oligonucleotide
  Sense strand starting at position 3115 of SEQ ID NO: 1886005
cuuauuuggcgguguaaac

SEQ ID NO: 2382449 - RNA, 19 nt, Artificial Sequence
  Description of Artificial Sequence: Synthetic oligonucleotide
  Antisense strand to SEQ ID NO: 2382448
guuuacaccgccaaauaag

SEQ ID NO: 2382450 - RNA, 19 nt, Artificial Sequence
  Description of Artificial Sequence: Synthetic oligonucleotide
  Sense strand starting at position 3333 of SEQ ID NO: 1886005
uguguagaccucgaagcau

SEQ ID NO: 2382451 - RNA, 19 nt, Artificial Sequence
  Description of Artificial Sequence: Synthetic oligonucleotide
  Antisense strand to SEQ ID NO: 2382450
augcuucgaggucuacaca

SEQ ID NO: 2382452 - RNA, 19 nt, Artificial Sequence
  Description of Artificial Sequence: Synthetic oligonucleotide
  Sense strand starting at position 3365 of SEQ ID NO: 1886005
agguauucugugugcauuu

SEQ ID NO: 2382453 - RNA, 19 nt, Artificial Sequence
  Description of Artificial Sequence: Synthetic oligonucleotide
  Antisense strand to SEQ ID NO: 2382452
aaaugcacacagaauaccu

SEQ ID NO: 2382454 - RNA, 19 nt, Artificial Sequence
  Description of Artificial Sequence: Synthetic oligonucleotide
  Sense strand starting at position 3382 of SEQ ID NO: 1886005
uugccauauccagagugaa

SEQ ID NO: 2382455 - RNA, 19 nt, Artificial Sequence
  Description of Artificial Sequence: Synthetic oligonucleotide
  Antisense strand to SEQ ID NO: 2382454
uucacucuggauauggcaa

SEQ ID NO: 2382456 - RNA, 19 nt, Artificial Sequence
  Description of Artificial Sequence: Synthetic oligonucleotide
  Sense strand starting at position 3439 of SEQ ID NO: 1886005
ugaaaucuaucuguugcaa

SEQ ID NO: 2382457 - RNA, 19 nt, Artificial Sequence
  Description of Artificial Sequence: Synthetic oligonucleotide
  Antisense strand to SEQ ID NO: 2382456
uugcaacagauagauuuca

SEQ ID NO: 2382458 - RNA, 19 nt, Artificial Sequence
  Description of Artificial Sequence: Synthetic oligonucleotide
  Sense strand starting at position 3458 of SEQ ID NO: 1886005
guagacuauguccagugua

SEQ ID NO: 2382459 - RNA, 19 nt, Artificial Sequence
  Description of Artificial Sequence: Synthetic oligonucleotide
  Antisense strand to SEQ ID NO: 2382458
uacacuggacauagucuac

SEQ ID NO: 2382460 - RNA, 19 nt, Artificial Sequence
  Description of Artificial Sequence: Synthetic oligonucleotide
  Sense strand starting at position 3480 of SEQ ID NO: 1886005
agauguguguaccugggau

SEQ ID NO: 2382461 - RNA, 19 nt, Artificial Sequence
  Description of Artificial Sequence: Synthetic oligonucleotide
  Antisense strand to SEQ ID NO: 2382460
aucccagguacacacaucu

SEQ ID NO: 2382462 - RNA, 19 nt, Artificial Sequence
  Description of Artificial Sequence: Synthetic oligonucleotide
  Sense strand starting at position 3871 of SEQ ID NO: 1886005
guuacugggucuuccagau

SEQ ID NO: 2382463 - RNA, 19 nt, Artificial Sequence
  Description of Artificial Sequence: Synthetic oligonucleotide
  Antisense strand to SEQ ID NO: 2382462
aucuggaagacccaguaac

SEQ ID NO: 2382464 - RNA, 19 nt, Artificial Sequence
  Description of Artificial Sequence: Synthetic oligonucleotide
  Sense strand starting at position 3875 of SEQ ID NO: 1886005
cugggucuuccagaucaua

SEQ ID NO: 2382465 - RNA, 19 nt, Artificial Sequence
  Description of Artificial Sequence: Synthetic oligonucleotide
  Antisense strand to SEQ ID NO: 2382464
uaugaucuggaagacccag

SEQ ID NO: 2382466 - RNA, 19 nt, Artificial Sequence
  Description of Artificial Sequence: Synthetic oligonucleotide
  Sense strand starting at position 40 of SEQ ID NO: 1886006
ggagacuuugcauacauuc

SEQ ID NO: 2382467 - RNA, 19 nt, Artificial Sequence
  Description of Artificial Sequence: Synthetic oligonucleotide
  Antisense strand to SEQ ID NO: 2382466
gaauguaugcaaagucucc

SEQ ID NO: 2382468 - RNA, 19 nt, Artificial Sequence
  Description of Artificial Sequence: Synthetic oligonucleotide
  Sense strand starting at position 85 of SEQ ID NO: 1886006
uugauugagaauggucacu

SEQ ID NO: 2382469 - RNA, 19 nt, Artificial Sequence
  Description of Artificial Sequence: Synthetic oligonucleotide
  Antisense strand to SEQ ID NO: 2382468
agugaccauucucaaucaa

SEQ ID NO: 2382470 - RNA, 19 nt, Artificial Sequence
  Description of Artificial Sequence: Synthetic oligonucleotide
  Sense strand starting at position 97 of SEQ ID NO: 1886006
ggucacugcacagauagua

SEQ ID NO: 2382471 - RNA, 19 nt, Artificial Sequence
  Description of Artificial Sequence: Synthetic oligonucleotide
  Antisense strand to SEQ ID NO: 2382470
uacuaucugugcagugacc

SEQ ID NO: 2382472 - RNA, 19 nt, Artificial Sequence
  Description of Artificial Sequence: Synthetic oligonucleotide
  Sense strand starting at position 341 of SEQ ID NO: 1886006
gaccucugggaaugaaugu

SEQ ID NO: 2382473 - RNA, 19 nt, Artificial Sequence
  Description of Artificial Sequence: Synthetic oligonucleotide
  Antisense strand to SEQ ID NO: 2382472
acauucauucccagagguc

SEQ ID NO: 2382474 - RNA, 19 nt, Artificial Sequence
  Description of Artificial Sequence: Synthetic oligonucleotide
  Sense strand starting at position 347 of SEQ ID NO: 1886006
ugggaaugaaugugccuaa

SEQ ID NO: 2382475 - RNA, 19 nt, Artificial Sequence
  Description of Artificial Sequence: Synthetic oligonucleotide
  Antisense strand to SEQ ID NO: 2382474
uuaggcacauucauuccca

SEQ ID NO: 2382476 - RNA, 19 nt, Artificial Sequence
  Description of Artificial Sequence: Synthetic oligonucleotide
  Sense strand starting at position 348 of SEQ ID NO: 1886006
gggaaugaaugugccuaaa

SEQ ID NO: 2382477 - RNA, 19 nt, Artificial Sequence
  Description of Artificial Sequence: Synthetic oligonucleotide
  Antisense strand to SEQ ID NO: 2382476
uuuaggcacauucauuccc

SEQ ID NO: 2382478 - RNA, 19 nt, Artificial Sequence
  Description of Artificial Sequence: Synthetic oligonucleotide
  Sense strand starting at position 497 of SEQ ID NO: 1886006
uugaaaucccuagauugcu

SEQ ID NO: 2382479 - RNA, 19 nt, Artificial Sequence
  Description of Artificial Sequence: Synthetic oligonucleotide
  Antisense strand to SEQ ID NO: 2382478
agcaaucuagggauuucaa

SEQ ID NO: 2382480 - RNA, 19 nt, Artificial Sequence
  Description of Artificial Sequence: Synthetic oligonucleotide
  Sense strand starting at position 510 of SEQ ID NO: 1886006
auugcuucgagggauauaa

SEQ ID NO: 2382481 - RNA, 19 nt, Artificial Sequence
  Description of Artificial Sequence: Synthetic oligonucleotide
  Antisense strand to SEQ ID NO: 2382480
uuauaucccucgaagcaau

SEQ ID NO: 2382482 - RNA, 19 nt, Artificial Sequence
  Description of Artificial Sequence: Synthetic oligonucleotide
  Sense strand starting at position 777 of SEQ ID NO: 1886006
cuuauaaaugggcauguca

SEQ ID NO: 2382483 - RNA, 19 nt, Artificial Sequence
  Description of Artificial Sequence: Synthetic oligonucleotide
  Antisense strand to SEQ ID NO: 2382482
ugacaugcccauuuauaag

SEQ ID NO: 2382484 - RNA, 19 nt, Artificial Sequence
  Description of Artificial Sequence: Synthetic oligonucleotide
  Sense strand starting at position 779 of SEQ ID NO: 1886006
uauaaaugggcaugucaau

SEQ ID NO: 2382485 - RNA, 19 nt, Artificial Sequence
  Description of Artificial Sequence: Synthetic oligonucleotide
  Antisense strand to SEQ ID NO: 2382484
auugacaugcccauuuaua

SEQ ID NO: 2382486 - RNA, 19 nt, Artificial Sequence
  Description of Artificial Sequence: Synthetic oligonucleotide
  Sense strand starting at position 997 of SEQ ID NO: 1886006
gccuuagugcugucuguua

SEQ ID NO: 2382487 - RNA, 19 nt, Artificial Sequence
  Description of Artificial Sequence: Synthetic oligonucleotide
  Antisense strand to SEQ ID NO: 2382486
uaacagacagcacuaaggc

SEQ ID NO: 2382488 - RNA, 19 nt, Artificial Sequence
  Description of Artificial Sequence: Synthetic oligonucleotide
  Sense strand starting at position 1141 of SEQ ID NO: 1886006
uggauucuggcacauguua

SEQ ID NO: 2382489 - RNA, 19 nt, Artificial Sequence
  Description of Artificial Sequence: Synthetic oligonucleotide
  Antisense strand to SEQ ID NO: 2382488
uaacaugugccagaaucca

SEQ ID NO: 2382490 - RNA, 19 nt, Artificial Sequence
  Description of Artificial Sequence: Synthetic oligonucleotide
  Sense strand starting at position 1256 of SEQ ID NO: 1886006
gagaucuuacugcagcaua

SEQ ID NO: 2382491 - RNA, 19 nt, Artificial Sequence
  Description of Artificial Sequence: Synthetic oligonucleotide
  Antisense strand to SEQ ID NO: 2382490
uaugcugcaguaagaucuc

SEQ ID NO: 2382492 - RNA, 19 nt, Artificial Sequence
  Description of Artificial Sequence: Synthetic oligonucleotide
  Sense strand starting at position 1259 of SEQ ID NO: 1886006
aucuuacugcagcauagau

SEQ ID NO: 2382493 - RNA, 19 nt, Artificial Sequence
  Description of Artificial Sequence: Synthetic oligonucleotide
  Antisense strand to SEQ ID NO: 2382492
aucuaugcugcaguaagau

SEQ ID NO: 2382494 - RNA, 19 nt, Artificial Sequence
  Description of Artificial Sequence: Synthetic oligonucleotide
  Sense strand starting at position 1322 of SEQ ID NO: 1886006
ucauuuaaaugccagagaa

SEQ ID NO: 2382495 - RNA, 19 nt, Artificial Sequence
  Description of Artificial Sequence: Synthetic oligonucleotide
  Antisense strand to SEQ ID NO: 2382494
uucucuggcauuuaaauga

SEQ ID NO: 2382496 - RNA, 19 nt, Artificial Sequence
  Description of Artificial Sequence: Synthetic oligonucleotide
  Sense strand starting at position 1330 of SEQ ID NO: 1886006
augccagagaaaugugaau

SEQ ID NO: 2382497 - RNA, 19 nt, Artificial Sequence
  Description of Artificial Sequence: Synthetic oligonucleotide
  Antisense strand to SEQ ID NO: 2382496
auucacauuucucuggcau

SEQ ID NO: 2382498 - RNA, 19 nt, Artificial Sequence
  Description of Artificial Sequence: Synthetic oligonucleotide
  Sense strand starting at position 1332 of SEQ ID NO: 1886006
gccagagaaaugugaauau

SEQ ID NO: 2382499 - RNA, 19 nt, Artificial Sequence
  Description of Artificial Sequence: Synthetic oligonucleotide
  Antisense strand to SEQ ID NO: 2382498
auauucacauuucucuggc

SEQ ID NO: 2382500 - RNA, 19 nt, Artificial Sequence
  Description of Artificial Sequence: Synthetic oligonucleotide
  Sense strand starting at position 1466 of SEQ ID NO: 1886006
auaauagucgcccauuaaa

SEQ ID NO: 2382501 - RNA, 19 nt, Artificial Sequence
  Description of Artificial Sequence: Synthetic oligonucleotide
  Antisense strand to SEQ ID NO: 2382500
uuuaaugggcgacuauuau

SEQ ID NO: 2382502 - RNA, 19 nt, Artificial Sequence
  Description of Artificial Sequence: Synthetic oligonucleotide
  Sense strand starting at position 1944 of SEQ ID NO: 1886006
uguaccuaagaguaaacuu

SEQ ID NO: 2382503 - RNA, 19 nt, Artificial Sequence
  Description of Artificial Sequence: Synthetic oligonucleotide
  Antisense strand to SEQ ID NO: 2382502
aaguuuacucuuagguaca

SEQ ID NO: 2382504 - RNA, 19 nt, Artificial Sequence
  Description of Artificial Sequence: Synthetic oligonucleotide
  Sense strand starting at position 2197 of SEQ ID NO: 1886006
cuugcuucugaccaauuga

SEQ ID NO: 2382505 - RNA, 19 nt, Artificial Sequence
  Description of Artificial Sequence: Synthetic oligonucleotide
  Antisense strand to SEQ ID NO: 2382504
ucaauuggucagaagcaag

SEQ ID NO: 2382506 - RNA, 19 nt, Artificial Sequence
  Description of Artificial Sequence: Synthetic oligonucleotide
  Sense strand starting at position 2216 of SEQ ID NO: 1886006
auaugaaugggacgucacu

SEQ ID NO: 2382507 - RNA, 19 nt, Artificial Sequence
  Description of Artificial Sequence: Synthetic oligonucleotide
  Antisense strand to SEQ ID NO: 2382506
agugacgucccauucauau

SEQ ID NO: 2382508 - RNA, 19 nt, Artificial Sequence
  Description of Artificial Sequence: Synthetic oligonucleotide
  Sense strand starting at position 2304 of SEQ ID NO: 1886006
acagcuaugcuggagaaau

SEQ ID NO: 2382509 - RNA, 19 nt, Artificial Sequence
  Description of Artificial Sequence: Synthetic oligonucleotide
  Antisense strand to SEQ ID NO: 2382508
auuucuccagcauagcugu

SEQ ID NO: 2382510 - RNA, 19 nt, Artificial Sequence
  Description of Artificial Sequence: Synthetic oligonucleotide
  Sense strand starting at position 2314 of SEQ ID NO: 1886006
uggagaaauccauguggca

SEQ ID NO: 2382511 - RNA, 19 nt, Artificial Sequence
  Description of Artificial Sequence: Synthetic oligonucleotide
  Antisense strand to SEQ ID NO: 2382510
ugccacauggauuucucca

SEQ ID NO: 2382512 - RNA, 19 nt, Artificial Sequence
  Description of Artificial Sequence: Synthetic oligonucleotide
  Sense strand starting at position 2426 of SEQ ID NO: 1886006
cugggaugaacuuggaagu

SEQ ID NO: 2382513 - RNA, 19 nt, Artificial Sequence
  Description of Artificial Sequence: Synthetic oligonucleotide
  Antisense strand to SEQ ID NO: 2382512
acuuccaaguucaucccag

SEQ ID NO: 2382514 - RNA, 19 nt, Artificial Sequence
  Description of Artificial Sequence: Synthetic oligonucleotide
  Sense strand starting at position 2472 of SEQ ID NO: 1886006
gagaauguggcccagcuaa

SEQ ID NO: 2382515 - RNA, 19 nt, Artificial Sequence
  Description of Artificial Sequence: Synthetic oligonucleotide
  Antisense strand to SEQ ID NO: 2382514
uuagcugggccacauucuc

SEQ ID NO: 2382516 - RNA, 19 nt, Artificial Sequence
  Description of Artificial Sequence: Synthetic oligonucleotide
  Sense strand starting at position 2604 of SEQ ID NO: 1886006
gcaauuuguuaugcaacau

SEQ ID NO: 2382517 - RNA, 19 nt, Artificial Sequence
  Description of Artificial Sequence: Synthetic oligonucleotide
  Antisense strand to SEQ ID NO: 2382516
auguugcauaacaaauugc

SEQ ID NO: 2382518 - RNA, 19 nt, Artificial Sequence
  Description of Artificial Sequence: Synthetic oligonucleotide
  Sense strand starting at position 2608 of SEQ ID NO: 1886006
uuuguuaugcaacauuaag

SEQ ID NO: 2382519 - RNA, 19 nt, Artificial Sequence
  Description of Artificial Sequence: Synthetic oligonucleotide
  Antisense strand to SEQ ID NO: 2382518
cuuaauguugcauaacaaa

SEQ ID NO: 2382520 - RNA, 19 nt, Artificial Sequence
  Description of Artificial Sequence: Synthetic oligonucleotide
  Sense strand starting at position 2649 of SEQ ID NO: 1886006
uuauauaaucugggcugga

SEQ ID NO: 2382521 - RNA, 19 nt, Artificial Sequence
  Description of Artificial Sequence: Synthetic oligonucleotide
  Antisense strand to SEQ ID NO: 2382520
uccagcccagauuauauaa

SEQ ID NO: 2382522 - RNA, 19 nt, Artificial Sequence
  Description of Artificial Sequence: Synthetic oligonucleotide
  Sense strand starting at position 2650 of SEQ ID NO: 1886006
uauauaaucugggcuggau

SEQ ID NO: 2382523 - RNA, 19 nt, Artificial Sequence
  Description of Artificial Sequence: Synthetic oligonucleotide
  Antisense strand to SEQ ID NO: 2382522
auccagcccagauuauaua

SEQ ID NO: 2382524 - RNA, 19 nt, Artificial Sequence
  Description of Artificial Sequence: Synthetic oligonucleotide
  Sense strand starting at position 2663 of SEQ ID NO: 1886006
cuggaugccacugaguuua

SEQ ID NO: 2382525 - RNA, 19 nt, Artificial Sequence
  Description of Artificial Sequence: Synthetic oligonucleotide
  Antisense strand to SEQ ID NO: 2382524
uaaacucaguggcauccag

SEQ ID NO: 2382526 - RNA, 19 nt, Artificial Sequence
  Description of Artificial Sequence: Synthetic oligonucleotide
  Sense strand starting at position 2731 of SEQ ID NO: 1886006
gauaaacugccauggaagu

SEQ ID NO: 2382527 - RNA, 19 nt, Artificial Sequence
  Description of Artificial Sequence: Synthetic oligonucleotide
  Antisense strand to SEQ ID NO: 2382526
acuuccauggcaguuuauc

SEQ ID NO: 2382528 - RNA, 19 nt, Artificial Sequence
  Description of Artificial Sequence: Synthetic oligonucleotide
  Sense strand starting at position 2855 of SEQ ID NO: 1886006
gcuugacucauauaggagu

SEQ ID NO: 2382529 - RNA, 19 nt, Artificial Sequence
  Description of Artificial Sequence: Synthetic oligonucleotide
  Antisense strand to SEQ ID NO: 2382528
acuccuauaugagucaagc

SEQ ID NO: 2382530 - RNA, 19 nt, Artificial Sequence
  Description of Artificial Sequence: Synthetic oligonucleotide
  Sense strand starting at position 2927 of SEQ ID NO: 1886006
acgauaacuuauguaauga

SEQ ID NO: 2382531 - RNA, 19 nt, Artificial Sequence
  Description of Artificial Sequence: Synthetic oligonucleotide
  Antisense strand to SEQ ID NO: 2382530
ucauuacauaaguuaucgu

SEQ ID NO: 2382532 - RNA, 19 nt, Artificial Sequence
  Description of Artificial Sequence: Synthetic oligonucleotide
  Sense strand starting at position 3321 of SEQ ID NO: 1886006
ugaugugaaucucuugacu

SEQ ID NO: 2382533 - RNA, 19 nt, Artificial Sequence
  Description of Artificial Sequence: Synthetic oligonucleotide
  Antisense strand to SEQ ID NO: 2382532
agucaagagauucacauca

SEQ ID NO: 2382534 - RNA, 19 nt, Artificial Sequence
  Description of Artificial Sequence: Synthetic oligonucleotide
  Sense strand starting at position 3374 of SEQ ID NO: 1886006
auuccugacugacuuaagu

SEQ ID NO: 2382535 - RNA, 19 nt, Artificial Sequence
  Description of Artificial Sequence: Synthetic oligonucleotide
  Antisense strand to SEQ ID NO: 2382534
acuuaagucagucaggaau

SEQ ID NO: 2382536 - RNA, 19 nt, Artificial Sequence
  Description of Artificial Sequence: Synthetic oligonucleotide
  Sense strand starting at position 3408 of SEQ ID NO: 1886006
gaucuuauccuguagcaga

SEQ ID NO: 2382537 - RNA, 19 nt, Artificial Sequence
  Description of Artificial Sequence: Synthetic oligonucleotide
  Antisense strand to SEQ ID NO: 2382536
ucugcuacaggauaagauc

SEQ ID NO: 2382538 - RNA, 19 nt, Artificial Sequence
  Description of Artificial Sequence: Synthetic oligonucleotide
  Sense strand starting at position 3568 of SEQ ID NO: 1886006
cucagaugacuuggaaguu

SEQ ID NO: 2382539 - RNA, 19 nt, Artificial Sequence
  Description of Artificial Sequence: Synthetic oligonucleotide
  Antisense strand to SEQ ID NO: 2382538
aacuuccaagucaucugag

SEQ ID NO: 2382540 - RNA, 19 nt, Artificial Sequence
  Description of Artificial Sequence: Synthetic oligonucleotide
  Sense strand starting at position 3581 of SEQ ID NO: 1886006
gaaguuuccuaguugggag

SEQ ID NO: 2382541 - RNA, 19 nt, Artificial Sequence
  Description of Artificial Sequence: Synthetic oligonucleotide
  Antisense strand to SEQ ID NO: 2382540
cucccaacuaggaaacuuc

SEQ ID NO: 2382542 - RNA, 19 nt, Artificial Sequence
  Description of Artificial Sequence: Synthetic oligonucleotide
  Sense strand starting at position 3582 of SEQ ID NO: 1886006
aaguuuccuaguugggaga

SEQ ID NO: 2382543 - RNA, 19 nt, Artificial Sequence
  Description of Artificial Sequence: Synthetic oligonucleotide
  Antisense strand to SEQ ID NO: 2382542
ucucccaacuaggaaacuu

SEQ ID NO: 2382544 - RNA, 19 nt, Artificial Sequence
  Description of Artificial Sequence: Synthetic oligonucleotide
  Sense strand starting at position 3767 of SEQ ID NO: 1886006
gagaccauuccugguuaac

SEQ ID NO: 2382545 - RNA, 19 nt, Artificial Sequence
  Description of Artificial Sequence: Synthetic oligonucleotide
  Antisense strand to SEQ ID NO: 2382544
guuaaccaggaauggucuc

SEQ ID NO: 2382546 - RNA, 19 nt, Artificial Sequence
  Description of Artificial Sequence: Synthetic oligonucleotide
  Sense strand starting at position 204 of SEQ ID NO: 1886007
agucuaaauguccaucaau

SEQ ID NO: 2382547 - RNA, 19 nt, Artificial Sequence
  Description of Artificial Sequence: Synthetic oligonucleotide
  Antisense strand to SEQ ID NO: 2382546
auugauggacauuuagacu

SEQ ID NO: 2382548 - RNA, 19 nt, Artificial Sequence
  Description of Artificial Sequence: Synthetic oligonucleotide
  Sense strand starting at position 222 of SEQ ID NO: 1886007
uggauaaauuguguuacau

SEQ ID NO: 2382549 - RNA, 19 nt, Artificial Sequence
  Description of Artificial Sequence: Synthetic oligonucleotide
  Antisense strand to SEQ ID NO: 2382548
auguaacacaauuuaucca

SEQ ID NO: 2382550 - RNA, 19 nt, Artificial Sequence
  Description of Artificial Sequence: Synthetic oligonucleotide
  Sense strand starting at position 445 of SEQ ID NO: 1886007
auuagagagugacuccuua

SEQ ID NO: 2382551 - RNA, 19 nt, Artificial Sequence
  Description of Artificial Sequence: Synthetic oligonucleotide
  Antisense strand to SEQ ID NO: 2382550
uaaggagucacucucuaau

SEQ ID NO: 2382552 - RNA, 19 nt, Artificial Sequence
  Description of Artificial Sequence: Synthetic oligonucleotide
  Sense strand starting at position 449 of SEQ ID NO: 1886007
gagagugacuccuuaacga

SEQ ID NO: 2382553 - RNA, 19 nt, Artificial Sequence
  Description of Artificial Sequence: Synthetic oligonucleotide
  Antisense strand to SEQ ID NO: 2382552
ucguuaaggagucacucuc

SEQ ID NO: 2382554 - RNA, 19 nt, Artificial Sequence
  Description of Artificial Sequence: Synthetic oligonucleotide
  Sense strand starting at position 541 of SEQ ID NO: 1886007
auauuaugucacugaauug

SEQ ID NO: 2382555 - RNA, 19 nt, Artificial Sequence
  Description of Artificial Sequence: Synthetic oligonucleotide
  Antisense strand to SEQ ID NO: 2382554
caauucagugacauaauau

SEQ ID NO: 2382556 - RNA, 19 nt, Artificial Sequence
  Description of Artificial Sequence: Synthetic oligonucleotide
  Sense strand starting at position 846 of SEQ ID NO: 1886007
ucgucuucucagucucgau

SEQ ID NO: 2382557 - RNA, 19 nt, Artificial Sequence
  Description of Artificial Sequence: Synthetic oligonucleotide
  Antisense strand to SEQ ID NO: 2382556
aucgagacugagaagacga

SEQ ID NO: 2382558 - RNA, 19 nt, Artificial Sequence
  Description of Artificial Sequence: Synthetic oligonucleotide
  Sense strand starting at position 847 of SEQ ID NO: 1886007
cgucuucucagucucgauu

SEQ ID NO: 2382559 - RNA, 19 nt, Artificial Sequence
  Description of Artificial Sequence: Synthetic oligonucleotide
  Antisense strand to SEQ ID NO: 2382558
aaucgagacugagaagacg

SEQ ID NO: 2382560 - RNA, 19 nt, Artificial Sequence
  Description of Artificial Sequence: Synthetic oligonucleotide
  Sense strand starting at position 1000 of SEQ ID NO: 1886007
uggacaugacgccagauua

SEQ ID NO: 2382561 - RNA, 19 nt, Artificial Sequence
  Description of Artificial Sequence: Synthetic oligonucleotide
  Antisense strand to SEQ ID NO: 2382560
uaaucuggcgucaugucca

SEQ ID NO: 2382562 - RNA, 19 nt, Artificial Sequence
  Description of Artificial Sequence: Synthetic oligonucleotide
  Sense strand starting at position 1007 of SEQ ID NO: 1886007
gacgccagauuacuugaau

SEQ ID NO: 2382563 - RNA, 19 nt, Artificial Sequence
  Description of Artificial Sequence: Synthetic oligonucleotide
  Antisense strand to SEQ ID NO: 2382562
auucaaguaaucuggcguc

SEQ ID NO: 2382564 - RNA, 19 nt, Artificial Sequence
  Description of Artificial Sequence: Synthetic oligonucleotide
  Sense strand starting at position 1008 of SEQ ID NO: 1886007
acgccagauuacuugaauu

SEQ ID NO: 2382565 - RNA, 19 nt, Artificial Sequence
  Description of Artificial Sequence: Synthetic oligonucleotide
  Antisense strand to SEQ ID NO: 2382564
aauucaaguaaucuggcgu

SEQ ID NO: 2382566 - RNA, 19 nt, Artificial Sequence
  Description of Artificial Sequence: Synthetic oligonucleotide
  Sense strand starting at position 1010 of SEQ ID NO: 1886007
gccagauuacuugaauucu

SEQ ID NO: 2382567 - RNA, 19 nt, Artificial Sequence
  Description of Artificial Sequence: Synthetic oligonucleotide
  Antisense strand to SEQ ID NO: 2382566
agaauucaaguaaucuggc

SEQ ID NO: 2382568 - RNA, 19 nt, Artificial Sequence
  Description of Artificial Sequence: Synthetic oligonucleotide
  Sense strand starting at position 1041 of SEQ ID NO: 1886007
gccaguuaucacuaaggug

SEQ ID NO: 2382569 - RNA, 19 nt, Artificial Sequence
  Description of Artificial Sequence: Synthetic oligonucleotide
  Antisense strand to SEQ ID NO: 2382568
caccuuagugauaacuggc

SEQ ID NO: 2382570 - RNA, 19 nt, Artificial Sequence
  Description of Artificial Sequence: Synthetic oligonucleotide
  Sense strand starting at position 1065 of SEQ ID NO: 1886007
ggacaaguuccuuaacuuc

SEQ ID NO: 2382571 - RNA, 19 nt, Artificial Sequence
  Description of Artificial Sequence: Synthetic oligonucleotide
  Antisense strand to SEQ ID NO: 2382570
gaaguuaaggaacuugucc

SEQ ID NO: 2382572 - RNA, 19 nt, Artificial Sequence
  Description of Artificial Sequence: Synthetic oligonucleotide
  Sense strand starting at position 1127 of SEQ ID NO: 1886007
cccaccuuauagguaaaga

SEQ ID NO: 2382573 - RNA, 19 nt, Artificial Sequence
  Description of Artificial Sequence: Synthetic oligonucleotide
  Antisense strand to SEQ ID NO: 2382572
ucuuuaccuauaagguggg

SEQ ID NO: 2382574 - RNA, 19 nt, Artificial Sequence
  Description of Artificial Sequence: Synthetic oligonucleotide
  Sense strand starting at position 1226 of SEQ ID NO: 1886007
aggaguuuaugucuuagga

SEQ ID NO: 2382575 - RNA, 19 nt, Artificial Sequence
  Description of Artificial Sequence: Synthetic oligonucleotide
  Antisense strand to SEQ ID NO: 2382574
uccuaagacauaaacuccu

SEQ ID NO: 2382576 - RNA, 19 nt, Artificial Sequence
  Description of Artificial Sequence: Synthetic oligonucleotide
  Sense strand starting at position 1514 of SEQ ID NO: 1886007
caacaugaguuuccgagga

SEQ ID NO: 2382577 - RNA, 19 nt, Artificial Sequence
  Description of Artificial Sequence: Synthetic oligonucleotide
  Antisense strand to SEQ ID NO: 2382576
uccucggaaacucauguug

SEQ ID NO: 2382578 - RNA, 19 nt, Artificial Sequence
  Description of Artificial Sequence: Synthetic oligonucleotide
  Sense strand starting at position 1519 of SEQ ID NO: 1886007
ugaguuuccgaggaggcau

SEQ ID NO: 2382579 - RNA, 19 nt, Artificial Sequence
  Description of Artificial Sequence: Synthetic oligonucleotide
  Antisense strand to SEQ ID NO: 2382578
augccuccucggaaacuca

SEQ ID NO: 2382580 - RNA, 19 nt, Artificial Sequence
  Description of Artificial Sequence: Synthetic oligonucleotide
  Sense strand starting at position 1563 of SEQ ID NO: 1886007
gugacugcucgcuccaagu

SEQ ID NO: 2382581 - RNA, 19 nt, Artificial Sequence
  Description of Artificial Sequence: Synthetic oligonucleotide
  Antisense strand to SEQ ID NO: 2382580
acuuggagcgagcagucac

SEQ ID NO: 2382582 - RNA, 19 nt, Artificial Sequence
  Description of Artificial Sequence: Synthetic oligonucleotide
  Sense strand starting at position 1706 of SEQ ID NO: 1886007
ugaguucauggcuaucgau

SEQ ID NO: 2382583 - RNA, 19 nt, Artificial Sequence
  Description of Artificial Sequence: Synthetic oligonucleotide
  Antisense strand to SEQ ID NO: 2382582
aucgauagccaugaacuca

SEQ ID NO: 2382584 - RNA, 19 nt, Artificial Sequence
  Description of Artificial Sequence: Synthetic oligonucleotide
  Sense strand starting at position 1714 of SEQ ID NO: 1886007
uggcuaucgauuuguugag

SEQ ID NO: 2382585 - RNA, 19 nt, Artificial Sequence
  Description of Artificial Sequence: Synthetic oligonucleotide
  Antisense strand to SEQ ID NO: 2382584
cucaacaaaucgauagcca

SEQ ID NO: 2382586 - RNA, 19 nt, Artificial Sequence
  Description of Artificial Sequence: Synthetic oligonucleotide
  Sense strand starting at position 1715 of SEQ ID NO: 1886007
ggcuaucgauuuguugagu

SEQ ID NO: 2382587 - RNA, 19 nt, Artificial Sequence
  Description of Artificial Sequence: Synthetic oligonucleotide
  Antisense strand to SEQ ID NO: 2382586
acucaacaaaucgauagcc

SEQ ID NO: 2382588 - RNA, 19 nt, Artificial Sequence
  Description of Artificial Sequence: Synthetic oligonucleotide
  Sense strand starting at position 1716 of SEQ ID NO: 1886007
gcuaucgauuuguugagua

SEQ ID NO: 2382589 - RNA, 19 nt, Artificial Sequence
  Description of Artificial Sequence: Synthetic oligonucleotide
  Antisense strand to SEQ ID NO: 2382588
uacucaacaaaucgauagc

SEQ ID NO: 2382590 - RNA, 19 nt, Artificial Sequence
  Description of Artificial Sequence: Synthetic oligonucleotide
  Sense strand starting at position 1720 of SEQ ID NO: 1886007
ucgauuuguugaguaaugu

SEQ ID NO: 2382591 - RNA, 19 nt, Artificial Sequence
  Description of Artificial Sequence: Synthetic oligonucleotide
  Antisense strand to SEQ ID NO: 2382590
acauuacucaacaaaucga

SEQ ID NO: 2382592 - RNA, 19 nt, Artificial Sequence
  Description of Artificial Sequence: Synthetic oligonucleotide
  Sense strand starting at position 1726 of SEQ ID NO: 1886007
uguugaguaauguaugaaa

SEQ ID NO: 2382593 - RNA, 19 nt, Artificial Sequence
  Description of Artificial Sequence: Synthetic oligonucleotide
  Antisense strand to SEQ ID NO: 2382592
uuucauacauuacucaaca

SEQ ID NO: 2382594 - RNA, 19 nt, Artificial Sequence
  Description of Artificial Sequence: Synthetic oligonucleotide
  Sense strand starting at position 1886 of SEQ ID NO: 1886007
cuguaaaugcgggaagcau

SEQ ID NO: 2382595 - RNA, 19 nt, Artificial Sequence
  Description of Artificial Sequence: Synthetic oligonucleotide
  Antisense strand to SEQ ID NO: 2382594
augcuucccgcauuuacag

SEQ ID NO: 2382596 - RNA, 19 nt, Artificial Sequence
  Description of Artificial Sequence: Synthetic oligonucleotide
  Sense strand starting at position 1924 of SEQ ID NO: 1886007
ucugcagaacacugucaaa

SEQ ID NO: 2382597 - RNA, 19 nt, Artificial Sequence
  Description of Artificial Sequence: Synthetic oligonucleotide
  Antisense strand to SEQ ID NO: 2382596
uuugacaguguucugcaga

SEQ ID NO: 2382598 - RNA, 19 nt, Artificial Sequence
  Description of Artificial Sequence: Synthetic oligonucleotide
  Sense strand starting at position 2298 of SEQ ID NO: 1886007
ggaguaguguggaaaggag

SEQ ID NO: 2382599 - RNA, 19 nt, Artificial Sequence
  Description of Artificial Sequence: Synthetic oligonucleotide
  Antisense strand to SEQ ID NO: 2382598
cuccuuuccacacuacucc

SEQ ID NO: 2382600 - RNA, 19 nt, Artificial Sequence
  Description of Artificial Sequence: Synthetic oligonucleotide
  Sense strand starting at position 2468 of SEQ ID NO: 1886007
uuucuaggccaguacuuau

SEQ ID NO: 2382601 - RNA, 19 nt, Artificial Sequence
  Description of Artificial Sequence: Synthetic oligonucleotide
  Antisense strand to SEQ ID NO: 2382600
auaaguacuggccuagaaa

SEQ ID NO: 2382602 - RNA, 19 nt, Artificial Sequence
  Description of Artificial Sequence: Synthetic oligonucleotide
  Sense strand starting at position 2691 of SEQ ID NO: 1886007
ucgcuaugaacguuugugu

SEQ ID NO: 2382603 - RNA, 19 nt, Artificial Sequence
  Description of Artificial Sequence: Synthetic oligonucleotide
  Antisense strand to SEQ ID NO: 2382602
acacaaacguucauagcga

SEQ ID NO: 2382604 - RNA, 19 nt, Artificial Sequence
  Description of Artificial Sequence: Synthetic oligonucleotide
  Sense strand starting at position 2768 of SEQ ID NO: 1886007
gcucuuauaggagggauua

SEQ ID NO: 2382605 - RNA, 19 nt, Artificial Sequence
  Description of Artificial Sequence: Synthetic oligonucleotide
  Antisense strand to SEQ ID NO: 2382604
uaaucccuccuauaagagc

SEQ ID NO: 2382606 - RNA, 19 nt, Artificial Sequence
  Description of Artificial Sequence: Synthetic oligonucleotide
  Sense strand starting at position 2780 of SEQ ID NO: 1886007
gggauuagguuauuagggu

SEQ ID NO: 2382607 - RNA, 19 nt, Artificial Sequence
  Description of Artificial Sequence: Synthetic oligonucleotide
  Antisense strand to SEQ ID NO: 2382606
acccuaauaaccuaauccc

SEQ ID NO: 2382608 - RNA, 19 nt, Artificial Sequence
  Description of Artificial Sequence: Synthetic oligonucleotide
  Sense strand starting at position 2795 of SEQ ID NO: 1886007
gggugaaacccucaugagu

SEQ ID NO: 2382609 - RNA, 19 nt, Artificial Sequence
  Description of Artificial Sequence: Synthetic oligonucleotide
  Antisense strand to SEQ ID NO: 2382608
acucaugaggguuucaccc

SEQ ID NO: 2382610 - RNA, 19 nt, Artificial Sequence
  Description of Artificial Sequence: Synthetic oligonucleotide
  Sense strand starting at position 2801 of SEQ ID NO: 1886007
aacccucaugaguggaauu

SEQ ID NO: 2382611 - RNA, 19 nt, Artificial Sequence
  Description of Artificial Sequence: Synthetic oligonucleotide
  Antisense strand to SEQ ID NO: 2382610
aauuccacucaugaggguu

SEQ ID NO: 2382612 - RNA, 19 nt, Artificial Sequence
  Description of Artificial Sequence: Synthetic oligonucleotide
  Sense strand starting at position 2882 of SEQ ID NO: 1886007
ugagaugauggcugugaga

SEQ ID NO: 2382613 - RNA, 19 nt, Artificial Sequence
  Description of Artificial Sequence: Synthetic oligonucleotide
  Antisense strand to SEQ ID NO: 2382612
ucucacagccaucaucuca

SEQ ID NO: 2382614 - RNA, 19 nt, Artificial Sequence
  Description of Artificial Sequence: Synthetic oligonucleotide
  Sense strand starting at position 2884 of SEQ ID NO: 1886007
agaugauggcugugagaug

SEQ ID NO: 2382615 - RNA, 19 nt, Artificial Sequence
  Description of Artificial Sequence: Synthetic oligonucleotide
  Antisense strand to SEQ ID NO: 2382614
caucucacagccaucaucu

SEQ ID NO: 2382616 - RNA, 19 nt, Artificial Sequence
  Description of Artificial Sequence: Synthetic oligonucleotide
  Sense strand starting at position 2889 of SEQ ID NO: 1886007
auggcugugagaugaugau

SEQ ID NO: 2382617 - RNA, 19 nt, Artificial Sequence
  Description of Artificial Sequence: Synthetic oligonucleotide
  Antisense strand to SEQ ID NO: 2382616
aucaucaucucacagccau

SEQ ID NO: 2382618 - RNA, 19 nt, Artificial Sequence
  Description of Artificial Sequence: Synthetic oligonucleotide
  Sense strand starting at position 3007 of SEQ ID NO: 1886007
cgccuagucaaagguauuu

SEQ ID NO: 2382619 - RNA, 19 nt, Artificial Sequence
  Description of Artificial Sequence: Synthetic oligonucleotide
  Antisense strand to SEQ ID NO: 2382618
aaauaccuuugacuaggcg

SEQ ID NO: 2382620 - RNA, 19 nt, Artificial Sequence
  Description of Artificial Sequence: Synthetic oligonucleotide
  Sense strand starting at position 3289 of SEQ ID NO: 1886007
ucuguucucagguaaugga

SEQ ID NO: 2382621 - RNA, 19 nt, Artificial Sequence
  Description of Artificial Sequence: Synthetic oligonucleotide
  Antisense strand to SEQ ID NO: 2382620
uccauuaccugagaacaga

SEQ ID NO: 2382622 - RNA, 19 nt, Artificial Sequence
  Description of Artificial Sequence: Synthetic oligonucleotide
  Sense strand starting at position 3298 of SEQ ID NO: 1886007
agguaauggaagugaggua

SEQ ID NO: 2382623 - RNA, 19 nt, Artificial Sequence
  Description of Artificial Sequence: Synthetic oligonucleotide
  Antisense strand to SEQ ID NO: 2382622
uaccucacuuccauuaccu

SEQ ID NO: 2382624 - RNA, 19 nt, Artificial Sequence
  Description of Artificial Sequence: Synthetic oligonucleotide
  Sense strand starting at position 3630 of SEQ ID NO: 1886007
cggccaugucaucaaauag

SEQ ID NO: 2382625 - RNA, 19 nt, Artificial Sequence
  Description of Artificial Sequence: Synthetic oligonucleotide
  Antisense strand to SEQ ID NO: 2382624
cuauuugaugacauggccg

SEQ ID NO: 2382626 - RNA, 19 nt, Artificial Sequence
  Description of Artificial Sequence: Synthetic oligonucleotide
  Sense strand starting at position 71 of SEQ ID NO: 1886008
ucaaucucuccagggauua

SEQ ID NO: 2382627 - RNA, 19 nt, Artificial Sequence
  Description of Artificial Sequence: Synthetic oligonucleotide
  Antisense strand to SEQ ID NO: 2382626
uaaucccuggagagauuga

SEQ ID NO: 2382628 - RNA, 19 nt, Artificial Sequence
  Description of Artificial Sequence: Synthetic oligonucleotide
  Sense strand starting at position 258 of SEQ ID NO: 1886008
guaaaucuugauugaugga

SEQ ID NO: 2382629 - RNA, 19 nt, Artificial Sequence
  Description of Artificial Sequence: Synthetic oligonucleotide
  Antisense strand to SEQ ID NO: 2382628
uccaucaaucaagauuuac

SEQ ID NO: 2382630 - RNA, 19 nt, Artificial Sequence
  Description of Artificial Sequence: Synthetic oligonucleotide
  Sense strand starting at position 280 of SEQ ID NO: 1886008
gaugaaguccgugagguac

SEQ ID NO: 2382631 - RNA, 19 nt, Artificial Sequence
  Description of Artificial Sequence: Synthetic oligonucleotide
  Antisense strand to SEQ ID NO: 2382630
guaccucacggacuucauc

SEQ ID NO: 2382632 - RNA, 19 nt, Artificial Sequence
  Description of Artificial Sequence: Synthetic oligonucleotide
  Sense strand starting at position 284 of SEQ ID NO: 1886008
aaguccgugagguacaaau

SEQ ID NO: 2382633 - RNA, 19 nt, Artificial Sequence
  Description of Artificial Sequence: Synthetic oligonucleotide
  Antisense strand to SEQ ID NO: 2382632
auuuguaccucacggacuu

SEQ ID NO: 2382634 - RNA, 19 nt, Artificial Sequence
  Description of Artificial Sequence: Synthetic oligonucleotide
  Sense strand starting at position 335 of SEQ ID NO: 1886008
ggagguguccauugggaag

SEQ ID NO: 2382635 - RNA, 19 nt, Artificial Sequence
  Description of Artificial Sequence: Synthetic oligonucleotide
  Antisense strand to SEQ ID NO: 2382634
cuucccaauggacaccucc

SEQ ID NO: 2382636 - RNA, 19 nt, Artificial Sequence
  Description of Artificial Sequence: Synthetic oligonucleotide
  Sense strand starting at position 349 of SEQ ID NO: 1886008
ggaagauggcaguaguuag

SEQ ID NO: 2382637 - RNA, 19 nt, Artificial Sequence
  Description of Artificial Sequence: Synthetic oligonucleotide
  Antisense strand to SEQ ID NO: 2382636
cuaacuacugccaucuucc

SEQ ID NO: 2382638 - RNA, 19 nt, Artificial Sequence
  Description of Artificial Sequence: Synthetic oligonucleotide
  Sense strand starting at position 591 of SEQ ID NO: 1886008
agccacuaauucucaggaa

SEQ ID NO: 2382639 - RNA, 19 nt, Artificial Sequence
  Description of Artificial Sequence: Synthetic oligonucleotide
  Antisense strand to SEQ ID NO: 2382638
uuccugagaauuaguggcu

SEQ ID NO: 2382640 - RNA, 19 nt, Artificial Sequence
  Description of Artificial Sequence: Synthetic oligonucleotide
  Sense strand starting at position 638 of SEQ ID NO: 1886008
guguuuauugggcaaggag

SEQ ID NO: 2382641 - RNA, 19 nt, Artificial Sequence
  Description of Artificial Sequence: Synthetic oligonucleotide
  Antisense strand to SEQ ID NO: 2382640
cuccuugcccaauaaacac

SEQ ID NO: 2382642 - RNA, 19 nt, Artificial Sequence
  Description of Artificial Sequence: Synthetic oligonucleotide
  Sense strand starting at position 711 of SEQ ID NO: 1886008
agcaaauaaugcucaauga

SEQ ID NO: 2382643 - RNA, 19 nt, Artificial Sequence
  Description of Artificial Sequence: Synthetic oligonucleotide
  Antisense strand to SEQ ID NO: 2382642
ucauugagcauuauuugcu

SEQ ID NO: 2382644 - RNA, 19 nt, Artificial Sequence
  Description of Artificial Sequence: Synthetic oligonucleotide
  Sense strand starting at position 712 of SEQ ID NO: 1886008
gcaaauaaugcucaaugac

SEQ ID NO: 2382645 - RNA, 19 nt, Artificial Sequence
  Description of Artificial Sequence: Synthetic oligonucleotide
  Antisense strand to SEQ ID NO: 2382644
gucauugagcauuauuugc

SEQ ID NO: 2382646 - RNA, 19 nt, Artificial Sequence
  Description of Artificial Sequence: Synthetic oligonucleotide
  Sense strand starting at position 904 of SEQ ID NO: 1886008
ggauaccucccaugauaug

SEQ ID NO: 2382647 - RNA, 19 nt, Artificial Sequence
  Description of Artificial Sequence: Synthetic oligonucleotide
  Antisense strand to SEQ ID NO: 2382646
cauaucaugggagguaucc

SEQ ID NO: 2382648 - RNA, 19 nt, Artificial Sequence
  Description of Artificial Sequence: Synthetic oligonucleotide
  Sense strand starting at position 1549 of SEQ ID NO: 1886008
gugguucaauaggucuaga

SEQ ID NO: 2382649 - RNA, 19 nt, Artificial Sequence
  Description of Artificial Sequence: Synthetic oligonucleotide
  Antisense strand to SEQ ID NO: 2382648
ucuagaccuauugaaccac

SEQ ID NO: 2382650 - RNA, 19 nt, Artificial Sequence
  Description of Artificial Sequence: Synthetic oligonucleotide
  Sense strand starting at position 1591 of SEQ ID NO: 1886008
uaacaaauuccuggugaug

SEQ ID NO: 2382651 - RNA, 19 nt, Artificial Sequence
  Description of Artificial Sequence: Synthetic oligonucleotide
  Antisense strand to SEQ ID NO: 2382650
caucaccaggaauuuguua

SEQ ID NO: 2382652 - RNA, 19 nt, Artificial Sequence
  Description of Artificial Sequence: Synthetic oligonucleotide
  Sense strand starting at position 1627 of SEQ ID NO: 1886008
aggcccucacucugagaau

SEQ ID NO: 2382653 - RNA, 19 nt, Artificial Sequence
  Description of Artificial Sequence: Synthetic oligonucleotide
  Antisense strand to SEQ ID NO: 2382652
auucucagagugagggccu

SEQ ID NO: 2382654 - RNA, 19 nt, Artificial Sequence
  Description of Artificial Sequence: Synthetic oligonucleotide
  Sense strand starting at position 1695 of SEQ ID NO: 1886008
gugaaauuguaucuugagg

SEQ ID NO: 2382655 - RNA, 19 nt, Artificial Sequence
  Description of Artificial Sequence: Synthetic oligonucleotide
  Antisense strand to SEQ ID NO: 2382654
ccucaagauacaauuucac

SEQ ID NO: 2382656 - RNA, 19 nt, Artificial Sequence
  Description of Artificial Sequence: Synthetic oligonucleotide
  Sense strand starting at position 1706 of SEQ ID NO: 1886008
ucuugaggugggugaugaa

SEQ ID NO: 2382657 - RNA, 19 nt, Artificial Sequence
  Description of Artificial Sequence: Synthetic oligonucleotide
  Antisense strand to SEQ ID NO: 2382656
uucaucacccaccucaaga

SEQ ID NO: 2382658 - RNA, 19 nt, Artificial Sequence
  Description of Artificial Sequence: Synthetic oligonucleotide
  Sense strand starting at position 2001 of SEQ ID NO: 1886008
gaagcauuagacugggagu

SEQ ID NO: 2382659 - RNA, 19 nt, Artificial Sequence
  Description of Artificial Sequence: Synthetic oligonucleotide
  Antisense strand to SEQ ID NO: 2382658
acucccagucuaaugcuuc

SEQ ID NO: 2382660 - RNA, 19 nt, Artificial Sequence
  Description of Artificial Sequence: Synthetic oligonucleotide
  Sense strand starting at position 2003 of SEQ ID NO: 1886008
agcauuagacugggaguca

SEQ ID NO: 2382661 - RNA, 19 nt, Artificial Sequence
  Description of Artificial Sequence: Synthetic oligonucleotide
  Antisense strand to SEQ ID NO: 2382660
ugacucccagucuaaugcu

SEQ ID NO: 2382662 - RNA, 19 nt, Artificial Sequence
  Description of Artificial Sequence: Synthetic oligonucleotide
  Sense strand starting at position 2207 of SEQ ID NO: 1886008
ggcauuguugaguagcaaa

SEQ ID NO: 2382663 - RNA, 19 nt, Artificial Sequence
  Description of Artificial Sequence: Synthetic oligonucleotide
  Antisense strand to SEQ ID NO: 2382662
uuugcuacucaacaaugcc

SEQ ID NO: 2382664 - RNA, 19 nt, Artificial Sequence
  Description of Artificial Sequence: Synthetic oligonucleotide
  Sense strand starting at position 2313 of SEQ ID NO: 1886008
caggauuacucggcacaag

SEQ ID NO: 2382665 - RNA, 19 nt, Artificial Sequence
  Description of Artificial Sequence: Synthetic oligonucleotide
  Antisense strand to SEQ ID NO: 2382664
cuugugccgaguaauccug

SEQ ID NO: 2382666 - RNA, 19 nt, Artificial Sequence
  Description of Artificial Sequence: Synthetic oligonucleotide
  Sense strand starting at position 2555 of SEQ ID NO: 1886008
agaggcugagucuacuuua

SEQ ID NO: 2382667 - RNA, 19 nt, Artificial Sequence
  Description of Artificial Sequence: Synthetic oligonucleotide
  Antisense strand to SEQ ID NO: 2382666
uaaaguagacucagccucu

SEQ ID NO: 2382668 - RNA, 19 nt, Artificial Sequence
  Description of Artificial Sequence: Synthetic oligonucleotide
  Sense strand starting at position 2560 of SEQ ID NO: 1886008
cugagucuacuuuaauguu

SEQ ID NO: 2382669 - RNA, 19 nt, Artificial Sequence
  Description of Artificial Sequence: Synthetic oligonucleotide
  Antisense strand to SEQ ID NO: 2382668
aacauuaaaguagacucag

SEQ ID NO: 2382670 - RNA, 19 nt, Artificial Sequence
  Description of Artificial Sequence: Synthetic oligonucleotide
  Sense strand starting at position 2618 of SEQ ID NO: 1886008
ccagacuccuggguuacaa

SEQ ID NO: 2382671 - RNA, 19 nt, Artificial Sequence
  Description of Artificial Sequence: Synthetic oligonucleotide
  Antisense strand to SEQ ID NO: 2382670
uuguaacccaggagucugg

SEQ ID NO: 2382672 - RNA, 19 nt, Artificial Sequence
  Description of Artificial Sequence: Synthetic oligonucleotide
  Sense strand starting at position 2688 of SEQ ID NO: 1886008
auucuuuaggaaugaguau

SEQ ID NO: 2382673 - RNA, 19 nt, Artificial Sequence
  Description of Artificial Sequence: Synthetic oligonucleotide
  Antisense strand to SEQ ID NO: 2382672
auacucauuccuaaagaau

SEQ ID NO: 2382674 - RNA, 19 nt, Artificial Sequence
  Description of Artificial Sequence: Synthetic oligonucleotide
  Sense strand starting at position 2694 of SEQ ID NO: 1886008
uaggaaugaguauguaaca

SEQ ID NO: 2382675 - RNA, 19 nt, Artificial Sequence
  Description of Artificial Sequence: Synthetic oligonucleotide
  Antisense strand to SEQ ID NO: 2382674
uguuacauacucauuccua

SEQ ID NO: 2382676 - RNA, 19 nt, Artificial Sequence
  Description of Artificial Sequence: Synthetic oligonucleotide
  Sense strand starting at position 2822 of SEQ ID NO: 1886008
cuuagaaacuauguccagu

SEQ ID NO: 2382677 - RNA, 19 nt, Artificial Sequence
  Description of Artificial Sequence: Synthetic oligonucleotide
  Antisense strand to SEQ ID NO: 2382676
acuggacauaguuucuaag

SEQ ID NO: 2382678 - RNA, 19 nt, Artificial Sequence
  Description of Artificial Sequence: Synthetic oligonucleotide
  Sense strand starting at position 2859 of SEQ ID NO: 1886008
aguugaucccaguggauca

SEQ ID NO: 2382679 - RNA, 19 nt, Artificial Sequence
  Description of Artificial Sequence: Synthetic oligonucleotide
  Antisense strand to SEQ ID NO: 2382678
ugauccacugggaucaacu

SEQ ID NO: 2382680 - RNA, 19 nt, Artificial Sequence
  Description of Artificial Sequence: Synthetic oligonucleotide
  Sense strand starting at position 2860 of SEQ ID NO: 1886008
guugaucccaguggaucaa

SEQ ID NO: 2382681 - RNA, 19 nt, Artificial Sequence
  Description of Artificial Sequence: Synthetic oligonucleotide
  Antisense strand to SEQ ID NO: 2382680
uugauccacugggaucaac

SEQ ID NO: 2382682 - RNA, 19 nt, Artificial Sequence
  Description of Artificial Sequence: Synthetic oligonucleotide
  Sense strand starting at position 3019 of SEQ ID NO: 1886008
caaguuggauugucauaac

SEQ ID NO: 2382683 - RNA, 19 nt, Artificial Sequence
  Description of Artificial Sequence: Synthetic oligonucleotide
  Antisense strand to SEQ ID NO: 2382682
guuaugacaauccaacuug

SEQ ID NO: 2382684 - RNA, 19 nt, Artificial Sequence
  Description of Artificial Sequence: Synthetic oligonucleotide
  Sense strand starting at position 3064 of SEQ ID NO: 1886008
ggauaacagaaguggucua

SEQ ID NO: 2382685 - RNA, 19 nt, Artificial Sequence
  Description of Artificial Sequence: Synthetic oligonucleotide
  Antisense strand to SEQ ID NO: 2382684
uagaccacuucuguuaucc

SEQ ID NO: 2382686 - RNA, 19 nt, Artificial Sequence
  Description of Artificial Sequence: Synthetic oligonucleotide
  Sense strand starting at position 3195 of SEQ ID NO: 1886008
ucuguuucgguagaagaca

SEQ ID NO: 2382687 - RNA, 19 nt, Artificial Sequence
  Description of Artificial Sequence: Synthetic oligonucleotide
  Antisense strand to SEQ ID NO: 2382686
ugucuucuaccgaaacaga

SEQ ID NO: 2382688 - RNA, 19 nt, Artificial Sequence
  Description of Artificial Sequence: Synthetic oligonucleotide
  Sense strand starting at position 3333 of SEQ ID NO: 1886008
ggcagagucugauuccaac

SEQ ID NO: 2382689 - RNA, 19 nt, Artificial Sequence
  Description of Artificial Sequence: Synthetic oligonucleotide
  Antisense strand to SEQ ID NO: 2382688
guuggaaucagacucugcc

SEQ ID NO: 2382690 - RNA, 19 nt, Artificial Sequence
  Description of Artificial Sequence: Synthetic oligonucleotide
  Sense strand starting at position 3601 of SEQ ID NO: 1886008
uggugaugacgauguugga

SEQ ID NO: 2382691 - RNA, 19 nt, Artificial Sequence
  Description of Artificial Sequence: Synthetic oligonucleotide
  Antisense strand to SEQ ID NO: 2382690
uccaacaucgucaucacca

SEQ ID NO: 2382692 - RNA, 19 nt, Artificial Sequence
  Description of Artificial Sequence: Synthetic oligonucleotide
  Sense strand starting at position 3614 of SEQ ID NO: 1886008
guuggaaucaggugacucu

SEQ ID NO: 2382693 - RNA, 19 nt, Artificial Sequence
  Description of Artificial Sequence: Synthetic oligonucleotide
  Antisense strand to SEQ ID NO: 2382692
agagucaccugauuccaac

SEQ ID NO: 2382694 - RNA, 19 nt, Artificial Sequence
  Description of Artificial Sequence: Synthetic oligonucleotide
  Sense strand starting at position 3648 of SEQ ID NO: 1886008
acgcuugcucucgucugaa

SEQ ID NO: 2382695 - RNA, 19 nt, Artificial Sequence
  Description of Artificial Sequence: Synthetic oligonucleotide
  Antisense strand to SEQ ID NO: 2382694
uucagacgagagcaagcgu

SEQ ID NO: 2382696 - RNA, 19 nt, Artificial Sequence
  Description of Artificial Sequence: Synthetic oligonucleotide
  Sense strand starting at position 3821 of SEQ ID NO: 1886008
gaagaugcuguacaauauu

SEQ ID NO: 2382697 - RNA, 19 nt, Artificial Sequence
  Description of Artificial Sequence: Synthetic oligonucleotide
  Antisense strand to SEQ ID NO: 2382696
aauauuguacagcaucuuc

SEQ ID NO: 2382698 - RNA, 19 nt, Artificial Sequence
  Description of Artificial Sequence: Synthetic oligonucleotide
  Sense strand starting at position 3910 of SEQ ID NO: 1886008
cccugaccuugagcagaua

SEQ ID NO: 2382699 - RNA, 19 nt, Artificial Sequence
  Description of Artificial Sequence: Synthetic oligonucleotide
  Antisense strand to SEQ ID NO: 2382698
uaucugcucaaggucaggg

SEQ ID NO: 2382700 - RNA, 19 nt, Artificial Sequence
  Description of Artificial Sequence: Synthetic oligonucleotide
  Sense strand starting at position 3923 of SEQ ID NO: 1886008
cagauagauuugggaucca

SEQ ID NO: 2382701 - RNA, 19 nt, Artificial Sequence
  Description of Artificial Sequence: Synthetic oligonucleotide
  Antisense strand to SEQ ID NO: 2382700
uggaucccaaaucuaucug

SEQ ID NO: 2382702 - RNA, 19 nt, Artificial Sequence
  Description of Artificial Sequence: Synthetic oligonucleotide
  Sense strand starting at position 3939 of SEQ ID NO: 1886008
ccacguguagcccuguuaa

SEQ ID NO: 2382703 - RNA, 19 nt, Artificial Sequence
  Description of Artificial Sequence: Synthetic oligonucleotide
  Antisense strand to SEQ ID NO: 2382702
uuaacagggcuacacgugg

SEQ ID NO: 2382704 - RNA, 19 nt, Artificial Sequence
  Description of Artificial Sequence: Synthetic oligonucleotide
  Sense strand starting at position 3942 of SEQ ID NO: 1886008
cguguagcccuguuaaauu

SEQ ID NO: 2382705 - RNA, 19 nt, Artificial Sequence
  Description of Artificial Sequence: Synthetic oligonucleotide
  Antisense strand to SEQ ID NO: 2382704
aauuuaacagggcuacacg

SEQ ID NO: 2382706 - RNA, 19 nt, Artificial Sequence
  Description of Artificial Sequence: Synthetic oligonucleotide
  Sense strand starting at position 83 of SEQ ID NO: 1886009
gucagagcuuugucaggaa

SEQ ID NO: 2382707 - RNA, 19 nt, Artificial Sequence
  Description of Artificial Sequence: Synthetic oligonucleotide
  Antisense strand to SEQ ID NO: 2382706
uuccugacaaagcucugac

SEQ ID NO: 2382708 - RNA, 19 nt, Artificial Sequence
  Description of Artificial Sequence: Synthetic oligonucleotide
  Sense strand starting at position 206 of SEQ ID NO: 1886009
ccaagucaucacugaaagu

SEQ ID NO: 2382709 - RNA, 19 nt, Artificial Sequence
  Description of Artificial Sequence: Synthetic oligonucleotide
  Antisense strand to SEQ ID NO: 2382708
acuuucagugaugacuugg

SEQ ID NO: 2382710 - RNA, 19 nt, Artificial Sequence
  Description of Artificial Sequence: Synthetic oligonucleotide
  Sense strand starting at position 216 of SEQ ID NO: 1886009
acugaaaguccaugaguuc

SEQ ID NO: 2382711 - RNA, 19 nt, Artificial Sequence
  Description of Artificial Sequence: Synthetic oligonucleotide
  Antisense strand to SEQ ID NO: 2382710
gaacucauggacuuucagu

SEQ ID NO: 2382712 - RNA, 19 nt, Artificial Sequence
  Description of Artificial Sequence: Synthetic oligonucleotide
  Sense strand starting at position 217 of SEQ ID NO: 1886009
cugaaaguccaugaguucu

SEQ ID NO: 2382713 - RNA, 19 nt, Artificial Sequence
  Description of Artificial Sequence: Synthetic oligonucleotide
  Antisense strand to SEQ ID NO: 2382712
agaacucauggacuuucag

SEQ ID NO: 2382714 - RNA, 19 nt, Artificial Sequence
  Description of Artificial Sequence: Synthetic oligonucleotide
  Sense strand starting at position 254 of SEQ ID NO: 1886009
guggauacugcagggauua

SEQ ID NO: 2382715 - RNA, 19 nt, Artificial Sequence
  Description of Artificial Sequence: Synthetic oligonucleotide
  Antisense strand to SEQ ID NO: 2382714
uaaucccugcaguauccac

SEQ ID NO: 2382716 - RNA, 19 nt, Artificial Sequence
  Description of Artificial Sequence: Synthetic oligonucleotide
  Sense strand starting at position 256 of SEQ ID NO: 1886009
ggauacugcagggauuagu

SEQ ID NO: 2382717 - RNA, 19 nt, Artificial Sequence
  Description of Artificial Sequence: Synthetic oligonucleotide
  Antisense strand to SEQ ID NO: 2382716
acuaaucccugcaguaucc

SEQ ID NO: 2382718 - RNA, 19 nt, Artificial Sequence
  Description of Artificial Sequence: Synthetic oligonucleotide
  Sense strand starting at position 265 of SEQ ID NO: 1886009
agggauuaguccucugcac

SEQ ID NO: 2382719 - RNA, 19 nt, Artificial Sequence
  Description of Artificial Sequence: Synthetic oligonucleotide
  Antisense strand to SEQ ID NO: 2382718
gugcagaggacuaaucccu

SEQ ID NO: 2382720 - RNA, 19 nt, Artificial Sequence
  Description of Artificial Sequence: Synthetic oligonucleotide
  Sense strand starting at position 365 of SEQ ID NO: 1886009
aguccugugagguaguuau

SEQ ID NO: 2382721 - RNA, 19 nt, Artificial Sequence
  Description of Artificial Sequence: Synthetic oligonucleotide
  Antisense strand to SEQ ID NO: 2382720
auaacuaccucacaggacu

SEQ ID NO: 2382722 - RNA, 19 nt, Artificial Sequence
  Description of Artificial Sequence: Synthetic oligonucleotide
  Sense strand starting at position 375 of SEQ ID NO: 1886009
gguaguuaucauuauccuc

SEQ ID NO: 2382723 - RNA, 19 nt, Artificial Sequence
  Description of Artificial Sequence: Synthetic oligonucleotide
  Antisense strand to SEQ ID NO: 2382722
gaggauaaugauaacuacc

SEQ ID NO: 2382724 - RNA, 19 nt, Artificial Sequence
  Description of Artificial Sequence: Synthetic oligonucleotide
  Sense strand starting at position 799 of SEQ ID NO: 1886009
cugauagacugacauuuac

SEQ ID NO: 2382725 - RNA, 19 nt, Artificial Sequence
  Description of Artificial Sequence: Synthetic oligonucleotide
  Antisense strand to SEQ ID NO: 2382724
guaaaugucagucuaucag

SEQ ID NO: 2382726 - RNA, 19 nt, Artificial Sequence
  Description of Artificial Sequence: Synthetic oligonucleotide
  Sense strand starting at position 831 of SEQ ID NO: 1886009
uaauccagauguguuaagu

SEQ ID NO: 2382727 - RNA, 19 nt, Artificial Sequence
  Description of Artificial Sequence: Synthetic oligonucleotide
  Antisense strand to SEQ ID NO: 2382726
acuuaacacaucuggauua

SEQ ID NO: 2382728 - RNA, 19 nt, Artificial Sequence
  Description of Artificial Sequence: Synthetic oligonucleotide
  Sense strand starting at position 841 of SEQ ID NO: 1886009
guguuaaguccacacagca

SEQ ID NO: 2382729 - RNA, 19 nt, Artificial Sequence
  Description of Artificial Sequence: Synthetic oligonucleotide
  Antisense strand to SEQ ID NO: 2382728
ugcuguguggacuuaacac

SEQ ID NO: 2382730 - RNA, 19 nt, Artificial Sequence
  Description of Artificial Sequence: Synthetic oligonucleotide
  Sense strand starting at position 904 of SEQ ID NO: 1886009
uggcauugagguugaauag

SEQ ID NO: 2382731 - RNA, 19 nt, Artificial Sequence
  Description of Artificial Sequence: Synthetic oligonucleotide
  Antisense strand to SEQ ID NO: 2382730
cuauucaaccucaaugcca

SEQ ID NO: 2382732 - RNA, 19 nt, Artificial Sequence
  Description of Artificial Sequence: Synthetic oligonucleotide
  Sense strand starting at position 972 of SEQ ID NO: 1886009
gcauuccuccuauggaaug

SEQ ID NO: 2382733 - RNA, 19 nt, Artificial Sequence
  Description of Artificial Sequence: Synthetic oligonucleotide
  Antisense strand to SEQ ID NO: 2382732
cauuccauaggaggaaugc

SEQ ID NO: 2382734 - RNA, 19 nt, Artificial Sequence
  Description of Artificial Sequence: Synthetic oligonucleotide
  Sense strand starting at position 1533 of SEQ ID NO: 1886009
ugcauagcuccagugugua

SEQ ID NO: 2382735 - RNA, 19 nt, Artificial Sequence
  Description of Artificial Sequence: Synthetic oligonucleotide
  Antisense strand to SEQ ID NO: 2382734
uacacacuggagcuaugca

SEQ ID NO: 2382736 - RNA, 19 nt, Artificial Sequence
  Description of Artificial Sequence: Synthetic oligonucleotide
  Sense strand starting at position 1568 of SEQ ID NO: 1886009
gcuggagucccaugauacu

SEQ ID NO: 2382737 - RNA, 19 nt, Artificial Sequence
  Description of Artificial Sequence: Synthetic oligonucleotide
  Antisense strand to SEQ ID NO: 2382736
aguaucaugggacuccagc

SEQ ID NO: 2382738 - RNA, 19 nt, Artificial Sequence
  Description of Artificial Sequence: Synthetic oligonucleotide
  Sense strand starting at position 1617 of SEQ ID NO: 1886009
ggacuuaaccucugggcuu

SEQ ID NO: 2382739 - RNA, 19 nt, Artificial Sequence
  Description of Artificial Sequence: Synthetic oligonucleotide
  Antisense strand to SEQ ID NO: 2382738
aagcccagagguuaagucc

SEQ ID NO: 2382740 - RNA, 19 nt, Artificial Sequence
  Description of Artificial Sequence: Synthetic oligonucleotide
  Sense strand starting at position 1749 of SEQ ID NO: 1886009
ugggcuagugaguauucau

SEQ ID NO: 2382741 - RNA, 19 nt, Artificial Sequence
  Description of Artificial Sequence: Synthetic oligonucleotide
  Antisense strand to SEQ ID NO: 2382740
augaauacucacuagccca

SEQ ID NO: 2382742 - RNA, 19 nt, Artificial Sequence
  Description of Artificial Sequence: Synthetic oligonucleotide
  Sense strand starting at position 2087 of SEQ ID NO: 1886009
gggacuuaguaucuguauc

SEQ ID NO: 2382743 - RNA, 19 nt, Artificial Sequence
  Description of Artificial Sequence: Synthetic oligonucleotide
  Antisense strand to SEQ ID NO: 2382742
gauacagauacuaaguccc

SEQ ID NO: 2382744 - RNA, 19 nt, Artificial Sequence
  Description of Artificial Sequence: Synthetic oligonucleotide
  Sense strand starting at position 2141 of SEQ ID NO: 1886009
ggcugagaaccauggaucu

SEQ ID NO: 2382745 - RNA, 19 nt, Artificial Sequence
  Description of Artificial Sequence: Synthetic oligonucleotide
  Antisense strand to SEQ ID NO: 2382744
agauccaugguucucagcc

SEQ ID NO: 2382746 - RNA, 19 nt, Artificial Sequence
  Description of Artificial Sequence: Synthetic oligonucleotide
  Sense strand starting at position 2220 of SEQ ID NO: 1886009
ggacucugauuugaacuau

SEQ ID NO: 2382747 - RNA, 19 nt, Artificial Sequence
  Description of Artificial Sequence: Synthetic oligonucleotide
  Antisense strand to SEQ ID NO: 2382746
auaguucaaaucagagucc

SEQ ID NO: 2382748 - RNA, 19 nt, Artificial Sequence
  Description of Artificial Sequence: Synthetic oligonucleotide
  Sense strand starting at position 2286 of SEQ ID NO: 1886009
gaugcuuaaguccaggagu

SEQ ID NO: 2382749 - RNA, 19 nt, Artificial Sequence
  Description of Artificial Sequence: Synthetic oligonucleotide
  Antisense strand to SEQ ID NO: 2382748
acuccuggacuuaagcauc

SEQ ID NO: 2382750 - RNA, 19 nt, Artificial Sequence
  Description of Artificial Sequence: Synthetic oligonucleotide
  Sense strand starting at position 2541 of SEQ ID NO: 1886009
agugucuacugagcacaua

SEQ ID NO: 2382751 - RNA, 19 nt, Artificial Sequence
  Description of Artificial Sequence: Synthetic oligonucleotide
  Antisense strand to SEQ ID NO: 2382750
uaugugcucaguagacacu

SEQ ID NO: 2382752 - RNA, 19 nt, Artificial Sequence
  Description of Artificial Sequence: Synthetic oligonucleotide
  Sense strand starting at position 2564 of SEQ ID NO: 1886009
ucuuguggcucauuugaau

SEQ ID NO: 2382753 - RNA, 19 nt, Artificial Sequence
  Description of Artificial Sequence: Synthetic oligonucleotide
  Antisense strand to SEQ ID NO: 2382752
auucaaaugagccacaaga

SEQ ID NO: 2382754 - RNA, 19 nt, Artificial Sequence
  Description of Artificial Sequence: Synthetic oligonucleotide
  Sense strand starting at position 2567 of SEQ ID NO: 1886009
uguggcucauuugaauuua

SEQ ID NO: 2382755 - RNA, 19 nt, Artificial Sequence
  Description of Artificial Sequence: Synthetic oligonucleotide
  Antisense strand to SEQ ID NO: 2382754
uaaauucaaaugagccaca

SEQ ID NO: 2382756 - RNA, 19 nt, Artificial Sequence
  Description of Artificial Sequence: Synthetic oligonucleotide
  Sense strand starting at position 2794 of SEQ ID NO: 1886009
gcugaagguuuauugagag

SEQ ID NO: 2382757 - RNA, 19 nt, Artificial Sequence
  Description of Artificial Sequence: Synthetic oligonucleotide
  Antisense strand to SEQ ID NO: 2382756
cucucaauaaaccuucagc

SEQ ID NO: 2382758 - RNA, 19 nt, Artificial Sequence
  Description of Artificial Sequence: Synthetic oligonucleotide
  Sense strand starting at position 2933 of SEQ ID NO: 1886009
aacgguaaaccuuaagugu

SEQ ID NO: 2382759 - RNA, 19 nt, Artificial Sequence
  Description of Artificial Sequence: Synthetic oligonucleotide
  Antisense strand to SEQ ID NO: 2382758
acacuuaagguuuaccguu

SEQ ID NO: 2382760 - RNA, 19 nt, Artificial Sequence
  Description of Artificial Sequence: Synthetic oligonucleotide
  Sense strand starting at position 2990 of SEQ ID NO: 1886009
ugaugccuugcucaagagu

SEQ ID NO: 2382761 - RNA, 19 nt, Artificial Sequence
  Description of Artificial Sequence: Synthetic oligonucleotide
  Antisense strand to SEQ ID NO: 2382760
acucuugagcaaggcauca

SEQ ID NO: 2382762 - RNA, 19 nt, Artificial Sequence
  Description of Artificial Sequence: Synthetic oligonucleotide
  Sense strand starting at position 2998 of SEQ ID NO: 1886009
ugcucaagaguuuagaugu

SEQ ID NO: 2382763 - RNA, 19 nt, Artificial Sequence
  Description of Artificial Sequence: Synthetic oligonucleotide
  Antisense strand to SEQ ID NO: 2382762
acaucuaaacucuugagca

SEQ ID NO: 2382764 - RNA, 19 nt, Artificial Sequence
  Description of Artificial Sequence: Synthetic oligonucleotide
  Sense strand starting at position 3004 of SEQ ID NO: 1886009
agaguuuagaugugauccu

SEQ ID NO: 2382765 - RNA, 19 nt, Artificial Sequence
  Description of Artificial Sequence: Synthetic oligonucleotide
  Antisense strand to SEQ ID NO: 2382764
aggaucacaucuaaacucu

SEQ ID NO: 2382766 - RNA, 19 nt, Artificial Sequence
  Description of Artificial Sequence: Synthetic oligonucleotide
  Sense strand starting at position 3033 of SEQ ID NO: 1886009
ggaagucauagagggcuuu

SEQ ID NO: 2382767 - RNA, 19 nt, Artificial Sequence
  Description of Artificial Sequence: Synthetic oligonucleotide
  Antisense strand to SEQ ID NO: 2382766
aaagcccucuaugacuucc

SEQ ID NO: 2382768 - RNA, 19 nt, Artificial Sequence
  Description of Artificial Sequence: Synthetic oligonucleotide
  Sense strand starting at position 3053 of SEQ ID NO: 1886009
guguucucacaaugacaau

SEQ ID NO: 2382769 - RNA, 19 nt, Artificial Sequence
  Description of Artificial Sequence: Synthetic oligonucleotide
  Antisense strand to SEQ ID NO: 2382768
auugucauugugagaacac

SEQ ID NO: 2382770 - RNA, 19 nt, Artificial Sequence
  Description of Artificial Sequence: Synthetic oligonucleotide
  Sense strand starting at position 3308 of SEQ ID NO: 1886009
uaagaaaguggcuguggaa

SEQ ID NO: 2382771 - RNA, 19 nt, Artificial Sequence
  Description of Artificial Sequence: Synthetic oligonucleotide
  Antisense strand to SEQ ID NO: 2382770
uuccacagccacuuucuua

SEQ ID NO: 2382772 - RNA, 19 nt, Artificial Sequence
  Description of Artificial Sequence: Synthetic oligonucleotide
  Sense strand starting at position 3343 of SEQ ID NO: 1886009
agagauauuuaguaaaugg

SEQ ID NO: 2382773 - RNA, 19 nt, Artificial Sequence
  Description of Artificial Sequence: Synthetic oligonucleotide
  Antisense strand to SEQ ID NO: 2382772
ccauuuacuaaauaucucu

SEQ ID NO: 2382774 - RNA, 19 nt, Artificial Sequence
  Description of Artificial Sequence: Synthetic oligonucleotide
  Sense strand starting at position 3410 of SEQ ID NO: 1886009
agaagaguccaaggugacu

SEQ ID NO: 2382775 - RNA, 19 nt, Artificial Sequence
  Description of Artificial Sequence: Synthetic oligonucleotide
  Antisense strand to SEQ ID NO: 2382774
agucaccuuggacucuucu

SEQ ID NO: 2382776 - RNA, 19 nt, Artificial Sequence
  Description of Artificial Sequence: Synthetic oligonucleotide
  Sense strand starting at position 3443 of SEQ ID NO: 1886009
ucggguacauuugugaagu

SEQ ID NO: 2382777 - RNA, 19 nt, Artificial Sequence
  Description of Artificial Sequence: Synthetic oligonucleotide
  Antisense strand to SEQ ID NO: 2382776
acuucacaaauguacccga

SEQ ID NO: 2382778 - RNA, 19 nt, Artificial Sequence
  Description of Artificial Sequence: Synthetic oligonucleotide
  Sense strand starting at position 3445 of SEQ ID NO: 1886009
ggguacauuugugaaguaa

SEQ ID NO: 2382779 - RNA, 19 nt, Artificial Sequence
  Description of Artificial Sequence: Synthetic oligonucleotide
  Antisense strand to SEQ ID NO: 2382778
uuacuucacaaauguaccc

SEQ ID NO: 2382780 - RNA, 19 nt, Artificial Sequence
  Description of Artificial Sequence: Synthetic oligonucleotide
  Sense strand starting at position 3465 of SEQ ID NO: 1886009
gugauucaucaagggagug

SEQ ID NO: 2382781 - RNA, 19 nt, Artificial Sequence
  Description of Artificial Sequence: Synthetic oligonucleotide
  Antisense strand to SEQ ID NO: 2382780
cacucccuugaugaaucac

SEQ ID NO: 2382782 - RNA, 19 nt, Artificial Sequence
  Description of Artificial Sequence: Synthetic oligonucleotide
  Sense strand starting at position 3623 of SEQ ID NO: 1886009
guaugacauccuugacaaa

SEQ ID NO: 2382783 - RNA, 19 nt, Artificial Sequence
  Description of Artificial Sequence: Synthetic oligonucleotide
  Antisense strand to SEQ ID NO: 2382782
uuugucaaggaugucauac

SEQ ID NO: 2382784 - RNA, 19 nt, Artificial Sequence
  Description of Artificial Sequence: Synthetic oligonucleotide
  Sense strand starting at position 3948 of SEQ ID NO: 1886009
guccguugaagacacaauu

SEQ ID NO: 2382785 - RNA, 19 nt, Artificial Sequence
  Description of Artificial Sequence: Synthetic oligonucleotide
  Antisense strand to SEQ ID NO: 2382784
aauugugucuucaacggac

SEQ ID NO: 2382786 - RNA, 19 nt, Artificial Sequence
  Description of Artificial Sequence: Synthetic oligonucleotide
  Sense strand starting at position 401 of SEQ ID NO: 1886010
aaggaaucccuaggugcuu

SEQ ID NO: 2382787 - RNA, 19 nt, Artificial Sequence
  Description of Artificial Sequence: Synthetic oligonucleotide
  Antisense strand to SEQ ID NO: 2382786
aagcaccuagggauuccuu

SEQ ID NO: 2382788 - RNA, 19 nt, Artificial Sequence
  Description of Artificial Sequence: Synthetic oligonucleotide
  Sense strand starting at position 457 of SEQ ID NO: 1886010
gcauaagguuaauuaaaca

SEQ ID NO: 2382789 - RNA, 19 nt, Artificial Sequence
  Description of Artificial Sequence: Synthetic oligonucleotide
  Antisense strand to SEQ ID NO: 2382788
uguuuaauuaaccuuaugc

SEQ ID NO: 2382790 - RNA, 19 nt, Artificial Sequence
  Description of Artificial Sequence: Synthetic oligonucleotide
  Sense strand starting at position 476 of SEQ ID NO: 1886010
cagguuuacugcucagaaa

SEQ ID NO: 2382791 - RNA, 19 nt, Artificial Sequence
  Description of Artificial Sequence: Synthetic oligonucleotide
  Antisense strand to SEQ ID NO: 2382790
uuucugagcaguaaaccug

SEQ ID NO: 2382792 - RNA, 19 nt, Artificial Sequence
  Description of Artificial Sequence: Synthetic oligonucleotide
  Sense strand starting at position 477 of SEQ ID NO: 1886010
agguuuacugcucagaaag

SEQ ID NO: 2382793 - RNA, 19 nt, Artificial Sequence
  Description of Artificial Sequence: Synthetic oligonucleotide
  Antisense strand to SEQ ID NO: 2382792
cuuucugagcaguaaaccu

SEQ ID NO: 2382794 - RNA, 19 nt, Artificial Sequence
  Description of Artificial Sequence: Synthetic oligonucleotide
  Sense strand starting at position 528 of SEQ ID NO: 1886010
gcagguaucagguaaguga

SEQ ID NO: 2382795 - RNA, 19 nt, Artificial Sequence
  Description of Artificial Sequence: Synthetic oligonucleotide
  Antisense strand to SEQ ID NO: 2382794
ucacuuaccugauaccugc

SEQ ID NO: 2382796 - RNA, 19 nt, Artificial Sequence
  Description of Artificial Sequence: Synthetic oligonucleotide
  Sense strand starting at position 535 of SEQ ID NO: 1886010
ucagguaagugauuguuaa

SEQ ID NO: 2382797 - RNA, 19 nt, Artificial Sequence
  Description of Artificial Sequence: Synthetic oligonucleotide
  Antisense strand to SEQ ID NO: 2382796
uuaacaaucacuuaccuga

SEQ ID NO: 2382798 - RNA, 19 nt, Artificial Sequence
  Description of Artificial Sequence: Synthetic oligonucleotide
  Sense strand starting at position 536 of SEQ ID NO: 1886010
cagguaagugauuguuaac

SEQ ID NO: 2382799 - RNA, 19 nt, Artificial Sequence
  Description of Artificial Sequence: Synthetic oligonucleotide
  Antisense strand to SEQ ID NO: 2382798
guuaacaaucacuuaccug

SEQ ID NO: 2382800 - RNA, 19 nt, Artificial Sequence
  Description of Artificial Sequence: Synthetic oligonucleotide
  Sense strand starting at position 542 of SEQ ID NO: 1886010
agugauuguuaaccuagaa

SEQ ID NO: 2382801 - RNA, 19 nt, Artificial Sequence
  Description of Artificial Sequence: Synthetic oligonucleotide
  Antisense strand to SEQ ID NO: 2382800
uucuagguuaacaaucacu

SEQ ID NO: 2382802 - RNA, 19 nt, Artificial Sequence
  Description of Artificial Sequence: Synthetic oligonucleotide
  Sense strand starting at position 796 of SEQ ID NO: 1886010
cucagaugcuuggcuaaga

SEQ ID NO: 2382803 - RNA, 19 nt, Artificial Sequence
  Description of Artificial Sequence: Synthetic oligonucleotide
  Antisense strand to SEQ ID NO: 2382802
ucuuagccaagcaucugag

SEQ ID NO: 2382804 - RNA, 19 nt, Artificial Sequence
  Description of Artificial Sequence: Synthetic oligonucleotide
  Sense strand starting at position 859 of SEQ ID NO: 1886010
ugucauugaugagugacau

SEQ ID NO: 2382805 - RNA, 19 nt, Artificial Sequence
  Description of Artificial Sequence: Synthetic oligonucleotide
  Antisense strand to SEQ ID NO: 2382804
augucacucaucaaugaca

SEQ ID NO: 2382806 - RNA, 19 nt, Artificial Sequence
  Description of Artificial Sequence: Synthetic oligonucleotide
  Sense strand starting at position 860 of SEQ ID NO: 1886010
gucauugaugagugacauu

SEQ ID NO: 2382807 - RNA, 19 nt, Artificial Sequence
  Description of Artificial Sequence: Synthetic oligonucleotide
  Antisense strand to SEQ ID NO: 2382806
aaugucacucaucaaugac

SEQ ID NO: 2382808 - RNA, 19 nt, Artificial Sequence
  Description of Artificial Sequence: Synthetic oligonucleotide
  Sense strand starting at position 1025 of SEQ ID NO: 1886010
gguguuugcaaagauuaca

SEQ ID NO: 2382809 - RNA, 19 nt, Artificial Sequence
  Description of Artificial Sequence: Synthetic oligonucleotide
  Antisense strand to SEQ ID NO: 2382808
uguaaucuuugcaaacacc

SEQ ID NO: 2382810 - RNA, 19 nt, Artificial Sequence
  Description of Artificial Sequence: Synthetic oligonucleotide
  Sense strand starting at position 1260 of SEQ ID NO: 1886010
cgccaaugcauggacuauu

SEQ ID NO: 2382811 - RNA, 19 nt, Artificial Sequence
  Description of Artificial Sequence: Synthetic oligonucleotide
  Antisense strand to SEQ ID NO: 2382810
aauaguccaugcauuggcg

SEQ ID NO: 2382812 - RNA, 19 nt, Artificial Sequence
  Description of Artificial Sequence: Synthetic oligonucleotide
  Sense strand starting at position 1273 of SEQ ID NO: 1886010
acuauugaguuucuggaga

SEQ ID NO: 2382813 - RNA, 19 nt, Artificial Sequence
  Description of Artificial Sequence: Synthetic oligonucleotide
  Antisense strand to SEQ ID NO: 2382812
ucuccagaaacucaauagu

SEQ ID NO: 2382814 - RNA, 19 nt, Artificial Sequence
  Description of Artificial Sequence: Synthetic oligonucleotide
  Sense strand starting at position 1351 of SEQ ID NO: 1886010
uugacucuauguguccaaa

SEQ ID NO: 2382815 - RNA, 19 nt, Artificial Sequence
  Description of Artificial Sequence: Synthetic oligonucleotide
  Antisense strand to SEQ ID NO: 2382814
uuuggacacauagagucaa

SEQ ID NO: 2382816 - RNA, 19 nt, Artificial Sequence
  Description of Artificial Sequence: Synthetic oligonucleotide
  Sense strand starting at position 1353 of SEQ ID NO: 1886010
gacucuauguguccaaaga

SEQ ID NO: 2382817 - RNA, 19 nt, Artificial Sequence
  Description of Artificial Sequence: Synthetic oligonucleotide
  Antisense strand to SEQ ID NO: 2382816
ucuuuggacacauagaguc

SEQ ID NO: 2382818 - RNA, 19 nt, Artificial Sequence
  Description of Artificial Sequence: Synthetic oligonucleotide
  Sense strand starting at position 1354 of SEQ ID NO: 1886010
acucuauguguccaaagag

SEQ ID NO: 2382819 - RNA, 19 nt, Artificial Sequence
  Description of Artificial Sequence: Synthetic oligonucleotide
  Antisense strand to SEQ ID NO: 2382818
cucuuuggacacauagagu

SEQ ID NO: 2382820 - RNA, 19 nt, Artificial Sequence
  Description of Artificial Sequence: Synthetic oligonucleotide
  Sense strand starting at position 1374 of SEQ ID NO: 1886010
cgaagacuugcccaaguuc

SEQ ID NO: 2382821 - RNA, 19 nt, Artificial Sequence
  Description of Artificial Sequence: Synthetic oligonucleotide
  Antisense strand to SEQ ID NO: 2382820
gaacuugggcaagucuucg

SEQ ID NO: 2382822 - RNA, 19 nt, Artificial Sequence
  Description of Artificial Sequence: Synthetic oligonucleotide
  Sense strand starting at position 1399 of SEQ ID NO: 1886010
cagguuagugcagaggaaa

SEQ ID NO: 2382823 - RNA, 19 nt, Artificial Sequence
  Description of Artificial Sequence: Synthetic oligonucleotide
  Antisense strand to SEQ ID NO: 2382822
uuuccucugcacuaaccug

SEQ ID NO: 2382824 - RNA, 19 nt, Artificial Sequence
  Description of Artificial Sequence: Synthetic oligonucleotide
  Sense strand starting at position 1617 of SEQ ID NO: 1886010
ccgaccaguuucuuuagaa

SEQ ID NO: 2382825 - RNA, 19 nt, Artificial Sequence
  Description of Artificial Sequence: Synthetic oligonucleotide
  Antisense strand to SEQ ID NO: 2382824
uucuaaagaaacuggucgg

SEQ ID NO: 2382826 - RNA, 19 nt, Artificial Sequence
  Description of Artificial Sequence: Synthetic oligonucleotide
  Sense strand starting at position 1618 of SEQ ID NO: 1886010
cgaccaguuucuuuagaac

SEQ ID NO: 2382827 - RNA, 19 nt, Artificial Sequence
  Description of Artificial Sequence: Synthetic oligonucleotide
  Antisense strand to SEQ ID NO: 2382826
guucuaaagaaacuggucg

SEQ ID NO: 2382828 - RNA, 19 nt, Artificial Sequence
  Description of Artificial Sequence: Synthetic oligonucleotide
  Sense strand starting at position 1707 of SEQ ID NO: 1886010
uccacauacguagacuaau

SEQ ID NO: 2382829 - RNA, 19 nt, Artificial Sequence
  Description of Artificial Sequence: Synthetic oligonucleotide
  Antisense strand to SEQ ID NO: 2382828
auuagucuacguaugugga

SEQ ID NO: 2382830 - RNA, 19 nt, Artificial Sequence
  Description of Artificial Sequence: Synthetic oligonucleotide
  Sense strand starting at position 1839 of SEQ ID NO: 1886010
ccaaguggccuccaaagaa

SEQ ID NO: 2382831 - RNA, 19 nt, Artificial Sequence
  Description of Artificial Sequence: Synthetic oligonucleotide
  Antisense strand to SEQ ID NO: 2382830
uucuuuggaggccacuugg

SEQ ID NO: 2382832 - RNA, 19 nt, Artificial Sequence
  Description of Artificial Sequence: Synthetic oligonucleotide
  Sense strand starting at position 1895 of SEQ ID NO: 1886010
caaagauuguccucuaacg

SEQ ID NO: 2382833 - RNA, 19 nt, Artificial Sequence
  Description of Artificial Sequence: Synthetic oligonucleotide
  Antisense strand to SEQ ID NO: 2382832
cguuagaggacaaucuuug

SEQ ID NO: 2382834 - RNA, 19 nt, Artificial Sequence
  Description of Artificial Sequence: Synthetic oligonucleotide
  Sense strand starting at position 1975 of SEQ ID NO: 1886010
ggcuguuaccuggaaagga

SEQ ID NO: 2382835 - RNA, 19 nt, Artificial Sequence
  Description of Artificial Sequence: Synthetic oligonucleotide
  Antisense strand to SEQ ID NO: 2382834
uccuuuccagguaacagcc

SEQ ID NO: 2382836 - RNA, 19 nt, Artificial Sequence
  Description of Artificial Sequence: Synthetic oligonucleotide
  Sense strand starting at position 2276 of SEQ ID NO: 1886010
uaagucaucgcaggaaauc

SEQ ID NO: 2382837 - RNA, 19 nt, Artificial Sequence
  Description of Artificial Sequence: Synthetic oligonucleotide
  Antisense strand to SEQ ID NO: 2382836
gauuuccugcgaugacuua

SEQ ID NO: 2382838 - RNA, 19 nt, Artificial Sequence
  Description of Artificial Sequence: Synthetic oligonucleotide
  Sense strand starting at position 2277 of SEQ ID NO: 1886010
aagucaucgcaggaaaucu

SEQ ID NO: 2382839 - RNA, 19 nt, Artificial Sequence
  Description of Artificial Sequence: Synthetic oligonucleotide
  Antisense strand to SEQ ID NO: 2382838
agauuuccugcgaugacuu

SEQ ID NO: 2382840 - RNA, 19 nt, Artificial Sequence
  Description of Artificial Sequence: Synthetic oligonucleotide
  Sense strand starting at position 2287 of SEQ ID NO: 1886010
aggaaaucugaacgugguu

SEQ ID NO: 2382841 - RNA, 19 nt, Artificial Sequence
  Description of Artificial Sequence: Synthetic oligonucleotide
  Antisense strand to SEQ ID NO: 2382840
aaccacguucagauuuccu

SEQ ID NO: 2382842 - RNA, 19 nt, Artificial Sequence
  Description of Artificial Sequence: Synthetic oligonucleotide
  Sense strand starting at position 2350 of SEQ ID NO: 1886010
guaacucaauuaccugaga

SEQ ID NO: 2382843 - RNA, 19 nt, Artificial Sequence
  Description of Artificial Sequence: Synthetic oligonucleotide
  Antisense strand to SEQ ID NO: 2382842
ucucagguaauugaguuac

SEQ ID NO: 2382844 - RNA, 19 nt, Artificial Sequence
  Description of Artificial Sequence: Synthetic oligonucleotide
  Sense strand starting at position 2586 of SEQ ID NO: 1886010
uggugaagcccuugacaua

SEQ ID NO: 2382845 - RNA, 19 nt, Artificial Sequence
  Description of Artificial Sequence: Synthetic oligonucleotide
  Antisense strand to SEQ ID NO: 2382844
uaugucaagggcuucacca

SEQ ID NO: 2382846 - RNA, 19 nt, Artificial Sequence
  Description of Artificial Sequence: Synthetic oligonucleotide
  Sense strand starting at position 2587 of SEQ ID NO: 1886010
ggugaagcccuugacauau

SEQ ID NO: 2382847 - RNA, 19 nt, Artificial Sequence
  Description of Artificial Sequence: Synthetic oligonucleotide
  Antisense strand to SEQ ID NO: 2382846
auaugucaagggcuucacc

SEQ ID NO: 2382848 - RNA, 19 nt, Artificial Sequence
  Description of Artificial Sequence: Synthetic oligonucleotide
  Sense strand starting at position 2593 of SEQ ID NO: 1886010
gcccuugacauaugguaga

SEQ ID NO: 2382849 - RNA, 19 nt, Artificial Sequence
  Description of Artificial Sequence: Synthetic oligonucleotide
  Antisense strand to SEQ ID NO: 2382848
ucuaccauaugucaagggc

SEQ ID NO: 2382850 - RNA, 19 nt, Artificial Sequence
  Description of Artificial Sequence: Synthetic oligonucleotide
  Sense strand starting at position 2606 of SEQ ID NO: 1886010
gguagauacucauuaagug

SEQ ID NO: 2382851 - RNA, 19 nt, Artificial Sequence
  Description of Artificial Sequence: Synthetic oligonucleotide
  Antisense strand to SEQ ID NO: 2382850
cacuuaaugaguaucuacc

SEQ ID NO: 2382852 - RNA, 19 nt, Artificial Sequence
  Description of Artificial Sequence: Synthetic oligonucleotide
  Sense strand starting at position 2652 of SEQ ID NO: 1886010
aggauucugucacucuuau

SEQ ID NO: 2382853 - RNA, 19 nt, Artificial Sequence
  Description of Artificial Sequence: Synthetic oligonucleotide
  Antisense strand to SEQ ID NO: 2382852
auaagagugacagaauccu

SEQ ID NO: 2382854 - RNA, 19 nt, Artificial Sequence
  Description of Artificial Sequence: Synthetic oligonucleotide
  Sense strand starting at position 2753 of SEQ ID NO: 1886010
uuuccuuaaguguaaggua

SEQ ID NO: 2382855 - RNA, 19 nt, Artificial Sequence
  Description of Artificial Sequence: Synthetic oligonucleotide
  Antisense strand to SEQ ID NO: 2382854
uaccuuacacuuaaggaaa

SEQ ID NO: 2382856 - RNA, 19 nt, Artificial Sequence
  Description of Artificial Sequence: Synthetic oligonucleotide
  Sense strand starting at position 3166 of SEQ ID NO: 1886010
cgguguuucguccuuucca

SEQ ID NO: 2382857 - RNA, 19 nt, Artificial Sequence
  Description of Artificial Sequence: Synthetic oligonucleotide
  Antisense strand to SEQ ID NO: 2382856
uggaaaggacgaaacaccg

SEQ ID NO: 2382858 - RNA, 19 nt, Artificial Sequence
  Description of Artificial Sequence: Synthetic oligonucleotide
  Sense strand starting at position 3168 of SEQ ID NO: 1886010
guguuucguccuuuccaca

SEQ ID NO: 2382859 - RNA, 19 nt, Artificial Sequence
  Description of Artificial Sequence: Synthetic oligonucleotide
  Antisense strand to SEQ ID NO: 2382858
uguggaaaggacgaaacac

SEQ ID NO: 2382860 - RNA, 19 nt, Artificial Sequence
  Description of Artificial Sequence: Synthetic oligonucleotide
  Sense strand starting at position 3173 of SEQ ID NO: 1886010
ucguccuuuccacaagaua

SEQ ID NO: 2382861 - RNA, 19 nt, Artificial Sequence
  Description of Artificial Sequence: Synthetic oligonucleotide
  Antisense strand to SEQ ID NO: 2382860
uaucuuguggaaaggacga

SEQ ID NO: 2382862 - RNA, 19 nt, Artificial Sequence
  Description of Artificial Sequence: Synthetic oligonucleotide
  Sense strand starting at position 3375 of SEQ ID NO: 1886010
cguauaugcaaauaugaag

SEQ ID NO: 2382863 - RNA, 19 nt, Artificial Sequence
  Description of Artificial Sequence: Synthetic oligonucleotide
  Antisense strand to SEQ ID NO: 2382862
cuucauauuugcauauacg

SEQ ID NO: 2382864 - RNA, 19 nt, Artificial Sequence
  Description of Artificial Sequence: Synthetic oligonucleotide
  Sense strand starting at position 3391 of SEQ ID NO: 1886010
aaggaaucaugggaaauag

SEQ ID NO: 2382865 - RNA, 19 nt, Artificial Sequence
  Description of Artificial Sequence: Synthetic oligonucleotide
  Antisense strand to SEQ ID NO: 2382864
cuauuucccaugauuccuu

SEQ ID NO: 2382866 - RNA, 19 nt, Artificial Sequence
  Description of Artificial Sequence: Synthetic oligonucleotide
  Sense strand starting at position 167 of SEQ ID NO: 1886011
agucuaguauuccuuguga

SEQ ID NO: 2382867 - RNA, 19 nt, Artificial Sequence
  Description of Artificial Sequence: Synthetic oligonucleotide
  Antisense strand to SEQ ID NO: 2382866
ucacaaggaauacuagacu

SEQ ID NO: 2382868 - RNA, 19 nt, Artificial Sequence
  Description of Artificial Sequence: Synthetic oligonucleotide
  Sense strand starting at position 169 of SEQ ID NO: 1886011
ucuaguauuccuugugaca

SEQ ID NO: 2382869 - RNA, 19 nt, Artificial Sequence
  Description of Artificial Sequence: Synthetic oligonucleotide
  Antisense strand to SEQ ID NO: 2382868
ugucacaaggaauacuaga

SEQ ID NO: 2382870 - RNA, 19 nt, Artificial Sequence
  Description of Artificial Sequence: Synthetic oligonucleotide
  Sense strand starting at position 207 of SEQ ID NO: 1886011
cuggaauucucagaguaua

SEQ ID NO: 2382871 - RNA, 19 nt, Artificial Sequence
  Description of Artificial Sequence: Synthetic oligonucleotide
  Antisense strand to SEQ ID NO: 2382870
uauacucugagaauuccag

SEQ ID NO: 2382872 - RNA, 19 nt, Artificial Sequence
  Description of Artificial Sequence: Synthetic oligonucleotide
  Sense strand starting at position 227 of SEQ ID NO: 1886011
ugaagacauuuccaaacug

SEQ ID NO: 2382873 - RNA, 19 nt, Artificial Sequence
  Description of Artificial Sequence: Synthetic oligonucleotide
  Antisense strand to SEQ ID NO: 2382872
caguuuggaaaugucuuca

SEQ ID NO: 2382874 - RNA, 19 nt, Artificial Sequence
  Description of Artificial Sequence: Synthetic oligonucleotide
  Sense strand starting at position 638 of SEQ ID NO: 1886011
ggugcagaguucccuguau

SEQ ID NO: 2382875 - RNA, 19 nt, Artificial Sequence
  Description of Artificial Sequence: Synthetic oligonucleotide
  Antisense strand to SEQ ID NO: 2382874
auacagggaacucugcacc

SEQ ID NO: 2382876 - RNA, 19 nt, Artificial Sequence
  Description of Artificial Sequence: Synthetic oligonucleotide
  Sense strand starting at position 668 of SEQ ID NO: 1886011
ggcugcccaucauuaacau

SEQ ID NO: 2382877 - RNA, 19 nt, Artificial Sequence
  Description of Artificial Sequence: Synthetic oligonucleotide
  Antisense strand to SEQ ID NO: 2382876
auguuaaugaugggcagcc

SEQ ID NO: 2382878 - RNA, 19 nt, Artificial Sequence
  Description of Artificial Sequence: Synthetic oligonucleotide
  Sense strand starting at position 695 of SEQ ID NO: 1886011
aguaucauuuguuacaaug

SEQ ID NO: 2382879 - RNA, 19 nt, Artificial Sequence
  Description of Artificial Sequence: Synthetic oligonucleotide
  Antisense strand to SEQ ID NO: 2382878
cauuguaacaaaugauacu

SEQ ID NO: 2382880 - RNA, 19 nt, Artificial Sequence
  Description of Artificial Sequence: Synthetic oligonucleotide
  Sense strand starting at position 818 of SEQ ID NO: 1886011
guggcaauuucucagacuu

SEQ ID NO: 2382881 - RNA, 19 nt, Artificial Sequence
  Description of Artificial Sequence: Synthetic oligonucleotide
  Antisense strand to SEQ ID NO: 2382880
aagucugagaaauugccac

SEQ ID NO: 2382882 - RNA, 19 nt, Artificial Sequence
  Description of Artificial Sequence: Synthetic oligonucleotide
  Sense strand starting at position 820 of SEQ ID NO: 1886011
ggcaauuucucagacuuug

SEQ ID NO: 2382883 - RNA, 19 nt, Artificial Sequence
  Description of Artificial Sequence: Synthetic oligonucleotide
  Antisense strand to SEQ ID NO: 2382882
caaagucugagaaauugcc

SEQ ID NO: 2382884 - RNA, 19 nt, Artificial Sequence
  Description of Artificial Sequence: Synthetic oligonucleotide
  Sense strand starting at position 907 of SEQ ID NO: 1886011
uugggauucgucugauguu

SEQ ID NO: 2382885 - RNA, 19 nt, Artificial Sequence
  Description of Artificial Sequence: Synthetic oligonucleotide
  Antisense strand to SEQ ID NO: 2382884
aacaucagacgaaucccaa

SEQ ID NO: 2382886 - RNA, 19 nt, Artificial Sequence
  Description of Artificial Sequence: Synthetic oligonucleotide
  Sense strand starting at position 1020 of SEQ ID NO: 1886011
ccacgugacuucucacugu

SEQ ID NO: 2382887 - RNA, 19 nt, Artificial Sequence
  Description of Artificial Sequence: Synthetic oligonucleotide
  Antisense strand to SEQ ID NO: 2382886
acagugagaagucacgugg

SEQ ID NO: 2382888 - RNA, 19 nt, Artificial Sequence
  Description of Artificial Sequence: Synthetic oligonucleotide
  Sense strand starting at position 1023 of SEQ ID NO: 1886011
cgugacuucucacugugau

SEQ ID NO: 2382889 - RNA, 19 nt, Artificial Sequence
  Description of Artificial Sequence: Synthetic oligonucleotide
  Antisense strand to SEQ ID NO: 2382888
aucacagugagaagucacg

SEQ ID NO: 2382890 - RNA, 19 nt, Artificial Sequence
  Description of Artificial Sequence: Synthetic oligonucleotide
  Sense strand starting at position 1024 of SEQ ID NO: 1886011
gugacuucucacugugaug

SEQ ID NO: 2382891 - RNA, 19 nt, Artificial Sequence
  Description of Artificial Sequence: Synthetic oligonucleotide
  Antisense strand to SEQ ID NO: 2382890
caucacagugagaagucac

SEQ ID NO: 2382892 - RNA, 19 nt, Artificial Sequence
  Description of Artificial Sequence: Synthetic oligonucleotide
  Sense strand starting at position 1504 of SEQ ID NO: 1886011
aguuucuugcaugaauauc

SEQ ID NO: 2382893 - RNA, 19 nt, Artificial Sequence
  Description of Artificial Sequence: Synthetic oligonucleotide
  Antisense strand to SEQ ID NO: 2382892
gauauucaugcaagaaacu

SEQ ID NO: 2382894 - RNA, 19 nt, Artificial Sequence
  Description of Artificial Sequence: Synthetic oligonucleotide
  Sense strand starting at position 1789 of SEQ ID NO: 1886011
uggcuuugacagggaaaca

SEQ ID NO: 2382895 - RNA, 19 nt, Artificial Sequence
  Description of Artificial Sequence: Synthetic oligonucleotide
  Antisense strand to SEQ ID NO: 2382894
uguuucccugucaaagcca

SEQ ID NO: 2382896 - RNA, 19 nt, Artificial Sequence
  Description of Artificial Sequence: Synthetic oligonucleotide
  Sense strand starting at position 1834 of SEQ ID NO: 1886011
gaucucuucugguugugga

SEQ ID NO: 2382897 - RNA, 19 nt, Artificial Sequence
  Description of Artificial Sequence: Synthetic oligonucleotide
  Antisense strand to SEQ ID NO: 2382896
uccacaaccagaagagauc

SEQ ID NO: 2382898 - RNA, 19 nt, Artificial Sequence
  Description of Artificial Sequence: Synthetic oligonucleotide
  Sense strand starting at position 2102 of SEQ ID NO: 1886011
gguggaucuuggccagaau

SEQ ID NO: 2382899 - RNA, 19 nt, Artificial Sequence
  Description of Artificial Sequence: Synthetic oligonucleotide
  Antisense strand to SEQ ID NO: 2382898
auucuggccaagauccacc

SEQ ID NO: 2382900 - RNA, 19 nt, Artificial Sequence
  Description of Artificial Sequence: Synthetic oligonucleotide
  Sense strand starting at position 2103 of SEQ ID NO: 1886011
guggaucuuggccagaauu

SEQ ID NO: 2382901 - RNA, 19 nt, Artificial Sequence
  Description of Artificial Sequence: Synthetic oligonucleotide
  Antisense strand to SEQ ID NO: 2382900
aauucuggccaagauccac

SEQ ID NO: 2382902 - RNA, 19 nt, Artificial Sequence
  Description of Artificial Sequence: Synthetic oligonucleotide
  Sense strand starting at position 2128 of SEQ ID NO: 1886011
cgaguuaggcucgcuggua

SEQ ID NO: 2382903 - RNA, 19 nt, Artificial Sequence
  Description of Artificial Sequence: Synthetic oligonucleotide
  Antisense strand to SEQ ID NO: 2382902
uaccagcgagccuaacucg

SEQ ID NO: 2382904 - RNA, 19 nt, Artificial Sequence
  Description of Artificial Sequence: Synthetic oligonucleotide
  Sense strand starting at position 2157 of SEQ ID NO: 1886011
guccaaagucacgaugcua

SEQ ID NO: 2382905 - RNA, 19 nt, Artificial Sequence
  Description of Artificial Sequence: Synthetic oligonucleotide
  Antisense strand to SEQ ID NO: 2382904
uagcaucgugacuuuggac

SEQ ID NO: 2382906 - RNA, 19 nt, Artificial Sequence
  Description of Artificial Sequence: Synthetic oligonucleotide
  Sense strand starting at position 2279 of SEQ ID NO: 1886011
acgauauacucuucugacu

SEQ ID NO: 2382907 - RNA, 19 nt, Artificial Sequence
  Description of Artificial Sequence: Synthetic oligonucleotide
  Antisense strand to SEQ ID NO: 2382906
agucagaagaguauaucgu

SEQ ID NO: 2382908 - RNA, 19 nt, Artificial Sequence
  Description of Artificial Sequence: Synthetic oligonucleotide
  Sense strand starting at position 2369 of SEQ ID NO: 1886011
uucugaagucuccguuaca

SEQ ID NO: 2382909 - RNA, 19 nt, Artificial Sequence
  Description of Artificial Sequence: Synthetic oligonucleotide
  Antisense strand to SEQ ID NO: 2382908
uguaacggagacuucagaa

SEQ ID NO: 2382910 - RNA, 19 nt, Artificial Sequence
  Description of Artificial Sequence: Synthetic oligonucleotide
  Sense strand starting at position 2370 of SEQ ID NO: 1886011
ucugaagucuccguuacac

SEQ ID NO: 2382911 - RNA, 19 nt, Artificial Sequence
  Description of Artificial Sequence: Synthetic oligonucleotide
  Antisense strand to SEQ ID NO: 2382910
guguaacggagacuucaga

SEQ ID NO: 2382912 - RNA, 19 nt, Artificial Sequence
  Description of Artificial Sequence: Synthetic oligonucleotide
  Sense strand starting at position 2398 of SEQ ID NO: 1886011
cauguuuaagccugguaac

SEQ ID NO: 2382913 - RNA, 19 nt, Artificial Sequence
  Description of Artificial Sequence: Synthetic oligonucleotide
  Antisense strand to SEQ ID NO: 2382912
guuaccaggcuuaaacaug

SEQ ID NO: 2382914 - RNA, 19 nt, Artificial Sequence
  Description of Artificial Sequence: Synthetic oligonucleotide
  Sense strand starting at position 2399 of SEQ ID NO: 1886011
auguuuaagccugguaaca

SEQ ID NO: 2382915 - RNA, 19 nt, Artificial Sequence
  Description of Artificial Sequence: Synthetic oligonucleotide
  Antisense strand to SEQ ID NO: 2382914
uguuaccaggcuuaaacau

SEQ ID NO: 2382916 - RNA, 19 nt, Artificial Sequence
  Description of Artificial Sequence: Synthetic oligonucleotide
  Sense strand starting at position 2459 of SEQ ID NO: 1886011
ggaaguuaguuucucuucu

SEQ ID NO: 2382917 - RNA, 19 nt, Artificial Sequence
  Description of Artificial Sequence: Synthetic oligonucleotide
  Antisense strand to SEQ ID NO: 2382916
agaagagaaacuaacuucc

SEQ ID NO: 2382918 - RNA, 19 nt, Artificial Sequence
  Description of Artificial Sequence: Synthetic oligonucleotide
  Sense strand starting at position 2463 of SEQ ID NO: 1886011
guuaguuucucuucucuga

SEQ ID NO: 2382919 - RNA, 19 nt, Artificial Sequence
  Description of Artificial Sequence: Synthetic oligonucleotide
  Antisense strand to SEQ ID NO: 2382918
ucagagaagagaaacuaac

SEQ ID NO: 2382920 - RNA, 19 nt, Artificial Sequence
  Description of Artificial Sequence: Synthetic oligonucleotide
  Sense strand starting at position 2507 of SEQ ID NO: 1886011
cccugagaucauuggcaaa

SEQ ID NO: 2382921 - RNA, 19 nt, Artificial Sequence
  Description of Artificial Sequence: Synthetic oligonucleotide
  Antisense strand to SEQ ID NO: 2382920
uuugccaaugaucucaggg

SEQ ID NO: 2382922 - RNA, 19 nt, Artificial Sequence
  Description of Artificial Sequence: Synthetic oligonucleotide
  Sense strand starting at position 2835 of SEQ ID NO: 1886011
ggaggcuuucaguaagggu

SEQ ID NO: 2382923 - RNA, 19 nt, Artificial Sequence
  Description of Artificial Sequence: Synthetic oligonucleotide
  Antisense strand to SEQ ID NO: 2382922
acccuuacugaaagccucc

SEQ ID NO: 2382924 - RNA, 19 nt, Artificial Sequence
  Description of Artificial Sequence: Synthetic oligonucleotide
  Sense strand starting at position 3201 of SEQ ID NO: 1886011
ucuauaugaugguugcuca

SEQ ID NO: 2382925 - RNA, 19 nt, Artificial Sequence
  Description of Artificial Sequence: Synthetic oligonucleotide
  Antisense strand to SEQ ID NO: 2382924
ugagcaaccaucauauaga

SEQ ID NO: 2382926 - RNA, 19 nt, Artificial Sequence
  Description of Artificial Sequence: Synthetic oligonucleotide
  Sense strand starting at position 3202 of SEQ ID NO: 1886011
cuauaugaugguugcucau

SEQ ID NO: 2382927 - RNA, 19 nt, Artificial Sequence
  Description of Artificial Sequence: Synthetic oligonucleotide
  Antisense strand to SEQ ID NO: 2382926
augagcaaccaucauauag

SEQ ID NO: 2382928 - RNA, 19 nt, Artificial Sequence
  Description of Artificial Sequence: Synthetic oligonucleotide
  Sense strand starting at position 3221 of SEQ ID NO: 1886011
ucacaaaugcacugucaug

SEQ ID NO: 2382929 - RNA, 19 nt, Artificial Sequence
  Description of Artificial Sequence: Synthetic oligonucleotide
  Antisense strand to SEQ ID NO: 2382928
caugacagugcauuuguga

SEQ ID NO: 2382930 - RNA, 19 nt, Artificial Sequence
  Description of Artificial Sequence: Synthetic oligonucleotide
  Sense strand starting at position 3254 of SEQ ID NO: 1886011
uccuuugcuggugaaaguu

SEQ ID NO: 2382931 - RNA, 19 nt, Artificial Sequence
  Description of Artificial Sequence: Synthetic oligonucleotide
  Antisense strand to SEQ ID NO: 2382930
aacuuucaccagcaaagga

SEQ ID NO: 2382932 - RNA, 19 nt, Artificial Sequence
  Description of Artificial Sequence: Synthetic oligonucleotide
  Sense strand starting at position 3326 of SEQ ID NO: 1886011
gcuauucuuuggccagauc

SEQ ID NO: 2382933 - RNA, 19 nt, Artificial Sequence
  Description of Artificial Sequence: Synthetic oligonucleotide
  Antisense strand to SEQ ID NO: 2382932
gaucuggccaaagaauagc

SEQ ID NO: 2382934 - RNA, 19 nt, Artificial Sequence
  Description of Artificial Sequence: Synthetic oligonucleotide
  Sense strand starting at position 3394 of SEQ ID NO: 1886011
ccauuucccugcgccagaa

SEQ ID NO: 2382935 - RNA, 19 nt, Artificial Sequence
  Description of Artificial Sequence: Synthetic oligonucleotide
  Antisense strand to SEQ ID NO: 2382934
uucuggcgcagggaaaugg

SEQ ID NO: 2382936 - RNA, 19 nt, Artificial Sequence
  Description of Artificial Sequence: Synthetic oligonucleotide
  Sense strand starting at position 3414 of SEQ ID NO: 1886011
gaggcaucugccugaguca

SEQ ID NO: 2382937 - RNA, 19 nt, Artificial Sequence
  Description of Artificial Sequence: Synthetic oligonucleotide
  Antisense strand to SEQ ID NO: 2382936
ugacucaggcagaugccuc

SEQ ID NO: 2382938 - RNA, 19 nt, Artificial Sequence
  Description of Artificial Sequence: Synthetic oligonucleotide
  Sense strand starting at position 3423 of SEQ ID NO: 1886011
gccugagucacugauaguu

SEQ ID NO: 2382939 - RNA, 19 nt, Artificial Sequence
  Description of Artificial Sequence: Synthetic oligonucleotide
  Antisense strand to SEQ ID NO: 2382938
aacuaucagugacucaggc

SEQ ID NO: 2382940 - RNA, 19 nt, Artificial Sequence
  Description of Artificial Sequence: Synthetic oligonucleotide
  Sense strand starting at position 3435 of SEQ ID NO: 1886011
gauaguuagggugaguaac

SEQ ID NO: 2382941 - RNA, 19 nt, Artificial Sequence
  Description of Artificial Sequence: Synthetic oligonucleotide
  Antisense strand to SEQ ID NO: 2382940
guuacucacccuaacuauc

SEQ ID NO: 2382942 - RNA, 19 nt, Artificial Sequence
  Description of Artificial Sequence: Synthetic oligonucleotide
  Sense strand starting at position 3477 of SEQ ID NO: 1886011
ccagaaaucugaguccuga

SEQ ID NO: 2382943 - RNA, 19 nt, Artificial Sequence
  Description of Artificial Sequence: Synthetic oligonucleotide
  Antisense strand to SEQ ID NO: 2382942
ucaggacucagauuucugg

SEQ ID NO: 2382944 - RNA, 19 nt, Artificial Sequence
  Description of Artificial Sequence: Synthetic oligonucleotide
  Sense strand starting at position 3958 of SEQ ID NO: 1886011
cuucuccagucaguggaua

SEQ ID NO: 2382945 - RNA, 19 nt, Artificial Sequence
  Description of Artificial Sequence: Synthetic oligonucleotide
  Antisense strand to SEQ ID NO: 2382944
uauccacugacuggagaag

SEQ ID NO: 2382946 - RNA, 19 nt, Artificial Sequence
  Description of Artificial Sequence: Synthetic oligonucleotide
  Sense strand starting at position 3 of SEQ ID NO: 1886012
cucagaucuugucuggcuu

SEQ ID NO: 2382947 - RNA, 19 nt, Artificial Sequence
  Description of Artificial Sequence: Synthetic oligonucleotide
  Antisense strand to SEQ ID NO: 2382946
aagccagacaagaucugag

SEQ ID NO: 2382948 - RNA, 19 nt, Artificial Sequence
  Description of Artificial Sequence: Synthetic oligonucleotide
  Sense strand starting at position 91 of SEQ ID NO: 1886012
cgggaagugugcucugaga

SEQ ID NO: 2382949 - RNA, 19 nt, Artificial Sequence
  Description of Artificial Sequence: Synthetic oligonucleotide
  Antisense strand to SEQ ID NO: 2382948
ucucagagcacacuucccg

SEQ ID NO: 2382950 - RNA, 19 nt, Artificial Sequence
  Description of Artificial Sequence: Synthetic oligonucleotide
  Sense strand starting at position 93 of SEQ ID NO: 1886012
ggaagugugcucugagagc

SEQ ID NO: 2382951 - RNA, 19 nt, Artificial Sequence
  Description of Artificial Sequence: Synthetic oligonucleotide
  Antisense strand to SEQ ID NO: 2382950
gcucucagagcacacuucc

SEQ ID NO: 2382952 - RNA, 19 nt, Artificial Sequence
  Description of Artificial Sequence: Synthetic oligonucleotide
  Sense strand starting at position 118 of SEQ ID NO: 1886012
cuugcaggucuugaggaua

SEQ ID NO: 2382953 - RNA, 19 nt, Artificial Sequence
  Description of Artificial Sequence: Synthetic oligonucleotide
  Antisense strand to SEQ ID NO: 2382952
uauccucaagaccugcaag

SEQ ID NO: 2382954 - RNA, 19 nt, Artificial Sequence
  Description of Artificial Sequence: Synthetic oligonucleotide
  Sense strand starting at position 243 of SEQ ID NO: 1886012
gugaggaaugggugaguca

SEQ ID NO: 2382955 - RNA, 19 nt, Artificial Sequence
  Description of Artificial Sequence: Synthetic oligonucleotide
  Antisense strand to SEQ ID NO: 2382954
ugacucacccauuccucac

SEQ ID NO: 2382956 - RNA, 19 nt, Artificial Sequence
  Description of Artificial Sequence: Synthetic oligonucleotide
  Sense strand starting at position 258 of SEQ ID NO: 1886012
gucagaccuucccugauca

SEQ ID NO: 2382957 - RNA, 19 nt, Artificial Sequence
  Description of Artificial Sequence: Synthetic oligonucleotide
  Antisense strand to SEQ ID NO: 2382956
ugaucagggaaggucugac

SEQ ID NO: 2382958 - RNA, 19 nt, Artificial Sequence
  Description of Artificial Sequence: Synthetic oligonucleotide
  Sense strand starting at position 306 of SEQ ID NO: 1886012
gucacauugugaucucuca

SEQ ID NO: 2382959 - RNA, 19 nt, Artificial Sequence
  Description of Artificial Sequence: Synthetic oligonucleotide
  Antisense strand to SEQ ID NO: 2382958
ugagagaucacaaugugac

SEQ ID NO: 2382960 - RNA, 19 nt, Artificial Sequence
  Description of Artificial Sequence: Synthetic oligonucleotide
  Sense strand starting at position 313 of SEQ ID NO: 1886012
ugugaucucucaguuggca

SEQ ID NO: 2382961 - RNA, 19 nt, Artificial Sequence
  Description of Artificial Sequence: Synthetic oligonucleotide
  Antisense strand to SEQ ID NO: 2382960
ugccaacugagagaucaca

SEQ ID NO: 2382962 - RNA, 19 nt, Artificial Sequence
  Description of Artificial Sequence: Synthetic oligonucleotide
  Sense strand starting at position 398 of SEQ ID NO: 1886012
gagaacuccugcucacugu

SEQ ID NO: 2382963 - RNA, 19 nt, Artificial Sequence
  Description of Artificial Sequence: Synthetic oligonucleotide
  Antisense strand to SEQ ID NO: 2382962
acagugagcaggaguucuc

SEQ ID NO: 2382964 - RNA, 19 nt, Artificial Sequence
  Description of Artificial Sequence: Synthetic oligonucleotide
  Sense strand starting at position 480 of SEQ ID NO: 1886012
ccauuugugccuugaccau

SEQ ID NO: 2382965 - RNA, 19 nt, Artificial Sequence
  Description of Artificial Sequence: Synthetic oligonucleotide
  Antisense strand to SEQ ID NO: 2382964
auggucaaggcacaaaugg

SEQ ID NO: 2382966 - RNA, 19 nt, Artificial Sequence
  Description of Artificial Sequence: Synthetic oligonucleotide
  Sense strand starting at position 486 of SEQ ID NO: 1886012
gugccuugaccaugagaac

SEQ ID NO: 2382967 - RNA, 19 nt, Artificial Sequence
  Description of Artificial Sequence: Synthetic oligonucleotide
  Antisense strand to SEQ ID NO: 2382966
guucucauggucaaggcac

SEQ ID NO: 2382968 - RNA, 19 nt, Artificial Sequence
  Description of Artificial Sequence: Synthetic oligonucleotide
  Sense strand starting at position 526 of SEQ ID NO: 1886012
gcacauaugcgugcguauu

SEQ ID NO: 2382969 - RNA, 19 nt, Artificial Sequence
  Description of Artificial Sequence: Synthetic oligonucleotide
  Antisense strand to SEQ ID NO: 2382968
aauacgcacgcauaugugc

SEQ ID NO: 2382970 - RNA, 19 nt, Artificial Sequence
  Description of Artificial Sequence: Synthetic oligonucleotide
  Sense strand starting at position 540 of SEQ ID NO: 1886012
guauuuccgugucugguuu

SEQ ID NO: 2382971 - RNA, 19 nt, Artificial Sequence
  Description of Artificial Sequence: Synthetic oligonucleotide
  Antisense strand to SEQ ID NO: 2382970
aaaccagacacggaaauac

SEQ ID NO: 2382972 - RNA, 19 nt, Artificial Sequence
  Description of Artificial Sequence: Synthetic oligonucleotide
  Sense strand starting at position 599 of SEQ ID NO: 1886012
ugccguguugcuuuggaca

SEQ ID NO: 2382973 - RNA, 19 nt, Artificial Sequence
  Description of Artificial Sequence: Synthetic oligonucleotide
  Antisense strand to SEQ ID NO: 2382972
uguccaaagcaacacggca

SEQ ID NO: 2382974 - RNA, 19 nt, Artificial Sequence
  Description of Artificial Sequence: Synthetic oligonucleotide
  Sense strand starting at position 913 of SEQ ID NO: 1886012
gcuggcauauugguacaau

SEQ ID NO: 2382975 - RNA, 19 nt, Artificial Sequence
  Description of Artificial Sequence: Synthetic oligonucleotide
  Antisense strand to SEQ ID NO: 2382974
auuguaccaauaugccagc

SEQ ID NO: 2382976 - RNA, 19 nt, Artificial Sequence
  Description of Artificial Sequence: Synthetic oligonucleotide
  Sense strand starting at position 916 of SEQ ID NO: 1886012
ggcauauugguacaauugu

SEQ ID NO: 2382977 - RNA, 19 nt, Artificial Sequence
  Description of Artificial Sequence: Synthetic oligonucleotide
  Antisense strand to SEQ ID NO: 2382976
acaauuguaccaauaugcc

SEQ ID NO: 2382978 - RNA, 19 nt, Artificial Sequence
  Description of Artificial Sequence: Synthetic oligonucleotide
  Sense strand starting at position 942 of SEQ ID NO: 1886012
uauuaugaguugcuguuaa

SEQ ID NO: 2382979 - RNA, 19 nt, Artificial Sequence
  Description of Artificial Sequence: Synthetic oligonucleotide
  Antisense strand to SEQ ID NO: 2382978
uuaacagcaacucauaaua

SEQ ID NO: 2382980 - RNA, 19 nt, Artificial Sequence
  Description of Artificial Sequence: Synthetic oligonucleotide
  Sense strand starting at position 988 of SEQ ID NO: 1886012
uuaucauagguguguauau

SEQ ID NO: 2382981 - RNA, 19 nt, Artificial Sequence
  Description of Artificial Sequence: Synthetic oligonucleotide
  Antisense strand to SEQ ID NO: 2382980
auauacacaccuaugauaa

SEQ ID NO: 2382982 - RNA, 19 nt, Artificial Sequence
  Description of Artificial Sequence: Synthetic oligonucleotide
  Sense strand starting at position 989 of SEQ ID NO: 1886012
uaucauagguguguauaua

SEQ ID NO: 2382983 - RNA, 19 nt, Artificial Sequence
  Description of Artificial Sequence: Synthetic oligonucleotide
  Antisense strand to SEQ ID NO: 2382982
uauauacacaccuaugaua

SEQ ID NO: 2382984 - RNA, 19 nt, Artificial Sequence
  Description of Artificial Sequence: Synthetic oligonucleotide
  Sense strand starting at position 990 of SEQ ID NO: 1886012
aucauagguguguauauau

SEQ ID NO: 2382985 - RNA, 19 nt, Artificial Sequence
  Description of Artificial Sequence: Synthetic oligonucleotide
  Antisense strand to SEQ ID NO: 2382984
auauauacacaccuaugau

SEQ ID NO: 2382986 - RNA, 19 nt, Artificial Sequence
  Description of Artificial Sequence: Synthetic oligonucleotide
  Sense strand starting at position 1390 of SEQ ID NO: 1886012
ucuugugauuuggaaauga

SEQ ID NO: 2382987 - RNA, 19 nt, Artificial Sequence
  Description of Artificial Sequence: Synthetic oligonucleotide
  Antisense strand to SEQ ID NO: 2382986
ucauuuccaaaucacaaga

SEQ ID NO: 2382988 - RNA, 19 nt, Artificial Sequence
  Description of Artificial Sequence: Synthetic oligonucleotide
  Sense strand starting at position 1405 of SEQ ID NO: 1886012
augagaucuugcuuccugu

SEQ ID NO: 2382989 - RNA, 19 nt, Artificial Sequence
  Description of Artificial Sequence: Synthetic oligonucleotide
  Antisense strand to SEQ ID NO: 2382988
acaggaagcaagaucucau

SEQ ID NO: 2382990 - RNA, 19 nt, Artificial Sequence
  Description of Artificial Sequence: Synthetic oligonucleotide
  Sense strand starting at position 1434 of SEQ ID NO: 1886012
ccaccaaaguugucugauc

SEQ ID NO: 2382991 - RNA, 19 nt, Artificial Sequence
  Description of Artificial Sequence: Synthetic oligonucleotide
  Antisense strand to SEQ ID NO: 2382990
gaucagacaacuuuggugg

SEQ ID NO: 2382992 - RNA, 19 nt, Artificial Sequence
  Description of Artificial Sequence: Synthetic oligonucleotide
  Sense strand starting at position 1436 of SEQ ID NO: 1886012
accaaaguugucugaucuu

SEQ ID NO: 2382993 - RNA, 19 nt, Artificial Sequence
  Description of Artificial Sequence: Synthetic oligonucleotide
  Antisense strand to SEQ ID NO: 2382992
aagaucagacaacuuuggu

SEQ ID NO: 2382994 - RNA, 19 nt, Artificial Sequence
  Description of Artificial Sequence: Synthetic oligonucleotide
  Sense strand starting at position 1439 of SEQ ID NO: 1886012
aaaguugucugaucuugga

SEQ ID NO: 2382995 - RNA, 19 nt, Artificial Sequence
  Description of Artificial Sequence: Synthetic oligonucleotide
  Antisense strand to SEQ ID NO: 2382994
uccaagaucagacaacuuu

SEQ ID NO: 2382996 - RNA, 19 nt, Artificial Sequence
  Description of Artificial Sequence: Synthetic oligonucleotide
  Sense strand starting at position 1446 of SEQ ID NO: 1886012
ucugaucuuggaugacuua

SEQ ID NO: 2382997 - RNA, 19 nt, Artificial Sequence
  Description of Artificial Sequence: Synthetic oligonucleotide
  Antisense strand to SEQ ID NO: 2382996
uaagucauccaagaucaga

SEQ ID NO: 2382998 - RNA, 19 nt, Artificial Sequence
  Description of Artificial Sequence: Synthetic oligonucleotide
  Sense strand starting at position 1473 of SEQ ID NO: 1886012
cucugagucucaguauuau

SEQ ID NO: 2382999 - RNA, 19 nt, Artificial Sequence
  Description of Artificial Sequence: Synthetic oligonucleotide
  Antisense strand to SEQ ID NO: 2382998
auaauacugagacucagag

SEQ ID NO: 2383000 - RNA, 19 nt, Artificial Sequence
  Description of Artificial Sequence: Synthetic oligonucleotide
  Sense strand starting at position 1482 of SEQ ID NO: 1886012
ucaguauuaucagcuguaa

SEQ ID NO: 2383001 - RNA, 19 nt, Artificial Sequence
  Description of Artificial Sequence: Synthetic oligonucleotide
  Antisense strand to SEQ ID NO: 2383000
uuacagcugauaauacuga

SEQ ID NO: 2383002 - RNA, 19 nt, Artificial Sequence
  Description of Artificial Sequence: Synthetic oligonucleotide
  Sense strand starting at position 1527 of SEQ ID NO: 1886012
uuaugaggcucuuucugaa

SEQ ID NO: 2383003 - RNA, 19 nt, Artificial Sequence
  Description of Artificial Sequence: Synthetic oligonucleotide
  Antisense strand to SEQ ID NO: 2383002
uucagaaagagccucauaa

SEQ ID NO: 2383004 - RNA, 19 nt, Artificial Sequence
  Description of Artificial Sequence: Synthetic oligonucleotide
  Sense strand starting at position 1672 of SEQ ID NO: 1886012
caacguuaagcaggguuaa

SEQ ID NO: 2383005 - RNA, 19 nt, Artificial Sequence
  Description of Artificial Sequence: Synthetic oligonucleotide
  Antisense strand to SEQ ID NO: 2383004
uuaacccugcuuaacguug

SEQ ID NO: 2383006 - RNA, 19 nt, Artificial Sequence
  Description of Artificial Sequence: Synthetic oligonucleotide
  Sense strand starting at position 1696 of SEQ ID NO: 1886012
uuguauguugccguaccaa

SEQ ID NO: 2383007 - RNA, 19 nt, Artificial Sequence
  Description of Artificial Sequence: Synthetic oligonucleotide
  Antisense strand to SEQ ID NO: 2383006
uugguacggcaacauacaa

SEQ ID NO: 2383008 - RNA, 19 nt, Artificial Sequence
  Description of Artificial Sequence: Synthetic oligonucleotide
  Sense strand starting at position 1741 of SEQ ID NO: 1886012
cuacauaccugagugagau

SEQ ID NO: 2383009 - RNA, 19 nt, Artificial Sequence
  Description of Artificial Sequence: Synthetic oligonucleotide
  Antisense strand to SEQ ID NO: 2383008
aucucacucagguauguag

SEQ ID NO: 2383010 - RNA, 19 nt, Artificial Sequence
  Description of Artificial Sequence: Synthetic oligonucleotide
  Sense strand starting at position 1742 of SEQ ID NO: 1886012
uacauaccugagugagaua

SEQ ID NO: 2383011 - RNA, 19 nt, Artificial Sequence
  Description of Artificial Sequence: Synthetic oligonucleotide
  Antisense strand to SEQ ID NO: 2383010
uaucucacucagguaugua

SEQ ID NO: 2383012 - RNA, 19 nt, Artificial Sequence
  Description of Artificial Sequence: Synthetic oligonucleotide
  Sense strand starting at position 1909 of SEQ ID NO: 1886012
uucucauaccgugguuaca

SEQ ID NO: 2383013 - RNA, 19 nt, Artificial Sequence
  Description of Artificial Sequence: Synthetic oligonucleotide
  Antisense strand to SEQ ID NO: 2383012
uguaaccacgguaugagaa

SEQ ID NO: 2383014 - RNA, 19 nt, Artificial Sequence
  Description of Artificial Sequence: Synthetic oligonucleotide
  Sense strand starting at position 1911 of SEQ ID NO: 1886012
cucauaccgugguuacaga

SEQ ID NO: 2383015 - RNA, 19 nt, Artificial Sequence
  Description of Artificial Sequence: Synthetic oligonucleotide
  Antisense strand to SEQ ID NO: 2383014
ucuguaaccacgguaugag

SEQ ID NO: 2383016 - RNA, 19 nt, Artificial Sequence
  Description of Artificial Sequence: Synthetic oligonucleotide
  Sense strand starting at position 2401 of SEQ ID NO: 1886012
gcuggaaaucccuguagga

SEQ ID NO: 2383017 - RNA, 19 nt, Artificial Sequence
  Description of Artificial Sequence: Synthetic oligonucleotide
  Antisense strand to SEQ ID NO: 2383016
uccuacagggauuuccagc

SEQ ID NO: 2383018 - RNA, 19 nt, Artificial Sequence
  Description of Artificial Sequence: Synthetic oligonucleotide
  Sense strand starting at position 2485 of SEQ ID NO: 1886012
ccuccugauuugugagaaa

SEQ ID NO: 2383019 - RNA, 19 nt, Artificial Sequence
  Description of Artificial Sequence: Synthetic oligonucleotide
  Antisense strand to SEQ ID NO: 2383018
uuucucacaaaucaggagg

SEQ ID NO: 2383020 - RNA, 19 nt, Artificial Sequence
  Description of Artificial Sequence: Synthetic oligonucleotide
  Sense strand starting at position 2488 of SEQ ID NO: 1886012
ccugauuugugagaaacaa

SEQ ID NO: 2383021 - RNA, 19 nt, Artificial Sequence
  Description of Artificial Sequence: Synthetic oligonucleotide
  Antisense strand to SEQ ID NO: 2383020
uuguuucucacaaaucagg

SEQ ID NO: 2383022 - RNA, 19 nt, Artificial Sequence
  Description of Artificial Sequence: Synthetic oligonucleotide
  Sense strand starting at position 2544 of SEQ ID NO: 1886012
gugcaaggugcuccaguuu

SEQ ID NO: 2383023 - RNA, 19 nt, Artificial Sequence
  Description of Artificial Sequence: Synthetic oligonucleotide
  Antisense strand to SEQ ID NO: 2383022
aaacuggagcaccuugcac

SEQ ID NO: 2383024 - RNA, 19 nt, Artificial Sequence
  Description of Artificial Sequence: Synthetic oligonucleotide
  Sense strand starting at position 3038 of SEQ ID NO: 1886012
ugcauuuaaucucaaggaa

SEQ ID NO: 2383025 - RNA, 19 nt, Artificial Sequence
  Description of Artificial Sequence: Synthetic oligonucleotide
  Antisense strand to SEQ ID NO: 2383024
uuccuugagauuaaaugca

SEQ ID NO: 2383026 - RNA, 19 nt, Artificial Sequence
  Description of Artificial Sequence: Synthetic oligonucleotide
  Sense strand starting at position 64 of SEQ ID NO: 1886013
ccaagcugugcucauuaga

SEQ ID NO: 2383027 - RNA, 19 nt, Artificial Sequence
  Description of Artificial Sequence: Synthetic oligonucleotide
  Antisense strand to SEQ ID NO: 2383026
ucuaaugagcacagcuugg

SEQ ID NO: 2383028 - RNA, 19 nt, Artificial Sequence
  Description of Artificial Sequence: Synthetic oligonucleotide
  Sense strand starting at position 67 of SEQ ID NO: 1886013
agcugugcucauuagacaa

SEQ ID NO: 2383029 - RNA, 19 nt, Artificial Sequence
  Description of Artificial Sequence: Synthetic oligonucleotide
  Antisense strand to SEQ ID NO: 2383028
uugucuaaugagcacagcu

SEQ ID NO: 2383030 - RNA, 19 nt, Artificial Sequence
  Description of Artificial Sequence: Synthetic oligonucleotide
  Sense strand starting at position 78 of SEQ ID NO: 1886013
uuagacaacugcuucugaa

SEQ ID NO: 2383031 - RNA, 19 nt, Artificial Sequence
  Description of Artificial Sequence: Synthetic oligonucleotide
  Antisense strand to SEQ ID NO: 2383030
uucagaagcaguugucuaa

SEQ ID NO: 2383032 - RNA, 19 nt, Artificial Sequence
  Description of Artificial Sequence: Synthetic oligonucleotide
  Sense strand starting at position 145 of SEQ ID NO: 1886013
aagggaugguugccacaca

SEQ ID NO: 2383033 - RNA, 19 nt, Artificial Sequence
  Description of Artificial Sequence: Synthetic oligonucleotide
  Antisense strand to SEQ ID NO: 2383032
uguguggcaaccaucccuu

SEQ ID NO: 2383034 - RNA, 19 nt, Artificial Sequence
  Description of Artificial Sequence: Synthetic oligonucleotide
  Sense strand starting at position 174 of SEQ ID NO: 1886013
ggaugacucugggcucauu

SEQ ID NO: 2383035 - RNA, 19 nt, Artificial Sequence
  Description of Artificial Sequence: Synthetic oligonucleotide
  Antisense strand to SEQ ID NO: 2383034
aaugagcccagagucaucc

SEQ ID NO: 2383036 - RNA, 19 nt, Artificial Sequence
  Description of Artificial Sequence: Synthetic oligonucleotide
  Sense strand starting at position 182 of SEQ ID NO: 1886013
cugggcucauucuugucaa

SEQ ID NO: 2383037 - RNA, 19 nt, Artificial Sequence
  Description of Artificial Sequence: Synthetic oligonucleotide
  Antisense strand to SEQ ID NO: 2383036
uugacaagaaugagcccag

SEQ ID NO: 2383038 - RNA, 19 nt, Artificial Sequence
  Description of Artificial Sequence: Synthetic oligonucleotide
  Sense strand starting at position 185 of SEQ ID NO: 1886013
ggcucauucuugucaauuc

SEQ ID NO: 2383039 - RNA, 19 nt, Artificial Sequence
  Description of Artificial Sequence: Synthetic oligonucleotide
  Antisense strand to SEQ ID NO: 2383038
gaauugacaagaaugagcc

SEQ ID NO: 2383040 - RNA, 19 nt, Artificial Sequence
  Description of Artificial Sequence: Synthetic oligonucleotide
  Sense strand starting at position 196 of SEQ ID NO: 1886013
gucaauuccugaccaaaga

SEQ ID NO: 2383041 - RNA, 19 nt, Artificial Sequence
  Description of Artificial Sequence: Synthetic oligonucleotide
  Antisense strand to SEQ ID NO: 2383040
ucuuuggucaggaauugac

SEQ ID NO: 2383042 - RNA, 19 nt, Artificial Sequence
  Description of Artificial Sequence: Synthetic oligonucleotide
  Sense strand starting at position 212 of SEQ ID NO: 1886013
agaaauguccuuugaaggc

SEQ ID NO: 2383043 - RNA, 19 nt, Artificial Sequence
  Description of Artificial Sequence: Synthetic oligonucleotide
  Antisense strand to SEQ ID NO: 2383042
gccuucaaaggacauuucu

SEQ ID NO: 2383044 - RNA, 19 nt, Artificial Sequence
  Description of Artificial Sequence: Synthetic oligonucleotide
  Sense strand starting at position 669 of SEQ ID NO: 1886013
uguuuagugcuuuauagaa

SEQ ID NO: 2383045 - RNA, 19 nt, Artificial Sequence
  Description of Artificial Sequence: Synthetic oligonucleotide
  Antisense strand to SEQ ID NO: 2383044
uucuauaaagcacuaaaca

SEQ ID NO: 2383046 - RNA, 19 nt, Artificial Sequence
  Description of Artificial Sequence: Synthetic oligonucleotide
  Sense strand starting at position 730 of SEQ ID NO: 1886013
agagaaucaagugguuuaa

SEQ ID NO: 2383047 - RNA, 19 nt, Artificial Sequence
  Description of Artificial Sequence: Synthetic oligonucleotide
  Antisense strand to SEQ ID NO: 2383046
uuaaaccacuugauucucu

SEQ ID NO: 2383048 - RNA, 19 nt, Artificial Sequence
  Description of Artificial Sequence: Synthetic oligonucleotide
  Sense strand starting at position 865 of SEQ ID NO: 1886013
uccucuuuccagcaugaga

SEQ ID NO: 2383049 - RNA, 19 nt, Artificial Sequence
  Description of Artificial Sequence: Synthetic oligonucleotide
  Antisense strand to SEQ ID NO: 2383048
ucucaugcuggaaagagga

SEQ ID NO: 2383050 - RNA, 19 nt, Artificial Sequence
  Description of Artificial Sequence: Synthetic oligonucleotide
  Sense strand starting at position 867 of SEQ ID NO: 1886013
cucuuuccagcaugagaca

SEQ ID NO: 2383051 - RNA, 19 nt, Artificial Sequence
  Description of Artificial Sequence: Synthetic oligonucleotide
  Antisense strand to SEQ ID NO: 2383050
ugucucaugcuggaaagag

SEQ ID NO: 2383052 - RNA, 19 nt, Artificial Sequence
  Description of Artificial Sequence: Synthetic oligonucleotide
  Sense strand starting at position 959 of SEQ ID NO: 1886013
ggucacugugaggguuaaa

SEQ ID NO: 2383053 - RNA, 19 nt, Artificial Sequence
  Description of Artificial Sequence: Synthetic oligonucleotide
  Antisense strand to SEQ ID NO: 2383052
uuuaacccucacagugacc

SEQ ID NO: 2383054 - RNA, 19 nt, Artificial Sequence
  Description of Artificial Sequence: Synthetic oligonucleotide
  Sense strand starting at position 971 of SEQ ID NO: 1886013
gguuaaaggagguaguuau

SEQ ID NO: 2383055 - RNA, 19 nt, Artificial Sequence
  Description of Artificial Sequence: Synthetic oligonucleotide
  Antisense strand to SEQ ID NO: 2383054
auaacuaccuccuuuaacc

SEQ ID NO: 2383056 - RNA, 19 nt, Artificial Sequence
  Description of Artificial Sequence: Synthetic oligonucleotide
  Sense strand starting at position 979 of SEQ ID NO: 1886013
gagguaguuaugcaaagca

SEQ ID NO: 2383057 - RNA, 19 nt, Artificial Sequence
  Description of Artificial Sequence: Synthetic oligonucleotide
  Antisense strand to SEQ ID NO: 2383056
ugcuuugcauaacuaccuc

SEQ ID NO: 2383058 - RNA, 19 nt, Artificial Sequence
  Description of Artificial Sequence: Synthetic oligonucleotide
  Sense strand starting at position 1007 of SEQ ID NO: 1886013
gggcuugacaacugcuuga

SEQ ID NO: 2383059 - RNA, 19 nt, Artificial Sequence
  Description of Artificial Sequence: Synthetic oligonucleotide
  Antisense strand to SEQ ID NO: 2383058
ucaagcaguugucaagccc

SEQ ID NO: 2383060 - RNA, 19 nt, Artificial Sequence
  Description of Artificial Sequence: Synthetic oligonucleotide
  Sense strand starting at position 1010 of SEQ ID NO: 1886013
cuugacaacugcuugacaa

SEQ ID NO: 2383061 - RNA, 19 nt, Artificial Sequence
  Description of Artificial Sequence: Synthetic oligonucleotide
  Antisense strand to SEQ ID NO: 2383060
uugucaagcaguugucaag

SEQ ID NO: 2383062 - RNA, 19 nt, Artificial Sequence
  Description of Artificial Sequence: Synthetic oligonucleotide
  Sense strand starting at position 1011 of SEQ ID NO: 1886013
uugacaacugcuugacaag

SEQ ID NO: 2383063 - RNA, 19 nt, Artificial Sequence
  Description of Artificial Sequence: Synthetic oligonucleotide
  Antisense strand to SEQ ID NO: 2383062
cuugucaagcaguugucaa

SEQ ID NO: 2383064 - RNA, 19 nt, Artificial Sequence
  Description of Artificial Sequence: Synthetic oligonucleotide
  Sense strand starting at position 1026 of SEQ ID NO: 1886013
caagaaggguuugacaaga

SEQ ID NO: 2383065 - RNA, 19 nt, Artificial Sequence
  Description of Artificial Sequence: Synthetic oligonucleotide
  Antisense strand to SEQ ID NO: 2383064
ucuugucaaacccuucuug

SEQ ID NO: 2383066 - RNA, 19 nt, Artificial Sequence
  Description of Artificial Sequence: Synthetic oligonucleotide
  Sense strand starting at position 1190 of SEQ ID NO: 1886013
guuggaguccuggaguuuc

SEQ ID NO: 2383067 - RNA, 19 nt, Artificial Sequence
  Description of Artificial Sequence: Synthetic oligonucleotide
  Antisense strand to SEQ ID NO: 2383066
gaaacuccaggacuccaac

SEQ ID NO: 2383068 - RNA, 19 nt, Artificial Sequence
  Description of Artificial Sequence: Synthetic oligonucleotide
  Sense strand starting at position 1246 of SEQ ID NO: 1886013
ggaugugacugaguucuag

SEQ ID NO: 2383069 - RNA, 19 nt, Artificial Sequence
  Description of Artificial Sequence: Synthetic oligonucleotide
  Antisense strand to SEQ ID NO: 2383068
cuagaacucagucacaucc

SEQ ID NO: 2383070 - RNA, 19 nt, Artificial Sequence
  Description of Artificial Sequence: Synthetic oligonucleotide
  Sense strand starting at position 1290 of SEQ ID NO: 1886013
gugcaacuucugggacaug

SEQ ID NO: 2383071 - RNA, 19 nt, Artificial Sequence
  Description of Artificial Sequence: Synthetic oligonucleotide
  Antisense strand to SEQ ID NO: 2383070
caugucccagaaguugcac

SEQ ID NO: 2383072 - RNA, 19 nt, Artificial Sequence
  Description of Artificial Sequence: Synthetic oligonucleotide
  Sense strand starting at position 1595 of SEQ ID NO: 1886013
uuuggaugcccagagugaa

SEQ ID NO: 2383073 - RNA, 19 nt, Artificial Sequence
  Description of Artificial Sequence: Synthetic oligonucleotide
  Antisense strand to SEQ ID NO: 2383072
uucacucugggcauccaaa

SEQ ID NO: 2383074 - RNA, 19 nt, Artificial Sequence
  Description of Artificial Sequence: Synthetic oligonucleotide
  Sense strand starting at position 1800 of SEQ ID NO: 1886013
cgcucaagaucauuccauu

SEQ ID NO: 2383075 - RNA, 19 nt, Artificial Sequence
  Description of Artificial Sequence: Synthetic oligonucleotide
  Antisense strand to SEQ ID NO: 2383074
aauggaaugaucuugagcg

SEQ ID NO: 2383076 - RNA, 19 nt, Artificial Sequence
  Description of Artificial Sequence: Synthetic oligonucleotide
  Sense strand starting at position 2079 of SEQ ID NO: 1886013
auguuuacccgugagcaua

SEQ ID NO: 2383077 - RNA, 19 nt, Artificial Sequence
  Description of Artificial Sequence: Synthetic oligonucleotide
  Antisense strand to SEQ ID NO: 2383076
uaugcucacggguaaacau

SEQ ID NO: 2383078 - RNA, 19 nt, Artificial Sequence
  Description of Artificial Sequence: Synthetic oligonucleotide
  Sense strand starting at position 2113 of SEQ ID NO: 1886013
gguucauggugacuaugaa

SEQ ID NO: 2383079 - RNA, 19 nt, Artificial Sequence
  Description of Artificial Sequence: Synthetic oligonucleotide
  Antisense strand to SEQ ID NO: 2383078
uucauagucaccaugaacc

SEQ ID NO: 2383080 - RNA, 19 nt, Artificial Sequence
  Description of Artificial Sequence: Synthetic oligonucleotide
  Sense strand starting at position 2300 of SEQ ID NO: 1886013
uuucgaauggauggaauua

SEQ ID NO: 2383081 - RNA, 19 nt, Artificial Sequence
  Description of Artificial Sequence: Synthetic oligonucleotide
  Antisense strand to SEQ ID NO: 2383080
uaauuccauccauucgaaa

SEQ ID NO: 2383082 - RNA, 19 nt, Artificial Sequence
  Description of Artificial Sequence: Synthetic oligonucleotide
  Sense strand starting at position 2327 of SEQ ID NO: 1886013
acuucuauuuaccagaguu

SEQ ID NO: 2383083 - RNA, 19 nt, Artificial Sequence
  Description of Artificial Sequence: Synthetic oligonucleotide
  Antisense strand to SEQ ID NO: 2383082
aacucugguaaauagaagu

SEQ ID NO: 2383084 - RNA, 19 nt, Artificial Sequence
  Description of Artificial Sequence: Synthetic oligonucleotide
  Sense strand starting at position 2553 of SEQ ID NO: 1886013
ccagcaaugucuccaagac

SEQ ID NO: 2383085 - RNA, 19 nt, Artificial Sequence
  Description of Artificial Sequence: Synthetic oligonucleotide
  Antisense strand to SEQ ID NO: 2383084
gucuuggagacauugcugg

SEQ ID NO: 2383086 - RNA, 19 nt, Artificial Sequence
  Description of Artificial Sequence: Synthetic oligonucleotide
  Sense strand starting at position 2677 of SEQ ID NO: 1886013
cuuugugcuaugugauaag

SEQ ID NO: 2383087 - RNA, 19 nt, Artificial Sequence
  Description of Artificial Sequence: Synthetic oligonucleotide
  Antisense strand to SEQ ID NO: 2383086
cuuaucacauagcacaaag

SEQ ID NO: 2383088 - RNA, 19 nt, Artificial Sequence
  Description of Artificial Sequence: Synthetic oligonucleotide
  Sense strand starting at position 2691 of SEQ ID NO: 1886013
auaagugugcuuuaucuca

SEQ ID NO: 2383089 - RNA, 19 nt, Artificial Sequence
  Description of Artificial Sequence: Synthetic oligonucleotide
  Antisense strand to SEQ ID NO: 2383088
ugagauaaagcacacuuau

SEQ ID NO: 2383090 - RNA, 19 nt, Artificial Sequence
  Description of Artificial Sequence: Synthetic oligonucleotide
  Sense strand starting at position 2699 of SEQ ID NO: 1886013
gcuuuaucucaaugaagca

SEQ ID NO: 2383091 - RNA, 19 nt, Artificial Sequence
  Description of Artificial Sequence: Synthetic oligonucleotide
  Antisense strand to SEQ ID NO: 2383090
ugcuucauugagauaaagc

SEQ ID NO: 2383092 - RNA, 19 nt, Artificial Sequence
  Description of Artificial Sequence: Synthetic oligonucleotide
  Sense strand starting at position 3140 of SEQ ID NO: 1886013
gagugagcgagaggcauua

SEQ ID NO: 2383093 - RNA, 19 nt, Artificial Sequence
  Description of Artificial Sequence: Synthetic oligonucleotide
  Antisense strand to SEQ ID NO: 2383092
uaaugccucucgcucacuc

SEQ ID NO: 2383094 - RNA, 19 nt, Artificial Sequence
  Description of Artificial Sequence: Synthetic oligonucleotide
  Sense strand starting at position 3153 of SEQ ID NO: 1886013
gcauuaggauggucacuga

SEQ ID NO: 2383095 - RNA, 19 nt, Artificial Sequence
  Description of Artificial Sequence: Synthetic oligonucleotide
  Antisense strand to SEQ ID NO: 2383094
ucagugaccauccuaaugc

SEQ ID NO: 2383096 - RNA, 19 nt, Artificial Sequence
  Description of Artificial Sequence: Synthetic oligonucleotide
  Sense strand starting at position 3238 of SEQ ID NO: 1886013
aggugacagcaaugaacaa

SEQ ID NO: 2383097 - RNA, 19 nt, Artificial Sequence
  Description of Artificial Sequence: Synthetic oligonucleotide
  Antisense strand to SEQ ID NO: 2383096
uuguucauugcugucaccu

SEQ ID NO: 2383098 - RNA, 19 nt, Artificial Sequence
  Description of Artificial Sequence: Synthetic oligonucleotide
  Sense strand starting at position 3276 of SEQ ID NO: 1886013
gggccauucuuaucuugga

SEQ ID NO: 2383099 - RNA, 19 nt, Artificial Sequence
  Description of Artificial Sequence: Synthetic oligonucleotide
  Antisense strand to SEQ ID NO: 2383098
uccaagauaagaauggccc

SEQ ID NO: 2383100 - RNA, 19 nt, Artificial Sequence
  Description of Artificial Sequence: Synthetic oligonucleotide
  Sense strand starting at position 3676 of SEQ ID NO: 1886013
gacuuacagcuuuguggaa

SEQ ID NO: 2383101 - RNA, 19 nt, Artificial Sequence
  Description of Artificial Sequence: Synthetic oligonucleotide
  Antisense strand to SEQ ID NO: 2383100
uuccacaaagcuguaaguc

SEQ ID NO: 2383102 - RNA, 19 nt, Artificial Sequence
  Description of Artificial Sequence: Synthetic oligonucleotide
  Sense strand starting at position 3719 of SEQ ID NO: 1886013
ggguguccuuugcuaauaa

SEQ ID NO: 2383103 - RNA, 19 nt, Artificial Sequence
  Description of Artificial Sequence: Synthetic oligonucleotide
  Antisense strand to SEQ ID NO: 2383102
uuauuagcaaaggacaccc

SEQ ID NO: 2383104 - RNA, 19 nt, Artificial Sequence
  Description of Artificial Sequence: Synthetic oligonucleotide
  Sense strand starting at position 3850 of SEQ ID NO: 1886013
ccaucuauagauggcagua

SEQ ID NO: 2383105 - RNA, 19 nt, Artificial Sequence
  Description of Artificial Sequence: Synthetic oligonucleotide
  Antisense strand to SEQ ID NO: 2383104
uacugccaucuauagaugg

SEQ ID NO: 2383106 - RNA, 19 nt, Artificial Sequence
  Description of Artificial Sequence: Synthetic oligonucleotide
  Sense strand starting at position 317 of SEQ ID NO: 1886014
gguauacucgccuccuguu

SEQ ID NO: 2383107 - RNA, 19 nt, Artificial Sequence
  Description of Artificial Sequence: Synthetic oligonucleotide
  Antisense strand to SEQ ID NO: 2383106
aacaggaggcgaguauacc

SEQ ID NO: 2383108 - RNA, 19 nt, Artificial Sequence
  Description of Artificial Sequence: Synthetic oligonucleotide
  Sense strand starting at position 431 of SEQ ID NO: 1886014
cuaggaguucccugaacuu

SEQ ID NO: 2383109 - RNA, 19 nt, Artificial Sequence
  Description of Artificial Sequence: Synthetic oligonucleotide
  Antisense strand to SEQ ID NO: 2383108
aaguucagggaacuccuag

SEQ ID NO: 2383110 - RNA, 19 nt, Artificial Sequence
  Description of Artificial Sequence: Synthetic oligonucleotide
  Sense strand starting at position 510 of SEQ ID NO: 1886014
ucaugacuucuuggaacuu

SEQ ID NO: 2383111 - RNA, 19 nt, Artificial Sequence
  Description of Artificial Sequence: Synthetic oligonucleotide
  Antisense strand to SEQ ID NO: 2383110
aaguuccaagaagucauga

SEQ ID NO: 2383112 - RNA, 19 nt, Artificial Sequence
  Description of Artificial Sequence: Synthetic oligonucleotide
  Sense strand starting at position 519 of SEQ ID NO: 1886014
cuuggaacuugucuuaaga

SEQ ID NO: 2383113 - RNA, 19 nt, Artificial Sequence
  Description of Artificial Sequence: Synthetic oligonucleotide
  Antisense strand to SEQ ID NO: 2383112
ucuuaagacaaguuccaag

SEQ ID NO: 2383114 - RNA, 19 nt, Artificial Sequence
  Description of Artificial Sequence: Synthetic oligonucleotide
  Sense strand starting at position 567 of SEQ ID NO: 1886014
uguagaaauguuggaaagu

SEQ ID NO: 2383115 - RNA, 19 nt, Artificial Sequence
  Description of Artificial Sequence: Synthetic oligonucleotide
  Antisense strand to SEQ ID NO: 2383114
acuuuccaacauuucuaca

SEQ ID NO: 2383116 - RNA, 19 nt, Artificial Sequence
  Description of Artificial Sequence: Synthetic oligonucleotide
  Sense strand starting at position 576 of SEQ ID NO: 1886014
guuggaaaguguuuauaau

SEQ ID NO: 2383117 - RNA, 19 nt, Artificial Sequence
  Description of Artificial Sequence: Synthetic oligonucleotide
  Antisense strand to SEQ ID NO: 2383116
auuauaaacacuuuccaac

SEQ ID NO: 2383118 - RNA, 19 nt, Artificial Sequence
  Description of Artificial Sequence: Synthetic oligonucleotide
  Sense strand starting at position 577 of SEQ ID NO: 1886014
uuggaaaguguuuauaauc

SEQ ID NO: 2383119 - RNA, 19 nt, Artificial Sequence
  Description of Artificial Sequence: Synthetic oligonucleotide
  Antisense strand to SEQ ID NO: 2383118
gauuauaaacacuuuccaa

SEQ ID NO: 2383120 - RNA, 19 nt, Artificial Sequence
  Description of Artificial Sequence: Synthetic oligonucleotide
  Sense strand starting at position 656 of SEQ ID NO: 1886014
gguauauuucuuugcugac

SEQ ID NO: 2383121 - RNA, 19 nt, Artificial Sequence
  Description of Artificial Sequence: Synthetic oligonucleotide
  Antisense strand to SEQ ID NO: 2383120
gucagcaaagaaauauacc

SEQ ID NO: 2383122 - RNA, 19 nt, Artificial Sequence
  Description of Artificial Sequence: Synthetic oligonucleotide
  Sense strand starting at position 702 of SEQ ID NO: 1886014
aaugaagagucauuaucug

SEQ ID NO: 2383123 - RNA, 19 nt, Artificial Sequence
  Description of Artificial Sequence: Synthetic oligonucleotide
  Antisense strand to SEQ ID NO: 2383122
cagauaaugacucuucauu

SEQ ID NO: 2383124 - RNA, 19 nt, Artificial Sequence
  Description of Artificial Sequence: Synthetic oligonucleotide
  Sense strand starting at position 913 of SEQ ID NO: 1886014
ggaguucgaggcuagaauu

SEQ ID NO: 2383125 - RNA, 19 nt, Artificial Sequence
  Description of Artificial Sequence: Synthetic oligonucleotide
  Antisense strand to SEQ ID NO: 2383124
aauucuagccucgaacucc

SEQ ID NO: 2383126 - RNA, 19 nt, Artificial Sequence
  Description of Artificial Sequence: Synthetic oligonucleotide
  Sense strand starting at position 1162 of SEQ ID NO: 1886014
uccagucuuggccagacau

SEQ ID NO: 2383127 - RNA, 19 nt, Artificial Sequence
  Description of Artificial Sequence: Synthetic oligonucleotide
  Antisense strand to SEQ ID NO: 2383126
augucuggccaagacugga

SEQ ID NO: 2383128 - RNA, 19 nt, Artificial Sequence
  Description of Artificial Sequence: Synthetic oligonucleotide
  Sense strand starting at position 1193 of SEQ ID NO: 1886014
aucagacucuggguggaau

SEQ ID NO: 2383129 - RNA, 19 nt, Artificial Sequence
  Description of Artificial Sequence: Synthetic oligonucleotide
  Antisense strand to SEQ ID NO: 2383128
auuccacccagagucugau

SEQ ID NO: 2383130 - RNA, 19 nt, Artificial Sequence
  Description of Artificial Sequence: Synthetic oligonucleotide
  Sense strand starting at position 1282 of SEQ ID NO: 1886014
uuccuucuuguugggacaa

SEQ ID NO: 2383131 - RNA, 19 nt, Artificial Sequence
  Description of Artificial Sequence: Synthetic oligonucleotide
  Antisense strand to SEQ ID NO: 2383130
uugucccaacaagaaggaa

SEQ ID NO: 2383132 - RNA, 19 nt, Artificial Sequence
  Description of Artificial Sequence: Synthetic oligonucleotide
  Sense strand starting at position 1295 of SEQ ID NO: 1886014
ggacaauugcagcaaguua

SEQ ID NO: 2383133 - RNA, 19 nt, Artificial Sequence
  Description of Artificial Sequence: Synthetic oligonucleotide
  Antisense strand to SEQ ID NO: 2383132
uaacuugcugcaauugucc

SEQ ID NO: 2383134 - RNA, 19 nt, Artificial Sequence
  Description of Artificial Sequence: Synthetic oligonucleotide
  Sense strand starting at position 1395 of SEQ ID NO: 1886014
accuauuaugaugggacuu

SEQ ID NO: 2383135 - RNA, 19 nt, Artificial Sequence
  Description of Artificial Sequence: Synthetic oligonucleotide
  Antisense strand to SEQ ID NO: 2383134
aagucccaucauaauaggu

SEQ ID NO: 2383136 - RNA, 19 nt, Artificial Sequence
  Description of Artificial Sequence: Synthetic oligonucleotide
  Sense strand starting at position 1435 of SEQ ID NO: 1886014
uugacuucuuuccuacgaa

SEQ ID NO: 2383137 - RNA, 19 nt, Artificial Sequence
  Description of Artificial Sequence: Synthetic oligonucleotide
  Antisense strand to SEQ ID NO: 2383136
uucguaggaaagaagucaa

SEQ ID NO: 2383138 - RNA, 19 nt, Artificial Sequence
  Description of Artificial Sequence: Synthetic oligonucleotide
  Sense strand starting at position 1622 of SEQ ID NO: 1886014
cugggauuaaguggcauaa

SEQ ID NO: 2383139 - RNA, 19 nt, Artificial Sequence
  Description of Artificial Sequence: Synthetic oligonucleotide
  Antisense strand to SEQ ID NO: 2383138
uuaugccacuuaaucccag

SEQ ID NO: 2383140 - RNA, 19 nt, Artificial Sequence
  Description of Artificial Sequence: Synthetic oligonucleotide
  Sense strand starting at position 1957 of SEQ ID NO: 1886014
agaaguaacucaccagcua

SEQ ID NO: 2383141 - RNA, 19 nt, Artificial Sequence
  Description of Artificial Sequence: Synthetic oligonucleotide
  Antisense strand to SEQ ID NO: 2383140
uagcuggugaguuacuucu

SEQ ID NO: 2383142 - RNA, 19 nt, Artificial Sequence
  Description of Artificial Sequence: Synthetic oligonucleotide
  Sense strand starting at position 2234 of SEQ ID NO: 1886014
cuacaaagccaucaguguu

SEQ ID NO: 2383143 - RNA, 19 nt, Artificial Sequence
  Description of Artificial Sequence: Synthetic oligonucleotide
  Antisense strand to SEQ ID NO: 2383142
aacacugauggcuuuguag

SEQ ID NO: 2383144 - RNA, 19 nt, Artificial Sequence
  Description of Artificial Sequence: Synthetic oligonucleotide
  Sense strand starting at position 2291 of SEQ ID NO: 1886014
ggcacuagagccuaaacaa

SEQ ID NO: 2383145 - RNA, 19 nt, Artificial Sequence
  Description of Artificial Sequence: Synthetic oligonucleotide
  Antisense strand to SEQ ID NO: 2383144
uuguuuaggcucuagugcc

SEQ ID NO: 2383146 - RNA, 19 nt, Artificial Sequence
  Description of Artificial Sequence: Synthetic oligonucleotide
  Sense strand starting at position 2474 of SEQ ID NO: 1886014
caugaauuccugcaauggu

SEQ ID NO: 2383147 - RNA, 19 nt, Artificial Sequence
  Description of Artificial Sequence: Synthetic oligonucleotide
  Antisense strand to SEQ ID NO: 2383146
accauugcaggaauucaug

SEQ ID NO: 2383148 - RNA, 19 nt, Artificial Sequence
  Description of Artificial Sequence: Synthetic oligonucleotide
  Sense strand starting at position 2477 of SEQ ID NO: 1886014
gaauuccugcaaugguaga

SEQ ID NO: 2383149 - RNA, 19 nt, Artificial Sequence
  Description of Artificial Sequence: Synthetic oligonucleotide
  Antisense strand to SEQ ID NO: 2383148
ucuaccauugcaggaauuc

SEQ ID NO: 2383150 - RNA, 19 nt, Artificial Sequence
  Description of Artificial Sequence: Synthetic oligonucleotide
  Sense strand starting at position 2656 of SEQ ID NO: 1886014
caguaauaagacuggguuu

SEQ ID NO: 2383151 - RNA, 19 nt, Artificial Sequence
  Description of Artificial Sequence: Synthetic oligonucleotide
  Antisense strand to SEQ ID NO: 2383150
aaacccagucuuauuacug

SEQ ID NO: 2383152 - RNA, 19 nt, Artificial Sequence
  Description of Artificial Sequence: Synthetic oligonucleotide
  Sense strand starting at position 2659 of SEQ ID NO: 1886014
uaauaagacuggguuuguu

SEQ ID NO: 2383153 - RNA, 19 nt, Artificial Sequence
  Description of Artificial Sequence: Synthetic oligonucleotide
  Antisense strand to SEQ ID NO: 2383152
aacaaacccagucuuauua

SEQ ID NO: 2383154 - RNA, 19 nt, Artificial Sequence
  Description of Artificial Sequence: Synthetic oligonucleotide
  Sense strand starting at position 2671 of SEQ ID NO: 1886014
guuuguuaugaccaaaguu

SEQ ID NO: 2383155 - RNA, 19 nt, Artificial Sequence
  Description of Artificial Sequence: Synthetic oligonucleotide
  Antisense strand to SEQ ID NO: 2383154
aacuuuggucauaacaaac

SEQ ID NO: 2383156 - RNA, 19 nt, Artificial Sequence
  Description of Artificial Sequence: Synthetic oligonucleotide
  Sense strand starting at position 2728 of SEQ ID NO: 1886014
ucuggaaaucucuacucgu

SEQ ID NO: 2383157 - RNA, 19 nt, Artificial Sequence
  Description of Artificial Sequence: Synthetic oligonucleotide
  Antisense strand to SEQ ID NO: 2383156
acgaguagagauuuccaga

SEQ ID NO: 2383158 - RNA, 19 nt, Artificial Sequence
  Description of Artificial Sequence: Synthetic oligonucleotide
  Sense strand starting at position 2772 of SEQ ID NO: 1886014
gauggaguugcccaaacca

SEQ ID NO: 2383159 - RNA, 19 nt, Artificial Sequence
  Description of Artificial Sequence: Synthetic oligonucleotide
  Antisense strand to SEQ ID NO: 2383158
ugguuugggcaacuccauc

SEQ ID NO: 2383160 - RNA, 19 nt, Artificial Sequence
  Description of Artificial Sequence: Synthetic oligonucleotide
  Sense strand starting at position 2827 of SEQ ID NO: 1886014
caguaaggauguuuccaca

SEQ ID NO: 2383161 - RNA, 19 nt, Artificial Sequence
  Description of Artificial Sequence: Synthetic oligonucleotide
  Antisense strand to SEQ ID NO: 2383160
uguggaaacauccuuacug

SEQ ID NO: 2383162 - RNA, 19 nt, Artificial Sequence
  Description of Artificial Sequence: Synthetic oligonucleotide
  Sense strand starting at position 2860 of SEQ ID NO: 1886014
uugacauaguacucauuau

SEQ ID NO: 2383163 - RNA, 19 nt, Artificial Sequence
  Description of Artificial Sequence: Synthetic oligonucleotide
  Antisense strand to SEQ ID NO: 2383162
auaaugaguacuaugucaa

SEQ ID NO: 2383164 - RNA, 19 nt, Artificial Sequence
  Description of Artificial Sequence: Synthetic oligonucleotide
  Sense strand starting at position 2901 of SEQ ID NO: 1886014
auaugccuagcugauuaaa

SEQ ID NO: 2383165 - RNA, 19 nt, Artificial Sequence
  Description of Artificial Sequence: Synthetic oligonucleotide
  Antisense strand to SEQ ID NO: 2383164
uuuaaucagcuaggcauau

SEQ ID NO: 2383166 - RNA, 19 nt, Artificial Sequence
  Description of Artificial Sequence: Synthetic oligonucleotide
  Sense strand starting at position 2944 of SEQ ID NO: 1886014
ggguauacuuacucuagga

SEQ ID NO: 2383167 - RNA, 19 nt, Artificial Sequence
  Description of Artificial Sequence: Synthetic oligonucleotide
  Antisense strand to SEQ ID NO: 2383166
uccuagaguaaguauaccc

SEQ ID NO: 2383168 - RNA, 19 nt, Artificial Sequence
  Description of Artificial Sequence: Synthetic oligonucleotide
  Sense strand starting at position 3520 of SEQ ID NO: 1886014
cugugaauacacuaugguu

SEQ ID NO: 2383169 - RNA, 19 nt, Artificial Sequence
  Description of Artificial Sequence: Synthetic oligonucleotide
  Antisense strand to SEQ ID NO: 2383168
aaccauaguguauucacag

SEQ ID NO: 2383170 - RNA, 19 nt, Artificial Sequence
  Description of Artificial Sequence: Synthetic oligonucleotide
  Sense strand starting at position 3522 of SEQ ID NO: 1886014
gugaauacacuaugguuua

SEQ ID NO: 2383171 - RNA, 19 nt, Artificial Sequence
  Description of Artificial Sequence: Synthetic oligonucleotide
  Antisense strand to SEQ ID NO: 2383170
uaaaccauaguguauucac

SEQ ID NO: 2383172 - RNA, 19 nt, Artificial Sequence
  Description of Artificial Sequence: Synthetic oligonucleotide
  Sense strand starting at position 3600 of SEQ ID NO: 1886014
ggaccaaaucccugaggcu

SEQ ID NO: 2383173 - RNA, 19 nt, Artificial Sequence
  Description of Artificial Sequence: Synthetic oligonucleotide
  Antisense strand to SEQ ID NO: 2383172
agccucagggauuuggucc

SEQ ID NO: 2383174 - RNA, 19 nt, Artificial Sequence
  Description of Artificial Sequence: Synthetic oligonucleotide
  Sense strand starting at position 3727 of SEQ ID NO: 1886014
ugacauugugaauaaugca

SEQ ID NO: 2383175 - RNA, 19 nt, Artificial Sequence
  Description of Artificial Sequence: Synthetic oligonucleotide
  Antisense strand to SEQ ID NO: 2383174
ugcauuauucacaauguca

SEQ ID NO: 2383176 - RNA, 19 nt, Artificial Sequence
  Description of Artificial Sequence: Synthetic oligonucleotide
  Sense strand starting at position 3760 of SEQ ID NO: 1886014
acacuauugcaccaagguu

SEQ ID NO: 2383177 - RNA, 19 nt, Artificial Sequence
  Description of Artificial Sequence: Synthetic oligonucleotide
  Antisense strand to SEQ ID NO: 2383176
aaccuuggugcaauagugu

SEQ ID NO: 2383178 - RNA, 19 nt, Artificial Sequence
  Description of Artificial Sequence: Synthetic oligonucleotide
  Sense strand starting at position 3937 of SEQ ID NO: 1886014
agacaagagucaucauggu

SEQ ID NO: 2383179 - RNA, 19 nt, Artificial Sequence
  Description of Artificial Sequence: Synthetic oligonucleotide
  Antisense strand to SEQ ID NO: 2383178
accaugaugacucuugucu

SEQ ID NO: 2383180 - RNA, 19 nt, Artificial Sequence
  Description of Artificial Sequence: Synthetic oligonucleotide
  Sense strand starting at position 3941 of SEQ ID NO: 1886014
aagagucaucaugguaacu

SEQ ID NO: 2383181 - RNA, 19 nt, Artificial Sequence
  Description of Artificial Sequence: Synthetic oligonucleotide
  Antisense strand to SEQ ID NO: 2383180
aguuaccaugaugacucuu

SEQ ID NO: 2383182 - RNA, 19 nt, Artificial Sequence
  Description of Artificial Sequence: Synthetic oligonucleotide
  Sense strand starting at position 3965 of SEQ ID NO: 1886014
cagguaugcagugagaauu

SEQ ID NO: 2383183 - RNA, 19 nt, Artificial Sequence
  Description of Artificial Sequence: Synthetic oligonucleotide
  Antisense strand to SEQ ID NO: 2383182
aauucucacugcauaccug

SEQ ID NO: 2383184 - RNA, 19 nt, Artificial Sequence
  Description of Artificial Sequence: Synthetic oligonucleotide
  Sense strand starting at position 3982 of SEQ ID NO: 1886014
uuuacaaucccuuguugga

SEQ ID NO: 2383185 - RNA, 19 nt, Artificial Sequence
  Description of Artificial Sequence: Synthetic oligonucleotide
  Antisense strand to SEQ ID NO: 2383184
uccaacaagggauuguaaa

SEQ ID NO: 2383186 - RNA, 19 nt, Artificial Sequence
  Description of Artificial Sequence: Synthetic oligonucleotide
  Sense strand starting at position 563 of SEQ ID NO: 1886015
ccaguuccucaccauguau

SEQ ID NO: 2383187 - RNA, 19 nt, Artificial Sequence
  Description of Artificial Sequence: Synthetic oligonucleotide
  Antisense strand to SEQ ID NO: 2383186
auacauggugaggaacugg

SEQ ID NO: 2383188 - RNA, 19 nt, Artificial Sequence
  Description of Artificial Sequence: Synthetic oligonucleotide
  Sense strand starting at position 789 of SEQ ID NO: 1886015
gaacucacgcuggaaguua

SEQ ID NO: 2383189 - RNA, 19 nt, Artificial Sequence
  Description of Artificial Sequence: Synthetic oligonucleotide
  Antisense strand to SEQ ID NO: 2383188
uaacuuccagcgugaguuc

SEQ ID NO: 2383190 - RNA, 19 nt, Artificial Sequence
  Description of Artificial Sequence: Synthetic oligonucleotide
  Sense strand starting at position 2638 of SEQ ID NO: 1886015
cccuacuccgaauagaguu

SEQ ID NO: 2383191 - RNA, 19 nt, Artificial Sequence
  Description of Artificial Sequence: Synthetic oligonucleotide
  Antisense strand to SEQ ID NO: 2383190
aacucuauucggaguaggg

SEQ ID NO: 2383192 - RNA, 19 nt, Artificial Sequence
  Description of Artificial Sequence: Synthetic oligonucleotide
  Sense strand starting at position 3627 of SEQ ID NO: 1886016
uguguuguuuaguagagau

SEQ ID NO: 2383193 - RNA, 19 nt, Artificial Sequence
  Description of Artificial Sequence: Synthetic oligonucleotide
  Antisense strand to SEQ ID NO: 2383192
aucucuacuaaacaacaca

SEQ ID NO: 2383194 - RNA, 19 nt, Artificial Sequence
  Description of Artificial Sequence: Synthetic oligonucleotide
  Sense strand starting at position 3528 of SEQ ID NO: 1886017
uguguuguuuaguagagau

SEQ ID NO: 2383195 - RNA, 19 nt, Artificial Sequence
  Description of Artificial Sequence: Synthetic oligonucleotide
  Antisense strand to SEQ ID NO: 2383194
aucucuacuaaacaacaca

SEQ ID NO: 2383196 - RNA, 19 nt, Artificial Sequence
  Description of Artificial Sequence: Synthetic oligonucleotide
  Sense strand starting at position 78 of SEQ ID NO: 1886018
gcaggucauccacaacaau

SEQ ID NO: 2383197 - RNA, 19 nt, Artificial Sequence
  Description of Artificial Sequence: Synthetic oligonucleotide
  Antisense strand to SEQ ID NO: 2383196
auuguuguggaugaccugc

SEQ ID NO: 2383198 - RNA, 19 nt, Artificial Sequence
  Description of Artificial Sequence: Synthetic oligonucleotide
  Sense strand starting at position 177 of SEQ ID NO: 1886018
cuuagcaauccaggugaca

SEQ ID NO: 2383199 - RNA, 19 nt, Artificial Sequence
  Description of Artificial Sequence: Synthetic oligonucleotide
  Antisense strand to SEQ ID NO: 2383198
ugucaccuggauugcuaag

SEQ ID NO: 2383200 - RNA, 19 nt, Artificial Sequence
  Description of Artificial Sequence: Synthetic oligonucleotide
  Sense strand starting at position 236 of SEQ ID NO: 1886018
agaucauaguuucucuaga

SEQ ID NO: 2383201 - RNA, 19 nt, Artificial Sequence
  Description of Artificial Sequence: Synthetic oligonucleotide
  Antisense strand to SEQ ID NO: 2383200
ucuagagaaacuaugaucu

SEQ ID NO: 2383202 - RNA, 19 nt, Artificial Sequence
  Description of Artificial Sequence: Synthetic oligonucleotide
  Sense strand starting at position 241 of SEQ ID NO: 1886018
auaguuucucuagaaucgu

SEQ ID NO: 2383203 - RNA, 19 nt, Artificial Sequence
  Description of Artificial Sequence: Synthetic oligonucleotide
  Antisense strand to SEQ ID NO: 2383202
acgauucuagagaaacuau

SEQ ID NO: 2383204 - RNA, 19 nt, Artificial Sequence
  Description of Artificial Sequence: Synthetic oligonucleotide
  Sense strand starting at position 398 of SEQ ID NO: 1886018
gugggcuuccaagaaccau

SEQ ID NO: 2383205 - RNA, 19 nt, Artificial Sequence
  Description of Artificial Sequence: Synthetic oligonucleotide
  Antisense strand to SEQ ID NO: 2383204
augguucuuggaagcccac

SEQ ID NO: 2383206 - RNA, 19 nt, Artificial Sequence
  Description of Artificial Sequence: Synthetic oligonucleotide
  Sense strand starting at position 427 of SEQ ID NO: 1886018
accucaaguucuccaguca

SEQ ID NO: 2383207 - RNA, 19 nt, Artificial Sequence
  Description of Artificial Sequence: Synthetic oligonucleotide
  Antisense strand to SEQ ID NO: 2383206
ugacuggagaacuugaggu

SEQ ID NO: 2383208 - RNA, 19 nt, Artificial Sequence
  Description of Artificial Sequence: Synthetic oligonucleotide
  Sense strand starting at position 428 of SEQ ID NO: 1886018
ccucaaguucuccagucau

SEQ ID NO: 2383209 - RNA, 19 nt, Artificial Sequence
  Description of Artificial Sequence: Synthetic oligonucleotide
  Antisense strand to SEQ ID NO: 2383208
augacuggagaacuugagg

SEQ ID NO: 2383210 - RNA, 19 nt, Artificial Sequence
  Description of Artificial Sequence: Synthetic oligonucleotide
  Sense strand starting at position 505 of SEQ ID NO: 1886018
gcggccaucccuuaaggaa

SEQ ID NO: 2383211 - RNA, 19 nt, Artificial Sequence
  Description of Artificial Sequence: Synthetic oligonucleotide
  Antisense strand to SEQ ID NO: 2383210
uuccuuaagggauggccgc

SEQ ID NO: 2383212 - RNA, 19 nt, Artificial Sequence
  Description of Artificial Sequence: Synthetic oligonucleotide
  Sense strand starting at position 758 of SEQ ID NO: 1886018
ggaugacuggcccgucaga

SEQ ID NO: 2383213 - RNA, 19 nt, Artificial Sequence
  Description of Artificial Sequence: Synthetic oligonucleotide
  Antisense strand to SEQ ID NO: 2383212
ucugacgggccagucaucc

SEQ ID NO: 2383214 - RNA, 19 nt, Artificial Sequence
  Description of Artificial Sequence: Synthetic oligonucleotide
  Sense strand starting at position 767 of SEQ ID NO: 1886018
gcccgucagaaucaugaau

SEQ ID NO: 2383215 - RNA, 19 nt, Artificial Sequence
  Description of Artificial Sequence: Synthetic oligonucleotide
  Antisense strand to SEQ ID NO: 2383214
auucaugauucugacgggc

SEQ ID NO: 2383216 - RNA, 19 nt, Artificial Sequence
  Description of Artificial Sequence: Synthetic oligonucleotide
  Sense strand starting at position 798 of SEQ ID NO: 1886018
cuguguguuccagggaaga

SEQ ID NO: 2383217 - RNA, 19 nt, Artificial Sequence
  Description of Artificial Sequence: Synthetic oligonucleotide
  Antisense strand to SEQ ID NO: 2383216
ucuucccuggaacacacag

SEQ ID NO: 2383218 - RNA, 19 nt, Artificial Sequence
  Description of Artificial Sequence: Synthetic oligonucleotide
  Sense strand starting at position 858 of SEQ ID NO: 1886018
ggccuaggugggcaagaau

SEQ ID NO: 2383219 - RNA, 19 nt, Artificial Sequence
  Description of Artificial Sequence: Synthetic oligonucleotide
  Antisense strand to SEQ ID NO: 2383218
auucuugcccaccuaggcc

SEQ ID NO: 2383220 - RNA, 19 nt, Artificial Sequence
  Description of Artificial Sequence: Synthetic oligonucleotide
  Sense strand starting at position 1019 of SEQ ID NO: 1886018
gagacuuggcucugguauu

SEQ ID NO: 2383221 - RNA, 19 nt, Artificial Sequence
  Description of Artificial Sequence: Synthetic oligonucleotide
  Antisense strand to SEQ ID NO: 2383220
aauaccagagccaagucuc

SEQ ID NO: 2383222 - RNA, 19 nt, Artificial Sequence
  Description of Artificial Sequence: Synthetic oligonucleotide
  Sense strand starting at position 1148 of SEQ ID NO: 1886018
ugcucagugguauaaagca

SEQ ID NO: 2383223 - RNA, 19 nt, Artificial Sequence
  Description of Artificial Sequence: Synthetic oligonucleotide
  Antisense strand to SEQ ID NO: 2383222
ugcuuuauaccacugagca

SEQ ID NO: 2383224 - RNA, 19 nt, Artificial Sequence
  Description of Artificial Sequence: Synthetic oligonucleotide
  Sense strand starting at position 1153 of SEQ ID NO: 1886018
agugguauaaagcaaguga

SEQ ID NO: 2383225 - RNA, 19 nt, Artificial Sequence
  Description of Artificial Sequence: Synthetic oligonucleotide
  Antisense strand to SEQ ID NO: 2383224
ucacuugcuuuauaccacu

SEQ ID NO: 2383226 - RNA, 19 nt, Artificial Sequence
  Description of Artificial Sequence: Synthetic oligonucleotide
  Sense strand starting at position 1193 of SEQ ID NO: 1886018
ucaggauucugcuugucca

SEQ ID NO: 2383227 - RNA, 19 nt, Artificial Sequence
  Description of Artificial Sequence: Synthetic oligonucleotide
  Antisense strand to SEQ ID NO: 2383226
uggacaagcagaauccuga

SEQ ID NO: 2383228 - RNA, 19 nt, Artificial Sequence
  Description of Artificial Sequence: Synthetic oligonucleotide
  Sense strand starting at position 1194 of SEQ ID NO: 1886018
caggauucugcuuguccaa

SEQ ID NO: 2383229 - RNA, 19 nt, Artificial Sequence
  Description of Artificial Sequence: Synthetic oligonucleotide
  Antisense strand to SEQ ID NO: 2383228
uuggacaagcagaauccug

SEQ ID NO: 2383230 - RNA, 19 nt, Artificial Sequence
  Description of Artificial Sequence: Synthetic oligonucleotide
  Sense strand starting at position 1196 of SEQ ID NO: 1886018
ggauucugcuuguccaaca

SEQ ID NO: 2383231 - RNA, 19 nt, Artificial Sequence
  Description of Artificial Sequence: Synthetic oligonucleotide
  Antisense strand to SEQ ID NO: 2383230
uguuggacaagcagaaucc

SEQ ID NO: 2383232 - RNA, 19 nt, Artificial Sequence
  Description of Artificial Sequence: Synthetic oligonucleotide
  Sense strand starting at position 1201 of SEQ ID NO: 1886018
cugcuuguccaacaucaga

SEQ ID NO: 2383233 - RNA, 19 nt, Artificial Sequence
  Description of Artificial Sequence: Synthetic oligonucleotide
  Antisense strand to SEQ ID NO: 2383232
ucugauguuggacaagcag

SEQ ID NO: 2383234 - RNA, 19 nt, Artificial Sequence
  Description of Artificial Sequence: Synthetic oligonucleotide
  Sense strand starting at position 1281 of SEQ ID NO: 1886018
agcaucuuaccauggcuua

SEQ ID NO: 2383235 - RNA, 19 nt, Artificial Sequence
  Description of Artificial Sequence: Synthetic oligonucleotide
  Antisense strand to SEQ ID NO: 2383234
uaagccaugguaagaugcu

SEQ ID NO: 2383236 - RNA, 19 nt, Artificial Sequence
  Description of Artificial Sequence: Synthetic oligonucleotide
  Sense strand starting at position 1367 of SEQ ID NO: 1886018
gcccucugccuggaaaucu

SEQ ID NO: 2383237 - RNA, 19 nt, Artificial Sequence
  Description of Artificial Sequence: Synthetic oligonucleotide
  Antisense strand to SEQ ID NO: 2383236
agauuuccaggcagagggc

SEQ ID NO: 2383238 - RNA, 19 nt, Artificial Sequence
  Description of Artificial Sequence: Synthetic oligonucleotide
  Sense strand starting at position 1614 of SEQ ID NO: 1886018
guuuaaacaucucuggaag

SEQ ID NO: 2383239 - RNA, 19 nt, Artificial Sequence
  Description of Artificial Sequence: Synthetic oligonucleotide
  Antisense strand to SEQ ID NO: 2383238
cuuccagagauguuuaaac

SEQ ID NO: 2383240 - RNA, 19 nt, Artificial Sequence
  Description of Artificial Sequence: Synthetic oligonucleotide
  Sense strand starting at position 1679 of SEQ ID NO: 1886018
ugacauaucugcucacuag

SEQ ID NO: 2383241 - RNA, 19 nt, Artificial Sequence
  Description of Artificial Sequence: Synthetic oligonucleotide
  Antisense strand to SEQ ID NO: 2383240
cuagugagcagauauguca

SEQ ID NO: 2383242 - RNA, 19 nt, Artificial Sequence
  Description of Artificial Sequence: Synthetic oligonucleotide
  Sense strand starting at position 1683 of SEQ ID NO: 1886018
auaucugcucacuaguuua

SEQ ID NO: 2383243 - RNA, 19 nt, Artificial Sequence
  Description of Artificial Sequence: Synthetic oligonucleotide
  Antisense strand to SEQ ID NO: 2383242
uaaacuagugagcagauau

SEQ ID NO: 2383244 - RNA, 19 nt, Artificial Sequence
  Description of Artificial Sequence: Synthetic oligonucleotide
  Sense strand starting at position 1786 of SEQ ID NO: 1886018
ccuccaaaguaauuguuga

SEQ ID NO: 2383245 - RNA, 19 nt, Artificial Sequence
  Description of Artificial Sequence: Synthetic oligonucleotide
  Antisense strand to SEQ ID NO: 2383244
ucaacaauuacuuuggagg

SEQ ID NO: 2383246 - RNA, 19 nt, Artificial Sequence
  Description of Artificial Sequence: Synthetic oligonucleotide
  Sense strand starting at position 1880 of SEQ ID NO: 1886018
cuuugaauuucccaaggau

SEQ ID NO: 2383247 - RNA, 19 nt, Artificial Sequence
  Description of Artificial Sequence: Synthetic oligonucleotide
  Antisense strand to SEQ ID NO: 2383246
auccuugggaaauucaaag

SEQ ID NO: 2383248 - RNA, 19 nt, Artificial Sequence
  Description of Artificial Sequence: Synthetic oligonucleotide
  Sense strand starting at position 1911 of SEQ ID NO: 1886018
ccugcagcuccagauaaau

SEQ ID NO: 2383249 - RNA, 19 nt, Artificial Sequence
  Description of Artificial Sequence: Synthetic oligonucleotide
  Antisense strand to SEQ ID NO: 2383248
auuuaucuggagcugcagg

SEQ ID NO: 2383250 - RNA, 19 nt, Artificial Sequence
  Description of Artificial Sequence: Synthetic oligonucleotide
  Sense strand starting at position 1920 of SEQ ID NO: 1886018
ccagauaaauguccagcau

SEQ ID NO: 2383251 - RNA, 19 nt, Artificial Sequence
  Description of Artificial Sequence: Synthetic oligonucleotide
  Antisense strand to SEQ ID NO: 2383250
augcuggacauuuaucugg

SEQ ID NO: 2383252 - RNA, 19 nt, Artificial Sequence
  Description of Artificial Sequence: Synthetic oligonucleotide
  Sense strand starting at position 1953 of SEQ ID NO: 1886018
ugagcuaguggguggaauu

SEQ ID NO: 2383253 - RNA, 19 nt, Artificial Sequence
  Description of Artificial Sequence: Synthetic oligonucleotide
  Antisense strand to SEQ ID NO: 2383252
aauuccacccacuagcuca

SEQ ID NO: 2383254 - RNA, 19 nt, Artificial Sequence
  Description of Artificial Sequence: Synthetic oligonucleotide
  Sense strand starting at position 3100 of SEQ ID NO: 1886018
ccuguauagcaaugucaau

SEQ ID NO: 2383255 - RNA, 19 nt, Artificial Sequence
  Description of Artificial Sequence: Synthetic oligonucleotide
  Antisense strand to SEQ ID NO: 2383254
auugacauugcuauacagg

SEQ ID NO: 2383256 - RNA, 19 nt, Artificial Sequence
  Description of Artificial Sequence: Synthetic oligonucleotide
  Sense strand starting at position 3201 of SEQ ID NO: 1886018
gguccauucugauugguca

SEQ ID NO: 2383257 - RNA, 19 nt, Artificial Sequence
  Description of Artificial Sequence: Synthetic oligonucleotide
  Antisense strand to SEQ ID NO: 2383256
ugaccaaucagaauggacc

SEQ ID NO: 2383258 - RNA, 19 nt, Artificial Sequence
  Description of Artificial Sequence: Synthetic oligonucleotide
  Sense strand starting at position 3224 of SEQ ID NO: 1886018
cccucuguauugguaaaua

SEQ ID NO: 2383259 - RNA, 19 nt, Artificial Sequence
  Description of Artificial Sequence: Synthetic oligonucleotide
  Antisense strand to SEQ ID NO: 2383258
uauuuaccaauacagaggg

SEQ ID NO: 2383260 - RNA, 19 nt, Artificial Sequence
  Description of Artificial Sequence: Synthetic oligonucleotide
  Sense strand starting at position 3235 of SEQ ID NO: 1886018
gguaaauacuuugcauauc

SEQ ID NO: 2383261 - RNA, 19 nt, Artificial Sequence
  Description of Artificial Sequence: Synthetic oligonucleotide
  Antisense strand to SEQ ID NO: 2383260
gauaugcaaaguauuuacc

SEQ ID NO: 2383262 - RNA, 19 nt, Artificial Sequence
  Description of Artificial Sequence: Synthetic oligonucleotide
  Sense strand starting at position 3660 of SEQ ID NO: 1886018
uuacaugggcuagaucauu

SEQ ID NO: 2383263 - RNA, 19 nt, Artificial Sequence
  Description of Artificial Sequence: Synthetic oligonucleotide
  Antisense strand to SEQ ID NO: 2383262
aaugaucuagcccauguaa

SEQ ID NO: 2383264 - RNA, 19 nt, Artificial Sequence
  Description of Artificial Sequence: Synthetic oligonucleotide
  Sense strand starting at position 3697 of SEQ ID NO: 1886018
auuugagguugacauuauu

SEQ ID NO: 2383265 - RNA, 19 nt, Artificial Sequence
  Description of Artificial Sequence: Synthetic oligonucleotide
  Antisense strand to SEQ ID NO: 2383264
aauaaugucaaccucaaau

SEQ ID NO: 2383266 - RNA, 19 nt, Artificial Sequence
  Description of Artificial Sequence: Synthetic oligonucleotide
  Sense strand starting at position 3786 of SEQ ID NO: 1886018
ggaaaugguugagcaggaa

SEQ ID NO: 2383267 - RNA, 19 nt, Artificial Sequence
  Description of Artificial Sequence: Synthetic oligonucleotide
  Antisense strand to SEQ ID NO: 2383266
uuccugcucaaccauuucc

SEQ ID NO: 2383268 - RNA, 19 nt, Artificial Sequence
  Description of Artificial Sequence: Synthetic oligonucleotide
  Sense strand starting at position 3837 of SEQ ID NO: 1886018
gcaggaagccucuaagcuu

SEQ ID NO: 2383269 - RNA, 19 nt, Artificial Sequence
  Description of Artificial Sequence: Synthetic oligonucleotide
  Antisense strand to SEQ ID NO: 2383268
aagcuuagaggcuuccugc

SEQ ID NO: 2383270 - RNA, 19 nt, Artificial Sequence
  Description of Artificial Sequence: Synthetic oligonucleotide
  Sense strand starting at position 3846 of SEQ ID NO: 1886018
cucuaagcuugaccuugau

SEQ ID NO: 2383271 - RNA, 19 nt, Artificial Sequence
  Description of Artificial Sequence: Synthetic oligonucleotide
  Antisense strand to SEQ ID NO: 2383270
aucaaggucaagcuuagag

SEQ ID NO: 2383272 - RNA, 19 nt, Artificial Sequence
  Description of Artificial Sequence: Synthetic oligonucleotide
  Sense strand starting at position 3937 of SEQ ID NO: 1886018
gaaggagcagucuagucaa

SEQ ID NO: 2383273 - RNA, 19 nt, Artificial Sequence
  Description of Artificial Sequence: Synthetic oligonucleotide
  Antisense strand to SEQ ID NO: 2383272
uugacuagacugcuccuuc

SEQ ID NO: 2383274 - RNA, 19 nt, Artificial Sequence
  Description of Artificial Sequence: Synthetic oligonucleotide
  Sense strand starting at position 3940 of SEQ ID NO: 1886018
ggagcagucuagucaaagu

SEQ ID NO: 2383275 - RNA, 19 nt, Artificial Sequence
  Description of Artificial Sequence: Synthetic oligonucleotide
  Antisense strand to SEQ ID NO: 2383274
acuuugacuagacugcucc

SEQ ID NO: 2383276 - RNA, 19 nt, Artificial Sequence
  Description of Artificial Sequence: Synthetic oligonucleotide
  Sense strand starting at position 205 of SEQ ID NO: 1886019
agaucagaucucuaugcau

SEQ ID NO: 2383277 - RNA, 19 nt, Artificial Sequence
  Description of Artificial Sequence: Synthetic oligonucleotide
  Antisense strand to SEQ ID NO: 2383276
augcauagagaucugaucu

SEQ ID NO: 2383278 - RNA, 19 nt, Artificial Sequence
  Description of Artificial Sequence: Synthetic oligonucleotide
  Sense strand starting at position 207 of SEQ ID NO: 1886019
aucagaucucuaugcaugu

SEQ ID NO: 2383279 - RNA, 19 nt, Artificial Sequence
  Description of Artificial Sequence: Synthetic oligonucleotide
  Antisense strand to SEQ ID NO: 2383278
acaugcauagagaucugau

SEQ ID NO: 2383280 - RNA, 19 nt, Artificial Sequence
  Description of Artificial Sequence: Synthetic oligonucleotide
  Sense strand starting at position 208 of SEQ ID NO: 1886019
ucagaucucuaugcauguu

SEQ ID NO: 2383281 - RNA, 19 nt, Artificial Sequence
  Description of Artificial Sequence: Synthetic oligonucleotide
  Antisense strand to SEQ ID NO: 2383280
aacaugcauagagaucuga

SEQ ID NO: 2383282 - RNA, 19 nt, Artificial Sequence
  Description of Artificial Sequence: Synthetic oligonucleotide
  Sense strand starting at position 255 of SEQ ID NO: 1886019
cccggcuagacuuguauuu

SEQ ID NO: 2383283 - RNA, 19 nt, Artificial Sequence
  Description of Artificial Sequence: Synthetic oligonucleotide
  Antisense strand to SEQ ID NO: 2383282
aaauacaagucuagccggg

SEQ ID NO: 2383284 - RNA, 19 nt, Artificial Sequence
  Description of Artificial Sequence: Synthetic oligonucleotide
  Sense strand starting at position 262 of SEQ ID NO: 1886019
agacuuguauuuggaagau

SEQ ID NO: 2383285 - RNA, 19 nt, Artificial Sequence
  Description of Artificial Sequence: Synthetic oligonucleotide
  Antisense strand to SEQ ID NO: 2383284
aucuuccaaauacaagucu

SEQ ID NO: 2383286 - RNA, 19 nt, Artificial Sequence
  Description of Artificial Sequence: Synthetic oligonucleotide
  Sense strand starting at position 456 of SEQ ID NO: 1886019
augggauucugcugauuua

SEQ ID NO: 2383287 - RNA, 19 nt, Artificial Sequence
  Description of Artificial Sequence: Synthetic oligonucleotide
  Antisense strand to SEQ ID NO: 2383286
uaaaucagcagaaucccau

SEQ ID NO: 2383288 - RNA, 19 nt, Artificial Sequence
  Description of Artificial Sequence: Synthetic oligonucleotide
  Sense strand starting at position 472 of SEQ ID NO: 1886019
uuagguuggaauuaugcua

SEQ ID NO: 2383289 - RNA, 19 nt, Artificial Sequence
  Description of Artificial Sequence: Synthetic oligonucleotide
  Antisense strand to SEQ ID NO: 2383288
uagcauaauuccaaccuaa

SEQ ID NO: 2383290 - RNA, 19 nt, Artificial Sequence
  Description of Artificial Sequence: Synthetic oligonucleotide
  Sense strand starting at position 553 of SEQ ID NO: 1886019
ugggcuuguuuaccaagau

SEQ ID NO: 2383291 - RNA, 19 nt, Artificial Sequence
  Description of Artificial Sequence: Synthetic oligonucleotide
  Antisense strand to SEQ ID NO: 2383290
aucuugguaaacaagccca

SEQ ID NO: 2383292 - RNA, 19 nt, Artificial Sequence
  Description of Artificial Sequence: Synthetic oligonucleotide
  Sense strand starting at position 590 of SEQ ID NO: 1886019
gggagucuaggccaccaua

SEQ ID NO: 2383293 - RNA, 19 nt, Artificial Sequence
  Description of Artificial Sequence: Synthetic oligonucleotide
  Antisense strand to SEQ ID NO: 2383292
uaugguggccuagacuccc

SEQ ID NO: 2383294 - RNA, 19 nt, Artificial Sequence
  Description of Artificial Sequence: Synthetic oligonucleotide
  Sense strand starting at position 626 of SEQ ID NO: 1886019
augcaaagccuuggaaauc

SEQ ID NO: 2383295 - RNA, 19 nt, Artificial Sequence
  Description of Artificial Sequence: Synthetic oligonucleotide
  Antisense strand to SEQ ID NO: 2383294
gauuuccaaggcuuugcau

SEQ ID NO: 2383296 - RNA, 19 nt, Artificial Sequence
  Description of Artificial Sequence: Synthetic oligonucleotide
  Sense strand starting at position 806 of SEQ ID NO: 1886019
agagauuucuuuggaugau

SEQ ID NO: 2383297 - RNA, 19 nt, Artificial Sequence
  Description of Artificial Sequence: Synthetic oligonucleotide
  Antisense strand to SEQ ID NO: 2383296
aucauccaaagaaaucucu

SEQ ID NO: 2383298 - RNA, 19 nt, Artificial Sequence
  Description of Artificial Sequence: Synthetic oligonucleotide
  Sense strand starting at position 807 of SEQ ID NO: 1886019
gagauuucuuuggaugauu

SEQ ID NO: 2383299 - RNA, 19 nt, Artificial Sequence
  Description of Artificial Sequence: Synthetic oligonucleotide
  Antisense strand to SEQ ID NO: 2383298
aaucauccaaagaaaucuc

SEQ ID NO: 2383300 - RNA, 19 nt, Artificial Sequence
  Description of Artificial Sequence: Synthetic oligonucleotide
  Sense strand starting at position 1000 of SEQ ID NO: 1886019
cuguacuaacuacaguaau

SEQ ID NO: 2383301 - RNA, 19 nt, Artificial Sequence
  Description of Artificial Sequence: Synthetic oligonucleotide
  Antisense strand to SEQ ID NO: 2383300
auuacuguaguuaguacag

SEQ ID NO: 2383302 - RNA, 19 nt, Artificial Sequence
  Description of Artificial Sequence: Synthetic oligonucleotide
  Sense strand starting at position 1011 of SEQ ID NO: 1886019
acaguaauggcauauggua

SEQ ID NO: 2383303 - RNA, 19 nt, Artificial Sequence
  Description of Artificial Sequence: Synthetic oligonucleotide
  Antisense strand to SEQ ID NO: 2383302
uaccauaugccauuacugu

SEQ ID NO: 2383304 - RNA, 19 nt, Artificial Sequence
  Description of Artificial Sequence: Synthetic oligonucleotide
  Sense strand starting at position 1019 of SEQ ID NO: 1886019
ggcauaugguagcugaauc

SEQ ID NO: 2383305 - RNA, 19 nt, Artificial Sequence
  Description of Artificial Sequence: Synthetic oligonucleotide
  Antisense strand to SEQ ID NO: 2383304
gauucagcuaccauaugcc

SEQ ID NO: 2383306 - RNA, 19 nt, Artificial Sequence
  Description of Artificial Sequence: Synthetic oligonucleotide
  Sense strand starting at position 1020 of SEQ ID NO: 1886019
gcauaugguagcugaaucu

SEQ ID NO: 2383307 - RNA, 19 nt, Artificial Sequence
  Description of Artificial Sequence: Synthetic oligonucleotide
  Antisense strand to SEQ ID NO: 2383306
agauucagcuaccauaugc

SEQ ID NO: 2383308 - RNA, 19 nt, Artificial Sequence
  Description of Artificial Sequence: Synthetic oligonucleotide
  Sense strand starting at position 1135 of SEQ ID NO: 1886019
gucuucuuuccucaguguu

SEQ ID NO: 2383309 - RNA, 19 nt, Artificial Sequence
  Description of Artificial Sequence: Synthetic oligonucleotide
  Antisense strand to SEQ ID NO: 2383308
aacacugaggaaagaagac

SEQ ID NO: 2383310 - RNA, 19 nt, Artificial Sequence
  Description of Artificial Sequence: Synthetic oligonucleotide
  Sense strand starting at position 1308 of SEQ ID NO: 1886019
ucagaacuugugcacaaga

SEQ ID NO: 2383311 - RNA, 19 nt, Artificial Sequence
  Description of Artificial Sequence: Synthetic oligonucleotide
  Antisense strand to SEQ ID NO: 2383310
ucuugugcacaaguucuga

SEQ ID NO: 2383312 - RNA, 19 nt, Artificial Sequence
  Description of Artificial Sequence: Synthetic oligonucleotide
  Sense strand starting at position 1354 of SEQ ID NO: 1886019
ggcugucuccguuagauga

SEQ ID NO: 2383313 - RNA, 19 nt, Artificial Sequence
  Description of Artificial Sequence: Synthetic oligonucleotide
  Antisense strand to SEQ ID NO: 2383312
ucaucuaacggagacagcc

SEQ ID NO: 2383314 - RNA, 19 nt, Artificial Sequence
  Description of Artificial Sequence: Synthetic oligonucleotide
  Sense strand starting at position 1370 of SEQ ID NO: 1886019
ugaagagacuggcuugauc

SEQ ID NO: 2383315 - RNA, 19 nt, Artificial Sequence
  Description of Artificial Sequence: Synthetic oligonucleotide
  Antisense strand to SEQ ID NO: 2383314
gaucaagccagucucuuca

SEQ ID NO: 2383316 - RNA, 19 nt, Artificial Sequence
  Description of Artificial Sequence: Synthetic oligonucleotide
  Sense strand starting at position 1420 of SEQ ID NO: 1886019
gguugcuccgaaugggauu

SEQ ID NO: 2383317 - RNA, 19 nt, Artificial Sequence
  Description of Artificial Sequence: Synthetic oligonucleotide
  Antisense strand to SEQ ID NO: 2383316
aaucccauucggagcaacc

SEQ ID NO: 2383318 - RNA, 19 nt, Artificial Sequence
  Description of Artificial Sequence: Synthetic oligonucleotide
  Sense strand starting at position 1511 of SEQ ID NO: 1886019
cuuugucugguuugaggua

SEQ ID NO: 2383319 - RNA, 19 nt, Artificial Sequence
  Description of Artificial Sequence: Synthetic oligonucleotide
  Antisense strand to SEQ ID NO: 2383318
uaccucaaaccagacaaag

SEQ ID NO: 2383320 - RNA, 19 nt, Artificial Sequence
  Description of Artificial Sequence: Synthetic oligonucleotide
  Sense strand starting at position 2935 of SEQ ID NO: 1886019
ugcaacuugucaguucuau

SEQ ID NO: 2383321 - RNA, 19 nt, Artificial Sequence
  Description of Artificial Sequence: Synthetic oligonucleotide
  Antisense strand to SEQ ID NO: 2383320
auagaacugacaaguugca

SEQ ID NO: 2383322 - RNA, 19 nt, Artificial Sequence
  Description of Artificial Sequence: Synthetic oligonucleotide
  Sense strand starting at position 3479 of SEQ ID NO: 1886019
acuucagugcgguaugaga

SEQ ID NO: 2383323 - RNA, 19 nt, Artificial Sequence
  Description of Artificial Sequence: Synthetic oligonucleotide
  Antisense strand to SEQ ID NO: 2383322
ucucauaccgcacugaagu

SEQ ID NO: 2383324 - RNA, 19 nt, Artificial Sequence
  Description of Artificial Sequence: Synthetic oligonucleotide
  Sense strand starting at position 3494 of SEQ ID NO: 1886019
gagagcuuuccauggcauc

SEQ ID NO: 2383325 - RNA, 19 nt, Artificial Sequence
  Description of Artificial Sequence: Synthetic oligonucleotide
  Antisense strand to SEQ ID NO: 2383324
gaugccauggaaagcucuc

SEQ ID NO: 2383326 - RNA, 19 nt, Artificial Sequence
  Description of Artificial Sequence: Synthetic oligonucleotide
  Sense strand starting at position 3598 of SEQ ID NO: 1886019
gcgugaacuccaucugcuu

SEQ ID NO: 2383327 - RNA, 19 nt, Artificial Sequence
  Description of Artificial Sequence: Synthetic oligonucleotide
  Antisense strand to SEQ ID NO: 2383326
aagcagauggaguucacgc

SEQ ID NO: 2383328 - RNA, 19 nt, Artificial Sequence
  Description of Artificial Sequence: Synthetic oligonucleotide
  Sense strand starting at position 3628 of SEQ ID NO: 1886019
aguaguucucagggcugga

SEQ ID NO: 2383329 - RNA, 19 nt, Artificial Sequence
  Description of Artificial Sequence: Synthetic oligonucleotide
  Antisense strand to SEQ ID NO: 2383328
uccagcccugagaacuacu

SEQ ID NO: 2383330 - RNA, 19 nt, Artificial Sequence
  Description of Artificial Sequence: Synthetic oligonucleotide
  Sense strand starting at position 3667 of SEQ ID NO: 1886019
acaccugaacuuugaugua

SEQ ID NO: 2383331 - RNA, 19 nt, Artificial Sequence
  Description of Artificial Sequence: Synthetic oligonucleotide
  Antisense strand to SEQ ID NO: 2383330
uacaucaaaguucaggugu

SEQ ID NO: 2383332 - RNA, 19 nt, Artificial Sequence
  Description of Artificial Sequence: Synthetic oligonucleotide
  Sense strand starting at position 3679 of SEQ ID NO: 1886019
ugauguaaugucuagacuu

SEQ ID NO: 2383333 - RNA, 19 nt, Artificial Sequence
  Description of Artificial Sequence: Synthetic oligonucleotide
  Antisense strand to SEQ ID NO: 2383332
aagucuagacauuacauca

SEQ ID NO: 2383334 - RNA, 19 nt, Artificial Sequence
  Description of Artificial Sequence: Synthetic oligonucleotide
  Sense strand starting at position 3762 of SEQ ID NO: 1886019
aauuaugaccuuugguuga

SEQ ID NO: 2383335 - RNA, 19 nt, Artificial Sequence
  Description of Artificial Sequence: Synthetic oligonucleotide
  Antisense strand to SEQ ID NO: 2383334
ucaaccaaaggucauaauu

SEQ ID NO: 2383336 - RNA, 19 nt, Artificial Sequence
  Description of Artificial Sequence: Synthetic oligonucleotide
  Sense strand starting at position 3764 of SEQ ID NO: 1886019
uuaugaccuuugguugagu

SEQ ID NO: 2383337 - RNA, 19 nt, Artificial Sequence
  Description of Artificial Sequence: Synthetic oligonucleotide
  Antisense strand to SEQ ID NO: 2383336
acucaaccaaaggucauaa

SEQ ID NO: 2383338 - RNA, 19 nt, Artificial Sequence
  Description of Artificial Sequence: Synthetic oligonucleotide
  Sense strand starting at position 3766 of SEQ ID NO: 1886019
augaccuuugguugaguca

SEQ ID NO: 2383339 - RNA, 19 nt, Artificial Sequence
  Description of Artificial Sequence: Synthetic oligonucleotide
  Antisense strand to SEQ ID NO: 2383338
ugacucaaccaaaggucau

SEQ ID NO: 2383340 - RNA, 19 nt, Artificial Sequence
  Description of Artificial Sequence: Synthetic oligonucleotide
  Sense strand starting at position 3808 of SEQ ID NO: 1886019
gggaucuuguacuuuauau

SEQ ID NO: 2383341 - RNA, 19 nt, Artificial Sequence
  Description of Artificial Sequence: Synthetic oligonucleotide
  Antisense strand to SEQ ID NO: 2383340
auauaaaguacaagauccc

SEQ ID NO: 2383342 - RNA, 19 nt, Artificial Sequence
  Description of Artificial Sequence: Synthetic oligonucleotide
  Sense strand starting at position 3865 of SEQ ID NO: 1886019
uuuccucuccaguaucaga

SEQ ID NO: 2383343 - RNA, 19 nt, Artificial Sequence
  Description of Artificial Sequence: Synthetic oligonucleotide
  Antisense strand to SEQ ID NO: 2383342
ucugauacuggagaggaaa

SEQ ID NO: 2383344 - RNA, 19 nt, Artificial Sequence
  Description of Artificial Sequence: Synthetic oligonucleotide
  Sense strand starting at position 3872 of SEQ ID NO: 1886019
uccaguaucagauguaguu

SEQ ID NO: 2383345 - RNA, 19 nt, Artificial Sequence
  Description of Artificial Sequence: Synthetic oligonucleotide
  Antisense strand to SEQ ID NO: 2383344
aacuacaucugauacugga

SEQ ID NO: 2383346 - RNA, 19 nt, Artificial Sequence
  Description of Artificial Sequence: Synthetic oligonucleotide
  Sense strand starting at position 3879 of SEQ ID NO: 1886019
ucagauguaguuuauggua

SEQ ID NO: 2383347 - RNA, 19 nt, Artificial Sequence
  Description of Artificial Sequence: Synthetic oligonucleotide
  Antisense strand to SEQ ID NO: 2383346
uaccauaaacuacaucuga

SEQ ID NO: 2383348 - RNA, 19 nt, Artificial Sequence
  Description of Artificial Sequence: Synthetic oligonucleotide
  Sense strand starting at position 3887 of SEQ ID NO: 1886019
aguuuaugguaccugaaag

SEQ ID NO: 2383349 - RNA, 19 nt, Artificial Sequence
  Description of Artificial Sequence: Synthetic oligonucleotide
  Antisense strand to SEQ ID NO: 2383348
cuuucagguaccauaaacu

SEQ ID NO: 2383350 - RNA, 19 nt, Artificial Sequence
  Description of Artificial Sequence: Synthetic oligonucleotide
  Sense strand starting at position 3888 of SEQ ID NO: 1886019
guuuaugguaccugaaaga

SEQ ID NO: 2383351 - RNA, 19 nt, Artificial Sequence
  Description of Artificial Sequence: Synthetic oligonucleotide
  Antisense strand to SEQ ID NO: 2383350
ucuuucagguaccauaaac

SEQ ID NO: 2383352 - RNA, 19 nt, Artificial Sequence
  Description of Artificial Sequence: Synthetic oligonucleotide
  Sense strand starting at position 3901 of SEQ ID NO: 1886019
gaaagaugucagcgacaag

SEQ ID NO: 2383353 - RNA, 19 nt, Artificial Sequence
  Description of Artificial Sequence: Synthetic oligonucleotide
  Antisense strand to SEQ ID NO: 2383352
cuugucgcugacaucuuuc

SEQ ID NO: 2383354 - RNA, 19 nt, Artificial Sequence
  Description of Artificial Sequence: Synthetic oligonucleotide
  Sense strand starting at position 3924 of SEQ ID NO: 1886019
guaguccagagcuagaauu

SEQ ID NO: 2383355 - RNA, 19 nt, Artificial Sequence
  Description of Artificial Sequence: Synthetic oligonucleotide
  Antisense strand to SEQ ID NO: 2383354
aauucuagcucuggacuac

SEQ ID NO: 2383356 - RNA, 19 nt, Artificial Sequence
  Description of Artificial Sequence: Synthetic oligonucleotide
  Sense strand starting at position 123 of SEQ ID NO: 1886020
uagagugcccugcaaucau

SEQ ID NO: 2383357 - RNA, 19 nt, Artificial Sequence
  Description of Artificial Sequence: Synthetic oligonucleotide
  Antisense strand to SEQ ID NO: 2383356
augauugcagggcacucua

SEQ ID NO: 2383358 - RNA, 19 nt, Artificial Sequence
  Description of Artificial Sequence: Synthetic oligonucleotide
  Sense strand starting at position 133 of SEQ ID NO: 1886020
ugcaaucauagagggugau

SEQ ID NO: 2383359 - RNA, 19 nt, Artificial Sequence
  Description of Artificial Sequence: Synthetic oligonucleotide
  Antisense strand to SEQ ID NO: 2383358
aucacccucuaugauugca

SEQ ID NO: 2383360 - RNA, 19 nt, Artificial Sequence
  Description of Artificial Sequence: Synthetic oligonucleotide
  Sense strand starting at position 134 of SEQ ID NO: 1886020
gcaaucauagagggugauu

SEQ ID NO: 2383361 - RNA, 19 nt, Artificial Sequence
  Description of Artificial Sequence: Synthetic oligonucleotide
  Antisense strand to SEQ ID NO: 2383360
aaucacccucuaugauugc

SEQ ID NO: 2383362 - RNA, 19 nt, Artificial Sequence
  Description of Artificial Sequence: Synthetic oligonucleotide
  Sense strand starting at position 621 of SEQ ID NO: 1886020
acgauuacucaggguugau

SEQ ID NO: 2383363 - RNA, 19 nt, Artificial Sequence
  Description of Artificial Sequence: Synthetic oligonucleotide
  Antisense strand to SEQ ID NO: 2383362
aucaacccugaguaaucgu

SEQ ID NO: 2383364 - RNA, 19 nt, Artificial Sequence
  Description of Artificial Sequence: Synthetic oligonucleotide
  Sense strand starting at position 624 of SEQ ID NO: 1886020
auuacucaggguugauaaa

SEQ ID NO: 2383365 - RNA, 19 nt, Artificial Sequence
  Description of Artificial Sequence: Synthetic oligonucleotide
  Antisense strand to SEQ ID NO: 2383364
uuuaucaacccugaguaau

SEQ ID NO: 2383366 - RNA, 19 nt, Artificial Sequence
  Description of Artificial Sequence: Synthetic oligonucleotide
  Sense strand starting at position 699 of SEQ ID NO: 1886020
guguaaguccaacaaauau

SEQ ID NO: 2383367 - RNA, 19 nt, Artificial Sequence
  Description of Artificial Sequence: Synthetic oligonucleotide
  Antisense strand to SEQ ID NO: 2383366
auauuuguuggacuuacac

SEQ ID NO: 2383368 - RNA, 19 nt, Artificial Sequence
  Description of Artificial Sequence: Synthetic oligonucleotide
  Sense strand starting at position 840 of SEQ ID NO: 1886020
auugcuaugccagaggaca

SEQ ID NO: 2383369 - RNA, 19 nt, Artificial Sequence
  Description of Artificial Sequence: Synthetic oligonucleotide
  Antisense strand to SEQ ID NO: 2383368
uguccucuggcauagcaau

SEQ ID NO: 2383370 - RNA, 19 nt, Artificial Sequence
  Description of Artificial Sequence: Synthetic oligonucleotide
  Sense strand starting at position 891 of SEQ ID NO: 1886020
ccugaacagcuagaaucuu

SEQ ID NO: 2383371 - RNA, 19 nt, Artificial Sequence
  Description of Artificial Sequence: Synthetic oligonucleotide
  Antisense strand to SEQ ID NO: 2383370
aagauucuagcuguucagg

SEQ ID NO: 2383372 - RNA, 19 nt, Artificial Sequence
  Description of Artificial Sequence: Synthetic oligonucleotide
  Sense strand starting at position 1052 of SEQ ID NO: 1886020
gacuuuacucaguggucca

SEQ ID NO: 2383373 - RNA, 19 nt, Artificial Sequence
  Description of Artificial Sequence: Synthetic oligonucleotide
  Antisense strand to SEQ ID NO: 2383372
uggaccacugaguaaaguc

SEQ ID NO: 2383374 - RNA, 19 nt, Artificial Sequence
  Description of Artificial Sequence: Synthetic oligonucleotide
  Sense strand starting at position 1156 of SEQ ID NO: 1886020
uccugaaagccaugaggua

SEQ ID NO: 2383375 - RNA, 19 nt, Artificial Sequence
  Description of Artificial Sequence: Synthetic oligonucleotide
  Antisense strand to SEQ ID NO: 2383374
uaccucauggcuuucagga

SEQ ID NO: 2383376 - RNA, 19 nt, Artificial Sequence
  Description of Artificial Sequence: Synthetic oligonucleotide
  Sense strand starting at position 1444 of SEQ ID NO: 1886020
ugagccaaacccugaguua

SEQ ID NO: 2383377 - RNA, 19 nt, Artificial Sequence
  Description of Artificial Sequence: Synthetic oligonucleotide
  Antisense strand to SEQ ID NO: 2383376
uaacucaggguuuggcuca

SEQ ID NO: 2383378 - RNA, 19 nt, Artificial Sequence
  Description of Artificial Sequence: Synthetic oligonucleotide
  Sense strand starting at position 1453 of SEQ ID NO: 1886020
cccugaguuaggcauuaga

SEQ ID NO: 2383379 - RNA, 19 nt, Artificial Sequence
  Description of Artificial Sequence: Synthetic oligonucleotide
  Antisense strand to SEQ ID NO: 2383378
ucuaaugccuaacucaggg

SEQ ID NO: 2383380 - RNA, 19 nt, Artificial Sequence
  Description of Artificial Sequence: Synthetic oligonucleotide
  Sense strand starting at position 1456 of SEQ ID NO: 1886020
ugaguuaggcauuagagcu

SEQ ID NO: 2383381 - RNA, 19 nt, Artificial Sequence
  Description of Artificial Sequence: Synthetic oligonucleotide
  Antisense strand to SEQ ID NO: 2383380
agcucuaaugccuaacuca

SEQ ID NO: 2383382 - RNA, 19 nt, Artificial Sequence
  Description of Artificial Sequence: Synthetic oligonucleotide
  Sense strand starting at position 1472 of SEQ ID NO: 1886020
gcuucugaaauguaaacga

SEQ ID NO: 2383383 - RNA, 19 nt, Artificial Sequence
  Description of Artificial Sequence: Synthetic oligonucleotide
  Antisense strand to SEQ ID NO: 2383382
ucguuuacauuucagaagc

SEQ ID NO: 2383384 - RNA, 19 nt, Artificial Sequence
  Description of Artificial Sequence: Synthetic oligonucleotide
  Sense strand starting at position 1998 of SEQ ID NO: 1886020
ccuguuugccaacauugua

SEQ ID NO: 2383385 - RNA, 19 nt, Artificial Sequence
  Description of Artificial Sequence: Synthetic oligonucleotide
  Antisense strand to SEQ ID NO: 2383384
uacaauguuggcaaacagg

SEQ ID NO: 2383386 - RNA, 19 nt, Artificial Sequence
  Description of Artificial Sequence: Synthetic oligonucleotide
  Sense strand starting at position 2151 of SEQ ID NO: 1886020
ugguguuauugauugacag

SEQ ID NO: 2383387 - RNA, 19 nt, Artificial Sequence
  Description of Artificial Sequence: Synthetic oligonucleotide
  Antisense strand to SEQ ID NO: 2383386
cugucaaucaauaacacca

SEQ ID NO: 2383388 - RNA, 19 nt, Artificial Sequence
  Description of Artificial Sequence: Synthetic oligonucleotide
  Sense strand starting at position 2152 of SEQ ID NO: 1886020
gguguuauugauugacaga

SEQ ID NO: 2383389 - RNA, 19 nt, Artificial Sequence
  Description of Artificial Sequence: Synthetic oligonucleotide
  Antisense strand to SEQ ID NO: 2383388
ucugucaaucaauaacacc

SEQ ID NO: 2383390 - RNA, 19 nt, Artificial Sequence
  Description of Artificial Sequence: Synthetic oligonucleotide
  Sense strand starting at position 2153 of SEQ ID NO: 1886020
guguuauugauugacagau

SEQ ID NO: 2383391 - RNA, 19 nt, Artificial Sequence
  Description of Artificial Sequence: Synthetic oligonucleotide
  Antisense strand to SEQ ID NO: 2383390
aucugucaaucaauaacac

SEQ ID NO: 2383392 - RNA, 19 nt, Artificial Sequence
  Description of Artificial Sequence: Synthetic oligonucleotide
  Sense strand starting at position 2211 of SEQ ID NO: 1886020
ugggcuagguguuucaaca

SEQ ID NO: 2383393 - RNA, 19 nt, Artificial Sequence
  Description of Artificial Sequence: Synthetic oligonucleotide
  Antisense strand to SEQ ID NO: 2383392
uguugaaacaccuagccca

SEQ ID NO: 2383394 - RNA, 19 nt, Artificial Sequence
  Description of Artificial Sequence: Synthetic oligonucleotide
  Sense strand starting at position 2235 of SEQ ID NO: 1886020
cccuaaugcugggcaaaca

SEQ ID NO: 2383395 - RNA, 19 nt, Artificial Sequence
  Description of Artificial Sequence: Synthetic oligonucleotide
  Antisense strand to SEQ ID NO: 2383394
uguuugcccagcauuaggg

SEQ ID NO: 2383396 - RNA, 19 nt, Artificial Sequence
  Description of Artificial Sequence: Synthetic oligonucleotide
  Sense strand starting at position 2342 of SEQ ID NO: 1886020
ccucaaccgagguauugau

SEQ ID NO: 2383397 - RNA, 19 nt, Artificial Sequence
  Description of Artificial Sequence: Synthetic oligonucleotide
  Antisense strand to SEQ ID NO: 2383396
aucaauaccucgguugagg

SEQ ID NO: 2383398 - RNA, 19 nt, Artificial Sequence
  Description of Artificial Sequence: Synthetic oligonucleotide
  Sense strand starting at position 2354 of SEQ ID NO: 1886020
uauugaucccaccggagga

SEQ ID NO: 2383399 - RNA, 19 nt, Artificial Sequence
  Description of Artificial Sequence: Synthetic oligonucleotide
  Antisense strand to SEQ ID NO: 2383398
uccuccggugggaucaaua

SEQ ID NO: 2383400 - RNA, 19 nt, Artificial Sequence
  Description of Artificial Sequence: Synthetic oligonucleotide
  Sense strand starting at position 2459 of SEQ ID NO: 1886020
augggcaucuguuuggaau

SEQ ID NO: 2383401 - RNA, 19 nt, Artificial Sequence
  Description of Artificial Sequence: Synthetic oligonucleotide
  Antisense strand to SEQ ID NO: 2383400
auuccaaacagaugcccau

SEQ ID NO: 2383402 - RNA, 19 nt, Artificial Sequence
  Description of Artificial Sequence: Synthetic oligonucleotide
  Sense strand starting at position 2460 of SEQ ID NO: 1886020
ugggcaucuguuuggaauu

SEQ ID NO: 2383403 - RNA, 19 nt, Artificial Sequence
  Description of Artificial Sequence: Synthetic oligonucleotide
  Antisense strand to SEQ ID NO: 2383402
aauuccaaacagaugccca

SEQ ID NO: 2383404 - RNA, 19 nt, Artificial Sequence
  Description of Artificial Sequence: Synthetic oligonucleotide
  Sense strand starting at position 2472 of SEQ ID NO: 1886020
uggaauuugucuucuugca

SEQ ID NO: 2383405 - RNA, 19 nt, Artificial Sequence
  Description of Artificial Sequence: Synthetic oligonucleotide
  Antisense strand to SEQ ID NO: 2383404
ugcaagaagacaaauucca

SEQ ID NO: 2383406 - RNA, 19 nt, Artificial Sequence
  Description of Artificial Sequence: Synthetic oligonucleotide
  Sense strand starting at position 2628 of SEQ ID NO: 1886020
ggaaacuugcugggugcaa

SEQ ID NO: 2383407 - RNA, 19 nt, Artificial Sequence
  Description of Artificial Sequence: Synthetic oligonucleotide
  Antisense strand to SEQ ID NO: 2383406
uugcacccagcaaguuucc

SEQ ID NO: 2383408 - RNA, 19 nt, Artificial Sequence
  Description of Artificial Sequence: Synthetic oligonucleotide
  Sense strand starting at position 2673 of SEQ ID NO: 1886020
ucugaacacuggucauaag

SEQ ID NO: 2383409 - RNA, 19 nt, Artificial Sequence
  Description of Artificial Sequence: Synthetic oligonucleotide
  Antisense strand to SEQ ID NO: 2383408
cuuaugaccaguguucaga

SEQ ID NO: 2383410 - RNA, 19 nt, Artificial Sequence
  Description of Artificial Sequence: Synthetic oligonucleotide
  Sense strand starting at position 2741 of SEQ ID NO: 1886020
cccugagcuguccauacaa

SEQ ID NO: 2383411 - RNA, 19 nt, Artificial Sequence
  Description of Artificial Sequence: Synthetic oligonucleotide
  Antisense strand to SEQ ID NO: 2383410
uuguauggacagcucaggg

SEQ ID NO: 2383412 - RNA, 19 nt, Artificial Sequence
  Description of Artificial Sequence: Synthetic oligonucleotide
  Sense strand starting at position 2743 of SEQ ID NO: 1886020
cugagcuguccauacaaga

SEQ ID NO: 2383413 - RNA, 19 nt, Artificial Sequence
  Description of Artificial Sequence: Synthetic oligonucleotide
  Antisense strand to SEQ ID NO: 2383412
ucuuguauggacagcucag

SEQ ID NO: 2383414 - RNA, 19 nt, Artificial Sequence
  Description of Artificial Sequence: Synthetic oligonucleotide
  Sense strand starting at position 2985 of SEQ ID NO: 1886020
aguuuaaggaaucgggaua

SEQ ID NO: 2383415 - RNA, 19 nt, Artificial Sequence
  Description of Artificial Sequence: Synthetic oligonucleotide
  Antisense strand to SEQ ID NO: 2383414
uaucccgauuccuuaaacu

SEQ ID NO: 2383416 - RNA, 19 nt, Artificial Sequence
  Description of Artificial Sequence: Synthetic oligonucleotide
  Sense strand starting at position 2986 of SEQ ID NO: 1886020
guuuaaggaaucgggauau

SEQ ID NO: 2383417 - RNA, 19 nt, Artificial Sequence
  Description of Artificial Sequence: Synthetic oligonucleotide
  Antisense strand to SEQ ID NO: 2383416
auaucccgauuccuuaaac

SEQ ID NO: 2383418 - RNA, 19 nt, Artificial Sequence
  Description of Artificial Sequence: Synthetic oligonucleotide
  Sense strand starting at position 3161 of SEQ ID NO: 1886020
gaauacauguuguuugcaa

SEQ ID NO: 2383419 - RNA, 19 nt, Artificial Sequence
  Description of Artificial Sequence: Synthetic oligonucleotide
  Antisense strand to SEQ ID NO: 2383418
uugcaaacaacauguauuc

SEQ ID NO: 2383420 - RNA, 19 nt, Artificial Sequence
  Description of Artificial Sequence: Synthetic oligonucleotide
  Sense strand starting at position 3163 of SEQ ID NO: 1886020
auacauguuguuugcaaau

SEQ ID NO: 2383421 - RNA, 19 nt, Artificial Sequence
  Description of Artificial Sequence: Synthetic oligonucleotide
  Antisense strand to SEQ ID NO: 2383420
auuugcaaacaacauguau

SEQ ID NO: 2383422 - RNA, 19 nt, Artificial Sequence
  Description of Artificial Sequence: Synthetic oligonucleotide
  Sense strand starting at position 3172 of SEQ ID NO: 1886020
guuugcaaauuccuugaaa

SEQ ID NO: 2383423 - RNA, 19 nt, Artificial Sequence
  Description of Artificial Sequence: Synthetic oligonucleotide
  Antisense strand to SEQ ID NO: 2383422
uuucaaggaauuugcaaac

SEQ ID NO: 2383424 - RNA, 19 nt, Artificial Sequence
  Description of Artificial Sequence: Synthetic oligonucleotide
  Sense strand starting at position 3615 of SEQ ID NO: 1886020
gaggacugugauuggauau

SEQ ID NO: 2383425 - RNA, 19 nt, Artificial Sequence
  Description of Artificial Sequence: Synthetic oligonucleotide
  Antisense strand to SEQ ID NO: 2383424
auauccaaucacaguccuc

SEQ ID NO: 2383426 - RNA, 19 nt, Artificial Sequence
  Description of Artificial Sequence: Synthetic oligonucleotide
  Sense strand starting at position 3616 of SEQ ID NO: 1886020
aggacugugauuggauauc

SEQ ID NO: 2383427 - RNA, 19 nt, Artificial Sequence
  Description of Artificial Sequence: Synthetic oligonucleotide
  Antisense strand to SEQ ID NO: 2383426
gauauccaaucacaguccu

SEQ ID NO: 2383428 - RNA, 19 nt, Artificial Sequence
  Description of Artificial Sequence: Synthetic oligonucleotide
  Sense strand starting at position 3733 of SEQ ID NO: 1886020
cacugcauuguacaagaga

SEQ ID NO: 2383429 - RNA, 19 nt, Artificial Sequence
  Description of Artificial Sequence: Synthetic oligonucleotide
  Antisense strand to SEQ ID NO: 2383428
ucucuuguacaaugcagug

SEQ ID NO: 2383430 - RNA, 19 nt, Artificial Sequence
  Description of Artificial Sequence: Synthetic oligonucleotide
  Sense strand starting at position 3843 of SEQ ID NO: 1886020
ggaggcaucuacuuugaua

SEQ ID NO: 2383431 - RNA, 19 nt, Artificial Sequence
  Description of Artificial Sequence: Synthetic oligonucleotide
  Antisense strand to SEQ ID NO: 2383430
uaucaaaguagaugccucc

SEQ ID NO: 2383432 - RNA, 19 nt, Artificial Sequence
  Description of Artificial Sequence: Synthetic oligonucleotide
  Sense strand starting at position 3845 of SEQ ID NO: 1886020
aggcaucuacuuugauaga

SEQ ID NO: 2383433 - RNA, 19 nt, Artificial Sequence
  Description of Artificial Sequence: Synthetic oligonucleotide
  Antisense strand to SEQ ID NO: 2383432
ucuaucaaaguagaugccu

SEQ ID NO: 2383434 - RNA, 19 nt, Artificial Sequence
  Description of Artificial Sequence: Synthetic oligonucleotide
  Sense strand starting at position 3904 of SEQ ID NO: 1886020
agauuacauuuaugaaagg

SEQ ID NO: 2383435 - RNA, 19 nt, Artificial Sequence
  Description of Artificial Sequence: Synthetic oligonucleotide
  Antisense strand to SEQ ID NO: 2383434
ccuuucauaaauguaaucu

SEQ ID NO: 2383436 - RNA, 19 nt, Artificial Sequence
  Description of Artificial Sequence: Synthetic oligonucleotide
  Sense strand starting at position 15 of SEQ ID NO: 1886021
uccaaaucuggaugaucau

SEQ ID NO: 2383437 - RNA, 19 nt, Artificial Sequence
  Description of Artificial Sequence: Synthetic oligonucleotide
  Antisense strand to SEQ ID NO: 2383436
augaucauccagauuugga

SEQ ID NO: 2383438 - RNA, 19 nt, Artificial Sequence
  Description of Artificial Sequence: Synthetic oligonucleotide
  Sense strand starting at position 43 of SEQ ID NO: 1886021
gguaaauauuaggccuuua

SEQ ID NO: 2383439 - RNA, 19 nt, Artificial Sequence
  Description of Artificial Sequence: Synthetic oligonucleotide
  Antisense strand to SEQ ID NO: 2383438
uaaaggccuaauauuuacc

SEQ ID NO: 2383440 - RNA, 19 nt, Artificial Sequence
  Description of Artificial Sequence: Synthetic oligonucleotide
  Sense strand starting at position 48 of SEQ ID NO: 1886021
auauuaggccuuuaagcaa

SEQ ID NO: 2383441 - RNA, 19 nt, Artificial Sequence
  Description of Artificial Sequence: Synthetic oligonucleotide
  Antisense strand to SEQ ID NO: 2383440
uugcuuaaaggccuaauau

SEQ ID NO: 2383442 - RNA, 19 nt, Artificial Sequence
  Description of Artificial Sequence: Synthetic oligonucleotide
  Sense strand starting at position 160 of SEQ ID NO: 1886021
gcacuauugaagugugaag

SEQ ID NO: 2383443 - RNA, 19 nt, Artificial Sequence
  Description of Artificial Sequence: Synthetic oligonucleotide
  Antisense strand to SEQ ID NO: 2383442
cuucacacuucaauagugc

SEQ ID NO: 2383444 - RNA, 19 nt, Artificial Sequence
  Description of Artificial Sequence: Synthetic oligonucleotide
  Sense strand starting at position 162 of SEQ ID NO: 1886021
acuauugaagugugaagaa

SEQ ID NO: 2383445 - RNA, 19 nt, Artificial Sequence
  Description of Artificial Sequence: Synthetic oligonucleotide
  Antisense strand to SEQ ID NO: 2383444
uucuucacacuucaauagu

SEQ ID NO: 2383446 - RNA, 19 nt, Artificial Sequence
  Description of Artificial Sequence: Synthetic oligonucleotide
  Sense strand starting at position 235 of SEQ ID NO: 1886021
gcuaguuauuaaucagaaa

SEQ ID NO: 2383447 - RNA, 19 nt, Artificial Sequence
  Description of Artificial Sequence: Synthetic oligonucleotide
  Antisense strand to SEQ ID NO: 2383446
uuucugauuaauaacuagc

SEQ ID NO: 2383448 - RNA, 19 nt, Artificial Sequence
  Description of Artificial Sequence: Synthetic oligonucleotide
  Sense strand starting at position 523 of SEQ ID NO: 1886021
uuugaaaccugcuugguga

SEQ ID NO: 2383449 - RNA, 19 nt, Artificial Sequence
  Description of Artificial Sequence: Synthetic oligonucleotide
  Antisense strand to SEQ ID NO: 2383448
ucaccaagcagguuucaaa

SEQ ID NO: 2383450 - RNA, 19 nt, Artificial Sequence
  Description of Artificial Sequence: Synthetic oligonucleotide
  Sense strand starting at position 526 of SEQ ID NO: 1886021
gaaaccugcuuggugagaa

SEQ ID NO: 2383451 - RNA, 19 nt, Artificial Sequence
  Description of Artificial Sequence: Synthetic oligonucleotide
  Antisense strand to SEQ ID NO: 2383450
uucucaccaagcagguuuc

SEQ ID NO: 2383452 - RNA, 19 nt, Artificial Sequence
  Description of Artificial Sequence: Synthetic oligonucleotide
  Sense strand starting at position 602 of SEQ ID NO: 1886021
ccuccaaagcgagaaacuu

SEQ ID NO: 2383453 - RNA, 19 nt, Artificial Sequence
  Description of Artificial Sequence: Synthetic oligonucleotide
  Antisense strand to SEQ ID NO: 2383452
aaguuucucgcuuuggagg

SEQ ID NO: 2383454 - RNA, 19 nt, Artificial Sequence
  Description of Artificial Sequence: Synthetic oligonucleotide
  Sense strand starting at position 1099 of SEQ ID NO: 1886021
aacggauauuggccucaaa

SEQ ID NO: 2383455 - RNA, 19 nt, Artificial Sequence
  Description of Artificial Sequence: Synthetic oligonucleotide
  Antisense strand to SEQ ID NO: 2383454
uuugaggccaauauccguu

SEQ ID NO: 2383456 - RNA, 19 nt, Artificial Sequence
  Description of Artificial Sequence: Synthetic oligonucleotide
  Sense strand starting at position 1309 of SEQ ID NO: 1886021
gucucugggccuuagaauu

SEQ ID NO: 2383457 - RNA, 19 nt, Artificial Sequence
  Description of Artificial Sequence: Synthetic oligonucleotide
  Antisense strand to SEQ ID NO: 2383456
aauucuaaggcccagagac

SEQ ID NO: 2383458 - RNA, 19 nt, Artificial Sequence
  Description of Artificial Sequence: Synthetic oligonucleotide
  Sense strand starting at position 1382 of SEQ ID NO: 1886021
ccauauuccugguuaccag

SEQ ID NO: 2383459 - RNA, 19 nt, Artificial Sequence
  Description of Artificial Sequence: Synthetic oligonucleotide
  Antisense strand to SEQ ID NO: 2383458
cugguaaccaggaauaugg

SEQ ID NO: 2383460 - RNA, 19 nt, Artificial Sequence
  Description of Artificial Sequence: Synthetic oligonucleotide
  Sense strand starting at position 1479 of SEQ ID NO: 1886021
cuaggugggacuuguggaa

SEQ ID NO: 2383461 - RNA, 19 nt, Artificial Sequence
  Description of Artificial Sequence: Synthetic oligonucleotide
  Antisense strand to SEQ ID NO: 2383460
uuccacaagucccaccuag

SEQ ID NO: 2383462 - RNA, 19 nt, Artificial Sequence
  Description of Artificial Sequence: Synthetic oligonucleotide
  Sense strand starting at position 1537 of SEQ ID NO: 1886021
gggaaugauuucugauaua

SEQ ID NO: 2383463 - RNA, 19 nt, Artificial Sequence
  Description of Artificial Sequence: Synthetic oligonucleotide
  Antisense strand to SEQ ID NO: 2383462
uauaucagaaaucauuccc

SEQ ID NO: 2383464 - RNA, 19 nt, Artificial Sequence
  Description of Artificial Sequence: Synthetic oligonucleotide
  Sense strand starting at position 1596 of SEQ ID NO: 1886021
gccaguuccgaguuagcau

SEQ ID NO: 2383465 - RNA, 19 nt, Artificial Sequence
  Description of Artificial Sequence: Synthetic oligonucleotide
  Antisense strand to SEQ ID NO: 2383464
augcuaacucggaacuggc

SEQ ID NO: 2383466 - RNA, 19 nt, Artificial Sequence
  Description of Artificial Sequence: Synthetic oligonucleotide
  Sense strand starting at position 1604 of SEQ ID NO: 1886021
cgaguuagcauuugguuaa

SEQ ID NO: 2383467 - RNA, 19 nt, Artificial Sequence
  Description of Artificial Sequence: Synthetic oligonucleotide
  Antisense strand to SEQ ID NO: 2383466
uuaaccaaaugcuaacucg

SEQ ID NO: 2383468 - RNA, 19 nt, Artificial Sequence
  Description of Artificial Sequence: Synthetic oligonucleotide
  Sense strand starting at position 1986 of SEQ ID NO: 1886021
cuccgaagucaagagcauu

SEQ ID NO: 2383469 - RNA, 19 nt, Artificial Sequence
  Description of Artificial Sequence: Synthetic oligonucleotide
  Antisense strand to SEQ ID NO: 2383468
aaugcucuugacuucggag

SEQ ID NO: 2383470 - RNA, 19 nt, Artificial Sequence
  Description of Artificial Sequence: Synthetic oligonucleotide
  Sense strand starting at position 1989 of SEQ ID NO: 1886021
cgaagucaagagcauuaca

SEQ ID NO: 2383471 - RNA, 19 nt, Artificial Sequence
  Description of Artificial Sequence: Synthetic oligonucleotide
  Antisense strand to SEQ ID NO: 2383470
uguaaugcucuugacuucg

SEQ ID NO: 2383472 - RNA, 19 nt, Artificial Sequence
  Description of Artificial Sequence: Synthetic oligonucleotide
  Sense strand starting at position 2097 of SEQ ID NO: 1886021
gcgaaaucguaauuuagcu

SEQ ID NO: 2383473 - RNA, 19 nt, Artificial Sequence
  Description of Artificial Sequence: Synthetic oligonucleotide
  Antisense strand to SEQ ID NO: 2383472
agcuaaauuacgauuucgc

SEQ ID NO: 2383474 - RNA, 19 nt, Artificial Sequence
  Description of Artificial Sequence: Synthetic oligonucleotide
  Sense strand starting at position 2130 of SEQ ID NO: 1886021
gagaauauagcguauuaug

SEQ ID NO: 2383475 - RNA, 19 nt, Artificial Sequence
  Description of Artificial Sequence: Synthetic oligonucleotide
  Antisense strand to SEQ ID NO: 2383474
cauaauacgcuauauucuc

SEQ ID NO: 2383476 - RNA, 19 nt, Artificial Sequence
  Description of Artificial Sequence: Synthetic oligonucleotide
  Sense strand starting at position 2416 of SEQ ID NO: 1886021
guugacaugcucuaccaaa

SEQ ID NO: 2383477 - RNA, 19 nt, Artificial Sequence
  Description of Artificial Sequence: Synthetic oligonucleotide
  Antisense strand to SEQ ID NO: 2383476
uuugguagagcaugucaac

SEQ ID NO: 2383478 - RNA, 19 nt, Artificial Sequence
  Description of Artificial Sequence: Synthetic oligonucleotide
  Sense strand starting at position 2499 of SEQ ID NO: 1886021
gaaacaaaccugggucuau

SEQ ID NO: 2383479 - RNA, 19 nt, Artificial Sequence
  Description of Artificial Sequence: Synthetic oligonucleotide
  Antisense strand to SEQ ID NO: 2383478
auagacccagguuuguuuc

SEQ ID NO: 2383480 - RNA, 19 nt, Artificial Sequence
  Description of Artificial Sequence: Synthetic oligonucleotide
  Sense strand starting at position 2580 of SEQ ID NO: 1886021
ggcagaauccauuggugga

SEQ ID NO: 2383481 - RNA, 19 nt, Artificial Sequence
  Description of Artificial Sequence: Synthetic oligonucleotide
  Antisense strand to SEQ ID NO: 2383480
uccaccaauggauucugcc

SEQ ID NO: 2383482 - RNA, 19 nt, Artificial Sequence
  Description of Artificial Sequence: Synthetic oligonucleotide
  Sense strand starting at position 2581 of SEQ ID NO: 1886021
gcagaauccauugguggac

SEQ ID NO: 2383483 - RNA, 19 nt, Artificial Sequence
  Description of Artificial Sequence: Synthetic oligonucleotide
  Antisense strand to SEQ ID NO: 2383482
guccaccaauggauucugc

SEQ ID NO: 2383484 - RNA, 19 nt, Artificial Sequence
  Description of Artificial Sequence: Synthetic oligonucleotide
  Sense strand starting at position 2628 of SEQ ID NO: 1886021
auguuauuucuguaucggu

SEQ ID NO: 2383485 - RNA, 19 nt, Artificial Sequence
  Description of Artificial Sequence: Synthetic oligonucleotide
  Antisense strand to SEQ ID NO: 2383484
accgauacagaaauaacau

SEQ ID NO: 2383486 - RNA, 19 nt, Artificial Sequence
  Description of Artificial Sequence: Synthetic oligonucleotide
  Sense strand starting at position 2648 of SEQ ID NO: 1886021
uuugguauuauagaggagu

SEQ ID NO: 2383487 - RNA, 19 nt, Artificial Sequence
  Description of Artificial Sequence: Synthetic oligonucleotide
  Antisense strand to SEQ ID NO: 2383486
acuccucuauaauaccaaa

SEQ ID NO: 2383488 - RNA, 19 nt, Artificial Sequence
  Description of Artificial Sequence: Synthetic oligonucleotide
  Sense strand starting at position 2650 of SEQ ID NO: 1886021
ugguauuauagaggaguaa

SEQ ID NO: 2383489 - RNA, 19 nt, Artificial Sequence
  Description of Artificial Sequence: Synthetic oligonucleotide
  Antisense strand to SEQ ID NO: 2383488
uuacuccucuauaauacca

SEQ ID NO: 2383490 - RNA, 19 nt, Artificial Sequence
  Description of Artificial Sequence: Synthetic oligonucleotide
  Sense strand starting at position 2700 of SEQ ID NO: 1886021
cagucacucugagcuaaug

SEQ ID NO: 2383491 - RNA, 19 nt, Artificial Sequence
  Description of Artificial Sequence: Synthetic oligonucleotide
  Antisense strand to SEQ ID NO: 2383490
cauuagcucagagugacug

SEQ ID NO: 2383492 - RNA, 19 nt, Artificial Sequence
  Description of Artificial Sequence: Synthetic oligonucleotide
  Sense strand starting at position 2750 of SEQ ID NO: 1886021
agaaucauuauguggguga

SEQ ID NO: 2383493 - RNA, 19 nt, Artificial Sequence
  Description of Artificial Sequence: Synthetic oligonucleotide
  Antisense strand to SEQ ID NO: 2383492
ucacccacauaaugauucu

SEQ ID NO: 2383494 - RNA, 19 nt, Artificial Sequence
  Description of Artificial Sequence: Synthetic oligonucleotide
  Sense strand starting at position 2752 of SEQ ID NO: 1886021
aaucauuaugugggugaca

SEQ ID NO: 2383495 - RNA, 19 nt, Artificial Sequence
  Description of Artificial Sequence: Synthetic oligonucleotide
  Antisense strand to SEQ ID NO: 2383494
ugucacccacauaaugauu

SEQ ID NO: 2383496 - RNA, 19 nt, Artificial Sequence
  Description of Artificial Sequence: Synthetic oligonucleotide
  Sense strand starting at position 2753 of SEQ ID NO: 1886021
aucauuaugugggugacau

SEQ ID NO: 2383497 - RNA, 19 nt, Artificial Sequence
  Description of Artificial Sequence: Synthetic oligonucleotide
  Antisense strand to SEQ ID NO: 2383496
augucacccacauaaugau

SEQ ID NO: 2383498 - RNA, 19 nt, Artificial Sequence
  Description of Artificial Sequence: Synthetic oligonucleotide
  Sense strand starting at position 2754 of SEQ ID NO: 1886021
ucauuaugugggugacauu

SEQ ID NO: 2383499 - RNA, 19 nt, Artificial Sequence
  Description of Artificial Sequence: Synthetic oligonucleotide
  Antisense strand to SEQ ID NO: 2383498
aaugucacccacauaauga

SEQ ID NO: 2383500 - RNA, 19 nt, Artificial Sequence
  Description of Artificial Sequence: Synthetic oligonucleotide
  Sense strand starting at position 2773 of SEQ ID NO: 1886021
gauaaaugaucgcccagga

SEQ ID NO: 2383501 - RNA, 19 nt, Artificial Sequence
  Description of Artificial Sequence: Synthetic oligonucleotide
  Antisense strand to SEQ ID NO: 2383500
uccugggcgaucauuuauc

SEQ ID NO: 2383502 - RNA, 19 nt, Artificial Sequence
  Description of Artificial Sequence: Synthetic oligonucleotide
  Sense strand starting at position 3171 of SEQ ID NO: 1886021
ggucucuccaaaggaguua

SEQ ID NO: 2383503 - RNA, 19 nt, Artificial Sequence
  Description of Artificial Sequence: Synthetic oligonucleotide
  Antisense strand to SEQ ID NO: 2383502
uaacuccuuuggagagacc

SEQ ID NO: 2383504 - RNA, 19 nt, Artificial Sequence
  Description of Artificial Sequence: Synthetic oligonucleotide
  Sense strand starting at position 3492 of SEQ ID NO: 1886021
gaagguauugagggcagua

SEQ ID NO: 2383505 - RNA, 19 nt, Artificial Sequence
  Description of Artificial Sequence: Synthetic oligonucleotide
  Antisense strand to SEQ ID NO: 2383504
uacugcccucaauaccuuc

SEQ ID NO: 2383506 - RNA, 19 nt, Artificial Sequence
  Description of Artificial Sequence: Synthetic oligonucleotide
  Sense strand starting at position 3494 of SEQ ID NO: 1886021
agguauugagggcaguaau

SEQ ID NO: 2383507 - RNA, 19 nt, Artificial Sequence
  Description of Artificial Sequence: Synthetic oligonucleotide
  Antisense strand to SEQ ID NO: 2383506
auuacugcccucaauaccu

SEQ ID NO: 2383508 - RNA, 19 nt, Artificial Sequence
  Description of Artificial Sequence: Synthetic oligonucleotide
  Sense strand starting at position 3526 of SEQ ID NO: 1886021
uccauaaaucgaugucgga

SEQ ID NO: 2383509 - RNA, 19 nt, Artificial Sequence
  Description of Artificial Sequence: Synthetic oligonucleotide
  Antisense strand to SEQ ID NO: 2383508
uccgacaucgauuuaugga

SEQ ID NO: 2383510 - RNA, 19 nt, Artificial Sequence
  Description of Artificial Sequence: Synthetic oligonucleotide
  Sense strand starting at position 3586 of SEQ ID NO: 1886021
gguggcgaugcuguuuauu

SEQ ID NO: 2383511 - RNA, 19 nt, Artificial Sequence
  Description of Artificial Sequence: Synthetic oligonucleotide
  Antisense strand to SEQ ID NO: 2383510
aauaaacagcaucgccacc

SEQ ID NO: 2383512 - RNA, 19 nt, Artificial Sequence
  Description of Artificial Sequence: Synthetic oligonucleotide
  Sense strand starting at position 3591 of SEQ ID NO: 1886021
cgaugcuguuuauuucuaa

SEQ ID NO: 2383513 - RNA, 19 nt, Artificial Sequence
  Description of Artificial Sequence: Synthetic oligonucleotide
  Antisense strand to SEQ ID NO: 2383512
uuagaaauaaacagcaucg

SEQ ID NO: 2383514 - RNA, 19 nt, Artificial Sequence
  Description of Artificial Sequence: Synthetic oligonucleotide
  Sense strand starting at position 3912 of SEQ ID NO: 1886021
ugaguugaugacugcaacu

SEQ ID NO: 2383515 - RNA, 19 nt, Artificial Sequence
  Description of Artificial Sequence: Synthetic oligonucleotide
  Antisense strand to SEQ ID NO: 2383514
aguugcagucaucaacuca

SEQ ID NO: 2383516 - RNA, 19 nt, Artificial Sequence
  Description of Artificial Sequence: Synthetic oligonucleotide
  Sense strand starting at position 265 of SEQ ID NO: 1886022
gguugcugacuccagucau

SEQ ID NO: 2383517 - RNA, 19 nt, Artificial Sequence
  Description of Artificial Sequence: Synthetic oligonucleotide
  Antisense strand to SEQ ID NO: 2383516
augacuggagucagcaacc

SEQ ID NO: 2383518 - RNA, 19 nt, Artificial Sequence
  Description of Artificial Sequence: Synthetic oligonucleotide
  Sense strand starting at position 434 of SEQ ID NO: 1886022
uguccucaguccuuguauu

SEQ ID NO: 2383519 - RNA, 19 nt, Artificial Sequence
  Description of Artificial Sequence: Synthetic oligonucleotide
  Antisense strand to SEQ ID NO: 2383518
aauacaaggacugaggaca

SEQ ID NO: 2383520 - RNA, 19 nt, Artificial Sequence
  Description of Artificial Sequence: Synthetic oligonucleotide
  Sense strand starting at position 773 of SEQ ID NO: 1886022
agccaugaagacuguuaca

SEQ ID NO: 2383521 - RNA, 19 nt, Artificial Sequence
  Description of Artificial Sequence: Synthetic oligonucleotide
  Antisense strand to SEQ ID NO: 2383520
uguaacagucuucauggcu

SEQ ID NO: 2383522 - RNA, 19 nt, Artificial Sequence
  Description of Artificial Sequence: Synthetic oligonucleotide
  Sense strand starting at position 1097 of SEQ ID NO: 1886022
uccggaaagguuuaaugca

SEQ ID NO: 2383523 - RNA, 19 nt, Artificial Sequence
  Description of Artificial Sequence: Synthetic oligonucleotide
  Antisense strand to SEQ ID NO: 2383522
ugcauuaaaccuuuccgga

SEQ ID NO: 2383524 - RNA, 19 nt, Artificial Sequence
  Description of Artificial Sequence: Synthetic oligonucleotide
  Sense strand starting at position 1684 of SEQ ID NO: 1886022
gcacgaaucugccgcuuua

SEQ ID NO: 2383525 - RNA, 19 nt, Artificial Sequence
  Description of Artificial Sequence: Synthetic oligonucleotide
  Antisense strand to SEQ ID NO: 2383524
uaaagcggcagauucgugc

SEQ ID NO: 2383526 - RNA, 19 nt, Artificial Sequence
  Description of Artificial Sequence: Synthetic oligonucleotide
  Sense strand starting at position 2270 of SEQ ID NO: 1886022
ggagcaaucacguacagag

SEQ ID NO: 2383527 - RNA, 19 nt, Artificial Sequence
  Description of Artificial Sequence: Synthetic oligonucleotide
  Antisense strand to SEQ ID NO: 2383526
cucuguacgugauugcucc

SEQ ID NO: 2383528 - RNA, 19 nt, Artificial Sequence
  Description of Artificial Sequence: Synthetic oligonucleotide
  Sense strand starting at position 2280 of SEQ ID NO: 1886022
cguacagagugcuuccaga

SEQ ID NO: 2383529 - RNA, 19 nt, Artificial Sequence
  Description of Artificial Sequence: Synthetic oligonucleotide
  Antisense strand to SEQ ID NO: 2383528
ucuggaagcacucuguacg

SEQ ID NO: 2383530 - RNA, 19 nt, Artificial Sequence
  Description of Artificial Sequence: Synthetic oligonucleotide
  Sense strand starting at position 2290 of SEQ ID NO: 1886022
gcuuccagaccucauguaa

SEQ ID NO: 2383531 - RNA, 19 nt, Artificial Sequence
  Description of Artificial Sequence: Synthetic oligonucleotide
  Antisense strand to SEQ ID NO: 2383530
uuacaugaggucuggaagc

SEQ ID NO: 2383532 - RNA, 19 nt, Artificial Sequence
  Description of Artificial Sequence: Synthetic oligonucleotide
  Sense strand starting at position 3046 of SEQ ID NO: 1886022
gcaucuucguuggugacuu

SEQ ID NO: 2383533 - RNA, 19 nt, Artificial Sequence
  Description of Artificial Sequence: Synthetic oligonucleotide
  Antisense strand to SEQ ID NO: 2383532
aagucaccaacgaagaugc

SEQ ID NO: 2383534 - RNA, 19 nt, Artificial Sequence
  Description of Artificial Sequence: Synthetic oligonucleotide
  Sense strand starting at position 3208 of SEQ ID NO: 1886022
aucauagcauccgaacauu

SEQ ID NO: 2383535 - RNA, 19 nt, Artificial Sequence
  Description of Artificial Sequence: Synthetic oligonucleotide
  Antisense strand to SEQ ID NO: 2383534
aauguucggaugcuaugau

SEQ ID NO: 2383536 - RNA, 19 nt, Artificial Sequence
  Description of Artificial Sequence: Synthetic oligonucleotide
  Sense strand starting at position 258 of SEQ ID NO: 1886023
agaucuugcagugaucuga

SEQ ID NO: 2383537 - RNA, 19 nt, Artificial Sequence
  Description of Artificial Sequence: Synthetic oligonucleotide
  Antisense strand to SEQ ID NO: 2383536
ucagaucacugcaagaucu

SEQ ID NO: 2383538 - RNA, 19 nt, Artificial Sequence
  Description of Artificial Sequence: Synthetic oligonucleotide
  Sense strand starting at position 463 of SEQ ID NO: 1886023
ggagaacaguugccagaga

SEQ ID NO: 2383539 - RNA, 19 nt, Artificial Sequence
  Description of Artificial Sequence: Synthetic oligonucleotide
  Antisense strand to SEQ ID NO: 2383538
ucucuggcaacuguucucc

SEQ ID NO: 2383540 - RNA, 19 nt, Artificial Sequence
  Description of Artificial Sequence: Synthetic oligonucleotide
  Sense strand starting at position 527 of SEQ ID NO: 1886023
cgucaaucacucuguauuu

SEQ ID NO: 2383541 - RNA, 19 nt, Artificial Sequence
  Description of Artificial Sequence: Synthetic oligonucleotide
  Antisense strand to SEQ ID NO: 2383540
aaauacagagugauugacg

SEQ ID NO: 2383542 - RNA, 19 nt, Artificial Sequence
  Description of Artificial Sequence: Synthetic oligonucleotide
  Sense strand starting at position 573 of SEQ ID NO: 1886023
ucugucauggucuauuauu

SEQ ID NO: 2383543 - RNA, 19 nt, Artificial Sequence
  Description of Artificial Sequence: Synthetic oligonucleotide
  Antisense strand to SEQ ID NO: 2383542
aauaauagaccaugacaga

SEQ ID NO: 2383544 - RNA, 19 nt, Artificial Sequence
  Description of Artificial Sequence: Synthetic oligonucleotide
  Sense strand starting at position 657 of SEQ ID NO: 1886023
acaucuuaguuagcuuaga

SEQ ID NO: 2383545 - RNA, 19 nt, Artificial Sequence
  Description of Artificial Sequence: Synthetic oligonucleotide
  Antisense strand to SEQ ID NO: 2383544
ucuaagcuaacuaagaugu

SEQ ID NO: 2383546 - RNA, 19 nt, Artificial Sequence
  Description of Artificial Sequence: Synthetic oligonucleotide
  Sense strand starting at position 701 of SEQ ID NO: 1886023
gggugucuuaaacgacaga

SEQ ID NO: 2383547 - RNA, 19 nt, Artificial Sequence
  Description of Artificial Sequence: Synthetic oligonucleotide
  Antisense strand to SEQ ID NO: 2383546
ucugucguuuaagacaccc

SEQ ID NO: 2383548 - RNA, 19 nt, Artificial Sequence
  Description of Artificial Sequence: Synthetic oligonucleotide
  Sense strand starting at position 704 of SEQ ID NO: 1886023
ugucuuaaacgacagacau

SEQ ID NO: 2383549 - RNA, 19 nt, Artificial Sequence
  Description of Artificial Sequence: Synthetic oligonucleotide
  Antisense strand to SEQ ID NO: 2383548
augucugucguuuaagaca

SEQ ID NO: 2383550 - RNA, 19 nt, Artificial Sequence
  Description of Artificial Sequence: Synthetic oligonucleotide
  Sense strand starting at position 877 of SEQ ID NO: 1886023
gucucuuaagggcacuaaa

SEQ ID NO: 2383551 - RNA, 19 nt, Artificial Sequence
  Description of Artificial Sequence: Synthetic oligonucleotide
  Antisense strand to SEQ ID NO: 2383550
uuuagugcccuuaagagac

SEQ ID NO: 2383552 - RNA, 19 nt, Artificial Sequence
  Description of Artificial Sequence: Synthetic oligonucleotide
  Sense strand starting at position 979 of SEQ ID NO: 1886023
ggguuagggcuucgacaca

SEQ ID NO: 2383553 - RNA, 19 nt, Artificial Sequence
  Description of Artificial Sequence: Synthetic oligonucleotide
  Antisense strand to SEQ ID NO: 2383552
ugugucgaagcccuaaccc

SEQ ID NO: 2383554 - RNA, 19 nt, Artificial Sequence
  Description of Artificial Sequence: Synthetic oligonucleotide
  Sense strand starting at position 1090 of SEQ ID NO: 1886023
auaugcagagguugacuua

SEQ ID NO: 2383555 - RNA, 19 nt, Artificial Sequence
  Description of Artificial Sequence: Synthetic oligonucleotide
  Antisense strand to SEQ ID NO: 2383554
uaagucaaccucugcauau

SEQ ID NO: 2383556 - RNA, 19 nt, Artificial Sequence
  Description of Artificial Sequence: Synthetic oligonucleotide
  Sense strand starting at position 1101 of SEQ ID NO: 1886023
uugacuuaguccucauuau

SEQ ID NO: 2383557 - RNA, 19 nt, Artificial Sequence
  Description of Artificial Sequence: Synthetic oligonucleotide
  Antisense strand to SEQ ID NO: 2383556
auaaugaggacuaagucaa

SEQ ID NO: 2383558 - RNA, 19 nt, Artificial Sequence
  Description of Artificial Sequence: Synthetic oligonucleotide
  Sense strand starting at position 1102 of SEQ ID NO: 1886023
ugacuuaguccucauuaua

SEQ ID NO: 2383559 - RNA, 19 nt, Artificial Sequence
  Description of Artificial Sequence: Synthetic oligonucleotide
  Antisense strand to SEQ ID NO: 2383558
uauaaugaggacuaaguca

SEQ ID NO: 2383560 - RNA, 19 nt, Artificial Sequence
  Description of Artificial Sequence: Synthetic oligonucleotide
  Sense strand starting at position 1105 of SEQ ID NO: 1886023
cuuaguccucauuauauag

SEQ ID NO: 2383561 - RNA, 19 nt, Artificial Sequence
  Description of Artificial Sequence: Synthetic oligonucleotide
  Antisense strand to SEQ ID NO: 2383560
cuauauaaugaggacuaag

SEQ ID NO: 2383562 - RNA, 19 nt, Artificial Sequence
  Description of Artificial Sequence: Synthetic oligonucleotide
  Sense strand starting at position 1113 of SEQ ID NO: 1886023
ucauuauauagcugaggga

SEQ ID NO: 2383563 - RNA, 19 nt, Artificial Sequence
  Description of Artificial Sequence: Synthetic oligonucleotide
  Antisense strand to SEQ ID NO: 2383562
ucccucagcuauauaauga

SEQ ID NO: 2383564 - RNA, 19 nt, Artificial Sequence
  Description of Artificial Sequence: Synthetic oligonucleotide
  Sense strand starting at position 1128 of SEQ ID NO: 1886023
gggaacugggucuaguuca

SEQ ID NO: 2383565 - RNA, 19 nt, Artificial Sequence
  Description of Artificial Sequence: Synthetic oligonucleotide
  Antisense strand to SEQ ID NO: 2383564
ugaacuagacccaguuccc

SEQ ID NO: 2383566 - RNA, 19 nt, Artificial Sequence
  Description of Artificial Sequence: Synthetic oligonucleotide
  Sense strand starting at position 1159 of SEQ ID NO: 1886023
agguuauaaucaguaaguu

SEQ ID NO: 2383567 - RNA, 19 nt, Artificial Sequence
  Description of Artificial Sequence: Synthetic oligonucleotide
  Antisense strand to SEQ ID NO: 2383566
aacuuacugauuauaaccu

SEQ ID NO: 2383568 - RNA, 19 nt, Artificial Sequence
  Description of Artificial Sequence: Synthetic oligonucleotide
  Sense strand starting at position 1160 of SEQ ID NO: 1886023
gguuauaaucaguaaguug

SEQ ID NO: 2383569 - RNA, 19 nt, Artificial Sequence
  Description of Artificial Sequence: Synthetic oligonucleotide
  Antisense strand to SEQ ID NO: 2383568
caacuuacugauuauaacc

SEQ ID NO: 2383570 - RNA, 19 nt, Artificial Sequence
  Description of Artificial Sequence: Synthetic oligonucleotide
  Sense strand starting at position 1167 of SEQ ID NO: 1886023
aucaguaaguugucacaga

SEQ ID NO: 2383571 - RNA, 19 nt, Artificial Sequence
  Description of Artificial Sequence: Synthetic oligonucleotide
  Antisense strand to SEQ ID NO: 2383570
ucugugacaacuuacugau

SEQ ID NO: 2383572 - RNA, 19 nt, Artificial Sequence
  Description of Artificial Sequence: Synthetic oligonucleotide
  Sense strand starting at position 1176 of SEQ ID NO: 1886023
uugucacagagcuaggauu

SEQ ID NO: 2383573 - RNA, 19 nt, Artificial Sequence
  Description of Artificial Sequence: Synthetic oligonucleotide
  Antisense strand to SEQ ID NO: 2383572
aauccuagcucugugacaa

SEQ ID NO: 2383574 - RNA, 19 nt, Artificial Sequence
  Description of Artificial Sequence: Synthetic oligonucleotide
  Sense strand starting at position 1360 of SEQ ID NO: 1886023
uuugauaacugcuuauaag

SEQ ID NO: 2383575 - RNA, 19 nt, Artificial Sequence
  Description of Artificial Sequence: Synthetic oligonucleotide
  Antisense strand to SEQ ID NO: 2383574
cuuauaagcaguuaucaaa

SEQ ID NO: 2383576 - RNA, 19 nt, Artificial Sequence
  Description of Artificial Sequence: Synthetic oligonucleotide
  Sense strand starting at position 1451 of SEQ ID NO: 1886023
gccaguuugaaaggaggaa

SEQ ID NO: 2383577 - RNA, 19 nt, Artificial Sequence
  Description of Artificial Sequence: Synthetic oligonucleotide
  Antisense strand to SEQ ID NO: 2383576
uuccuccuuucaaacuggc

SEQ ID NO: 2383578 - RNA, 19 nt, Artificial Sequence
  Description of Artificial Sequence: Synthetic oligonucleotide
  Sense strand starting at position 1463 of SEQ ID NO: 1886023
ggaggaauuucuugaaugc

SEQ ID NO: 2383579 - RNA, 19 nt, Artificial Sequence
  Description of Artificial Sequence: Synthetic oligonucleotide
  Antisense strand to SEQ ID NO: 2383578
gcauucaagaaauuccucc

SEQ ID NO: 2383580 - RNA, 19 nt, Artificial Sequence
  Description of Artificial Sequence: Synthetic oligonucleotide
  Sense strand starting at position 1473 of SEQ ID NO: 1886023
cuugaaugcugaucacaug

SEQ ID NO: 2383581 - RNA, 19 nt, Artificial Sequence
  Description of Artificial Sequence: Synthetic oligonucleotide
  Antisense strand to SEQ ID NO: 2383580
caugugaucagcauucaag

SEQ ID NO: 2383582 - RNA, 19 nt, Artificial Sequence
  Description of Artificial Sequence: Synthetic oligonucleotide
  Sense strand starting at position 1490 of SEQ ID NO: 1886023
ugagacaugacucgucaga

SEQ ID NO: 2383583 - RNA, 19 nt, Artificial Sequence
  Description of Artificial Sequence: Synthetic oligonucleotide
  Antisense strand to SEQ ID NO: 2383582
ucugacgagucaugucuca

SEQ ID NO: 2383584 - RNA, 19 nt, Artificial Sequence
  Description of Artificial Sequence: Synthetic oligonucleotide
  Sense strand starting at position 1492 of SEQ ID NO: 1886023
agacaugacucgucagaag

SEQ ID NO: 2383585 - RNA, 19 nt, Artificial Sequence
  Description of Artificial Sequence: Synthetic oligonucleotide
  Antisense strand to SEQ ID NO: 2383584
cuucugacgagucaugucu

SEQ ID NO: 2383586 - RNA, 19 nt, Artificial Sequence
  Description of Artificial Sequence: Synthetic oligonucleotide
  Sense strand starting at position 1519 of SEQ ID NO: 1886023
gguguuaacugaucaaacu

SEQ ID NO: 2383587 - RNA, 19 nt, Artificial Sequence
  Description of Artificial Sequence: Synthetic oligonucleotide
  Antisense strand to SEQ ID NO: 2383586
aguuugaucaguuaacacc

SEQ ID NO: 2383588 - RNA, 19 nt, Artificial Sequence
  Description of Artificial Sequence: Synthetic oligonucleotide
  Sense strand starting at position 1520 of SEQ ID NO: 1886023
guguuaacugaucaaacug

SEQ ID NO: 2383589 - RNA, 19 nt, Artificial Sequence
  Description of Artificial Sequence: Synthetic oligonucleotide
  Antisense strand to SEQ ID NO: 2383588
caguuugaucaguuaacac

SEQ ID NO: 2383590 - RNA, 19 nt, Artificial Sequence
  Description of Artificial Sequence: Synthetic oligonucleotide
  Sense strand starting at position 1585 of SEQ ID NO: 1886023
guccaacaugcugguaaau

SEQ ID NO: 2383591 - RNA, 19 nt, Artificial Sequence
  Description of Artificial Sequence: Synthetic oligonucleotide
  Antisense strand to SEQ ID NO: 2383590
auuuaccagcauguuggac

SEQ ID NO: 2383592 - RNA, 19 nt, Artificial Sequence
  Description of Artificial Sequence: Synthetic oligonucleotide
  Sense strand starting at position 1683 of SEQ ID NO: 1886023
uaaguuaaaccuggguacu

SEQ ID NO: 2383593 - RNA, 19 nt, Artificial Sequence
  Description of Artificial Sequence: Synthetic oligonucleotide
  Antisense strand to SEQ ID NO: 2383592
aguacccagguuuaacuua

SEQ ID NO: 2383594 - RNA, 19 nt, Artificial Sequence
  Description of Artificial Sequence: Synthetic oligonucleotide
  Sense strand starting at position 1684 of SEQ ID NO: 1886023
aaguuaaaccuggguacua

SEQ ID NO: 2383595 - RNA, 19 nt, Artificial Sequence
  Description of Artificial Sequence: Synthetic oligonucleotide
  Antisense strand to SEQ ID NO: 2383594
uaguacccagguuuaacuu

SEQ ID NO: 2383596 - RNA, 19 nt, Artificial Sequence
  Description of Artificial Sequence: Synthetic oligonucleotide
  Sense strand starting at position 1685 of SEQ ID NO: 1886023
aguuaaaccuggguacuaa

SEQ ID NO: 2383597 - RNA, 19 nt, Artificial Sequence
  Description of Artificial Sequence: Synthetic oligonucleotide
  Antisense strand to SEQ ID NO: 2383596
uuaguacccagguuuaacu

SEQ ID NO: 2383598 - RNA, 19 nt, Artificial Sequence
  Description of Artificial Sequence: Synthetic oligonucleotide
  Sense strand starting at position 1686 of SEQ ID NO: 1886023
guuaaaccuggguacuaau

SEQ ID NO: 2383599 - RNA, 19 nt, Artificial Sequence
  Description of Artificial Sequence: Synthetic oligonucleotide
  Antisense strand to SEQ ID NO: 2383598
auuaguacccagguuuaac

SEQ ID NO: 2383600 - RNA, 19 nt, Artificial Sequence
  Description of Artificial Sequence: Synthetic oligonucleotide
  Sense strand starting at position 1738 of SEQ ID NO: 1886023
guacaaggcuagucauuau

SEQ ID NO: 2383601 - RNA, 19 nt, Artificial Sequence
  Description of Artificial Sequence: Synthetic oligonucleotide
  Antisense strand to SEQ ID NO: 2383600
auaaugacuagccuuguac

SEQ ID NO: 2383602 - RNA, 19 nt, Artificial Sequence
  Description of Artificial Sequence: Synthetic oligonucleotide
  Sense strand starting at position 1828 of SEQ ID NO: 1886023
cacagcgauguccauagaa

SEQ ID NO: 2383603 - RNA, 19 nt, Artificial Sequence
  Description of Artificial Sequence: Synthetic oligonucleotide
  Antisense strand to SEQ ID NO: 2383602
uucuauggacaucgcugug

SEQ ID NO: 2383604 - RNA, 19 nt, Artificial Sequence
  Description of Artificial Sequence: Synthetic oligonucleotide
  Sense strand starting at position 1830 of SEQ ID NO: 1886023
cagcgauguccauagaaau

SEQ ID NO: 2383605 - RNA, 19 nt, Artificial Sequence
  Description of Artificial Sequence: Synthetic oligonucleotide
  Antisense strand to SEQ ID NO: 2383604
auuucuauggacaucgcug

SEQ ID NO: 2383606 - RNA, 19 nt, Artificial Sequence
  Description of Artificial Sequence: Synthetic oligonucleotide
  Sense strand starting at position 1879 of SEQ ID NO: 1886023
agaacuugccauuguuaca

SEQ ID NO: 2383607 - RNA, 19 nt, Artificial Sequence
  Description of Artificial Sequence: Synthetic oligonucleotide
  Antisense strand to SEQ ID NO: 2383606
uguaacaauggcaaguucu

SEQ ID NO: 2383608 - RNA, 19 nt, Artificial Sequence
  Description of Artificial Sequence: Synthetic oligonucleotide
  Sense strand starting at position 1976 of SEQ ID NO: 1886023
ucucuuaccuaguuauuga

SEQ ID NO: 2383609 - RNA, 19 nt, Artificial Sequence
  Description of Artificial Sequence: Synthetic oligonucleotide
  Antisense strand to SEQ ID NO: 2383608
ucaauaacuagguaagaga

SEQ ID NO: 2383610 - RNA, 19 nt, Artificial Sequence
  Description of Artificial Sequence: Synthetic oligonucleotide
  Sense strand starting at position 3446 of SEQ ID NO: 1886023
accagugaaugcuugauga

SEQ ID NO: 2383611 - RNA, 19 nt, Artificial Sequence
  Description of Artificial Sequence: Synthetic oligonucleotide
  Antisense strand to SEQ ID NO: 2383610
ucaucaagcauucacuggu

SEQ ID NO: 2383612 - RNA, 19 nt, Artificial Sequence
  Description of Artificial Sequence: Synthetic oligonucleotide
  Sense strand starting at position 3966 of SEQ ID NO: 1886023
gcugaaacguuauucugga

SEQ ID NO: 2383613 - RNA, 19 nt, Artificial Sequence
  Description of Artificial Sequence: Synthetic oligonucleotide
  Antisense strand to SEQ ID NO: 2383612
uccagaauaacguuucagc

SEQ ID NO: 2383614 - RNA, 19 nt, Artificial Sequence
  Description of Artificial Sequence: Synthetic oligonucleotide
  Sense strand starting at position 3967 of SEQ ID NO: 1886023
cugaaacguuauucuggaa

SEQ ID NO: 2383615 - RNA, 19 nt, Artificial Sequence
  Description of Artificial Sequence: Synthetic oligonucleotide
  Antisense strand to SEQ ID NO: 2383614
uuccagaauaacguuucag

SEQ ID NO: 2383616 - RNA, 19 nt, Artificial Sequence
  Description of Artificial Sequence: Synthetic oligonucleotide
  Sense strand starting at position 57 of SEQ ID NO: 1886024
cugacaaagucauaagacu

SEQ ID NO: 2383617 - RNA, 19 nt, Artificial Sequence
  Description of Artificial Sequence: Synthetic oligonucleotide
  Antisense strand to SEQ ID NO: 2383616
agucuuaugacuuugucag

SEQ ID NO: 2383618 - RNA, 19 nt, Artificial Sequence
  Description of Artificial Sequence: Synthetic oligonucleotide
  Sense strand starting at position 66 of SEQ ID NO: 1886024
ucauaagacucagagagaa

SEQ ID NO: 2383619 - RNA, 19 nt, Artificial Sequence
  Description of Artificial Sequence: Synthetic oligonucleotide
  Antisense strand to SEQ ID NO: 2383618
uucucucugagucuuauga

SEQ ID NO: 2383620 - RNA, 19 nt, Artificial Sequence
  Description of Artificial Sequence: Synthetic oligonucleotide
  Sense strand starting at position 122 of SEQ ID NO: 1886024
agggacuagucgcucaaga

SEQ ID NO: 2383621 - RNA, 19 nt, Artificial Sequence
  Description of Artificial Sequence: Synthetic oligonucleotide
  Antisense strand to SEQ ID NO: 2383620
ucuugagcgacuagucccu

SEQ ID NO: 2383622 - RNA, 19 nt, Artificial Sequence
  Description of Artificial Sequence: Synthetic oligonucleotide
  Sense strand starting at position 124 of SEQ ID NO: 1886024
ggacuagucgcucaagaau

SEQ ID NO: 2383623 - RNA, 19 nt, Artificial Sequence
  Description of Artificial Sequence: Synthetic oligonucleotide
  Antisense strand to SEQ ID NO: 2383622
auucuugagcgacuagucc

SEQ ID NO: 2383624 - RNA, 19 nt, Artificial Sequence
  Description of Artificial Sequence: Synthetic oligonucleotide
  Sense strand starting at position 193 of SEQ ID NO: 1886024
gccuguguuguguagugga

SEQ ID NO: 2383625 - RNA, 19 nt, Artificial Sequence
  Description of Artificial Sequence: Synthetic oligonucleotide
  Antisense strand to SEQ ID NO: 2383624
uccacuacacaacacaggc

SEQ ID NO: 2383626 - RNA, 19 nt, Artificial Sequence
  Description of Artificial Sequence: Synthetic oligonucleotide
  Sense strand starting at position 218 of SEQ ID NO: 1886024
guugcugauaccugggaca

SEQ ID NO: 2383627 - RNA, 19 nt, Artificial Sequence
  Description of Artificial Sequence: Synthetic oligonucleotide
  Antisense strand to SEQ ID NO: 2383626
ugucccagguaucagcaac

SEQ ID NO: 2383628 - RNA, 19 nt, Artificial Sequence
  Description of Artificial Sequence: Synthetic oligonucleotide
  Sense strand starting at position 220 of SEQ ID NO: 1886024
ugcugauaccugggacaua

SEQ ID NO: 2383629 - RNA, 19 nt, Artificial Sequence
  Description of Artificial Sequence: Synthetic oligonucleotide
  Antisense strand to SEQ ID NO: 2383628
uaugucccagguaucagca

SEQ ID NO: 2383630 - RNA, 19 nt, Artificial Sequence
  Description of Artificial Sequence: Synthetic oligonucleotide
  Sense strand starting at position 255 of SEQ ID NO: 1886024
gaaguaaagccucgggacu

SEQ ID NO: 2383631 - RNA, 19 nt, Artificial Sequence
  Description of Artificial Sequence: Synthetic oligonucleotide
  Antisense strand to SEQ ID NO: 2383630
agucccgaggcuuuacuuc

SEQ ID NO: 2383632 - RNA, 19 nt, Artificial Sequence
  Description of Artificial Sequence: Synthetic oligonucleotide
  Sense strand starting at position 256 of SEQ ID NO: 1886024
aaguaaagccucgggacuu

SEQ ID NO: 2383633 - RNA, 19 nt, Artificial Sequence
  Description of Artificial Sequence: Synthetic oligonucleotide
  Antisense strand to SEQ ID NO: 2383632
aagucccgaggcuuuacuu

SEQ ID NO: 2383634 - RNA, 19 nt, Artificial Sequence
  Description of Artificial Sequence: Synthetic oligonucleotide
  Sense strand starting at position 445 of SEQ ID NO: 1886024
aggcuugggcccuagaaca

SEQ ID NO: 2383635 - RNA, 19 nt, Artificial Sequence
  Description of Artificial Sequence: Synthetic oligonucleotide
  Antisense strand to SEQ ID NO: 2383634
uguucuagggcccaagccu

SEQ ID NO: 2383636 - RNA, 19 nt, Artificial Sequence
  Description of Artificial Sequence: Synthetic oligonucleotide
  Sense strand starting at position 469 of SEQ ID NO: 1886024
gauggagucgcuggagcaa

SEQ ID NO: 2383637 - RNA, 19 nt, Artificial Sequence
  Description of Artificial Sequence: Synthetic oligonucleotide
  Antisense strand to SEQ ID NO: 2383636
uugcuccagcgacuccauc

SEQ ID NO: 2383638 - RNA, 19 nt, Artificial Sequence
  Description of Artificial Sequence: Synthetic oligonucleotide
  Sense strand starting at position 547 of SEQ ID NO: 1886024
guugaaguuaagggucgau

SEQ ID NO: 2383639 - RNA, 19 nt, Artificial Sequence
  Description of Artificial Sequence: Synthetic oligonucleotide
  Antisense strand to SEQ ID NO: 2383638
aucgacccuuaacuucaac

SEQ ID NO: 2383640 - RNA, 19 nt, Artificial Sequence
  Description of Artificial Sequence: Synthetic oligonucleotide
  Sense strand starting at position 556 of SEQ ID NO: 1886024
aagggucgauccgcagaaa

SEQ ID NO: 2383641 - RNA, 19 nt, Artificial Sequence
  Description of Artificial Sequence: Synthetic oligonucleotide
  Antisense strand to SEQ ID NO: 2383640
uuucugcggaucgacccuu

SEQ ID NO: 2383642 - RNA, 19 nt, Artificial Sequence
  Description of Artificial Sequence: Synthetic oligonucleotide
  Sense strand starting at position 621 of SEQ ID NO: 1886024
gcuccagccugguuagaag

SEQ ID NO: 2383643 - RNA, 19 nt, Artificial Sequence
  Description of Artificial Sequence: Synthetic oligonucleotide
  Antisense strand to SEQ ID NO: 2383642
cuucuaaccaggcuggagc

SEQ ID NO: 2383644 - RNA, 19 nt, Artificial Sequence
  Description of Artificial Sequence: Synthetic oligonucleotide
  Sense strand starting at position 737 of SEQ ID NO: 1886024
ccugauuaguugucuguuu

SEQ ID NO: 2383645 - RNA, 19 nt, Artificial Sequence
  Description of Artificial Sequence: Synthetic oligonucleotide
  Antisense strand to SEQ ID NO: 2383644
aaacagacaacuaaucagg

SEQ ID NO: 2383646 - RNA, 19 nt, Artificial Sequence
  Description of Artificial Sequence: Synthetic oligonucleotide
  Sense strand starting at position 739 of SEQ ID NO: 1886024
ugauuaguugucuguuucu

SEQ ID NO: 2383647 - RNA, 19 nt, Artificial Sequence
  Description of Artificial Sequence: Synthetic oligonucleotide
  Antisense strand to SEQ ID NO: 2383646
agaaacagacaacuaauca

SEQ ID NO: 2383648 - RNA, 19 nt, Artificial Sequence
  Description of Artificial Sequence: Synthetic oligonucleotide
  Sense strand starting at position 742 of SEQ ID NO: 1886024
uuaguugucuguuucuuua

SEQ ID NO: 2383649 - RNA, 19 nt, Artificial Sequence
  Description of Artificial Sequence: Synthetic oligonucleotide
  Antisense strand to SEQ ID NO: 2383648
uaaagaaacagacaacuaa

SEQ ID NO: 2383650 - RNA, 19 nt, Artificial Sequence
  Description of Artificial Sequence: Synthetic oligonucleotide
  Sense strand starting at position 744 of SEQ ID NO: 1886024
aguugucuguuucuuuaau

SEQ ID NO: 2383651 - RNA, 19 nt, Artificial Sequence
  Description of Artificial Sequence: Synthetic oligonucleotide
  Antisense strand to SEQ ID NO: 2383650
auuaaagaaacagacaacu

SEQ ID NO: 2383652 - RNA, 19 nt, Artificial Sequence
  Description of Artificial Sequence: Synthetic oligonucleotide
  Sense strand starting at position 745 of SEQ ID NO: 1886024
guugucuguuucuuuaaug

SEQ ID NO: 2383653 - RNA, 19 nt, Artificial Sequence
  Description of Artificial Sequence: Synthetic oligonucleotide
  Antisense strand to SEQ ID NO: 2383652
cauuaaagaaacagacaac

SEQ ID NO: 2383654 - RNA, 19 nt, Artificial Sequence
  Description of Artificial Sequence: Synthetic oligonucleotide
  Sense strand starting at position 1132 of SEQ ID NO: 1886024
guggucaccgcguccuuaa

SEQ ID NO: 2383655 - RNA, 19 nt, Artificial Sequence
  Description of Artificial Sequence: Synthetic oligonucleotide
  Antisense strand to SEQ ID NO: 2383654
uuaaggacgcggugaccac

SEQ ID NO: 2383656 - RNA, 19 nt, Artificial Sequence
  Description of Artificial Sequence: Synthetic oligonucleotide
  Sense strand starting at position 1594 of SEQ ID NO: 1886024
ccaccuuguucggcagaca

SEQ ID NO: 2383657 - RNA, 19 nt, Artificial Sequence
  Description of Artificial Sequence: Synthetic oligonucleotide
  Antisense strand to SEQ ID NO: 2383656
ugucugccgaacaaggugg

SEQ ID NO: 2383658 - RNA, 19 nt, Artificial Sequence
  Description of Artificial Sequence: Synthetic oligonucleotide
  Sense strand starting at position 1595 of SEQ ID NO: 1886024
caccuuguucggcagacaa

SEQ ID NO: 2383659 - RNA, 19 nt, Artificial Sequence
  Description of Artificial Sequence: Synthetic oligonucleotide
  Antisense strand to SEQ ID NO: 2383658
uugucugccgaacaaggug

SEQ ID NO: 2383660 - RNA, 19 nt, Artificial Sequence
  Description of Artificial Sequence: Synthetic oligonucleotide
  Sense strand starting at position 1597 of SEQ ID NO: 1886024
ccuuguucggcagacaaag

SEQ ID NO: 2383661 - RNA, 19 nt, Artificial Sequence
  Description of Artificial Sequence: Synthetic oligonucleotide
  Antisense strand to SEQ ID NO: 2383660
cuuugucugccgaacaagg

SEQ ID NO: 2383662 - RNA, 19 nt, Artificial Sequence
  Description of Artificial Sequence: Synthetic oligonucleotide
  Sense strand starting at position 1848 of SEQ ID NO: 1886024
cggugugaaguucuguguu

SEQ ID NO: 2383663 - RNA, 19 nt, Artificial Sequence
  Description of Artificial Sequence: Synthetic oligonucleotide
  Antisense strand to SEQ ID NO: 2383662
aacacagaacuucacaccg

SEQ ID NO: 2383664 - RNA, 19 nt, Artificial Sequence
  Description of Artificial Sequence: Synthetic oligonucleotide
  Sense strand starting at position 1850 of SEQ ID NO: 1886024
gugugaaguucuguguucu

SEQ ID NO: 2383665 - RNA, 19 nt, Artificial Sequence
  Description of Artificial Sequence: Synthetic oligonucleotide
  Antisense strand to SEQ ID NO: 2383664
agaacacagaacuucacac

SEQ ID NO: 2383666 - RNA, 19 nt, Artificial Sequence
  Description of Artificial Sequence: Synthetic oligonucleotide
  Sense strand starting at position 1851 of SEQ ID NO: 1886024
ugugaaguucuguguucug

SEQ ID NO: 2383667 - RNA, 19 nt, Artificial Sequence
  Description of Artificial Sequence: Synthetic oligonucleotide
  Antisense strand to SEQ ID NO: 2383666
cagaacacagaacuucaca

SEQ ID NO: 2383668 - RNA, 19 nt, Artificial Sequence
  Description of Artificial Sequence: Synthetic oligonucleotide
  Sense strand starting at position 1854 of SEQ ID NO: 1886024
gaaguucuguguucugaac

SEQ ID NO: 2383669 - RNA, 19 nt, Artificial Sequence
  Description of Artificial Sequence: Synthetic oligonucleotide
  Antisense strand to SEQ ID NO: 2383668
guucagaacacagaacuuc

SEQ ID NO: 2383670 - RNA, 19 nt, Artificial Sequence
  Description of Artificial Sequence: Synthetic oligonucleotide
  Sense strand starting at position 1882 of SEQ ID NO: 1886024
gcaagaugcgauggucuca

SEQ ID NO: 2383671 - RNA, 19 nt, Artificial Sequence
  Description of Artificial Sequence: Synthetic oligonucleotide
  Antisense strand to SEQ ID NO: 2383670
ugagaccaucgcaucuugc

SEQ ID NO: 2383672 - RNA, 19 nt, Artificial Sequence
  Description of Artificial Sequence: Synthetic oligonucleotide
  Sense strand starting at position 2774 of SEQ ID NO: 1886024
ggcuucaagcgcugguuua

SEQ ID NO: 2383673 - RNA, 19 nt, Artificial Sequence
  Description of Artificial Sequence: Synthetic oligonucleotide
  Antisense strand to SEQ ID NO: 2383672
uaaaccagcgcuugaagcc

SEQ ID NO: 2383674 - RNA, 19 nt, Artificial Sequence
  Description of Artificial Sequence: Synthetic oligonucleotide
  Sense strand starting at position 2965 of SEQ ID NO: 1886024
gggcuuauaucagcccaga

SEQ ID NO: 2383675 - RNA, 19 nt, Artificial Sequence
  Description of Artificial Sequence: Synthetic oligonucleotide
  Antisense strand to SEQ ID NO: 2383674
ucugggcugauauaagccc

SEQ ID NO: 2383676 - RNA, 19 nt, Artificial Sequence
  Description of Artificial Sequence: Synthetic oligonucleotide
  Sense strand starting at position 3340 of SEQ ID NO: 1886024
gagggugaguucgcgugaa

SEQ ID NO: 2383677 - RNA, 19 nt, Artificial Sequence
  Description of Artificial Sequence: Synthetic oligonucleotide
  Antisense strand to SEQ ID NO: 2383676
uucacgcgaacucacccuc

SEQ ID NO: 2383678 - RNA, 19 nt, Artificial Sequence
  Description of Artificial Sequence: Synthetic oligonucleotide
  Sense strand starting at position 3343 of SEQ ID NO: 1886024
ggugaguucgcgugaaugu

SEQ ID NO: 2383679 - RNA, 19 nt, Artificial Sequence
  Description of Artificial Sequence: Synthetic oligonucleotide
  Antisense strand to SEQ ID NO: 2383678
acauucacgcgaacucacc

SEQ ID NO: 2383680 - RNA, 19 nt, Artificial Sequence
  Description of Artificial Sequence: Synthetic oligonucleotide
  Sense strand starting at position 3344 of SEQ ID NO: 1886024
gugaguucgcgugaaugug

SEQ ID NO: 2383681 - RNA, 19 nt, Artificial Sequence
  Description of Artificial Sequence: Synthetic oligonucleotide
  Antisense strand to SEQ ID NO: 2383680
cacauucacgcgaacucac

SEQ ID NO: 2383682 - RNA, 19 nt, Artificial Sequence
  Description of Artificial Sequence: Synthetic oligonucleotide
  Sense strand starting at position 3345 of SEQ ID NO: 1886024
ugaguucgcgugaaugugu

SEQ ID NO: 2383683 - RNA, 19 nt, Artificial Sequence
  Description of Artificial Sequence: Synthetic oligonucleotide
  Antisense strand to SEQ ID NO: 2383682
acacauucacgcgaacuca

SEQ ID NO: 2383684 - RNA, 19 nt, Artificial Sequence
  Description of Artificial Sequence: Synthetic oligonucleotide
  Sense strand starting at position 3447 of SEQ ID NO: 1886024
acacauugaugcgauuauu

SEQ ID NO: 2383685 - RNA, 19 nt, Artificial Sequence
  Description of Artificial Sequence: Synthetic oligonucleotide
  Antisense strand to SEQ ID NO: 2383684
aauaaucgcaucaaugugu

SEQ ID NO: 2383686 - RNA, 19 nt, Artificial Sequence
  Description of Artificial Sequence: Synthetic oligonucleotide
  Sense strand starting at position 3456 of SEQ ID NO: 1886024
ugcgauuauuaccugacca

SEQ ID NO: 2383687 - RNA, 19 nt, Artificial Sequence
  Description of Artificial Sequence: Synthetic oligonucleotide
  Antisense strand to SEQ ID NO: 2383686
uggucagguaauaaucgca

SEQ ID NO: 2383688 - RNA, 19 nt, Artificial Sequence
  Description of Artificial Sequence: Synthetic oligonucleotide
  Sense strand starting at position 3458 of SEQ ID NO: 1886024
cgauuauuaccugaccaug

SEQ ID NO: 2383689 - RNA, 19 nt, Artificial Sequence
  Description of Artificial Sequence: Synthetic oligonucleotide
  Antisense strand to SEQ ID NO: 2383688
cauggucagguaauaaucg

SEQ ID NO: 2383690 - RNA, 19 nt, Artificial Sequence
  Description of Artificial Sequence: Synthetic oligonucleotide
  Sense strand starting at position 3480 of SEQ ID NO: 1886024
gauuguaaacugugaaggu

SEQ ID NO: 2383691 - RNA, 19 nt, Artificial Sequence
  Description of Artificial Sequence: Synthetic oligonucleotide
  Antisense strand to SEQ ID NO: 2383690
accuucacaguuuacaauc

SEQ ID NO: 2383692 - RNA, 19 nt, Artificial Sequence
  Description of Artificial Sequence: Synthetic oligonucleotide
  Sense strand starting at position 3562 of SEQ ID NO: 1886024
uggugugaucagggacagu

SEQ ID NO: 2383693 - RNA, 19 nt, Artificial Sequence
  Description of Artificial Sequence: Synthetic oligonucleotide
  Antisense strand to SEQ ID NO: 2383692
acugucccugaucacacca

SEQ ID NO: 2383694 - RNA, 19 nt, Artificial Sequence
  Description of Artificial Sequence: Synthetic oligonucleotide
  Sense strand starting at position 3706 of SEQ ID NO: 1886024
gagggucuccguggcuuua

SEQ ID NO: 2383695 - RNA, 19 nt, Artificial Sequence
  Description of Artificial Sequence: Synthetic oligonucleotide
  Antisense strand to SEQ ID NO: 2383694
uaaagccacggagacccuc

SEQ ID NO: 2383696 - RNA, 19 nt, Artificial Sequence
  Description of Artificial Sequence: Synthetic oligonucleotide
  Sense strand starting at position 48 of SEQ ID NO: 1886025
ccuccuugugcuuaaggga

SEQ ID NO: 2383697 - RNA, 19 nt, Artificial Sequence
  Description of Artificial Sequence: Synthetic oligonucleotide
  Antisense strand to SEQ ID NO: 2383696
ucccuuaagcacaaggagg

SEQ ID NO: 2383698 - RNA, 19 nt, Artificial Sequence
  Description of Artificial Sequence: Synthetic oligonucleotide
  Sense strand starting at position 335 of SEQ ID NO: 1886025
ggaugagauuuggaccuag

SEQ ID NO: 2383699 - RNA, 19 nt, Artificial Sequence
  Description of Artificial Sequence: Synthetic oligonucleotide
  Antisense strand to SEQ ID NO: 2383698
cuagguccaaaucucaucc

SEQ ID NO: 2383700 - RNA, 19 nt, Artificial Sequence
  Description of Artificial Sequence: Synthetic oligonucleotide
  Sense strand starting at position 367 of SEQ ID NO: 1886025
ucccaagucuguguggaga

SEQ ID NO: 2383701 - RNA, 19 nt, Artificial Sequence
  Description of Artificial Sequence: Synthetic oligonucleotide
  Antisense strand to SEQ ID NO: 2383700
ucuccacacagacuuggga

SEQ ID NO: 2383702 - RNA, 19 nt, Artificial Sequence
  Description of Artificial Sequence: Synthetic oligonucleotide
  Sense strand starting at position 485 of SEQ ID NO: 1886025
guuuacagaggcuauguau

SEQ ID NO: 2383703 - RNA, 19 nt, Artificial Sequence
  Description of Artificial Sequence: Synthetic oligonucleotide
  Antisense strand to SEQ ID NO: 2383702
auacauagccucuguaaac

SEQ ID NO: 2383704 - RNA, 19 nt, Artificial Sequence
  Description of Artificial Sequence: Synthetic oligonucleotide
  Sense strand starting at position 494 of SEQ ID NO: 1886025
ggcuauguaucacuggagu

SEQ ID NO: 2383705 - RNA, 19 nt, Artificial Sequence
  Description of Artificial Sequence: Synthetic oligonucleotide
  Antisense strand to SEQ ID NO: 2383704
acuccagugauacauagcc

SEQ ID NO: 2383706 - RNA, 19 nt, Artificial Sequence
  Description of Artificial Sequence: Synthetic oligonucleotide
  Sense strand starting at position 608 of SEQ ID NO: 1886025
ugagaaaccugcuuaguuc

SEQ ID NO: 2383707 - RNA, 19 nt, Artificial Sequence
  Description of Artificial Sequence: Synthetic oligonucleotide
  Antisense strand to SEQ ID NO: 2383706
gaacuaagcagguuucuca

SEQ ID NO: 2383708 - RNA, 19 nt, Artificial Sequence
  Description of Artificial Sequence: Synthetic oligonucleotide
  Sense strand starting at position 700 of SEQ ID NO: 1886025
ccugauguuugaucuaaga

SEQ ID NO: 2383709 - RNA, 19 nt, Artificial Sequence
  Description of Artificial Sequence: Synthetic oligonucleotide
  Antisense strand to SEQ ID NO: 2383708
ucuuagaucaaacaucagg

SEQ ID NO: 2383710 - RNA, 19 nt, Artificial Sequence
  Description of Artificial Sequence: Synthetic oligonucleotide
  Sense strand starting at position 702 of SEQ ID NO: 1886025
ugauguuugaucuaagagc

SEQ ID NO: 2383711 - RNA, 19 nt, Artificial Sequence
  Description of Artificial Sequence: Synthetic oligonucleotide
  Antisense strand to SEQ ID NO: 2383710
gcucuuagaucaaacauca

SEQ ID NO: 2383712 - RNA, 19 nt, Artificial Sequence
  Description of Artificial Sequence: Synthetic oligonucleotide
  Sense strand starting at position 737 of SEQ ID NO: 1886025
agguaagaccugugggcau

SEQ ID NO: 2383713 - RNA, 19 nt, Artificial Sequence
  Description of Artificial Sequence: Synthetic oligonucleotide
  Antisense strand to SEQ ID NO: 2383712
augcccacaggucuuaccu

SEQ ID NO: 2383714 - RNA, 19 nt, Artificial Sequence
  Description of Artificial Sequence: Synthetic oligonucleotide
  Sense strand starting at position 820 of SEQ ID NO: 1886025
ggcaucuuuguuggaagga

SEQ ID NO: 2383715 - RNA, 19 nt, Artificial Sequence
  Description of Artificial Sequence: Synthetic oligonucleotide
  Antisense strand to SEQ ID NO: 2383714
uccuuccaacaaagaugcc

SEQ ID NO: 2383716 - RNA, 19 nt, Artificial Sequence
  Description of Artificial Sequence: Synthetic oligonucleotide
  Sense strand starting at position 841 of SEQ ID NO: 1886025
cagaauuggcuccagcaga

SEQ ID NO: 2383717 - RNA, 19 nt, Artificial Sequence
  Description of Artificial Sequence: Synthetic oligonucleotide
  Antisense strand to SEQ ID NO: 2383716
ucugcuggagccaauucug

SEQ ID NO: 2383718 - RNA, 19 nt, Artificial Sequence
  Description of Artificial Sequence: Synthetic oligonucleotide
  Sense strand starting at position 993 of SEQ ID NO: 1886025
uccauaguaucuucugcau

SEQ ID NO: 2383719 - RNA, 19 nt, Artificial Sequence
  Description of Artificial Sequence: Synthetic oligonucleotide
  Antisense strand to SEQ ID NO: 2383718
augcagaagauacuaugga

SEQ ID NO: 2383720 - RNA, 19 nt, Artificial Sequence
  Description of Artificial Sequence: Synthetic oligonucleotide
  Sense strand starting at position 1310 of SEQ ID NO: 1886025
gcuuauuacugggugaguc

SEQ ID NO: 2383721 - RNA, 19 nt, Artificial Sequence
  Description of Artificial Sequence: Synthetic oligonucleotide
  Antisense strand to SEQ ID NO: 2383720
gacucacccaguaauaagc

SEQ ID NO: 2383722 - RNA, 19 nt, Artificial Sequence
  Description of Artificial Sequence: Synthetic oligonucleotide
  Sense strand starting at position 1311 of SEQ ID NO: 1886025
cuuauuacugggugagucu

SEQ ID NO: 2383723 - RNA, 19 nt, Artificial Sequence
  Description of Artificial Sequence: Synthetic oligonucleotide
  Antisense strand to SEQ ID NO: 2383722
agacucacccaguaauaag

SEQ ID NO: 2383724 - RNA, 19 nt, Artificial Sequence
  Description of Artificial Sequence: Synthetic oligonucleotide
  Sense strand starting at position 1634 of SEQ ID NO: 1886025
gguuuacagcuauggaaga

SEQ ID NO: 2383725 - RNA, 19 nt, Artificial Sequence
  Description of Artificial Sequence: Synthetic oligonucleotide
  Antisense strand to SEQ ID NO: 2383724
ucuuccauagcuguaaacc

SEQ ID NO: 2383726 - RNA, 19 nt, Artificial Sequence
  Description of Artificial Sequence: Synthetic oligonucleotide
  Sense strand starting at position 1716 of SEQ ID NO: 1886025
gcugaagacuucuccaguu

SEQ ID NO: 2383727 - RNA, 19 nt, Artificial Sequence
  Description of Artificial Sequence: Synthetic oligonucleotide
  Antisense strand to SEQ ID NO: 2383726
aacuggagaagucuucagc

SEQ ID NO: 2383728 - RNA, 19 nt, Artificial Sequence
  Description of Artificial Sequence: Synthetic oligonucleotide
  Sense strand starting at position 1718 of SEQ ID NO: 1886025
ugaagacuucuccaguuac

SEQ ID NO: 2383729 - RNA, 19 nt, Artificial Sequence
  Description of Artificial Sequence: Synthetic oligonucleotide
  Antisense strand to SEQ ID NO: 2383728
guaacuggagaagucuuca

SEQ ID NO: 2383730 - RNA, 19 nt, Artificial Sequence
  Description of Artificial Sequence: Synthetic oligonucleotide
  Sense strand starting at position 1894 of SEQ ID NO: 1886025
gugcauuugaugugcaugu

SEQ ID NO: 2383731 - RNA, 19 nt, Artificial Sequence
  Description of Artificial Sequence: Synthetic oligonucleotide
  Antisense strand to SEQ ID NO: 2383730
acaugcacaucaaaugcac

SEQ ID NO: 2383732 - RNA, 19 nt, Artificial Sequence
  Description of Artificial Sequence: Synthetic oligonucleotide
  Sense strand starting at position 1896 of SEQ ID NO: 1886025
gcauuugaugugcauguga

SEQ ID NO: 2383733 - RNA, 19 nt, Artificial Sequence
  Description of Artificial Sequence: Synthetic oligonucleotide
  Antisense strand to SEQ ID NO: 2383732
ucacaugcacaucaaaugc

SEQ ID NO: 2383734 - RNA, 19 nt, Artificial Sequence
  Description of Artificial Sequence: Synthetic oligonucleotide
  Sense strand starting at position 1898 of SEQ ID NO: 1886025
auuugaugugcaugugagu

SEQ ID NO: 2383735 - RNA, 19 nt, Artificial Sequence
  Description of Artificial Sequence: Synthetic oligonucleotide
  Antisense strand to SEQ ID NO: 2383734
acucacaugcacaucaaau

SEQ ID NO: 2383736 - RNA, 19 nt, Artificial Sequence
  Description of Artificial Sequence: Synthetic oligonucleotide
  Sense strand starting at position 2016 of SEQ ID NO: 1886025
ggccucaacuuccugugaa

SEQ ID NO: 2383737 - RNA, 19 nt, Artificial Sequence
  Description of Artificial Sequence: Synthetic oligonucleotide
  Antisense strand to SEQ ID NO: 2383736
uucacaggaaguugaggcc

SEQ ID NO: 2383738 - RNA, 19 nt, Artificial Sequence
  Description of Artificial Sequence: Synthetic oligonucleotide
  Sense strand starting at position 2123 of SEQ ID NO: 1886025
aagguuuguuuaucuaaag

SEQ ID NO: 2383739 - RNA, 19 nt, Artificial Sequence
  Description of Artificial Sequence: Synthetic oligonucleotide
  Antisense strand to SEQ ID NO: 2383738
cuuuagauaaacaaaccuu

SEQ ID NO: 2383740 - RNA, 19 nt, Artificial Sequence
  Description of Artificial Sequence: Synthetic oligonucleotide
  Sense strand starting at position 2124 of SEQ ID NO: 1886025
agguuuguuuaucuaaagu

SEQ ID NO: 2383741 - RNA, 19 nt, Artificial Sequence
  Description of Artificial Sequence: Synthetic oligonucleotide
  Antisense strand to SEQ ID NO: 2383740
acuuuagauaaacaaaccu

SEQ ID NO: 2383742 - RNA, 19 nt, Artificial Sequence
  Description of Artificial Sequence: Synthetic oligonucleotide
  Sense strand starting at position 2265 of SEQ ID NO: 1886025
cagagcucucagggaauca

SEQ ID NO: 2383743 - RNA, 19 nt, Artificial Sequence
  Description of Artificial Sequence: Synthetic oligonucleotide
  Antisense strand to SEQ ID NO: 2383742
ugauucccugagagcucug

SEQ ID NO: 2383744 - RNA, 19 nt, Artificial Sequence
  Description of Artificial Sequence: Synthetic oligonucleotide
  Sense strand starting at position 2321 of SEQ ID NO: 1886025
cgacucucccucugaaagu

SEQ ID NO: 2383745 - RNA, 19 nt, Artificial Sequence
  Description of Artificial Sequence: Synthetic oligonucleotide
  Antisense strand to SEQ ID NO: 2383744
acuuucagagggagagucg

SEQ ID NO: 2383746 - RNA, 19 nt, Artificial Sequence
  Description of Artificial Sequence: Synthetic oligonucleotide
  Sense strand starting at position 2458 of SEQ ID NO: 1886025
gugcuccauccauaaugau

SEQ ID NO: 2383747 - RNA, 19 nt, Artificial Sequence
  Description of Artificial Sequence: Synthetic oligonucleotide
  Antisense strand to SEQ ID NO: 2383746
aucauuauggauggagcac

SEQ ID NO: 2383748 - RNA, 19 nt, Artificial Sequence
  Description of Artificial Sequence: Synthetic oligonucleotide
  Sense strand starting at position 2525 of SEQ ID NO: 1886025
acuugaaguagaugauguu

SEQ ID NO: 2383749 - RNA, 19 nt, Artificial Sequence
  Description of Artificial Sequence: Synthetic oligonucleotide
  Antisense strand to SEQ ID NO: 2383748
aacaucaucuacuucaagu

SEQ ID NO: 2383750 - RNA, 19 nt, Artificial Sequence
  Description of Artificial Sequence: Synthetic oligonucleotide
  Sense strand starting at position 2745 of SEQ ID NO: 1886025
ccuuccugaccuggagaaa

SEQ ID NO: 2383751 - RNA, 19 nt, Artificial Sequence
  Description of Artificial Sequence: Synthetic oligonucleotide
  Antisense strand to SEQ ID NO: 2383750
uuucuccaggucaggaagg

SEQ ID NO: 2383752 - RNA, 19 nt, Artificial Sequence
  Description of Artificial Sequence: Synthetic oligonucleotide
  Sense strand starting at position 3134 of SEQ ID NO: 1886025
ucaguuuaaccuuggacaa

SEQ ID NO: 2383753 - RNA, 19 nt, Artificial Sequence
  Description of Artificial Sequence: Synthetic oligonucleotide
  Antisense strand to SEQ ID NO: 2383752
uuguccaagguuaaacuga

SEQ ID NO: 2383754 - RNA, 19 nt, Artificial Sequence
  Description of Artificial Sequence: Synthetic oligonucleotide
  Sense strand starting at position 3393 of SEQ ID NO: 1886025
cuucuucuguggcuagaga

SEQ ID NO: 2383755 - RNA, 19 nt, Artificial Sequence
  Description of Artificial Sequence: Synthetic oligonucleotide
  Antisense strand to SEQ ID NO: 2383754
ucucuagccacagaagaag

SEQ ID NO: 2383756 - RNA, 19 nt, Artificial Sequence
  Description of Artificial Sequence: Synthetic oligonucleotide
  Sense strand starting at position 3394 of SEQ ID NO: 1886025
uucuucuguggcuagagaa

SEQ ID NO: 2383757 - RNA, 19 nt, Artificial Sequence
  Description of Artificial Sequence: Synthetic oligonucleotide
  Antisense strand to SEQ ID NO: 2383756
uucucuagccacagaagaa

SEQ ID NO: 2383758 - RNA, 19 nt, Artificial Sequence
  Description of Artificial Sequence: Synthetic oligonucleotide
  Sense strand starting at position 3417 of SEQ ID NO: 1886025
ggacaagcuguccauccuu

SEQ ID NO: 2383759 - RNA, 19 nt, Artificial Sequence
  Description of Artificial Sequence: Synthetic oligonucleotide
  Antisense strand to SEQ ID NO: 2383758
aaggauggacagcuugucc

SEQ ID NO: 2383760 - RNA, 19 nt, Artificial Sequence
  Description of Artificial Sequence: Synthetic oligonucleotide
  Sense strand starting at position 3686 of SEQ ID NO: 1886025
cccagacuguggucagaga

SEQ ID NO: 2383761 - RNA, 19 nt, Artificial Sequence
  Description of Artificial Sequence: Synthetic oligonucleotide
  Antisense strand to SEQ ID NO: 2383760
ucucugaccacagucuggg

SEQ ID NO: 2383762 - RNA, 19 nt, Artificial Sequence
  Description of Artificial Sequence: Synthetic oligonucleotide
  Sense strand starting at position 3744 of SEQ ID NO: 1886025
ugcuuuauggaguaacaua

SEQ ID NO: 2383763 - RNA, 19 nt, Artificial Sequence
  Description of Artificial Sequence: Synthetic oligonucleotide
  Antisense strand to SEQ ID NO: 2383762
uauguuacuccauaaagca

SEQ ID NO: 2383764 - RNA, 19 nt, Artificial Sequence
  Description of Artificial Sequence: Synthetic oligonucleotide
  Sense strand starting at position 3751 of SEQ ID NO: 1886025
uggaguaacauauggucua

SEQ ID NO: 2383765 - RNA, 19 nt, Artificial Sequence
  Description of Artificial Sequence: Synthetic oligonucleotide
  Antisense strand to SEQ ID NO: 2383764
uagaccauauguuacucca

SEQ ID NO: 2383766 - RNA, 19 nt, Artificial Sequence
  Description of Artificial Sequence: Synthetic oligonucleotide
  Sense strand starting at position 3765 of SEQ ID NO: 1886025
gucuacucucgugaacaua

SEQ ID NO: 2383767 - RNA, 19 nt, Artificial Sequence
  Description of Artificial Sequence: Synthetic oligonucleotide
  Antisense strand to SEQ ID NO: 2383766
uauguucacgagaguagac

SEQ ID NO: 2383768 - RNA, 19 nt, Artificial Sequence
  Description of Artificial Sequence: Synthetic oligonucleotide
  Sense strand starting at position 3810 of SEQ ID NO: 1886025
ugcagaguaggguauacua

SEQ ID NO: 2383769 - RNA, 19 nt, Artificial Sequence
  Description of Artificial Sequence: Synthetic oligonucleotide
  Antisense strand to SEQ ID NO: 2383768
uaguauacccuacucugca

SEQ ID NO: 2383770 - RNA, 19 nt, Artificial Sequence
  Description of Artificial Sequence: Synthetic oligonucleotide
  Sense strand starting at position 3833 of SEQ ID NO: 1886025
uaucaauuaggucacggua

SEQ ID NO: 2383771 - RNA, 19 nt, Artificial Sequence
  Description of Artificial Sequence: Synthetic oligonucleotide
  Antisense strand to SEQ ID NO: 2383770
uaccgugaccuaauugaua

SEQ ID NO: 2383772 - RNA, 19 nt, Artificial Sequence
  Description of Artificial Sequence: Synthetic oligonucleotide
  Sense strand starting at position 3836 of SEQ ID NO: 1886025
caauuaggucacgguaguu

SEQ ID NO: 2383773 - RNA, 19 nt, Artificial Sequence
  Description of Artificial Sequence: Synthetic oligonucleotide
  Antisense strand to SEQ ID NO: 2383772
aacuaccgugaccuaauug

SEQ ID NO: 2383774 - RNA, 19 nt, Artificial Sequence
  Description of Artificial Sequence: Synthetic oligonucleotide
  Sense strand starting at position 3842 of SEQ ID NO: 1886025
ggucacgguaguugauaau

SEQ ID NO: 2383775 - RNA, 19 nt, Artificial Sequence
  Description of Artificial Sequence: Synthetic oligonucleotide
  Antisense strand to SEQ ID NO: 2383774
auuaucaacuaccgugacc

SEQ ID NO: 2383776 - RNA, 19 nt, Artificial Sequence
  Description of Artificial Sequence: Synthetic oligonucleotide
  Sense strand starting at position 259 of SEQ ID NO: 1886026
agacaugcagcuggucaua

SEQ ID NO: 2383777 - RNA, 19 nt, Artificial Sequence
  Description of Artificial Sequence: Synthetic oligonucleotide
  Antisense strand to SEQ ID NO: 2383776
uaugaccagcugcaugucu

SEQ ID NO: 2383778 - RNA, 19 nt, Artificial Sequence
  Description of Artificial Sequence: Synthetic oligonucleotide
  Sense strand starting at position 261 of SEQ ID NO: 1886026
acaugcagcuggucauauu

SEQ ID NO: 2383779 - RNA, 19 nt, Artificial Sequence
  Description of Artificial Sequence: Synthetic oligonucleotide
  Antisense strand to SEQ ID NO: 2383778
aauaugaccagcugcaugu

SEQ ID NO: 2383780 - RNA, 19 nt, Artificial Sequence
  Description of Artificial Sequence: Synthetic oligonucleotide
  Sense strand starting at position 1175 of SEQ ID NO: 1886026
guggcugcucugugagguu

SEQ ID NO: 2383781 - RNA, 19 nt, Artificial Sequence
  Description of Artificial Sequence: Synthetic oligonucleotide
  Antisense strand to SEQ ID NO: 2383780
aaccucacagagcagccac

SEQ ID NO: 2383782 - RNA, 19 nt, Artificial Sequence
  Description of Artificial Sequence: Synthetic oligonucleotide
  Sense strand starting at position 1184 of SEQ ID NO: 1886026
cugugagguuccuggguaa

SEQ ID NO: 2383783 - RNA, 19 nt, Artificial Sequence
  Description of Artificial Sequence: Synthetic oligonucleotide
  Antisense strand to SEQ ID NO: 2383782
uuacccaggaaccucacag

SEQ ID NO: 2383784 - RNA, 19 nt, Artificial Sequence
  Description of Artificial Sequence: Synthetic oligonucleotide
  Sense strand starting at position 1187 of SEQ ID NO: 1886026
ugagguuccuggguaagca

SEQ ID NO: 2383785 - RNA, 19 nt, Artificial Sequence
  Description of Artificial Sequence: Synthetic oligonucleotide
  Antisense strand to SEQ ID NO: 2383784
ugcuuacccaggaaccuca

SEQ ID NO: 2383786 - RNA, 19 nt, Artificial Sequence
  Description of Artificial Sequence: Synthetic oligonucleotide
  Sense strand starting at position 29 of SEQ ID NO: 1886027
cuuauauucuaggcgucua

SEQ ID NO: 2383787 - RNA, 19 nt, Artificial Sequence
  Description of Artificial Sequence: Synthetic oligonucleotide
  Antisense strand to SEQ ID NO: 2383786
uagacgccuagaauauaag

SEQ ID NO: 2383788 - RNA, 19 nt, Artificial Sequence
  Description of Artificial Sequence: Synthetic oligonucleotide
  Sense strand starting at position 79 of SEQ ID NO: 1886027
cucugugauucucuuuacu

SEQ ID NO: 2383789 - RNA, 19 nt, Artificial Sequence
  Description of Artificial Sequence: Synthetic oligonucleotide
  Antisense strand to SEQ ID NO: 2383788
aguaaagagaaucacagag

SEQ ID NO: 2383790 - RNA, 19 nt, Artificial Sequence
  Description of Artificial Sequence: Synthetic oligonucleotide
  Sense strand starting at position 81 of SEQ ID NO: 1886027
cugugauucucuuuacuuu

SEQ ID NO: 2383791 - RNA, 19 nt, Artificial Sequence
  Description of Artificial Sequence: Synthetic oligonucleotide
  Antisense strand to SEQ ID NO: 2383790
aaaguaaagagaaucacag

SEQ ID NO: 2383792 - RNA, 19 nt, Artificial Sequence
  Description of Artificial Sequence: Synthetic oligonucleotide
  Sense strand starting at position 159 of SEQ ID NO: 1886027
aggguuauacugcaucuaa

SEQ ID NO: 2383793 - RNA, 19 nt, Artificial Sequence
  Description of Artificial Sequence: Synthetic oligonucleotide
  Antisense strand to SEQ ID NO: 2383792
uuagaugcaguauaacccu

SEQ ID NO: 2383794 - RNA, 19 nt, Artificial Sequence
  Description of Artificial Sequence: Synthetic oligonucleotide
  Sense strand starting at position 197 of SEQ ID NO: 1886027
auauuuguuucugccacuu

SEQ ID NO: 2383795 - RNA, 19 nt, Artificial Sequence
  Description of Artificial Sequence: Synthetic oligonucleotide
  Antisense strand to SEQ ID NO: 2383794
aaguggcagaaacaaauau

SEQ ID NO: 2383796 - RNA, 19 nt, Artificial Sequence
  Description of Artificial Sequence: Synthetic oligonucleotide
  Sense strand starting at position 263 of SEQ ID NO: 1886027
guuuccucaugugaaugaa

SEQ ID NO: 2383797 - RNA, 19 nt, Artificial Sequence
  Description of Artificial Sequence: Synthetic oligonucleotide
  Antisense strand to SEQ ID NO: 2383796
uucauucacaugaggaaac

SEQ ID NO: 2383798 - RNA, 19 nt, Artificial Sequence
  Description of Artificial Sequence: Synthetic oligonucleotide
  Sense strand starting at position 2007 of SEQ ID NO: 1886027
augugcuaugaauaguaaa

SEQ ID NO: 2383799 - RNA, 19 nt, Artificial Sequence
  Description of Artificial Sequence: Synthetic oligonucleotide
  Antisense strand to SEQ ID NO: 2383798
uuuacuauucauagcacau

SEQ ID NO: 2383800 - RNA, 19 nt, Artificial Sequence
  Description of Artificial Sequence: Synthetic oligonucleotide
  Sense strand starting at position 2060 of SEQ ID NO: 1886027
guggaucuccuuuauauaa

SEQ ID NO: 2383801 - RNA, 19 nt, Artificial Sequence
  Description of Artificial Sequence: Synthetic oligonucleotide
  Antisense strand to SEQ ID NO: 2383800
uuauauaaaggagauccac

SEQ ID NO: 2383802 - RNA, 19 nt, Artificial Sequence
  Description of Artificial Sequence: Synthetic oligonucleotide
  Sense strand starting at position 2155 of SEQ ID NO: 1886027
agagguaucucauauguau

SEQ ID NO: 2383803 - RNA, 19 nt, Artificial Sequence
  Description of Artificial Sequence: Synthetic oligonucleotide
  Antisense strand to SEQ ID NO: 2383802
auacauaugagauaccucu

SEQ ID NO: 2383804 - RNA, 19 nt, Artificial Sequence
  Description of Artificial Sequence: Synthetic oligonucleotide
  Sense strand starting at position 2166 of SEQ ID NO: 1886027
auauguauucacgggaagg

SEQ ID NO: 2383805 - RNA, 19 nt, Artificial Sequence
  Description of Artificial Sequence: Synthetic oligonucleotide
  Antisense strand to SEQ ID NO: 2383804
ccuucccgugaauacauau

SEQ ID NO: 2383806 - RNA, 19 nt, Artificial Sequence
  Description of Artificial Sequence: Synthetic oligonucleotide
  Sense strand starting at position 2218 of SEQ ID NO: 1886027
uggaacugauaacguaaga

SEQ ID NO: 2383807 - RNA, 19 nt, Artificial Sequence
  Description of Artificial Sequence: Synthetic oligonucleotide
  Antisense strand to SEQ ID NO: 2383806
ucuuacguuaucaguucca

SEQ ID NO: 2383808 - RNA, 19 nt, Artificial Sequence
  Description of Artificial Sequence: Synthetic oligonucleotide
  Sense strand starting at position 2239 of SEQ ID NO: 1886027
ggagucacauuccaagcaa

SEQ ID NO: 2383809 - RNA, 19 nt, Artificial Sequence
  Description of Artificial Sequence: Synthetic oligonucleotide
  Antisense strand to SEQ ID NO: 2383808
uugcuuggaaugugacucc

SEQ ID NO: 2383810 - RNA, 19 nt, Artificial Sequence
  Description of Artificial Sequence: Synthetic oligonucleotide
  Sense strand starting at position 2291 of SEQ ID NO: 1886027
auacaaagguuaugguauu

SEQ ID NO: 2383811 - RNA, 19 nt, Artificial Sequence
  Description of Artificial Sequence: Synthetic oligonucleotide
  Antisense strand to SEQ ID NO: 2383810
aauaccauaaccuuuguau

SEQ ID NO: 2383812 - RNA, 19 nt, Artificial Sequence
  Description of Artificial Sequence: Synthetic oligonucleotide
  Sense strand starting at position 2305 of SEQ ID NO: 1886027
guauuuauccaaugcuguu

SEQ ID NO: 2383813 - RNA, 19 nt, Artificial Sequence
  Description of Artificial Sequence: Synthetic oligonucleotide
  Antisense strand to SEQ ID NO: 2383812
aacagcauuggauaaauac

SEQ ID NO: 2383814 - RNA, 19 nt, Artificial Sequence
  Description of Artificial Sequence: Synthetic oligonucleotide
  Sense strand starting at position 2312 of SEQ ID NO: 1886027
uccaaugcuguuugucagu

SEQ ID NO: 2383815 - RNA, 19 nt, Artificial Sequence
  Description of Artificial Sequence: Synthetic oligonucleotide
  Antisense strand to SEQ ID NO: 2383814
acugacaaacagcauugga

SEQ ID NO: 2383816 - RNA, 19 nt, Artificial Sequence
  Description of Artificial Sequence: Synthetic oligonucleotide
  Sense strand starting at position 2500 of SEQ ID NO: 1886027
guaauuugggcaggucuuu

SEQ ID NO: 2383817 - RNA, 19 nt, Artificial Sequence
  Description of Artificial Sequence: Synthetic oligonucleotide
  Antisense strand to SEQ ID NO: 2383816
aaagaccugcccaaauuac

SEQ ID NO: 2383818 - RNA, 19 nt, Artificial Sequence
  Description of Artificial Sequence: Synthetic oligonucleotide
  Sense strand starting at position 2617 of SEQ ID NO: 1886027
aguaguuccuggcccuuaa

SEQ ID NO: 2383819 - RNA, 19 nt, Artificial Sequence
  Description of Artificial Sequence: Synthetic oligonucleotide
  Antisense strand to SEQ ID NO: 2383818
uuaagggccaggaacuacu

SEQ ID NO: 2383820 - RNA, 19 nt, Artificial Sequence
  Description of Artificial Sequence: Synthetic oligonucleotide
  Sense strand starting at position 2642 of SEQ ID NO: 1886027
cugggcaagagaugaguua

SEQ ID NO: 2383821 - RNA, 19 nt, Artificial Sequence
  Description of Artificial Sequence: Synthetic oligonucleotide
  Antisense strand to SEQ ID NO: 2383820
uaacucaucucuugcccag

SEQ ID NO: 2383822 - RNA, 19 nt, Artificial Sequence
  Description of Artificial Sequence: Synthetic oligonucleotide
  Sense strand starting at position 2649 of SEQ ID NO: 1886027
agagaugaguuagggaacu

SEQ ID NO: 2383823 - RNA, 19 nt, Artificial Sequence
  Description of Artificial Sequence: Synthetic oligonucleotide
  Antisense strand to SEQ ID NO: 2383822
aguucccuaacucaucucu

SEQ ID NO: 2383824 - RNA, 19 nt, Artificial Sequence
  Description of Artificial Sequence: Synthetic oligonucleotide
  Sense strand starting at position 2686 of SEQ ID NO: 1886027
gcugaagaccucuggaauc

SEQ ID NO: 2383825 - RNA, 19 nt, Artificial Sequence
  Description of Artificial Sequence: Synthetic oligonucleotide
  Antisense strand to SEQ ID NO: 2383824
gauuccagaggucuucagc

SEQ ID NO: 2383826 - RNA, 19 nt, Artificial Sequence
  Description of Artificial Sequence: Synthetic oligonucleotide
  Sense strand starting at position 2732 of SEQ ID NO: 1886027
auaguugugugagcuggua

SEQ ID NO: 2383827 - RNA, 19 nt, Artificial Sequence
  Description of Artificial Sequence: Synthetic oligonucleotide
  Antisense strand to SEQ ID NO: 2383826
uaccagcucacacaacuau

SEQ ID NO: 2383828 - RNA, 19 nt, Artificial Sequence
  Description of Artificial Sequence: Synthetic oligonucleotide
  Sense strand starting at position 2734 of SEQ ID NO: 1886027
aguugugugagcugguauu

SEQ ID NO: 2383829 - RNA, 19 nt, Artificial Sequence
  Description of Artificial Sequence: Synthetic oligonucleotide
  Antisense strand to SEQ ID NO: 2383828
aauaccagcucacacaacu

SEQ ID NO: 2383830 - RNA, 19 nt, Artificial Sequence
  Description of Artificial Sequence: Synthetic oligonucleotide
  Sense strand starting at position 2751 of SEQ ID NO: 1886027
uuaggaugucccugaggag

SEQ ID NO: 2383831 - RNA, 19 nt, Artificial Sequence
  Description of Artificial Sequence: Synthetic oligonucleotide
  Antisense strand to SEQ ID NO: 2383830
cuccucagggacauccuaa

SEQ ID NO: 2383832 - RNA, 19 nt, Artificial Sequence
  Description of Artificial Sequence: Synthetic oligonucleotide
  Sense strand starting at position 2754 of SEQ ID NO: 1886027
ggaugucccugaggagcaa

SEQ ID NO: 2383833 - RNA, 19 nt, Artificial Sequence
  Description of Artificial Sequence: Synthetic oligonucleotide
  Antisense strand to SEQ ID NO: 2383832
uugcuccucagggacaucc

SEQ ID NO: 2383834 - RNA, 19 nt, Artificial Sequence
  Description of Artificial Sequence: Synthetic oligonucleotide
  Sense strand starting at position 2803 of SEQ ID NO: 1886027
uugggagcuuucguauacu

SEQ ID NO: 2383835 - RNA, 19 nt, Artificial Sequence
  Description of Artificial Sequence: Synthetic oligonucleotide
  Antisense strand to SEQ ID NO: 2383834
aguauacgaaagcucccaa

SEQ ID NO: 2383836 - RNA, 19 nt, Artificial Sequence
  Description of Artificial Sequence: Synthetic oligonucleotide
  Sense strand starting at position 2806 of SEQ ID NO: 1886027
ggagcuuucguauacugaa

SEQ ID NO: 2383837 - RNA, 19 nt, Artificial Sequence
  Description of Artificial Sequence: Synthetic oligonucleotide
  Antisense strand to SEQ ID NO: 2383836
uucaguauacgaaagcucc

SEQ ID NO: 2383838 - RNA, 19 nt, Artificial Sequence
  Description of Artificial Sequence: Synthetic oligonucleotide
  Sense strand starting at position 2832 of SEQ ID NO: 1886027
ggcagaguguagucauaga

SEQ ID NO: 2383839 - RNA, 19 nt, Artificial Sequence
  Description of Artificial Sequence: Synthetic oligonucleotide
  Antisense strand to SEQ ID NO: 2383838
ucuaugacuacacucugcc

SEQ ID NO: 2383840 - RNA, 19 nt, Artificial Sequence
  Description of Artificial Sequence: Synthetic oligonucleotide
  Sense strand starting at position 2837 of SEQ ID NO: 1886027
aguguagucauagacauca

SEQ ID NO: 2383841 - RNA, 19 nt, Artificial Sequence
  Description of Artificial Sequence: Synthetic oligonucleotide
  Antisense strand to SEQ ID NO: 2383840
ugaugucuaugacuacacu

SEQ ID NO: 2383842 - RNA, 19 nt, Artificial Sequence
  Description of Artificial Sequence: Synthetic oligonucleotide
  Sense strand starting at position 2929 of SEQ ID NO: 1886027
ccaguucuccugugggacu

SEQ ID NO: 2383843 - RNA, 19 nt, Artificial Sequence
  Description of Artificial Sequence: Synthetic oligonucleotide
  Antisense strand to SEQ ID NO: 2383842
agucccacaggagaacugg

SEQ ID NO: 2383844 - RNA, 19 nt, Artificial Sequence
  Description of Artificial Sequence: Synthetic oligonucleotide
  Sense strand starting at position 2949 of SEQ ID NO: 1886027
gggcacaucuguucugaaa

SEQ ID NO: 2383845 - RNA, 19 nt, Artificial Sequence
  Description of Artificial Sequence: Synthetic oligonucleotide
  Antisense strand to SEQ ID NO: 2383844
uuucagaacagaugugccc

SEQ ID NO: 2383846 - RNA, 19 nt, Artificial Sequence
  Description of Artificial Sequence: Synthetic oligonucleotide
  Sense strand starting at position 3055 of SEQ ID NO: 1886027
gacgcauagcuccaccaga

SEQ ID NO: 2383847 - RNA, 19 nt, Artificial Sequence
  Description of Artificial Sequence: Synthetic oligonucleotide
  Antisense strand to SEQ ID NO: 2383846
ucugguggagcuaugcguc

SEQ ID NO: 2383848 - RNA, 19 nt, Artificial Sequence
  Description of Artificial Sequence: Synthetic oligonucleotide
  Sense strand starting at position 3147 of SEQ ID NO: 1886027
uccuguugcccacaggauu

SEQ ID NO: 2383849 - RNA, 19 nt, Artificial Sequence
  Description of Artificial Sequence: Synthetic oligonucleotide
  Antisense strand to SEQ ID NO: 2383848
aauccugugggcaacagga

SEQ ID NO: 2383850 - RNA, 19 nt, Artificial Sequence
  Description of Artificial Sequence: Synthetic oligonucleotide
  Sense strand starting at position 3153 of SEQ ID NO: 1886027
ugcccacaggauugugauu

SEQ ID NO: 2383851 - RNA, 19 nt, Artificial Sequence
  Description of Artificial Sequence: Synthetic oligonucleotide
  Antisense strand to SEQ ID NO: 2383850
aaucacaauccugugggca

SEQ ID NO: 2383852 - RNA, 19 nt, Artificial Sequence
  Description of Artificial Sequence: Synthetic oligonucleotide
  Sense strand starting at position 3182 of SEQ ID NO: 1886027
gaguacugagcccaaaucu

SEQ ID NO: 2383853 - RNA, 19 nt, Artificial Sequence
  Description of Artificial Sequence: Synthetic oligonucleotide
  Antisense strand to SEQ ID NO: 2383852
agauuugggcucaguacuc

SEQ ID NO: 2383854 - RNA, 19 nt, Artificial Sequence
  Description of Artificial Sequence: Synthetic oligonucleotide
  Sense strand starting at position 3248 of SEQ ID NO: 1886027
gugagaugugcagguuccu

SEQ ID NO: 2383855 - RNA, 19 nt, Artificial Sequence
  Description of Artificial Sequence: Synthetic oligonucleotide
  Antisense strand to SEQ ID NO: 2383854
aggaaccugcacaucucac

SEQ ID NO: 2383856 - RNA, 19 nt, Artificial Sequence
  Description of Artificial Sequence: Synthetic oligonucleotide
  Sense strand starting at position 3511 of SEQ ID NO: 1886027
gaggcaugcagcuguguau

SEQ ID NO: 2383857 - RNA, 19 nt, Artificial Sequence
  Description of Artificial Sequence: Synthetic oligonucleotide
  Antisense strand to SEQ ID NO: 2383856
auacacagcugcaugccuc

SEQ ID NO: 2383858 - RNA, 19 nt, Artificial Sequence
  Description of Artificial Sequence: Synthetic oligonucleotide
  Sense strand starting at position 3540 of SEQ ID NO: 1886027
gcuggccauugcucuuaau

SEQ ID NO: 2383859 - RNA, 19 nt, Artificial Sequence
  Description of Artificial Sequence: Synthetic oligonucleotide
  Antisense strand to SEQ ID NO: 2383858
auuaagagcaauggccagc

SEQ ID NO: 2383860 - RNA, 19 nt, Artificial Sequence
  Description of Artificial Sequence: Synthetic oligonucleotide
  Sense strand starting at position 3621 of SEQ ID NO: 1886027
cugugaaacuaagcacaau

SEQ ID NO: 2383861 - RNA, 19 nt, Artificial Sequence
  Description of Artificial Sequence: Synthetic oligonucleotide
  Antisense strand to SEQ ID NO: 2383860
auugugcuuaguuucacag

SEQ ID NO: 2383862 - RNA, 19 nt, Artificial Sequence
  Description of Artificial Sequence: Synthetic oligonucleotide
  Sense strand starting at position 3717 of SEQ ID NO: 1886027
cgcaauuuauaccacaguu

SEQ ID NO: 2383863 - RNA, 19 nt, Artificial Sequence
  Description of Artificial Sequence: Synthetic oligonucleotide
  Antisense strand to SEQ ID NO: 2383862
aacugugguauaaauugcg

SEQ ID NO: 2383864 - RNA, 19 nt, Artificial Sequence
  Description of Artificial Sequence: Synthetic oligonucleotide
  Sense strand starting at position 3794 of SEQ ID NO: 1886027
aagccagaguguccuguua

SEQ ID NO: 2383865 - RNA, 19 nt, Artificial Sequence
  Description of Artificial Sequence: Synthetic oligonucleotide
  Antisense strand to SEQ ID NO: 2383864
uaacaggacacucuggcuu

SEQ ID NO: 2383866 - RNA, 19 nt, Artificial Sequence
  Description of Artificial Sequence: Synthetic oligonucleotide
  Sense strand starting at position 2631 of SEQ ID NO: 1886029
ugugcuguugaccaaguua

SEQ ID NO: 2383867 - RNA, 19 nt, Artificial Sequence
  Description of Artificial Sequence: Synthetic oligonucleotide
  Antisense strand to SEQ ID NO: 2383866
uaacuuggucaacagcaca

SEQ ID NO: 2383868 - RNA, 19 nt, Artificial Sequence
  Description of Artificial Sequence: Synthetic oligonucleotide
  Sense strand starting at position 2788 of SEQ ID NO: 1886029
cugccuuucuccuagaaug

SEQ ID NO: 2383869 - RNA, 19 nt, Artificial Sequence
  Description of Artificial Sequence: Synthetic oligonucleotide
  Antisense strand to SEQ ID NO: 2383868
cauucuaggagaaaggcag

SEQ ID NO: 2383870 - RNA, 19 nt, Artificial Sequence
  Description of Artificial Sequence: Synthetic oligonucleotide
  Sense strand starting at position 2841 of SEQ ID NO: 1886029
augcuauguuaaccguaga

SEQ ID NO: 2383871 - RNA, 19 nt, Artificial Sequence
  Description of Artificial Sequence: Synthetic oligonucleotide
  Antisense strand to SEQ ID NO: 2383870
ucuacgguuaacauagcau

SEQ ID NO: 2383872 - RNA, 19 nt, Artificial Sequence
  Description of Artificial Sequence: Synthetic oligonucleotide
  Sense strand starting at position 2842 of SEQ ID NO: 1886029
ugcuauguuaaccguagau

SEQ ID NO: 2383873 - RNA, 19 nt, Artificial Sequence
  Description of Artificial Sequence: Synthetic oligonucleotide
  Antisense strand to SEQ ID NO: 2383872
aucuacgguuaacauagca

SEQ ID NO: 2383874 - RNA, 19 nt, Artificial Sequence
  Description of Artificial Sequence: Synthetic oligonucleotide
  Sense strand starting at position 2854 of SEQ ID NO: 1886029
cguagaugcgucuguagga

SEQ ID NO: 2383875 - RNA, 19 nt, Artificial Sequence
  Description of Artificial Sequence: Synthetic oligonucleotide
  Antisense strand to SEQ ID NO: 2383874
uccuacagacgcaucuacg

SEQ ID NO: 2383876 - RNA, 19 nt, Artificial Sequence
  Description of Artificial Sequence: Synthetic oligonucleotide
  Sense strand starting at position 2885 of SEQ ID NO: 1886029
cugccaacgugaguucaga

SEQ ID NO: 2383877 - RNA, 19 nt, Artificial Sequence
  Description of Artificial Sequence: Synthetic oligonucleotide
  Antisense strand to SEQ ID NO: 2383876
ucugaacucacguuggcag

SEQ ID NO: 2383878 - RNA, 19 nt, Artificial Sequence
  Description of Artificial Sequence: Synthetic oligonucleotide
  Sense strand starting at position 3164 of SEQ ID NO: 1886029
gguguagugugggucacaa

SEQ ID NO: 2383879 - RNA, 19 nt, Artificial Sequence
  Description of Artificial Sequence: Synthetic oligonucleotide
  Antisense strand to SEQ ID NO: 2383878
uugugacccacacuacacc

SEQ ID NO: 2383880 - RNA, 19 nt, Artificial Sequence
  Description of Artificial Sequence: Synthetic oligonucleotide
  Sense strand starting at position 3712 of SEQ ID NO: 1886029
ugggaccugccaugugauu

SEQ ID NO: 2383881 - RNA, 19 nt, Artificial Sequence
  Description of Artificial Sequence: Synthetic oligonucleotide
  Antisense strand to SEQ ID NO: 2383880
aaucacauggcagguccca

SEQ ID NO: 2383882 - RNA, 19 nt, Artificial Sequence
  Description of Artificial Sequence: Synthetic oligonucleotide
  Sense strand starting at position 3725 of SEQ ID NO: 1886029
gugauuugaugcugucuuu

SEQ ID NO: 2383883 - RNA, 19 nt, Artificial Sequence
  Description of Artificial Sequence: Synthetic oligonucleotide
  Antisense strand to SEQ ID NO: 2383882
aaagacagcaucaaaucac

SEQ ID NO: 2383884 - RNA, 19 nt, Artificial Sequence
  Description of Artificial Sequence: Synthetic oligonucleotide
  Sense strand starting at position 342 of SEQ ID NO: 1886031
acaaucacuuagugauuga

SEQ ID NO: 2383885 - RNA, 19 nt, Artificial Sequence
  Description of Artificial Sequence: Synthetic oligonucleotide
  Antisense strand to SEQ ID NO: 2383884
ucaaucacuaagugauugu

SEQ ID NO: 2383886 - RNA, 19 nt, Artificial Sequence
  Description of Artificial Sequence: Synthetic oligonucleotide
  Sense strand starting at position 345 of SEQ ID NO: 1886031
aucacuuagugauugagag

SEQ ID NO: 2383887 - RNA, 19 nt, Artificial Sequence
  Description of Artificial Sequence: Synthetic oligonucleotide
  Antisense strand to SEQ ID NO: 2383886
cucucaaucacuaagugau

SEQ ID NO: 2383888 - RNA, 19 nt, Artificial Sequence
  Description of Artificial Sequence: Synthetic oligonucleotide
  Sense strand starting at position 349 of SEQ ID NO: 1886031
cuuagugauugagagggau

SEQ ID NO: 2383889 - RNA, 19 nt, Artificial Sequence
  Description of Artificial Sequence: Synthetic oligonucleotide
  Antisense strand to SEQ ID NO: 2383888
aucccucucaaucacuaag

SEQ ID NO: 2383890 - RNA, 19 nt, Artificial Sequence
  Description of Artificial Sequence: Synthetic oligonucleotide
  Sense strand starting at position 521 of SEQ ID NO: 1886031
cuacaugcugugugguuua

SEQ ID NO: 2383891 - RNA, 19 nt, Artificial Sequence
  Description of Artificial Sequence: Synthetic oligonucleotide
  Antisense strand to SEQ ID NO: 2383890
uaaaccacacagcauguag

SEQ ID NO: 2383892 - RNA, 19 nt, Artificial Sequence
  Description of Artificial Sequence: Synthetic oligonucleotide
  Sense strand starting at position 555 of SEQ ID NO: 1886031
acaugucuguuagugugaa

SEQ ID NO: 2383893 - RNA, 19 nt, Artificial Sequence
  Description of Artificial Sequence: Synthetic oligonucleotide
  Antisense strand to SEQ ID NO: 2383892
uucacacuaacagacaugu

SEQ ID NO: 2383894 - RNA, 19 nt, Artificial Sequence
  Description of Artificial Sequence: Synthetic oligonucleotide
  Sense strand starting at position 556 of SEQ ID NO: 1886031
caugucuguuagugugaag

SEQ ID NO: 2383895 - RNA, 19 nt, Artificial Sequence
  Description of Artificial Sequence: Synthetic oligonucleotide
  Antisense strand to SEQ ID NO: 2383894
cuucacacuaacagacaug

SEQ ID NO: 2383896 - RNA, 19 nt, Artificial Sequence
  Description of Artificial Sequence: Synthetic oligonucleotide
  Sense strand starting at position 638 of SEQ ID NO: 1886031
uguuaaaucugggaauuug

SEQ ID NO: 2383897 - RNA, 19 nt, Artificial Sequence
  Description of Artificial Sequence: Synthetic oligonucleotide
  Antisense strand to SEQ ID NO: 2383896
caaauucccagauuuaaca

SEQ ID NO: 2383898 - RNA, 19 nt, Artificial Sequence
  Description of Artificial Sequence: Synthetic oligonucleotide
  Sense strand starting at position 648 of SEQ ID NO: 1886031
gggaauuugucagaaagag

SEQ ID NO: 2383899 - RNA, 19 nt, Artificial Sequence
  Description of Artificial Sequence: Synthetic oligonucleotide
  Antisense strand to SEQ ID NO: 2383898
cucuuucugacaaauuccc

SEQ ID NO: 2383900 - RNA, 19 nt, Artificial Sequence
  Description of Artificial Sequence: Synthetic oligonucleotide
  Sense strand starting at position 712 of SEQ ID NO: 1886031
aaaccuaugugagggucau

SEQ ID NO: 2383901 - RNA, 19 nt, Artificial Sequence
  Description of Artificial Sequence: Synthetic oligonucleotide
  Antisense strand to SEQ ID NO: 2383900
augacccucacauagguuu

SEQ ID NO: 2383902 - RNA, 19 nt, Artificial Sequence
  Description of Artificial Sequence: Synthetic oligonucleotide
  Sense strand starting at position 718 of SEQ ID NO: 1886031
augugagggucaucccuaa

SEQ ID NO: 2383903 - RNA, 19 nt, Artificial Sequence
  Description of Artificial Sequence: Synthetic oligonucleotide
  Antisense strand to SEQ ID NO: 2383902
uuagggaugacccucacau

SEQ ID NO: 2383904 - RNA, 19 nt, Artificial Sequence
  Description of Artificial Sequence: Synthetic oligonucleotide
  Sense strand starting at position 722 of SEQ ID NO: 1886031
gagggucaucccuaaguac

SEQ ID NO: 2383905 - RNA, 19 nt, Artificial Sequence
  Description of Artificial Sequence: Synthetic oligonucleotide
  Antisense strand to SEQ ID NO: 2383904
guacuuagggaugacccuc

SEQ ID NO: 2383906 - RNA, 19 nt, Artificial Sequence
  Description of Artificial Sequence: Synthetic oligonucleotide
  Sense strand starting at position 1347 of SEQ ID NO: 1886031
ggaaccucaucagugcaau

SEQ ID NO: 2383907 - RNA, 19 nt, Artificial Sequence
  Description of Artificial Sequence: Synthetic oligonucleotide
  Antisense strand to SEQ ID NO: 2383906
auugcacugaugagguucc

SEQ ID NO: 2383908 - RNA, 19 nt, Artificial Sequence
  Description of Artificial Sequence: Synthetic oligonucleotide
  Sense strand starting at position 1627 of SEQ ID NO: 1886031
ggaccugagggcugaauau

SEQ ID NO: 2383909 - RNA, 19 nt, Artificial Sequence
  Description of Artificial Sequence: Synthetic oligonucleotide
  Antisense strand to SEQ ID NO: 2383908
auauucagcccucaggucc

SEQ ID NO: 2383910 - RNA, 19 nt, Artificial Sequence
  Description of Artificial Sequence: Synthetic oligonucleotide
  Sense strand starting at position 1662 of SEQ ID NO: 1886031
gcagucauccgcccaaagu

SEQ ID NO: 2383911 - RNA, 19 nt, Artificial Sequence
  Description of Artificial Sequence: Synthetic oligonucleotide
  Antisense strand to SEQ ID NO: 2383910
acuuugggcggaugacugc

SEQ ID NO: 2383912 - RNA, 19 nt, Artificial Sequence
  Description of Artificial Sequence: Synthetic oligonucleotide
  Sense strand starting at position 1793 of SEQ ID NO: 1886031
cccggugugccucaagagu

SEQ ID NO: 2383913 - RNA, 19 nt, Artificial Sequence
  Description of Artificial Sequence: Synthetic oligonucleotide
  Antisense strand to SEQ ID NO: 2383912
acucuugaggcacaccggg

SEQ ID NO: 2383914 - RNA, 19 nt, Artificial Sequence
  Description of Artificial Sequence: Synthetic oligonucleotide
  Sense strand starting at position 1811 of SEQ ID NO: 1886031
ugguauggacucugagagu

SEQ ID NO: 2383915 - RNA, 19 nt, Artificial Sequence
  Description of Artificial Sequence: Synthetic oligonucleotide
  Antisense strand to SEQ ID NO: 2383914
acucucagaguccauacca

SEQ ID NO: 2383916 - RNA, 19 nt, Artificial Sequence
  Description of Artificial Sequence: Synthetic oligonucleotide
  Sense strand starting at position 1817 of SEQ ID NO: 1886031
ggacucugagaguggucuu

SEQ ID NO: 2383917 - RNA, 19 nt, Artificial Sequence
  Description of Artificial Sequence: Synthetic oligonucleotide
  Antisense strand to SEQ ID NO: 2383916
aagaccacucucagagucc

SEQ ID NO: 2383918 - RNA, 19 nt, Artificial Sequence
  Description of Artificial Sequence: Synthetic oligonucleotide
  Sense strand starting at position 1899 of SEQ ID NO: 1886031
uuucuugacugcugccaau

SEQ ID NO: 2383919 - RNA, 19 nt, Artificial Sequence
  Description of Artificial Sequence: Synthetic oligonucleotide
  Antisense strand to SEQ ID NO: 2383918
auuggcagcagucaagaaa

SEQ ID NO: 2383920 - RNA, 19 nt, Artificial Sequence
  Description of Artificial Sequence: Synthetic oligonucleotide
  Sense strand starting at position 1924 of SEQ ID NO: 1886031
caucgaguuucuucuggca

SEQ ID NO: 2383921 - RNA, 19 nt, Artificial Sequence
  Description of Artificial Sequence: Synthetic oligonucleotide
  Antisense strand to SEQ ID NO: 2383920
ugccagaagaaacucgaug

SEQ ID NO: 2383922 - RNA, 19 nt, Artificial Sequence
  Description of Artificial Sequence: Synthetic oligonucleotide
  Sense strand starting at position 1926 of SEQ ID NO: 1886031
ucgaguuucuucuggcauc

SEQ ID NO: 2383923 - RNA, 19 nt, Artificial Sequence
  Description of Artificial Sequence: Synthetic oligonucleotide
  Antisense strand to SEQ ID NO: 2383922
gaugccagaagaaacucga

SEQ ID NO: 2383924 - RNA, 19 nt, Artificial Sequence
  Description of Artificial Sequence: Synthetic oligonucleotide
  Sense strand starting at position 1927 of SEQ ID NO: 1886031
cgaguuucuucuggcauca

SEQ ID NO: 2383925 - RNA, 19 nt, Artificial Sequence
  Description of Artificial Sequence: Synthetic oligonucleotide
  Antisense strand to SEQ ID NO: 2383924
ugaugccagaagaaacucg

SEQ ID NO: 2383926 - RNA, 19 nt, Artificial Sequence
  Description of Artificial Sequence: Synthetic oligonucleotide
  Sense strand starting at position 2074 of SEQ ID NO: 1886031
ccuuaaugcuccgauccca

SEQ ID NO: 2383927 - RNA, 19 nt, Artificial Sequence
  Description of Artificial Sequence: Synthetic oligonucleotide
  Antisense strand to SEQ ID NO: 2383926
ugggaucggagcauuaagg

SEQ ID NO: 2383928 - RNA, 19 nt, Artificial Sequence
  Description of Artificial Sequence: Synthetic oligonucleotide
  Sense strand starting at position 2082 of SEQ ID NO: 1886031
cuccgaucccauuggucaa

SEQ ID NO: 2383929 - RNA, 19 nt, Artificial Sequence
  Description of Artificial Sequence: Synthetic oligonucleotide
  Antisense strand to SEQ ID NO: 2383928
uugaccaaugggaucggag

SEQ ID NO: 2383930 - RNA, 19 nt, Artificial Sequence
  Description of Artificial Sequence: Synthetic oligonucleotide
  Sense strand starting at position 2085 of SEQ ID NO: 1886031
cgaucccauuggucaauga

SEQ ID NO: 2383931 - RNA, 19 nt, Artificial Sequence
  Description of Artificial Sequence: Synthetic oligonucleotide
  Antisense strand to SEQ ID NO: 2383930
ucauugaccaaugggaucg

SEQ ID NO: 2383932 - RNA, 19 nt, Artificial Sequence
  Description of Artificial Sequence: Synthetic oligonucleotide
  Sense strand starting at position 2413 of SEQ ID NO: 1886031
gauggaguauaagaauuac

SEQ ID NO: 2383933 - RNA, 19 nt, Artificial Sequence
  Description of Artificial Sequence: Synthetic oligonucleotide
  Antisense strand to SEQ ID NO: 2383932
guaauucuuauacuccauc

SEQ ID NO: 2383934 - RNA, 19 nt, Artificial Sequence
  Description of Artificial Sequence: Synthetic oligonucleotide
  Sense strand starting at position 2476 of SEQ ID NO: 1886031
uccauaguauguuugauga

SEQ ID NO: 2383935 - RNA, 19 nt, Artificial Sequence
  Description of Artificial Sequence: Synthetic oligonucleotide
  Antisense strand to SEQ ID NO: 2383934
ucaucaaacauacuaugga

SEQ ID NO: 2383936 - RNA, 19 nt, Artificial Sequence
  Description of Artificial Sequence: Synthetic oligonucleotide
  Sense strand starting at position 2478 of SEQ ID NO: 1886031
cauaguauguuugaugauu

SEQ ID NO: 2383937 - RNA, 19 nt, Artificial Sequence
  Description of Artificial Sequence: Synthetic oligonucleotide
  Antisense strand to SEQ ID NO: 2383936
aaucaucaaacauacuaug

SEQ ID NO: 2383938 - RNA, 19 nt, Artificial Sequence
  Description of Artificial Sequence: Synthetic oligonucleotide
  Sense strand starting at position 3151 of SEQ ID NO: 1886031
uguguauuguuaccugaau

SEQ ID NO: 2383939 - RNA, 19 nt, Artificial Sequence
  Description of Artificial Sequence: Synthetic oligonucleotide
  Antisense strand to SEQ ID NO: 2383938
auucagguaacaauacaca

SEQ ID NO: 2383940 - RNA, 19 nt, Artificial Sequence
  Description of Artificial Sequence: Synthetic oligonucleotide
  Sense strand starting at position 3152 of SEQ ID NO: 1886031
guguauuguuaccugaauu

SEQ ID NO: 2383941 - RNA, 19 nt, Artificial Sequence
  Description of Artificial Sequence: Synthetic oligonucleotide
  Antisense strand to SEQ ID NO: 2383940
aauucagguaacaauacac

SEQ ID NO: 2383942 - RNA, 19 nt, Artificial Sequence
  Description of Artificial Sequence: Synthetic oligonucleotide
  Sense strand starting at position 3213 of SEQ ID NO: 1886031
cuccauaaccugugagcuu

SEQ ID NO: 2383943 - RNA, 19 nt, Artificial Sequence
  Description of Artificial Sequence: Synthetic oligonucleotide
  Antisense strand to SEQ ID NO: 2383942
aagcucacagguuauggag

SEQ ID NO: 2383944 - RNA, 19 nt, Artificial Sequence
  Description of Artificial Sequence: Synthetic oligonucleotide
  Sense strand starting at position 3222 of SEQ ID NO: 1886031
cugugagcuuccuuuccca

SEQ ID NO: 2383945 - RNA, 19 nt, Artificial Sequence
  Description of Artificial Sequence: Synthetic oligonucleotide
  Antisense strand to SEQ ID NO: 2383944
ugggaaaggaagcucacag

SEQ ID NO: 2383946 - RNA, 19 nt, Artificial Sequence
  Description of Artificial Sequence: Synthetic oligonucleotide
  Sense strand starting at position 3305 of SEQ ID NO: 1886031
aaauguagccucuggacua

SEQ ID NO: 2383947 - RNA, 19 nt, Artificial Sequence
  Description of Artificial Sequence: Synthetic oligonucleotide
  Antisense strand to SEQ ID NO: 2383946
uaguccagaggcuacauuu

SEQ ID NO: 2383948 - RNA, 19 nt, Artificial Sequence
  Description of Artificial Sequence: Synthetic oligonucleotide
  Sense strand starting at position 3332 of SEQ ID NO: 1886031
agcagaaccugagaacuuu

SEQ ID NO: 2383949 - RNA, 19 nt, Artificial Sequence
  Description of Artificial Sequence: Synthetic oligonucleotide
  Antisense strand to SEQ ID NO: 2383948
aaaguucucagguucugcu

SEQ ID NO: 2383950 - RNA, 19 nt, Artificial Sequence
  Description of Artificial Sequence: Synthetic oligonucleotide
  Sense strand starting at position 3797 of SEQ ID NO: 1886031
aguagaucggaauguccaa

SEQ ID NO: 2383951 - RNA, 19 nt, Artificial Sequence
  Description of Artificial Sequence: Synthetic oligonucleotide
  Antisense strand to SEQ ID NO: 2383950
uuggacauuccgaucuacu

SEQ ID NO: 2383952 - RNA, 19 nt, Artificial Sequence
  Description of Artificial Sequence: Synthetic oligonucleotide
  Sense strand starting at position 3982 of SEQ ID NO: 1886031
acuucuugcuuucgauaga

SEQ ID NO: 2383953 - RNA, 19 nt, Artificial Sequence
  Description of Artificial Sequence: Synthetic oligonucleotide
  Antisense strand to SEQ ID NO: 2383952
ucuaucgaaagcaagaagu

SEQ ID NO: 2383954 - RNA, 19 nt, Artificial Sequence
  Description of Artificial Sequence: Synthetic oligonucleotide
  Sense strand starting at position 3983 of SEQ ID NO: 1886031
cuucuugcuuucgauagau

SEQ ID NO: 2383955 - RNA, 19 nt, Artificial Sequence
  Description of Artificial Sequence: Synthetic oligonucleotide
  Antisense strand to SEQ ID NO: 2383954
aucuaucgaaagcaagaag

SEQ ID NO: 2383956 - RNA, 19 nt, Artificial Sequence
  Description of Artificial Sequence: Synthetic oligonucleotide
  Sense strand starting at position 942 of SEQ ID NO: 1886032
gcuuauacugaugaaggua

SEQ ID NO: 2383957 - RNA, 19 nt, Artificial Sequence
  Description of Artificial Sequence: Synthetic oligonucleotide
  Antisense strand to SEQ ID NO: 2383956
uaccuucaucaguauaagc

SEQ ID NO: 2383958 - RNA, 19 nt, Artificial Sequence
  Description of Artificial Sequence: Synthetic oligonucleotide
  Sense strand starting at position 1029 of SEQ ID NO: 1886032
uccacaaguccuggaaguu

SEQ ID NO: 2383959 - RNA, 19 nt, Artificial Sequence
  Description of Artificial Sequence: Synthetic oligonucleotide
  Antisense strand to SEQ ID NO: 2383958
aacuuccaggacuugugga

SEQ ID NO: 2383960 - RNA, 19 nt, Artificial Sequence
  Description of Artificial Sequence: Synthetic oligonucleotide
  Sense strand starting at position 1030 of SEQ ID NO: 1886032
ccacaaguccuggaaguua

SEQ ID NO: 2383961 - RNA, 19 nt, Artificial Sequence
  Description of Artificial Sequence: Synthetic oligonucleotide
  Antisense strand to SEQ ID NO: 2383960
uaacuuccaggacuugugg

SEQ ID NO: 2383962 - RNA, 19 nt, Artificial Sequence
  Description of Artificial Sequence: Synthetic oligonucleotide
  Sense strand starting at position 1062 of SEQ ID NO: 1886032
auuugauggucuggucuua

SEQ ID NO: 2383963 - RNA, 19 nt, Artificial Sequence
  Description of Artificial Sequence: Synthetic oligonucleotide
  Antisense strand to SEQ ID NO: 2383962
uaagaccagaccaucaaau

SEQ ID NO: 2383964 - RNA, 19 nt, Artificial Sequence
  Description of Artificial Sequence: Synthetic oligonucleotide
  Sense strand starting at position 1164 of SEQ ID NO: 1886032
ugaauugaaucugggcaga

SEQ ID NO: 2383965 - RNA, 19 nt, Artificial Sequence
  Description of Artificial Sequence: Synthetic oligonucleotide
  Antisense strand to SEQ ID NO: 2383964
ucugcccagauucaauuca

SEQ ID NO: 2383966 - RNA, 19 nt, Artificial Sequence
  Description of Artificial Sequence: Synthetic oligonucleotide
  Sense strand starting at position 1166 of SEQ ID NO: 1886032
aauugaaucugggcagagu

SEQ ID NO: 2383967 - RNA, 19 nt, Artificial Sequence
  Description of Artificial Sequence: Synthetic oligonucleotide
  Antisense strand to SEQ ID NO: 2383966
acucugcccagauucaauu

SEQ ID NO: 2383968 - RNA, 19 nt, Artificial Sequence
  Description of Artificial Sequence: Synthetic oligonucleotide
  Sense strand starting at position 1177 of SEQ ID NO: 1886032
ggcagaguguacaagggau

SEQ ID NO: 2383969 - RNA, 19 nt, Artificial Sequence
  Description of Artificial Sequence: Synthetic oligonucleotide
  Antisense strand to SEQ ID NO: 2383968
aucccuuguacacucugcc

SEQ ID NO: 2383970 - RNA, 19 nt, Artificial Sequence
  Description of Artificial Sequence: Synthetic oligonucleotide
  Sense strand starting at position 1189 of SEQ ID NO: 1886032
aagggaucucucuguauua

SEQ ID NO: 2383971 - RNA, 19 nt, Artificial Sequence
  Description of Artificial Sequence: Synthetic oligonucleotide
  Antisense strand to SEQ ID NO: 2383970
uaauacagagagaucccuu

SEQ ID NO: 2383972 - RNA, 19 nt, Artificial Sequence
  Description of Artificial Sequence: Synthetic oligonucleotide
  Sense strand starting at position 1271 of SEQ ID NO: 1886032
gagcccauguuugcuguua

SEQ ID NO: 2383973 - RNA, 19 nt, Artificial Sequence
  Description of Artificial Sequence: Synthetic oligonucleotide
  Antisense strand to SEQ ID NO: 2383972
uaacagcaaacaugggcuc

SEQ ID NO: 2383974 - RNA, 19 nt, Artificial Sequence
  Description of Artificial Sequence: Synthetic oligonucleotide
  Sense strand starting at position 1275 of SEQ ID NO: 1886032
ccauguuugcuguuaccgu

SEQ ID NO: 2383975 - RNA, 19 nt, Artificial Sequence
  Description of Artificial Sequence: Synthetic oligonucleotide
  Antisense strand to SEQ ID NO: 2383974
acgguaacagcaaacaugg

SEQ ID NO: 2383976 - RNA, 19 nt, Artificial Sequence
  Description of Artificial Sequence: Synthetic oligonucleotide
  Sense strand starting at position 1361 of SEQ ID NO: 1886032
ugaugugagcuccacggaa

SEQ ID NO: 2383977 - RNA, 19 nt, Artificial Sequence
  Description of Artificial Sequence: Synthetic oligonucleotide
  Antisense strand to SEQ ID NO: 2383976
uuccguggagcucacauca

SEQ ID NO: 2383978 - RNA, 19 nt, Artificial Sequence
  Description of Artificial Sequence: Synthetic oligonucleotide
  Sense strand starting at position 1363 of SEQ ID NO: 1886032
augugagcuccacggaaug

SEQ ID NO: 2383979 - RNA, 19 nt, Artificial Sequence
  Description of Artificial Sequence: Synthetic oligonucleotide
  Antisense strand to SEQ ID NO: 2383978
cauuccguggagcucacau

SEQ ID NO: 2383980 - RNA, 19 nt, Artificial Sequence
  Description of Artificial Sequence: Synthetic oligonucleotide
  Sense strand starting at position 1564 of SEQ ID NO: 1886032
uugcauuacuaguacuaga

SEQ ID NO: 2383981 - RNA, 19 nt, Artificial Sequence
  Description of Artificial Sequence: Synthetic oligonucleotide
  Antisense strand to SEQ ID NO: 2383980
ucuaguacuaguaaugcaa

SEQ ID NO: 2383982 - RNA, 19 nt, Artificial Sequence
  Description of Artificial Sequence: Synthetic oligonucleotide
  Sense strand starting at position 1582 of SEQ ID NO: 1886032
agccauuugugacaucuag

SEQ ID NO: 2383983 - RNA, 19 nt, Artificial Sequence
  Description of Artificial Sequence: Synthetic oligonucleotide
  Antisense strand to SEQ ID NO: 2383982
cuagaugucacaaauggcu

SEQ ID NO: 2383984 - RNA, 19 nt, Artificial Sequence
  Description of Artificial Sequence: Synthetic oligonucleotide
  Sense strand starting at position 1589 of SEQ ID NO: 1886032
ugugacaucuaguuccauu

SEQ ID NO: 2383985 - RNA, 19 nt, Artificial Sequence
  Description of Artificial Sequence: Synthetic oligonucleotide
  Antisense strand to SEQ ID NO: 2383984
aauggaacuagaugucaca

SEQ ID NO: 2383986 - RNA, 19 nt, Artificial Sequence
  Description of Artificial Sequence: Synthetic oligonucleotide
  Sense strand starting at position 1839 of SEQ ID NO: 1886032
ucaguaggaucucacaaug

SEQ ID NO: 2383987 - RNA, 19 nt, Artificial Sequence
  Description of Artificial Sequence: Synthetic oligonucleotide
  Antisense strand to SEQ ID NO: 2383986
cauugugagauccuacuga

SEQ ID NO: 2383988 - RNA, 19 nt, Artificial Sequence
  Description of Artificial Sequence: Synthetic oligonucleotide
  Sense strand starting at position 1844 of SEQ ID NO: 1886032
aggaucucacaauggugau

SEQ ID NO: 2383989 - RNA, 19 nt, Artificial Sequence
  Description of Artificial Sequence: Synthetic oligonucleotide
  Antisense strand to SEQ ID NO: 2383988
aucaccauugugagauccu

SEQ ID NO: 2383990 - RNA, 19 nt, Artificial Sequence
  Description of Artificial Sequence: Synthetic oligonucleotide
  Sense strand starting at position 1942 of SEQ ID NO: 1886032
guguauuaaugucuguaua

SEQ ID NO: 2383991 - RNA, 19 nt, Artificial Sequence
  Description of Artificial Sequence: Synthetic oligonucleotide
  Antisense strand to SEQ ID NO: 2383990
uauacagacauuaauacac

SEQ ID NO: 2383992 - RNA, 19 nt, Artificial Sequence
  Description of Artificial Sequence: Synthetic oligonucleotide
  Sense strand starting at position 1956 of SEQ ID NO: 1886032
guauaauucuaccaccugu

SEQ ID NO: 2383993 - RNA, 19 nt, Artificial Sequence
  Description of Artificial Sequence: Synthetic oligonucleotide
  Antisense strand to SEQ ID NO: 2383992
acaggugguagaauuauac

SEQ ID NO: 2383994 - RNA, 19 nt, Artificial Sequence
  Description of Artificial Sequence: Synthetic oligonucleotide
  Sense strand starting at position 1962 of SEQ ID NO: 1886032
uucuaccaccugugugaau

SEQ ID NO: 2383995 - RNA, 19 nt, Artificial Sequence
  Description of Artificial Sequence: Synthetic oligonucleotide
  Antisense strand to SEQ ID NO: 2383994
auucacacaggugguagaa

SEQ ID NO: 2383996 - RNA, 19 nt, Artificial Sequence
  Description of Artificial Sequence: Synthetic oligonucleotide
  Sense strand starting at position 1963 of SEQ ID NO: 1886032
ucuaccaccugugugaauu

SEQ ID NO: 2383997 - RNA, 19 nt, Artificial Sequence
  Description of Artificial Sequence: Synthetic oligonucleotide
  Antisense strand to SEQ ID NO: 2383996
aauucacacaggugguaga

SEQ ID NO: 2383998 - RNA, 19 nt, Artificial Sequence
  Description of Artificial Sequence: Synthetic oligonucleotide
  Sense strand starting at position 2147 of SEQ ID NO: 1886032
aacaaauggcguuauauag

SEQ ID NO: 2383999 - RNA, 19 nt, Artificial Sequence
  Description of Artificial Sequence: Synthetic oligonucleotide
  Antisense strand to SEQ ID NO: 2383998
cuauauaacgccauuuguu

SEQ ID NO: 2384000 - RNA, 19 nt, Artificial Sequence
  Description of Artificial Sequence: Synthetic oligonucleotide
  Sense strand starting at position 2234 of SEQ ID NO: 1886032
ccaggagaaucccauuaca

SEQ ID NO: 2384001 - RNA, 19 nt, Artificial Sequence
  Description of Artificial Sequence: Synthetic oligonucleotide
  Antisense strand to SEQ ID NO: 2384000
uguaaugggauucuccugg

SEQ ID NO: 2384002 - RNA, 19 nt, Artificial Sequence
  Description of Artificial Sequence: Synthetic oligonucleotide
  Sense strand starting at position 2323 of SEQ ID NO: 1886032
acaagugaugcccaucagu

SEQ ID NO: 2384003 - RNA, 19 nt, Artificial Sequence
  Description of Artificial Sequence: Synthetic oligonucleotide
  Antisense strand to SEQ ID NO: 2384002
acugaugggcaucacuugu

SEQ ID NO: 2384004 - RNA, 19 nt, Artificial Sequence
  Description of Artificial Sequence: Synthetic oligonucleotide
  Sense strand starting at position 2332 of SEQ ID NO: 1886032
gcccaucagucagaugaua

SEQ ID NO: 2384005 - RNA, 19 nt, Artificial Sequence
  Description of Artificial Sequence: Synthetic oligonucleotide
  Antisense strand to SEQ ID NO: 2384004
uaucaucugacugaugggc

SEQ ID NO: 2384006 - RNA, 19 nt, Artificial Sequence
  Description of Artificial Sequence: Synthetic oligonucleotide
  Sense strand starting at position 2337 of SEQ ID NO: 1886032
ucagucagaugauagagua

SEQ ID NO: 2384007 - RNA, 19 nt, Artificial Sequence
  Description of Artificial Sequence: Synthetic oligonucleotide
  Antisense strand to SEQ ID NO: 2384006
uacucuaucaucugacuga

SEQ ID NO: 2384008 - RNA, 19 nt, Artificial Sequence
  Description of Artificial Sequence: Synthetic oligonucleotide
  Sense strand starting at position 2368 of SEQ ID NO: 1886032
augguccaagucugacaaa

SEQ ID NO: 2384009 - RNA, 19 nt, Artificial Sequence
  Description of Artificial Sequence: Synthetic oligonucleotide
  Antisense strand to SEQ ID NO: 2384008
uuugucagacuuggaccau

SEQ ID NO: 2384010 - RNA, 19 nt, Artificial Sequence
  Description of Artificial Sequence: Synthetic oligonucleotide
  Sense strand starting at position 2463 of SEQ ID NO: 1886032
accaguugagcucacaaca

SEQ ID NO: 2384011 - RNA, 19 nt, Artificial Sequence
  Description of Artificial Sequence: Synthetic oligonucleotide
  Antisense strand to SEQ ID NO: 2384010
uguugugagcucaacuggu

SEQ ID NO: 2384012 - RNA, 19 nt, Artificial Sequence
  Description of Artificial Sequence: Synthetic oligonucleotide
  Sense strand starting at position 2483 of SEQ ID NO: 1886032
aaagcaauuguagagaguu

SEQ ID NO: 2384013 - RNA, 19 nt, Artificial Sequence
  Description of Artificial Sequence: Synthetic oligonucleotide
  Antisense strand to SEQ ID NO: 2384012
aacucucuacaauugcuuu

SEQ ID NO: 2384014 - RNA, 19 nt, Artificial Sequence
  Description of Artificial Sequence: Synthetic oligonucleotide
  Sense strand starting at position 2558 of SEQ ID NO: 1886032
uuuggaacuuucuuuguua

SEQ ID NO: 2384015 - RNA, 19 nt, Artificial Sequence
  Description of Artificial Sequence: Synthetic oligonucleotide
  Antisense strand to SEQ ID NO: 2384014
uaacaaagaaaguuccaaa

SEQ ID NO: 2384016 - RNA, 19 nt, Artificial Sequence
  Description of Artificial Sequence: Synthetic oligonucleotide
  Sense strand starting at position 2560 of SEQ ID NO: 1886032
uggaacuuucuuuguuagu

SEQ ID NO: 2384017 - RNA, 19 nt, Artificial Sequence
  Description of Artificial Sequence: Synthetic oligonucleotide
  Antisense strand to SEQ ID NO: 2384016
acuaacaaagaaaguucca

SEQ ID NO: 2384018 - RNA, 19 nt, Artificial Sequence
  Description of Artificial Sequence: Synthetic oligonucleotide
  Sense strand starting at position 2561 of SEQ ID NO: 1886032
ggaacuuucuuuguuagua

SEQ ID NO: 2384019 - RNA, 19 nt, Artificial Sequence
  Description of Artificial Sequence: Synthetic oligonucleotide
  Antisense strand to SEQ ID NO: 2384018
uacuaacaaagaaaguucc

SEQ ID NO: 2384020 - RNA, 19 nt, Artificial Sequence
  Description of Artificial Sequence: Synthetic oligonucleotide
  Sense strand starting at position 2565 of SEQ ID NO: 1886032
cuuucuuuguuaguaauag

SEQ ID NO: 2384021 - RNA, 19 nt, Artificial Sequence
  Description of Artificial Sequence: Synthetic oligonucleotide
  Antisense strand to SEQ ID NO: 2384020
cuauuacuaacaaagaaag

SEQ ID NO: 2384022 - RNA, 19 nt, Artificial Sequence
  Description of Artificial Sequence: Synthetic oligonucleotide
  Sense strand starting at position 2576 of SEQ ID NO: 1886032
aguaauaguuccuuauggu

SEQ ID NO: 2384023 - RNA, 19 nt, Artificial Sequence
  Description of Artificial Sequence: Synthetic oligonucleotide
  Antisense strand to SEQ ID NO: 2384022
accauaaggaacuauuacu

SEQ ID NO: 2384024 - RNA, 19 nt, Artificial Sequence
  Description of Artificial Sequence: Synthetic oligonucleotide
  Sense strand starting at position 2577 of SEQ ID NO: 1886032
guaauaguuccuuaugguu

SEQ ID NO: 2384025 - RNA, 19 nt, Artificial Sequence
  Description of Artificial Sequence: Synthetic oligonucleotide
  Antisense strand to SEQ ID NO: 2384024
aaccauaaggaacuauuac

SEQ ID NO: 2384026 - RNA, 19 nt, Artificial Sequence
  Description of Artificial Sequence: Synthetic oligonucleotide
  Sense strand starting at position 2616 of SEQ ID NO: 1886032
gcaugaaugugucucccau

SEQ ID NO: 2384027 - RNA, 19 nt, Artificial Sequence
  Description of Artificial Sequence: Synthetic oligonucleotide
  Antisense strand to SEQ ID NO: 2384026
augggagacacauucaugc

SEQ ID NO: 2384028 - RNA, 19 nt, Artificial Sequence
  Description of Artificial Sequence: Synthetic oligonucleotide
  Sense strand starting at position 2618 of SEQ ID NO: 1886032
augaaugugucucccauca

SEQ ID NO: 2384029 - RNA, 19 nt, Artificial Sequence
  Description of Artificial Sequence: Synthetic oligonucleotide
  Antisense strand to SEQ ID NO: 2384028
ugaugggagacacauucau

SEQ ID NO: 2384030 - RNA, 19 nt, Artificial Sequence
  Description of Artificial Sequence: Synthetic oligonucleotide
  Sense strand starting at position 2729 of SEQ ID NO: 1886032
uccugaaauuguuauugau

SEQ ID NO: 2384031 - RNA, 19 nt, Artificial Sequence
  Description of Artificial Sequence: Synthetic oligonucleotide
  Antisense strand to SEQ ID NO: 2384030
aucaauaacaauuucagga

SEQ ID NO: 2384032 - RNA, 19 nt, Artificial Sequence
  Description of Artificial Sequence: Synthetic oligonucleotide
  Sense strand starting at position 3449 of SEQ ID NO: 1886032
guacaucuucaggagcgau

SEQ ID NO: 2384033 - RNA, 19 nt, Artificial Sequence
  Description of Artificial Sequence: Synthetic oligonucleotide
  Antisense strand to SEQ ID NO: 2384032
aucgcuccugaagauguac

SEQ ID NO: 2384034 - RNA, 19 nt, Artificial Sequence
  Description of Artificial Sequence: Synthetic oligonucleotide
  Sense strand starting at position 3720 of SEQ ID NO: 1886032
cugauucucuuacauguca

SEQ ID NO: 2384035 - RNA, 19 nt, Artificial Sequence
  Description of Artificial Sequence: Synthetic oligonucleotide
  Antisense strand to SEQ ID NO: 2384034
ugacauguaagagaaucag

SEQ ID NO: 2384036 - RNA, 19 nt, Artificial Sequence
  Description of Artificial Sequence: Synthetic oligonucleotide
  Sense strand starting at position 495 of SEQ ID NO: 1886033
gcgugacugagauauguau

SEQ ID NO: 2384037 - RNA, 19 nt, Artificial Sequence
  Description of Artificial Sequence: Synthetic oligonucleotide
  Antisense strand to SEQ ID NO: 2384036
auacauaucucagucacgc

SEQ ID NO: 2384038 - RNA, 19 nt, Artificial Sequence
  Description of Artificial Sequence: Synthetic oligonucleotide
  Sense strand starting at position 497 of SEQ ID NO: 1886033
gugacugagauauguauaa

SEQ ID NO: 2384039 - RNA, 19 nt, Artificial Sequence
  Description of Artificial Sequence: Synthetic oligonucleotide
  Antisense strand to SEQ ID NO: 2384038
uuauacauaucucagucac

SEQ ID NO: 2384040 - RNA, 19 nt, Artificial Sequence
  Description of Artificial Sequence: Synthetic oligonucleotide
  Sense strand starting at position 1158 of SEQ ID NO: 1886033
ugcugugugacugaaguca

SEQ ID NO: 2384041 - RNA, 19 nt, Artificial Sequence
  Description of Artificial Sequence: Synthetic oligonucleotide
  Antisense strand to SEQ ID NO: 2384040
ugacuucagucacacagca

SEQ ID NO: 2384042 - RNA, 19 nt, Artificial Sequence
  Description of Artificial Sequence: Synthetic oligonucleotide
  Sense strand starting at position 1166 of SEQ ID NO: 1886033
gacugaagucacugccuuu

SEQ ID NO: 2384043 - RNA, 19 nt, Artificial Sequence
  Description of Artificial Sequence: Synthetic oligonucleotide
  Antisense strand to SEQ ID NO: 2384042
aaaggcagugacuucaguc

SEQ ID NO: 2384044 - RNA, 19 nt, Artificial Sequence
  Description of Artificial Sequence: Synthetic oligonucleotide
  Sense strand starting at position 1247 of SEQ ID NO: 1886033
gauuacucguguucccaca

SEQ ID NO: 2384045 - RNA, 19 nt, Artificial Sequence
  Description of Artificial Sequence: Synthetic oligonucleotide
  Antisense strand to SEQ ID NO: 2384044
ugugggaacacgaguaauc

SEQ ID NO: 2384046 - RNA, 19 nt, Artificial Sequence
  Description of Artificial Sequence: Synthetic oligonucleotide
  Sense strand starting at position 1263 of SEQ ID NO: 1886033
acacauaagcgcugagaag

SEQ ID NO: 2384047 - RNA, 19 nt, Artificial Sequence
  Description of Artificial Sequence: Synthetic oligonucleotide
  Antisense strand to SEQ ID NO: 2384046
cuucucagcgcuuaugugu

SEQ ID NO: 2384048 - RNA, 19 nt, Artificial Sequence
  Description of Artificial Sequence: Synthetic oligonucleotide
  Sense strand starting at position 1264 of SEQ ID NO: 1886033
cacauaagcgcugagaaga

SEQ ID NO: 2384049 - RNA, 19 nt, Artificial Sequence
  Description of Artificial Sequence: Synthetic oligonucleotide
  Antisense strand to SEQ ID NO: 2384048
ucuucucagcgcuuaugug

SEQ ID NO: 2384050 - RNA, 19 nt, Artificial Sequence
  Description of Artificial Sequence: Synthetic oligonucleotide
  Sense strand starting at position 1277 of SEQ ID NO: 1886033
agaagagcuccuggcacuu

SEQ ID NO: 2384051 - RNA, 19 nt, Artificial Sequence
  Description of Artificial Sequence: Synthetic oligonucleotide
  Antisense strand to SEQ ID NO: 2384050
aagugccaggagcucuucu

SEQ ID NO: 2384052 - RNA, 19 nt, Artificial Sequence
  Description of Artificial Sequence: Synthetic oligonucleotide
  Sense strand starting at position 1308 of SEQ ID NO: 1886033
uggguaugucugcauccuu

SEQ ID NO: 2384053 - RNA, 19 nt, Artificial Sequence
  Description of Artificial Sequence: Synthetic oligonucleotide
  Antisense strand to SEQ ID NO: 2384052
aaggaugcagacauaccca

SEQ ID NO: 2384054 - RNA, 19 nt, Artificial Sequence
  Description of Artificial Sequence: Synthetic oligonucleotide
  Sense strand starting at position 1411 of SEQ ID NO: 1886033
ggcaguccuggugaugacu

SEQ ID NO: 2384055 - RNA, 19 nt, Artificial Sequence
  Description of Artificial Sequence: Synthetic oligonucleotide
  Antisense strand to SEQ ID NO: 2384054
agucaucaccaggacugcc

SEQ ID NO: 2384056 - RNA, 19 nt, Artificial Sequence
  Description of Artificial Sequence: Synthetic oligonucleotide
  Sense strand starting at position 1417 of SEQ ID NO: 1886033
ccuggugaugacugucaga

SEQ ID NO: 2384057 - RNA, 19 nt, Artificial Sequence
  Description of Artificial Sequence: Synthetic oligonucleotide
  Antisense strand to SEQ ID NO: 2384056
ucugacagucaucaccagg

SEQ ID NO: 2384058 - RNA, 19 nt, Artificial Sequence
  Description of Artificial Sequence: Synthetic oligonucleotide
  Sense strand starting at position 1420 of SEQ ID NO: 1886033
ggugaugacugucagaccu

SEQ ID NO: 2384059 - RNA, 19 nt, Artificial Sequence
  Description of Artificial Sequence: Synthetic oligonucleotide
  Antisense strand to SEQ ID NO: 2384058
aggucugacagucaucacc

SEQ ID NO: 2384060 - RNA, 19 nt, Artificial Sequence
  Description of Artificial Sequence: Synthetic oligonucleotide
  Sense strand starting at position 1430 of SEQ ID NO: 1886033
gucagaccuagucggcaau

SEQ ID NO: 2384061 - RNA, 19 nt, Artificial Sequence
  Description of Artificial Sequence: Synthetic oligonucleotide
  Antisense strand to SEQ ID NO: 2384060
auugccgacuaggucugac

SEQ ID NO: 2384062 - RNA, 19 nt, Artificial Sequence
  Description of Artificial Sequence: Synthetic oligonucleotide
  Sense strand starting at position 1436 of SEQ ID NO: 1886033
ccuagucggcaaugugaca

SEQ ID NO: 2384063 - RNA, 19 nt, Artificial Sequence
  Description of Artificial Sequence: Synthetic oligonucleotide
  Antisense strand to SEQ ID NO: 2384062
ugucacauugccgacuagg

SEQ ID NO: 2384064 - RNA, 19 nt, Artificial Sequence
  Description of Artificial Sequence: Synthetic oligonucleotide
  Sense strand starting at position 1466 of SEQ ID NO: 1886033
gcagucuacagagaaaugu

SEQ ID NO: 2384065 - RNA, 19 nt, Artificial Sequence
  Description of Artificial Sequence: Synthetic oligonucleotide
  Antisense strand to SEQ ID NO: 2384064
acauuucucuguagacugc

SEQ ID NO: 2384066 - RNA, 19 nt, Artificial Sequence
  Description of Artificial Sequence: Synthetic oligonucleotide
  Sense strand starting at position 1567 of SEQ ID NO: 1886033
acuggucaguggcuuaaua

SEQ ID NO: 2384067 - RNA, 19 nt, Artificial Sequence
  Description of Artificial Sequence: Synthetic oligonucleotide
  Antisense strand to SEQ ID NO: 2384066
uauuaagccacugaccagu

SEQ ID NO: 2384068 - RNA, 19 nt, Artificial Sequence
  Description of Artificial Sequence: Synthetic oligonucleotide
  Sense strand starting at position 1569 of SEQ ID NO: 1886033
uggucaguggcuuaauaaa

SEQ ID NO: 2384069 - RNA, 19 nt, Artificial Sequence
  Description of Artificial Sequence: Synthetic oligonucleotide
  Antisense strand to SEQ ID NO: 2384068
uuuauuaagccacugacca

SEQ ID NO: 2384070 - RNA, 19 nt, Artificial Sequence
  Description of Artificial Sequence: Synthetic oligonucleotide
  Sense strand starting at position 1615 of SEQ ID NO: 1886033
uggcuauggauuuguagca

SEQ ID NO: 2384071 - RNA, 19 nt, Artificial Sequence
  Description of Artificial Sequence: Synthetic oligonucleotide
  Antisense strand to SEQ ID NO: 2384070
ugcuacaaauccauagcca

SEQ ID NO: 2384072 - RNA, 19 nt, Artificial Sequence
  Description of Artificial Sequence: Synthetic oligonucleotide
  Sense strand starting at position 1620 of SEQ ID NO: 1886033
auggauuuguagcacuaau

SEQ ID NO: 2384073 - RNA, 19 nt, Artificial Sequence
  Description of Artificial Sequence: Synthetic oligonucleotide
  Antisense strand to SEQ ID NO: 2384072
auuagugcuacaaauccau

SEQ ID NO: 2384074 - RNA, 19 nt, Artificial Sequence
  Description of Artificial Sequence: Synthetic oligonucleotide
  Sense strand starting at position 1731 of SEQ ID NO: 1886033
cccagaugcuuuguaucca

SEQ ID NO: 2384075 - RNA, 19 nt, Artificial Sequence
  Description of Artificial Sequence: Synthetic oligonucleotide
  Antisense strand to SEQ ID NO: 2384074
uggauacaaagcaucuggg

SEQ ID NO: 2384076 - RNA, 19 nt, Artificial Sequence
  Description of Artificial Sequence: Synthetic oligonucleotide
  Sense strand starting at position 2169 of SEQ ID NO: 1886033
ggaggaggcuccgugugaa

SEQ ID NO: 2384077 - RNA, 19 nt, Artificial Sequence
  Description of Artificial Sequence: Synthetic oligonucleotide
  Antisense strand to SEQ ID NO: 2384076
uucacacggagccuccucc

SEQ ID NO: 2384078 - RNA, 19 nt, Artificial Sequence
  Description of Artificial Sequence: Synthetic oligonucleotide
  Sense strand starting at position 2294 of SEQ ID NO: 1886033
acgagcccgaaguauaauu

SEQ ID NO: 2384079 - RNA, 19 nt, Artificial Sequence
  Description of Artificial Sequence: Synthetic oligonucleotide
  Antisense strand to SEQ ID NO: 2384078
aauuauacuucgggcucgu

SEQ ID NO: 2384080 - RNA, 19 nt, Artificial Sequence
  Description of Artificial Sequence: Synthetic oligonucleotide
  Sense strand starting at position 2400 of SEQ ID NO: 1886033
cuggaagguuccucuggga

SEQ ID NO: 2384081 - RNA, 19 nt, Artificial Sequence
  Description of Artificial Sequence: Synthetic oligonucleotide
  Antisense strand to SEQ ID NO: 2384080
ucccagaggaaccuuccag

SEQ ID NO: 2384082 - RNA, 19 nt, Artificial Sequence
  Description of Artificial Sequence: Synthetic oligonucleotide
  Sense strand starting at position 2403 of SEQ ID NO: 1886033
gaagguuccucugggagau

SEQ ID NO: 2384083 - RNA, 19 nt, Artificial Sequence
  Description of Artificial Sequence: Synthetic oligonucleotide
  Antisense strand to SEQ ID NO: 2384082
aucucccagaggaaccuuc

SEQ ID NO: 2384084 - RNA, 19 nt, Artificial Sequence
  Description of Artificial Sequence: Synthetic oligonucleotide
  Sense strand starting at position 2404 of SEQ ID NO: 1886033
aagguuccucugggagaug

SEQ ID NO: 2384085 - RNA, 19 nt, Artificial Sequence
  Description of Artificial Sequence: Synthetic oligonucleotide
  Antisense strand to SEQ ID NO: 2384084
caucucccagaggaaccuu

SEQ ID NO: 2384086 - RNA, 19 nt, Artificial Sequence
  Description of Artificial Sequence: Synthetic oligonucleotide
  Sense strand starting at position 2424 of SEQ ID NO: 1886033
gaaggugucccauggucag

SEQ ID NO: 2384087 - RNA, 19 nt, Artificial Sequence
  Description of Artificial Sequence: Synthetic oligonucleotide
  Antisense strand to SEQ ID NO: 2384086
cugaccaugggacaccuuc

SEQ ID NO: 2384088 - RNA, 19 nt, Artificial Sequence
  Description of Artificial Sequence: Synthetic oligonucleotide
  Sense strand starting at position 2430 of SEQ ID NO: 1886033
gucccauggucagcuaaau

SEQ ID NO: 2384089 - RNA, 19 nt, Artificial Sequence
  Description of Artificial Sequence: Synthetic oligonucleotide
  Antisense strand to SEQ ID NO: 2384088
auuuagcugaccaugggac

SEQ ID NO: 2384090 - RNA, 19 nt, Artificial Sequence
  Description of Artificial Sequence: Synthetic oligonucleotide
  Sense strand starting at position 2441 of SEQ ID NO: 1886033
agcuaaauuugggagacga

SEQ ID NO: 2384091 - RNA, 19 nt, Artificial Sequence
  Description of Artificial Sequence: Synthetic oligonucleotide
  Antisense strand to SEQ ID NO: 2384090
ucgucucccaaauuuagcu

SEQ ID NO: 2384092 - RNA, 19 nt, Artificial Sequence
  Description of Artificial Sequence: Synthetic oligonucleotide
  Sense strand starting at position 2457 of SEQ ID NO: 1886033
cgaugcucagcgccuuaaa

SEQ ID NO: 2384093 - RNA, 19 nt, Artificial Sequence
  Description of Artificial Sequence: Synthetic oligonucleotide
  Antisense strand to SEQ ID NO: 2384092
uuuaaggcgcugagcaucg

SEQ ID NO: 2384094 - RNA, 19 nt, Artificial Sequence
  Description of Artificial Sequence: Synthetic oligonucleotide
  Sense strand starting at position 2563 of SEQ ID NO: 1886033
uguguuucugaaggccaau

SEQ ID NO: 2384095 - RNA, 19 nt, Artificial Sequence
  Description of Artificial Sequence: Synthetic oligonucleotide
  Antisense strand to SEQ ID NO: 2384094
auuggccuucagaaacaca

SEQ ID NO: 2384096 - RNA, 19 nt, Artificial Sequence
  Description of Artificial Sequence: Synthetic oligonucleotide
  Sense strand starting at position 2672 of SEQ ID NO: 1886033
cccugcagucuugauaaca

SEQ ID NO: 2384097 - RNA, 19 nt, Artificial Sequence
  Description of Artificial Sequence: Synthetic oligonucleotide
  Antisense strand to SEQ ID NO: 2384096
uguuaucaagacugcaggg

SEQ ID NO: 2384098 - RNA, 19 nt, Artificial Sequence
  Description of Artificial Sequence: Synthetic oligonucleotide
  Sense strand starting at position 3009 of SEQ ID NO: 1886033
cggcaauccugacccaaca

SEQ ID NO: 2384099 - RNA, 19 nt, Artificial Sequence
  Description of Artificial Sequence: Synthetic oligonucleotide
  Antisense strand to SEQ ID NO: 2384098
uguugggucaggauugccg

SEQ ID NO: 2384100 - RNA, 19 nt, Artificial Sequence
  Description of Artificial Sequence: Synthetic oligonucleotide
  Sense strand starting at position 3082 of SEQ ID NO: 1886033
ccgcaaauaugauucccau

SEQ ID NO: 2384101 - RNA, 19 nt, Artificial Sequence
  Description of Artificial Sequence: Synthetic oligonucleotide
  Antisense strand to SEQ ID NO: 2384100
augggaaucauauuugcgg

SEQ ID NO: 2384102 - RNA, 19 nt, Artificial Sequence
  Description of Artificial Sequence: Synthetic oligonucleotide
  Sense strand starting at position 3105 of SEQ ID NO: 1886033
cuccucauuuggcagaaau

SEQ ID NO: 2384103 - RNA, 19 nt, Artificial Sequence
  Description of Artificial Sequence: Synthetic oligonucleotide
  Antisense strand to SEQ ID NO: 2384102
auuucugccaaaugaggag

SEQ ID NO: 2384104 - RNA, 19 nt, Artificial Sequence
  Description of Artificial Sequence: Synthetic oligonucleotide
  Sense strand starting at position 3141 of SEQ ID NO: 1886033
ugcuauuaguaagccugaa

SEQ ID NO: 2384105 - RNA, 19 nt, Artificial Sequence
  Description of Artificial Sequence: Synthetic oligonucleotide
  Antisense strand to SEQ ID NO: 2384104
uucaggcuuacuaauagca

SEQ ID NO: 2384106 - RNA, 19 nt, Artificial Sequence
  Description of Artificial Sequence: Synthetic oligonucleotide
  Sense strand starting at position 3145 of SEQ ID NO: 1886033
auuaguaagccugaaacua

SEQ ID NO: 2384107 - RNA, 19 nt, Artificial Sequence
  Description of Artificial Sequence: Synthetic oligonucleotide
  Antisense strand to SEQ ID NO: 2384106
uaguuucaggcuuacuaau

SEQ ID NO: 2384108 - RNA, 19 nt, Artificial Sequence
  Description of Artificial Sequence: Synthetic oligonucleotide
  Sense strand starting at position 3300 of SEQ ID NO: 1886033
gggauauacggaugagggu

SEQ ID NO: 2384109 - RNA, 19 nt, Artificial Sequence
  Description of Artificial Sequence: Synthetic oligonucleotide
  Antisense strand to SEQ ID NO: 2384108
acccucauccguauauccc

SEQ ID NO: 2384110 - RNA, 19 nt, Artificial Sequence
  Description of Artificial Sequence: Synthetic oligonucleotide
  Sense strand starting at position 3586 of SEQ ID NO: 1886033
ggugaucucauccacggua

SEQ ID NO: 2384111 - RNA, 19 nt, Artificial Sequence
  Description of Artificial Sequence: Synthetic oligonucleotide
  Antisense strand to SEQ ID NO: 2384110
uaccguggaugagaucacc

SEQ ID NO: 2384112 - RNA, 19 nt, Artificial Sequence
  Description of Artificial Sequence: Synthetic oligonucleotide
  Sense strand starting at position 3701 of SEQ ID NO: 1886033
cuuccagaucugugaccuu

SEQ ID NO: 2384113 - RNA, 19 nt, Artificial Sequence
  Description of Artificial Sequence: Synthetic oligonucleotide
  Antisense strand to SEQ ID NO: 2384112
aaggucacagaucuggaag

SEQ ID NO: 2384114 - RNA, 19 nt, Artificial Sequence
  Description of Artificial Sequence: Synthetic oligonucleotide
  Sense strand starting at position 3779 of SEQ ID NO: 1886033
ggacgcagaucuucaaguu

SEQ ID NO: 2384115 - RNA, 19 nt, Artificial Sequence
  Description of Artificial Sequence: Synthetic oligonucleotide
  Antisense strand to SEQ ID NO: 2384114
aacuugaagaucugcgucc

SEQ ID NO: 2384116 - RNA, 19 nt, Artificial Sequence
  Description of Artificial Sequence: Synthetic oligonucleotide
  Sense strand starting at position 770 of SEQ ID NO: 1886034
gcaauaaauucuccaacga

SEQ ID NO: 2384117 - RNA, 19 nt, Artificial Sequence
  Description of Artificial Sequence: Synthetic oligonucleotide
  Antisense strand to SEQ ID NO: 2384116
ucguuggagaauuuauugc

SEQ ID NO: 2384118 - RNA, 19 nt, Artificial Sequence
  Description of Artificial Sequence: Synthetic oligonucleotide
  Sense strand starting at position 2755 of SEQ ID NO: 1886034
aauaguaguugacagugau

SEQ ID NO: 2384119 - RNA, 19 nt, Artificial Sequence
  Description of Artificial Sequence: Synthetic oligonucleotide
  Antisense strand to SEQ ID NO: 2384118
aucacugucaacuacuauu

SEQ ID NO: 2384120 - RNA, 19 nt, Artificial Sequence
  Description of Artificial Sequence: Synthetic oligonucleotide
  Sense strand starting at position 2758 of SEQ ID NO: 1886034
aguaguugacagugauuga

SEQ ID NO: 2384121 - RNA, 19 nt, Artificial Sequence
  Description of Artificial Sequence: Synthetic oligonucleotide
  Antisense strand to SEQ ID NO: 2384120
ucaaucacugucaacuacu

SEQ ID NO: 2384122 - RNA, 19 nt, Artificial Sequence
  Description of Artificial Sequence: Synthetic oligonucleotide
  Sense strand starting at position 2759 of SEQ ID NO: 1886034
guaguugacagugauugaa

SEQ ID NO: 2384123 - RNA, 19 nt, Artificial Sequence
  Description of Artificial Sequence: Synthetic oligonucleotide
  Antisense strand to SEQ ID NO: 2384122
uucaaucacugucaacuac

SEQ ID NO: 2384124 - RNA, 19 nt, Artificial Sequence
  Description of Artificial Sequence: Synthetic oligonucleotide
  Sense strand starting at position 324 of SEQ ID NO: 1886035
uuccaucugugauugaauc

SEQ ID NO: 2384125 - RNA, 19 nt, Artificial Sequence
  Description of Artificial Sequence: Synthetic oligonucleotide
  Antisense strand to SEQ ID NO: 2384124
gauucaaucacagauggaa

SEQ ID NO: 2384126 - RNA, 19 nt, Artificial Sequence
  Description of Artificial Sequence: Synthetic oligonucleotide
  Sense strand starting at position 325 of SEQ ID NO: 1886035
uccaucugugauugaaucu

SEQ ID NO: 2384127 - RNA, 19 nt, Artificial Sequence
  Description of Artificial Sequence: Synthetic oligonucleotide
  Antisense strand to SEQ ID NO: 2384126
agauucaaucacagaugga

SEQ ID NO: 2384128 - RNA, 19 nt, Artificial Sequence
  Description of Artificial Sequence: Synthetic oligonucleotide
  Sense strand starting at position 331 of SEQ ID NO: 1886035
ugugauugaaucugcagau

SEQ ID NO: 2384129 - RNA, 19 nt, Artificial Sequence
  Description of Artificial Sequence: Synthetic oligonucleotide
  Antisense strand to SEQ ID NO: 2384128
aucugcagauucaaucaca

SEQ ID NO: 2384130 - RNA, 19 nt, Artificial Sequence
  Description of Artificial Sequence: Synthetic oligonucleotide
  Sense strand starting at position 332 of SEQ ID NO: 1886035
gugauugaaucugcagaug

SEQ ID NO: 2384131 - RNA, 19 nt, Artificial Sequence
  Description of Artificial Sequence: Synthetic oligonucleotide
  Antisense strand to SEQ ID NO: 2384130
caucugcagauucaaucac

SEQ ID NO: 2384132 - RNA, 19 nt, Artificial Sequence
  Description of Artificial Sequence: Synthetic oligonucleotide
  Sense strand starting at position 2449 of SEQ ID NO: 1886035
cuagguauccauuaaagug

SEQ ID NO: 2384133 - RNA, 19 nt, Artificial Sequence
  Description of Artificial Sequence: Synthetic oligonucleotide
  Antisense strand to SEQ ID NO: 2384132
cacuuuaauggauaccuag

SEQ ID NO: 2384134 - RNA, 19 nt, Artificial Sequence
  Description of Artificial Sequence: Synthetic oligonucleotide
  Sense strand starting at position 3024 of SEQ ID NO: 1886035
gcuccuugugaucaacagu

SEQ ID NO: 2384135 - RNA, 19 nt, Artificial Sequence
  Description of Artificial Sequence: Synthetic oligonucleotide
  Antisense strand to SEQ ID NO: 2384134
acuguugaucacaaggagc

SEQ ID NO: 2384136 - RNA, 19 nt, Artificial Sequence
  Description of Artificial Sequence: Synthetic oligonucleotide
  Sense strand starting at position 3027 of SEQ ID NO: 1886035
ccuugugaucaacaguuag

SEQ ID NO: 2384137 - RNA, 19 nt, Artificial Sequence
  Description of Artificial Sequence: Synthetic oligonucleotide
  Antisense strand to SEQ ID NO: 2384136
cuaacuguugaucacaagg

SEQ ID NO: 2384138 - RNA, 19 nt, Artificial Sequence
  Description of Artificial Sequence: Synthetic oligonucleotide
  Sense strand starting at position 29 of SEQ ID NO: 1886036
uggaucuaagaaugagcua

SEQ ID NO: 2384139 - RNA, 19 nt, Artificial Sequence
  Description of Artificial Sequence: Synthetic oligonucleotide
  Antisense strand to SEQ ID NO: 2384138
uagcucauucuuagaucca

SEQ ID NO: 2384140 - RNA, 19 nt, Artificial Sequence
  Description of Artificial Sequence: Synthetic oligonucleotide
  Sense strand starting at position 301 of SEQ ID NO: 1886036
ucaauuucuuugucagucu

SEQ ID NO: 2384141 - RNA, 19 nt, Artificial Sequence
  Description of Artificial Sequence: Synthetic oligonucleotide
  Antisense strand to SEQ ID NO: 2384140
agacugacaaagaaauuga

SEQ ID NO: 2384142 - RNA, 19 nt, Artificial Sequence
  Description of Artificial Sequence: Synthetic oligonucleotide
  Sense strand starting at position 387 of SEQ ID NO: 1886036
cacagauacuucgcuguuu

SEQ ID NO: 2384143 - RNA, 19 nt, Artificial Sequence
  Description of Artificial Sequence: Synthetic oligonucleotide
  Antisense strand to SEQ ID NO: 2384142
aaacagcgaaguaucugug

SEQ ID NO: 2384144 - RNA, 19 nt, Artificial Sequence
  Description of Artificial Sequence: Synthetic oligonucleotide
  Sense strand starting at position 388 of SEQ ID NO: 1886036
acagauacuucgcuguuua

SEQ ID NO: 2384145 - RNA, 19 nt, Artificial Sequence
  Description of Artificial Sequence: Synthetic oligonucleotide
  Antisense strand to SEQ ID NO: 2384144
uaaacagcgaaguaucugu

SEQ ID NO: 2384146 - RNA, 19 nt, Artificial Sequence
  Description of Artificial Sequence: Synthetic oligonucleotide
  Sense strand starting at position 389 of SEQ ID NO: 1886036
cagauacuucgcuguuuag

SEQ ID NO: 2384147 - RNA, 19 nt, Artificial Sequence
  Description of Artificial Sequence: Synthetic oligonucleotide
  Antisense strand to SEQ ID NO: 2384146
cuaaacagcgaaguaucug

SEQ ID NO: 2384148 - RNA, 19 nt, Artificial Sequence
  Description of Artificial Sequence: Synthetic oligonucleotide
  Sense strand starting at position 443 of SEQ ID NO: 1886036
gucuguagccuuuagagua

SEQ ID NO: 2384149 - RNA, 19 nt, Artificial Sequence
  Description of Artificial Sequence: Synthetic oligonucleotide
  Antisense strand to SEQ ID NO: 2384148
uacucuaaaggcuacagac

SEQ ID NO: 2384150 - RNA, 19 nt, Artificial Sequence
  Description of Artificial Sequence: Synthetic oligonucleotide
  Sense strand starting at position 448 of SEQ ID NO: 1886036
uagccuuuagaguagaauu

SEQ ID NO: 2384151 - RNA, 19 nt, Artificial Sequence
  Description of Artificial Sequence: Synthetic oligonucleotide
  Antisense strand to SEQ ID NO: 2384150
aauucuacucuaaaggcua

SEQ ID NO: 2384152 - RNA, 19 nt, Artificial Sequence
  Description of Artificial Sequence: Synthetic oligonucleotide
  Sense strand starting at position 603 of SEQ ID NO: 1886036
guggguuauguggagugaa

SEQ ID NO: 2384153 - RNA, 19 nt, Artificial Sequence
  Description of Artificial Sequence: Synthetic oligonucleotide
  Antisense strand to SEQ ID NO: 2384152
uucacuccacauaacccac

SEQ ID NO: 2384154 - RNA, 19 nt, Artificial Sequence
  Description of Artificial Sequence: Synthetic oligonucleotide
  Sense strand starting at position 604 of SEQ ID NO: 1886036
uggguuauguggagugaau

SEQ ID NO: 2384155 - RNA, 19 nt, Artificial Sequence
  Description of Artificial Sequence: Synthetic oligonucleotide
  Antisense strand to SEQ ID NO: 2384154
auucacuccacauaaccca

SEQ ID NO: 2384156 - RNA, 19 nt, Artificial Sequence
  Description of Artificial Sequence: Synthetic oligonucleotide
  Sense strand starting at position 606 of SEQ ID NO: 1886036
gguuauguggagugaauca

SEQ ID NO: 2384157 - RNA, 19 nt, Artificial Sequence
  Description of Artificial Sequence: Synthetic oligonucleotide
  Antisense strand to SEQ ID NO: 2384156
ugauucacuccacauaacc

SEQ ID NO: 2384158 - RNA, 19 nt, Artificial Sequence
  Description of Artificial Sequence: Synthetic oligonucleotide
  Sense strand starting at position 636 of SEQ ID NO: 1886036
uugauugauuaugagcuaa

SEQ ID NO: 2384159 - RNA, 19 nt, Artificial Sequence
  Description of Artificial Sequence: Synthetic oligonucleotide
  Antisense strand to SEQ ID NO: 2384158
uuagcucauaaucaaucaa

SEQ ID NO: 2384160 - RNA, 19 nt, Artificial Sequence
  Description of Artificial Sequence: Synthetic oligonucleotide
  Sense strand starting at position 688 of SEQ ID NO: 1886036
ggccuuuauccauguauaa

SEQ ID NO: 2384161 - RNA, 19 nt, Artificial Sequence
  Description of Artificial Sequence: Synthetic oligonucleotide
  Antisense strand to SEQ ID NO: 2384160
uuauacauggauaaaggcc

SEQ ID NO: 2384162 - RNA, 19 nt, Artificial Sequence
  Description of Artificial Sequence: Synthetic oligonucleotide
  Sense strand starting at position 774 of SEQ ID NO: 1886036
acuucuauuguucguagaa

SEQ ID NO: 2384163 - RNA, 19 nt, Artificial Sequence
  Description of Artificial Sequence: Synthetic oligonucleotide
  Antisense strand to SEQ ID NO: 2384162
uucuacgaacaauagaagu

SEQ ID NO: 2384164 - RNA, 19 nt, Artificial Sequence
  Description of Artificial Sequence: Synthetic oligonucleotide
  Sense strand starting at position 775 of SEQ ID NO: 1886036
cuucuauuguucguagaag

SEQ ID NO: 2384165 - RNA, 19 nt, Artificial Sequence
  Description of Artificial Sequence: Synthetic oligonucleotide
  Antisense strand to SEQ ID NO: 2384164
cuucuacgaacaauagaag

SEQ ID NO: 2384166 - RNA, 19 nt, Artificial Sequence
  Description of Artificial Sequence: Synthetic oligonucleotide
  Sense strand starting at position 1055 of SEQ ID NO: 1886036
ugauguuuccagcagauuc

SEQ ID NO: 2384167 - RNA, 19 nt, Artificial Sequence
  Description of Artificial Sequence: Synthetic oligonucleotide
  Antisense strand to SEQ ID NO: 2384166
gaaucugcuggaaacauca

SEQ ID NO: 2384168 - RNA, 19 nt, Artificial Sequence
  Description of Artificial Sequence: Synthetic oligonucleotide
  Sense strand starting at position 1228 of SEQ ID NO: 1886036
guuuaaauggcugaccaga

SEQ ID NO: 2384169 - RNA, 19 nt, Artificial Sequence
  Description of Artificial Sequence: Synthetic oligonucleotide
  Antisense strand to SEQ ID NO: 2384168
ucuggucagccauuuaaac

SEQ ID NO: 2384170 - RNA, 19 nt, Artificial Sequence
  Description of Artificial Sequence: Synthetic oligonucleotide
  Sense strand starting at position 2046 of SEQ ID NO: 1886036
agcgacagguuauaaacua

SEQ ID NO: 2384171 - RNA, 19 nt, Artificial Sequence
  Description of Artificial Sequence: Synthetic oligonucleotide
  Antisense strand to SEQ ID NO: 2384170
uaguuuauaaccugucgcu

SEQ ID NO: 2384172 - RNA, 19 nt, Artificial Sequence
  Description of Artificial Sequence: Synthetic oligonucleotide
  Sense strand starting at position 2148 of SEQ ID NO: 1886036
guggguuaguagcuuuaua

SEQ ID NO: 2384173 - RNA, 19 nt, Artificial Sequence
  Description of Artificial Sequence: Synthetic oligonucleotide
  Antisense strand to SEQ ID NO: 2384172
uauaaagcuacuaacccac

SEQ ID NO: 2384174 - RNA, 19 nt, Artificial Sequence
  Description of Artificial Sequence: Synthetic oligonucleotide
  Sense strand starting at position 2213 of SEQ ID NO: 1886036
uauaauugugauugguaac

SEQ ID NO: 2384175 - RNA, 19 nt, Artificial Sequence
  Description of Artificial Sequence: Synthetic oligonucleotide
  Antisense strand to SEQ ID NO: 2384174
guuaccaaucacaauuaua

SEQ ID NO: 2384176 - RNA, 19 nt, Artificial Sequence
  Description of Artificial Sequence: Synthetic oligonucleotide
  Sense strand starting at position 2216 of SEQ ID NO: 1886036
aauugugauugguaacaua

SEQ ID NO: 2384177 - RNA, 19 nt, Artificial Sequence
  Description of Artificial Sequence: Synthetic oligonucleotide
  Antisense strand to SEQ ID NO: 2384176
uauguuaccaaucacaauu

SEQ ID NO: 2384178 - RNA, 19 nt, Artificial Sequence
  Description of Artificial Sequence: Synthetic oligonucleotide
  Sense strand starting at position 2219 of SEQ ID NO: 1886036
ugugauugguaacauauac

SEQ ID NO: 2384179 - RNA, 19 nt, Artificial Sequence
  Description of Artificial Sequence: Synthetic oligonucleotide
  Antisense strand to SEQ ID NO: 2384178
guauauguuaccaaucaca

SEQ ID NO: 2384180 - RNA, 19 nt, Artificial Sequence
  Description of Artificial Sequence: Synthetic oligonucleotide
  Sense strand starting at position 2403 of SEQ ID NO: 1886036
ucuagaaagccaggcauua

SEQ ID NO: 2384181 - RNA, 19 nt, Artificial Sequence
  Description of Artificial Sequence: Synthetic oligonucleotide
  Antisense strand to SEQ ID NO: 2384180
uaaugccuggcuuucuaga

SEQ ID NO: 2384182 - RNA, 19 nt, Artificial Sequence
  Description of Artificial Sequence: Synthetic oligonucleotide
  Sense strand starting at position 2460 of SEQ ID NO: 1886036
uccagauuaccguaaacua

SEQ ID NO: 2384183 - RNA, 19 nt, Artificial Sequence
  Description of Artificial Sequence: Synthetic oligonucleotide
  Antisense strand to SEQ ID NO: 2384182
uaguuuacgguaaucugga

SEQ ID NO: 2384184 - RNA, 19 nt, Artificial Sequence
  Description of Artificial Sequence: Synthetic oligonucleotide
  Sense strand starting at position 2921 of SEQ ID NO: 1886036
cugugacuggccuauaaug

SEQ ID NO: 2384185 - RNA, 19 nt, Artificial Sequence
  Description of Artificial Sequence: Synthetic oligonucleotide
  Antisense strand to SEQ ID NO: 2384184
cauuauaggccagucacag

SEQ ID NO: 2384186 - RNA, 19 nt, Artificial Sequence
  Description of Artificial Sequence: Synthetic oligonucleotide
  Sense strand starting at position 2929 of SEQ ID NO: 1886036
ggccuauaauggcgaauuu

SEQ ID NO: 2384187 - RNA, 19 nt, Artificial Sequence
  Description of Artificial Sequence: Synthetic oligonucleotide
  Antisense strand to SEQ ID NO: 2384186
aaauucgccauuauaggcc

SEQ ID NO: 2384188 - RNA, 19 nt, Artificial Sequence
  Description of Artificial Sequence: Synthetic oligonucleotide
  Sense strand starting at position 3278 of SEQ ID NO: 1886036
cugguaaguucugauaaag

SEQ ID NO: 2384189 - RNA, 19 nt, Artificial Sequence
  Description of Artificial Sequence: Synthetic oligonucleotide
  Antisense strand to SEQ ID NO: 2384188
cuuuaucagaacuuaccag

SEQ ID NO: 2384190 - RNA, 19 nt, Artificial Sequence
  Description of Artificial Sequence: Synthetic oligonucleotide
  Sense strand starting at position 3288 of SEQ ID NO: 1886036
cugauaaaguuucugauaa

SEQ ID NO: 2384191 - RNA, 19 nt, Artificial Sequence
  Description of Artificial Sequence: Synthetic oligonucleotide
  Antisense strand to SEQ ID NO: 2384190
uuaucagaaacuuuaucag

SEQ ID NO: 2384192 - RNA, 19 nt, Artificial Sequence
  Description of Artificial Sequence: Synthetic oligonucleotide
  Sense strand starting at position 3289 of SEQ ID NO: 1886036
ugauaaaguuucugauaag

SEQ ID NO: 2384193 - RNA, 19 nt, Artificial Sequence
  Description of Artificial Sequence: Synthetic oligonucleotide
  Antisense strand to SEQ ID NO: 2384192
cuuaucagaaacuuuauca

SEQ ID NO: 2384194 - RNA, 19 nt, Artificial Sequence
  Description of Artificial Sequence: Synthetic oligonucleotide
  Sense strand starting at position 3290 of SEQ ID NO: 1886036
gauaaaguuucugauaagg

SEQ ID NO: 2384195 - RNA, 19 nt, Artificial Sequence
  Description of Artificial Sequence: Synthetic oligonucleotide
  Antisense strand to SEQ ID NO: 2384194
ccuuaucagaaacuuuauc

SEQ ID NO: 2384196 - RNA, 19 nt, Artificial Sequence
  Description of Artificial Sequence: Synthetic oligonucleotide
  Sense strand starting at position 3292 of SEQ ID NO: 1886036
uaaaguuucugauaagguu

SEQ ID NO: 2384197 - RNA, 19 nt, Artificial Sequence
  Description of Artificial Sequence: Synthetic oligonucleotide
  Antisense strand to SEQ ID NO: 2384196
aaccuuaucagaaacuuua

SEQ ID NO: 2384198 - RNA, 19 nt, Artificial Sequence
  Description of Artificial Sequence: Synthetic oligonucleotide
  Sense strand starting at position 3300 of SEQ ID NO: 1886036
cugauaagguuugacuacu

SEQ ID NO: 2384199 - RNA, 19 nt, Artificial Sequence
  Description of Artificial Sequence: Synthetic oligonucleotide
  Antisense strand to SEQ ID NO: 2384198
aguagucaaaccuuaucag

SEQ ID NO: 2384200 - RNA, 19 nt, Artificial Sequence
  Description of Artificial Sequence: Synthetic oligonucleotide
  Sense strand starting at position 3416 of SEQ ID NO: 1886036
agcuuaugauguuaaagga

SEQ ID NO: 2384201 - RNA, 19 nt, Artificial Sequence
  Description of Artificial Sequence: Synthetic oligonucleotide
  Antisense strand to SEQ ID NO: 2384200
uccuuuaacaucauaagcu

SEQ ID NO: 2384202 - RNA, 19 nt, Artificial Sequence
  Description of Artificial Sequence: Synthetic oligonucleotide
  Sense strand starting at position 3644 of SEQ ID NO: 1886036
agaggagauauacgugacu

SEQ ID NO: 2384203 - RNA, 19 nt, Artificial Sequence
  Description of Artificial Sequence: Synthetic oligonucleotide
  Antisense strand to SEQ ID NO: 2384202
agucacguauaucuccucu

SEQ ID NO: 2384204 - RNA, 19 nt, Artificial Sequence
  Description of Artificial Sequence: Synthetic oligonucleotide
  Sense strand starting at position 3646 of SEQ ID NO: 1886036
aggagauauacgugacuuc

SEQ ID NO: 2384205 - RNA, 19 nt, Artificial Sequence
  Description of Artificial Sequence: Synthetic oligonucleotide
  Antisense strand to SEQ ID NO: 2384204
gaagucacguauaucuccu

SEQ ID NO: 2384206 - RNA, 19 nt, Artificial Sequence
  Description of Artificial Sequence: Synthetic oligonucleotide
  Sense strand starting at position 3647 of SEQ ID NO: 1886036
ggagauauacgugacuucu

SEQ ID NO: 2384207 - RNA, 19 nt, Artificial Sequence
  Description of Artificial Sequence: Synthetic oligonucleotide
  Antisense strand to SEQ ID NO: 2384206
agaagucacguauaucucc

SEQ ID NO: 2384208 - RNA, 19 nt, Artificial Sequence
  Description of Artificial Sequence: Synthetic oligonucleotide
  Sense strand starting at position 3656 of SEQ ID NO: 1886036
cgugacuucuacuuuauau

SEQ ID NO: 2384209 - RNA, 19 nt, Artificial Sequence
  Description of Artificial Sequence: Synthetic oligonucleotide
  Antisense strand to SEQ ID NO: 2384208
auauaaaguagaagucacg

SEQ ID NO: 2384210 - RNA, 19 nt, Artificial Sequence
  Description of Artificial Sequence: Synthetic oligonucleotide
  Sense strand starting at position 3771 of SEQ ID NO: 1886036
acgcgugucccugugaaga

SEQ ID NO: 2384211 - RNA, 19 nt, Artificial Sequence
  Description of Artificial Sequence: Synthetic oligonucleotide
  Antisense strand to SEQ ID NO: 2384210
ucuucacagggacacgcgu

SEQ ID NO: 2384212 - RNA, 19 nt, Artificial Sequence
  Description of Artificial Sequence: Synthetic oligonucleotide
  Sense strand starting at position 3772 of SEQ ID NO: 1886036
cgcgugucccugugaagag

SEQ ID NO: 2384213 - RNA, 19 nt, Artificial Sequence
  Description of Artificial Sequence: Synthetic oligonucleotide
  Antisense strand to SEQ ID NO: 2384212
cucuucacagggacacgcg

SEQ ID NO: 2384214 - RNA, 19 nt, Artificial Sequence
  Description of Artificial Sequence: Synthetic oligonucleotide
  Sense strand starting at position 3846 of SEQ ID NO: 1886036
ugggcuaaguccguaaaga

SEQ ID NO: 2384215 - RNA, 19 nt, Artificial Sequence
  Description of Artificial Sequence: Synthetic oligonucleotide
  Antisense strand to SEQ ID NO: 2384214
ucuuuacggacuuagccca

SEQ ID NO: 2384216 - RNA, 19 nt, Artificial Sequence
  Description of Artificial Sequence: Synthetic oligonucleotide
  Sense strand starting at position 3847 of SEQ ID NO: 1886036
gggcuaaguccguaaagag

SEQ ID NO: 2384217 - RNA, 19 nt, Artificial Sequence
  Description of Artificial Sequence: Synthetic oligonucleotide
  Antisense strand to SEQ ID NO: 2384216
cucuuuacggacuuagccc

SEQ ID NO: 2384218 - RNA, 19 nt, Artificial Sequence
  Description of Artificial Sequence: Synthetic oligonucleotide
  Sense strand starting at position 440 of SEQ ID NO: 1886037
gcuggagacgugugaccuu

SEQ ID NO: 2384219 - RNA, 19 nt, Artificial Sequence
  Description of Artificial Sequence: Synthetic oligonucleotide
  Antisense strand to SEQ ID NO: 2384218
aaggucacacgucuccagc

SEQ ID NO: 2384220 - RNA, 19 nt, Artificial Sequence
  Description of Artificial Sequence: Synthetic oligonucleotide
  Sense strand starting at position 443 of SEQ ID NO: 1886037
ggagacgugugaccuugaa

SEQ ID NO: 2384221 - RNA, 19 nt, Artificial Sequence
  Description of Artificial Sequence: Synthetic oligonucleotide
  Antisense strand to SEQ ID NO: 2384220
uucaaggucacacgucucc

SEQ ID NO: 2384222 - RNA, 19 nt, Artificial Sequence
  Description of Artificial Sequence: Synthetic oligonucleotide
  Sense strand starting at position 1080 of SEQ ID NO: 1886037
caucuuggauuuggagaau

SEQ ID NO: 2384223 - RNA, 19 nt, Artificial Sequence
  Description of Artificial Sequence: Synthetic oligonucleotide
  Antisense strand to SEQ ID NO: 2384222
auucuccaaauccaagaug

SEQ ID NO: 2384224 - RNA, 19 nt, Artificial Sequence
  Description of Artificial Sequence: Synthetic oligonucleotide
  Sense strand starting at position 1192 of SEQ ID NO: 1886037
ggcagaucugcaggguaca

SEQ ID NO: 2384225 - RNA, 19 nt, Artificial Sequence
  Description of Artificial Sequence: Synthetic oligonucleotide
  Antisense strand to SEQ ID NO: 2384224
uguacccugcagaucugcc

SEQ ID NO: 2384226 - RNA, 19 nt, Artificial Sequence
  Description of Artificial Sequence: Synthetic oligonucleotide
  Sense strand starting at position 1515 of SEQ ID NO: 1886037
ccuguuguaucuguugacu

SEQ ID NO: 2384227 - RNA, 19 nt, Artificial Sequence
  Description of Artificial Sequence: Synthetic oligonucleotide
  Antisense strand to SEQ ID NO: 2384226
agucaacagauacaacagg

SEQ ID NO: 2384228 - RNA, 19 nt, Artificial Sequence
  Description of Artificial Sequence: Synthetic oligonucleotide
  Sense strand starting at position 1517 of SEQ ID NO: 1886037
uguuguaucuguugacucu

SEQ ID NO: 2384229 - RNA, 19 nt, Artificial Sequence
  Description of Artificial Sequence: Synthetic oligonucleotide
  Antisense strand to SEQ ID NO: 2384228
agagucaacagauacaaca

SEQ ID NO: 2384230 - RNA, 19 nt, Artificial Sequence
  Description of Artificial Sequence: Synthetic oligonucleotide
  Sense strand starting at position 1518 of SEQ ID NO: 1886037
guuguaucuguugacucuu

SEQ ID NO: 2384231 - RNA, 19 nt, Artificial Sequence
  Description of Artificial Sequence: Synthetic oligonucleotide
  Antisense strand to SEQ ID NO: 2384230
aagagucaacagauacaac

SEQ ID NO: 2384232 - RNA, 19 nt, Artificial Sequence
  Description of Artificial Sequence: Synthetic oligonucleotide
  Sense strand starting at position 2005 of SEQ ID NO: 1886037
gacccaagcucugagucau

SEQ ID NO: 2384233 - RNA, 19 nt, Artificial Sequence
  Description of Artificial Sequence: Synthetic oligonucleotide
  Antisense strand to SEQ ID NO: 2384232
augacucagagcuuggguc

SEQ ID NO: 2384234 - RNA, 19 nt, Artificial Sequence
  Description of Artificial Sequence: Synthetic oligonucleotide
  Sense strand starting at position 2199 of SEQ ID NO: 1886037
aauccauguccgcagaaga

SEQ ID NO: 2384235 - RNA, 19 nt, Artificial Sequence
  Description of Artificial Sequence: Synthetic oligonucleotide
  Antisense strand to SEQ ID NO: 2384234
ucuucugcggacauggauu

SEQ ID NO: 2384236 - RNA, 19 nt, Artificial Sequence
  Description of Artificial Sequence: Synthetic oligonucleotide
  Sense strand starting at position 2294 of SEQ ID NO: 1886037
cccuuuggucuuuaucauu

SEQ ID NO: 2384237 - RNA, 19 nt, Artificial Sequence
  Description of Artificial Sequence: Synthetic oligonucleotide
  Antisense strand to SEQ ID NO: 2384236
aaugauaaagaccaaaggg

SEQ ID NO: 2384238 - RNA, 19 nt, Artificial Sequence
  Description of Artificial Sequence: Synthetic oligonucleotide
  Sense strand starting at position 2777 of SEQ ID NO: 1886037
guuuauuucuuccuuuagu

SEQ ID NO: 2384239 - RNA, 19 nt, Artificial Sequence
  Description of Artificial Sequence: Synthetic oligonucleotide
  Antisense strand to SEQ ID NO: 2384238
acuaaaggaagaaauaaac

SEQ ID NO: 2384240 - RNA, 19 nt, Artificial Sequence
  Description of Artificial Sequence: Synthetic oligonucleotide
  Sense strand starting at position 2786 of SEQ ID NO: 1886037
uuccuuuaguauuacaguu

SEQ ID NO: 2384241 - RNA, 19 nt, Artificial Sequence
  Description of Artificial Sequence: Synthetic oligonucleotide
  Antisense strand to SEQ ID NO: 2384240
aacuguaauacuaaaggaa

SEQ ID NO: 2384242 - RNA, 19 nt, Artificial Sequence
  Description of Artificial Sequence: Synthetic oligonucleotide
  Sense strand starting at position 2831 of SEQ ID NO: 1886037
aggagcugcugugauauaa

SEQ ID NO: 2384243 - RNA, 19 nt, Artificial Sequence
  Description of Artificial Sequence: Synthetic oligonucleotide
  Antisense strand to SEQ ID NO: 2384242
uuauaucacagcagcuccu

SEQ ID NO: 2384244 - RNA, 19 nt, Artificial Sequence
  Description of Artificial Sequence: Synthetic oligonucleotide
  Sense strand starting at position 3029 of SEQ ID NO: 1886037
ggaucugugcaauacaaac

SEQ ID NO: 2384245 - RNA, 19 nt, Artificial Sequence
  Description of Artificial Sequence: Synthetic oligonucleotide
  Antisense strand to SEQ ID NO: 2384244
guuuguauugcacagaucc

SEQ ID NO: 2384246 - RNA, 19 nt, Artificial Sequence
  Description of Artificial Sequence: Synthetic oligonucleotide
  Sense strand starting at position 3042 of SEQ ID NO: 1886037
acaaacauguagcuagaaa

SEQ ID NO: 2384247 - RNA, 19 nt, Artificial Sequence
  Description of Artificial Sequence: Synthetic oligonucleotide
  Antisense strand to SEQ ID NO: 2384246
uuucuagcuacauguuugu

SEQ ID NO: 2384248 - RNA, 19 nt, Artificial Sequence
  Description of Artificial Sequence: Synthetic oligonucleotide
  Sense strand starting at position 3065 of SEQ ID NO: 1886037
aaccgaggaucugucuaga

SEQ ID NO: 2384249 - RNA, 19 nt, Artificial Sequence
  Description of Artificial Sequence: Synthetic oligonucleotide
  Antisense strand to SEQ ID NO: 2384248
ucuagacagauccucgguu

SEQ ID NO: 2384250 - RNA, 19 nt, Artificial Sequence
  Description of Artificial Sequence: Synthetic oligonucleotide
  Sense strand starting at position 3076 of SEQ ID NO: 1886037
ugucuagaauacuuccgau

SEQ ID NO: 2384251 - RNA, 19 nt, Artificial Sequence
  Description of Artificial Sequence: Synthetic oligonucleotide
  Antisense strand to SEQ ID NO: 2384250
aucggaaguauucuagaca

SEQ ID NO: 2384252 - RNA, 19 nt, Artificial Sequence
  Description of Artificial Sequence: Synthetic oligonucleotide
  Sense strand starting at position 3079 of SEQ ID NO: 1886037
cuagaauacuuccgauauc

SEQ ID NO: 2384253 - RNA, 19 nt, Artificial Sequence
  Description of Artificial Sequence: Synthetic oligonucleotide
  Antisense strand to SEQ ID NO: 2384252
gauaucggaaguauucuag

SEQ ID NO: 2384254 - RNA, 19 nt, Artificial Sequence
  Description of Artificial Sequence: Synthetic oligonucleotide
  Sense strand starting at position 3095 of SEQ ID NO: 1886037
aucaauauaccguaguuga

SEQ ID NO: 2384255 - RNA, 19 nt, Artificial Sequence
  Description of Artificial Sequence: Synthetic oligonucleotide
  Antisense strand to SEQ ID NO: 2384254
ucaacuacgguauauugau

SEQ ID NO: 2384256 - RNA, 19 nt, Artificial Sequence
  Description of Artificial Sequence: Synthetic oligonucleotide
  Sense strand starting at position 3217 of SEQ ID NO: 1886037
gcacaucacaucggugagu

SEQ ID NO: 2384257 - RNA, 19 nt, Artificial Sequence
  Description of Artificial Sequence: Synthetic oligonucleotide
  Antisense strand to SEQ ID NO: 2384256
acucaccgaugugaugugc

SEQ ID NO: 2384258 - RNA, 19 nt, Artificial Sequence
  Description of Artificial Sequence: Synthetic oligonucleotide
  Sense strand starting at position 3219 of SEQ ID NO: 1886037
acaucacaucggugaguca

SEQ ID NO: 2384259 - RNA, 19 nt, Artificial Sequence
  Description of Artificial Sequence: Synthetic oligonucleotide
  Antisense strand to SEQ ID NO: 2384258
ugacucaccgaugugaugu

SEQ ID NO: 2384260 - RNA, 19 nt, Artificial Sequence
  Description of Artificial Sequence: Synthetic oligonucleotide
  Sense strand starting at position 3227 of SEQ ID NO: 1886037
ucggugagucagugagagu

SEQ ID NO: 2384261 - RNA, 19 nt, Artificial Sequence
  Description of Artificial Sequence: Synthetic oligonucleotide
  Antisense strand to SEQ ID NO: 2384260
acucucacugacucaccga

SEQ ID NO: 2384262 - RNA, 19 nt, Artificial Sequence
  Description of Artificial Sequence: Synthetic oligonucleotide
  Sense strand starting at position 3386 of SEQ ID NO: 1886037
uauaaacuguagugagagu

SEQ ID NO: 2384263 - RNA, 19 nt, Artificial Sequence
  Description of Artificial Sequence: Synthetic oligonucleotide
  Antisense strand to SEQ ID NO: 2384262
acucucacuacaguuuaua

SEQ ID NO: 2384264 - RNA, 19 nt, Artificial Sequence
  Description of Artificial Sequence: Synthetic oligonucleotide
  Sense strand starting at position 3692 of SEQ ID NO: 1886037
gcagcucuuuccucaguga

SEQ ID NO: 2384265 - RNA, 19 nt, Artificial Sequence
  Description of Artificial Sequence: Synthetic oligonucleotide
  Antisense strand to SEQ ID NO: 2384264
ucacugaggaaagagcugc

SEQ ID NO: 2384266 - RNA, 19 nt, Artificial Sequence
  Description of Artificial Sequence: Synthetic oligonucleotide
  Sense strand starting at position 3827 of SEQ ID NO: 1886037
ggacacgcaucacuugauu

SEQ ID NO: 2384267 - RNA, 19 nt, Artificial Sequence
  Description of Artificial Sequence: Synthetic oligonucleotide
  Antisense strand to SEQ ID NO: 2384266
aaucaagugaugcgugucc

SEQ ID NO: 2384268 - RNA, 19 nt, Artificial Sequence
  Description of Artificial Sequence: Synthetic oligonucleotide
  Sense strand starting at position 3852 of SEQ ID NO: 1886037
aggagaaccucugagaaag

SEQ ID NO: 2384269 - RNA, 19 nt, Artificial Sequence
  Description of Artificial Sequence: Synthetic oligonucleotide
  Antisense strand to SEQ ID NO: 2384268
cuuucucagagguucuccu

SEQ ID NO: 2384270 - RNA, 19 nt, Artificial Sequence
  Description of Artificial Sequence: Synthetic oligonucleotide
  Sense strand starting at position 3934 of SEQ ID NO: 1886037
gcugacaacugccuggaaa

SEQ ID NO: 2384271 - RNA, 19 nt, Artificial Sequence
  Description of Artificial Sequence: Synthetic oligonucleotide
  Antisense strand to SEQ ID NO: 2384270
uuuccaggcaguugucagc

SEQ ID NO: 2384272 - RNA, 19 nt, Artificial Sequence
  Description of Artificial Sequence: Synthetic oligonucleotide
  Sense strand starting at position 94 of SEQ ID NO: 1886038
gcaccugggaccuggaauu

SEQ ID NO: 2384273 - RNA, 19 nt, Artificial Sequence
  Description of Artificial Sequence: Synthetic oligonucleotide
  Antisense strand to SEQ ID NO: 2384272
aauuccaggucccaggugc

SEQ ID NO: 2384274 - RNA, 19 nt, Artificial Sequence
  Description of Artificial Sequence: Synthetic oligonucleotide
  Sense strand starting at position 114 of SEQ ID NO: 1886038
gagaguggucccuguucag

SEQ ID NO: 2384275 - RNA, 19 nt, Artificial Sequence
  Description of Artificial Sequence: Synthetic oligonucleotide
  Antisense strand to SEQ ID NO: 2384274
cugaacagggaccacucuc

SEQ ID NO: 2384276 - RNA, 19 nt, Artificial Sequence
  Description of Artificial Sequence: Synthetic oligonucleotide
  Sense strand starting at position 226 of SEQ ID NO: 1886038
caaagagggugugucuuaa

SEQ ID NO: 2384277 - RNA, 19 nt, Artificial Sequence
  Description of Artificial Sequence: Synthetic oligonucleotide
  Antisense strand to SEQ ID NO: 2384276
uuaagacacacccucuuug

SEQ ID NO: 2384278 - RNA, 19 nt, Artificial Sequence
  Description of Artificial Sequence: Synthetic oligonucleotide
  Sense strand starting at position 230 of SEQ ID NO: 1886038
gagggugugucuuaauuag

SEQ ID NO: 2384279 - RNA, 19 nt, Artificial Sequence
  Description of Artificial Sequence: Synthetic oligonucleotide
  Antisense strand to SEQ ID NO: 2384278
cuaauuaagacacacccuc

SEQ ID NO: 2384280 - RNA, 19 nt, Artificial Sequence
  Description of Artificial Sequence: Synthetic oligonucleotide
  Sense strand starting at position 234 of SEQ ID NO: 1886038
gugugucuuaauuagcacu

SEQ ID NO: 2384281 - RNA, 19 nt, Artificial Sequence
  Description of Artificial Sequence: Synthetic oligonucleotide
  Antisense strand to SEQ ID NO: 2384280
agugcuaauuaagacacac

SEQ ID NO: 2384282 - RNA, 19 nt, Artificial Sequence
  Description of Artificial Sequence: Synthetic oligonucleotide
  Sense strand starting at position 368 of SEQ ID NO: 1886038
cagggaugcugugaccaaa

SEQ ID NO: 2384283 - RNA, 19 nt, Artificial Sequence
  Description of Artificial Sequence: Synthetic oligonucleotide
  Antisense strand to SEQ ID NO: 2384282
uuuggucacagcaucccug

SEQ ID NO: 2384284 - RNA, 19 nt, Artificial Sequence
  Description of Artificial Sequence: Synthetic oligonucleotide
  Sense strand starting at position 2408 of SEQ ID NO: 1886038
ugggucaucugaggacaaa

SEQ ID NO: 2384285 - RNA, 19 nt, Artificial Sequence
  Description of Artificial Sequence: Synthetic oligonucleotide
  Antisense strand to SEQ ID NO: 2384284
uuuguccucagaugaccca

SEQ ID NO: 2384286 - RNA, 19 nt, Artificial Sequence
  Description of Artificial Sequence: Synthetic oligonucleotide
  Sense strand starting at position 2537 of SEQ ID NO: 1886038
cugagucuucagggccaga

SEQ ID NO: 2384287 - RNA, 19 nt, Artificial Sequence
  Description of Artificial Sequence: Synthetic oligonucleotide
  Antisense strand to SEQ ID NO: 2384286
ucuggcccugaagacucag

SEQ ID NO: 2384288 - RNA, 19 nt, Artificial Sequence
  Description of Artificial Sequence: Synthetic oligonucleotide
  Sense strand starting at position 2609 of SEQ ID NO: 1886038
gugugagguuggcuugagu

SEQ ID NO: 2384289 - RNA, 19 nt, Artificial Sequence
  Description of Artificial Sequence: Synthetic oligonucleotide
  Antisense strand to SEQ ID NO: 2384288
acucaagccaaccucacac

SEQ ID NO: 2384290 - RNA, 19 nt, Artificial Sequence
  Description of Artificial Sequence: Synthetic oligonucleotide
  Sense strand starting at position 2760 of SEQ ID NO: 1886038
cacaguaguugagaugagu

SEQ ID NO: 2384291 - RNA, 19 nt, Artificial Sequence
  Description of Artificial Sequence: Synthetic oligonucleotide
  Antisense strand to SEQ ID NO: 2384290
acucaucucaacuacugug

SEQ ID NO: 2384292 - RNA, 19 nt, Artificial Sequence
  Description of Artificial Sequence: Synthetic oligonucleotide
  Sense strand starting at position 2763 of SEQ ID NO: 1886038
aguaguugagaugaguaau

SEQ ID NO: 2384293 - RNA, 19 nt, Artificial Sequence
  Description of Artificial Sequence: Synthetic oligonucleotide
  Antisense strand to SEQ ID NO: 2384292
auuacucaucucaacuacu

SEQ ID NO: 2384294 - RNA, 19 nt, Artificial Sequence
  Description of Artificial Sequence: Synthetic oligonucleotide
  Sense strand starting at position 2769 of SEQ ID NO: 1886038
ugagaugaguaauauugag

SEQ ID NO: 2384295 - RNA, 19 nt, Artificial Sequence
  Description of Artificial Sequence: Synthetic oligonucleotide
  Antisense strand to SEQ ID NO: 2384294
cucaauauuacucaucuca

SEQ ID NO: 2384296 - RNA, 19 nt, Artificial Sequence
  Description of Artificial Sequence: Synthetic oligonucleotide
  Sense strand starting at position 2775 of SEQ ID NO: 1886038
gaguaauauugagauguau

SEQ ID NO: 2384297 - RNA, 19 nt, Artificial Sequence
  Description of Artificial Sequence: Synthetic oligonucleotide
  Antisense strand to SEQ ID NO: 2384296
auacaucucaauauuacuc

SEQ ID NO: 2384298 - RNA, 19 nt, Artificial Sequence
  Description of Artificial Sequence: Synthetic oligonucleotide
  Sense strand starting at position 2935 of SEQ ID NO: 1886038
cacggauccugucuuuauu

SEQ ID NO: 2384299 - RNA, 19 nt, Artificial Sequence
  Description of Artificial Sequence: Synthetic oligonucleotide
  Antisense strand to SEQ ID NO: 2384298
aauaaagacaggauccgug

SEQ ID NO: 2384300 - RNA, 19 nt, Artificial Sequence
  Description of Artificial Sequence: Synthetic oligonucleotide
  Sense strand starting at position 3026 of SEQ ID NO: 1886038
auuacuuaucuccguuacu

SEQ ID NO: 2384301 - RNA, 19 nt, Artificial Sequence
  Description of Artificial Sequence: Synthetic oligonucleotide
  Antisense strand to SEQ ID NO: 2384300
aguaacggagauaaguaau

SEQ ID NO: 2384302 - RNA, 19 nt, Artificial Sequence
  Description of Artificial Sequence: Synthetic oligonucleotide
  Sense strand starting at position 3027 of SEQ ID NO: 1886038
uuacuuaucuccguuacug

SEQ ID NO: 2384303 - RNA, 19 nt, Artificial Sequence
  Description of Artificial Sequence: Synthetic oligonucleotide
  Antisense strand to SEQ ID NO: 2384302
caguaacggagauaaguaa

SEQ ID NO: 2384304 - RNA, 19 nt, Artificial Sequence
  Description of Artificial Sequence: Synthetic oligonucleotide
  Sense strand starting at position 3259 of SEQ ID NO: 1886038
cacacaugcuguuagcaga

SEQ ID NO: 2384305 - RNA, 19 nt, Artificial Sequence
  Description of Artificial Sequence: Synthetic oligonucleotide
  Antisense strand to SEQ ID NO: 2384304
ucugcuaacagcaugugug

SEQ ID NO: 2384306 - RNA, 19 nt, Artificial Sequence
  Description of Artificial Sequence: Synthetic oligonucleotide
  Sense strand starting at position 3335 of SEQ ID NO: 1886038
gccauucucugcuguccua

SEQ ID NO: 2384307 - RNA, 19 nt, Artificial Sequence
  Description of Artificial Sequence: Synthetic oligonucleotide
  Antisense strand to SEQ ID NO: 2384306
uaggacagcagagaauggc

SEQ ID NO: 2384308 - RNA, 19 nt, Artificial Sequence
  Description of Artificial Sequence: Synthetic oligonucleotide
  Sense strand starting at position 3338 of SEQ ID NO: 1886038
auucucugcuguccuagaa

SEQ ID NO: 2384309 - RNA, 19 nt, Artificial Sequence
  Description of Artificial Sequence: Synthetic oligonucleotide
  Antisense strand to SEQ ID NO: 2384308
uucuaggacagcagagaau

SEQ ID NO: 2384310 - RNA, 19 nt, Artificial Sequence
  Description of Artificial Sequence: Synthetic oligonucleotide
  Sense strand starting at position 3465 of SEQ ID NO: 1886038
gucaguuuccucuacccau

SEQ ID NO: 2384311 - RNA, 19 nt, Artificial Sequence
  Description of Artificial Sequence: Synthetic oligonucleotide
  Antisense strand to SEQ ID NO: 2384310
auggguagaggaaacugac

SEQ ID NO: 2384312 - RNA, 19 nt, Artificial Sequence
  Description of Artificial Sequence: Synthetic oligonucleotide
  Sense strand starting at position 3544 of SEQ ID NO: 1886038
ccuccagugccucagagua

SEQ ID NO: 2384313 - RNA, 19 nt, Artificial Sequence
  Description of Artificial Sequence: Synthetic oligonucleotide
  Antisense strand to SEQ ID NO: 2384312
uacucugaggcacuggagg

SEQ ID NO: 2384314 - RNA, 19 nt, Artificial Sequence
  Description of Artificial Sequence: Synthetic oligonucleotide
  Sense strand starting at position 3546 of SEQ ID NO: 1886038
uccagugccucagaguaua

SEQ ID NO: 2384315 - RNA, 19 nt, Artificial Sequence
  Description of Artificial Sequence: Synthetic oligonucleotide
  Antisense strand to SEQ ID NO: 2384314
uauacucugaggcacugga

SEQ ID NO: 2384316 - RNA, 19 nt, Artificial Sequence
  Description of Artificial Sequence: Synthetic oligonucleotide
  Sense strand starting at position 3605 of SEQ ID NO: 1886038
gagggaugaugcuuugucu

SEQ ID NO: 2384317 - RNA, 19 nt, Artificial Sequence
  Description of Artificial Sequence: Synthetic oligonucleotide
  Antisense strand to SEQ ID NO: 2384316
agacaaagcaucaucccuc

SEQ ID NO: 2384318 - RNA, 19 nt, Artificial Sequence
  Description of Artificial Sequence: Synthetic oligonucleotide
  Sense strand starting at position 3608 of SEQ ID NO: 1886038
ggaugaugcuuugucucca

SEQ ID NO: 2384319 - RNA, 19 nt, Artificial Sequence
  Description of Artificial Sequence: Synthetic oligonucleotide
  Antisense strand to SEQ ID NO: 2384318
uggagacaaagcaucaucc

SEQ ID NO: 2384320 - RNA, 19 nt, Artificial Sequence
  Description of Artificial Sequence: Synthetic oligonucleotide
  Sense strand starting at position 3612 of SEQ ID NO: 1886038
gaugcuuugucuccagcca

SEQ ID NO: 2384321 - RNA, 19 nt, Artificial Sequence
  Description of Artificial Sequence: Synthetic oligonucleotide
  Antisense strand to SEQ ID NO: 2384320
uggcuggagacaaagcauc

SEQ ID NO: 2384322 - RNA, 19 nt, Artificial Sequence
  Description of Artificial Sequence: Synthetic oligonucleotide
  Sense strand starting at position 3767 of SEQ ID NO: 1886038
ugugcugaaucccacuuua

SEQ ID NO: 2384323 - RNA, 19 nt, Artificial Sequence
  Description of Artificial Sequence: Synthetic oligonucleotide
  Antisense strand to SEQ ID NO: 2384322
uaaagugggauucagcaca

SEQ ID NO: 2384324 - RNA, 19 nt, Artificial Sequence
  Description of Artificial Sequence: Synthetic oligonucleotide
  Sense strand starting at position 3822 of SEQ ID NO: 1886038
guccuucuguggugugaug

SEQ ID NO: 2384325 - RNA, 19 nt, Artificial Sequence
  Description of Artificial Sequence: Synthetic oligonucleotide
  Antisense strand to SEQ ID NO: 2384324
caucacaccacagaaggac

SEQ ID NO: 2384326 - RNA, 19 nt, Artificial Sequence
  Description of Artificial Sequence: Synthetic oligonucleotide
  Sense strand starting at position 3890 of SEQ ID NO: 1886038
ugcagaagggcgcauuaua

SEQ ID NO: 2384327 - RNA, 19 nt, Artificial Sequence
  Description of Artificial Sequence: Synthetic oligonucleotide
  Antisense strand to SEQ ID NO: 2384326
uauaaugcgcccuucugca

SEQ ID NO: 2384328 - RNA, 19 nt, Artificial Sequence
  Description of Artificial Sequence: Synthetic oligonucleotide
  Sense strand starting at position 3899 of SEQ ID NO: 1886038
gcgcauuauagccaugcau

SEQ ID NO: 2384329 - RNA, 19 nt, Artificial Sequence
  Description of Artificial Sequence: Synthetic oligonucleotide
  Antisense strand to SEQ ID NO: 2384328
augcauggcuauaaugcgc

SEQ ID NO: 2384330 - RNA, 19 nt, Artificial Sequence
  Description of Artificial Sequence: Synthetic oligonucleotide
  Sense strand starting at position 3901 of SEQ ID NO: 1886038
gcauuauagccaugcauca

SEQ ID NO: 2384331 - RNA, 19 nt, Artificial Sequence
  Description of Artificial Sequence: Synthetic oligonucleotide
  Antisense strand to SEQ ID NO: 2384330
ugaugcauggcuauaaugc

SEQ ID NO: 2384332 - RNA, 19 nt, Artificial Sequence
  Description of Artificial Sequence: Synthetic oligonucleotide
  Sense strand starting at position 3956 of SEQ ID NO: 1886038
ccuagagggugcuaaacuu

SEQ ID NO: 2384333 - RNA, 19 nt, Artificial Sequence
  Description of Artificial Sequence: Synthetic oligonucleotide
  Antisense strand to SEQ ID NO: 2384332
aaguuuagcacccucuagg

SEQ ID NO: 2384334 - RNA, 19 nt, Artificial Sequence
  Description of Artificial Sequence: Synthetic oligonucleotide
  Sense strand starting at position 1946 of SEQ ID NO: 1886040
ugggucaucugaggacaaa

SEQ ID NO: 2384335 - RNA, 19 nt, Artificial Sequence
  Description of Artificial Sequence: Synthetic oligonucleotide
  Antisense strand to SEQ ID NO: 2384334
uuuguccucagaugaccca

SEQ ID NO: 2384336 - RNA, 19 nt, Artificial Sequence
  Description of Artificial Sequence: Synthetic oligonucleotide
  Sense strand starting at position 2075 of SEQ ID NO: 1886040
cugagucuucagggccaga

SEQ ID NO: 2384337 - RNA, 19 nt, Artificial Sequence
  Description of Artificial Sequence: Synthetic oligonucleotide
  Antisense strand to SEQ ID NO: 2384336
ucuggcccugaagacucag

SEQ ID NO: 2384338 - RNA, 19 nt, Artificial Sequence
  Description of Artificial Sequence: Synthetic oligonucleotide
  Sense strand starting at position 2147 of SEQ ID NO: 1886040
gugugagguuggcuugagu

SEQ ID NO: 2384339 - RNA, 19 nt, Artificial Sequence
  Description of Artificial Sequence: Synthetic oligonucleotide
  Antisense strand to SEQ ID NO: 2384338
acucaagccaaccucacac

SEQ ID NO: 2384340 - RNA, 19 nt, Artificial Sequence
  Description of Artificial Sequence: Synthetic oligonucleotide
  Sense strand starting at position 2298 of SEQ ID NO: 1886040
cacaguaguugagaugagu

SEQ ID NO: 2384341 - RNA, 19 nt, Artificial Sequence
  Description of Artificial Sequence: Synthetic oligonucleotide
  Antisense strand to SEQ ID NO: 2384340
acucaucucaacuacugug

SEQ ID NO: 2384342 - RNA, 19 nt, Artificial Sequence
  Description of Artificial Sequence: Synthetic oligonucleotide
  Sense strand starting at position 2301 of SEQ ID NO: 1886040
aguaguugagaugaguaau

SEQ ID NO: 2384343 - RNA, 19 nt, Artificial Sequence
  Description of Artificial Sequence: Synthetic oligonucleotide
  Antisense strand to SEQ ID NO: 2384342
auuacucaucucaacuacu

SEQ ID NO: 2384344 - RNA, 19 nt, Artificial Sequence
  Description of Artificial Sequence: Synthetic oligonucleotide
  Sense strand starting at position 2307 of SEQ ID NO: 1886040
ugagaugaguaauauugag

SEQ ID NO: 2384345 - RNA, 19 nt, Artificial Sequence
  Description of Artificial Sequence: Synthetic oligonucleotide
  Antisense strand to SEQ ID NO: 2384344
cucaauauuacucaucuca

SEQ ID NO: 2384346 - RNA, 19 nt, Artificial Sequence
  Description of Artificial Sequence: Synthetic oligonucleotide
  Sense strand starting at position 2313 of SEQ ID NO: 1886040
gaguaauauugagauguau

SEQ ID NO: 2384347 - RNA, 19 nt, Artificial Sequence
  Description of Artificial Sequence: Synthetic oligonucleotide
  Antisense strand to SEQ ID NO: 2384346
auacaucucaauauuacuc

SEQ ID NO: 2384348 - RNA, 19 nt, Artificial Sequence
  Description of Artificial Sequence: Synthetic oligonucleotide
  Sense strand starting at position 2473 of SEQ ID NO: 1886040
cacggauccugucuuuauu

SEQ ID NO: 2384349 - RNA, 19 nt, Artificial Sequence
  Description of Artificial Sequence: Synthetic oligonucleotide
  Antisense strand to SEQ ID NO: 2384348
aauaaagacaggauccgug

SEQ ID NO: 2384350 - RNA, 19 nt, Artificial Sequence
  Description of Artificial Sequence: Synthetic oligonucleotide
  Sense strand starting at position 2564 of SEQ ID NO: 1886040
auuacuuaucuccguuacu

SEQ ID NO: 2384351 - RNA, 19 nt, Artificial Sequence
  Description of Artificial Sequence: Synthetic oligonucleotide
  Antisense strand to SEQ ID NO: 2384350
aguaacggagauaaguaau

SEQ ID NO: 2384352 - RNA, 19 nt, Artificial Sequence
  Description of Artificial Sequence: Synthetic oligonucleotide
  Sense strand starting at position 2565 of SEQ ID NO: 1886040
uuacuuaucuccguuacug

SEQ ID NO: 2384353 - RNA, 19 nt, Artificial Sequence
  Description of Artificial Sequence: Synthetic oligonucleotide
  Antisense strand to SEQ ID NO: 2384352
caguaacggagauaaguaa

SEQ ID NO: 2384354 - RNA, 19 nt, Artificial Sequence
  Description of Artificial Sequence: Synthetic oligonucleotide
  Sense strand starting at position 2797 of SEQ ID NO: 1886040
cacacaugcuguuagcaga

SEQ ID NO: 2384355 - RNA, 19 nt, Artificial Sequence
  Description of Artificial Sequence: Synthetic oligonucleotide
  Antisense strand to SEQ ID NO: 2384354
ucugcuaacagcaugugug

SEQ ID NO: 2384356 - RNA, 19 nt, Artificial Sequence
  Description of Artificial Sequence: Synthetic oligonucleotide
  Sense strand starting at position 2873 of SEQ ID NO: 1886040
gccauucucugcuguccua

SEQ ID NO: 2384357 - RNA, 19 nt, Artificial Sequence
  Description of Artificial Sequence: Synthetic oligonucleotide
  Antisense strand to SEQ ID NO: 2384356
uaggacagcagagaauggc

SEQ ID NO: 2384358 - RNA, 19 nt, Artificial Sequence
  Description of Artificial Sequence: Synthetic oligonucleotide
  Sense strand starting at position 2876 of SEQ ID NO: 1886040
auucucugcuguccuagaa

SEQ ID NO: 2384359 - RNA, 19 nt, Artificial Sequence
  Description of Artificial Sequence: Synthetic oligonucleotide
  Antisense strand to SEQ ID NO: 2384358
uucuaggacagcagagaau

SEQ ID NO: 2384360 - RNA, 19 nt, Artificial Sequence
  Description of Artificial Sequence: Synthetic oligonucleotide
  Sense strand starting at position 3003 of SEQ ID NO: 1886040
gucaguuuccucuacccau

SEQ ID NO: 2384361 - RNA, 19 nt, Artificial Sequence
  Description of Artificial Sequence: Synthetic oligonucleotide
  Antisense strand to SEQ ID NO: 2384360
auggguagaggaaacugac

SEQ ID NO: 2384362 - RNA, 19 nt, Artificial Sequence
  Description of Artificial Sequence: Synthetic oligonucleotide
  Sense strand starting at position 3082 of SEQ ID NO: 1886040
ccuccagugccucagagua

SEQ ID NO: 2384363 - RNA, 19 nt, Artificial Sequence
  Description of Artificial Sequence: Synthetic oligonucleotide
  Antisense strand to SEQ ID NO: 2384362
uacucugaggcacuggagg

SEQ ID NO: 2384364 - RNA, 19 nt, Artificial Sequence
  Description of Artificial Sequence: Synthetic oligonucleotide
  Sense strand starting at position 3084 of SEQ ID NO: 1886040
uccagugccucagaguaua

SEQ ID NO: 2384365 - RNA, 19 nt, Artificial Sequence
  Description of Artificial Sequence: Synthetic oligonucleotide
  Antisense strand to SEQ ID NO: 2384364
uauacucugaggcacugga

SEQ ID NO: 2384366 - RNA, 19 nt, Artificial Sequence
  Description of Artificial Sequence: Synthetic oligonucleotide
  Sense strand starting at position 3143 of SEQ ID NO: 1886040
gagggaugaugcuuugucu

SEQ ID NO: 2384367 - RNA, 19 nt, Artificial Sequence
  Description of Artificial Sequence: Synthetic oligonucleotide
  Antisense strand to SEQ ID NO: 2384366
agacaaagcaucaucccuc

SEQ ID NO: 2384368 - RNA, 19 nt, Artificial Sequence
  Description of Artificial Sequence: Synthetic oligonucleotide
  Sense strand starting at position 3146 of SEQ ID NO: 1886040
ggaugaugcuuugucucca

SEQ ID NO: 2384369 - RNA, 19 nt, Artificial Sequence
  Description of Artificial Sequence: Synthetic oligonucleotide
  Antisense strand to SEQ ID NO: 2384368
uggagacaaagcaucaucc

SEQ ID NO: 2384370 - RNA, 19 nt, Artificial Sequence
  Description of Artificial Sequence: Synthetic oligonucleotide
  Sense strand starting at position 3150 of SEQ ID NO: 1886040
gaugcuuugucuccagcca

SEQ ID NO: 2384371 - RNA, 19 nt, Artificial Sequence
  Description of Artificial Sequence: Synthetic oligonucleotide
  Antisense strand to SEQ ID NO: 2384370
uggcuggagacaaagcauc

SEQ ID NO: 2384372 - RNA, 19 nt, Artificial Sequence
  Description of Artificial Sequence: Synthetic oligonucleotide
  Sense strand starting at position 3305 of SEQ ID NO: 1886040
ugugcugaaucccacuuua

SEQ ID NO: 2384373 - RNA, 19 nt, Artificial Sequence
  Description of Artificial Sequence: Synthetic oligonucleotide
  Antisense strand to SEQ ID NO: 2384372
uaaagugggauucagcaca

SEQ ID NO: 2384374 - RNA, 19 nt, Artificial Sequence
  Description of Artificial Sequence: Synthetic oligonucleotide
  Sense strand starting at position 3360 of SEQ ID NO: 1886040
guccuucuguggugugaug

SEQ ID NO: 2384375 - RNA, 19 nt, Artificial Sequence
  Description of Artificial Sequence: Synthetic oligonucleotide
  Antisense strand to SEQ ID NO: 2384374
caucacaccacagaaggac

SEQ ID NO: 2384376 - RNA, 19 nt, Artificial Sequence
  Description of Artificial Sequence: Synthetic oligonucleotide
  Sense strand starting at position 3428 of SEQ ID NO: 1886040
ugcagaagggcgcauuaua

SEQ ID NO: 2384377 - RNA, 19 nt, Artificial Sequence
  Description of Artificial Sequence: Synthetic oligonucleotide
  Antisense strand to SEQ ID NO: 2384376
uauaaugcgcccuucugca

SEQ ID NO: 2384378 - RNA, 19 nt, Artificial Sequence
  Description of Artificial Sequence: Synthetic oligonucleotide
  Sense strand starting at position 3437 of SEQ ID NO: 1886040
gcgcauuauagccaugcau

SEQ ID NO: 2384379 - RNA, 19 nt, Artificial Sequence
  Description of Artificial Sequence: Synthetic oligonucleotide
  Antisense strand to SEQ ID NO: 2384378
augcauggcuauaaugcgc

SEQ ID NO: 2384380 - RNA, 19 nt, Artificial Sequence
  Description of Artificial Sequence: Synthetic oligonucleotide
  Sense strand starting at position 3439 of SEQ ID NO: 1886040
gcauuauagccaugcauca

SEQ ID NO: 2384381 - RNA, 19 nt, Artificial Sequence
  Description of Artificial Sequence: Synthetic oligonucleotide
  Antisense strand to SEQ ID NO: 2384380
ugaugcauggcuauaaugc

SEQ ID NO: 2384382 - RNA, 19 nt, Artificial Sequence
  Description of Artificial Sequence: Synthetic oligonucleotide
  Sense strand starting at position 3494 of SEQ ID NO: 1886040
ccuagagggugcuaaacuu

SEQ ID NO: 2384383 - RNA, 19 nt, Artificial Sequence
  Description of Artificial Sequence: Synthetic oligonucleotide
  Antisense strand to SEQ ID NO: 2384382
aaguuuagcacccucuagg

SEQ ID NO: 2384384 - RNA, 19 nt, Artificial Sequence
  Description of Artificial Sequence: Synthetic oligonucleotide
  Sense strand starting at position 3607 of SEQ ID NO: 1886040
acaauauuggcagaggcau

SEQ ID NO: 2384385 - RNA, 19 nt, Artificial Sequence
  Description of Artificial Sequence: Synthetic oligonucleotide
  Antisense strand to SEQ ID NO: 2384384
augccucugccaauauugu

SEQ ID NO: 2384386 - RNA, 19 nt, Artificial Sequence
  Description of Artificial Sequence: Synthetic oligonucleotide
  Sense strand starting at position 3671 of SEQ ID NO: 1886040
gccugucuuugggcuguua

SEQ ID NO: 2384387 - RNA, 19 nt, Artificial Sequence
  Description of Artificial Sequence: Synthetic oligonucleotide
  Antisense strand to SEQ ID NO: 2384386
uaacagcccaaagacaggc

SEQ ID NO: 2384388 - RNA, 19 nt, Artificial Sequence
  Description of Artificial Sequence: Synthetic oligonucleotide
  Sense strand starting at position 3673 of SEQ ID NO: 1886040
cugucuuugggcuguuagu

SEQ ID NO: 2384389 - RNA, 19 nt, Artificial Sequence
  Description of Artificial Sequence: Synthetic oligonucleotide
  Antisense strand to SEQ ID NO: 2384388
acuaacagcccaaagacag

SEQ ID NO: 2384390 - RNA, 19 nt, Artificial Sequence
  Description of Artificial Sequence: Synthetic oligonucleotide
  Sense strand starting at position 3679 of SEQ ID NO: 1886040
uugggcuguuaguucuuaa

SEQ ID NO: 2384391 - RNA, 19 nt, Artificial Sequence
  Description of Artificial Sequence: Synthetic oligonucleotide
  Antisense strand to SEQ ID NO: 2384390
uuaagaacuaacagcccaa

SEQ ID NO: 2384392 - RNA, 19 nt, Artificial Sequence
  Description of Artificial Sequence: Synthetic oligonucleotide
  Sense strand starting at position 3682 of SEQ ID NO: 1886040
ggcuguuaguucuuaagga

SEQ ID NO: 2384393 - RNA, 19 nt, Artificial Sequence
  Description of Artificial Sequence: Synthetic oligonucleotide
  Antisense strand to SEQ ID NO: 2384392
uccuuaagaacuaacagcc

SEQ ID NO: 2384394 - RNA, 19 nt, Artificial Sequence
  Description of Artificial Sequence: Synthetic oligonucleotide
  Sense strand starting at position 3683 of SEQ ID NO: 1886040
gcuguuaguucuuaaggaa

SEQ ID NO: 2384395 - RNA, 19 nt, Artificial Sequence
  Description of Artificial Sequence: Synthetic oligonucleotide
  Antisense strand to SEQ ID NO: 2384394
uuccuuaagaacuaacagc

SEQ ID NO: 2384396 - RNA, 19 nt, Artificial Sequence
  Description of Artificial Sequence: Synthetic oligonucleotide
  Sense strand starting at position 3755 of SEQ ID NO: 1886040
gugcuuggugcuuagcaga

SEQ ID NO: 2384397 - RNA, 19 nt, Artificial Sequence
  Description of Artificial Sequence: Synthetic oligonucleotide
  Antisense strand to SEQ ID NO: 2384396
ucugcuaagcaccaagcac

SEQ ID NO: 2384398 - RNA, 19 nt, Artificial Sequence
  Description of Artificial Sequence: Synthetic oligonucleotide
  Sense strand starting at position 3854 of SEQ ID NO: 1886040
agcugaguguacucacaug

SEQ ID NO: 2384399 - RNA, 19 nt, Artificial Sequence
  Description of Artificial Sequence: Synthetic oligonucleotide
  Antisense strand to SEQ ID NO: 2384398
caugugaguacacucagcu

SEQ ID NO: 2384400 - RNA, 19 nt, Artificial Sequence
  Description of Artificial Sequence: Synthetic oligonucleotide
  Sense strand starting at position 3915 of SEQ ID NO: 1886040
gcaucucagugcugugauu

SEQ ID NO: 2384401 - RNA, 19 nt, Artificial Sequence
  Description of Artificial Sequence: Synthetic oligonucleotide
  Antisense strand to SEQ ID NO: 2384400
aaucacagcacugagaugc

SEQ ID NO: 2384402 - RNA, 19 nt, Artificial Sequence
  Description of Artificial Sequence: Synthetic oligonucleotide
  Sense strand starting at position 3917 of SEQ ID NO: 1886040
aucucagugcugugauuag

SEQ ID NO: 2384403 - RNA, 19 nt, Artificial Sequence
  Description of Artificial Sequence: Synthetic oligonucleotide
  Antisense strand to SEQ ID NO: 2384402
cuaaucacagcacugagau

SEQ ID NO: 2384404 - RNA, 19 nt, Artificial Sequence
  Description of Artificial Sequence: Synthetic oligonucleotide
  Sense strand starting at position 3921 of SEQ ID NO: 1886040
cagugcugugauuaggcaa

SEQ ID NO: 2384405 - RNA, 19 nt, Artificial Sequence
  Description of Artificial Sequence: Synthetic oligonucleotide
  Antisense strand to SEQ ID NO: 2384404
uugccuaaucacagcacug

SEQ ID NO: 2384406 - RNA, 19 nt, Artificial Sequence
  Description of Artificial Sequence: Synthetic oligonucleotide
  Sense strand starting at position 52 of SEQ ID NO: 1886039
caaagagggugugucuuaa

SEQ ID NO: 2384407 - RNA, 19 nt, Artificial Sequence
  Description of Artificial Sequence: Synthetic oligonucleotide
  Antisense strand to SEQ ID NO: 2384406
uuaagacacacccucuuug

SEQ ID NO: 2384408 - RNA, 19 nt, Artificial Sequence
  Description of Artificial Sequence: Synthetic oligonucleotide
  Sense strand starting at position 56 of SEQ ID NO: 1886039
gagggugugucuuaauuag

SEQ ID NO: 2384409 - RNA, 19 nt, Artificial Sequence
  Description of Artificial Sequence: Synthetic oligonucleotide
  Antisense strand to SEQ ID NO: 2384408
cuaauuaagacacacccuc

SEQ ID NO: 2384410 - RNA, 19 nt, Artificial Sequence
  Description of Artificial Sequence: Synthetic oligonucleotide
  Sense strand starting at position 60 of SEQ ID NO: 1886039
gugugucuuaauuagcacu

SEQ ID NO: 2384411 - RNA, 19 nt, Artificial Sequence
  Description of Artificial Sequence: Synthetic oligonucleotide
  Antisense strand to SEQ ID NO: 2384410
agugcuaauuaagacacac

SEQ ID NO: 2384412 - RNA, 19 nt, Artificial Sequence
  Description of Artificial Sequence: Synthetic oligonucleotide
  Sense strand starting at position 194 of SEQ ID NO: 1886039
cagggaugcugugaccaaa

SEQ ID NO: 2384413 - RNA, 19 nt, Artificial Sequence
  Description of Artificial Sequence: Synthetic oligonucleotide
  Antisense strand to SEQ ID NO: 2384412
uuuggucacagcaucccug

SEQ ID NO: 2384414 - RNA, 19 nt, Artificial Sequence
  Description of Artificial Sequence: Synthetic oligonucleotide
  Sense strand starting at position 2234 of SEQ ID NO: 1886039
ugggucaucugaggacaaa

SEQ ID NO: 2384415 - RNA, 19 nt, Artificial Sequence
  Description of Artificial Sequence: Synthetic oligonucleotide
  Antisense strand to SEQ ID NO: 2384414
uuuguccucagaugaccca

SEQ ID NO: 2384416 - RNA, 19 nt, Artificial Sequence
  Description of Artificial Sequence: Synthetic oligonucleotide
  Sense strand starting at position 2363 of SEQ ID NO: 1886039
cugagucuucagggccaga

SEQ ID NO: 2384417 - RNA, 19 nt, Artificial Sequence
  Description of Artificial Sequence: Synthetic oligonucleotide
  Antisense strand to SEQ ID NO: 2384416
ucuggcccugaagacucag

SEQ ID NO: 2384418 - RNA, 19 nt, Artificial Sequence
  Description of Artificial Sequence: Synthetic oligonucleotide
  Sense strand starting at position 2435 of SEQ ID NO: 1886039
gugugagguuggcuugagu

SEQ ID NO: 2384419 - RNA, 19 nt, Artificial Sequence
  Description of Artificial Sequence: Synthetic oligonucleotide
  Antisense strand to SEQ ID NO: 2384418
acucaagccaaccucacac

SEQ ID NO: 2384420 - RNA, 19 nt, Artificial Sequence
  Description of Artificial Sequence: Synthetic oligonucleotide
  Sense strand starting at position 2586 of SEQ ID NO: 1886039
cacaguaguugagaugagu

SEQ ID NO: 2384421 - RNA, 19 nt, Artificial Sequence
  Description of Artificial Sequence: Synthetic oligonucleotide
  Antisense strand to SEQ ID NO: 2384420
acucaucucaacuacugug

SEQ ID NO: 2384422 - RNA, 19 nt, Artificial Sequence
  Description of Artificial Sequence: Synthetic oligonucleotide
  Sense strand starting at position 2589 of SEQ ID NO: 1886039
aguaguugagaugaguaau

SEQ ID NO: 2384423 - RNA, 19 nt, Artificial Sequence
  Description of Artificial Sequence: Synthetic oligonucleotide
  Antisense strand to SEQ ID NO: 2384422
auuacucaucucaacuacu

SEQ ID NO: 2384424 - RNA, 19 nt, Artificial Sequence
  Description of Artificial Sequence: Synthetic oligonucleotide
  Sense strand starting at position 2595 of SEQ ID NO: 1886039
ugagaugaguaauauugag

SEQ ID NO: 2384425 - RNA, 19 nt, Artificial Sequence
  Description of Artificial Sequence: Synthetic oligonucleotide
  Antisense strand to SEQ ID NO: 2384424
cucaauauuacucaucuca

SEQ ID NO: 2384426 - RNA, 19 nt, Artificial Sequence
  Description of Artificial Sequence: Synthetic oligonucleotide
  Sense strand starting at position 2601 of SEQ ID NO: 1886039
gaguaauauugagauguau

SEQ ID NO: 2384427 - RNA, 19 nt, Artificial Sequence
  Description of Artificial Sequence: Synthetic oligonucleotide
  Antisense strand to SEQ ID NO: 2384426
auacaucucaauauuacuc

SEQ ID NO: 2384428 - RNA, 19 nt, Artificial Sequence
  Description of Artificial Sequence: Synthetic oligonucleotide
  Sense strand starting at position 2761 of SEQ ID NO: 1886039
cacggauccugucuuuauu

SEQ ID NO: 2384429 - RNA, 19 nt, Artificial Sequence
  Description of Artificial Sequence: Synthetic oligonucleotide
  Antisense strand to SEQ ID NO: 2384428
aauaaagacaggauccgug

SEQ ID NO: 2384430 - RNA, 19 nt, Artificial Sequence
  Description of Artificial Sequence: Synthetic oligonucleotide
  Sense strand starting at position 2852 of SEQ ID NO: 1886039
auuacuuaucuccguuacu

SEQ ID NO: 2384431 - RNA, 19 nt, Artificial Sequence
  Description of Artificial Sequence: Synthetic oligonucleotide
  Antisense strand to SEQ ID NO: 2384430
aguaacggagauaaguaau

SEQ ID NO: 2384432 - RNA, 19 nt, Artificial Sequence
  Description of Artificial Sequence: Synthetic oligonucleotide
  Sense strand starting at position 2853 of SEQ ID NO: 1886039
uuacuuaucuccguuacug

SEQ ID NO: 2384433 - RNA, 19 nt, Artificial Sequence
  Description of Artificial Sequence: Synthetic oligonucleotide
  Antisense strand to SEQ ID NO: 2384432
caguaacggagauaaguaa

SEQ ID NO: 2384434 - RNA, 19 nt, Artificial Sequence
  Description of Artificial Sequence: Synthetic oligonucleotide
  Sense strand starting at position 3085 of SEQ ID NO: 1886039
cacacaugcuguuagcaga

SEQ ID NO: 2384435 - RNA, 19 nt, Artificial Sequence
  Description of Artificial Sequence: Synthetic oligonucleotide
  Antisense strand to SEQ ID NO: 2384434
ucugcuaacagcaugugug

SEQ ID NO: 2384436 - RNA, 19 nt, Artificial Sequence
  Description of Artificial Sequence: Synthetic oligonucleotide
  Sense strand starting at position 3161 of SEQ ID NO: 1886039
gccauucucugcuguccua

SEQ ID NO: 2384437 - RNA, 19 nt, Artificial Sequence
  Description of Artificial Sequence: Synthetic oligonucleotide
  Antisense strand to SEQ ID NO: 2384436
uaggacagcagagaauggc

SEQ ID NO: 2384438 - RNA, 19 nt, Artificial Sequence
  Description of Artificial Sequence: Synthetic oligonucleotide
  Sense strand starting at position 3164 of SEQ ID NO: 1886039
auucucugcuguccuagaa

SEQ ID NO: 2384439 - RNA, 19 nt, Artificial Sequence
  Description of Artificial Sequence: Synthetic oligonucleotide
  Antisense strand to SEQ ID NO: 2384438
uucuaggacagcagagaau

SEQ ID NO: 2384440 - RNA, 19 nt, Artificial Sequence
  Description of Artificial Sequence: Synthetic oligonucleotide
  Sense strand starting at position 3291 of SEQ ID NO: 1886039
gucaguuuccucuacccau

SEQ ID NO: 2384441 - RNA, 19 nt, Artificial Sequence
  Description of Artificial Sequence: Synthetic oligonucleotide
  Antisense strand to SEQ ID NO: 2384440
auggguagaggaaacugac

SEQ ID NO: 2384442 - RNA, 19 nt, Artificial Sequence
  Description of Artificial Sequence: Synthetic oligonucleotide
  Sense strand starting at position 3370 of SEQ ID NO: 1886039
ccuccagugccucagagua

SEQ ID NO: 2384443 - RNA, 19 nt, Artificial Sequence
  Description of Artificial Sequence: Synthetic oligonucleotide
  Antisense strand to SEQ ID NO: 2384442
uacucugaggcacuggagg

SEQ ID NO: 2384444 - RNA, 19 nt, Artificial Sequence
  Description of Artificial Sequence: Synthetic oligonucleotide
  Sense strand starting at position 3372 of SEQ ID NO: 1886039
uccagugccucagaguaua

SEQ ID NO: 2384445 - RNA, 19 nt, Artificial Sequence
  Description of Artificial Sequence: Synthetic oligonucleotide
  Antisense strand to SEQ ID NO: 2384444
uauacucugaggcacugga

SEQ ID NO: 2384446 - RNA, 19 nt, Artificial Sequence
  Description of Artificial Sequence: Synthetic oligonucleotide
  Sense strand starting at position 3431 of SEQ ID NO: 1886039
gagggaugaugcuuugucu

SEQ ID NO: 2384447 - RNA, 19 nt, Artificial Sequence
  Description of Artificial Sequence: Synthetic oligonucleotide
  Antisense strand to SEQ ID NO: 2384446
agacaaagcaucaucccuc

SEQ ID NO: 2384448 - RNA, 19 nt, Artificial Sequence
  Description of Artificial Sequence: Synthetic oligonucleotide
  Sense strand starting at position 3434 of SEQ ID NO: 1886039
ggaugaugcuuugucucca

SEQ ID NO: 2384449 - RNA, 19 nt, Artificial Sequence
  Description of Artificial Sequence: Synthetic oligonucleotide
  Antisense strand to SEQ ID NO: 2384448
uggagacaaagcaucaucc

SEQ ID NO: 2384450 - RNA, 19 nt, Artificial Sequence
  Description of Artificial Sequence: Synthetic oligonucleotide
  Sense strand starting at position 3438 of SEQ ID NO: 1886039
gaugcuuugucuccagcca

SEQ ID NO: 2384451 - RNA, 19 nt, Artificial Sequence
  Description of Artificial Sequence: Synthetic oligonucleotide
  Antisense strand to SEQ ID NO: 2384450
uggcuggagacaaagcauc

SEQ ID NO: 2384452 - RNA, 19 nt, Artificial Sequence
  Description of Artificial Sequence: Synthetic oligonucleotide
  Sense strand starting at position 3593 of SEQ ID NO: 1886039
ugugcugaaucccacuuua

SEQ ID NO: 2384453 - RNA, 19 nt, Artificial Sequence
  Description of Artificial Sequence: Synthetic oligonucleotide
  Antisense strand to SEQ ID NO: 2384452
uaaagugggauucagcaca

SEQ ID NO: 2384454 - RNA, 19 nt, Artificial Sequence
  Description of Artificial Sequence: Synthetic oligonucleotide
  Sense strand starting at position 3648 of SEQ ID NO: 1886039
guccuucuguggugugaug

SEQ ID NO: 2384455 - RNA, 19 nt, Artificial Sequence
  Description of Artificial Sequence: Synthetic oligonucleotide
  Antisense strand to SEQ ID NO: 2384454
caucacaccacagaaggac

SEQ ID NO: 2384456 - RNA, 19 nt, Artificial Sequence
  Description of Artificial Sequence: Synthetic oligonucleotide
  Sense strand starting at position 3716 of SEQ ID NO: 1886039
ugcagaagggcgcauuaua

SEQ ID NO: 2384457 - RNA, 19 nt, Artificial Sequence
  Description of Artificial Sequence: Synthetic oligonucleotide
  Antisense strand to SEQ ID NO: 2384456
uauaaugcgcccuucugca

SEQ ID NO: 2384458 - RNA, 19 nt, Artificial Sequence
  Description of Artificial Sequence: Synthetic oligonucleotide
  Sense strand starting at position 3725 of SEQ ID NO: 1886039
gcgcauuauagccaugcau

SEQ ID NO: 2384459 - RNA, 19 nt, Artificial Sequence
  Description of Artificial Sequence: Synthetic oligonucleotide
  Antisense strand to SEQ ID NO: 2384458
augcauggcuauaaugcgc

SEQ ID NO: 2384460 - RNA, 19 nt, Artificial Sequence
  Description of Artificial Sequence: Synthetic oligonucleotide
  Sense strand starting at position 3727 of SEQ ID NO: 1886039
gcauuauagccaugcauca

SEQ ID NO: 2384461 - RNA, 19 nt, Artificial Sequence
  Description of Artificial Sequence: Synthetic oligonucleotide
  Antisense strand to SEQ ID NO: 2384460
ugaugcauggcuauaaugc

SEQ ID NO: 2384462 - RNA, 19 nt, Artificial Sequence
  Description of Artificial Sequence: Synthetic oligonucleotide
  Sense strand starting at position 3782 of SEQ ID NO: 1886039
ccuagagggugcuaaacuu

SEQ ID NO: 2384463 - RNA, 19 nt, Artificial Sequence
  Description of Artificial Sequence: Synthetic oligonucleotide
  Antisense strand to SEQ ID NO: 2384462
aaguuuagcacccucuagg

SEQ ID NO: 2384464 - RNA, 19 nt, Artificial Sequence
  Description of Artificial Sequence: Synthetic oligonucleotide
  Sense strand starting at position 3895 of SEQ ID NO: 1886039
acaauauuggcagaggcau

SEQ ID NO: 2384465 - RNA, 19 nt, Artificial Sequence
  Description of Artificial Sequence: Synthetic oligonucleotide
  Antisense strand to SEQ ID NO: 2384464
augccucugccaauauugu

SEQ ID NO: 2384466 - RNA, 19 nt, Artificial Sequence
  Description of Artificial Sequence: Synthetic oligonucleotide
  Sense strand starting at position 3959 of SEQ ID NO: 1886039
gccugucuuugggcuguua

SEQ ID NO: 2384467 - RNA, 19 nt, Artificial Sequence
  Description of Artificial Sequence: Synthetic oligonucleotide
  Antisense strand to SEQ ID NO: 2384466
uaacagcccaaagacaggc

SEQ ID NO: 2384468 - RNA, 19 nt, Artificial Sequence
  Description of Artificial Sequence: Synthetic oligonucleotide
  Sense strand starting at position 3961 of SEQ ID NO: 1886039
cugucuuugggcuguuagu

SEQ ID NO: 2384469 - RNA, 19 nt, Artificial Sequence
  Description of Artificial Sequence: Synthetic oligonucleotide
  Antisense strand to SEQ ID NO: 2384468
acuaacagcccaaagacag

SEQ ID NO: 2384470 - RNA, 19 nt, Artificial Sequence
  Description of Artificial Sequence: Synthetic oligonucleotide
  Sense strand starting at position 3967 of SEQ ID NO: 1886039
uugggcuguuaguucuuaa

SEQ ID NO: 2384471 - RNA, 19 nt, Artificial Sequence
  Description of Artificial Sequence: Synthetic oligonucleotide
  Antisense strand to SEQ ID NO: 2384470
uuaagaacuaacagcccaa

SEQ ID NO: 2384472 - RNA, 19 nt, Artificial Sequence
  Description of Artificial Sequence: Synthetic oligonucleotide
  Sense strand starting at position 3970 of SEQ ID NO: 1886039
ggcuguuaguucuuaagga

SEQ ID NO: 2384473 - RNA, 19 nt, Artificial Sequence
  Description of Artificial Sequence: Synthetic oligonucleotide
  Antisense strand to SEQ ID NO: 2384472
uccuuaagaacuaacagcc

SEQ ID NO: 2384474 - RNA, 19 nt, Artificial Sequence
  Description of Artificial Sequence: Synthetic oligonucleotide
  Sense strand starting at position 3971 of SEQ ID NO: 1886039
gcuguuaguucuuaaggaa

SEQ ID NO: 2384475 - RNA, 19 nt, Artificial Sequence
  Description of Artificial Sequence: Synthetic oligonucleotide
  Antisense strand to SEQ ID NO: 2384474
uuccuuaagaacuaacagc

SEQ ID NO: 2384476 - RNA, 19 nt, Artificial Sequence
  Description of Artificial Sequence: Synthetic oligonucleotide
  Sense strand starting at position 10 of SEQ ID NO: 1886041
ugggcagaaucuccucuau

SEQ ID NO: 2384477 - RNA, 19 nt, Artificial Sequence
  Description of Artificial Sequence: Synthetic oligonucleotide
  Antisense strand to SEQ ID NO: 2384476
auagaggagauucugccca

SEQ ID NO: 2384478 - RNA, 19 nt, Artificial Sequence
  Description of Artificial Sequence: Synthetic oligonucleotide
  Sense strand starting at position 77 of SEQ ID NO: 1886041
ucguccuaguucuccaaca

SEQ ID NO: 2384479 - RNA, 19 nt, Artificial Sequence
  Description of Artificial Sequence: Synthetic oligonucleotide
  Antisense strand to SEQ ID NO: 2384478
uguuggagaacuaggacga

SEQ ID NO: 2384480 - RNA, 19 nt, Artificial Sequence
  Description of Artificial Sequence: Synthetic oligonucleotide
  Sense strand starting at position 78 of SEQ ID NO: 1886041
cguccuaguucuccaacau

SEQ ID NO: 2384481 - RNA, 19 nt, Artificial Sequence
  Description of Artificial Sequence: Synthetic oligonucleotide
  Antisense strand to SEQ ID NO: 2384480
auguuggagaacuaggacg

SEQ ID NO: 2384482 - RNA, 19 nt, Artificial Sequence
  Description of Artificial Sequence: Synthetic oligonucleotide
  Sense strand starting at position 79 of SEQ ID NO: 1886041
guccuaguucuccaacaug

SEQ ID NO: 2384483 - RNA, 19 nt, Artificial Sequence
  Description of Artificial Sequence: Synthetic oligonucleotide
  Antisense strand to SEQ ID NO: 2384482
cauguuggagaacuaggac

SEQ ID NO: 2384484 - RNA, 19 nt, Artificial Sequence
  Description of Artificial Sequence: Synthetic oligonucleotide
  Sense strand starting at position 82 of SEQ ID NO: 1886041
cuaguucuccaacauguaa

SEQ ID NO: 2384485 - RNA, 19 nt, Artificial Sequence
  Description of Artificial Sequence: Synthetic oligonucleotide
  Antisense strand to SEQ ID NO: 2384484
uuacauguuggagaacuag

SEQ ID NO: 2384486 - RNA, 19 nt, Artificial Sequence
  Description of Artificial Sequence: Synthetic oligonucleotide
  Sense strand starting at position 691 of SEQ ID NO: 1886041
gagcguaaaucgccucuaa

SEQ ID NO: 2384487 - RNA, 19 nt, Artificial Sequence
  Description of Artificial Sequence: Synthetic oligonucleotide
  Antisense strand to SEQ ID NO: 2384486
uuagaggcgauuuacgcuc

SEQ ID NO: 2384488 - RNA, 19 nt, Artificial Sequence
  Description of Artificial Sequence: Synthetic oligonucleotide
  Sense strand starting at position 695 of SEQ ID NO: 1886041
guaaaucgccucuaaaguu

SEQ ID NO: 2384489 - RNA, 19 nt, Artificial Sequence
  Description of Artificial Sequence: Synthetic oligonucleotide
  Antisense strand to SEQ ID NO: 2384488
aacuuuagaggcgauuuac

SEQ ID NO: 2384490 - RNA, 19 nt, Artificial Sequence
  Description of Artificial Sequence: Synthetic oligonucleotide
  Sense strand starting at position 733 of SEQ ID NO: 1886041
aggagccuuuaugagauuu

SEQ ID NO: 2384491 - RNA, 19 nt, Artificial Sequence
  Description of Artificial Sequence: Synthetic oligonucleotide
  Antisense strand to SEQ ID NO: 2384490
aaaucucauaaaggcuccu

SEQ ID NO: 2384492 - RNA, 19 nt, Artificial Sequence
  Description of Artificial Sequence: Synthetic oligonucleotide
  Sense strand starting at position 766 of SEQ ID NO: 1886041
agacguguggcgggagaaa

SEQ ID NO: 2384493 - RNA, 19 nt, Artificial Sequence
  Description of Artificial Sequence: Synthetic oligonucleotide
  Antisense strand to SEQ ID NO: 2384492
uuucucccgccacacgucu

SEQ ID NO: 2384494 - RNA, 19 nt, Artificial Sequence
  Description of Artificial Sequence: Synthetic oligonucleotide
  Sense strand starting at position 893 of SEQ ID NO: 1886041
cccuccuucccucgggaaa

SEQ ID NO: 2384495 - RNA, 19 nt, Artificial Sequence
  Description of Artificial Sequence: Synthetic oligonucleotide
  Antisense strand to SEQ ID NO: 2384494
uuucccgagggaaggaggg

SEQ ID NO: 2384496 - RNA, 19 nt, Artificial Sequence
  Description of Artificial Sequence: Synthetic oligonucleotide
  Sense strand starting at position 1005 of SEQ ID NO: 1886041
gcgcuacucuugcuccuau

SEQ ID NO: 2384497 - RNA, 19 nt, Artificial Sequence
  Description of Artificial Sequence: Synthetic oligonucleotide
  Antisense strand to SEQ ID NO: 2384496
auaggagcaagaguagcgc

SEQ ID NO: 2384498 - RNA, 19 nt, Artificial Sequence
  Description of Artificial Sequence: Synthetic oligonucleotide
  Sense strand starting at position 1309 of SEQ ID NO: 1886041
ccgagcggccguaaagaau

SEQ ID NO: 2384499 - RNA, 19 nt, Artificial Sequence
  Description of Artificial Sequence: Synthetic oligonucleotide
  Antisense strand to SEQ ID NO: 2384498
auucuuuacggccgcucgg

SEQ ID NO: 2384500 - RNA, 19 nt, Artificial Sequence
  Description of Artificial Sequence: Synthetic oligonucleotide
  Sense strand starting at position 2298 of SEQ ID NO: 1886041
uucuguuucuuuggacaag

SEQ ID NO: 2384501 - RNA, 19 nt, Artificial Sequence
  Description of Artificial Sequence: Synthetic oligonucleotide
  Antisense strand to SEQ ID NO: 2384500
cuuguccaaagaaacagaa

SEQ ID NO: 2384502 - RNA, 19 nt, Artificial Sequence
  Description of Artificial Sequence: Synthetic oligonucleotide
  Sense strand starting at position 2299 of SEQ ID NO: 1886041
ucuguuucuuuggacaaga

SEQ ID NO: 2384503 - RNA, 19 nt, Artificial Sequence
  Description of Artificial Sequence: Synthetic oligonucleotide
  Antisense strand to SEQ ID NO: 2384502
ucuuguccaaagaaacaga

SEQ ID NO: 2384504 - RNA, 19 nt, Artificial Sequence
  Description of Artificial Sequence: Synthetic oligonucleotide
  Sense strand starting at position 2360 of SEQ ID NO: 1886041
ccaguaagcuuccuagaag

SEQ ID NO: 2384505 - RNA, 19 nt, Artificial Sequence
  Description of Artificial Sequence: Synthetic oligonucleotide
  Antisense strand to SEQ ID NO: 2384504
cuucuaggaagcuuacugg

SEQ ID NO: 2384506 - RNA, 19 nt, Artificial Sequence
  Description of Artificial Sequence: Synthetic oligonucleotide
  Sense strand starting at position 2361 of SEQ ID NO: 1886041
caguaagcuuccuagaagg

SEQ ID NO: 2384507 - RNA, 19 nt, Artificial Sequence
  Description of Artificial Sequence: Synthetic oligonucleotide
  Antisense strand to SEQ ID NO: 2384506
ccuucuaggaagcuuacug

SEQ ID NO: 2384508 - RNA, 19 nt, Artificial Sequence
  Description of Artificial Sequence: Synthetic oligonucleotide
  Sense strand starting at position 2545 of SEQ ID NO: 1886041
caggacaucccguaaucuu

SEQ ID NO: 2384509 - RNA, 19 nt, Artificial Sequence
  Description of Artificial Sequence: Synthetic oligonucleotide
  Antisense strand to SEQ ID NO: 2384508
aagauuacgggauguccug

SEQ ID NO: 2384510 - RNA, 19 nt, Artificial Sequence
  Description of Artificial Sequence: Synthetic oligonucleotide
  Sense strand starting at position 2707 of SEQ ID NO: 1886041
ccuguuucugcguguuauc

SEQ ID NO: 2384511 - RNA, 19 nt, Artificial Sequence
  Description of Artificial Sequence: Synthetic oligonucleotide
  Antisense strand to SEQ ID NO: 2384510
gauaacacgcagaaacagg

SEQ ID NO: 2384512 - RNA, 19 nt, Artificial Sequence
  Description of Artificial Sequence: Synthetic oligonucleotide
  Sense strand starting at position 2709 of SEQ ID NO: 1886041
uguuucugcguguuaucca

SEQ ID NO: 2384513 - RNA, 19 nt, Artificial Sequence
  Description of Artificial Sequence: Synthetic oligonucleotide
  Antisense strand to SEQ ID NO: 2384512
uggauaacacgcagaaaca

SEQ ID NO: 2384514 - RNA, 19 nt, Artificial Sequence
  Description of Artificial Sequence: Synthetic oligonucleotide
  Sense strand starting at position 2735 of SEQ ID NO: 1886041
guggaauacaguggugguu

SEQ ID NO: 2384515 - RNA, 19 nt, Artificial Sequence
  Description of Artificial Sequence: Synthetic oligonucleotide
  Antisense strand to SEQ ID NO: 2384514
aaccaccacuguauuccac

SEQ ID NO: 2384516 - RNA, 19 nt, Artificial Sequence
  Description of Artificial Sequence: Synthetic oligonucleotide
  Sense strand starting at position 2893 of SEQ ID NO: 1886041
acuguuucucaugagagca

SEQ ID NO: 2384517 - RNA, 19 nt, Artificial Sequence
  Description of Artificial Sequence: Synthetic oligonucleotide
  Antisense strand to SEQ ID NO: 2384516
ugcucucaugagaaacagu

SEQ ID NO: 2384518 - RNA, 19 nt, Artificial Sequence
  Description of Artificial Sequence: Synthetic oligonucleotide
  Sense strand starting at position 2977 of SEQ ID NO: 1886041
aggugcaaguguuuaggau

SEQ ID NO: 2384519 - RNA, 19 nt, Artificial Sequence
  Description of Artificial Sequence: Synthetic oligonucleotide
  Antisense strand to SEQ ID NO: 2384518
auccuaaacacuugcaccu

SEQ ID NO: 2384520 - RNA, 19 nt, Artificial Sequence
  Description of Artificial Sequence: Synthetic oligonucleotide
  Sense strand starting at position 2978 of SEQ ID NO: 1886041
ggugcaaguguuuaggauu

SEQ ID NO: 2384521 - RNA, 19 nt, Artificial Sequence
  Description of Artificial Sequence: Synthetic oligonucleotide
  Antisense strand to SEQ ID NO: 2384520
aauccuaaacacuugcacc

SEQ ID NO: 2384522 - RNA, 19 nt, Artificial Sequence
  Description of Artificial Sequence: Synthetic oligonucleotide
  Sense strand starting at position 2981 of SEQ ID NO: 1886041
gcaaguguuuaggauuaga

SEQ ID NO: 2384523 - RNA, 19 nt, Artificial Sequence
  Description of Artificial Sequence: Synthetic oligonucleotide
  Antisense strand to SEQ ID NO: 2384522
ucuaauccuaaacacuugc

SEQ ID NO: 2384524 - RNA, 19 nt, Artificial Sequence
  Description of Artificial Sequence: Synthetic oligonucleotide
  Sense strand starting at position 2986 of SEQ ID NO: 1886041
uguuuaggauuagacacaa

SEQ ID NO: 2384525 - RNA, 19 nt, Artificial Sequence
  Description of Artificial Sequence: Synthetic oligonucleotide
  Antisense strand to SEQ ID NO: 2384524
uugugucuaauccuaaaca

SEQ ID NO: 2384526 - RNA, 19 nt, Artificial Sequence
  Description of Artificial Sequence: Synthetic oligonucleotide
  Sense strand starting at position 3001 of SEQ ID NO: 1886041
acaacugaagccuguuagu

SEQ ID NO: 2384527 - RNA, 19 nt, Artificial Sequence
  Description of Artificial Sequence: Synthetic oligonucleotide
  Antisense strand to SEQ ID NO: 2384526
acuaacaggcuucaguugu

SEQ ID NO: 2384528 - RNA, 19 nt, Artificial Sequence
  Description of Artificial Sequence: Synthetic oligonucleotide
  Sense strand starting at position 3004 of SEQ ID NO: 1886041
acugaagccuguuaguaau

SEQ ID NO: 2384529 - RNA, 19 nt, Artificial Sequence
  Description of Artificial Sequence: Synthetic oligonucleotide
  Antisense strand to SEQ ID NO: 2384528
auuacuaacaggcuucagu

SEQ ID NO: 2384530 - RNA, 19 nt, Artificial Sequence
  Description of Artificial Sequence: Synthetic oligonucleotide
  Sense strand starting at position 3006 of SEQ ID NO: 1886041
ugaagccuguuaguaauga

SEQ ID NO: 2384531 - RNA, 19 nt, Artificial Sequence
  Description of Artificial Sequence: Synthetic oligonucleotide
  Antisense strand to SEQ ID NO: 2384530
ucauuacuaacaggcuuca

SEQ ID NO: 2384532 - RNA, 19 nt, Artificial Sequence
  Description of Artificial Sequence: Synthetic oligonucleotide
  Sense strand starting at position 3021 of SEQ ID NO: 1886041
augagaacuugugauaauc

SEQ ID NO: 2384533 - RNA, 19 nt, Artificial Sequence
  Description of Artificial Sequence: Synthetic oligonucleotide
  Antisense strand to SEQ ID NO: 2384532
gauuaucacaaguucucau

SEQ ID NO: 2384534 - RNA, 19 nt, Artificial Sequence
  Description of Artificial Sequence: Synthetic oligonucleotide
  Sense strand starting at position 3196 of SEQ ID NO: 1886041
cuacguuuguccuuucguu

SEQ ID NO: 2384535 - RNA, 19 nt, Artificial Sequence
  Description of Artificial Sequence: Synthetic oligonucleotide
  Antisense strand to SEQ ID NO: 2384534
aacgaaaggacaaacguag

SEQ ID NO: 2384536 - RNA, 19 nt, Artificial Sequence
  Description of Artificial Sequence: Synthetic oligonucleotide
  Sense strand starting at position 3198 of SEQ ID NO: 1886041
acguuuguccuuucguuca

SEQ ID NO: 2384537 - RNA, 19 nt, Artificial Sequence
  Description of Artificial Sequence: Synthetic oligonucleotide
  Antisense strand to SEQ ID NO: 2384536
ugaacgaaaggacaaacgu

SEQ ID NO: 2384538 - RNA, 19 nt, Artificial Sequence
  Description of Artificial Sequence: Synthetic oligonucleotide
  Sense strand starting at position 3245 of SEQ ID NO: 1886041
caauaacugucguagugac

SEQ ID NO: 2384539 - RNA, 19 nt, Artificial Sequence
  Description of Artificial Sequence: Synthetic oligonucleotide
  Antisense strand to SEQ ID NO: 2384538
gucacuacgacaguuauug

SEQ ID NO: 2384540 - RNA, 19 nt, Artificial Sequence
  Description of Artificial Sequence: Synthetic oligonucleotide
  Sense strand starting at position 3268 of SEQ ID NO: 1886041
ucaaguaguaacgguaaua

SEQ ID NO: 2384541 - RNA, 19 nt, Artificial Sequence
  Description of Artificial Sequence: Synthetic oligonucleotide
  Antisense strand to SEQ ID NO: 2384540
uauuaccguuacuacuuga

SEQ ID NO: 2384542 - RNA, 19 nt, Artificial Sequence
  Description of Artificial Sequence: Synthetic oligonucleotide
  Sense strand starting at position 3280 of SEQ ID NO: 1886041
gguaauaacugucauagug

SEQ ID NO: 2384543 - RNA, 19 nt, Artificial Sequence
  Description of Artificial Sequence: Synthetic oligonucleotide
  Antisense strand to SEQ ID NO: 2384542
cacuaugacaguuauuacc

SEQ ID NO: 2384544 - RNA, 19 nt, Artificial Sequence
  Description of Artificial Sequence: Synthetic oligonucleotide
  Sense strand starting at position 3353 of SEQ ID NO: 1886041
ucauuaaugucugcuguaa

SEQ ID NO: 2384545 - RNA, 19 nt, Artificial Sequence
  Description of Artificial Sequence: Synthetic oligonucleotide
  Antisense strand to SEQ ID NO: 2384544
uuacagcagacauuaauga

SEQ ID NO: 2384546 - RNA, 19 nt, Artificial Sequence
  Description of Artificial Sequence: Synthetic oligonucleotide
  Sense strand starting at position 3778 of SEQ ID NO: 1886041
auguauagagcuugaacag

SEQ ID NO: 2384547 - RNA, 19 nt, Artificial Sequence
  Description of Artificial Sequence: Synthetic oligonucleotide
  Antisense strand to SEQ ID NO: 2384546
cuguucaagcucuauacau

SEQ ID NO: 2384548 - RNA, 19 nt, Artificial Sequence
  Description of Artificial Sequence: Synthetic oligonucleotide
  Sense strand starting at position 3779 of SEQ ID NO: 1886041
uguauagagcuugaacagu

SEQ ID NO: 2384549 - RNA, 19 nt, Artificial Sequence
  Description of Artificial Sequence: Synthetic oligonucleotide
  Antisense strand to SEQ ID NO: 2384548
acuguucaagcucuauaca

SEQ ID NO: 2384550 - RNA, 19 nt, Artificial Sequence
  Description of Artificial Sequence: Synthetic oligonucleotide
  Sense strand starting at position 3889 of SEQ ID NO: 1886041
auccaaagucaguauuagu

SEQ ID NO: 2384551 - RNA, 19 nt, Artificial Sequence
  Description of Artificial Sequence: Synthetic oligonucleotide
  Antisense strand to SEQ ID NO: 2384550
acuaauacugacuuuggau

SEQ ID NO: 2384552 - RNA, 19 nt, Artificial Sequence
  Description of Artificial Sequence: Synthetic oligonucleotide
  Sense strand starting at position 3943 of SEQ ID NO: 1886041
uugcgucucgcaugaguau

SEQ ID NO: 2384553 - RNA, 19 nt, Artificial Sequence
  Description of Artificial Sequence: Synthetic oligonucleotide
  Antisense strand to SEQ ID NO: 2384552
auacucaugcgagacgcaa

SEQ ID NO: 2384554 - RNA, 19 nt, Artificial Sequence
  Description of Artificial Sequence: Synthetic oligonucleotide
  Sense strand starting at position 3944 of SEQ ID NO: 1886041
ugcgucucgcaugaguauu

SEQ ID NO: 2384555 - RNA, 19 nt, Artificial Sequence
  Description of Artificial Sequence: Synthetic oligonucleotide
  Antisense strand to SEQ ID NO: 2384554
aauacucaugcgagacgca

SEQ ID NO: 2384556 - RNA, 19 nt, Artificial Sequence
  Description of Artificial Sequence: Synthetic oligonucleotide
  Sense strand starting at position 44 of SEQ ID NO: 1886042
ugaacuaaguccucccaga

SEQ ID NO: 2384557 - RNA, 19 nt, Artificial Sequence
  Description of Artificial Sequence: Synthetic oligonucleotide
  Antisense strand to SEQ ID NO: 2384556
ucugggaggacuuaguuca

SEQ ID NO: 2384558 - RNA, 19 nt, Artificial Sequence
  Description of Artificial Sequence: Synthetic oligonucleotide
  Sense strand starting at position 69 of SEQ ID NO: 1886042
ccauuuguacaguggcauu

SEQ ID NO: 2384559 - RNA, 19 nt, Artificial Sequence
  Description of Artificial Sequence: Synthetic oligonucleotide
  Antisense strand to SEQ ID NO: 2384558
aaugccacuguacaaaugg

SEQ ID NO: 2384560 - RNA, 19 nt, Artificial Sequence
  Description of Artificial Sequence: Synthetic oligonucleotide
  Sense strand starting at position 202 of SEQ ID NO: 1886042
ggguuuacaggcuacuaau

SEQ ID NO: 2384561 - RNA, 19 nt, Artificial Sequence
  Description of Artificial Sequence: Synthetic oligonucleotide
  Antisense strand to SEQ ID NO: 2384560
auuaguagccuguaaaccc

SEQ ID NO: 2384562 - RNA, 19 nt, Artificial Sequence
  Description of Artificial Sequence: Synthetic oligonucleotide
  Sense strand starting at position 237 of SEQ ID NO: 1886042
ucugauccugugggaguaa

SEQ ID NO: 2384563 - RNA, 19 nt, Artificial Sequence
  Description of Artificial Sequence: Synthetic oligonucleotide
  Antisense strand to SEQ ID NO: 2384562
uuacucccacaggaucaga

SEQ ID NO: 2384564 - RNA, 19 nt, Artificial Sequence
  Description of Artificial Sequence: Synthetic oligonucleotide
  Sense strand starting at position 249 of SEQ ID NO: 1886042
ggaguaaagcccuggauuc

SEQ ID NO: 2384565 - RNA, 19 nt, Artificial Sequence
  Description of Artificial Sequence: Synthetic oligonucleotide
  Antisense strand to SEQ ID NO: 2384564
gaauccagggcuuuacucc

SEQ ID NO: 2384566 - RNA, 19 nt, Artificial Sequence
  Description of Artificial Sequence: Synthetic oligonucleotide
  Sense strand starting at position 275 of SEQ ID NO: 1886042
ggauuaaauaaaugucgac

SEQ ID NO: 2384567 - RNA, 19 nt, Artificial Sequence
  Description of Artificial Sequence: Synthetic oligonucleotide
  Antisense strand to SEQ ID NO: 2384566
gucgacauuuauuuaaucc

SEQ ID NO: 2384568 - RNA, 19 nt, Artificial Sequence
  Description of Artificial Sequence: Synthetic oligonucleotide
  Sense strand starting at position 378 of SEQ ID NO: 1886042
gaacuuugccucugaggau

SEQ ID NO: 2384569 - RNA, 19 nt, Artificial Sequence
  Description of Artificial Sequence: Synthetic oligonucleotide
  Antisense strand to SEQ ID NO: 2384568
auccucagaggcaaaguuc

SEQ ID NO: 2384570 - RNA, 19 nt, Artificial Sequence
  Description of Artificial Sequence: Synthetic oligonucleotide
  Sense strand starting at position 420 of SEQ ID NO: 1886042
gcucuuggcauauagugaa

SEQ ID NO: 2384571 - RNA, 19 nt, Artificial Sequence
  Description of Artificial Sequence: Synthetic oligonucleotide
  Antisense strand to SEQ ID NO: 2384570
uucacuauaugccaagagc

SEQ ID NO: 2384572 - RNA, 19 nt, Artificial Sequence
  Description of Artificial Sequence: Synthetic oligonucleotide
  Sense strand starting at position 427 of SEQ ID NO: 1886042
gcauauagugaaugagaua

SEQ ID NO: 2384573 - RNA, 19 nt, Artificial Sequence
  Description of Artificial Sequence: Synthetic oligonucleotide
  Antisense strand to SEQ ID NO: 2384572
uaucucauucacuauaugc

SEQ ID NO: 2384574 - RNA, 19 nt, Artificial Sequence
  Description of Artificial Sequence: Synthetic oligonucleotide
  Sense strand starting at position 439 of SEQ ID NO: 1886042
ugagauaagcaaugcucaa

SEQ ID NO: 2384575 - RNA, 19 nt, Artificial Sequence
  Description of Artificial Sequence: Synthetic oligonucleotide
  Antisense strand to SEQ ID NO: 2384574
uugagcauugcuuaucuca

SEQ ID NO: 2384576 - RNA, 19 nt, Artificial Sequence
  Description of Artificial Sequence: Synthetic oligonucleotide
  Sense strand starting at position 497 of SEQ ID NO: 1886042
cuugcauguuauuccuaag

SEQ ID NO: 2384577 - RNA, 19 nt, Artificial Sequence
  Description of Artificial Sequence: Synthetic oligonucleotide
  Antisense strand to SEQ ID NO: 2384576
cuuaggaauaacaugcaag

SEQ ID NO: 2384578 - RNA, 19 nt, Artificial Sequence
  Description of Artificial Sequence: Synthetic oligonucleotide
  Sense strand starting at position 747 of SEQ ID NO: 1886042
ugagucauagcauaucaac

SEQ ID NO: 2384579 - RNA, 19 nt, Artificial Sequence
  Description of Artificial Sequence: Synthetic oligonucleotide
  Antisense strand to SEQ ID NO: 2384578
guugauaugcuaugacuca

SEQ ID NO: 2384580 - RNA, 19 nt, Artificial Sequence
  Description of Artificial Sequence: Synthetic oligonucleotide
  Sense strand starting at position 899 of SEQ ID NO: 1886042
ccaaaucauugccugcaga

SEQ ID NO: 2384581 - RNA, 19 nt, Artificial Sequence
  Description of Artificial Sequence: Synthetic oligonucleotide
  Antisense strand to SEQ ID NO: 2384580
ucugcaggcaaugauuugg

SEQ ID NO: 2384582 - RNA, 19 nt, Artificial Sequence
  Description of Artificial Sequence: Synthetic oligonucleotide
  Sense strand starting at position 945 of SEQ ID NO: 1886042
aagggcuucuaguuaucuu

SEQ ID NO: 2384583 - RNA, 19 nt, Artificial Sequence
  Description of Artificial Sequence: Synthetic oligonucleotide
  Antisense strand to SEQ ID NO: 2384582
aagauaacuagaagcccuu

SEQ ID NO: 2384584 - RNA, 19 nt, Artificial Sequence
  Description of Artificial Sequence: Synthetic oligonucleotide
  Sense strand starting at position 1289 of SEQ ID NO: 1886042
uuaguaucacagugucuua

SEQ ID NO: 2384585 - RNA, 19 nt, Artificial Sequence
  Description of Artificial Sequence: Synthetic oligonucleotide
  Antisense strand to SEQ ID NO: 2384584
uaagacacugugauacuaa

SEQ ID NO: 2384586 - RNA, 19 nt, Artificial Sequence
  Description of Artificial Sequence: Synthetic oligonucleotide
  Sense strand starting at position 1305 of SEQ ID NO: 1886042
uuaccuucugccuagcgaa

SEQ ID NO: 2384587 - RNA, 19 nt, Artificial Sequence
  Description of Artificial Sequence: Synthetic oligonucleotide
  Antisense strand to SEQ ID NO: 2384586
uucgcuaggcagaagguaa

SEQ ID NO: 2384588 - RNA, 19 nt, Artificial Sequence
  Description of Artificial Sequence: Synthetic oligonucleotide
  Sense strand starting at position 1472 of SEQ ID NO: 1886042
ccgccagaggcguuuaacu

SEQ ID NO: 2384589 - RNA, 19 nt, Artificial Sequence
  Description of Artificial Sequence: Synthetic oligonucleotide
  Antisense strand to SEQ ID NO: 2384588
aguuaaacgccucuggcgg

SEQ ID NO: 2384590 - RNA, 19 nt, Artificial Sequence
  Description of Artificial Sequence: Synthetic oligonucleotide
  Sense strand starting at position 1568 of SEQ ID NO: 1886042
aacuguaguguccaaggga

SEQ ID NO: 2384591 - RNA, 19 nt, Artificial Sequence
  Description of Artificial Sequence: Synthetic oligonucleotide
  Antisense strand to SEQ ID NO: 2384590
ucccuuggacacuacaguu

SEQ ID NO: 2384592 - RNA, 19 nt, Artificial Sequence
  Description of Artificial Sequence: Synthetic oligonucleotide
  Sense strand starting at position 1571 of SEQ ID NO: 1886042
uguaguguccaagggagga

SEQ ID NO: 2384593 - RNA, 19 nt, Artificial Sequence
  Description of Artificial Sequence: Synthetic oligonucleotide
  Antisense strand to SEQ ID NO: 2384592
uccucccuuggacacuaca

SEQ ID NO: 2384594 - RNA, 19 nt, Artificial Sequence
  Description of Artificial Sequence: Synthetic oligonucleotide
  Sense strand starting at position 2279 of SEQ ID NO: 1886042
aagguugucaucugauagg

SEQ ID NO: 2384595 - RNA, 19 nt, Artificial Sequence
  Description of Artificial Sequence: Synthetic oligonucleotide
  Antisense strand to SEQ ID NO: 2384594
ccuaucagaugacaaccuu

SEQ ID NO: 2384596 - RNA, 19 nt, Artificial Sequence
  Description of Artificial Sequence: Synthetic oligonucleotide
  Sense strand starting at position 2314 of SEQ ID NO: 1886042
ugaaacuccuagcucagaa

SEQ ID NO: 2384597 - RNA, 19 nt, Artificial Sequence
  Description of Artificial Sequence: Synthetic oligonucleotide
  Antisense strand to SEQ ID NO: 2384596
uucugagcuaggaguuuca

SEQ ID NO: 2384598 - RNA, 19 nt, Artificial Sequence
  Description of Artificial Sequence: Synthetic oligonucleotide
  Sense strand starting at position 2452 of SEQ ID NO: 1886042
ggauuauucugaguaaugc

SEQ ID NO: 2384599 - RNA, 19 nt, Artificial Sequence
  Description of Artificial Sequence: Synthetic oligonucleotide
  Antisense strand to SEQ ID NO: 2384598
gcauuacucagaauaaucc

SEQ ID NO: 2384600 - RNA, 19 nt, Artificial Sequence
  Description of Artificial Sequence: Synthetic oligonucleotide
  Sense strand starting at position 2453 of SEQ ID NO: 1886042
gauuauucugaguaaugca

SEQ ID NO: 2384601 - RNA, 19 nt, Artificial Sequence
  Description of Artificial Sequence: Synthetic oligonucleotide
  Antisense strand to SEQ ID NO: 2384600
ugcauuacucagaauaauc

SEQ ID NO: 2384602 - RNA, 19 nt, Artificial Sequence
  Description of Artificial Sequence: Synthetic oligonucleotide
  Sense strand starting at position 2502 of SEQ ID NO: 1886042
ugggcaaccuggucaucau

SEQ ID NO: 2384603 - RNA, 19 nt, Artificial Sequence
  Description of Artificial Sequence: Synthetic oligonucleotide
  Antisense strand to SEQ ID NO: 2384602
augaugaccagguugccca

SEQ ID NO: 2384604 - RNA, 19 nt, Artificial Sequence
  Description of Artificial Sequence: Synthetic oligonucleotide
  Sense strand starting at position 2505 of SEQ ID NO: 1886042
gcaaccuggucaucaugaa

SEQ ID NO: 2384605 - RNA, 19 nt, Artificial Sequence
  Description of Artificial Sequence: Synthetic oligonucleotide
  Antisense strand to SEQ ID NO: 2384604
uucaugaugaccagguugc

SEQ ID NO: 2384606 - RNA, 19 nt, Artificial Sequence
  Description of Artificial Sequence: Synthetic oligonucleotide
  Sense strand starting at position 2575 of SEQ ID NO: 1886042
gugaauaugcuauguuaua

SEQ ID NO: 2384607 - RNA, 19 nt, Artificial Sequence
  Description of Artificial Sequence: Synthetic oligonucleotide
  Antisense strand to SEQ ID NO: 2384606
uauaacauagcauauucac

SEQ ID NO: 2384608 - RNA, 19 nt, Artificial Sequence
  Description of Artificial Sequence: Synthetic oligonucleotide
  Sense strand starting at position 2636 of SEQ ID NO: 1886042
ugugcuuccucaccuaaag

SEQ ID NO: 2384609 - RNA, 19 nt, Artificial Sequence
  Description of Artificial Sequence: Synthetic oligonucleotide
  Antisense strand to SEQ ID NO: 2384608
cuuuaggugaggaagcaca

SEQ ID NO: 2384610 - RNA, 19 nt, Artificial Sequence
  Description of Artificial Sequence: Synthetic oligonucleotide
  Sense strand starting at position 2661 of SEQ ID NO: 1886042
aggacuuuguugcuccaga

SEQ ID NO: 2384611 - RNA, 19 nt, Artificial Sequence
  Description of Artificial Sequence: Synthetic oligonucleotide
  Antisense strand to SEQ ID NO: 2384610
ucuggagcaacaaaguccu

SEQ ID NO: 2384612 - RNA, 19 nt, Artificial Sequence
  Description of Artificial Sequence: Synthetic oligonucleotide
  Sense strand starting at position 2662 of SEQ ID NO: 1886042
ggacuuuguugcuccagau

SEQ ID NO: 2384613 - RNA, 19 nt, Artificial Sequence
  Description of Artificial Sequence: Synthetic oligonucleotide
  Antisense strand to SEQ ID NO: 2384612
aucuggagcaacaaagucc

SEQ ID NO: 2384614 - RNA, 19 nt, Artificial Sequence
  Description of Artificial Sequence: Synthetic oligonucleotide
  Sense strand starting at position 2666 of SEQ ID NO: 1886042
uuuguugcuccagaucuuu

SEQ ID NO: 2384615 - RNA, 19 nt, Artificial Sequence
  Description of Artificial Sequence: Synthetic oligonucleotide
  Antisense strand to SEQ ID NO: 2384614
aaagaucuggagcaacaaa

SEQ ID NO: 2384616 - RNA, 19 nt, Artificial Sequence
  Description of Artificial Sequence: Synthetic oligonucleotide
  Sense strand starting at position 2838 of SEQ ID NO: 1886042
uccugaguauucuccacuu

SEQ ID NO: 2384617 - RNA, 19 nt, Artificial Sequence
  Description of Artificial Sequence: Synthetic oligonucleotide
  Antisense strand to SEQ ID NO: 2384616
aaguggagaauacucagga

SEQ ID NO: 2384618 - RNA, 19 nt, Artificial Sequence
  Description of Artificial Sequence: Synthetic oligonucleotide
  Sense strand starting at position 2840 of SEQ ID NO: 1886042
cugaguauucuccacuuga

SEQ ID NO: 2384619 - RNA, 19 nt, Artificial Sequence
  Description of Artificial Sequence: Synthetic oligonucleotide
  Antisense strand to SEQ ID NO: 2384618
ucaaguggagaauacucag

SEQ ID NO: 2384620 - RNA, 19 nt, Artificial Sequence
  Description of Artificial Sequence: Synthetic oligonucleotide
  Sense strand starting at position 2959 of SEQ ID NO: 1886042
uuugaaucccuguggagau

SEQ ID NO: 2384621 - RNA, 19 nt, Artificial Sequence
  Description of Artificial Sequence: Synthetic oligonucleotide
  Antisense strand to SEQ ID NO: 2384620
aucuccacagggauucaaa

SEQ ID NO: 2384622 - RNA, 19 nt, Artificial Sequence
  Description of Artificial Sequence: Synthetic oligonucleotide
  Sense strand starting at position 2976 of SEQ ID NO: 1886042
augacaugugucugcaaga

SEQ ID NO: 2384623 - RNA, 19 nt, Artificial Sequence
  Description of Artificial Sequence: Synthetic oligonucleotide
  Antisense strand to SEQ ID NO: 2384622
ucuugcagacacaugucau

SEQ ID NO: 2384624 - RNA, 19 nt, Artificial Sequence
  Description of Artificial Sequence: Synthetic oligonucleotide
  Sense strand starting at position 2977 of SEQ ID NO: 1886042
ugacaugugucugcaagag

SEQ ID NO: 2384625 - RNA, 19 nt, Artificial Sequence
  Description of Artificial Sequence: Synthetic oligonucleotide
  Antisense strand to SEQ ID NO: 2384624
cucuugcagacacauguca

SEQ ID NO: 2384626 - RNA, 19 nt, Artificial Sequence
  Description of Artificial Sequence: Synthetic oligonucleotide
  Sense strand starting at position 2981 of SEQ ID NO: 1886042
augugucugcaagagggaa

SEQ ID NO: 2384627 - RNA, 19 nt, Artificial Sequence
  Description of Artificial Sequence: Synthetic oligonucleotide
  Antisense strand to SEQ ID NO: 2384626
uucccucuugcagacacau

SEQ ID NO: 2384628 - RNA, 19 nt, Artificial Sequence
  Description of Artificial Sequence: Synthetic oligonucleotide
  Sense strand starting at position 3103 of SEQ ID NO: 1886042
uuugaaacccuguggagau

SEQ ID NO: 2384629 - RNA, 19 nt, Artificial Sequence
  Description of Artificial Sequence: Synthetic oligonucleotide
  Antisense strand to SEQ ID NO: 2384628
aucuccacaggguuucaaa

SEQ ID NO: 2384630 - RNA, 19 nt, Artificial Sequence
  Description of Artificial Sequence: Synthetic oligonucleotide
  Sense strand starting at position 3473 of SEQ ID NO: 1886042
gggaccucuccaugggauu

SEQ ID NO: 2384631 - RNA, 19 nt, Artificial Sequence
  Description of Artificial Sequence: Synthetic oligonucleotide
  Antisense strand to SEQ ID NO: 2384630
aaucccauggagagguccc

SEQ ID NO: 2384632 - RNA, 19 nt, Artificial Sequence
  Description of Artificial Sequence: Synthetic oligonucleotide
  Sense strand starting at position 3651 of SEQ ID NO: 1886042
gaucacucauggccagaua

SEQ ID NO: 2384633 - RNA, 19 nt, Artificial Sequence
  Description of Artificial Sequence: Synthetic oligonucleotide
  Antisense strand to SEQ ID NO: 2384632
uaucuggccaugagugauc

SEQ ID NO: 2384634 - RNA, 19 nt, Artificial Sequence
  Description of Artificial Sequence: Synthetic oligonucleotide
  Sense strand starting at position 3660 of SEQ ID NO: 1886042
uggccagauaaaugguuua

SEQ ID NO: 2384635 - RNA, 19 nt, Artificial Sequence
  Description of Artificial Sequence: Synthetic oligonucleotide
  Antisense strand to SEQ ID NO: 2384634
uaaaccauuuaucuggcca

SEQ ID NO: 2384636 - RNA, 19 nt, Artificial Sequence
  Description of Artificial Sequence: Synthetic oligonucleotide
  Sense strand starting at position 657 of SEQ ID NO: 1886043
gcuaauaaucagcacgaga

SEQ ID NO: 2384637 - RNA, 19 nt, Artificial Sequence
  Description of Artificial Sequence: Synthetic oligonucleotide
  Antisense strand to SEQ ID NO: 2384636
ucucgugcugauuauuagc

SEQ ID NO: 2384638 - RNA, 19 nt, Artificial Sequence
  Description of Artificial Sequence: Synthetic oligonucleotide
  Sense strand starting at position 739 of SEQ ID NO: 1886043
gggcgaauaacgugaaagu

SEQ ID NO: 2384639 - RNA, 19 nt, Artificial Sequence
  Description of Artificial Sequence: Synthetic oligonucleotide
  Antisense strand to SEQ ID NO: 2384638
acuuucacguuauucgccc

SEQ ID NO: 2384640 - RNA, 19 nt, Artificial Sequence
  Description of Artificial Sequence: Synthetic oligonucleotide
  Sense strand starting at position 740 of SEQ ID NO: 1886043
ggcgaauaacgugaaaguu

SEQ ID NO: 2384641 - RNA, 19 nt, Artificial Sequence
  Description of Artificial Sequence: Synthetic oligonucleotide
  Antisense strand to SEQ ID NO: 2384640
aacuuucacguuauucgcc

SEQ ID NO: 2384642 - RNA, 19 nt, Artificial Sequence
  Description of Artificial Sequence: Synthetic oligonucleotide
  Sense strand starting at position 748 of SEQ ID NO: 1886043
acgugaaaguuaccagaaa

SEQ ID NO: 2384643 - RNA, 19 nt, Artificial Sequence
  Description of Artificial Sequence: Synthetic oligonucleotide
  Antisense strand to SEQ ID NO: 2384642
uuucugguaacuuucacgu

SEQ ID NO: 2384644 - RNA, 19 nt, Artificial Sequence
  Description of Artificial Sequence: Synthetic oligonucleotide
  Sense strand starting at position 749 of SEQ ID NO: 1886043
cgugaaaguuaccagaaac

SEQ ID NO: 2384645 - RNA, 19 nt, Artificial Sequence
  Description of Artificial Sequence: Synthetic oligonucleotide
  Antisense strand to SEQ ID NO: 2384644
guuucugguaacuuucacg

SEQ ID NO: 2384646 - RNA, 19 nt, Artificial Sequence
  Description of Artificial Sequence: Synthetic oligonucleotide
  Sense strand starting at position 786 of SEQ ID NO: 1886043
cccugcguccuugucaauu

SEQ ID NO: 2384647 - RNA, 19 nt, Artificial Sequence
  Description of Artificial Sequence: Synthetic oligonucleotide
  Antisense strand to SEQ ID NO: 2384646
aauugacaaggacgcaggg

SEQ ID NO: 2384648 - RNA, 19 nt, Artificial Sequence
  Description of Artificial Sequence: Synthetic oligonucleotide
  Sense strand starting at position 1007 of SEQ ID NO: 1886043
ggcgaaagcguguaacgau

SEQ ID NO: 2384649 - RNA, 19 nt, Artificial Sequence
  Description of Artificial Sequence: Synthetic oligonucleotide
  Antisense strand to SEQ ID NO: 2384648
aucguuacacgcuuucgcc

SEQ ID NO: 2384650 - RNA, 19 nt, Artificial Sequence
  Description of Artificial Sequence: Synthetic oligonucleotide
  Sense strand starting at position 1279 of SEQ ID NO: 1886043
uuuauaucuagguaagugu

SEQ ID NO: 2384651 - RNA, 19 nt, Artificial Sequence
  Description of Artificial Sequence: Synthetic oligonucleotide
  Antisense strand to SEQ ID NO: 2384650
acacuuaccuagauauaaa

SEQ ID NO: 2384652 - RNA, 19 nt, Artificial Sequence
  Description of Artificial Sequence: Synthetic oligonucleotide
  Sense strand starting at position 1287 of SEQ ID NO: 1886043
uagguaaguguuggagauu

SEQ ID NO: 2384653 - RNA, 19 nt, Artificial Sequence
  Description of Artificial Sequence: Synthetic oligonucleotide
  Antisense strand to SEQ ID NO: 2384652
aaucuccaacacuuaccua

SEQ ID NO: 2384654 - RNA, 19 nt, Artificial Sequence
  Description of Artificial Sequence: Synthetic oligonucleotide
  Sense strand starting at position 1288 of SEQ ID NO: 1886043
agguaaguguuggagauuu

SEQ ID NO: 2384655 - RNA, 19 nt, Artificial Sequence
  Description of Artificial Sequence: Synthetic oligonucleotide
  Antisense strand to SEQ ID NO: 2384654
aaaucuccaacacuuaccu

SEQ ID NO: 2384656 - RNA, 19 nt, Artificial Sequence
  Description of Artificial Sequence: Synthetic oligonucleotide
  Sense strand starting at position 1327 of SEQ ID NO: 1886043
cagucugcgcuccaauaaa

SEQ ID NO: 2384657 - RNA, 19 nt, Artificial Sequence
  Description of Artificial Sequence: Synthetic oligonucleotide
  Antisense strand to SEQ ID NO: 2384656
uuuauuggagcgcagacug

SEQ ID NO: 2384658 - RNA, 19 nt, Artificial Sequence
  Description of Artificial Sequence: Synthetic oligonucleotide
  Sense strand starting at position 1340 of SEQ ID NO: 1886043
aauaaacuccuggaugugu

SEQ ID NO: 2384659 - RNA, 19 nt, Artificial Sequence
  Description of Artificial Sequence: Synthetic oligonucleotide
  Antisense strand to SEQ ID NO: 2384658
acacauccaggaguuuauu

SEQ ID NO: 2384660 - RNA, 19 nt, Artificial Sequence
  Description of Artificial Sequence: Synthetic oligonucleotide
  Sense strand starting at position 1349 of SEQ ID NO: 1886043
cuggaugugucguauauuu

SEQ ID NO: 2384661 - RNA, 19 nt, Artificial Sequence
  Description of Artificial Sequence: Synthetic oligonucleotide
  Antisense strand to SEQ ID NO: 2384660
aaauauacgacacauccag

SEQ ID NO: 2384662 - RNA, 19 nt, Artificial Sequence
  Description of Artificial Sequence: Synthetic oligonucleotide
  Sense strand starting at position 1370 of SEQ ID NO: 1886043
uaucccaguccggauaaga

SEQ ID NO: 2384663 - RNA, 19 nt, Artificial Sequence
  Description of Artificial Sequence: Synthetic oligonucleotide
  Antisense strand to SEQ ID NO: 2384662
ucuuauccggacugggaua

SEQ ID NO: 2384664 - RNA, 19 nt, Artificial Sequence
  Description of Artificial Sequence: Synthetic oligonucleotide
  Sense strand starting at position 1380 of SEQ ID NO: 1886043
cggauaagaaagugaucua

SEQ ID NO: 2384665 - RNA, 19 nt, Artificial Sequence
  Description of Artificial Sequence: Synthetic oligonucleotide
  Antisense strand to SEQ ID NO: 2384664
uagaucacuuucuuauccg

SEQ ID NO: 2384666 - RNA, 19 nt, Artificial Sequence
  Description of Artificial Sequence: Synthetic oligonucleotide
  Sense strand starting at position 1387 of SEQ ID NO: 1886043
gaaagugaucuaggcugaa

SEQ ID NO: 2384667 - RNA, 19 nt, Artificial Sequence
  Description of Artificial Sequence: Synthetic oligonucleotide
  Antisense strand to SEQ ID NO: 2384666
uucagccuagaucacuuuc

SEQ ID NO: 2384668 - RNA, 19 nt, Artificial Sequence
  Description of Artificial Sequence: Synthetic oligonucleotide
  Sense strand starting at position 1390 of SEQ ID NO: 1886043
agugaucuaggcugaagau

SEQ ID NO: 2384669 - RNA, 19 nt, Artificial Sequence
  Description of Artificial Sequence: Synthetic oligonucleotide
  Antisense strand to SEQ ID NO: 2384668
aucuucagccuagaucacu

SEQ ID NO: 2384670 - RNA, 19 nt, Artificial Sequence
  Description of Artificial Sequence: Synthetic oligonucleotide
  Sense strand starting at position 1391 of SEQ ID NO: 1886043
gugaucuaggcugaagauu

SEQ ID NO: 2384671 - RNA, 19 nt, Artificial Sequence
  Description of Artificial Sequence: Synthetic oligonucleotide
  Antisense strand to SEQ ID NO: 2384670
aaucuucagccuagaucac

SEQ ID NO: 2384672 - RNA, 19 nt, Artificial Sequence
  Description of Artificial Sequence: Synthetic oligonucleotide
  Sense strand starting at position 1764 of SEQ ID NO: 1886043
ccgaacugucguguuucau

SEQ ID NO: 2384673 - RNA, 19 nt, Artificial Sequence
  Description of Artificial Sequence: Synthetic oligonucleotide
  Antisense strand to SEQ ID NO: 2384672
augaaacacgacaguucgg

SEQ ID NO: 2384674 - RNA, 19 nt, Artificial Sequence
  Description of Artificial Sequence: Synthetic oligonucleotide
  Sense strand starting at position 1831 of SEQ ID NO: 1886043
gugaaugaaugaugguuga

SEQ ID NO: 2384675 - RNA, 19 nt, Artificial Sequence
  Description of Artificial Sequence: Synthetic oligonucleotide
  Antisense strand to SEQ ID NO: 2384674
ucaaccaucauucauucac

SEQ ID NO: 2384676 - RNA, 19 nt, Artificial Sequence
  Description of Artificial Sequence: Synthetic oligonucleotide
  Sense strand starting at position 1911 of SEQ ID NO: 1886043
gguuucugcuucuugaauu

SEQ ID NO: 2384677 - RNA, 19 nt, Artificial Sequence
  Description of Artificial Sequence: Synthetic oligonucleotide
  Antisense strand to SEQ ID NO: 2384676
aauucaagaagcagaaacc

SEQ ID NO: 2384678 - RNA, 19 nt, Artificial Sequence
  Description of Artificial Sequence: Synthetic oligonucleotide
  Sense strand starting at position 2228 of SEQ ID NO: 1886043
ugcugccuggcuuauugaa

SEQ ID NO: 2384679 - RNA, 19 nt, Artificial Sequence
  Description of Artificial Sequence: Synthetic oligonucleotide
  Antisense strand to SEQ ID NO: 2384678
uucaauaagccaggcagca

SEQ ID NO: 2384680 - RNA, 19 nt, Artificial Sequence
  Description of Artificial Sequence: Synthetic oligonucleotide
  Sense strand starting at position 2230 of SEQ ID NO: 1886043
cugccuggcuuauugaaga

SEQ ID NO: 2384681 - RNA, 19 nt, Artificial Sequence
  Description of Artificial Sequence: Synthetic oligonucleotide
  Antisense strand to SEQ ID NO: 2384680
ucuucaauaagccaggcag

SEQ ID NO: 2384682 - RNA, 19 nt, Artificial Sequence
  Description of Artificial Sequence: Synthetic oligonucleotide
  Sense strand starting at position 2301 of SEQ ID NO: 1886043
ggaagucgugguggccaua

SEQ ID NO: 2384683 - RNA, 19 nt, Artificial Sequence
  Description of Artificial Sequence: Synthetic oligonucleotide
  Antisense strand to SEQ ID NO: 2384682
uauggccaccacgacuucc

SEQ ID NO: 2384684 - RNA, 19 nt, Artificial Sequence
  Description of Artificial Sequence: Synthetic oligonucleotide
  Sense strand starting at position 2884 of SEQ ID NO: 1886043
cccgaaggcuuccugcuaa

SEQ ID NO: 2384685 - RNA, 19 nt, Artificial Sequence
  Description of Artificial Sequence: Synthetic oligonucleotide
  Antisense strand to SEQ ID NO: 2384684
uuagcaggaagccuucggg

SEQ ID NO: 2384686 - RNA, 19 nt, Artificial Sequence
  Description of Artificial Sequence: Synthetic oligonucleotide
  Sense strand starting at position 3132 of SEQ ID NO: 1886043
ggcagucaucuggguccga

SEQ ID NO: 2384687 - RNA, 19 nt, Artificial Sequence
  Description of Artificial Sequence: Synthetic oligonucleotide
  Antisense strand to SEQ ID NO: 2384686
ucggacccagaugacugcc

SEQ ID NO: 2384688 - RNA, 19 nt, Artificial Sequence
  Description of Artificial Sequence: Synthetic oligonucleotide
  Sense strand starting at position 3133 of SEQ ID NO: 1886043
gcagucaucuggguccgau

SEQ ID NO: 2384689 - RNA, 19 nt, Artificial Sequence
  Description of Artificial Sequence: Synthetic oligonucleotide
  Antisense strand to SEQ ID NO: 2384688
aucggacccagaugacugc

SEQ ID NO: 2384690 - RNA, 19 nt, Artificial Sequence
  Description of Artificial Sequence: Synthetic oligonucleotide
  Sense strand starting at position 3136 of SEQ ID NO: 1886043
gucaucuggguccgaugua

SEQ ID NO: 2384691 - RNA, 19 nt, Artificial Sequence
  Description of Artificial Sequence: Synthetic oligonucleotide
  Antisense strand to SEQ ID NO: 2384690
uacaucggacccagaugac

SEQ ID NO: 2384692 - RNA, 19 nt, Artificial Sequence
  Description of Artificial Sequence: Synthetic oligonucleotide
  Sense strand starting at position 3241 of SEQ ID NO: 1886043
uagugugcgucuccaaagu

SEQ ID NO: 2384693 - RNA, 19 nt, Artificial Sequence
  Description of Artificial Sequence: Synthetic oligonucleotide
  Antisense strand to SEQ ID NO: 2384692
acuuuggagacgcacacua

SEQ ID NO: 2384694 - RNA, 19 nt, Artificial Sequence
  Description of Artificial Sequence: Synthetic oligonucleotide
  Sense strand starting at position 3396 of SEQ ID NO: 1886043
gcgguaacgccugcuaaug

SEQ ID NO: 2384695 - RNA, 19 nt, Artificial Sequence
  Description of Artificial Sequence: Synthetic oligonucleotide
  Antisense strand to SEQ ID NO: 2384694
cauuagcaggcguuaccgc

SEQ ID NO: 2384696 - RNA, 19 nt, Artificial Sequence
  Description of Artificial Sequence: Synthetic oligonucleotide
  Sense strand starting at position 3405 of SEQ ID NO: 1886043
ccugcuaauggcuguguua

SEQ ID NO: 2384697 - RNA, 19 nt, Artificial Sequence
  Description of Artificial Sequence: Synthetic oligonucleotide
  Antisense strand to SEQ ID NO: 2384696
uaacacagccauuagcagg

SEQ ID NO: 2384698 - RNA, 19 nt, Artificial Sequence
  Description of Artificial Sequence: Synthetic oligonucleotide
  Sense strand starting at position 3518 of SEQ ID NO: 1886043
caccguuuggguggaaacu

SEQ ID NO: 2384699 - RNA, 19 nt, Artificial Sequence
  Description of Artificial Sequence: Synthetic oligonucleotide
  Antisense strand to SEQ ID NO: 2384698
aguuuccacccaaacggug

SEQ ID NO: 2384700 - RNA, 19 nt, Artificial Sequence
  Description of Artificial Sequence: Synthetic oligonucleotide
  Sense strand starting at position 3519 of SEQ ID NO: 1886043
accguuuggguggaaacua

SEQ ID NO: 2384701 - RNA, 19 nt, Artificial Sequence
  Description of Artificial Sequence: Synthetic oligonucleotide
  Antisense strand to SEQ ID NO: 2384700
uaguuuccacccaaacggu

SEQ ID NO: 2384702 - RNA, 19 nt, Artificial Sequence
  Description of Artificial Sequence: Synthetic oligonucleotide
  Sense strand starting at position 3802 of SEQ ID NO: 1886043
gcggacuguuguucuccaa

SEQ ID NO: 2384703 - RNA, 19 nt, Artificial Sequence
  Description of Artificial Sequence: Synthetic oligonucleotide
  Antisense strand to SEQ ID NO: 2384702
uuggagaacaacaguccgc

SEQ ID NO: 2384704 - RNA, 19 nt, Artificial Sequence
  Description of Artificial Sequence: Synthetic oligonucleotide
  Sense strand starting at position 3805 of SEQ ID NO: 1886043
gacuguuguucuccaacag

SEQ ID NO: 2384705 - RNA, 19 nt, Artificial Sequence
  Description of Artificial Sequence: Synthetic oligonucleotide
  Antisense strand to SEQ ID NO: 2384704
cuguuggagaacaacaguc

SEQ ID NO: 2384706 - RNA, 19 nt, Artificial Sequence
  Description of Artificial Sequence: Synthetic oligonucleotide
  Sense strand starting at position 3843 of SEQ ID NO: 1886043
ugaacccauucugagaagu

SEQ ID NO: 2384707 - RNA, 19 nt, Artificial Sequence
  Description of Artificial Sequence: Synthetic oligonucleotide
  Antisense strand to SEQ ID NO: 2384706
acuucucagaauggguuca

SEQ ID NO: 2384708 - RNA, 19 nt, Artificial Sequence
  Description of Artificial Sequence: Synthetic oligonucleotide
  Sense strand starting at position 3864 of SEQ ID NO: 1886043
agaguagugucuuccgcga

SEQ ID NO: 2384709 - RNA, 19 nt, Artificial Sequence
  Description of Artificial Sequence: Synthetic oligonucleotide
  Antisense strand to SEQ ID NO: 2384708
ucgcggaagacacuacucu

SEQ ID NO: 2384710 - RNA, 19 nt, Artificial Sequence
  Description of Artificial Sequence: Synthetic oligonucleotide
  Sense strand starting at position 3926 of SEQ ID NO: 1886043
ggagguugauuagagagaa

SEQ ID NO: 2384711 - RNA, 19 nt, Artificial Sequence
  Description of Artificial Sequence: Synthetic oligonucleotide
  Antisense strand to SEQ ID NO: 2384710
uucucucuaaucaaccucc

SEQ ID NO: 2384712 - RNA, 19 nt, Artificial Sequence
  Description of Artificial Sequence: Synthetic oligonucleotide
  Sense strand starting at position 3941 of SEQ ID NO: 1886043
agaauaaaguacucugugu

SEQ ID NO: 2384713 - RNA, 19 nt, Artificial Sequence
  Description of Artificial Sequence: Synthetic oligonucleotide
  Antisense strand to SEQ ID NO: 2384712
acacagaguacuuuauucu

SEQ ID NO: 2384714 - RNA, 19 nt, Artificial Sequence
  Description of Artificial Sequence: Synthetic oligonucleotide
  Sense strand starting at position 3943 of SEQ ID NO: 1886043
aauaaaguacucugugugu

SEQ ID NO: 2384715 - RNA, 19 nt, Artificial Sequence
  Description of Artificial Sequence: Synthetic oligonucleotide
  Antisense strand to SEQ ID NO: 2384714
acacacagaguacuuuauu

SEQ ID NO: 2384716 - RNA, 19 nt, Artificial Sequence
  Description of Artificial Sequence: Synthetic oligonucleotide
  Sense strand starting at position 309 of SEQ ID NO: 1886044
gugcgauguggagcaaguu

SEQ ID NO: 2384717 - RNA, 19 nt, Artificial Sequence
  Description of Artificial Sequence: Synthetic oligonucleotide
  Antisense strand to SEQ ID NO: 2384716
aacuugcuccacaucgcac

SEQ ID NO: 2384718 - RNA, 19 nt, Artificial Sequence
  Description of Artificial Sequence: Synthetic oligonucleotide
  Sense strand starting at position 343 of SEQ ID NO: 1886044
gucucaaugucaucaucua

SEQ ID NO: 2384719 - RNA, 19 nt, Artificial Sequence
  Description of Artificial Sequence: Synthetic oligonucleotide
  Antisense strand to SEQ ID NO: 2384718
uagaugaugacauugagac

SEQ ID NO: 2384720 - RNA, 19 nt, Artificial Sequence
  Description of Artificial Sequence: Synthetic oligonucleotide
  Sense strand starting at position 550 of SEQ ID NO: 1886044
uuucucaugaggugauguu

SEQ ID NO: 2384721 - RNA, 19 nt, Artificial Sequence
  Description of Artificial Sequence: Synthetic oligonucleotide
  Antisense strand to SEQ ID NO: 2384720
aacaucaccucaugagaaa

SEQ ID NO: 2384722 - RNA, 19 nt, Artificial Sequence
  Description of Artificial Sequence: Synthetic oligonucleotide
  Sense strand starting at position 569 of SEQ ID NO: 1886044
cucacucuggcagaucaaa

SEQ ID NO: 2384723 - RNA, 19 nt, Artificial Sequence
  Description of Artificial Sequence: Synthetic oligonucleotide
  Antisense strand to SEQ ID NO: 2384722
uuugaucugccagagugag

SEQ ID NO: 2384724 - RNA, 19 nt, Artificial Sequence
  Description of Artificial Sequence: Synthetic oligonucleotide
  Sense strand starting at position 588 of SEQ ID NO: 1886044
aggcuuuauuugcuggagu

SEQ ID NO: 2384725 - RNA, 19 nt, Artificial Sequence
  Description of Artificial Sequence: Synthetic oligonucleotide
  Antisense strand to SEQ ID NO: 2384724
acuccagcaaauaaagccu

SEQ ID NO: 2384726 - RNA, 19 nt, Artificial Sequence
  Description of Artificial Sequence: Synthetic oligonucleotide
  Sense strand starting at position 736 of SEQ ID NO: 1886044
agaugcaucaggugguauu

SEQ ID NO: 2384727 - RNA, 19 nt, Artificial Sequence
  Description of Artificial Sequence: Synthetic oligonucleotide
  Antisense strand to SEQ ID NO: 2384726
aauaccaccugaugcaucu

SEQ ID NO: 2384728 - RNA, 19 nt, Artificial Sequence
  Description of Artificial Sequence: Synthetic oligonucleotide
  Sense strand starting at position 737 of SEQ ID NO: 1886044
gaugcaucaggugguauuu

SEQ ID NO: 2384729 - RNA, 19 nt, Artificial Sequence
  Description of Artificial Sequence: Synthetic oligonucleotide
  Antisense strand to SEQ ID NO: 2384728
aaauaccaccugaugcauc

SEQ ID NO: 2384730 - RNA, 19 nt, Artificial Sequence
  Description of Artificial Sequence: Synthetic oligonucleotide
  Sense strand starting at position 755 of SEQ ID NO: 1886044
uuaaacucuugucugaaag

SEQ ID NO: 2384731 - RNA, 19 nt, Artificial Sequence
  Description of Artificial Sequence: Synthetic oligonucleotide
  Antisense strand to SEQ ID NO: 2384730
cuuucagacaagaguuuaa

SEQ ID NO: 2384732 - RNA, 19 nt, Artificial Sequence
  Description of Artificial Sequence: Synthetic oligonucleotide
  Sense strand starting at position 863 of SEQ ID NO: 1886044
ccucauguugcagauaaag

SEQ ID NO: 2384733 - RNA, 19 nt, Artificial Sequence
  Description of Artificial Sequence: Synthetic oligonucleotide
  Antisense strand to SEQ ID NO: 2384732
cuuuaucugcaacaugagg

SEQ ID NO: 2384734 - RNA, 19 nt, Artificial Sequence
  Description of Artificial Sequence: Synthetic oligonucleotide
  Sense strand starting at position 1307 of SEQ ID NO: 1886044
aggaaaugcucuuuaguag

SEQ ID NO: 2384735 - RNA, 19 nt, Artificial Sequence
  Description of Artificial Sequence: Synthetic oligonucleotide
  Antisense strand to SEQ ID NO: 2384734
cuacuaaagagcauuuccu

SEQ ID NO: 2384736 - RNA, 19 nt, Artificial Sequence
  Description of Artificial Sequence: Synthetic oligonucleotide
  Sense strand starting at position 1308 of SEQ ID NO: 1886044
ggaaaugcucuuuaguaga

SEQ ID NO: 2384737 - RNA, 19 nt, Artificial Sequence
  Description of Artificial Sequence: Synthetic oligonucleotide
  Antisense strand to SEQ ID NO: 2384736
ucuacuaaagagcauuucc

SEQ ID NO: 2384738 - RNA, 19 nt, Artificial Sequence
  Description of Artificial Sequence: Synthetic oligonucleotide
  Sense strand starting at position 1316 of SEQ ID NO: 1886044
ucuuuaguagauugggaaa

SEQ ID NO: 2384739 - RNA, 19 nt, Artificial Sequence
  Description of Artificial Sequence: Synthetic oligonucleotide
  Antisense strand to SEQ ID NO: 2384738
uuucccaaucuacuaaaga

SEQ ID NO: 2384740 - RNA, 19 nt, Artificial Sequence
  Description of Artificial Sequence: Synthetic oligonucleotide
  Sense strand starting at position 1447 of SEQ ID NO: 1886044
auugaagugguuugagaaa

SEQ ID NO: 2384741 - RNA, 19 nt, Artificial Sequence
  Description of Artificial Sequence: Synthetic oligonucleotide
  Antisense strand to SEQ ID NO: 2384740
uuucucaaaccacuucaau

SEQ ID NO: 2384742 - RNA, 19 nt, Artificial Sequence
  Description of Artificial Sequence: Synthetic oligonucleotide
  Sense strand starting at position 1585 of SEQ ID NO: 1886044
gcaugaguagaggagguua

SEQ ID NO: 2384743 - RNA, 19 nt, Artificial Sequence
  Description of Artificial Sequence: Synthetic oligonucleotide
  Antisense strand to SEQ ID NO: 2384742
uaaccuccucuacucaugc

SEQ ID NO: 2384744 - RNA, 19 nt, Artificial Sequence
  Description of Artificial Sequence: Synthetic oligonucleotide
  Sense strand starting at position 1701 of SEQ ID NO: 1886044
cucccauugcuccagaaga

SEQ ID NO: 2384745 - RNA, 19 nt, Artificial Sequence
  Description of Artificial Sequence: Synthetic oligonucleotide
  Antisense strand to SEQ ID NO: 2384744
ucuucuggagcaaugggag

SEQ ID NO: 2384746 - RNA, 19 nt, Artificial Sequence
  Description of Artificial Sequence: Synthetic oligonucleotide
  Sense strand starting at position 2386 of SEQ ID NO: 1886044
gcaauuuccuuugagaaca

SEQ ID NO: 2384747 - RNA, 19 nt, Artificial Sequence
  Description of Artificial Sequence: Synthetic oligonucleotide
  Antisense strand to SEQ ID NO: 2384746
uguucucaaaggaaauugc

SEQ ID NO: 2384748 - RNA, 19 nt, Artificial Sequence
  Description of Artificial Sequence: Synthetic oligonucleotide
  Sense strand starting at position 2452 of SEQ ID NO: 1886044
agucauaaauaguucgagu

SEQ ID NO: 2384749 - RNA, 19 nt, Artificial Sequence
  Description of Artificial Sequence: Synthetic oligonucleotide
  Antisense strand to SEQ ID NO: 2384748
acucgaacuauuuaugacu

SEQ ID NO: 2384750 - RNA, 19 nt, Artificial Sequence
  Description of Artificial Sequence: Synthetic oligonucleotide
  Sense strand starting at position 2573 of SEQ ID NO: 1886044
gcuugccuuucuuugauuu

SEQ ID NO: 2384751 - RNA, 19 nt, Artificial Sequence
  Description of Artificial Sequence: Synthetic oligonucleotide
  Antisense strand to SEQ ID NO: 2384750
aaaucaaagaaaggcaagc

SEQ ID NO: 2384752 - RNA, 19 nt, Artificial Sequence
  Description of Artificial Sequence: Synthetic oligonucleotide
  Sense strand starting at position 2668 of SEQ ID NO: 1886044
ggccaaagaugcuuugaga

SEQ ID NO: 2384753 - RNA, 19 nt, Artificial Sequence
  Description of Artificial Sequence: Synthetic oligonucleotide
  Antisense strand to SEQ ID NO: 2384752
ucucaaagcaucuuuggcc

SEQ ID NO: 2384754 - RNA, 19 nt, Artificial Sequence
  Description of Artificial Sequence: Synthetic oligonucleotide
  Sense strand starting at position 2679 of SEQ ID NO: 1886044
cuuugagauucuucuuguu

SEQ ID NO: 2384755 - RNA, 19 nt, Artificial Sequence
  Description of Artificial Sequence: Synthetic oligonucleotide
  Antisense strand to SEQ ID NO: 2384754
aacaagaagaaucucaaag

SEQ ID NO: 2384756 - RNA, 19 nt, Artificial Sequence
  Description of Artificial Sequence: Synthetic oligonucleotide
  Sense strand starting at position 2788 of SEQ ID NO: 1886044
ggcuuaagccuuuauaauc

SEQ ID NO: 2384757 - RNA, 19 nt, Artificial Sequence
  Description of Artificial Sequence: Synthetic oligonucleotide
  Antisense strand to SEQ ID NO: 2384756
gauuauaaaggcuuaagcc

SEQ ID NO: 2384758 - RNA, 19 nt, Artificial Sequence
  Description of Artificial Sequence: Synthetic oligonucleotide
  Sense strand starting at position 2831 of SEQ ID NO: 1886044
ggacgauaauuugaguuua

SEQ ID NO: 2384759 - RNA, 19 nt, Artificial Sequence
  Description of Artificial Sequence: Synthetic oligonucleotide
  Antisense strand to SEQ ID NO: 2384758
uaaacucaaauuaucgucc

SEQ ID NO: 2384760 - RNA, 19 nt, Artificial Sequence
  Description of Artificial Sequence: Synthetic oligonucleotide
  Sense strand starting at position 2981 of SEQ ID NO: 1886044
augggcauuuauuaccaau

SEQ ID NO: 2384761 - RNA, 19 nt, Artificial Sequence
  Description of Artificial Sequence: Synthetic oligonucleotide
  Antisense strand to SEQ ID NO: 2384760
auugguaauaaaugcccau

SEQ ID NO: 2384762 - RNA, 19 nt, Artificial Sequence
  Description of Artificial Sequence: Synthetic oligonucleotide
  Sense strand starting at position 3062 of SEQ ID NO: 1886044
auuaguaggcugcauauaa

SEQ ID NO: 2384763 - RNA, 19 nt, Artificial Sequence
  Description of Artificial Sequence: Synthetic oligonucleotide
  Antisense strand to SEQ ID NO: 2384762
uuauaugcagccuacuaau

SEQ ID NO: 2384764 - RNA, 19 nt, Artificial Sequence
  Description of Artificial Sequence: Synthetic oligonucleotide
  Sense strand starting at position 3155 of SEQ ID NO: 1886044
caguguaaacucgaaacua

SEQ ID NO: 2384765 - RNA, 19 nt, Artificial Sequence
  Description of Artificial Sequence: Synthetic oligonucleotide
  Antisense strand to SEQ ID NO: 2384764
uaguuucgaguuuacacug

SEQ ID NO: 2384766 - RNA, 19 nt, Artificial Sequence
  Description of Artificial Sequence: Synthetic oligonucleotide
  Sense strand starting at position 3166 of SEQ ID NO: 1886044
cgaaacuagggcugguaua

SEQ ID NO: 2384767 - RNA, 19 nt, Artificial Sequence
  Description of Artificial Sequence: Synthetic oligonucleotide
  Antisense strand to SEQ ID NO: 2384766
uauaccagcccuaguuucg

SEQ ID NO: 2384768 - RNA, 19 nt, Artificial Sequence
  Description of Artificial Sequence: Synthetic oligonucleotide
  Sense strand starting at position 3286 of SEQ ID NO: 1886044
gagcuccagucaucaagau

SEQ ID NO: 2384769 - RNA, 19 nt, Artificial Sequence
  Description of Artificial Sequence: Synthetic oligonucleotide
  Antisense strand to SEQ ID NO: 2384768
aucuugaugacuggagcuc

SEQ ID NO: 2384770 - RNA, 19 nt, Artificial Sequence
  Description of Artificial Sequence: Synthetic oligonucleotide
  Sense strand starting at position 3394 of SEQ ID NO: 1886044
uugcauacauuucuguuua

SEQ ID NO: 2384771 - RNA, 19 nt, Artificial Sequence
  Description of Artificial Sequence: Synthetic oligonucleotide
  Antisense strand to SEQ ID NO: 2384770
uaaacagaaauguaugcaa

SEQ ID NO: 2384772 - RNA, 19 nt, Artificial Sequence
  Description of Artificial Sequence: Synthetic oligonucleotide
  Sense strand starting at position 3449 of SEQ ID NO: 1886044
cugagaaauugucuucuag

SEQ ID NO: 2384773 - RNA, 19 nt, Artificial Sequence
  Description of Artificial Sequence: Synthetic oligonucleotide
  Antisense strand to SEQ ID NO: 2384772
cuagaagacaauuucucag

SEQ ID NO: 2384774 - RNA, 19 nt, Artificial Sequence
  Description of Artificial Sequence: Synthetic oligonucleotide
  Sense strand starting at position 3599 of SEQ ID NO: 1886044
guaggaguggcugauauuc

SEQ ID NO: 2384775 - RNA, 19 nt, Artificial Sequence
  Description of Artificial Sequence: Synthetic oligonucleotide
  Antisense strand to SEQ ID NO: 2384774
gaauaucagccacuccuac

SEQ ID NO: 2384776 - RNA, 19 nt, Artificial Sequence
  Description of Artificial Sequence: Synthetic oligonucleotide
  Sense strand starting at position 3604 of SEQ ID NO: 1886044
aguggcugauauucuacau

SEQ ID NO: 2384777 - RNA, 19 nt, Artificial Sequence
  Description of Artificial Sequence: Synthetic oligonucleotide
  Antisense strand to SEQ ID NO: 2384776
auguagaauaucagccacu

SEQ ID NO: 2384778 - RNA, 19 nt, Artificial Sequence
  Description of Artificial Sequence: Synthetic oligonucleotide
  Sense strand starting at position 3631 of SEQ ID NO: 1886044
augcaucuguauguaaaca

SEQ ID NO: 2384779 - RNA, 19 nt, Artificial Sequence
  Description of Artificial Sequence: Synthetic oligonucleotide
  Antisense strand to SEQ ID NO: 2384778
uguuuacauacagaugcau

SEQ ID NO: 2384780 - RNA, 19 nt, Artificial Sequence
  Description of Artificial Sequence: Synthetic oligonucleotide
  Sense strand starting at position 3670 of SEQ ID NO: 1886044
uauugacguugagcagaaa

SEQ ID NO: 2384781 - RNA, 19 nt, Artificial Sequence
  Description of Artificial Sequence: Synthetic oligonucleotide
  Antisense strand to SEQ ID NO: 2384780
uuucugcucaacgucaaua

SEQ ID NO: 2384782 - RNA, 19 nt, Artificial Sequence
  Description of Artificial Sequence: Synthetic oligonucleotide
  Sense strand starting at position 3673 of SEQ ID NO: 1886044
ugacguugagcagaaacaa

SEQ ID NO: 2384783 - RNA, 19 nt, Artificial Sequence
  Description of Artificial Sequence: Synthetic oligonucleotide
  Antisense strand to SEQ ID NO: 2384782
uuguuucugcucaacguca

SEQ ID NO: 2384784 - RNA, 19 nt, Artificial Sequence
  Description of Artificial Sequence: Synthetic oligonucleotide
  Sense strand starting at position 3730 of SEQ ID NO: 1886044
gggaaaugucaugagcuuu

SEQ ID NO: 2384785 - RNA, 19 nt, Artificial Sequence
  Description of Artificial Sequence: Synthetic oligonucleotide
  Antisense strand to SEQ ID NO: 2384784
aaagcucaugacauuuccc

SEQ ID NO: 2384786 - RNA, 19 nt, Artificial Sequence
  Description of Artificial Sequence: Synthetic oligonucleotide
  Sense strand starting at position 3905 of SEQ ID NO: 1886044
uugggauucuuggcccaca

SEQ ID NO: 2384787 - RNA, 19 nt, Artificial Sequence
  Description of Artificial Sequence: Synthetic oligonucleotide
  Antisense strand to SEQ ID NO: 2384786
ugugggccaagaaucccaa

SEQ ID NO: 2384788 - RNA, 19 nt, Artificial Sequence
  Description of Artificial Sequence: Synthetic oligonucleotide
  Sense strand starting at position 3906 of SEQ ID NO: 1886044
ugggauucuuggcccacau

SEQ ID NO: 2384789 - RNA, 19 nt, Artificial Sequence
  Description of Artificial Sequence: Synthetic oligonucleotide
  Antisense strand to SEQ ID NO: 2384788
augugggccaagaauccca

SEQ ID NO: 2384790 - RNA, 19 nt, Artificial Sequence
  Description of Artificial Sequence: Synthetic oligonucleotide
  Sense strand starting at position 3908 of SEQ ID NO: 1886044
ggauucuuggcccacauau

SEQ ID NO: 2384791 - RNA, 19 nt, Artificial Sequence
  Description of Artificial Sequence: Synthetic oligonucleotide
  Antisense strand to SEQ ID NO: 2384790
auaugugggccaagaaucc

SEQ ID NO: 2384792 - RNA, 19 nt, Artificial Sequence
  Description of Artificial Sequence: Synthetic oligonucleotide
  Sense strand starting at position 3919 of SEQ ID NO: 1886044
ccacauaucuaguuauaga

SEQ ID NO: 2384793 - RNA, 19 nt, Artificial Sequence
  Description of Artificial Sequence: Synthetic oligonucleotide
  Antisense strand to SEQ ID NO: 2384792
ucuauaacuagauaugugg

SEQ ID NO: 2384794 - RNA, 19 nt, Artificial Sequence
  Description of Artificial Sequence: Synthetic oligonucleotide
  Sense strand starting at position 3971 of SEQ ID NO: 1886044
ugggaauguguagaaaguu

SEQ ID NO: 2384795 - RNA, 19 nt, Artificial Sequence
  Description of Artificial Sequence: Synthetic oligonucleotide
  Antisense strand to SEQ ID NO: 2384794
aacuuucuacacauuccca

SEQ ID NO: 2384796 - RNA, 19 nt, Artificial Sequence
  Description of Artificial Sequence: Synthetic oligonucleotide
  Sense strand starting at position 67 of SEQ ID NO: 1886045
gagacauuccugggaaguc

SEQ ID NO: 2384797 - RNA, 19 nt, Artificial Sequence
  Description of Artificial Sequence: Synthetic oligonucleotide
  Antisense strand to SEQ ID NO: 2384796
gacuucccaggaaugucuc

SEQ ID NO: 2384798 - RNA, 19 nt, Artificial Sequence
  Description of Artificial Sequence: Synthetic oligonucleotide
  Sense strand starting at position 196 of SEQ ID NO: 1886045
cuguaagaaugauuaguuu

SEQ ID NO: 2384799 - RNA, 19 nt, Artificial Sequence
  Description of Artificial Sequence: Synthetic oligonucleotide
  Antisense strand to SEQ ID NO: 2384798
aaacuaaucauucuuacag

SEQ ID NO: 2384800 - RNA, 19 nt, Artificial Sequence
  Description of Artificial Sequence: Synthetic oligonucleotide
  Sense strand starting at position 200 of SEQ ID NO: 1886045
aagaaugauuaguuugguu

SEQ ID NO: 2384801 - RNA, 19 nt, Artificial Sequence
  Description of Artificial Sequence: Synthetic oligonucleotide
  Antisense strand to SEQ ID NO: 2384800
aaccaaacuaaucauucuu

SEQ ID NO: 2384802 - RNA, 19 nt, Artificial Sequence
  Description of Artificial Sequence: Synthetic oligonucleotide
  Sense strand starting at position 349 of SEQ ID NO: 1886045
aguauuucuugucuguuga

SEQ ID NO: 2384803 - RNA, 19 nt, Artificial Sequence
  Description of Artificial Sequence: Synthetic oligonucleotide
  Antisense strand to SEQ ID NO: 2384802
ucaacagacaagaaauacu

SEQ ID NO: 2384804 - RNA, 19 nt, Artificial Sequence
  Description of Artificial Sequence: Synthetic oligonucleotide
  Sense strand starting at position 350 of SEQ ID NO: 1886045
guauuucuugucuguugaa

SEQ ID NO: 2384805 - RNA, 19 nt, Artificial Sequence
  Description of Artificial Sequence: Synthetic oligonucleotide
  Antisense strand to SEQ ID NO: 2384804
uucaacagacaagaaauac

SEQ ID NO: 2384806 - RNA, 19 nt, Artificial Sequence
  Description of Artificial Sequence: Synthetic oligonucleotide
  Sense strand starting at position 434 of SEQ ID NO: 1886045
ugaggauccaacggguaua

SEQ ID NO: 2384807 - RNA, 19 nt, Artificial Sequence
  Description of Artificial Sequence: Synthetic oligonucleotide
  Antisense strand to SEQ ID NO: 2384806
uauacccguuggauccuca

SEQ ID NO: 2384808 - RNA, 19 nt, Artificial Sequence
  Description of Artificial Sequence: Synthetic oligonucleotide
  Sense strand starting at position 437 of SEQ ID NO: 1886045
ggauccaacggguauaguu

SEQ ID NO: 2384809 - RNA, 19 nt, Artificial Sequence
  Description of Artificial Sequence: Synthetic oligonucleotide
  Antisense strand to SEQ ID NO: 2384808
aacuauacccguuggaucc

SEQ ID NO: 2384810 - RNA, 19 nt, Artificial Sequence
  Description of Artificial Sequence: Synthetic oligonucleotide
  Sense strand starting at position 458 of SEQ ID NO: 1886045
ccaagcauugaguaucuau

SEQ ID NO: 2384811 - RNA, 19 nt, Artificial Sequence
  Description of Artificial Sequence: Synthetic oligonucleotide
  Antisense strand to SEQ ID NO: 2384810
auagauacucaaugcuugg

SEQ ID NO: 2384812 - RNA, 19 nt, Artificial Sequence
  Description of Artificial Sequence: Synthetic oligonucleotide
  Sense strand starting at position 537 of SEQ ID NO: 1886045
uugacauguccagagguca

SEQ ID NO: 2384813 - RNA, 19 nt, Artificial Sequence
  Description of Artificial Sequence: Synthetic oligonucleotide
  Antisense strand to SEQ ID NO: 2384812
ugaccucuggacaugucaa

SEQ ID NO: 2384814 - RNA, 19 nt, Artificial Sequence
  Description of Artificial Sequence: Synthetic oligonucleotide
  Sense strand starting at position 637 of SEQ ID NO: 1886045
ucaccuucuccgcaauaga

SEQ ID NO: 2384815 - RNA, 19 nt, Artificial Sequence
  Description of Artificial Sequence: Synthetic oligonucleotide
  Antisense strand to SEQ ID NO: 2384814
ucuauugcggagaagguga

SEQ ID NO: 2384816 - RNA, 19 nt, Artificial Sequence
  Description of Artificial Sequence: Synthetic oligonucleotide
  Sense strand starting at position 671 of SEQ ID NO: 1886045
gcacuuggugcagaauaga

SEQ ID NO: 2384817 - RNA, 19 nt, Artificial Sequence
  Description of Artificial Sequence: Synthetic oligonucleotide
  Antisense strand to SEQ ID NO: 2384816
ucuauucugcaccaagugc

SEQ ID NO: 2384818 - RNA, 19 nt, Artificial Sequence
  Description of Artificial Sequence: Synthetic oligonucleotide
  Sense strand starting at position 684 of SEQ ID NO: 1886045
aauagagauuauguauggu

SEQ ID NO: 2384819 - RNA, 19 nt, Artificial Sequence
  Description of Artificial Sequence: Synthetic oligonucleotide
  Antisense strand to SEQ ID NO: 2384818
accauacauaaucucuauu

SEQ ID NO: 2384820 - RNA, 19 nt, Artificial Sequence
  Description of Artificial Sequence: Synthetic oligonucleotide
  Sense strand starting at position 687 of SEQ ID NO: 1886045
agagauuauguauggugag

SEQ ID NO: 2384821 - RNA, 19 nt, Artificial Sequence
  Description of Artificial Sequence: Synthetic oligonucleotide
  Antisense strand to SEQ ID NO: 2384820
cucaccauacauaaucucu

SEQ ID NO: 2384822 - RNA, 19 nt, Artificial Sequence
  Description of Artificial Sequence: Synthetic oligonucleotide
  Sense strand starting at position 725 of SEQ ID NO: 1886045
ugggacugucucuaggacu

SEQ ID NO: 2384823 - RNA, 19 nt, Artificial Sequence
  Description of Artificial Sequence: Synthetic oligonucleotide
  Antisense strand to SEQ ID NO: 2384822
aguccuagagacaguccca

SEQ ID NO: 2384824 - RNA, 19 nt, Artificial Sequence
  Description of Artificial Sequence: Synthetic oligonucleotide
  Sense strand starting at position 753 of SEQ ID NO: 1886045
uggaaaccaugucuaugua

SEQ ID NO: 2384825 - RNA, 19 nt, Artificial Sequence
  Description of Artificial Sequence: Synthetic oligonucleotide
  Antisense strand to SEQ ID NO: 2384824
uacauagacaugguuucca

SEQ ID NO: 2384826 - RNA, 19 nt, Artificial Sequence
  Description of Artificial Sequence: Synthetic oligonucleotide
  Sense strand starting at position 773 of SEQ ID NO: 1886045
auaacuucccuauggaguu

SEQ ID NO: 2384827 - RNA, 19 nt, Artificial Sequence
  Description of Artificial Sequence: Synthetic oligonucleotide
  Antisense strand to SEQ ID NO: 2384826
aacuccauagggaaguuau

SEQ ID NO: 2384828 - RNA, 19 nt, Artificial Sequence
  Description of Artificial Sequence: Synthetic oligonucleotide
  Sense strand starting at position 785 of SEQ ID NO: 1886045
uggaguuuacagcaaccau

SEQ ID NO: 2384829 - RNA, 19 nt, Artificial Sequence
  Description of Artificial Sequence: Synthetic oligonucleotide
  Antisense strand to SEQ ID NO: 2384828
augguugcuguaaacucca

SEQ ID NO: 2384830 - RNA, 19 nt, Artificial Sequence
  Description of Artificial Sequence: Synthetic oligonucleotide
  Sense strand starting at position 878 of SEQ ID NO: 1886045
agcauacuugcucaggaga

SEQ ID NO: 2384831 - RNA, 19 nt, Artificial Sequence
  Description of Artificial Sequence: Synthetic oligonucleotide
  Antisense strand to SEQ ID NO: 2384830
ucuccugagcaaguaugcu

SEQ ID NO: 2384832 - RNA, 19 nt, Artificial Sequence
  Description of Artificial Sequence: Synthetic oligonucleotide
  Sense strand starting at position 1077 of SEQ ID NO: 1886045
gcgaucucucccuucuguu

SEQ ID NO: 2384833 - RNA, 19 nt, Artificial Sequence
  Description of Artificial Sequence: Synthetic oligonucleotide
  Antisense strand to SEQ ID NO: 2384832
aacagaagggagagaucgc

SEQ ID NO: 2384834 - RNA, 19 nt, Artificial Sequence
  Description of Artificial Sequence: Synthetic oligonucleotide
  Sense strand starting at position 1578 of SEQ ID NO: 1886045
guguuagguccugcuguua

SEQ ID NO: 2384835 - RNA, 19 nt, Artificial Sequence
  Description of Artificial Sequence: Synthetic oligonucleotide
  Antisense strand to SEQ ID NO: 2384834
uaacagcaggaccuaacac

SEQ ID NO: 2384836 - RNA, 19 nt, Artificial Sequence
  Description of Artificial Sequence: Synthetic oligonucleotide
  Sense strand starting at position 1857 of SEQ ID NO: 1886045
accagucaugcuuauggau

SEQ ID NO: 2384837 - RNA, 19 nt, Artificial Sequence
  Description of Artificial Sequence: Synthetic oligonucleotide
  Antisense strand to SEQ ID NO: 2384836
auccauaagcaugacuggu

SEQ ID NO: 2384838 - RNA, 19 nt, Artificial Sequence
  Description of Artificial Sequence: Synthetic oligonucleotide
  Sense strand starting at position 1916 of SEQ ID NO: 1886045
cggaaugaucugcaucaca

SEQ ID NO: 2384839 - RNA, 19 nt, Artificial Sequence
  Description of Artificial Sequence: Synthetic oligonucleotide
  Antisense strand to SEQ ID NO: 2384838
ugugaugcagaucauuccg

SEQ ID NO: 2384840 - RNA, 19 nt, Artificial Sequence
  Description of Artificial Sequence: Synthetic oligonucleotide
  Sense strand starting at position 1994 of SEQ ID NO: 1886045
uggguuaacuaggccuaua

SEQ ID NO: 2384841 - RNA, 19 nt, Artificial Sequence
  Description of Artificial Sequence: Synthetic oligonucleotide
  Antisense strand to SEQ ID NO: 2384840
uauaggccuaguuaaccca

SEQ ID NO: 2384842 - RNA, 19 nt, Artificial Sequence
  Description of Artificial Sequence: Synthetic oligonucleotide
  Sense strand starting at position 1997 of SEQ ID NO: 1886045
guuaacuaggccuauaaag

SEQ ID NO: 2384843 - RNA, 19 nt, Artificial Sequence
  Description of Artificial Sequence: Synthetic oligonucleotide
  Antisense strand to SEQ ID NO: 2384842
cuuuauaggccuaguuaac

SEQ ID NO: 2384844 - RNA, 19 nt, Artificial Sequence
  Description of Artificial Sequence: Synthetic oligonucleotide
  Sense strand starting at position 2059 of SEQ ID NO: 1886045
aauauugcaguugggaauu

SEQ ID NO: 2384845 - RNA, 19 nt, Artificial Sequence
  Description of Artificial Sequence: Synthetic oligonucleotide
  Antisense strand to SEQ ID NO: 2384844
aauucccaacugcaauauu

SEQ ID NO: 2384846 - RNA, 19 nt, Artificial Sequence
  Description of Artificial Sequence: Synthetic oligonucleotide
  Sense strand starting at position 2155 of SEQ ID NO: 1886045
gcagauucccagugaacac

SEQ ID NO: 2384847 - RNA, 19 nt, Artificial Sequence
  Description of Artificial Sequence: Synthetic oligonucleotide
  Antisense strand to SEQ ID NO: 2384846
guguucacugggaaucugc

SEQ ID NO: 2384848 - RNA, 19 nt, Artificial Sequence
  Description of Artificial Sequence: Synthetic oligonucleotide
  Sense strand starting at position 2270 of SEQ ID NO: 1886045
ucagaaugacauugcaguu

SEQ ID NO: 2384849 - RNA, 19 nt, Artificial Sequence
  Description of Artificial Sequence: Synthetic oligonucleotide
  Antisense strand to SEQ ID NO: 2384848
aacugcaaugucauucuga

SEQ ID NO: 2384850 - RNA, 19 nt, Artificial Sequence
  Description of Artificial Sequence: Synthetic oligonucleotide
  Sense strand starting at position 2302 of SEQ ID NO: 1886045
gguugcuuugugagaccgu

SEQ ID NO: 2384851 - RNA, 19 nt, Artificial Sequence
  Description of Artificial Sequence: Synthetic oligonucleotide
  Antisense strand to SEQ ID NO: 2384850
acggucucacaaagcaacc

SEQ ID NO: 2384852 - RNA, 19 nt, Artificial Sequence
  Description of Artificial Sequence: Synthetic oligonucleotide
  Sense strand starting at position 2340 of SEQ ID NO: 1886045
accaaagcaucuguugaaa

SEQ ID NO: 2384853 - RNA, 19 nt, Artificial Sequence
  Description of Artificial Sequence: Synthetic oligonucleotide
  Antisense strand to SEQ ID NO: 2384852
uuucaacagaugcuuuggu

SEQ ID NO: 2384854 - RNA, 19 nt, Artificial Sequence
  Description of Artificial Sequence: Synthetic oligonucleotide
  Sense strand starting at position 2761 of SEQ ID NO: 1886045
aggaguauauuugauagag

SEQ ID NO: 2384855 - RNA, 19 nt, Artificial Sequence
  Description of Artificial Sequence: Synthetic oligonucleotide
  Antisense strand to SEQ ID NO: 2384854
cucuaucaaauauacuccu

SEQ ID NO: 2384856 - RNA, 19 nt, Artificial Sequence
  Description of Artificial Sequence: Synthetic oligonucleotide
  Sense strand starting at position 2763 of SEQ ID NO: 1886045
gaguauauuugauagagac

SEQ ID NO: 2384857 - RNA, 19 nt, Artificial Sequence
  Description of Artificial Sequence: Synthetic oligonucleotide
  Antisense strand to SEQ ID NO: 2384856
gucucuaucaaauauacuc

SEQ ID NO: 2384858 - RNA, 19 nt, Artificial Sequence
  Description of Artificial Sequence: Synthetic oligonucleotide
  Sense strand starting at position 2775 of SEQ ID NO: 1886045
uagagacuggcuuggguua

SEQ ID NO: 2384859 - RNA, 19 nt, Artificial Sequence
  Description of Artificial Sequence: Synthetic oligonucleotide
  Antisense strand to SEQ ID NO: 2384858
uaacccaagccagucucua

SEQ ID NO: 2384860 - RNA, 19 nt, Artificial Sequence
  Description of Artificial Sequence: Synthetic oligonucleotide
  Sense strand starting at position 2811 of SEQ ID NO: 1886045
uaaguuucuggccaugaaa

SEQ ID NO: 2384861 - RNA, 19 nt, Artificial Sequence
  Description of Artificial Sequence: Synthetic oligonucleotide
  Antisense strand to SEQ ID NO: 2384860
uuucauggccagaaacuua

SEQ ID NO: 2384862 - RNA, 19 nt, Artificial Sequence
  Description of Artificial Sequence: Synthetic oligonucleotide
  Sense strand starting at position 2813 of SEQ ID NO: 1886045
aguuucuggccaugaaaua

SEQ ID NO: 2384863 - RNA, 19 nt, Artificial Sequence
  Description of Artificial Sequence: Synthetic oligonucleotide
  Antisense strand to SEQ ID NO: 2384862
uauuucauggccagaaacu

SEQ ID NO: 2384864 - RNA, 19 nt, Artificial Sequence
  Description of Artificial Sequence: Synthetic oligonucleotide
  Sense strand starting at position 2814 of SEQ ID NO: 1886045
guuucuggccaugaaauag

SEQ ID NO: 2384865 - RNA, 19 nt, Artificial Sequence
  Description of Artificial Sequence: Synthetic oligonucleotide
  Antisense strand to SEQ ID NO: 2384864
cuauuucauggccagaaac

SEQ ID NO: 2384866 - RNA, 19 nt, Artificial Sequence
  Description of Artificial Sequence: Synthetic oligonucleotide
  Sense strand starting at position 2877 of SEQ ID NO: 1886045
aacacugaguuguugaacu

SEQ ID NO: 2384867 - RNA, 19 nt, Artificial Sequence
  Description of Artificial Sequence: Synthetic oligonucleotide
  Antisense strand to SEQ ID NO: 2384866
aguucaacaacucaguguu

SEQ ID NO: 2384868 - RNA, 19 nt, Artificial Sequence
  Description of Artificial Sequence: Synthetic oligonucleotide
  Sense strand starting at position 2879 of SEQ ID NO: 1886045
cacugaguuguugaacuua

SEQ ID NO: 2384869 - RNA, 19 nt, Artificial Sequence
  Description of Artificial Sequence: Synthetic oligonucleotide
  Antisense strand to SEQ ID NO: 2384868
uaaguucaacaacucagug

SEQ ID NO: 2384870 - RNA, 19 nt, Artificial Sequence
  Description of Artificial Sequence: Synthetic oligonucleotide
  Sense strand starting at position 3409 of SEQ ID NO: 1886045
acccuuuggguuuaagauu

SEQ ID NO: 2384871 - RNA, 19 nt, Artificial Sequence
  Description of Artificial Sequence: Synthetic oligonucleotide
  Antisense strand to SEQ ID NO: 2384870
aaucuuaaacccaaagggu

SEQ ID NO: 2384872 - RNA, 19 nt, Artificial Sequence
  Description of Artificial Sequence: Synthetic oligonucleotide
  Sense strand starting at position 3633 of SEQ ID NO: 1886045
gagggcuucccugauucuu

SEQ ID NO: 2384873 - RNA, 19 nt, Artificial Sequence
  Description of Artificial Sequence: Synthetic oligonucleotide
  Antisense strand to SEQ ID NO: 2384872
aagaaucagggaagcccuc

SEQ ID NO: 2384874 - RNA, 19 nt, Artificial Sequence
  Description of Artificial Sequence: Synthetic oligonucleotide
  Sense strand starting at position 3770 of SEQ ID NO: 1886045
cuaggaccuucucucagaa

SEQ ID NO: 2384875 - RNA, 19 nt, Artificial Sequence
  Description of Artificial Sequence: Synthetic oligonucleotide
  Antisense strand to SEQ ID NO: 2384874
uucugagagaagguccuag

SEQ ID NO: 2384876 - RNA, 19 nt, Artificial Sequence
  Description of Artificial Sequence: Synthetic oligonucleotide
  Sense strand starting at position 82 of SEQ ID NO: 1886046
acugaucuagcuuacauga

SEQ ID NO: 2384877 - RNA, 19 nt, Artificial Sequence
  Description of Artificial Sequence: Synthetic oligonucleotide
  Antisense strand to SEQ ID NO: 2384876
ucauguaagcuagaucagu

SEQ ID NO: 2384878 - RNA, 19 nt, Artificial Sequence
  Description of Artificial Sequence: Synthetic oligonucleotide
  Sense strand starting at position 141 of SEQ ID NO: 1886046
gcuagaagcucacuaugag

SEQ ID NO: 2384879 - RNA, 19 nt, Artificial Sequence
  Description of Artificial Sequence: Synthetic oligonucleotide
  Antisense strand to SEQ ID NO: 2384878
cucauagugagcuucuagc

SEQ ID NO: 2384880 - RNA, 19 nt, Artificial Sequence
  Description of Artificial Sequence: Synthetic oligonucleotide
  Sense strand starting at position 218 of SEQ ID NO: 1886046
aaaugaaacugguuggcaa

SEQ ID NO: 2384881 - RNA, 19 nt, Artificial Sequence
  Description of Artificial Sequence: Synthetic oligonucleotide
  Antisense strand to SEQ ID NO: 2384880
uugccaaccaguuucauuu

SEQ ID NO: 2384882 - RNA, 19 nt, Artificial Sequence
  Description of Artificial Sequence: Synthetic oligonucleotide
  Sense strand starting at position 219 of SEQ ID NO: 1886046
aaugaaacugguuggcaaa

SEQ ID NO: 2384883 - RNA, 19 nt, Artificial Sequence
  Description of Artificial Sequence: Synthetic oligonucleotide
  Antisense strand to SEQ ID NO: 2384882
uuugccaaccaguuucauu

SEQ ID NO: 2384884 - RNA, 19 nt, Artificial Sequence
  Description of Artificial Sequence: Synthetic oligonucleotide
  Sense strand starting at position 261 of SEQ ID NO: 1886046
aggauugugaggugugaac

SEQ ID NO: 2384885 - RNA, 19 nt, Artificial Sequence
  Description of Artificial Sequence: Synthetic oligonucleotide
  Antisense strand to SEQ ID NO: 2384884
guucacaccucacaauccu

SEQ ID NO: 2384886 - RNA, 19 nt, Artificial Sequence
  Description of Artificial Sequence: Synthetic oligonucleotide
  Sense strand starting at position 270 of SEQ ID NO: 1886046
aggugugaacaggguaaau

SEQ ID NO: 2384887 - RNA, 19 nt, Artificial Sequence
  Description of Artificial Sequence: Synthetic oligonucleotide
  Antisense strand to SEQ ID NO: 2384886
auuuacccuguucacaccu

SEQ ID NO: 2384888 - RNA, 19 nt, Artificial Sequence
  Description of Artificial Sequence: Synthetic oligonucleotide
  Sense strand starting at position 545 of SEQ ID NO: 1886046
ugguuuccuccaugacaau

SEQ ID NO: 2384889 - RNA, 19 nt, Artificial Sequence
  Description of Artificial Sequence: Synthetic oligonucleotide
  Antisense strand to SEQ ID NO: 2384888
auugucauggaggaaacca

SEQ ID NO: 2384890 - RNA, 19 nt, Artificial Sequence
  Description of Artificial Sequence: Synthetic oligonucleotide
  Sense strand starting at position 546 of SEQ ID NO: 1886046
gguuuccuccaugacaaug

SEQ ID NO: 2384891 - RNA, 19 nt, Artificial Sequence
  Description of Artificial Sequence: Synthetic oligonucleotide
  Antisense strand to SEQ ID NO: 2384890
cauugucauggaggaaacc

SEQ ID NO: 2384892 - RNA, 19 nt, Artificial Sequence
  Description of Artificial Sequence: Synthetic oligonucleotide
  Sense strand starting at position 777 of SEQ ID NO: 1886046
aauacuagccaguaggauu

SEQ ID NO: 2384893 - RNA, 19 nt, Artificial Sequence
  Description of Artificial Sequence: Synthetic oligonucleotide
  Antisense strand to SEQ ID NO: 2384892
aauccuacuggcuaguauu

SEQ ID NO: 2384894 - RNA, 19 nt, Artificial Sequence
  Description of Artificial Sequence: Synthetic oligonucleotide
  Sense strand starting at position 871 of SEQ ID NO: 1886046
ccuaauauugaagggcuaa

SEQ ID NO: 2384895 - RNA, 19 nt, Artificial Sequence
  Description of Artificial Sequence: Synthetic oligonucleotide
  Antisense strand to SEQ ID NO: 2384894
uuagcccuucaauauuagg

SEQ ID NO: 2384896 - RNA, 19 nt, Artificial Sequence
  Description of Artificial Sequence: Synthetic oligonucleotide
  Sense strand starting at position 883 of SEQ ID NO: 1886046
gggcuaauagucuagcacu

SEQ ID NO: 2384897 - RNA, 19 nt, Artificial Sequence
  Description of Artificial Sequence: Synthetic oligonucleotide
  Antisense strand to SEQ ID NO: 2384896
agugcuagacuauuagccc

SEQ ID NO: 2384898 - RNA, 19 nt, Artificial Sequence
  Description of Artificial Sequence: Synthetic oligonucleotide
  Sense strand starting at position 1038 of SEQ ID NO: 1886046
guggucuguacucacauua

SEQ ID NO: 2384899 - RNA, 19 nt, Artificial Sequence
  Description of Artificial Sequence: Synthetic oligonucleotide
  Antisense strand to SEQ ID NO: 2384898
uaaugugaguacagaccac

SEQ ID NO: 2384900 - RNA, 19 nt, Artificial Sequence
  Description of Artificial Sequence: Synthetic oligonucleotide
  Sense strand starting at position 1070 of SEQ ID NO: 1886046
gcuguuaucagagaguuuc

SEQ ID NO: 2384901 - RNA, 19 nt, Artificial Sequence
  Description of Artificial Sequence: Synthetic oligonucleotide
  Antisense strand to SEQ ID NO: 2384900
gaaacucucugauaacagc

SEQ ID NO: 2384902 - RNA, 19 nt, Artificial Sequence
  Description of Artificial Sequence: Synthetic oligonucleotide
  Sense strand starting at position 1078 of SEQ ID NO: 1886046
cagagaguuucuguccuga

SEQ ID NO: 2384903 - RNA, 19 nt, Artificial Sequence
  Description of Artificial Sequence: Synthetic oligonucleotide
  Antisense strand to SEQ ID NO: 2384902
ucaggacagaaacucucug

SEQ ID NO: 2384904 - RNA, 19 nt, Artificial Sequence
  Description of Artificial Sequence: Synthetic oligonucleotide
  Sense strand starting at position 1080 of SEQ ID NO: 1886046
gagaguuucuguccugaaa

SEQ ID NO: 2384905 - RNA, 19 nt, Artificial Sequence
  Description of Artificial Sequence: Synthetic oligonucleotide
  Antisense strand to SEQ ID NO: 2384904
uuucaggacagaaacucuc

SEQ ID NO: 2384906 - RNA, 19 nt, Artificial Sequence
  Description of Artificial Sequence: Synthetic oligonucleotide
  Sense strand starting at position 1228 of SEQ ID NO: 1886046
cugggauaaucuccaguuc

SEQ ID NO: 2384907 - RNA, 19 nt, Artificial Sequence
  Description of Artificial Sequence: Synthetic oligonucleotide
  Antisense strand to SEQ ID NO: 2384906
gaacuggagauuaucccag

SEQ ID NO: 2384908 - RNA, 19 nt, Artificial Sequence
  Description of Artificial Sequence: Synthetic oligonucleotide
  Sense strand starting at position 1319 of SEQ ID NO: 1886046
agucauugucuccauccau

SEQ ID NO: 2384909 - RNA, 19 nt, Artificial Sequence
  Description of Artificial Sequence: Synthetic oligonucleotide
  Antisense strand to SEQ ID NO: 2384908
auggauggagacaaugacu

SEQ ID NO: 2384910 - RNA, 19 nt, Artificial Sequence
  Description of Artificial Sequence: Synthetic oligonucleotide
  Sense strand starting at position 1377 of SEQ ID NO: 1886046
cgcagcucugaagaaugaa

SEQ ID NO: 2384911 - RNA, 19 nt, Artificial Sequence
  Description of Artificial Sequence: Synthetic oligonucleotide
  Antisense strand to SEQ ID NO: 2384910
uucauucuucagagcugcg

SEQ ID NO: 2384912 - RNA, 19 nt, Artificial Sequence
  Description of Artificial Sequence: Synthetic oligonucleotide
  Sense strand starting at position 1380 of SEQ ID NO: 1886046
agcucugaagaaugaaagu

SEQ ID NO: 2384913 - RNA, 19 nt, Artificial Sequence
  Description of Artificial Sequence: Synthetic oligonucleotide
  Antisense strand to SEQ ID NO: 2384912
acuuucauucuucagagcu

SEQ ID NO: 2384914 - RNA, 19 nt, Artificial Sequence
  Description of Artificial Sequence: Synthetic oligonucleotide
  Sense strand starting at position 1659 of SEQ ID NO: 1886046
cugcacugacuuggaaaga

SEQ ID NO: 2384915 - RNA, 19 nt, Artificial Sequence
  Description of Artificial Sequence: Synthetic oligonucleotide
  Antisense strand to SEQ ID NO: 2384914
ucuuuccaagucagugcag

SEQ ID NO: 2384916 - RNA, 19 nt, Artificial Sequence
  Description of Artificial Sequence: Synthetic oligonucleotide
  Sense strand starting at position 1714 of SEQ ID NO: 1886046
gccauaggacaauguauaa

SEQ ID NO: 2384917 - RNA, 19 nt, Artificial Sequence
  Description of Artificial Sequence: Synthetic oligonucleotide
  Antisense strand to SEQ ID NO: 2384916
uuauacauuguccuauggc

SEQ ID NO: 2384918 - RNA, 19 nt, Artificial Sequence
  Description of Artificial Sequence: Synthetic oligonucleotide
  Sense strand starting at position 2000 of SEQ ID NO: 1886046
ccaauaagagcucaguuau

SEQ ID NO: 2384919 - RNA, 19 nt, Artificial Sequence
  Description of Artificial Sequence: Synthetic oligonucleotide
  Antisense strand to SEQ ID NO: 2384918
auaacugagcucuuauugg

SEQ ID NO: 2384920 - RNA, 19 nt, Artificial Sequence
  Description of Artificial Sequence: Synthetic oligonucleotide
  Sense strand starting at position 2011 of SEQ ID NO: 1886046
ucaguuaucuucuugaaag

SEQ ID NO: 2384921 - RNA, 19 nt, Artificial Sequence
  Description of Artificial Sequence: Synthetic oligonucleotide
  Antisense strand to SEQ ID NO: 2384920
cuuucaagaagauaacuga

SEQ ID NO: 2384922 - RNA, 19 nt, Artificial Sequence
  Description of Artificial Sequence: Synthetic oligonucleotide
  Sense strand starting at position 2013 of SEQ ID NO: 1886046
aguuaucuucuugaaagua

SEQ ID NO: 2384923 - RNA, 19 nt, Artificial Sequence
  Description of Artificial Sequence: Synthetic oligonucleotide
  Antisense strand to SEQ ID NO: 2384922
uacuuucaagaagauaacu

SEQ ID NO: 2384924 - RNA, 19 nt, Artificial Sequence
  Description of Artificial Sequence: Synthetic oligonucleotide
  Sense strand starting at position 2028 of SEQ ID NO: 1886046
aguagacccuuuguccaua

SEQ ID NO: 2384925 - RNA, 19 nt, Artificial Sequence
  Description of Artificial Sequence: Synthetic oligonucleotide
  Antisense strand to SEQ ID NO: 2384924
uauggacaaagggucuacu

SEQ ID NO: 2384926 - RNA, 19 nt, Artificial Sequence
  Description of Artificial Sequence: Synthetic oligonucleotide
  Sense strand starting at position 2029 of SEQ ID NO: 1886046
guagacccuuuguccauaa

SEQ ID NO: 2384927 - RNA, 19 nt, Artificial Sequence
  Description of Artificial Sequence: Synthetic oligonucleotide
  Antisense strand to SEQ ID NO: 2384926
uuauggacaaagggucuac

SEQ ID NO: 2384928 - RNA, 19 nt, Artificial Sequence
  Description of Artificial Sequence: Synthetic oligonucleotide
  Sense strand starting at position 2095 of SEQ ID NO: 1886046
guugcuaugggacauuacu

SEQ ID NO: 2384929 - RNA, 19 nt, Artificial Sequence
  Description of Artificial Sequence: Synthetic oligonucleotide
  Antisense strand to SEQ ID NO: 2384928
aguaaugucccauagcaac

SEQ ID NO: 2384930 - RNA, 19 nt, Artificial Sequence
  Description of Artificial Sequence: Synthetic oligonucleotide
  Sense strand starting at position 2113 of SEQ ID NO: 1886046
ugaugugaucaaugauagc

SEQ ID NO: 2384931 - RNA, 19 nt, Artificial Sequence
  Description of Artificial Sequence: Synthetic oligonucleotide
  Antisense strand to SEQ ID NO: 2384930
gcuaucauugaucacauca

SEQ ID NO: 2384932 - RNA, 19 nt, Artificial Sequence
  Description of Artificial Sequence: Synthetic oligonucleotide
  Sense strand starting at position 2153 of SEQ ID NO: 1886046
gaaagcacuucuuugggaa

SEQ ID NO: 2384933 - RNA, 19 nt, Artificial Sequence
  Description of Artificial Sequence: Synthetic oligonucleotide
  Antisense strand to SEQ ID NO: 2384932
uucccaaagaagugcuuuc

SEQ ID NO: 2384934 - RNA, 19 nt, Artificial Sequence
  Description of Artificial Sequence: Synthetic oligonucleotide
  Sense strand starting at position 2154 of SEQ ID NO: 1886046
aaagcacuucuuugggaag

SEQ ID NO: 2384935 - RNA, 19 nt, Artificial Sequence
  Description of Artificial Sequence: Synthetic oligonucleotide
  Antisense strand to SEQ ID NO: 2384934
cuucccaaagaagugcuuu

SEQ ID NO: 2384936 - RNA, 19 nt, Artificial Sequence
  Description of Artificial Sequence: Synthetic oligonucleotide
  Sense strand starting at position 2587 of SEQ ID NO: 1886046
uuagacuuauuugagauga

SEQ ID NO: 2384937 - RNA, 19 nt, Artificial Sequence
  Description of Artificial Sequence: Synthetic oligonucleotide
  Antisense strand to SEQ ID NO: 2384936
ucaucucaaauaagucuaa

SEQ ID NO: 2384938 - RNA, 19 nt, Artificial Sequence
  Description of Artificial Sequence: Synthetic oligonucleotide
  Sense strand starting at position 2641 of SEQ ID NO: 1886046
gcuagcgauuuccucucaa

SEQ ID NO: 2384939 - RNA, 19 nt, Artificial Sequence
  Description of Artificial Sequence: Synthetic oligonucleotide
  Antisense strand to SEQ ID NO: 2384938
uugagaggaaaucgcuagc

SEQ ID NO: 2384940 - RNA, 19 nt, Artificial Sequence
  Description of Artificial Sequence: Synthetic oligonucleotide
  Sense strand starting at position 2661 of SEQ ID NO: 1886046
ucauucugagaauguuaca

SEQ ID NO: 2384941 - RNA, 19 nt, Artificial Sequence
  Description of Artificial Sequence: Synthetic oligonucleotide
  Antisense strand to SEQ ID NO: 2384940
uguaacauucucagaauga

SEQ ID NO: 2384942 - RNA, 19 nt, Artificial Sequence
  Description of Artificial Sequence: Synthetic oligonucleotide
  Sense strand starting at position 2823 of SEQ ID NO: 1886046
aggugcuguauuugcuaau

SEQ ID NO: 2384943 - RNA, 19 nt, Artificial Sequence
  Description of Artificial Sequence: Synthetic oligonucleotide
  Antisense strand to SEQ ID NO: 2384942
auuagcaaauacagcaccu

SEQ ID NO: 2384944 - RNA, 19 nt, Artificial Sequence
  Description of Artificial Sequence: Synthetic oligonucleotide
  Sense strand starting at position 2824 of SEQ ID NO: 1886046
ggugcuguauuugcuaauu

SEQ ID NO: 2384945 - RNA, 19 nt, Artificial Sequence
  Description of Artificial Sequence: Synthetic oligonucleotide
  Antisense strand to SEQ ID NO: 2384944
aauuagcaaauacagcacc

SEQ ID NO: 2384946 - RNA, 19 nt, Artificial Sequence
  Description of Artificial Sequence: Synthetic oligonucleotide
  Sense strand starting at position 3057 of SEQ ID NO: 1886046
gggagaaaguuucucucua

SEQ ID NO: 2384947 - RNA, 19 nt, Artificial Sequence
  Description of Artificial Sequence: Synthetic oligonucleotide
  Antisense strand to SEQ ID NO: 2384946
uagagagaaacuuucuccc

SEQ ID NO: 2384948 - RNA, 19 nt, Artificial Sequence
  Description of Artificial Sequence: Synthetic oligonucleotide
  Sense strand starting at position 3058 of SEQ ID NO: 1886046
ggagaaaguuucucucuac

SEQ ID NO: 2384949 - RNA, 19 nt, Artificial Sequence
  Description of Artificial Sequence: Synthetic oligonucleotide
  Antisense strand to SEQ ID NO: 2384948
guagagagaaacuuucucc

SEQ ID NO: 2384950 - RNA, 19 nt, Artificial Sequence
  Description of Artificial Sequence: Synthetic oligonucleotide
  Sense strand starting at position 3064 of SEQ ID NO: 1886046
aguuucucucuacaguaga

SEQ ID NO: 2384951 - RNA, 19 nt, Artificial Sequence
  Description of Artificial Sequence: Synthetic oligonucleotide
  Antisense strand to SEQ ID NO: 2384950
ucuacuguagagagaaacu

SEQ ID NO: 2384952 - RNA, 19 nt, Artificial Sequence
  Description of Artificial Sequence: Synthetic oligonucleotide
  Sense strand starting at position 3307 of SEQ ID NO: 1886046
ugcuaugcgccuuuacuua

SEQ ID NO: 2384953 - RNA, 19 nt, Artificial Sequence
  Description of Artificial Sequence: Synthetic oligonucleotide
  Antisense strand to SEQ ID NO: 2384952
uaaguaaaggcgcauagca

SEQ ID NO: 2384954 - RNA, 19 nt, Artificial Sequence
  Description of Artificial Sequence: Synthetic oligonucleotide
  Sense strand starting at position 3452 of SEQ ID NO: 1886046
agucaaggugcucacugau

SEQ ID NO: 2384955 - RNA, 19 nt, Artificial Sequence
  Description of Artificial Sequence: Synthetic oligonucleotide
  Antisense strand to SEQ ID NO: 2384954
aucagugagcaccuugacu

SEQ ID NO: 2384956 - RNA, 19 nt, Artificial Sequence
  Description of Artificial Sequence: Synthetic oligonucleotide
  Sense strand starting at position 617 of SEQ ID NO: 1886047
ccucuucugugagauuuag

SEQ ID NO: 2384957 - RNA, 19 nt, Artificial Sequence
  Description of Artificial Sequence: Synthetic oligonucleotide
  Antisense strand to SEQ ID NO: 2384956
cuaaaucucacagaagagg

SEQ ID NO: 2384958 - RNA, 19 nt, Artificial Sequence
  Description of Artificial Sequence: Synthetic oligonucleotide
  Sense strand starting at position 623 of SEQ ID NO: 1886047
cugugagauuuagaaagcu

SEQ ID NO: 2384959 - RNA, 19 nt, Artificial Sequence
  Description of Artificial Sequence: Synthetic oligonucleotide
  Antisense strand to SEQ ID NO: 2384958
agcuuucuaaaucucacag

SEQ ID NO: 2384960 - RNA, 19 nt, Artificial Sequence
  Description of Artificial Sequence: Synthetic oligonucleotide
  Sense strand starting at position 788 of SEQ ID NO: 1886047
cgcauauugagcuauagaa

SEQ ID NO: 2384961 - RNA, 19 nt, Artificial Sequence
  Description of Artificial Sequence: Synthetic oligonucleotide
  Antisense strand to SEQ ID NO: 2384960
uucuauagcucaauaugcg

SEQ ID NO: 2384962 - RNA, 19 nt, Artificial Sequence
  Description of Artificial Sequence: Synthetic oligonucleotide
  Sense strand starting at position 803 of SEQ ID NO: 1886047
agaagagcucacugugauu

SEQ ID NO: 2384963 - RNA, 19 nt, Artificial Sequence
  Description of Artificial Sequence: Synthetic oligonucleotide
  Antisense strand to SEQ ID NO: 2384962
aaucacagugagcucuucu

SEQ ID NO: 2384964 - RNA, 19 nt, Artificial Sequence
  Description of Artificial Sequence: Synthetic oligonucleotide
  Sense strand starting at position 866 of SEQ ID NO: 1886047
ugaauucuguaauggacau

SEQ ID NO: 2384965 - RNA, 19 nt, Artificial Sequence
  Description of Artificial Sequence: Synthetic oligonucleotide
  Antisense strand to SEQ ID NO: 2384964
auguccauuacagaauuca

SEQ ID NO: 2384966 - RNA, 19 nt, Artificial Sequence
  Description of Artificial Sequence: Synthetic oligonucleotide
  Sense strand starting at position 870 of SEQ ID NO: 1886047
uucuguaauggacauccau

SEQ ID NO: 2384967 - RNA, 19 nt, Artificial Sequence
  Description of Artificial Sequence: Synthetic oligonucleotide
  Antisense strand to SEQ ID NO: 2384966
auggauguccauuacagaa

SEQ ID NO: 2384968 - RNA, 19 nt, Artificial Sequence
  Description of Artificial Sequence: Synthetic oligonucleotide
  Sense strand starting at position 879 of SEQ ID NO: 1886047
ggacauccaugcugcaaua

SEQ ID NO: 2384969 - RNA, 19 nt, Artificial Sequence
  Description of Artificial Sequence: Synthetic oligonucleotide
  Antisense strand to SEQ ID NO: 2384968
uauugcagcauggaugucc

SEQ ID NO: 2384970 - RNA, 19 nt, Artificial Sequence
  Description of Artificial Sequence: Synthetic oligonucleotide
  Sense strand starting at position 229 of SEQ ID NO: 1886048
acucuuaaaggaugucuua

SEQ ID NO: 2384971 - RNA, 19 nt, Artificial Sequence
  Description of Artificial Sequence: Synthetic oligonucleotide
  Antisense strand to SEQ ID NO: 2384970
uaagacauccuuuaagagu

SEQ ID NO: 2384972 - RNA, 19 nt, Artificial Sequence
  Description of Artificial Sequence: Synthetic oligonucleotide
  Sense strand starting at position 232 of SEQ ID NO: 1886048
cuuaaaggaugucuuauga

SEQ ID NO: 2384973 - RNA, 19 nt, Artificial Sequence
  Description of Artificial Sequence: Synthetic oligonucleotide
  Antisense strand to SEQ ID NO: 2384972
ucauaagacauccuuuaag

SEQ ID NO: 2384974 - RNA, 19 nt, Artificial Sequence
  Description of Artificial Sequence: Synthetic oligonucleotide
  Sense strand starting at position 236 of SEQ ID NO: 1886048
aaggaugucuuaugaucuu

SEQ ID NO: 2384975 - RNA, 19 nt, Artificial Sequence
  Description of Artificial Sequence: Synthetic oligonucleotide
  Antisense strand to SEQ ID NO: 2384974
aagaucauaagacauccuu

SEQ ID NO: 2384976 - RNA, 19 nt, Artificial Sequence
  Description of Artificial Sequence: Synthetic oligonucleotide
  Sense strand starting at position 613 of SEQ ID NO: 1886048
cuuuccucuucugcgagau

SEQ ID NO: 2384977 - RNA, 19 nt, Artificial Sequence
  Description of Artificial Sequence: Synthetic oligonucleotide
  Antisense strand to SEQ ID NO: 2384976
aucucgcagaagaggaaag

SEQ ID NO: 2384978 - RNA, 19 nt, Artificial Sequence
  Description of Artificial Sequence: Synthetic oligonucleotide
  Sense strand starting at position 614 of SEQ ID NO: 1886048
uuuccucuucugcgagauu

SEQ ID NO: 2384979 - RNA, 19 nt, Artificial Sequence
  Description of Artificial Sequence: Synthetic oligonucleotide
  Antisense strand to SEQ ID NO: 2384978
aaucucgcagaagaggaaa

SEQ ID NO: 2384980 - RNA, 19 nt, Artificial Sequence
  Description of Artificial Sequence: Synthetic oligonucleotide
  Sense strand starting at position 615 of SEQ ID NO: 1886048
uuccucuucugcgagauuu

SEQ ID NO: 2384981 - RNA, 19 nt, Artificial Sequence
  Description of Artificial Sequence: Synthetic oligonucleotide
  Antisense strand to SEQ ID NO: 2384980
aaaucucgcagaagaggaa

SEQ ID NO: 2384982 - RNA, 19 nt, Artificial Sequence
  Description of Artificial Sequence: Synthetic oligonucleotide
  Sense strand starting at position 623 of SEQ ID NO: 1886048
cugcgagauuuagaaagcu

SEQ ID NO: 2384983 - RNA, 19 nt, Artificial Sequence
  Description of Artificial Sequence: Synthetic oligonucleotide
  Antisense strand to SEQ ID NO: 2384982
agcuuucuaaaucucgcag

SEQ ID NO: 2384984 - RNA, 19 nt, Artificial Sequence
  Description of Artificial Sequence: Synthetic oligonucleotide
  Sense strand starting at position 722 of SEQ ID NO: 1886048
cucuaagugucaguacuca

SEQ ID NO: 2384985 - RNA, 19 nt, Artificial Sequence
  Description of Artificial Sequence: Synthetic oligonucleotide
  Antisense strand to SEQ ID NO: 2384984
ugaguacugacacuuagag

SEQ ID NO: 2384986 - RNA, 19 nt, Artificial Sequence
  Description of Artificial Sequence: Synthetic oligonucleotide
  Sense strand starting at position 726 of SEQ ID NO: 1886048
aagugucaguacucauagu

SEQ ID NO: 2384987 - RNA, 19 nt, Artificial Sequence
  Description of Artificial Sequence: Synthetic oligonucleotide
  Antisense strand to SEQ ID NO: 2384986
acuaugaguacugacacuu

SEQ ID NO: 2384988 - RNA, 19 nt, Artificial Sequence
  Description of Artificial Sequence: Synthetic oligonucleotide
  Sense strand starting at position 788 of SEQ ID NO: 1886048
cgcauauugagcuauggaa

SEQ ID NO: 2384989 - RNA, 19 nt, Artificial Sequence
  Description of Artificial Sequence: Synthetic oligonucleotide
  Antisense strand to SEQ ID NO: 2384988
uuccauagcucaauaugcg

SEQ ID NO: 2384990 - RNA, 19 nt, Artificial Sequence
  Description of Artificial Sequence: Synthetic oligonucleotide
  Sense strand starting at position 790 of SEQ ID NO: 1886048
cauauugagcuauggaaga

SEQ ID NO: 2384991 - RNA, 19 nt, Artificial Sequence
  Description of Artificial Sequence: Synthetic oligonucleotide
  Antisense strand to SEQ ID NO: 2384990
ucuuccauagcucaauaug

SEQ ID NO: 2384992 - RNA, 19 nt, Artificial Sequence
  Description of Artificial Sequence: Synthetic oligonucleotide
  Sense strand starting at position 866 of SEQ ID NO: 1886048
ugaauucuguaaugaacau

SEQ ID NO: 2384993 - RNA, 19 nt, Artificial Sequence
  Description of Artificial Sequence: Synthetic oligonucleotide
  Antisense strand to SEQ ID NO: 2384992
auguucauuacagaauuca

SEQ ID NO: 2384994 - RNA, 19 nt, Artificial Sequence
  Description of Artificial Sequence: Synthetic oligonucleotide
  Sense strand starting at position 617 of SEQ ID NO: 1886049
ccucuucugugagauuuag

SEQ ID NO: 2384995 - RNA, 19 nt, Artificial Sequence
  Description of Artificial Sequence: Synthetic oligonucleotide
  Antisense strand to SEQ ID NO: 2384994
cuaaaucucacagaagagg

SEQ ID NO: 2384996 - RNA, 19 nt, Artificial Sequence
  Description of Artificial Sequence: Synthetic oligonucleotide
  Sense strand starting at position 623 of SEQ ID NO: 1886049
cugugagauuuagaaagcu

SEQ ID NO: 2384997 - RNA, 19 nt, Artificial Sequence
  Description of Artificial Sequence: Synthetic oligonucleotide
  Antisense strand to SEQ ID NO: 2384996
agcuuucuaaaucucacag

SEQ ID NO: 2384998 - RNA, 19 nt, Artificial Sequence
  Description of Artificial Sequence: Synthetic oligonucleotide
  Sense strand starting at position 788 of SEQ ID NO: 1886049
cgcauauugagcuauagaa

SEQ ID NO: 2384999 - RNA, 19 nt, Artificial Sequence
  Description of Artificial Sequence: Synthetic oligonucleotide
  Antisense strand to SEQ ID NO: 2384998
uucuauagcucaauaugcg

SEQ ID NO: 2385000 - RNA, 19 nt, Artificial Sequence
  Description of Artificial Sequence: Synthetic oligonucleotide
  Sense strand starting at position 803 of SEQ ID NO: 1886049
agaagagcucacugugauu

SEQ ID NO: 2385001 - RNA, 19 nt, Artificial Sequence
  Description of Artificial Sequence: Synthetic oligonucleotide
  Antisense strand to SEQ ID NO: 2385000
aaucacagugagcucuucu

SEQ ID NO: 2385002 - RNA, 19 nt, Artificial Sequence
  Description of Artificial Sequence: Synthetic oligonucleotide
  Sense strand starting at position 866 of SEQ ID NO: 1886049
ugaauucuguaauggacau

SEQ ID NO: 2385003 - RNA, 19 nt, Artificial Sequence
  Description of Artificial Sequence: Synthetic oligonucleotide
  Antisense strand to SEQ ID NO: 2385002
auguccauuacagaauuca

SEQ ID NO: 2385004 - RNA, 19 nt, Artificial Sequence
  Description of Artificial Sequence: Synthetic oligonucleotide
  Sense strand starting at position 870 of SEQ ID NO: 1886049
uucuguaauggacauccau

SEQ ID NO: 2385005 - RNA, 19 nt, Artificial Sequence
  Description of Artificial Sequence: Synthetic oligonucleotide
  Antisense strand to SEQ ID NO: 2385004
auggauguccauuacagaa

SEQ ID NO: 2385006 - RNA, 19 nt, Artificial Sequence
  Description of Artificial Sequence: Synthetic oligonucleotide
  Sense strand starting at position 879 of SEQ ID NO: 1886049
ggacauccaugcugcaaua

SEQ ID NO: 2385007 - RNA, 19 nt, Artificial Sequence
  Description of Artificial Sequence: Synthetic oligonucleotide
  Antisense strand to SEQ ID NO: 2385006
uauugcagcauggaugucc

SEQ ID NO: 2385008 - RNA, 19 nt, Artificial Sequence
  Description of Artificial Sequence: Synthetic oligonucleotide
  Sense strand starting at position 229 of SEQ ID NO: 1886050
acucuuaaaggaugucuua

SEQ ID NO: 2385009 - RNA, 19 nt, Artificial Sequence
  Description of Artificial Sequence: Synthetic oligonucleotide
  Antisense strand to SEQ ID NO: 2385008
uaagacauccuuuaagagu

SEQ ID NO: 2385010 - RNA, 19 nt, Artificial Sequence
  Description of Artificial Sequence: Synthetic oligonucleotide
  Sense strand starting at position 232 of SEQ ID NO: 1886050
cuuaaaggaugucuuauga

SEQ ID NO: 2385011 - RNA, 19 nt, Artificial Sequence
  Description of Artificial Sequence: Synthetic oligonucleotide
  Antisense strand to SEQ ID NO: 2385010
ucauaagacauccuuuaag

SEQ ID NO: 2385012 - RNA, 19 nt, Artificial Sequence
  Description of Artificial Sequence: Synthetic oligonucleotide
  Sense strand starting at position 236 of SEQ ID NO: 1886050
aaggaugucuuaugaucuu

SEQ ID NO: 2385013 - RNA, 19 nt, Artificial Sequence
  Description of Artificial Sequence: Synthetic oligonucleotide
  Antisense strand to SEQ ID NO: 2385012
aagaucauaagacauccuu

SEQ ID NO: 2385014 - RNA, 19 nt, Artificial Sequence
  Description of Artificial Sequence: Synthetic oligonucleotide
  Sense strand starting at position 613 of SEQ ID NO: 1886050
cuuuccucuucugcgagau

SEQ ID NO: 2385015 - RNA, 19 nt, Artificial Sequence
  Description of Artificial Sequence: Synthetic oligonucleotide
  Antisense strand to SEQ ID NO: 2385014
aucucgcagaagaggaaag

SEQ ID NO: 2385016 - RNA, 19 nt, Artificial Sequence
  Description of Artificial Sequence: Synthetic oligonucleotide
  Sense strand starting at position 614 of SEQ ID NO: 1886050
uuuccucuucugcgagauu

SEQ ID NO: 2385017 - RNA, 19 nt, Artificial Sequence
  Description of Artificial Sequence: Synthetic oligonucleotide
  Antisense strand to SEQ ID NO: 2385016
aaucucgcagaagaggaaa

SEQ ID NO: 2385018 - RNA, 19 nt, Artificial Sequence
  Description of Artificial Sequence: Synthetic oligonucleotide
  Sense strand starting at position 615 of SEQ ID NO: 1886050
uuccucuucugcgagauuu

SEQ ID NO: 2385019 - RNA, 19 nt, Artificial Sequence
  Description of Artificial Sequence: Synthetic oligonucleotide
  Antisense strand to SEQ ID NO: 2385018
aaaucucgcagaagaggaa

SEQ ID NO: 2385020 - RNA, 19 nt, Artificial Sequence
  Description of Artificial Sequence: Synthetic oligonucleotide
  Sense strand starting at position 623 of SEQ ID NO: 1886050
cugcgagauuuagaaagcu

SEQ ID NO: 2385021 - RNA, 19 nt, Artificial Sequence
  Description of Artificial Sequence: Synthetic oligonucleotide
  Antisense strand to SEQ ID NO: 2385020
agcuuucuaaaucucgcag

SEQ ID NO: 2385022 - RNA, 19 nt, Artificial Sequence
  Description of Artificial Sequence: Synthetic oligonucleotide
  Sense strand starting at position 722 of SEQ ID NO: 1886050
cucuaagugucaguacuca

SEQ ID NO: 2385023 - RNA, 19 nt, Artificial Sequence
  Description of Artificial Sequence: Synthetic oligonucleotide
  Antisense strand to SEQ ID NO: 2385022
ugaguacugacacuuagag

SEQ ID NO: 2385024 - RNA, 19 nt, Artificial Sequence
  Description of Artificial Sequence: Synthetic oligonucleotide
  Sense strand starting at position 726 of SEQ ID NO: 1886050
aagugucaguacucauagu

SEQ ID NO: 2385025 - RNA, 19 nt, Artificial Sequence
  Description of Artificial Sequence: Synthetic oligonucleotide
  Antisense strand to SEQ ID NO: 2385024
acuaugaguacugacacuu

SEQ ID NO: 2385026 - RNA, 19 nt, Artificial Sequence
  Description of Artificial Sequence: Synthetic oligonucleotide
  Sense strand starting at position 788 of SEQ ID NO: 1886050
cgcauauugagcuauggaa

SEQ ID NO: 2385027 - RNA, 19 nt, Artificial Sequence
  Description of Artificial Sequence: Synthetic oligonucleotide
  Antisense strand to SEQ ID NO: 2385026
uuccauagcucaauaugcg

SEQ ID NO: 2385028 - RNA, 19 nt, Artificial Sequence
  Description of Artificial Sequence: Synthetic oligonucleotide
  Sense strand starting at position 790 of SEQ ID NO: 1886050
cauauugagcuauggaaga

SEQ ID NO: 2385029 - RNA, 19 nt, Artificial Sequence
  Description of Artificial Sequence: Synthetic oligonucleotide
  Antisense strand to SEQ ID NO: 2385028
ucuuccauagcucaauaug

SEQ ID NO: 2385030 - RNA, 19 nt, Artificial Sequence
  Description of Artificial Sequence: Synthetic oligonucleotide
  Sense strand starting at position 866 of SEQ ID NO: 1886050
ugaauucuguaaugaacau

SEQ ID NO: 2385031 - RNA, 19 nt, Artificial Sequence
  Description of Artificial Sequence: Synthetic oligonucleotide
  Antisense strand to SEQ ID NO: 2385030
auguucauuacagaauuca

SEQ ID NO: 2385032 - RNA, 19 nt, Artificial Sequence
  Description of Artificial Sequence: Synthetic oligonucleotide
  Sense strand starting at position 97 of SEQ ID NO: 1886051
cugggauguaaauguaaac

SEQ ID NO: 2385033 - RNA, 19 nt, Artificial Sequence
  Description of Artificial Sequence: Synthetic oligonucleotide
  Antisense strand to SEQ ID NO: 2385032
guuuacauuuacaucccag

SEQ ID NO: 2385034 - RNA, 19 nt, Artificial Sequence
  Description of Artificial Sequence: Synthetic oligonucleotide
  Sense strand starting at position 127 of SEQ ID NO: 1886051
ggagucugaugguagauuu

SEQ ID NO: 2385035 - RNA, 19 nt, Artificial Sequence
  Description of Artificial Sequence: Synthetic oligonucleotide
  Antisense strand to SEQ ID NO: 2385034
aaaucuaccaucagacucc

SEQ ID NO: 2385036 - RNA, 19 nt, Artificial Sequence
  Description of Artificial Sequence: Synthetic oligonucleotide
  Sense strand starting at position 252 of SEQ ID NO: 1886051
cuucuuuagucuuuaaagg

SEQ ID NO: 2385037 - RNA, 19 nt, Artificial Sequence
  Description of Artificial Sequence: Synthetic oligonucleotide
  Antisense strand to SEQ ID NO: 2385036
ccuuuaaagacuaaagaag

SEQ ID NO: 2385038 - RNA, 19 nt, Artificial Sequence
  Description of Artificial Sequence: Synthetic oligonucleotide
  Sense strand starting at position 548 of SEQ ID NO: 1886051
guuucuucccauuaaagag

SEQ ID NO: 2385039 - RNA, 19 nt, Artificial Sequence
  Description of Artificial Sequence: Synthetic oligonucleotide
  Antisense strand to SEQ ID NO: 2385038
cucuuuaaugggaagaaac

SEQ ID NO: 2385040 - RNA, 19 nt, Artificial Sequence
  Description of Artificial Sequence: Synthetic oligonucleotide
  Sense strand starting at position 563 of SEQ ID NO: 1886051
agaggcaacaugugcuaau

SEQ ID NO: 2385041 - RNA, 19 nt, Artificial Sequence
  Description of Artificial Sequence: Synthetic oligonucleotide
  Antisense strand to SEQ ID NO: 2385040
auuagcacauguugccucu

SEQ ID NO: 2385042 - RNA, 19 nt, Artificial Sequence
  Description of Artificial Sequence: Synthetic oligonucleotide
  Sense strand starting at position 564 of SEQ ID NO: 1886051
gaggcaacaugugcuaauu

SEQ ID NO: 2385043 - RNA, 19 nt, Artificial Sequence
  Description of Artificial Sequence: Synthetic oligonucleotide
  Antisense strand to SEQ ID NO: 2385042
aauuagcacauguugccuc

SEQ ID NO: 2385044 - RNA, 19 nt, Artificial Sequence
  Description of Artificial Sequence: Synthetic oligonucleotide
  Sense strand starting at position 676 of SEQ ID NO: 1886051
ugugaucgugcagaacaca

SEQ ID NO: 2385045 - RNA, 19 nt, Artificial Sequence
  Description of Artificial Sequence: Synthetic oligonucleotide
  Antisense strand to SEQ ID NO: 2385044
uguguucugcacgaucaca

SEQ ID NO: 2385046 - RNA, 19 nt, Artificial Sequence
  Description of Artificial Sequence: Synthetic oligonucleotide
  Sense strand starting at position 955 of SEQ ID NO: 1886051
uauugaguaccauguugag

SEQ ID NO: 2385047 - RNA, 19 nt, Artificial Sequence
  Description of Artificial Sequence: Synthetic oligonucleotide
  Antisense strand to SEQ ID NO: 2385046
cucaacaugguacucaaua

SEQ ID NO: 2385048 - RNA, 19 nt, Artificial Sequence
  Description of Artificial Sequence: Synthetic oligonucleotide
  Sense strand starting at position 1333 of SEQ ID NO: 1886051
acacaaacagcuugaguuu

SEQ ID NO: 2385049 - RNA, 19 nt, Artificial Sequence
  Description of Artificial Sequence: Synthetic oligonucleotide
  Antisense strand to SEQ ID NO: 2385048
aaacucaagcuguuugugu

SEQ ID NO: 2385050 - RNA, 19 nt, Artificial Sequence
  Description of Artificial Sequence: Synthetic oligonucleotide
  Sense strand starting at position 1339 of SEQ ID NO: 1886051
acagcuugaguuuagguaa

SEQ ID NO: 2385051 - RNA, 19 nt, Artificial Sequence
  Description of Artificial Sequence: Synthetic oligonucleotide
  Antisense strand to SEQ ID NO: 2385050
uuaccuaaacucaagcugu

SEQ ID NO: 2385052 - RNA, 19 nt, Artificial Sequence
  Description of Artificial Sequence: Synthetic oligonucleotide
  Sense strand starting at position 1627 of SEQ ID NO: 1886051
augucauaagacugugaug

SEQ ID NO: 2385053 - RNA, 19 nt, Artificial Sequence
  Description of Artificial Sequence: Synthetic oligonucleotide
  Antisense strand to SEQ ID NO: 2385052
caucacagucuuaugacau

SEQ ID NO: 2385054 - RNA, 19 nt, Artificial Sequence
  Description of Artificial Sequence: Synthetic oligonucleotide
  Sense strand starting at position 1629 of SEQ ID NO: 1886051
gucauaagacugugauggu

SEQ ID NO: 2385055 - RNA, 19 nt, Artificial Sequence
  Description of Artificial Sequence: Synthetic oligonucleotide
  Antisense strand to SEQ ID NO: 2385054
accaucacagucuuaugac

SEQ ID NO: 2385056 - RNA, 19 nt, Artificial Sequence
  Description of Artificial Sequence: Synthetic oligonucleotide
  Sense strand starting at position 1656 of SEQ ID NO: 1886051
cuaacauggcucuguggau

SEQ ID NO: 2385057 - RNA, 19 nt, Artificial Sequence
  Description of Artificial Sequence: Synthetic oligonucleotide
  Antisense strand to SEQ ID NO: 2385056
auccacagagccauguuag

SEQ ID NO: 2385058 - RNA, 19 nt, Artificial Sequence
  Description of Artificial Sequence: Synthetic oligonucleotide
  Sense strand starting at position 1830 of SEQ ID NO: 1886051
guaaaugcuagaggagacu

SEQ ID NO: 2385059 - RNA, 19 nt, Artificial Sequence
  Description of Artificial Sequence: Synthetic oligonucleotide
  Antisense strand to SEQ ID NO: 2385058
agucuccucuagcauuuac

SEQ ID NO: 2385060 - RNA, 19 nt, Artificial Sequence
  Description of Artificial Sequence: Synthetic oligonucleotide
  Sense strand starting at position 2041 of SEQ ID NO: 1886051
cguucuguuauggcaguua

SEQ ID NO: 2385061 - RNA, 19 nt, Artificial Sequence
  Description of Artificial Sequence: Synthetic oligonucleotide
  Antisense strand to SEQ ID NO: 2385060
uaacugccauaacagaacg

SEQ ID NO: 2385062 - RNA, 19 nt, Artificial Sequence
  Description of Artificial Sequence: Synthetic oligonucleotide
  Sense strand starting at position 2076 of SEQ ID NO: 1886051
aggagaaacuggcucuuua

SEQ ID NO: 2385063 - RNA, 19 nt, Artificial Sequence
  Description of Artificial Sequence: Synthetic oligonucleotide
  Antisense strand to SEQ ID NO: 2385062
uaaagagccaguuucuccu

SEQ ID NO: 2385064 - RNA, 19 nt, Artificial Sequence
  Description of Artificial Sequence: Synthetic oligonucleotide
  Sense strand starting at position 2088 of SEQ ID NO: 1886051
cucuuuagggcugaaguga

SEQ ID NO: 2385065 - RNA, 19 nt, Artificial Sequence
  Description of Artificial Sequence: Synthetic oligonucleotide
  Antisense strand to SEQ ID NO: 2385064
ucacuucagcccuaaagag

SEQ ID NO: 2385066 - RNA, 19 nt, Artificial Sequence
  Description of Artificial Sequence: Synthetic oligonucleotide
  Sense strand starting at position 2150 of SEQ ID NO: 1886051
gucccuaaucaccacgaua

SEQ ID NO: 2385067 - RNA, 19 nt, Artificial Sequence
  Description of Artificial Sequence: Synthetic oligonucleotide
  Antisense strand to SEQ ID NO: 2385066
uaucguggugauuagggac

SEQ ID NO: 2385068 - RNA, 19 nt, Artificial Sequence
  Description of Artificial Sequence: Synthetic oligonucleotide
  Sense strand starting at position 2419 of SEQ ID NO: 1886051
uccagagagucuccuuaac

SEQ ID NO: 2385069 - RNA, 19 nt, Artificial Sequence
  Description of Artificial Sequence: Synthetic oligonucleotide
  Antisense strand to SEQ ID NO: 2385068
guuaaggagacucucugga

SEQ ID NO: 2385070 - RNA, 19 nt, Artificial Sequence
  Description of Artificial Sequence: Synthetic oligonucleotide
  Sense strand starting at position 2464 of SEQ ID NO: 1886051
augccuuguuaccuagaau

SEQ ID NO: 2385071 - RNA, 19 nt, Artificial Sequence
  Description of Artificial Sequence: Synthetic oligonucleotide
  Antisense strand to SEQ ID NO: 2385070
auucuagguaacaaggcau

SEQ ID NO: 2385072 - RNA, 19 nt, Artificial Sequence
  Description of Artificial Sequence: Synthetic oligonucleotide
  Sense strand starting at position 2467 of SEQ ID NO: 1886051
ccuuguuaccuagaauaug

SEQ ID NO: 2385073 - RNA, 19 nt, Artificial Sequence
  Description of Artificial Sequence: Synthetic oligonucleotide
  Antisense strand to SEQ ID NO: 2385072
cauauucuagguaacaagg

SEQ ID NO: 2385074 - RNA, 19 nt, Artificial Sequence
  Description of Artificial Sequence: Synthetic oligonucleotide
  Sense strand starting at position 2504 of SEQ ID NO: 1886051
uggcuugucccugaggaug

SEQ ID NO: 2385075 - RNA, 19 nt, Artificial Sequence
  Description of Artificial Sequence: Synthetic oligonucleotide
  Antisense strand to SEQ ID NO: 2385074
cauccucagggacaagcca

SEQ ID NO: 2385076 - RNA, 19 nt, Artificial Sequence
  Description of Artificial Sequence: Synthetic oligonucleotide
  Sense strand starting at position 2561 of SEQ ID NO: 1886051
ggucucugaugacucugaa

SEQ ID NO: 2385077 - RNA, 19 nt, Artificial Sequence
  Description of Artificial Sequence: Synthetic oligonucleotide
  Antisense strand to SEQ ID NO: 2385076
uucagagucaucagagacc

SEQ ID NO: 2385078 - RNA, 19 nt, Artificial Sequence
  Description of Artificial Sequence: Synthetic oligonucleotide
  Sense strand starting at position 2607 of SEQ ID NO: 1886051
aucagacaucugugcagga

SEQ ID NO: 2385079 - RNA, 19 nt, Artificial Sequence
  Description of Artificial Sequence: Synthetic oligonucleotide
  Antisense strand to SEQ ID NO: 2385078
uccugcacagaugucugau

SEQ ID NO: 2385080 - RNA, 19 nt, Artificial Sequence
  Description of Artificial Sequence: Synthetic oligonucleotide
  Sense strand starting at position 2608 of SEQ ID NO: 1886051
ucagacaucugugcaggaa

SEQ ID NO: 2385081 - RNA, 19 nt, Artificial Sequence
  Description of Artificial Sequence: Synthetic oligonucleotide
  Antisense strand to SEQ ID NO: 2385080
uuccugcacagaugucuga

SEQ ID NO: 2385082 - RNA, 19 nt, Artificial Sequence
  Description of Artificial Sequence: Synthetic oligonucleotide
  Sense strand starting at position 2771 of SEQ ID NO: 1886051
aguaaagauuuagguaaag

SEQ ID NO: 2385083 - RNA, 19 nt, Artificial Sequence
  Description of Artificial Sequence: Synthetic oligonucleotide
  Antisense strand to SEQ ID NO: 2385082
cuuuaccuaaaucuuuacu

SEQ ID NO: 2385084 - RNA, 19 nt, Artificial Sequence
  Description of Artificial Sequence: Synthetic oligonucleotide
  Sense strand starting at position 2804 of SEQ ID NO: 1886051
gguccugugccucagauuu

SEQ ID NO: 2385085 - RNA, 19 nt, Artificial Sequence
  Description of Artificial Sequence: Synthetic oligonucleotide
  Antisense strand to SEQ ID NO: 2385084
aaaucugaggcacaggacc

SEQ ID NO: 2385086 - RNA, 19 nt, Artificial Sequence
  Description of Artificial Sequence: Synthetic oligonucleotide
  Sense strand starting at position 2839 of SEQ ID NO: 1886051
gggcaaugaagucagucaa

SEQ ID NO: 2385087 - RNA, 19 nt, Artificial Sequence
  Description of Artificial Sequence: Synthetic oligonucleotide
  Antisense strand to SEQ ID NO: 2385086
uugacugacuucauugccc

SEQ ID NO: 2385088 - RNA, 19 nt, Artificial Sequence
  Description of Artificial Sequence: Synthetic oligonucleotide
  Sense strand starting at position 2862 of SEQ ID NO: 1886051
acaggagugcuguaagacu

SEQ ID NO: 2385089 - RNA, 19 nt, Artificial Sequence
  Description of Artificial Sequence: Synthetic oligonucleotide
  Antisense strand to SEQ ID NO: 2385088
agucuuacagcacuccugu

SEQ ID NO: 2385090 - RNA, 19 nt, Artificial Sequence
  Description of Artificial Sequence: Synthetic oligonucleotide
  Sense strand starting at position 2933 of SEQ ID NO: 1886051
caaagauagggugguguuu

SEQ ID NO: 2385091 - RNA, 19 nt, Artificial Sequence
  Description of Artificial Sequence: Synthetic oligonucleotide
  Antisense strand to SEQ ID NO: 2385090
aaacaccacccuaucuuug

SEQ ID NO: 2385092 - RNA, 19 nt, Artificial Sequence
  Description of Artificial Sequence: Synthetic oligonucleotide
  Sense strand starting at position 3079 of SEQ ID NO: 1886051
ugguuauucccugaagcug

SEQ ID NO: 2385093 - RNA, 19 nt, Artificial Sequence
  Description of Artificial Sequence: Synthetic oligonucleotide
  Antisense strand to SEQ ID NO: 2385092
cagcuucagggaauaacca

SEQ ID NO: 2385094 - RNA, 19 nt, Artificial Sequence
  Description of Artificial Sequence: Synthetic oligonucleotide
  Sense strand starting at position 3095 of SEQ ID NO: 1886051
cuguuuacugcccagacau

SEQ ID NO: 2385095 - RNA, 19 nt, Artificial Sequence
  Description of Artificial Sequence: Synthetic oligonucleotide
  Antisense strand to SEQ ID NO: 2385094
augucugggcaguaaacag

SEQ ID NO: 2385096 - RNA, 19 nt, Artificial Sequence
  Description of Artificial Sequence: Synthetic oligonucleotide
  Sense strand starting at position 3195 of SEQ ID NO: 1886051
auacaugugcacuagugaa

SEQ ID NO: 2385097 - RNA, 19 nt, Artificial Sequence
  Description of Artificial Sequence: Synthetic oligonucleotide
  Antisense strand to SEQ ID NO: 2385096
uucacuagugcacauguau

SEQ ID NO: 2385098 - RNA, 19 nt, Artificial Sequence
  Description of Artificial Sequence: Synthetic oligonucleotide
  Sense strand starting at position 3359 of SEQ ID NO: 1886051
cgucucauagcagagaaua

SEQ ID NO: 2385099 - RNA, 19 nt, Artificial Sequence
  Description of Artificial Sequence: Synthetic oligonucleotide
  Antisense strand to SEQ ID NO: 2385098
uauucucugcuaugagacg

SEQ ID NO: 2385100 - RNA, 19 nt, Artificial Sequence
  Description of Artificial Sequence: Synthetic oligonucleotide
  Sense strand starting at position 3419 of SEQ ID NO: 1886051
cugcuauucccagacuggu

SEQ ID NO: 2385101 - RNA, 19 nt, Artificial Sequence
  Description of Artificial Sequence: Synthetic oligonucleotide
  Antisense strand to SEQ ID NO: 2385100
accagucugggaauagcag

SEQ ID NO: 2385102 - RNA, 19 nt, Artificial Sequence
  Description of Artificial Sequence: Synthetic oligonucleotide
  Sense strand starting at position 3436 of SEQ ID NO: 1886051
guaggacugacuugacuac

SEQ ID NO: 2385103 - RNA, 19 nt, Artificial Sequence
  Description of Artificial Sequence: Synthetic oligonucleotide
  Antisense strand to SEQ ID NO: 2385102
guagucaagucaguccuac

SEQ ID NO: 2385104 - RNA, 19 nt, Artificial Sequence
  Description of Artificial Sequence: Synthetic oligonucleotide
  Sense strand starting at position 3707 of SEQ ID NO: 1886051
caaauauguguggguccau

SEQ ID NO: 2385105 - RNA, 19 nt, Artificial Sequence
  Description of Artificial Sequence: Synthetic oligonucleotide
  Antisense strand to SEQ ID NO: 2385104
auggacccacacauauuug

SEQ ID NO: 2385106 - RNA, 19 nt, Artificial Sequence
  Description of Artificial Sequence: Synthetic oligonucleotide
  Sense strand starting at position 3708 of SEQ ID NO: 1886051
aaauauguguggguccaua

SEQ ID NO: 2385107 - RNA, 19 nt, Artificial Sequence
  Description of Artificial Sequence: Synthetic oligonucleotide
  Antisense strand to SEQ ID NO: 2385106
uauggacccacacauauuu

SEQ ID NO: 2385108 - RNA, 19 nt, Artificial Sequence
  Description of Artificial Sequence: Synthetic oligonucleotide
  Sense strand starting at position 3760 of SEQ ID NO: 1886051
auggcaucuccguauauug

SEQ ID NO: 2385109 - RNA, 19 nt, Artificial Sequence
  Description of Artificial Sequence: Synthetic oligonucleotide
  Antisense strand to SEQ ID NO: 2385108
caauauacggagaugccau

SEQ ID NO: 2385110 - RNA, 19 nt, Artificial Sequence
  Description of Artificial Sequence: Synthetic oligonucleotide
  Sense strand starting at position 3826 of SEQ ID NO: 1886051
agauguuagaugcaguuaa

SEQ ID NO: 2385111 - RNA, 19 nt, Artificial Sequence
  Description of Artificial Sequence: Synthetic oligonucleotide
  Antisense strand to SEQ ID NO: 2385110
uuaacugcaucuaacaucu

SEQ ID NO: 2385112 - RNA, 19 nt, Artificial Sequence
  Description of Artificial Sequence: Synthetic oligonucleotide
  Sense strand starting at position 209 of SEQ ID NO: 1886052
ggauaaugauggcuacaca

SEQ ID NO: 2385113 - RNA, 19 nt, Artificial Sequence
  Description of Artificial Sequence: Synthetic oligonucleotide
  Antisense strand to SEQ ID NO: 2385112
uguguagccaucauuaucc

SEQ ID NO: 2385114 - RNA, 19 nt, Artificial Sequence
  Description of Artificial Sequence: Synthetic oligonucleotide
  Sense strand starting at position 717 of SEQ ID NO: 1886052
uuccgucucucaguauauu

SEQ ID NO: 2385115 - RNA, 19 nt, Artificial Sequence
  Description of Artificial Sequence: Synthetic oligonucleotide
  Antisense strand to SEQ ID NO: 2385114
aauauacugagagacggaa

SEQ ID NO: 2385116 - RNA, 19 nt, Artificial Sequence
  Description of Artificial Sequence: Synthetic oligonucleotide
  Sense strand starting at position 718 of SEQ ID NO: 1886052
uccgucucucaguauauua

SEQ ID NO: 2385117 - RNA, 19 nt, Artificial Sequence
  Description of Artificial Sequence: Synthetic oligonucleotide
  Antisense strand to SEQ ID NO: 2385116
uaauauacugagagacgga

SEQ ID NO: 2385118 - RNA, 19 nt, Artificial Sequence
  Description of Artificial Sequence: Synthetic oligonucleotide
  Sense strand starting at position 726 of SEQ ID NO: 1886052
ucaguauauuaacggcaga

SEQ ID NO: 2385119 - RNA, 19 nt, Artificial Sequence
  Description of Artificial Sequence: Synthetic oligonucleotide
  Antisense strand to SEQ ID NO: 2385118
ucugccguuaauauacuga

SEQ ID NO: 2385120 - RNA, 19 nt, Artificial Sequence
  Description of Artificial Sequence: Synthetic oligonucleotide
  Sense strand starting at position 851 of SEQ ID NO: 1886052
ggagauugguggccacaca

SEQ ID NO: 2385121 - RNA, 19 nt, Artificial Sequence
  Description of Artificial Sequence: Synthetic oligonucleotide
  Antisense strand to SEQ ID NO: 2385120
uguguggccaccaaucucc

SEQ ID NO: 2385122 - RNA, 19 nt, Artificial Sequence
  Description of Artificial Sequence: Synthetic oligonucleotide
  Sense strand starting at position 929 of SEQ ID NO: 1886052
cauugugucucucagucua

SEQ ID NO: 2385123 - RNA, 19 nt, Artificial Sequence
  Description of Artificial Sequence: Synthetic oligonucleotide
  Antisense strand to SEQ ID NO: 2385122
uagacugagagacacaaug

SEQ ID NO: 2385124 - RNA, 19 nt, Artificial Sequence
  Description of Artificial Sequence: Synthetic oligonucleotide
  Sense strand starting at position 931 of SEQ ID NO: 1886052
uugugucucucagucuauu

SEQ ID NO: 2385125 - RNA, 19 nt, Artificial Sequence
  Description of Artificial Sequence: Synthetic oligonucleotide
  Antisense strand to SEQ ID NO: 2385124
aauagacugagagacacaa

SEQ ID NO: 2385126 - RNA, 19 nt, Artificial Sequence
  Description of Artificial Sequence: Synthetic oligonucleotide
  Sense strand starting at position 1059 of SEQ ID NO: 1886052
agucuauuaacagggcaga

SEQ ID NO: 2385127 - RNA, 19 nt, Artificial Sequence
  Description of Artificial Sequence: Synthetic oligonucleotide
  Antisense strand to SEQ ID NO: 2385126
ucugcccuguuaauagacu

SEQ ID NO: 2385128 - RNA, 19 nt, Artificial Sequence
  Description of Artificial Sequence: Synthetic oligonucleotide
  Sense strand starting at position 1076 of SEQ ID NO: 1886052
gacggagcccaggauugau

SEQ ID NO: 2385129 - RNA, 19 nt, Artificial Sequence
  Description of Artificial Sequence: Synthetic oligonucleotide
  Antisense strand to SEQ ID NO: 2385128
aucaauccugggcuccguc

SEQ ID NO: 2385130 - RNA, 19 nt, Artificial Sequence
  Description of Artificial Sequence: Synthetic oligonucleotide
  Sense strand starting at position 1085 of SEQ ID NO: 1886052
caggauugauggcuacaca

SEQ ID NO: 2385131 - RNA, 19 nt, Artificial Sequence
  Description of Artificial Sequence: Synthetic oligonucleotide
  Antisense strand to SEQ ID NO: 2385130
uguguagccaucaauccug

SEQ ID NO: 2385132 - RNA, 19 nt, Artificial Sequence
  Description of Artificial Sequence: Synthetic oligonucleotide
  Sense strand starting at position 1169 of SEQ ID NO: 1886052
aucucucagucuguuaaca

SEQ ID NO: 2385133 - RNA, 19 nt, Artificial Sequence
  Description of Artificial Sequence: Synthetic oligonucleotide
  Antisense strand to SEQ ID NO: 2385132
uguuaacagacugagagau

SEQ ID NO: 2385134 - RNA, 19 nt, Artificial Sequence
  Description of Artificial Sequence: Synthetic oligonucleotide
  Sense strand starting at position 1202 of SEQ ID NO: 1886052
caggauugauggcuacacu

SEQ ID NO: 2385135 - RNA, 19 nt, Artificial Sequence
  Description of Artificial Sequence: Synthetic oligonucleotide
  Antisense strand to SEQ ID NO: 2385134
aguguagccaucaauccug

SEQ ID NO: 2385136 - RNA, 19 nt, Artificial Sequence
  Description of Artificial Sequence: Synthetic oligonucleotide
  Sense strand starting at position 1294 of SEQ ID NO: 1886052
uucugucucucagucuauu

SEQ ID NO: 2385137 - RNA, 19 nt, Artificial Sequence
  Description of Artificial Sequence: Synthetic oligonucleotide
  Antisense strand to SEQ ID NO: 2385136
aauagacugagagacagaa

SEQ ID NO: 2385138 - RNA, 19 nt, Artificial Sequence
  Description of Artificial Sequence: Synthetic oligonucleotide
  Sense strand starting at position 1348 of SEQ ID NO: 1886052
ccgcgcuguccuggcaaau

SEQ ID NO: 2385139 - RNA, 19 nt, Artificial Sequence
  Description of Artificial Sequence: Synthetic oligonucleotide
  Antisense strand to SEQ ID NO: 2385138
auuugccaggacagcgcgg

SEQ ID NO: 2385140 - RNA, 19 nt, Artificial Sequence
  Description of Artificial Sequence: Synthetic oligonucleotide
  Sense strand starting at position 1375 of SEQ ID NO: 1886052
cgauucugaguucaauggu

SEQ ID NO: 2385141 - RNA, 19 nt, Artificial Sequence
  Description of Artificial Sequence: Synthetic oligonucleotide
  Antisense strand to SEQ ID NO: 2385140
accauugaacucagaaucg

SEQ ID NO: 2385142 - RNA, 19 nt, Artificial Sequence
  Description of Artificial Sequence: Synthetic oligonucleotide
  Sense strand starting at position 1455 of SEQ ID NO: 1886052
ggcugugcacaucacaauu

SEQ ID NO: 2385143 - RNA, 19 nt, Artificial Sequence
  Description of Artificial Sequence: Synthetic oligonucleotide
  Antisense strand to SEQ ID NO: 2385142
aauugugaugugcacagcc

SEQ ID NO: 2385144 - RNA, 19 nt, Artificial Sequence
  Description of Artificial Sequence: Synthetic oligonucleotide
  Sense strand starting at position 1695 of SEQ ID NO: 1886052
uuugcauauuuaguagagu

SEQ ID NO: 2385145 - RNA, 19 nt, Artificial Sequence
  Description of Artificial Sequence: Synthetic oligonucleotide
  Antisense strand to SEQ ID NO: 2385144
acucuacuaaauaugcaaa

SEQ ID NO: 2385146 - RNA, 19 nt, Artificial Sequence
  Description of Artificial Sequence: Synthetic oligonucleotide
  Sense strand starting at position 1838 of SEQ ID NO: 1886052
uggugcuucugguuugaga

SEQ ID NO: 2385147 - RNA, 19 nt, Artificial Sequence
  Description of Artificial Sequence: Synthetic oligonucleotide
  Antisense strand to SEQ ID NO: 2385146
ucucaaaccagaagcacca

SEQ ID NO: 2385148 - RNA, 19 nt, Artificial Sequence
  Description of Artificial Sequence: Synthetic oligonucleotide
  Sense strand starting at position 1840 of SEQ ID NO: 1886052
gugcuucugguuugagaug

SEQ ID NO: 2385149 - RNA, 19 nt, Artificial Sequence
  Description of Artificial Sequence: Synthetic oligonucleotide
  Antisense strand to SEQ ID NO: 2385148
caucucaaaccagaagcac

SEQ ID NO: 2385150 - RNA, 19 nt, Artificial Sequence
  Description of Artificial Sequence: Synthetic oligonucleotide
  Sense strand starting at position 1893 of SEQ ID NO: 1886052
gcugcaaucuaagcuuacu

SEQ ID NO: 2385151 - RNA, 19 nt, Artificial Sequence
  Description of Artificial Sequence: Synthetic oligonucleotide
  Antisense strand to SEQ ID NO: 2385150
aguaagcuuagauugcagc

SEQ ID NO: 2385152 - RNA, 19 nt, Artificial Sequence
  Description of Artificial Sequence: Synthetic oligonucleotide
  Sense strand starting at position 2335 of SEQ ID NO: 1886052
aagggaucuuaccaaguug

SEQ ID NO: 2385153 - RNA, 19 nt, Artificial Sequence
  Description of Artificial Sequence: Synthetic oligonucleotide
  Antisense strand to SEQ ID NO: 2385152
caacuugguaagaucccuu

SEQ ID NO: 2385154 - RNA, 19 nt, Artificial Sequence
  Description of Artificial Sequence: Synthetic oligonucleotide
  Sense strand starting at position 2421 of SEQ ID NO: 1886052
gugcuacauuucugcacaa

SEQ ID NO: 2385155 - RNA, 19 nt, Artificial Sequence
  Description of Artificial Sequence: Synthetic oligonucleotide
  Antisense strand to SEQ ID NO: 2385154
uugugcagaaauguagcac

SEQ ID NO: 2385156 - RNA, 19 nt, Artificial Sequence
  Description of Artificial Sequence: Synthetic oligonucleotide
  Sense strand starting at position 2508 of SEQ ID NO: 1886052
auuauuccuuuagaaggua

SEQ ID NO: 2385157 - RNA, 19 nt, Artificial Sequence
  Description of Artificial Sequence: Synthetic oligonucleotide
  Antisense strand to SEQ ID NO: 2385156
uaccuucuaaaggaauaau

SEQ ID NO: 2385158 - RNA, 19 nt, Artificial Sequence
  Description of Artificial Sequence: Synthetic oligonucleotide
  Sense strand starting at position 2539 of SEQ ID NO: 1886052
caagaagcuguaggauaaa

SEQ ID NO: 2385159 - RNA, 19 nt, Artificial Sequence
  Description of Artificial Sequence: Synthetic oligonucleotide
  Antisense strand to SEQ ID NO: 2385158
uuuauccuacagcuucuug

SEQ ID NO: 2385160 - RNA, 19 nt, Artificial Sequence
  Description of Artificial Sequence: Synthetic oligonucleotide
  Sense strand starting at position 2582 of SEQ ID NO: 1886052
augaaacacccaggugauu

SEQ ID NO: 2385161 - RNA, 19 nt, Artificial Sequence
  Description of Artificial Sequence: Synthetic oligonucleotide
  Antisense strand to SEQ ID NO: 2385160
aaucaccuggguguuucau

SEQ ID NO: 2385162 - RNA, 19 nt, Artificial Sequence
  Description of Artificial Sequence: Synthetic oligonucleotide
  Sense strand starting at position 2618 of SEQ ID NO: 1886052
cccuuucacgugggugauu

SEQ ID NO: 2385163 - RNA, 19 nt, Artificial Sequence
  Description of Artificial Sequence: Synthetic oligonucleotide
  Antisense strand to SEQ ID NO: 2385162
aaucacccacgugaaaggg

SEQ ID NO: 2385164 - RNA, 19 nt, Artificial Sequence
  Description of Artificial Sequence: Synthetic oligonucleotide
  Sense strand starting at position 2619 of SEQ ID NO: 1886052
ccuuucacgugggugauuu

SEQ ID NO: 2385165 - RNA, 19 nt, Artificial Sequence
  Description of Artificial Sequence: Synthetic oligonucleotide
  Antisense strand to SEQ ID NO: 2385164
aaaucacccacgugaaagg

SEQ ID NO: 2385166 - RNA, 19 nt, Artificial Sequence
  Description of Artificial Sequence: Synthetic oligonucleotide
  Sense strand starting at position 2820 of SEQ ID NO: 1886052
gugguuaauuuacacaaau

SEQ ID NO: 2385167 - RNA, 19 nt, Artificial Sequence
  Description of Artificial Sequence: Synthetic oligonucleotide
  Antisense strand to SEQ ID NO: 2385166
auuuguguaaauuaaccac

SEQ ID NO: 2385168 - RNA, 19 nt, Artificial Sequence
  Description of Artificial Sequence: Synthetic oligonucleotide
  Sense strand starting at position 2934 of SEQ ID NO: 1886052
ggaauuagcagcugggaua

SEQ ID NO: 2385169 - RNA, 19 nt, Artificial Sequence
  Description of Artificial Sequence: Synthetic oligonucleotide
  Antisense strand to SEQ ID NO: 2385168
uaucccagcugcuaauucc

SEQ ID NO: 2385170 - RNA, 19 nt, Artificial Sequence
  Description of Artificial Sequence: Synthetic oligonucleotide
  Sense strand starting at position 3024 of SEQ ID NO: 1886052
gcuuaagaaccaugccaau

SEQ ID NO: 2385171 - RNA, 19 nt, Artificial Sequence
  Description of Artificial Sequence: Synthetic oligonucleotide
  Antisense strand to SEQ ID NO: 2385170
auuggcaugguucuuaagc

SEQ ID NO: 2385172 - RNA, 19 nt, Artificial Sequence
  Description of Artificial Sequence: Synthetic oligonucleotide
  Sense strand starting at position 3537 of SEQ ID NO: 1886052
accaauugcugagggaaga

SEQ ID NO: 2385173 - RNA, 19 nt, Artificial Sequence
  Description of Artificial Sequence: Synthetic oligonucleotide
  Antisense strand to SEQ ID NO: 2385172
ucuucccucagcaauuggu

SEQ ID NO: 2385174 - RNA, 19 nt, Artificial Sequence
  Description of Artificial Sequence: Synthetic oligonucleotide
  Sense strand starting at position 3574 of SEQ ID NO: 1886052
ggauaaacaugucagcugu

SEQ ID NO: 2385175 - RNA, 19 nt, Artificial Sequence
  Description of Artificial Sequence: Synthetic oligonucleotide
  Antisense strand to SEQ ID NO: 2385174
acagcugacauguuuaucc

SEQ ID NO: 2385176 - RNA, 19 nt, Artificial Sequence
  Description of Artificial Sequence: Synthetic oligonucleotide
  Sense strand starting at position 3576 of SEQ ID NO: 1886052
auaaacaugucagcuguuu

SEQ ID NO: 2385177 - RNA, 19 nt, Artificial Sequence
  Description of Artificial Sequence: Synthetic oligonucleotide
  Antisense strand to SEQ ID NO: 2385176
aaacagcugacauguuuau

SEQ ID NO: 2385178 - RNA, 19 nt, Artificial Sequence
  Description of Artificial Sequence: Synthetic oligonucleotide
  Sense strand starting at position 3589 of SEQ ID NO: 1886052
cuguuuggcuuuccacaau

SEQ ID NO: 2385179 - RNA, 19 nt, Artificial Sequence
  Description of Artificial Sequence: Synthetic oligonucleotide
  Antisense strand to SEQ ID NO: 2385178
auuguggaaagccaaacag

SEQ ID NO: 2385180 - RNA, 19 nt, Artificial Sequence
  Description of Artificial Sequence: Synthetic oligonucleotide
  Sense strand starting at position 3623 of SEQ ID NO: 1886052
gccuccguguccugauguu

SEQ ID NO: 2385181 - RNA, 19 nt, Artificial Sequence
  Description of Artificial Sequence: Synthetic oligonucleotide
  Antisense strand to SEQ ID NO: 2385180
aacaucaggacacggaggc

SEQ ID NO: 2385182 - RNA, 19 nt, Artificial Sequence
  Description of Artificial Sequence: Synthetic oligonucleotide
  Sense strand starting at position 3747 of SEQ ID NO: 1886052
ggugccaucagggauggau

SEQ ID NO: 2385183 - RNA, 19 nt, Artificial Sequence
  Description of Artificial Sequence: Synthetic oligonucleotide
  Antisense strand to SEQ ID NO: 2385182
auccaucccugauggcacc

SEQ ID NO: 2385184 - RNA, 19 nt, Artificial Sequence
  Description of Artificial Sequence: Synthetic oligonucleotide
  Sense strand starting at position 3761 of SEQ ID NO: 1886052
uggaucuguccaugcagga

SEQ ID NO: 2385185 - RNA, 19 nt, Artificial Sequence
  Description of Artificial Sequence: Synthetic oligonucleotide
  Antisense strand to SEQ ID NO: 2385184
uccugcauggacagaucca

SEQ ID NO: 2385186 - RNA, 19 nt, Artificial Sequence
  Description of Artificial Sequence: Synthetic oligonucleotide
  Sense strand starting at position 3839 of SEQ ID NO: 1886052
guggaccagugauugauua

SEQ ID NO: 2385187 - RNA, 19 nt, Artificial Sequence
  Description of Artificial Sequence: Synthetic oligonucleotide
  Antisense strand to SEQ ID NO: 2385186
uaaucaaucacugguccac

SEQ ID NO: 2385188 - RNA, 19 nt, Artificial Sequence
  Description of Artificial Sequence: Synthetic oligonucleotide
  Sense strand starting at position 340 of SEQ ID NO: 1886053
gcaugauuuccuugagcuu

SEQ ID NO: 2385189 - RNA, 19 nt, Artificial Sequence
  Description of Artificial Sequence: Synthetic oligonucleotide
  Antisense strand to SEQ ID NO: 2385188
aagcucaaggaaaucaugc

SEQ ID NO: 2385190 - RNA, 19 nt, Artificial Sequence
  Description of Artificial Sequence: Synthetic oligonucleotide
  Sense strand starting at position 374 of SEQ ID NO: 1886053
uuuacaagugacuguauca

SEQ ID NO: 2385191 - RNA, 19 nt, Artificial Sequence
  Description of Artificial Sequence: Synthetic oligonucleotide
  Antisense strand to SEQ ID NO: 2385190
ugauacagucacuuguaaa

SEQ ID NO: 2385192 - RNA, 19 nt, Artificial Sequence
  Description of Artificial Sequence: Synthetic oligonucleotide
  Sense strand starting at position 612 of SEQ ID NO: 1886053
guguaauaagaaugaacua

SEQ ID NO: 2385193 - RNA, 19 nt, Artificial Sequence
  Description of Artificial Sequence: Synthetic oligonucleotide
  Antisense strand to SEQ ID NO: 2385192
uaguucauucuuauuacac

SEQ ID NO: 2385194 - RNA, 19 nt, Artificial Sequence
  Description of Artificial Sequence: Synthetic oligonucleotide
  Sense strand starting at position 680 of SEQ ID NO: 1886053
cauauuugucaguguacau

SEQ ID NO: 2385195 - RNA, 19 nt, Artificial Sequence
  Description of Artificial Sequence: Synthetic oligonucleotide
  Antisense strand to SEQ ID NO: 2385194
auguacacugacaaauaug

SEQ ID NO: 2385196 - RNA, 19 nt, Artificial Sequence
  Description of Artificial Sequence: Synthetic oligonucleotide
  Sense strand starting at position 722 of SEQ ID NO: 1886053
uuaauagaguucuccagag

SEQ ID NO: 2385197 - RNA, 19 nt, Artificial Sequence
  Description of Artificial Sequence: Synthetic oligonucleotide
  Antisense strand to SEQ ID NO: 2385196
cucuggagaacucuauuaa

SEQ ID NO: 2385198 - RNA, 19 nt, Artificial Sequence
  Description of Artificial Sequence: Synthetic oligonucleotide
  Sense strand starting at position 958 of SEQ ID NO: 1886053
aaugguuagccugacuaua

SEQ ID NO: 2385199 - RNA, 19 nt, Artificial Sequence
  Description of Artificial Sequence: Synthetic oligonucleotide
  Antisense strand to SEQ ID NO: 2385198
uauagucaggcuaaccauu

SEQ ID NO: 2385200 - RNA, 19 nt, Artificial Sequence
  Description of Artificial Sequence: Synthetic oligonucleotide
  Sense strand starting at position 1041 of SEQ ID NO: 1886053
gaggucuuggcuuagacaa

SEQ ID NO: 2385201 - RNA, 19 nt, Artificial Sequence
  Description of Artificial Sequence: Synthetic oligonucleotide
  Antisense strand to SEQ ID NO: 2385200
uugucuaagccaagaccuc

SEQ ID NO: 2385202 - RNA, 19 nt, Artificial Sequence
  Description of Artificial Sequence: Synthetic oligonucleotide
  Sense strand starting at position 1049 of SEQ ID NO: 1886053
ggcuuagacaacuauguag

SEQ ID NO: 2385203 - RNA, 19 nt, Artificial Sequence
  Description of Artificial Sequence: Synthetic oligonucleotide
  Antisense strand to SEQ ID NO: 2385202
cuacauaguugucuaagcc

SEQ ID NO: 2385204 - RNA, 19 nt, Artificial Sequence
  Description of Artificial Sequence: Synthetic oligonucleotide
  Sense strand starting at position 1060 of SEQ ID NO: 1886053
cuauguagaguugauggua

SEQ ID NO: 2385205 - RNA, 19 nt, Artificial Sequence
  Description of Artificial Sequence: Synthetic oligonucleotide
  Antisense strand to SEQ ID NO: 2385204
uaccaucaacucuacauag

SEQ ID NO: 2385206 - RNA, 19 nt, Artificial Sequence
  Description of Artificial Sequence: Synthetic oligonucleotide
  Sense strand starting at position 1378 of SEQ ID NO: 1886053
uaaacauugucaguaguga

SEQ ID NO: 2385207 - RNA, 19 nt, Artificial Sequence
  Description of Artificial Sequence: Synthetic oligonucleotide
  Antisense strand to SEQ ID NO: 2385206
ucacuacugacaauguuua

SEQ ID NO: 2385208 - RNA, 19 nt, Artificial Sequence
  Description of Artificial Sequence: Synthetic oligonucleotide
  Sense strand starting at position 1379 of SEQ ID NO: 1886053
aaacauugucaguagugag

SEQ ID NO: 2385209 - RNA, 19 nt, Artificial Sequence
  Description of Artificial Sequence: Synthetic oligonucleotide
  Antisense strand to SEQ ID NO: 2385208
cucacuacugacaauguuu

SEQ ID NO: 2385210 - RNA, 19 nt, Artificial Sequence
  Description of Artificial Sequence: Synthetic oligonucleotide
  Sense strand starting at position 1383 of SEQ ID NO: 1886053
auugucaguagugagacaa

SEQ ID NO: 2385211 - RNA, 19 nt, Artificial Sequence
  Description of Artificial Sequence: Synthetic oligonucleotide
  Antisense strand to SEQ ID NO: 2385210
uugucucacuacugacaau

SEQ ID NO: 2385212 - RNA, 19 nt, Artificial Sequence
  Description of Artificial Sequence: Synthetic oligonucleotide
  Sense strand starting at position 1698 of SEQ ID NO: 1886053
gccagaaaucuugguuaag

SEQ ID NO: 2385213 - RNA, 19 nt, Artificial Sequence
  Description of Artificial Sequence: Synthetic oligonucleotide
  Antisense strand to SEQ ID NO: 2385212
cuuaaccaagauuucuggc

SEQ ID NO: 2385214 - RNA, 19 nt, Artificial Sequence
  Description of Artificial Sequence: Synthetic oligonucleotide
  Sense strand starting at position 1699 of SEQ ID NO: 1886053
ccagaaaucuugguuaagu

SEQ ID NO: 2385215 - RNA, 19 nt, Artificial Sequence
  Description of Artificial Sequence: Synthetic oligonucleotide
  Antisense strand to SEQ ID NO: 2385214
acuuaaccaagauuucugg

SEQ ID NO: 2385216 - RNA, 19 nt, Artificial Sequence
  Description of Artificial Sequence: Synthetic oligonucleotide
  Sense strand starting at position 1700 of SEQ ID NO: 1886053
cagaaaucuugguuaaguu

SEQ ID NO: 2385217 - RNA, 19 nt, Artificial Sequence
  Description of Artificial Sequence: Synthetic oligonucleotide
  Antisense strand to SEQ ID NO: 2385216
aacuuaaccaagauuucug

SEQ ID NO: 2385218 - RNA, 19 nt, Artificial Sequence
  Description of Artificial Sequence: Synthetic oligonucleotide
  Sense strand starting at position 1818 of SEQ ID NO: 1886053
uugggacuauuggugaauu

SEQ ID NO: 2385219 - RNA, 19 nt, Artificial Sequence
  Description of Artificial Sequence: Synthetic oligonucleotide
  Antisense strand to SEQ ID NO: 2385218
aauucaccaauagucccaa

SEQ ID NO: 2385220 - RNA, 19 nt, Artificial Sequence
  Description of Artificial Sequence: Synthetic oligonucleotide
  Sense strand starting at position 2143 of SEQ ID NO: 1886053
ggcugacuauuggugaaau

SEQ ID NO: 2385221 - RNA, 19 nt, Artificial Sequence
  Description of Artificial Sequence: Synthetic oligonucleotide
  Antisense strand to SEQ ID NO: 2385220
auuucaccaauagucagcc

SEQ ID NO: 2385222 - RNA, 19 nt, Artificial Sequence
  Description of Artificial Sequence: Synthetic oligonucleotide
  Sense strand starting at position 2164 of SEQ ID NO: 1886053
uaaugcggacuugauaauu

SEQ ID NO: 2385223 - RNA, 19 nt, Artificial Sequence
  Description of Artificial Sequence: Synthetic oligonucleotide
  Antisense strand to SEQ ID NO: 2385222
aauuaucaaguccgcauua

SEQ ID NO: 2385224 - RNA, 19 nt, Artificial Sequence
  Description of Artificial Sequence: Synthetic oligonucleotide
  Sense strand starting at position 2169 of SEQ ID NO: 1886053
cggacuugauaauuagaug

SEQ ID NO: 2385225 - RNA, 19 nt, Artificial Sequence
  Description of Artificial Sequence: Synthetic oligonucleotide
  Antisense strand to SEQ ID NO: 2385224
caucuaauuaucaaguccg

SEQ ID NO: 2385226 - RNA, 19 nt, Artificial Sequence
  Description of Artificial Sequence: Synthetic oligonucleotide
  Sense strand starting at position 2321 of SEQ ID NO: 1886053
acaauuguguuuguagaaa

SEQ ID NO: 2385227 - RNA, 19 nt, Artificial Sequence
  Description of Artificial Sequence: Synthetic oligonucleotide
  Antisense strand to SEQ ID NO: 2385226
uuucuacaaacacaauugu

SEQ ID NO: 2385228 - RNA, 19 nt, Artificial Sequence
  Description of Artificial Sequence: Synthetic oligonucleotide
  Sense strand starting at position 2537 of SEQ ID NO: 1886053
agauguuuccuggagggca

SEQ ID NO: 2385229 - RNA, 19 nt, Artificial Sequence
  Description of Artificial Sequence: Synthetic oligonucleotide
  Antisense strand to SEQ ID NO: 2385228
ugcccuccaggaaacaucu

SEQ ID NO: 2385230 - RNA, 19 nt, Artificial Sequence
  Description of Artificial Sequence: Synthetic oligonucleotide
  Sense strand starting at position 2539 of SEQ ID NO: 1886053
auguuuccuggagggcaaa

SEQ ID NO: 2385231 - RNA, 19 nt, Artificial Sequence
  Description of Artificial Sequence: Synthetic oligonucleotide
  Antisense strand to SEQ ID NO: 2385230
uuugcccuccaggaaacau

SEQ ID NO: 2385232 - RNA, 19 nt, Artificial Sequence
  Description of Artificial Sequence: Synthetic oligonucleotide
  Sense strand starting at position 2565 of SEQ ID NO: 1886053
cugguugagaaucagucua

SEQ ID NO: 2385233 - RNA, 19 nt, Artificial Sequence
  Description of Artificial Sequence: Synthetic oligonucleotide
  Antisense strand to SEQ ID NO: 2385232
uagacugauucucaaccag

SEQ ID NO: 2385234 - RNA, 19 nt, Artificial Sequence
  Description of Artificial Sequence: Synthetic oligonucleotide
  Sense strand starting at position 2567 of SEQ ID NO: 1886053
gguugagaaucagucuacu

SEQ ID NO: 2385235 - RNA, 19 nt, Artificial Sequence
  Description of Artificial Sequence: Synthetic oligonucleotide
  Antisense strand to SEQ ID NO: 2385234
aguagacugauucucaacc

SEQ ID NO: 2385236 - RNA, 19 nt, Artificial Sequence
  Description of Artificial Sequence: Synthetic oligonucleotide
  Sense strand starting at position 2690 of SEQ ID NO: 1886053
gccaauuugucaccagcaa

SEQ ID NO: 2385237 - RNA, 19 nt, Artificial Sequence
  Description of Artificial Sequence: Synthetic oligonucleotide
  Antisense strand to SEQ ID NO: 2385236
uugcuggugacaaauuggc

SEQ ID NO: 2385238 - RNA, 19 nt, Artificial Sequence
  Description of Artificial Sequence: Synthetic oligonucleotide
  Sense strand starting at position 2752 of SEQ ID NO: 1886053
gggaaauaacgucgaaucu

SEQ ID NO: 2385239 - RNA, 19 nt, Artificial Sequence
  Description of Artificial Sequence: Synthetic oligonucleotide
  Antisense strand to SEQ ID NO: 2385238
agauucgacguuauuuccc

SEQ ID NO: 2385240 - RNA, 19 nt, Artificial Sequence
  Description of Artificial Sequence: Synthetic oligonucleotide
  Sense strand starting at position 2753 of SEQ ID NO: 1886053
ggaaauaacgucgaaucua

SEQ ID NO: 2385241 - RNA, 19 nt, Artificial Sequence
  Description of Artificial Sequence: Synthetic oligonucleotide
  Antisense strand to SEQ ID NO: 2385240
uagauucgacguuauuucc

SEQ ID NO: 2385242 - RNA, 19 nt, Artificial Sequence
  Description of Artificial Sequence: Synthetic oligonucleotide
  Sense strand starting at position 2800 of SEQ ID NO: 1886053
uagaaaugguaaguauaug

SEQ ID NO: 2385243 - RNA, 19 nt, Artificial Sequence
  Description of Artificial Sequence: Synthetic oligonucleotide
  Antisense strand to SEQ ID NO: 2385242
cauauacuuaccauuucua

SEQ ID NO: 2385244 - RNA, 19 nt, Artificial Sequence
  Description of Artificial Sequence: Synthetic oligonucleotide
  Sense strand starting at position 2805 of SEQ ID NO: 1886053
augguaaguauaugaguaa

SEQ ID NO: 2385245 - RNA, 19 nt, Artificial Sequence
  Description of Artificial Sequence: Synthetic oligonucleotide
  Antisense strand to SEQ ID NO: 2385244
uuacucauauacuuaccau

SEQ ID NO: 2385246 - RNA, 19 nt, Artificial Sequence
  Description of Artificial Sequence: Synthetic oligonucleotide
  Sense strand starting at position 2808 of SEQ ID NO: 1886053
guaaguauaugaguaacag

SEQ ID NO: 2385247 - RNA, 19 nt, Artificial Sequence
  Description of Artificial Sequence: Synthetic oligonucleotide
  Antisense strand to SEQ ID NO: 2385246
cuguuacucauauacuuac

SEQ ID NO: 2385248 - RNA, 19 nt, Artificial Sequence
  Description of Artificial Sequence: Synthetic oligonucleotide
  Sense strand starting at position 2906 of SEQ ID NO: 1886053
ggguuuaugauguggacag

SEQ ID NO: 2385249 - RNA, 19 nt, Artificial Sequence
  Description of Artificial Sequence: Synthetic oligonucleotide
  Antisense strand to SEQ ID NO: 2385248
cuguccacaucauaaaccc

SEQ ID NO: 2385250 - RNA, 19 nt, Artificial Sequence
  Description of Artificial Sequence: Synthetic oligonucleotide
  Sense strand starting at position 2969 of SEQ ID NO: 1886053
aaggaaauguuaccgucau

SEQ ID NO: 2385251 - RNA, 19 nt, Artificial Sequence
  Description of Artificial Sequence: Synthetic oligonucleotide
  Antisense strand to SEQ ID NO: 2385250
augacgguaacauuuccuu

SEQ ID NO: 2385252 - RNA, 19 nt, Artificial Sequence
  Description of Artificial Sequence: Synthetic oligonucleotide
  Sense strand starting at position 3232 of SEQ ID NO: 1886053
ucauacauucuaugaguuu

SEQ ID NO: 2385253 - RNA, 19 nt, Artificial Sequence
  Description of Artificial Sequence: Synthetic oligonucleotide
  Antisense strand to SEQ ID NO: 2385252
aaacucauagaauguauga

SEQ ID NO: 2385254 - RNA, 19 nt, Artificial Sequence
  Description of Artificial Sequence: Synthetic oligonucleotide
  Sense strand starting at position 3238 of SEQ ID NO: 1886053
auucuaugaguuuaggcaa

SEQ ID NO: 2385255 - RNA, 19 nt, Artificial Sequence
  Description of Artificial Sequence: Synthetic oligonucleotide
  Antisense strand to SEQ ID NO: 2385254
uugccuaaacucauagaau

SEQ ID NO: 2385256 - RNA, 19 nt, Artificial Sequence
  Description of Artificial Sequence: Synthetic oligonucleotide
  Sense strand starting at position 3241 of SEQ ID NO: 1886053
cuaugaguuuaggcaaauu

SEQ ID NO: 2385257 - RNA, 19 nt, Artificial Sequence
  Description of Artificial Sequence: Synthetic oligonucleotide
  Antisense strand to SEQ ID NO: 2385256
aauuugccuaaacucauag

SEQ ID NO: 2385258 - RNA, 19 nt, Artificial Sequence
  Description of Artificial Sequence: Synthetic oligonucleotide
  Sense strand starting at position 3696 of SEQ ID NO: 1886053
caagguagagacugucaua

SEQ ID NO: 2385259 - RNA, 19 nt, Artificial Sequence
  Description of Artificial Sequence: Synthetic oligonucleotide
  Antisense strand to SEQ ID NO: 2385258
uaugacagucucuaccuug

SEQ ID NO: 2385260 - RNA, 19 nt, Artificial Sequence
  Description of Artificial Sequence: Synthetic oligonucleotide
  Sense strand starting at position 3737 of SEQ ID NO: 1886053
acuaauguugucuaccaga

SEQ ID NO: 2385261 - RNA, 19 nt, Artificial Sequence
  Description of Artificial Sequence: Synthetic oligonucleotide
  Antisense strand to SEQ ID NO: 2385260
ucugguagacaacauuagu

SEQ ID NO: 2385262 - RNA, 19 nt, Artificial Sequence
  Description of Artificial Sequence: Synthetic oligonucleotide
  Sense strand starting at position 3742 of SEQ ID NO: 1886053
uguugucuaccagaaacau

SEQ ID NO: 2385263 - RNA, 19 nt, Artificial Sequence
  Description of Artificial Sequence: Synthetic oligonucleotide
  Antisense strand to SEQ ID NO: 2385262
auguuucugguagacaaca

SEQ ID NO: 2385264 - RNA, 19 nt, Artificial Sequence
  Description of Artificial Sequence: Synthetic oligonucleotide
  Sense strand starting at position 3963 of SEQ ID NO: 1886053
auauuauuguccucugaug

SEQ ID NO: 2385265 - RNA, 19 nt, Artificial Sequence
  Description of Artificial Sequence: Synthetic oligonucleotide
  Antisense strand to SEQ ID NO: 2385264
caucagaggacaauaauau

SEQ ID NO: 2385266 - RNA, 19 nt, Artificial Sequence
  Description of Artificial Sequence: Synthetic oligonucleotide
  Sense strand starting at position 3975 of SEQ ID NO: 1886053
ucugaugaauugguuauua

SEQ ID NO: 2385267 - RNA, 19 nt, Artificial Sequence
  Description of Artificial Sequence: Synthetic oligonucleotide
  Antisense strand to SEQ ID NO: 2385266
uaauaaccaauucaucaga

SEQ ID NO: 2385268 - RNA, 19 nt, Artificial Sequence
  Description of Artificial Sequence: Synthetic oligonucleotide
  Sense strand starting at position 325 of SEQ ID NO: 1886054
caaggauacugaggcaaga

SEQ ID NO: 2385269 - RNA, 19 nt, Artificial Sequence
  Description of Artificial Sequence: Synthetic oligonucleotide
  Antisense strand to SEQ ID NO: 2385268
ucuugccucaguauccuug

SEQ ID NO: 2385270 - RNA, 19 nt, Artificial Sequence
  Description of Artificial Sequence: Synthetic oligonucleotide
  Sense strand starting at position 434 of SEQ ID NO: 1886054
ucuguaaauuccugucuca

SEQ ID NO: 2385271 - RNA, 19 nt, Artificial Sequence
  Description of Artificial Sequence: Synthetic oligonucleotide
  Antisense strand to SEQ ID NO: 2385270
ugagacaggaauuuacaga

SEQ ID NO: 2385272 - RNA, 19 nt, Artificial Sequence
  Description of Artificial Sequence: Synthetic oligonucleotide
  Sense strand starting at position 437 of SEQ ID NO: 1886054
guaaauuccugucucacag

SEQ ID NO: 2385273 - RNA, 19 nt, Artificial Sequence
  Description of Artificial Sequence: Synthetic oligonucleotide
  Antisense strand to SEQ ID NO: 2385272
cugugagacaggaauuuac

SEQ ID NO: 2385274 - RNA, 19 nt, Artificial Sequence
  Description of Artificial Sequence: Synthetic oligonucleotide
  Sense strand starting at position 441 of SEQ ID NO: 1886054
auuccugucucacaggauu

SEQ ID NO: 2385275 - RNA, 19 nt, Artificial Sequence
  Description of Artificial Sequence: Synthetic oligonucleotide
  Antisense strand to SEQ ID NO: 2385274
aauccugugagacaggaau

SEQ ID NO: 2385276 - RNA, 19 nt, Artificial Sequence
  Description of Artificial Sequence: Synthetic oligonucleotide
  Sense strand starting at position 670 of SEQ ID NO: 1886054
gcgagcucucccgguguca

SEQ ID NO: 2385277 - RNA, 19 nt, Artificial Sequence
  Description of Artificial Sequence: Synthetic oligonucleotide
  Antisense strand to SEQ ID NO: 2385276
ugacaccgggagagcucgc

SEQ ID NO: 2385278 - RNA, 19 nt, Artificial Sequence
  Description of Artificial Sequence: Synthetic oligonucleotide
  Sense strand starting at position 671 of SEQ ID NO: 1886054
cgagcucucccggugucau

SEQ ID NO: 2385279 - RNA, 19 nt, Artificial Sequence
  Description of Artificial Sequence: Synthetic oligonucleotide
  Antisense strand to SEQ ID NO: 2385278
augacaccgggagagcucg

SEQ ID NO: 2385280 - RNA, 19 nt, Artificial Sequence
  Description of Artificial Sequence: Synthetic oligonucleotide
  Sense strand starting at position 681 of SEQ ID NO: 1886054
cggugucaucccgauggaa

SEQ ID NO: 2385281 - RNA, 19 nt, Artificial Sequence
  Description of Artificial Sequence: Synthetic oligonucleotide
  Antisense strand to SEQ ID NO: 2385280
uuccaucgggaugacaccg

SEQ ID NO: 2385282 - RNA, 19 nt, Artificial Sequence
  Description of Artificial Sequence: Synthetic oligonucleotide
  Sense strand starting at position 819 of SEQ ID NO: 1886054
cagaacaucugagcuggaa

SEQ ID NO: 2385283 - RNA, 19 nt, Artificial Sequence
  Description of Artificial Sequence: Synthetic oligonucleotide
  Antisense strand to SEQ ID NO: 2385282
uuccagcucagauguucug

SEQ ID NO: 2385284 - RNA, 19 nt, Artificial Sequence
  Description of Artificial Sequence: Synthetic oligonucleotide
  Sense strand starting at position 879 of SEQ ID NO: 1886054
gagcgaguugcucgcaguu

SEQ ID NO: 2385285 - RNA, 19 nt, Artificial Sequence
  Description of Artificial Sequence: Synthetic oligonucleotide
  Antisense strand to SEQ ID NO: 2385284
aacugcgagcaacucgcuc

SEQ ID NO: 2385286 - RNA, 19 nt, Artificial Sequence
  Description of Artificial Sequence: Synthetic oligonucleotide
  Sense strand starting at position 881 of SEQ ID NO: 1886054
gcgaguugcucgcaguuac

SEQ ID NO: 2385287 - RNA, 19 nt, Artificial Sequence
  Description of Artificial Sequence: Synthetic oligonucleotide
  Antisense strand to SEQ ID NO: 2385286
guaacugcgagcaacucgc

SEQ ID NO: 2385288 - RNA, 19 nt, Artificial Sequence
  Description of Artificial Sequence: Synthetic oligonucleotide
  Sense strand starting at position 892 of SEQ ID NO: 1886054
gcaguuaccgagcauguca

SEQ ID NO: 2385289 - RNA, 19 nt, Artificial Sequence
  Description of Artificial Sequence: Synthetic oligonucleotide
  Antisense strand to SEQ ID NO: 2385288
ugacaugcucgguaacugc

SEQ ID NO: 2385290 - RNA, 19 nt, Artificial Sequence
  Description of Artificial Sequence: Synthetic oligonucleotide
  Sense strand starting at position 957 of SEQ ID NO: 1886054
ugcagaccuugaucucaca

SEQ ID NO: 2385291 - RNA, 19 nt, Artificial Sequence
  Description of Artificial Sequence: Synthetic oligonucleotide
  Antisense strand to SEQ ID NO: 2385290
ugugagaucaaggucugca

SEQ ID NO: 2385292 - RNA, 19 nt, Artificial Sequence
  Description of Artificial Sequence: Synthetic oligonucleotide
  Sense strand starting at position 1708 of SEQ ID NO: 1886054
gguggucccacuggaugau

SEQ ID NO: 2385293 - RNA, 19 nt, Artificial Sequence
  Description of Artificial Sequence: Synthetic oligonucleotide
  Antisense strand to SEQ ID NO: 2385292
aucauccagugggaccacc

SEQ ID NO: 2385294 - RNA, 19 nt, Artificial Sequence
  Description of Artificial Sequence: Synthetic oligonucleotide
  Sense strand starting at position 1720 of SEQ ID NO: 1886054
ggaugaugccacggugaau

SEQ ID NO: 2385295 - RNA, 19 nt, Artificial Sequence
  Description of Artificial Sequence: Synthetic oligonucleotide
  Antisense strand to SEQ ID NO: 2385294
auucaccguggcaucaucc

SEQ ID NO: 2385296 - RNA, 19 nt, Artificial Sequence
  Description of Artificial Sequence: Synthetic oligonucleotide
  Sense strand starting at position 1731 of SEQ ID NO: 1886054
cggugaauccuacaugguu

SEQ ID NO: 2385297 - RNA, 19 nt, Artificial Sequence
  Description of Artificial Sequence: Synthetic oligonucleotide
  Antisense strand to SEQ ID NO: 2385296
aaccauguaggauucaccg

SEQ ID NO: 2385298 - RNA, 19 nt, Artificial Sequence
  Description of Artificial Sequence: Synthetic oligonucleotide
  Sense strand starting at position 1924 of SEQ ID NO: 1886054
cggcuuuccuguuauaaag

SEQ ID NO: 2385299 - RNA, 19 nt, Artificial Sequence
  Description of Artificial Sequence: Synthetic oligonucleotide
  Antisense strand to SEQ ID NO: 2385298
cuuuauaacaggaaagccg

SEQ ID NO: 2385300 - RNA, 19 nt, Artificial Sequence
  Description of Artificial Sequence: Synthetic oligonucleotide
  Sense strand starting at position 1926 of SEQ ID NO: 1886054
gcuuuccuguuauaaagac

SEQ ID NO: 2385301 - RNA, 19 nt, Artificial Sequence
  Description of Artificial Sequence: Synthetic oligonucleotide
  Antisense strand to SEQ ID NO: 2385300
gucuuuauaacaggaaagc

SEQ ID NO: 2385302 - RNA, 19 nt, Artificial Sequence
  Description of Artificial Sequence: Synthetic oligonucleotide
  Sense strand starting at position 1960 of SEQ ID NO: 1886054
agaauuugcugccaucauc

SEQ ID NO: 2385303 - RNA, 19 nt, Artificial Sequence
  Description of Artificial Sequence: Synthetic oligonucleotide
  Antisense strand to SEQ ID NO: 2385302
gaugauggcagcaaauucu

SEQ ID NO: 2385304 - RNA, 19 nt, Artificial Sequence
  Description of Artificial Sequence: Synthetic oligonucleotide
  Sense strand starting at position 2049 of SEQ ID NO: 1886054
ggguccagcucagaagaua

SEQ ID NO: 2385305 - RNA, 19 nt, Artificial Sequence
  Description of Artificial Sequence: Synthetic oligonucleotide
  Antisense strand to SEQ ID NO: 2385304
uaucuucugagcuggaccc

SEQ ID NO: 2385306 - RNA, 19 nt, Artificial Sequence
  Description of Artificial Sequence: Synthetic oligonucleotide
  Sense strand starting at position 2267 of SEQ ID NO: 1886054
guagaaugcgacugagucu

SEQ ID NO: 2385307 - RNA, 19 nt, Artificial Sequence
  Description of Artificial Sequence: Synthetic oligonucleotide
  Antisense strand to SEQ ID NO: 2385306
agacucagucgcauucuac

SEQ ID NO: 2385308 - RNA, 19 nt, Artificial Sequence
  Description of Artificial Sequence: Synthetic oligonucleotide
  Sense strand starting at position 2274 of SEQ ID NO: 1886054
gcgacugagucucagauaa

SEQ ID NO: 2385309 - RNA, 19 nt, Artificial Sequence
  Description of Artificial Sequence: Synthetic oligonucleotide
  Antisense strand to SEQ ID NO: 2385308
uuaucugagacucagucgc

SEQ ID NO: 2385310 - RNA, 19 nt, Artificial Sequence
  Description of Artificial Sequence: Synthetic oligonucleotide
  Sense strand starting at position 2276 of SEQ ID NO: 1886054
gacugagucucagauaaga

SEQ ID NO: 2385311 - RNA, 19 nt, Artificial Sequence
  Description of Artificial Sequence: Synthetic oligonucleotide
  Antisense strand to SEQ ID NO: 2385310
ucuuaucugagacucaguc

SEQ ID NO: 2385312 - RNA, 19 nt, Artificial Sequence
  Description of Artificial Sequence: Synthetic oligonucleotide
  Sense strand starting at position 2329 of SEQ ID NO: 1886054
gugacuccuucugcacaca

SEQ ID NO: 2385313 - RNA, 19 nt, Artificial Sequence
  Description of Artificial Sequence: Synthetic oligonucleotide
  Antisense strand to SEQ ID NO: 2385312
ugugugcagaaggagucac

SEQ ID NO: 2385314 - RNA, 19 nt, Artificial Sequence
  Description of Artificial Sequence: Synthetic oligonucleotide
  Sense strand starting at position 2622 of SEQ ID NO: 1886054
uuacgccucccauaggaaa

SEQ ID NO: 2385315 - RNA, 19 nt, Artificial Sequence
  Description of Artificial Sequence: Synthetic oligonucleotide
  Antisense strand to SEQ ID NO: 2385314
uuuccuaugggaggcguaa

SEQ ID NO: 2385316 - RNA, 19 nt, Artificial Sequence
  Description of Artificial Sequence: Synthetic oligonucleotide
  Sense strand starting at position 2712 of SEQ ID NO: 1886054
cuuauaaggcucugaauaa

SEQ ID NO: 2385317 - RNA, 19 nt, Artificial Sequence
  Description of Artificial Sequence: Synthetic oligonucleotide
  Antisense strand to SEQ ID NO: 2385316
uuauucagagccuuauaag

SEQ ID NO: 2385318 - RNA, 19 nt, Artificial Sequence
  Description of Artificial Sequence: Synthetic oligonucleotide
  Sense strand starting at position 2713 of SEQ ID NO: 1886054
uuauaaggcucugaauaag

SEQ ID NO: 2385319 - RNA, 19 nt, Artificial Sequence
  Description of Artificial Sequence: Synthetic oligonucleotide
  Antisense strand to SEQ ID NO: 2385318
cuuauucagagccuuauaa

SEQ ID NO: 2385320 - RNA, 19 nt, Artificial Sequence
  Description of Artificial Sequence: Synthetic oligonucleotide
  Sense strand starting at position 3104 of SEQ ID NO: 1886054
cucauaguccuuugagcaa

SEQ ID NO: 2385321 - RNA, 19 nt, Artificial Sequence
  Description of Artificial Sequence: Synthetic oligonucleotide
  Antisense strand to SEQ ID NO: 2385320
uugcucaaaggacuaugag

SEQ ID NO: 2385322 - RNA, 19 nt, Artificial Sequence
  Description of Artificial Sequence: Synthetic oligonucleotide
  Sense strand starting at position 3162 of SEQ ID NO: 1886054
gaagucaguccagggauca

SEQ ID NO: 2385323 - RNA, 19 nt, Artificial Sequence
  Description of Artificial Sequence: Synthetic oligonucleotide
  Antisense strand to SEQ ID NO: 2385322
ugaucccuggacugacuuc

SEQ ID NO: 2385324 - RNA, 19 nt, Artificial Sequence
  Description of Artificial Sequence: Synthetic oligonucleotide
  Sense strand starting at position 3163 of SEQ ID NO: 1886054
aagucaguccagggaucaa

SEQ ID NO: 2385325 - RNA, 19 nt, Artificial Sequence
  Description of Artificial Sequence: Synthetic oligonucleotide
  Antisense strand to SEQ ID NO: 2385324
uugaucccuggacugacuu

SEQ ID NO: 2385326 - RNA, 19 nt, Artificial Sequence
  Description of Artificial Sequence: Synthetic oligonucleotide
  Sense strand starting at position 3241 of SEQ ID NO: 1886054
ggcucuuccucauaaugug

SEQ ID NO: 2385327 - RNA, 19 nt, Artificial Sequence
  Description of Artificial Sequence: Synthetic oligonucleotide
  Antisense strand to SEQ ID NO: 2385326
cacauuaugaggaagagcc

SEQ ID NO: 2385328 - RNA, 19 nt, Artificial Sequence
  Description of Artificial Sequence: Synthetic oligonucleotide
  Sense strand starting at position 3256 of SEQ ID NO: 1886054
ugugcaauguguccuagac

SEQ ID NO: 2385329 - RNA, 19 nt, Artificial Sequence
  Description of Artificial Sequence: Synthetic oligonucleotide
  Antisense strand to SEQ ID NO: 2385328
gucuaggacacauugcaca

SEQ ID NO: 2385330 - RNA, 19 nt, Artificial Sequence
  Description of Artificial Sequence: Synthetic oligonucleotide
  Sense strand starting at position 3258 of SEQ ID NO: 1886054
ugcaauguguccuagacuu

SEQ ID NO: 2385331 - RNA, 19 nt, Artificial Sequence
  Description of Artificial Sequence: Synthetic oligonucleotide
  Antisense strand to SEQ ID NO: 2385330
aagucuaggacacauugca

SEQ ID NO: 2385332 - RNA, 19 nt, Artificial Sequence
  Description of Artificial Sequence: Synthetic oligonucleotide
  Sense strand starting at position 3266 of SEQ ID NO: 1886054
guccuagacuuccaauggu

SEQ ID NO: 2385333 - RNA, 19 nt, Artificial Sequence
  Description of Artificial Sequence: Synthetic oligonucleotide
  Antisense strand to SEQ ID NO: 2385332
accauuggaagucuaggac

SEQ ID NO: 2385334 - RNA, 19 nt, Artificial Sequence
  Description of Artificial Sequence: Synthetic oligonucleotide
  Sense strand starting at position 3322 of SEQ ID NO: 1886054
gaacuaagccagggugaaa

SEQ ID NO: 2385335 - RNA, 19 nt, Artificial Sequence
  Description of Artificial Sequence: Synthetic oligonucleotide
  Antisense strand to SEQ ID NO: 2385334
uuucacccuggcuuaguuc

SEQ ID NO: 2385336 - RNA, 19 nt, Artificial Sequence
  Description of Artificial Sequence: Synthetic oligonucleotide
  Sense strand starting at position 3429 of SEQ ID NO: 1886054
gccuuaaugucgugggaac

SEQ ID NO: 2385337 - RNA, 19 nt, Artificial Sequence
  Description of Artificial Sequence: Synthetic oligonucleotide
  Antisense strand to SEQ ID NO: 2385336
guucccacgacauuaaggc

SEQ ID NO: 2385338 - RNA, 19 nt, Artificial Sequence
  Description of Artificial Sequence: Synthetic oligonucleotide
  Sense strand starting at position 3430 of SEQ ID NO: 1886054
ccuuaaugucgugggaaca

SEQ ID NO: 2385339 - RNA, 19 nt, Artificial Sequence
  Description of Artificial Sequence: Synthetic oligonucleotide
  Antisense strand to SEQ ID NO: 2385338
uguucccacgacauuaagg

SEQ ID NO: 2385340 - RNA, 19 nt, Artificial Sequence
  Description of Artificial Sequence: Synthetic oligonucleotide
  Sense strand starting at position 3525 of SEQ ID NO: 1886054
gcuugcaaacucuguguca

SEQ ID NO: 2385341 - RNA, 19 nt, Artificial Sequence
  Description of Artificial Sequence: Synthetic oligonucleotide
  Antisense strand to SEQ ID NO: 2385340
ugacacagaguuugcaagc

SEQ ID NO: 2385342 - RNA, 19 nt, Artificial Sequence
  Description of Artificial Sequence: Synthetic oligonucleotide
  Sense strand starting at position 3746 of SEQ ID NO: 1886054
ccgccacugccauacaaua

SEQ ID NO: 2385343 - RNA, 19 nt, Artificial Sequence
  Description of Artificial Sequence: Synthetic oligonucleotide
  Antisense strand to SEQ ID NO: 2385342
uauuguauggcaguggcgg

SEQ ID NO: 2385344 - RNA, 19 nt, Artificial Sequence
  Description of Artificial Sequence: Synthetic oligonucleotide
  Sense strand starting at position 3949 of SEQ ID NO: 1886054
gauguuuccuaacaugaug

SEQ ID NO: 2385345 - RNA, 19 nt, Artificial Sequence
  Description of Artificial Sequence: Synthetic oligonucleotide
  Antisense strand to SEQ ID NO: 2385344
caucauguuaggaaacauc

SEQ ID NO: 2385346 - RNA, 19 nt, Artificial Sequence
  Description of Artificial Sequence: Synthetic oligonucleotide
  Sense strand starting at position 63 of SEQ ID NO: 1886055
gaggcaguucuccagcuca

SEQ ID NO: 2385347 - RNA, 19 nt, Artificial Sequence
  Description of Artificial Sequence: Synthetic oligonucleotide
  Antisense strand to SEQ ID NO: 2385346
ugagcuggagaacugccuc

SEQ ID NO: 2385348 - RNA, 19 nt, Artificial Sequence
  Description of Artificial Sequence: Synthetic oligonucleotide
  Sense strand starting at position 124 of SEQ ID NO: 1886055
uuggaccauuccucaugua

SEQ ID NO: 2385349 - RNA, 19 nt, Artificial Sequence
  Description of Artificial Sequence: Synthetic oligonucleotide
  Antisense strand to SEQ ID NO: 2385348
uacaugaggaaugguccaa

SEQ ID NO: 2385350 - RNA, 19 nt, Artificial Sequence
  Description of Artificial Sequence: Synthetic oligonucleotide
  Sense strand starting at position 155 of SEQ ID NO: 1886055
cccagacauccuuggagac

SEQ ID NO: 2385351 - RNA, 19 nt, Artificial Sequence
  Description of Artificial Sequence: Synthetic oligonucleotide
  Antisense strand to SEQ ID NO: 2385350
gucuccaaggaugucuggg

SEQ ID NO: 2385352 - RNA, 19 nt, Artificial Sequence
  Description of Artificial Sequence: Synthetic oligonucleotide
  Sense strand starting at position 269 of SEQ ID NO: 1886055
ggaugaucuccuuggccuu

SEQ ID NO: 2385353 - RNA, 19 nt, Artificial Sequence
  Description of Artificial Sequence: Synthetic oligonucleotide
  Antisense strand to SEQ ID NO: 2385352
aaggccaaggagaucaucc

SEQ ID NO: 2385354 - RNA, 19 nt, Artificial Sequence
  Description of Artificial Sequence: Synthetic oligonucleotide
  Sense strand starting at position 287 of SEQ ID NO: 1886055
ugugguccaccugguagau

SEQ ID NO: 2385355 - RNA, 19 nt, Artificial Sequence
  Description of Artificial Sequence: Synthetic oligonucleotide
  Antisense strand to SEQ ID NO: 2385354
aucuaccagguggaccaca

SEQ ID NO: 2385356 - RNA, 19 nt, Artificial Sequence
  Description of Artificial Sequence: Synthetic oligonucleotide
  Sense strand starting at position 380 of SEQ ID NO: 1886055
uggugaccacgccaucauu

SEQ ID NO: 2385357 - RNA, 19 nt, Artificial Sequence
  Description of Artificial Sequence: Synthetic oligonucleotide
  Antisense strand to SEQ ID NO: 2385356
aaugauggcguggucacca

SEQ ID NO: 2385358 - RNA, 19 nt, Artificial Sequence
  Description of Artificial Sequence: Synthetic oligonucleotide
  Sense strand starting at position 389 of SEQ ID NO: 1886055
cgccaucauucugcaggau

SEQ ID NO: 2385359 - RNA, 19 nt, Artificial Sequence
  Description of Artificial Sequence: Synthetic oligonucleotide
  Antisense strand to SEQ ID NO: 2385358
auccugcagaaugauggcg

SEQ ID NO: 2385360 - RNA, 19 nt, Artificial Sequence
  Description of Artificial Sequence: Synthetic oligonucleotide
  Sense strand starting at position 401 of SEQ ID NO: 1886055
gcaggauccuggucuugca

SEQ ID NO: 2385361 - RNA, 19 nt, Artificial Sequence
  Description of Artificial Sequence: Synthetic oligonucleotide
  Antisense strand to SEQ ID NO: 2385360
ugcaagaccaggauccugc

SEQ ID NO: 2385362 - RNA, 19 nt, Artificial Sequence
  Description of Artificial Sequence: Synthetic oligonucleotide
  Sense strand starting at position 425 of SEQ ID NO: 1886055
gggccucauccaugauaag

SEQ ID NO: 2385363 - RNA, 19 nt, Artificial Sequence
  Description of Artificial Sequence: Synthetic oligonucleotide
  Antisense strand to SEQ ID NO: 2385362
cuuaucauggaugaggccc

SEQ ID NO: 2385364 - RNA, 19 nt, Artificial Sequence
  Description of Artificial Sequence: Synthetic oligonucleotide
  Sense strand starting at position 628 of SEQ ID NO: 1886055
agcucaucacucgagauga

SEQ ID NO: 2385365 - RNA, 19 nt, Artificial Sequence
  Description of Artificial Sequence: Synthetic oligonucleotide
  Antisense strand to SEQ ID NO: 2385364
ucaucucgagugaugagcu

SEQ ID NO: 2385366 - RNA, 19 nt, Artificial Sequence
  Description of Artificial Sequence: Synthetic oligonucleotide
  Sense strand starting at position 800 of SEQ ID NO: 1886055
aaagguucuucuccaggaa

SEQ ID NO: 2385367 - RNA, 19 nt, Artificial Sequence
  Description of Artificial Sequence: Synthetic oligonucleotide
  Antisense strand to SEQ ID NO: 2385366
uuccuggagaagaaccuuu

SEQ ID NO: 2385368 - RNA, 19 nt, Artificial Sequence
  Description of Artificial Sequence: Synthetic oligonucleotide
  Sense strand starting at position 899 of SEQ ID NO: 1886055
uggcgaugcgugaggagua

SEQ ID NO: 2385369 - RNA, 19 nt, Artificial Sequence
  Description of Artificial Sequence: Synthetic oligonucleotide
  Antisense strand to SEQ ID NO: 2385368
uacuccucacgcaucgcca

SEQ ID NO: 2385370 - RNA, 19 nt, Artificial Sequence
  Description of Artificial Sequence: Synthetic oligonucleotide
  Sense strand starting at position 953 of SEQ ID NO: 1886055
gcagguuguccuggaaguu

SEQ ID NO: 2385371 - RNA, 19 nt, Artificial Sequence
  Description of Artificial Sequence: Synthetic oligonucleotide
  Antisense strand to SEQ ID NO: 2385370
aacuuccaggacaaccugc

SEQ ID NO: 2385372 - RNA, 19 nt, Artificial Sequence
  Description of Artificial Sequence: Synthetic oligonucleotide
  Sense strand starting at position 965 of SEQ ID NO: 1886055
ggaaguugacagugucauc

SEQ ID NO: 2385373 - RNA, 19 nt, Artificial Sequence
  Description of Artificial Sequence: Synthetic oligonucleotide
  Antisense strand to SEQ ID NO: 2385372
gaugacacugucaacuucc

SEQ ID NO: 2385374 - RNA, 19 nt, Artificial Sequence
  Description of Artificial Sequence: Synthetic oligonucleotide
  Sense strand starting at position 1465 of SEQ ID NO: 1886055
gagccagcucugggacaaa

SEQ ID NO: 2385375 - RNA, 19 nt, Artificial Sequence
  Description of Artificial Sequence: Synthetic oligonucleotide
  Antisense strand to SEQ ID NO: 2385374
uuugucccagagcuggcuc

SEQ ID NO: 2385376 - RNA, 19 nt, Artificial Sequence
  Description of Artificial Sequence: Synthetic oligonucleotide
  Sense strand starting at position 1483 of SEQ ID NO: 1886055
acaucucuggccugcagau

SEQ ID NO: 2385377 - RNA, 19 nt, Artificial Sequence
  Description of Artificial Sequence: Synthetic oligonucleotide
  Antisense strand to SEQ ID NO: 2385376
aucugcaggccagagaugu

SEQ ID NO: 2385378 - RNA, 19 nt, Artificial Sequence
  Description of Artificial Sequence: Synthetic oligonucleotide
  Sense strand starting at position 1531 of SEQ ID NO: 1886055
ggcugccucccaugguuaa

SEQ ID NO: 2385379 - RNA, 19 nt, Artificial Sequence
  Description of Artificial Sequence: Synthetic oligonucleotide
  Antisense strand to SEQ ID NO: 2385378
uuaaccaugggaggcagcc

SEQ ID NO: 2385380 - RNA, 19 nt, Artificial Sequence
  Description of Artificial Sequence: Synthetic oligonucleotide
  Sense strand starting at position 1535 of SEQ ID NO: 1886055
gccucccaugguuaagaga

SEQ ID NO: 2385381 - RNA, 19 nt, Artificial Sequence
  Description of Artificial Sequence: Synthetic oligonucleotide
  Antisense strand to SEQ ID NO: 2385380
ucucuuaaccaugggaggc

SEQ ID NO: 2385382 - RNA, 19 nt, Artificial Sequence
  Description of Artificial Sequence: Synthetic oligonucleotide
  Sense strand starting at position 1647 of SEQ ID NO: 1886055
acagaagcuucucuuguaa

SEQ ID NO: 2385383 - RNA, 19 nt, Artificial Sequence
  Description of Artificial Sequence: Synthetic oligonucleotide
  Antisense strand to SEQ ID NO: 2385382
uuacaagagaagcuucugu

SEQ ID NO: 2385384 - RNA, 19 nt, Artificial Sequence
  Description of Artificial Sequence: Synthetic oligonucleotide
  Sense strand starting at position 1784 of SEQ ID NO: 1886055
gacuaaucccugcaggguu

SEQ ID NO: 2385385 - RNA, 19 nt, Artificial Sequence
  Description of Artificial Sequence: Synthetic oligonucleotide
  Antisense strand to SEQ ID NO: 2385384
aacccugcagggauuaguc

SEQ ID NO: 2385386 - RNA, 19 nt, Artificial Sequence
  Description of Artificial Sequence: Synthetic oligonucleotide
  Sense strand starting at position 1879 of SEQ ID NO: 1886055
agcgguacuggcuagacau

SEQ ID NO: 2385387 - RNA, 19 nt, Artificial Sequence
  Description of Artificial Sequence: Synthetic oligonucleotide
  Antisense strand to SEQ ID NO: 2385386
augucuagccaguaccgcu

SEQ ID NO: 2385388 - RNA, 19 nt, Artificial Sequence
  Description of Artificial Sequence: Synthetic oligonucleotide
  Sense strand starting at position 1946 of SEQ ID NO: 1886055
ggagacauguucucugaau

SEQ ID NO: 2385389 - RNA, 19 nt, Artificial Sequence
  Description of Artificial Sequence: Synthetic oligonucleotide
  Antisense strand to SEQ ID NO: 2385388
auucagagaacaugucucc

SEQ ID NO: 2385390 - RNA, 19 nt, Artificial Sequence
  Description of Artificial Sequence: Synthetic oligonucleotide
  Sense strand starting at position 1947 of SEQ ID NO: 1886055
gagacauguucucugaauc

SEQ ID NO: 2385391 - RNA, 19 nt, Artificial Sequence
  Description of Artificial Sequence: Synthetic oligonucleotide
  Antisense strand to SEQ ID NO: 2385390
gauucagagaacaugucuc

SEQ ID NO: 2385392 - RNA, 19 nt, Artificial Sequence
  Description of Artificial Sequence: Synthetic oligonucleotide
  Sense strand starting at position 1948 of SEQ ID NO: 1886055
agacauguucucugaaucc

SEQ ID NO: 2385393 - RNA, 19 nt, Artificial Sequence
  Description of Artificial Sequence: Synthetic oligonucleotide
  Antisense strand to SEQ ID NO: 2385392
ggauucagagaacaugucu

SEQ ID NO: 2385394 - RNA, 19 nt, Artificial Sequence
  Description of Artificial Sequence: Synthetic oligonucleotide
  Sense strand starting at position 2312 of SEQ ID NO: 1886055
ugucauuaauguccaguga

SEQ ID NO: 2385395 - RNA, 19 nt, Artificial Sequence
  Description of Artificial Sequence: Synthetic oligonucleotide
  Antisense strand to SEQ ID NO: 2385394
ucacuggacauuaaugaca

SEQ ID NO: 2385396 - RNA, 19 nt, Artificial Sequence
  Description of Artificial Sequence: Synthetic oligonucleotide
  Sense strand starting at position 2313 of SEQ ID NO: 1886055
gucauuaauguccagugaa

SEQ ID NO: 2385397 - RNA, 19 nt, Artificial Sequence
  Description of Artificial Sequence: Synthetic oligonucleotide
  Antisense strand to SEQ ID NO: 2385396
uucacuggacauuaaugac

SEQ ID NO: 2385398 - RNA, 19 nt, Artificial Sequence
  Description of Artificial Sequence: Synthetic oligonucleotide
  Sense strand starting at position 2708 of SEQ ID NO: 1886055
ugcugucuuccugcuggua

SEQ ID NO: 2385399 - RNA, 19 nt, Artificial Sequence
  Description of Artificial Sequence: Synthetic oligonucleotide
  Antisense strand to SEQ ID NO: 2385398
uaccagcaggaagacagca

SEQ ID NO: 2385400 - RNA, 19 nt, Artificial Sequence
  Description of Artificial Sequence: Synthetic oligonucleotide
  Sense strand starting at position 2709 of SEQ ID NO: 1886055
gcugucuuccugcugguaa

SEQ ID NO: 2385401 - RNA, 19 nt, Artificial Sequence
  Description of Artificial Sequence: Synthetic oligonucleotide
  Antisense strand to SEQ ID NO: 2385400
uuaccagcaggaagacagc

SEQ ID NO: 2385402 - RNA, 19 nt, Artificial Sequence
  Description of Artificial Sequence: Synthetic oligonucleotide
  Sense strand starting at position 2878 of SEQ ID NO: 1886055
ugaaauuguaaaugagugu

SEQ ID NO: 2385403 - RNA, 19 nt, Artificial Sequence
  Description of Artificial Sequence: Synthetic oligonucleotide
  Antisense strand to SEQ ID NO: 2385402
acacucauuuacaauuuca

SEQ ID NO: 2385404 - RNA, 19 nt, Artificial Sequence
  Description of Artificial Sequence: Synthetic oligonucleotide
  Sense strand starting at position 2885 of SEQ ID NO: 1886055
guaaaugaguguccggcua

SEQ ID NO: 2385405 - RNA, 19 nt, Artificial Sequence
  Description of Artificial Sequence: Synthetic oligonucleotide
  Antisense strand to SEQ ID NO: 2385404
uagccggacacucauuuac

SEQ ID NO: 2385406 - RNA, 19 nt, Artificial Sequence
  Description of Artificial Sequence: Synthetic oligonucleotide
  Sense strand starting at position 2962 of SEQ ID NO: 1886055
cgagauuagagcuagcaag

SEQ ID NO: 2385407 - RNA, 19 nt, Artificial Sequence
  Description of Artificial Sequence: Synthetic oligonucleotide
  Antisense strand to SEQ ID NO: 2385406
cuugcuagcucuaaucucg

SEQ ID NO: 2385408 - RNA, 19 nt, Artificial Sequence
  Description of Artificial Sequence: Synthetic oligonucleotide
  Sense strand starting at position 3365 of SEQ ID NO: 1886055
gagggaagcuuugccaaca

SEQ ID NO: 2385409 - RNA, 19 nt, Artificial Sequence
  Description of Artificial Sequence: Synthetic oligonucleotide
  Antisense strand to SEQ ID NO: 2385408
uguuggcaaagcuucccuc

SEQ ID NO: 2385410 - RNA, 19 nt, Artificial Sequence
  Description of Artificial Sequence: Synthetic oligonucleotide
  Sense strand starting at position 3389 of SEQ ID NO: 1886055
gcccgugacugaucggaau

SEQ ID NO: 2385411 - RNA, 19 nt, Artificial Sequence
  Description of Artificial Sequence: Synthetic oligonucleotide
  Antisense strand to SEQ ID NO: 2385410
auuccgaucagucacgggc

SEQ ID NO: 2385412 - RNA, 19 nt, Artificial Sequence
  Description of Artificial Sequence: Synthetic oligonucleotide
  Sense strand starting at position 3391 of SEQ ID NO: 1886055
ccgugacugaucggaauug

SEQ ID NO: 2385413 - RNA, 19 nt, Artificial Sequence
  Description of Artificial Sequence: Synthetic oligonucleotide
  Antisense strand to SEQ ID NO: 2385412
caauuccgaucagucacgg

SEQ ID NO: 2385414 - RNA, 19 nt, Artificial Sequence
  Description of Artificial Sequence: Synthetic oligonucleotide
  Sense strand starting at position 3403 of SEQ ID NO: 1886055
ggaauugccuaaucugaau

SEQ ID NO: 2385415 - RNA, 19 nt, Artificial Sequence
  Description of Artificial Sequence: Synthetic oligonucleotide
  Antisense strand to SEQ ID NO: 2385414
auucagauuaggcaauucc

SEQ ID NO: 2385416 - RNA, 19 nt, Artificial Sequence
  Description of Artificial Sequence: Synthetic oligonucleotide
  Sense strand starting at position 3448 of SEQ ID NO: 1886055
ucuugcugugauugcuaaa

SEQ ID NO: 2385417 - RNA, 19 nt, Artificial Sequence
  Description of Artificial Sequence: Synthetic oligonucleotide
  Antisense strand to SEQ ID NO: 2385416
uuuagcaaucacagcaaga

SEQ ID NO: 2385418 - RNA, 19 nt, Artificial Sequence
  Description of Artificial Sequence: Synthetic oligonucleotide
  Sense strand starting at position 3475 of SEQ ID NO: 1886055
ccaguuuccucacuccaga

SEQ ID NO: 2385419 - RNA, 19 nt, Artificial Sequence
  Description of Artificial Sequence: Synthetic oligonucleotide
  Antisense strand to SEQ ID NO: 2385418
ucuggagugaggaaacugg

SEQ ID NO: 2385420 - RNA, 19 nt, Artificial Sequence
  Description of Artificial Sequence: Synthetic oligonucleotide
  Sense strand starting at position 3638 of SEQ ID NO: 1886055
gaagaauucuaguucgagc

SEQ ID NO: 2385421 - RNA, 19 nt, Artificial Sequence
  Description of Artificial Sequence: Synthetic oligonucleotide
  Antisense strand to SEQ ID NO: 2385420
gcucgaacuagaauucuuc

SEQ ID NO: 2385422 - RNA, 19 nt, Artificial Sequence
  Description of Artificial Sequence: Synthetic oligonucleotide
  Sense strand starting at position 3910 of SEQ ID NO: 1886055
cugggauucuucuuacaga

SEQ ID NO: 2385423 - RNA, 19 nt, Artificial Sequence
  Description of Artificial Sequence: Synthetic oligonucleotide
  Antisense strand to SEQ ID NO: 2385422
ucuguaagaagaaucccag

SEQ ID NO: 2385424 - RNA, 19 nt, Artificial Sequence
  Description of Artificial Sequence: Synthetic oligonucleotide
  Sense strand starting at position 3913 of SEQ ID NO: 1886055
ggauucuucuuacagacag

SEQ ID NO: 2385425 - RNA, 19 nt, Artificial Sequence
  Description of Artificial Sequence: Synthetic oligonucleotide
  Antisense strand to SEQ ID NO: 2385424
cugucuguaagaagaaucc

SEQ ID NO: 2385426 - RNA, 19 nt, Artificial Sequence
  Description of Artificial Sequence: Synthetic oligonucleotide
  Sense strand starting at position 48 of SEQ ID NO: 1886056
gcggguuucugaaguugug

SEQ ID NO: 2385427 - RNA, 19 nt, Artificial Sequence
  Description of Artificial Sequence: Synthetic oligonucleotide
  Antisense strand to SEQ ID NO: 2385426
cacaacuucagaaacccgc

SEQ ID NO: 2385428 - RNA, 19 nt, Artificial Sequence
  Description of Artificial Sequence: Synthetic oligonucleotide
  Sense strand starting at position 51 of SEQ ID NO: 1886056
gguuucugaaguuguguuu

SEQ ID NO: 2385429 - RNA, 19 nt, Artificial Sequence
  Description of Artificial Sequence: Synthetic oligonucleotide
  Antisense strand to SEQ ID NO: 2385428
aaacacaacuucagaaacc

SEQ ID NO: 2385430 - RNA, 19 nt, Artificial Sequence
  Description of Artificial Sequence: Synthetic oligonucleotide
  Sense strand starting at position 57 of SEQ ID NO: 1886056
ugaaguuguguuuguacuu

SEQ ID NO: 2385431 - RNA, 19 nt, Artificial Sequence
  Description of Artificial Sequence: Synthetic oligonucleotide
  Antisense strand to SEQ ID NO: 2385430
aaguacaaacacaacuuca

SEQ ID NO: 2385432 - RNA, 19 nt, Artificial Sequence
  Description of Artificial Sequence: Synthetic oligonucleotide
  Sense strand starting at position 62 of SEQ ID NO: 1886056
uuguguuuguacuugauuu

SEQ ID NO: 2385433 - RNA, 19 nt, Artificial Sequence
  Description of Artificial Sequence: Synthetic oligonucleotide
  Antisense strand to SEQ ID NO: 2385432
aaaucaaguacaaacacaa

SEQ ID NO: 2385434 - RNA, 19 nt, Artificial Sequence
  Description of Artificial Sequence: Synthetic oligonucleotide
  Sense strand starting at position 80 of SEQ ID NO: 1886056
uuaagcgagcugugaacaa

SEQ ID NO: 2385435 - RNA, 19 nt, Artificial Sequence
  Description of Artificial Sequence: Synthetic oligonucleotide
  Antisense strand to SEQ ID NO: 2385434
uuguucacagcucgcuuaa

SEQ ID NO: 2385436 - RNA, 19 nt, Artificial Sequence
  Description of Artificial Sequence: Synthetic oligonucleotide
  Sense strand starting at position 837 of SEQ ID NO: 1886056
ccggaucuuccgcggugua

SEQ ID NO: 2385437 - RNA, 19 nt, Artificial Sequence
  Description of Artificial Sequence: Synthetic oligonucleotide
  Antisense strand to SEQ ID NO: 2385436
uacaccgcggaagauccgg

SEQ ID NO: 2385438 - RNA, 19 nt, Artificial Sequence
  Description of Artificial Sequence: Synthetic oligonucleotide
  Sense strand starting at position 838 of SEQ ID NO: 1886056
cggaucuuccgcgguguaa

SEQ ID NO: 2385439 - RNA, 19 nt, Artificial Sequence
  Description of Artificial Sequence: Synthetic oligonucleotide
  Antisense strand to SEQ ID NO: 2385438
uuacaccgcggaagauccg

SEQ ID NO: 2385440 - RNA, 19 nt, Artificial Sequence
  Description of Artificial Sequence: Synthetic oligonucleotide
  Sense strand starting at position 1106 of SEQ ID NO: 1886056
cggagauugaagugguguu

SEQ ID NO: 2385441 - RNA, 19 nt, Artificial Sequence
  Description of Artificial Sequence: Synthetic oligonucleotide
  Antisense strand to SEQ ID NO: 2385440
aacaccacuucaaucuccg

SEQ ID NO: 2385442 - RNA, 19 nt, Artificial Sequence
  Description of Artificial Sequence: Synthetic oligonucleotide
  Sense strand starting at position 1354 of SEQ ID NO: 1886056
gguggagaccuggguuaga

SEQ ID NO: 2385443 - RNA, 19 nt, Artificial Sequence
  Description of Artificial Sequence: Synthetic oligonucleotide
  Antisense strand to SEQ ID NO: 2385442
ucuaacccaggucuccacc

SEQ ID NO: 2385444 - RNA, 19 nt, Artificial Sequence
  Description of Artificial Sequence: Synthetic oligonucleotide
  Sense strand starting at position 1365 of SEQ ID NO: 1886056
ggguuagaccaaggguuau

SEQ ID NO: 2385445 - RNA, 19 nt, Artificial Sequence
  Description of Artificial Sequence: Synthetic oligonucleotide
  Antisense strand to SEQ ID NO: 2385444
auaacccuuggucuaaccc

SEQ ID NO: 2385446 - RNA, 19 nt, Artificial Sequence
  Description of Artificial Sequence: Synthetic oligonucleotide
  Sense strand starting at position 1442 of SEQ ID NO: 1886056
cauugcuuccucuaggguu

SEQ ID NO: 2385447 - RNA, 19 nt, Artificial Sequence
  Description of Artificial Sequence: Synthetic oligonucleotide
  Antisense strand to SEQ ID NO: 2385446
aacccuagaggaagcaaug

SEQ ID NO: 2385448 - RNA, 19 nt, Artificial Sequence
  Description of Artificial Sequence: Synthetic oligonucleotide
  Sense strand starting at position 1533 of SEQ ID NO: 1886056
cagucugauuucugagcgu

SEQ ID NO: 2385449 - RNA, 19 nt, Artificial Sequence
  Description of Artificial Sequence: Synthetic oligonucleotide
  Antisense strand to SEQ ID NO: 2385448
acgcucagaaaucagacug

SEQ ID NO: 2385450 - RNA, 19 nt, Artificial Sequence
  Description of Artificial Sequence: Synthetic oligonucleotide
  Sense strand starting at position 1689 of SEQ ID NO: 1886056
gggugugguccucaauaca

SEQ ID NO: 2385451 - RNA, 19 nt, Artificial Sequence
  Description of Artificial Sequence: Synthetic oligonucleotide
  Antisense strand to SEQ ID NO: 2385450
uguauugaggaccacaccc

SEQ ID NO: 2385452 - RNA, 19 nt, Artificial Sequence
  Description of Artificial Sequence: Synthetic oligonucleotide
  Sense strand starting at position 1692 of SEQ ID NO: 1886056
ugugguccucaauacagaa

SEQ ID NO: 2385453 - RNA, 19 nt, Artificial Sequence
  Description of Artificial Sequence: Synthetic oligonucleotide
  Antisense strand to SEQ ID NO: 2385452
uucuguauugaggaccaca

SEQ ID NO: 2385454 - RNA, 19 nt, Artificial Sequence
  Description of Artificial Sequence: Synthetic oligonucleotide
  Sense strand starting at position 4 of SEQ ID NO: 1886057
agaggagucuguucccaga

SEQ ID NO: 2385455 - RNA, 19 nt, Artificial Sequence
  Description of Artificial Sequence: Synthetic oligonucleotide
  Antisense strand to SEQ ID NO: 2385454
ucugggaacagacuccucu

SEQ ID NO: 2385456 - RNA, 19 nt, Artificial Sequence
  Description of Artificial Sequence: Synthetic oligonucleotide
  Sense strand starting at position 6 of SEQ ID NO: 1886057
aggagucuguucccagaac

SEQ ID NO: 2385457 - RNA, 19 nt, Artificial Sequence
  Description of Artificial Sequence: Synthetic oligonucleotide
  Antisense strand to SEQ ID NO: 2385456
guucugggaacagacuccu

SEQ ID NO: 2385458 - RNA, 19 nt, Artificial Sequence
  Description of Artificial Sequence: Synthetic oligonucleotide
  Sense strand starting at position 7 of SEQ ID NO: 1886057
ggagucuguucccagaacu

SEQ ID NO: 2385459 - RNA, 19 nt, Artificial Sequence
  Description of Artificial Sequence: Synthetic oligonucleotide
  Antisense strand to SEQ ID NO: 2385458
aguucugggaacagacucc

SEQ ID NO: 2385460 - RNA, 19 nt, Artificial Sequence
  Description of Artificial Sequence: Synthetic oligonucleotide
  Sense strand starting at position 401 of SEQ ID NO: 1886057
augagccugucaguagauu

SEQ ID NO: 2385461 - RNA, 19 nt, Artificial Sequence
  Description of Artificial Sequence: Synthetic oligonucleotide
  Antisense strand to SEQ ID NO: 2385460
aaucuacugacaggcucau

SEQ ID NO: 2385462 - RNA, 19 nt, Artificial Sequence
  Description of Artificial Sequence: Synthetic oligonucleotide
  Sense strand starting at position 402 of SEQ ID NO: 1886057
ugagccugucaguagauua

SEQ ID NO: 2385463 - RNA, 19 nt, Artificial Sequence
  Description of Artificial Sequence: Synthetic oligonucleotide
  Antisense strand to SEQ ID NO: 2385462
uaaucuacugacaggcuca

SEQ ID NO: 2385464 - RNA, 19 nt, Artificial Sequence
  Description of Artificial Sequence: Synthetic oligonucleotide
  Sense strand starting at position 604 of SEQ ID NO: 1886057
guugaaaucuuacagauua

SEQ ID NO: 2385465 - RNA, 19 nt, Artificial Sequence
  Description of Artificial Sequence: Synthetic oligonucleotide
  Antisense strand to SEQ ID NO: 2385464
uaaucuguaagauuucaac

SEQ ID NO: 2385466 - RNA, 19 nt, Artificial Sequence
  Description of Artificial Sequence: Synthetic oligonucleotide
  Sense strand starting at position 1678 of SEQ ID NO: 1886057
ggagauccaucucuucuuu

SEQ ID NO: 2385467 - RNA, 19 nt, Artificial Sequence
  Description of Artificial Sequence: Synthetic oligonucleotide
  Antisense strand to SEQ ID NO: 2385466
aaagaagagauggaucucc

SEQ ID NO: 2385468 - RNA, 19 nt, Artificial Sequence
  Description of Artificial Sequence: Synthetic oligonucleotide
  Sense strand starting at position 1690 of SEQ ID NO: 1886057
cuucuuuaccucugguaag

SEQ ID NO: 2385469 - RNA, 19 nt, Artificial Sequence
  Description of Artificial Sequence: Synthetic oligonucleotide
  Antisense strand to SEQ ID NO: 2385468
cuuaccagagguaaagaag

SEQ ID NO: 2385470 - RNA, 19 nt, Artificial Sequence
  Description of Artificial Sequence: Synthetic oligonucleotide
  Sense strand starting at position 1748 of SEQ ID NO: 1886057
uuguuacaacucgaucuaa

SEQ ID NO: 2385471 - RNA, 19 nt, Artificial Sequence
  Description of Artificial Sequence: Synthetic oligonucleotide
  Antisense strand to SEQ ID NO: 2385470
uuagaucgaguuguaacaa

SEQ ID NO: 2385472 - RNA, 19 nt, Artificial Sequence
  Description of Artificial Sequence: Synthetic oligonucleotide
  Sense strand starting at position 1941 of SEQ ID NO: 1886057
acauauuuaugcuacgaaa

SEQ ID NO: 2385473 - RNA, 19 nt, Artificial Sequence
  Description of Artificial Sequence: Synthetic oligonucleotide
  Antisense strand to SEQ ID NO: 2385472
uuucguagcauaaauaugu

SEQ ID NO: 2385474 - RNA, 19 nt, Artificial Sequence
  Description of Artificial Sequence: Synthetic oligonucleotide
  Sense strand starting at position 3660 of SEQ ID NO: 1886057
cgguuuacauucucgaaag

SEQ ID NO: 2385475 - RNA, 19 nt, Artificial Sequence
  Description of Artificial Sequence: Synthetic oligonucleotide
  Antisense strand to SEQ ID NO: 2385474
cuuucgagaauguaaaccg

SEQ ID NO: 2385476 - RNA, 19 nt, Artificial Sequence
  Description of Artificial Sequence: Synthetic oligonucleotide
  Sense strand starting at position 3661 of SEQ ID NO: 1886057
gguuuacauucucgaaagu

SEQ ID NO: 2385477 - RNA, 19 nt, Artificial Sequence
  Description of Artificial Sequence: Synthetic oligonucleotide
  Antisense strand to SEQ ID NO: 2385476
acuuucgagaauguaaacc

SEQ ID NO: 2385478 - RNA, 19 nt, Artificial Sequence
  Description of Artificial Sequence: Synthetic oligonucleotide
  Sense strand starting at position 3662 of SEQ ID NO: 1886057
guuuacauucucgaaagua

SEQ ID NO: 2385479 - RNA, 19 nt, Artificial Sequence
  Description of Artificial Sequence: Synthetic oligonucleotide
  Antisense strand to SEQ ID NO: 2385478
uacuuucgagaauguaaac

SEQ ID NO: 2385480 - RNA, 19 nt, Artificial Sequence
  Description of Artificial Sequence: Synthetic oligonucleotide
  Sense strand starting at position 3677 of SEQ ID NO: 1886057
aguagugcugucgacuaga

SEQ ID NO: 2385481 - RNA, 19 nt, Artificial Sequence
  Description of Artificial Sequence: Synthetic oligonucleotide
  Antisense strand to SEQ ID NO: 2385480
ucuagucgacagcacuacu

SEQ ID NO: 2385482 - RNA, 19 nt, Artificial Sequence
  Description of Artificial Sequence: Synthetic oligonucleotide
  Sense strand starting at position 3682 of SEQ ID NO: 1886057
ugcugucgacuagaaauau

SEQ ID NO: 2385483 - RNA, 19 nt, Artificial Sequence
  Description of Artificial Sequence: Synthetic oligonucleotide
  Antisense strand to SEQ ID NO: 2385482
auauuucuagucgacagca

SEQ ID NO: 2385484 - RNA, 19 nt, Artificial Sequence
  Description of Artificial Sequence: Synthetic oligonucleotide
  Sense strand starting at position 3692 of SEQ ID NO: 1886057
uagaaauauugagcgauac

SEQ ID NO: 2385485 - RNA, 19 nt, Artificial Sequence
  Description of Artificial Sequence: Synthetic oligonucleotide
  Antisense strand to SEQ ID NO: 2385484
guaucgcucaauauuucua

SEQ ID NO: 2385486 - RNA, 19 nt, Artificial Sequence
  Description of Artificial Sequence: Synthetic oligonucleotide
  Sense strand starting at position 3693 of SEQ ID NO: 1886057
agaaauauugagcgauaca

SEQ ID NO: 2385487 - RNA, 19 nt, Artificial Sequence
  Description of Artificial Sequence: Synthetic oligonucleotide
  Antisense strand to SEQ ID NO: 2385486
uguaucgcucaauauuucu

SEQ ID NO: 2385488 - RNA, 19 nt, Artificial Sequence
  Description of Artificial Sequence: Synthetic oligonucleotide
  Sense strand starting at position 3852 of SEQ ID NO: 1886057
gcagaccuagaaugaauua

SEQ ID NO: 2385489 - RNA, 19 nt, Artificial Sequence
  Description of Artificial Sequence: Synthetic oligonucleotide
  Antisense strand to SEQ ID NO: 2385488
uaauucauucuaggucugc

SEQ ID NO: 2385490 - RNA, 19 nt, Artificial Sequence
  Description of Artificial Sequence: Synthetic oligonucleotide
  Sense strand starting at position 4 of SEQ ID NO: 1886058
agaggagucuguucccaga

SEQ ID NO: 2385491 - RNA, 19 nt, Artificial Sequence
  Description of Artificial Sequence: Synthetic oligonucleotide
  Antisense strand to SEQ ID NO: 2385490
ucugggaacagacuccucu

SEQ ID NO: 2385492 - RNA, 19 nt, Artificial Sequence
  Description of Artificial Sequence: Synthetic oligonucleotide
  Sense strand starting at position 6 of SEQ ID NO: 1886058
aggagucuguucccagaac

SEQ ID NO: 2385493 - RNA, 19 nt, Artificial Sequence
  Description of Artificial Sequence: Synthetic oligonucleotide
  Antisense strand to SEQ ID NO: 2385492
guucugggaacagacuccu

SEQ ID NO: 2385494 - RNA, 19 nt, Artificial Sequence
  Description of Artificial Sequence: Synthetic oligonucleotide
  Sense strand starting at position 7 of SEQ ID NO: 1886058
ggagucuguucccagaacu

SEQ ID NO: 2385495 - RNA, 19 nt, Artificial Sequence
  Description of Artificial Sequence: Synthetic oligonucleotide
  Antisense strand to SEQ ID NO: 2385494
aguucugggaacagacucc

SEQ ID NO: 2385496 - RNA, 19 nt, Artificial Sequence
  Description of Artificial Sequence: Synthetic oligonucleotide
  Sense strand starting at position 401 of SEQ ID NO: 1886058
augagccugucaguagauu

SEQ ID NO: 2385497 - RNA, 19 nt, Artificial Sequence
  Description of Artificial Sequence: Synthetic oligonucleotide
  Antisense strand to SEQ ID NO: 2385496
aaucuacugacaggcucau

SEQ ID NO: 2385498 - RNA, 19 nt, Artificial Sequence
  Description of Artificial Sequence: Synthetic oligonucleotide
  Sense strand starting at position 402 of SEQ ID NO: 1886058
ugagccugucaguagauua

SEQ ID NO: 2385499 - RNA, 19 nt, Artificial Sequence
  Description of Artificial Sequence: Synthetic oligonucleotide
  Antisense strand to SEQ ID NO: 2385498
uaaucuacugacaggcuca

SEQ ID NO: 2385500 - RNA, 19 nt, Artificial Sequence
  Description of Artificial Sequence: Synthetic oligonucleotide
  Sense strand starting at position 604 of SEQ ID NO: 1886058
guugaaaucuuacagauua

SEQ ID NO: 2385501 - RNA, 19 nt, Artificial Sequence
  Description of Artificial Sequence: Synthetic oligonucleotide
  Antisense strand to SEQ ID NO: 2385500
uaaucuguaagauuucaac

SEQ ID NO: 2385502 - RNA, 19 nt, Artificial Sequence
  Description of Artificial Sequence: Synthetic oligonucleotide
  Sense strand starting at position 1678 of SEQ ID NO: 1886058
ggagauccaucucuucuuu

SEQ ID NO: 2385503 - RNA, 19 nt, Artificial Sequence
  Description of Artificial Sequence: Synthetic oligonucleotide
  Antisense strand to SEQ ID NO: 2385502
aaagaagagauggaucucc

SEQ ID NO: 2385504 - RNA, 19 nt, Artificial Sequence
  Description of Artificial Sequence: Synthetic oligonucleotide
  Sense strand starting at position 1690 of SEQ ID NO: 1886058
cuucuuuaccucugguaag

SEQ ID NO: 2385505 - RNA, 19 nt, Artificial Sequence
  Description of Artificial Sequence: Synthetic oligonucleotide
  Antisense strand to SEQ ID NO: 2385504
cuuaccagagguaaagaag

SEQ ID NO: 2385506 - RNA, 19 nt, Artificial Sequence
  Description of Artificial Sequence: Synthetic oligonucleotide
  Sense strand starting at position 1748 of SEQ ID NO: 1886058
uuguuacaacucgaucuaa

SEQ ID NO: 2385507 - RNA, 19 nt, Artificial Sequence
  Description of Artificial Sequence: Synthetic oligonucleotide
  Antisense strand to SEQ ID NO: 2385506
uuagaucgaguuguaacaa

SEQ ID NO: 2385508 - RNA, 19 nt, Artificial Sequence
  Description of Artificial Sequence: Synthetic oligonucleotide
  Sense strand starting at position 1941 of SEQ ID NO: 1886058
acauauuuaugcuacgaaa

SEQ ID NO: 2385509 - RNA, 19 nt, Artificial Sequence
  Description of Artificial Sequence: Synthetic oligonucleotide
  Antisense strand to SEQ ID NO: 2385508
uuucguagcauaaauaugu

SEQ ID NO: 2385510 - RNA, 19 nt, Artificial Sequence
  Description of Artificial Sequence: Synthetic oligonucleotide
  Sense strand starting at position 3660 of SEQ ID NO: 1886058
cgguuuacauucucgaaag

SEQ ID NO: 2385511 - RNA, 19 nt, Artificial Sequence
  Description of Artificial Sequence: Synthetic oligonucleotide
  Antisense strand to SEQ ID NO: 2385510
cuuucgagaauguaaaccg

SEQ ID NO: 2385512 - RNA, 19 nt, Artificial Sequence
  Description of Artificial Sequence: Synthetic oligonucleotide
  Sense strand starting at position 3661 of SEQ ID NO: 1886058
gguuuacauucucgaaagu

SEQ ID NO: 2385513 - RNA, 19 nt, Artificial Sequence
  Description of Artificial Sequence: Synthetic oligonucleotide
  Antisense strand to SEQ ID NO: 2385512
acuuucgagaauguaaacc

SEQ ID NO: 2385514 - RNA, 19 nt, Artificial Sequence
  Description of Artificial Sequence: Synthetic oligonucleotide
  Sense strand starting at position 3662 of SEQ ID NO: 1886058
guuuacauucucgaaagua

SEQ ID NO: 2385515 - RNA, 19 nt, Artificial Sequence
  Description of Artificial Sequence: Synthetic oligonucleotide
  Antisense strand to SEQ ID NO: 2385514
uacuuucgagaauguaaac

SEQ ID NO: 2385516 - RNA, 19 nt, Artificial Sequence
  Description of Artificial Sequence: Synthetic oligonucleotide
  Sense strand starting at position 3677 of SEQ ID NO: 1886058
aguagugcugucgacuaga

SEQ ID NO: 2385517 - RNA, 19 nt, Artificial Sequence
  Description of Artificial Sequence: Synthetic oligonucleotide
  Antisense strand to SEQ ID NO: 2385516
ucuagucgacagcacuacu

SEQ ID NO: 2385518 - RNA, 19 nt, Artificial Sequence
  Description of Artificial Sequence: Synthetic oligonucleotide
  Sense strand starting at position 3682 of SEQ ID NO: 1886058
ugcugucgacuagaaauau

SEQ ID NO: 2385519 - RNA, 19 nt, Artificial Sequence
  Description of Artificial Sequence: Synthetic oligonucleotide
  Antisense strand to SEQ ID NO: 2385518
auauuucuagucgacagca

SEQ ID NO: 2385520 - RNA, 19 nt, Artificial Sequence
  Description of Artificial Sequence: Synthetic oligonucleotide
  Sense strand starting at position 3692 of SEQ ID NO: 1886058
uagaaauauugagcgauac

SEQ ID NO: 2385521 - RNA, 19 nt, Artificial Sequence
  Description of Artificial Sequence: Synthetic oligonucleotide
  Antisense strand to SEQ ID NO: 2385520
guaucgcucaauauuucua

SEQ ID NO: 2385522 - RNA, 19 nt, Artificial Sequence
  Description of Artificial Sequence: Synthetic oligonucleotide
  Sense strand starting at position 3693 of SEQ ID NO: 1886058
agaaauauugagcgauaca

SEQ ID NO: 2385523 - RNA, 19 nt, Artificial Sequence
  Description of Artificial Sequence: Synthetic oligonucleotide
  Antisense strand to SEQ ID NO: 2385522
uguaucgcucaauauuucu

SEQ ID NO: 2385524 - RNA, 19 nt, Artificial Sequence
  Description of Artificial Sequence: Synthetic oligonucleotide
  Sense strand starting at position 3852 of SEQ ID NO: 1886058
gcagaccuagaaugaauua

SEQ ID NO: 2385525 - RNA, 19 nt, Artificial Sequence
  Description of Artificial Sequence: Synthetic oligonucleotide
  Antisense strand to SEQ ID NO: 2385524
uaauucauucuaggucugc

SEQ ID NO: 2385526 - RNA, 19 nt, Artificial Sequence
  Description of Artificial Sequence: Synthetic oligonucleotide
  Sense strand starting at position 4 of SEQ ID NO: 1886059
agaggagucuguucccaga

SEQ ID NO: 2385527 - RNA, 19 nt, Artificial Sequence
  Description of Artificial Sequence: Synthetic oligonucleotide
  Antisense strand to SEQ ID NO: 2385526
ucugggaacagacuccucu

SEQ ID NO: 2385528 - RNA, 19 nt, Artificial Sequence
  Description of Artificial Sequence: Synthetic oligonucleotide
  Sense strand starting at position 6 of SEQ ID NO: 1886059
aggagucuguucccagaac

SEQ ID NO: 2385529 - RNA, 19 nt, Artificial Sequence
  Description of Artificial Sequence: Synthetic oligonucleotide
  Antisense strand to SEQ ID NO: 2385528
guucugggaacagacuccu

SEQ ID NO: 2385530 - RNA, 19 nt, Artificial Sequence
  Description of Artificial Sequence: Synthetic oligonucleotide
  Sense strand starting at position 7 of SEQ ID NO: 1886059
ggagucuguucccagaacu

SEQ ID NO: 2385531 - RNA, 19 nt, Artificial Sequence
  Description of Artificial Sequence: Synthetic oligonucleotide
  Antisense strand to SEQ ID NO: 2385530
aguucugggaacagacucc

SEQ ID NO: 2385532 - RNA, 19 nt, Artificial Sequence
  Description of Artificial Sequence: Synthetic oligonucleotide
  Sense strand starting at position 401 of SEQ ID NO: 1886059
augagccugucaguagauu

SEQ ID NO: 2385533 - RNA, 19 nt, Artificial Sequence
  Description of Artificial Sequence: Synthetic oligonucleotide
  Antisense strand to SEQ ID NO: 2385532
aaucuacugacaggcucau

SEQ ID NO: 2385534 - RNA, 19 nt, Artificial Sequence
  Description of Artificial Sequence: Synthetic oligonucleotide
  Sense strand starting at position 402 of SEQ ID NO: 1886059
ugagccugucaguagauua

SEQ ID NO: 2385535 - RNA, 19 nt, Artificial Sequence
  Description of Artificial Sequence: Synthetic oligonucleotide
  Antisense strand to SEQ ID NO: 2385534
uaaucuacugacaggcuca

SEQ ID NO: 2385536 - RNA, 19 nt, Artificial Sequence
  Description of Artificial Sequence: Synthetic oligonucleotide
  Sense strand starting at position 604 of SEQ ID NO: 1886059
guugaaaucuuacagauua

SEQ ID NO: 2385537 - RNA, 19 nt, Artificial Sequence
  Description of Artificial Sequence: Synthetic oligonucleotide
  Antisense strand to SEQ ID NO: 2385536
uaaucuguaagauuucaac

SEQ ID NO: 2385538 - RNA, 19 nt, Artificial Sequence
  Description of Artificial Sequence: Synthetic oligonucleotide
  Sense strand starting at position 1678 of SEQ ID NO: 1886059
ggagauccaucucuucuuu

SEQ ID NO: 2385539 - RNA, 19 nt, Artificial Sequence
  Description of Artificial Sequence: Synthetic oligonucleotide
  Antisense strand to SEQ ID NO: 2385538
aaagaagagauggaucucc

SEQ ID NO: 2385540 - RNA, 19 nt, Artificial Sequence
  Description of Artificial Sequence: Synthetic oligonucleotide
  Sense strand starting at position 1690 of SEQ ID NO: 1886059
cuucuuuaccucugguaag

SEQ ID NO: 2385541 - RNA, 19 nt, Artificial Sequence
  Description of Artificial Sequence: Synthetic oligonucleotide
  Antisense strand to SEQ ID NO: 2385540
cuuaccagagguaaagaag

SEQ ID NO: 2385542 - RNA, 19 nt, Artificial Sequence
  Description of Artificial Sequence: Synthetic oligonucleotide
  Sense strand starting at position 1748 of SEQ ID NO: 1886059
uuguuacaacucgaucuaa

SEQ ID NO: 2385543 - RNA, 19 nt, Artificial Sequence
  Description of Artificial Sequence: Synthetic oligonucleotide
  Antisense strand to SEQ ID NO: 2385542
uuagaucgaguuguaacaa

SEQ ID NO: 2385544 - RNA, 19 nt, Artificial Sequence
  Description of Artificial Sequence: Synthetic oligonucleotide
  Sense strand starting at position 1941 of SEQ ID NO: 1886059
acauauuuaugcuacgaaa

SEQ ID NO: 2385545 - RNA, 19 nt, Artificial Sequence
  Description of Artificial Sequence: Synthetic oligonucleotide
  Antisense strand to SEQ ID NO: 2385544
uuucguagcauaaauaugu

SEQ ID NO: 2385546 - RNA, 19 nt, Artificial Sequence
  Description of Artificial Sequence: Synthetic oligonucleotide
  Sense strand starting at position 3660 of SEQ ID NO: 1886059
cgguuuacauucucgaaag

SEQ ID NO: 2385547 - RNA, 19 nt, Artificial Sequence
  Description of Artificial Sequence: Synthetic oligonucleotide
  Antisense strand to SEQ ID NO: 2385546
cuuucgagaauguaaaccg

SEQ ID NO: 2385548 - RNA, 19 nt, Artificial Sequence
  Description of Artificial Sequence: Synthetic oligonucleotide
  Sense strand starting at position 3661 of SEQ ID NO: 1886059
gguuuacauucucgaaagu

SEQ ID NO: 2385549 - RNA, 19 nt, Artificial Sequence
  Description of Artificial Sequence: Synthetic oligonucleotide
  Antisense strand to SEQ ID NO: 2385548
acuuucgagaauguaaacc

SEQ ID NO: 2385550 - RNA, 19 nt, Artificial Sequence
  Description of Artificial Sequence: Synthetic oligonucleotide
  Sense strand starting at position 3662 of SEQ ID NO: 1886059
guuuacauucucgaaagua

SEQ ID NO: 2385551 - RNA, 19 nt, Artificial Sequence
  Description of Artificial Sequence: Synthetic oligonucleotide
  Antisense strand to SEQ ID NO: 2385550
uacuuucgagaauguaaac

SEQ ID NO: 2385552 - RNA, 19 nt, Artificial Sequence
  Description of Artificial Sequence: Synthetic oligonucleotide
  Sense strand starting at position 3677 of SEQ ID NO: 1886059
aguagugcugucgacuaga

SEQ ID NO: 2385553 - RNA, 19 nt, Artificial Sequence
  Description of Artificial Sequence: Synthetic oligonucleotide
  Antisense strand to SEQ ID NO: 2385552
ucuagucgacagcacuacu

SEQ ID NO: 2385554 - RNA, 19 nt, Artificial Sequence
  Description of Artificial Sequence: Synthetic oligonucleotide
  Sense strand starting at position 3682 of SEQ ID NO: 1886059
ugcugucgacuagaaauau

SEQ ID NO: 2385555 - RNA, 19 nt, Artificial Sequence
  Description of Artificial Sequence: Synthetic oligonucleotide
  Antisense strand to SEQ ID NO: 2385554
auauuucuagucgacagca

SEQ ID NO: 2385556 - RNA, 19 nt, Artificial Sequence
  Description of Artificial Sequence: Synthetic oligonucleotide
  Sense strand starting at position 3692 of SEQ ID NO: 1886059
uagaaauauugagcgauac

SEQ ID NO: 2385557 - RNA, 19 nt, Artificial Sequence
  Description of Artificial Sequence: Synthetic oligonucleotide
  Antisense strand to SEQ ID NO: 2385556
guaucgcucaauauuucua

SEQ ID NO: 2385558 - RNA, 19 nt, Artificial Sequence
  Description of Artificial Sequence: Synthetic oligonucleotide
  Sense strand starting at position 3693 of SEQ ID NO: 1886059
agaaauauugagcgauaca

SEQ ID NO: 2385559 - RNA, 19 nt, Artificial Sequence
  Description of Artificial Sequence: Synthetic oligonucleotide
  Antisense strand to SEQ ID NO: 2385558
uguaucgcucaauauuucu

SEQ ID NO: 2385560 - RNA, 19 nt, Artificial Sequence
  Description of Artificial Sequence: Synthetic oligonucleotide
  Sense strand starting at position 3852 of SEQ ID NO: 1886059
gcagaccuagaaugaauua

SEQ ID NO: 2385561 - RNA, 19 nt, Artificial Sequence
  Description of Artificial Sequence: Synthetic oligonucleotide
  Antisense strand to SEQ ID NO: 2385560
uaauucauucuaggucugc

SEQ ID NO: 2385562 - RNA, 19 nt, Artificial Sequence
  Description of Artificial Sequence: Synthetic oligonucleotide
  Sense strand starting at position 4 of SEQ ID NO: 1886060
agaggagucuguucccaga

SEQ ID NO: 2385563 - RNA, 19 nt, Artificial Sequence
  Description of Artificial Sequence: Synthetic oligonucleotide
  Antisense strand to SEQ ID NO: 2385562
ucugggaacagacuccucu

SEQ ID NO: 2385564 - RNA, 19 nt, Artificial Sequence
  Description of Artificial Sequence: Synthetic oligonucleotide
  Sense strand starting at position 6 of SEQ ID NO: 1886060
aggagucuguucccagaac

SEQ ID NO: 2385565 - RNA, 19 nt, Artificial Sequence
  Description of Artificial Sequence: Synthetic oligonucleotide
  Antisense strand to SEQ ID NO: 2385564
guucugggaacagacuccu

SEQ ID NO: 2385566 - RNA, 19 nt, Artificial Sequence
  Description of Artificial Sequence: Synthetic oligonucleotide
  Sense strand starting at position 7 of SEQ ID NO: 1886060
ggagucuguucccagaacu

SEQ ID NO: 2385567 - RNA, 19 nt, Artificial Sequence
  Description of Artificial Sequence: Synthetic oligonucleotide
  Antisense strand to SEQ ID NO: 2385566
aguucugggaacagacucc

SEQ ID NO: 2385568 - RNA, 19 nt, Artificial Sequence
  Description of Artificial Sequence: Synthetic oligonucleotide
  Sense strand starting at position 401 of SEQ ID NO: 1886060
augagccugucaguagauu

SEQ ID NO: 2385569 - RNA, 19 nt, Artificial Sequence
  Description of Artificial Sequence: Synthetic oligonucleotide
  Antisense strand to SEQ ID NO: 2385568
aaucuacugacaggcucau

SEQ ID NO: 2385570 - RNA, 19 nt, Artificial Sequence
  Description of Artificial Sequence: Synthetic oligonucleotide
  Sense strand starting at position 402 of SEQ ID NO: 1886060
ugagccugucaguagauua

SEQ ID NO: 2385571 - RNA, 19 nt, Artificial Sequence
  Description of Artificial Sequence: Synthetic oligonucleotide
  Antisense strand to SEQ ID NO: 2385570
uaaucuacugacaggcuca

SEQ ID NO: 2385572 - RNA, 19 nt, Artificial Sequence
  Description of Artificial Sequence: Synthetic oligonucleotide
  Sense strand starting at position 604 of SEQ ID NO: 1886060
guugaaaucuuacagauua

SEQ ID NO: 2385573 - RNA, 19 nt, Artificial Sequence
  Description of Artificial Sequence: Synthetic oligonucleotide
  Antisense strand to SEQ ID NO: 2385572
uaaucuguaagauuucaac

SEQ ID NO: 2385574 - RNA, 19 nt, Artificial Sequence
  Description of Artificial Sequence: Synthetic oligonucleotide
  Sense strand starting at position 1678 of SEQ ID NO: 1886060
ggagauccaucucuucuuu

SEQ ID NO: 2385575 - RNA, 19 nt, Artificial Sequence
  Description of Artificial Sequence: Synthetic oligonucleotide
  Antisense strand to SEQ ID NO: 2385574
aaagaagagauggaucucc

SEQ ID NO: 2385576 - RNA, 19 nt, Artificial Sequence
  Description of Artificial Sequence: Synthetic oligonucleotide
  Sense strand starting at position 1690 of SEQ ID NO: 1886060
cuucuuuaccucugguaag

SEQ ID NO: 2385577 - RNA, 19 nt, Artificial Sequence
  Description of Artificial Sequence: Synthetic oligonucleotide
  Antisense strand to SEQ ID NO: 2385576
cuuaccagagguaaagaag

SEQ ID NO: 2385578 - RNA, 19 nt, Artificial Sequence
  Description of Artificial Sequence: Synthetic oligonucleotide
  Sense strand starting at position 1748 of SEQ ID NO: 1886060
uuguuacaacucgaucuaa

SEQ ID NO: 2385579 - RNA, 19 nt, Artificial Sequence
  Description of Artificial Sequence: Synthetic oligonucleotide
  Antisense strand to SEQ ID NO: 2385578
uuagaucgaguuguaacaa

SEQ ID NO: 2385580 - RNA, 19 nt, Artificial Sequence
  Description of Artificial Sequence: Synthetic oligonucleotide
  Sense strand starting at position 1941 of SEQ ID NO: 1886060
acauauuuaugcuacgaaa

SEQ ID NO: 2385581 - RNA, 19 nt, Artificial Sequence
  Description of Artificial Sequence: Synthetic oligonucleotide
  Antisense strand to SEQ ID NO: 2385580
uuucguagcauaaauaugu

SEQ ID NO: 2385582 - RNA, 19 nt, Artificial Sequence
  Description of Artificial Sequence: Synthetic oligonucleotide
  Sense strand starting at position 3660 of SEQ ID NO: 1886060
cgguuuacauucucgaaag

SEQ ID NO: 2385583 - RNA, 19 nt, Artificial Sequence
  Description of Artificial Sequence: Synthetic oligonucleotide
  Antisense strand to SEQ ID NO: 2385582
cuuucgagaauguaaaccg

SEQ ID NO: 2385584 - RNA, 19 nt, Artificial Sequence
  Description of Artificial Sequence: Synthetic oligonucleotide
  Sense strand starting at position 3661 of SEQ ID NO: 1886060
gguuuacauucucgaaagu

SEQ ID NO: 2385585 - RNA, 19 nt, Artificial Sequence
  Description of Artificial Sequence: Synthetic oligonucleotide
  Antisense strand to SEQ ID NO: 2385584
acuuucgagaauguaaacc

SEQ ID NO: 2385586 - RNA, 19 nt, Artificial Sequence
  Description of Artificial Sequence: Synthetic oligonucleotide
  Sense strand starting at position 3662 of SEQ ID NO: 1886060
guuuacauucucgaaagua

SEQ ID NO: 2385587 - RNA, 19 nt, Artificial Sequence
  Description of Artificial Sequence: Synthetic oligonucleotide
  Antisense strand to SEQ ID NO: 2385586
uacuuucgagaauguaaac

SEQ ID NO: 2385588 - RNA, 19 nt, Artificial Sequence
  Description of Artificial Sequence: Synthetic oligonucleotide
  Sense strand starting at position 3677 of SEQ ID NO: 1886060
aguagugcugucgacuaga

SEQ ID NO: 2385589 - RNA, 19 nt, Artificial Sequence
  Description of Artificial Sequence: Synthetic oligonucleotide
  Antisense strand to SEQ ID NO: 2385588
ucuagucgacagcacuacu

SEQ ID NO: 2385590 - RNA, 19 nt, Artificial Sequence
  Description of Artificial Sequence: Synthetic oligonucleotide
  Sense strand starting at position 3682 of SEQ ID NO: 1886060
ugcugucgacuagaaauau

SEQ ID NO: 2385591 - RNA, 19 nt, Artificial Sequence
  Description of Artificial Sequence: Synthetic oligonucleotide
  Antisense strand to SEQ ID NO: 2385590
auauuucuagucgacagca

SEQ ID NO: 2385592 - RNA, 19 nt, Artificial Sequence
  Description of Artificial Sequence: Synthetic oligonucleotide
  Sense strand starting at position 3692 of SEQ ID NO: 1886060
uagaaauauugagcgauac

SEQ ID NO: 2385593 - RNA, 19 nt, Artificial Sequence
  Description of Artificial Sequence: Synthetic oligonucleotide
  Antisense strand to SEQ ID NO: 2385592
guaucgcucaauauuucua

SEQ ID NO: 2385594 - RNA, 19 nt, Artificial Sequence
  Description of Artificial Sequence: Synthetic oligonucleotide
  Sense strand starting at position 3693 of SEQ ID NO: 1886060
agaaauauugagcgauaca

SEQ ID NO: 2385595 - RNA, 19 nt, Artificial Sequence
  Description of Artificial Sequence: Synthetic oligonucleotide
  Antisense strand to SEQ ID NO: 2385594
uguaucgcucaauauuucu

SEQ ID NO: 2385596 - RNA, 19 nt, Artificial Sequence
  Description of Artificial Sequence: Synthetic oligonucleotide
  Sense strand starting at position 3852 of SEQ ID NO: 1886060
gcagaccuagaaugaauua

SEQ ID NO: 2385597 - RNA, 19 nt, Artificial Sequence
  Description of Artificial Sequence: Synthetic oligonucleotide
  Antisense strand to SEQ ID NO: 2385596
uaauucauucuaggucugc

SEQ ID NO: 2385598 - RNA, 19 nt, Artificial Sequence
  Description of Artificial Sequence: Synthetic oligonucleotide
  Sense strand starting at position 40 of SEQ ID NO: 1886061
ugcagacauucugaagagu

SEQ ID NO: 2385599 - RNA, 19 nt, Artificial Sequence
  Description of Artificial Sequence: Synthetic oligonucleotide
  Antisense strand to SEQ ID NO: 2385598
acucuucagaaugucugca

SEQ ID NO: 2385600 - RNA, 19 nt, Artificial Sequence
  Description of Artificial Sequence: Synthetic oligonucleotide
  Sense strand starting at position 112 of SEQ ID NO: 1886061
ccuggcagucugcauuauu

SEQ ID NO: 2385601 - RNA, 19 nt, Artificial Sequence
  Description of Artificial Sequence: Synthetic oligonucleotide
  Antisense strand to SEQ ID NO: 2385600
aauaaugcagacugccagg

SEQ ID NO: 2385602 - RNA, 19 nt, Artificial Sequence
  Description of Artificial Sequence: Synthetic oligonucleotide
  Sense strand starting at position 115 of SEQ ID NO: 1886061
ggcagucugcauuauucca

SEQ ID NO: 2385603 - RNA, 19 nt, Artificial Sequence
  Description of Artificial Sequence: Synthetic oligonucleotide
  Antisense strand to SEQ ID NO: 2385602
uggaauaaugcagacugcc

SEQ ID NO: 2385604 - RNA, 19 nt, Artificial Sequence
  Description of Artificial Sequence: Synthetic oligonucleotide
  Sense strand starting at position 120 of SEQ ID NO: 1886061
ucugcauuauuccaguaag

SEQ ID NO: 2385605 - RNA, 19 nt, Artificial Sequence
  Description of Artificial Sequence: Synthetic oligonucleotide
  Antisense strand to SEQ ID NO: 2385604
cuuacuggaauaaugcaga

SEQ ID NO: 2385606 - RNA, 19 nt, Artificial Sequence
  Description of Artificial Sequence: Synthetic oligonucleotide
  Sense strand starting at position 123 of SEQ ID NO: 1886061
gcauuauuccaguaagaau

SEQ ID NO: 2385607 - RNA, 19 nt, Artificial Sequence
  Description of Artificial Sequence: Synthetic oligonucleotide
  Antisense strand to SEQ ID NO: 2385606
auucuuacuggaauaaugc

SEQ ID NO: 2385608 - RNA, 19 nt, Artificial Sequence
  Description of Artificial Sequence: Synthetic oligonucleotide
  Sense strand starting at position 168 of SEQ ID NO: 1886061
guuggauuugccuggagcu

SEQ ID NO: 2385609 - RNA, 19 nt, Artificial Sequence
  Description of Artificial Sequence: Synthetic oligonucleotide
  Antisense strand to SEQ ID NO: 2385608
agcuccaggcaaauccaac

SEQ ID NO: 2385610 - RNA, 19 nt, Artificial Sequence
  Description of Artificial Sequence: Synthetic oligonucleotide
  Sense strand starting at position 198 of SEQ ID NO: 1886061
ugaguuagcaggcaaacuu

SEQ ID NO: 2385611 - RNA, 19 nt, Artificial Sequence
  Description of Artificial Sequence: Synthetic oligonucleotide
  Antisense strand to SEQ ID NO: 2385610
aaguuugccugcuaacuca

SEQ ID NO: 2385612 - RNA, 19 nt, Artificial Sequence
  Description of Artificial Sequence: Synthetic oligonucleotide
  Sense strand starting at position 434 of SEQ ID NO: 1886061
gggaaucuaucugaagcau

SEQ ID NO: 2385613 - RNA, 19 nt, Artificial Sequence
  Description of Artificial Sequence: Synthetic oligonucleotide
  Antisense strand to SEQ ID NO: 2385612
augcuucagauagauuccc

SEQ ID NO: 2385614 - RNA, 19 nt, Artificial Sequence
  Description of Artificial Sequence: Synthetic oligonucleotide
  Sense strand starting at position 1925 of SEQ ID NO: 1886061
gagagucgcucucgcagaa

SEQ ID NO: 2385615 - RNA, 19 nt, Artificial Sequence
  Description of Artificial Sequence: Synthetic oligonucleotide
  Antisense strand to SEQ ID NO: 2385614
uucugcgagagcgacucuc

SEQ ID NO: 2385616 - RNA, 19 nt, Artificial Sequence
  Description of Artificial Sequence: Synthetic oligonucleotide
  Sense strand starting at position 2121 of SEQ ID NO: 1886061
cgcgcucucuucguuucaa

SEQ ID NO: 2385617 - RNA, 19 nt, Artificial Sequence
  Description of Artificial Sequence: Synthetic oligonucleotide
  Antisense strand to SEQ ID NO: 2385616
uugaaacgaagagagcgcg

SEQ ID NO: 2385618 - RNA, 19 nt, Artificial Sequence
  Description of Artificial Sequence: Synthetic oligonucleotide
  Sense strand starting at position 2187 of SEQ ID NO: 1886061
auguuaauccacggagggu

SEQ ID NO: 2385619 - RNA, 19 nt, Artificial Sequence
  Description of Artificial Sequence: Synthetic oligonucleotide
  Antisense strand to SEQ ID NO: 2385618
acccuccguggauuaacau

SEQ ID NO: 2385620 - RNA, 19 nt, Artificial Sequence
  Description of Artificial Sequence: Synthetic oligonucleotide
  Sense strand starting at position 2229 of SEQ ID NO: 1886061
agcguuaauacggcgaagu

SEQ ID NO: 2385621 - RNA, 19 nt, Artificial Sequence
  Description of Artificial Sequence: Synthetic oligonucleotide
  Antisense strand to SEQ ID NO: 2385620
acuucgccguauuaacgcu

SEQ ID NO: 2385622 - RNA, 19 nt, Artificial Sequence
  Description of Artificial Sequence: Synthetic oligonucleotide
  Sense strand starting at position 2230 of SEQ ID NO: 1886061
gcguuaauacggcgaagug

SEQ ID NO: 2385623 - RNA, 19 nt, Artificial Sequence
  Description of Artificial Sequence: Synthetic oligonucleotide
  Antisense strand to SEQ ID NO: 2385622
cacuucgccguauuaacgc

SEQ ID NO: 2385624 - RNA, 19 nt, Artificial Sequence
  Description of Artificial Sequence: Synthetic oligonucleotide
  Sense strand starting at position 2397 of SEQ ID NO: 1886061
agaaguaaacuaggcuuua

SEQ ID NO: 2385625 - RNA, 19 nt, Artificial Sequence
  Description of Artificial Sequence: Synthetic oligonucleotide
  Antisense strand to SEQ ID NO: 2385624
uaaagccuaguuuacuucu

SEQ ID NO: 2385626 - RNA, 19 nt, Artificial Sequence
  Description of Artificial Sequence: Synthetic oligonucleotide
  Sense strand starting at position 2452 of SEQ ID NO: 1886061
ggcagacuccagugaacuc

SEQ ID NO: 2385627 - RNA, 19 nt, Artificial Sequence
  Description of Artificial Sequence: Synthetic oligonucleotide
  Antisense strand to SEQ ID NO: 2385626
gaguucacuggagucugcc

SEQ ID NO: 2385628 - RNA, 19 nt, Artificial Sequence
  Description of Artificial Sequence: Synthetic oligonucleotide
  Sense strand starting at position 2518 of SEQ ID NO: 1886061
aggaaaucagucggccaaa

SEQ ID NO: 2385629 - RNA, 19 nt, Artificial Sequence
  Description of Artificial Sequence: Synthetic oligonucleotide
  Antisense strand to SEQ ID NO: 2385628
uuuggccgacugauuuccu

SEQ ID NO: 2385630 - RNA, 19 nt, Artificial Sequence
  Description of Artificial Sequence: Synthetic oligonucleotide
  Sense strand starting at position 2519 of SEQ ID NO: 1886061
ggaaaucagucggccaaag

SEQ ID NO: 2385631 - RNA, 19 nt, Artificial Sequence
  Description of Artificial Sequence: Synthetic oligonucleotide
  Antisense strand to SEQ ID NO: 2385630
cuuuggccgacugauuucc

SEQ ID NO: 2385632 - RNA, 19 nt, Artificial Sequence
  Description of Artificial Sequence: Synthetic oligonucleotide
  Sense strand starting at position 2568 of SEQ ID NO: 1886061
agaacucgcuucuaguaua

SEQ ID NO: 2385633 - RNA, 19 nt, Artificial Sequence
  Description of Artificial Sequence: Synthetic oligonucleotide
  Antisense strand to SEQ ID NO: 2385632
uauacuagaagcgaguucu

SEQ ID NO: 2385634 - RNA, 19 nt, Artificial Sequence
  Description of Artificial Sequence: Synthetic oligonucleotide
  Sense strand starting at position 2625 of SEQ ID NO: 1886061
ggcuucuuguccuuaccca

SEQ ID NO: 2385635 - RNA, 19 nt, Artificial Sequence
  Description of Artificial Sequence: Synthetic oligonucleotide
  Antisense strand to SEQ ID NO: 2385634
uggguaaggacaagaagcc

SEQ ID NO: 2385636 - RNA, 19 nt, Artificial Sequence
  Description of Artificial Sequence: Synthetic oligonucleotide
  Sense strand starting at position 2694 of SEQ ID NO: 1886061
ggagaaaugagaggccgau

SEQ ID NO: 2385637 - RNA, 19 nt, Artificial Sequence
  Description of Artificial Sequence: Synthetic oligonucleotide
  Antisense strand to SEQ ID NO: 2385636
aucggccucucauuucucc

SEQ ID NO: 2385638 - RNA, 19 nt, Artificial Sequence
  Description of Artificial Sequence: Synthetic oligonucleotide
  Sense strand starting at position 256 of SEQ ID NO: 1886062
cugucuagucugggugaca

SEQ ID NO: 2385639 - RNA, 19 nt, Artificial Sequence
  Description of Artificial Sequence: Synthetic oligonucleotide
  Antisense strand to SEQ ID NO: 2385638
ugucacccagacuagacag

SEQ ID NO: 2385640 - RNA, 19 nt, Artificial Sequence
  Description of Artificial Sequence: Synthetic oligonucleotide
  Sense strand starting at position 585 of SEQ ID NO: 1886062
ggucacauauugccugauu

SEQ ID NO: 2385641 - RNA, 19 nt, Artificial Sequence
  Description of Artificial Sequence: Synthetic oligonucleotide
  Antisense strand to SEQ ID NO: 2385640
aaucaggcaauaugugacc

SEQ ID NO: 2385642 - RNA, 19 nt, Artificial Sequence
  Description of Artificial Sequence: Synthetic oligonucleotide
  Sense strand starting at position 640 of SEQ ID NO: 1886062
agagacaguuuauuaguau

SEQ ID NO: 2385643 - RNA, 19 nt, Artificial Sequence
  Description of Artificial Sequence: Synthetic oligonucleotide
  Antisense strand to SEQ ID NO: 2385642
auacuaauaaacugucucu

SEQ ID NO: 2385644 - RNA, 19 nt, Artificial Sequence
  Description of Artificial Sequence: Synthetic oligonucleotide
  Sense strand starting at position 691 of SEQ ID NO: 1886062
uagggaaaugacugcuaau

SEQ ID NO: 2385645 - RNA, 19 nt, Artificial Sequence
  Description of Artificial Sequence: Synthetic oligonucleotide
  Antisense strand to SEQ ID NO: 2385644
auuagcagucauuucccua

SEQ ID NO: 2385646 - RNA, 19 nt, Artificial Sequence
  Description of Artificial Sequence: Synthetic oligonucleotide
  Sense strand starting at position 702 of SEQ ID NO: 1886062
cugcuaaugguacagaguu

SEQ ID NO: 2385647 - RNA, 19 nt, Artificial Sequence
  Description of Artificial Sequence: Synthetic oligonucleotide
  Antisense strand to SEQ ID NO: 2385646
aacucuguaccauuagcag

SEQ ID NO: 2385648 - RNA, 19 nt, Artificial Sequence
  Description of Artificial Sequence: Synthetic oligonucleotide
  Sense strand starting at position 753 of SEQ ID NO: 1886062
gauggagaugguugcacaa

SEQ ID NO: 2385649 - RNA, 19 nt, Artificial Sequence
  Description of Artificial Sequence: Synthetic oligonucleotide
  Antisense strand to SEQ ID NO: 2385648
uugugcaaccaucuccauc

SEQ ID NO: 2385650 - RNA, 19 nt, Artificial Sequence
  Description of Artificial Sequence: Synthetic oligonucleotide
  Sense strand starting at position 813 of SEQ ID NO: 1886062
augggugaauacuaugaca

SEQ ID NO: 2385651 - RNA, 19 nt, Artificial Sequence
  Description of Artificial Sequence: Synthetic oligonucleotide
  Antisense strand to SEQ ID NO: 2385650
ugucauaguauucacccau

SEQ ID NO: 2385652 - RNA, 19 nt, Artificial Sequence
  Description of Artificial Sequence: Synthetic oligonucleotide
  Sense strand starting at position 818 of SEQ ID NO: 1886062
ugaauacuaugacauguga

SEQ ID NO: 2385653 - RNA, 19 nt, Artificial Sequence
  Description of Artificial Sequence: Synthetic oligonucleotide
  Antisense strand to SEQ ID NO: 2385652
ucacaugucauaguauuca

SEQ ID NO: 2385654 - RNA, 19 nt, Artificial Sequence
  Description of Artificial Sequence: Synthetic oligonucleotide
  Sense strand starting at position 921 of SEQ ID NO: 1886062
cggcaugcuggauaugaau

SEQ ID NO: 2385655 - RNA, 19 nt, Artificial Sequence
  Description of Artificial Sequence: Synthetic oligonucleotide
  Antisense strand to SEQ ID NO: 2385654
auucauauccagcaugccg

SEQ ID NO: 2385656 - RNA, 19 nt, Artificial Sequence
  Description of Artificial Sequence: Synthetic oligonucleotide
  Sense strand starting at position 923 of SEQ ID NO: 1886062
gcaugcuggauaugaaugu

SEQ ID NO: 2385657 - RNA, 19 nt, Artificial Sequence
  Description of Artificial Sequence: Synthetic oligonucleotide
  Antisense strand to SEQ ID NO: 2385656
acauucauauccagcaugc

SEQ ID NO: 2385658 - RNA, 19 nt, Artificial Sequence
  Description of Artificial Sequence: Synthetic oligonucleotide
  Sense strand starting at position 927 of SEQ ID NO: 1886062
gcuggauaugaauguaucu

SEQ ID NO: 2385659 - RNA, 19 nt, Artificial Sequence
  Description of Artificial Sequence: Synthetic oligonucleotide
  Antisense strand to SEQ ID NO: 2385658
agauacauucauauccagc

SEQ ID NO: 2385660 - RNA, 19 nt, Artificial Sequence
  Description of Artificial Sequence: Synthetic oligonucleotide
  Sense strand starting at position 1049 of SEQ ID NO: 1886062
cacaguauggcuuggcauu

SEQ ID NO: 2385661 - RNA, 19 nt, Artificial Sequence
  Description of Artificial Sequence: Synthetic oligonucleotide
  Antisense strand to SEQ ID NO: 2385660
aaugccaagccauacugug

SEQ ID NO: 2385662 - RNA, 19 nt, Artificial Sequence
  Description of Artificial Sequence: Synthetic oligonucleotide
  Sense strand starting at position 1050 of SEQ ID NO: 1886062
acaguauggcuuggcauuu

SEQ ID NO: 2385663 - RNA, 19 nt, Artificial Sequence
  Description of Artificial Sequence: Synthetic oligonucleotide
  Antisense strand to SEQ ID NO: 2385662
aaaugccaagccauacugu

SEQ ID NO: 2385664 - RNA, 19 nt, Artificial Sequence
  Description of Artificial Sequence: Synthetic oligonucleotide
  Sense strand starting at position 1369 of SEQ ID NO: 1886062
gcaucuuuagggcagaucu

SEQ ID NO: 2385665 - RNA, 19 nt, Artificial Sequence
  Description of Artificial Sequence: Synthetic oligonucleotide
  Antisense strand to SEQ ID NO: 2385664
agaucugcccuaaagaugc

SEQ ID NO: 2385666 - RNA, 19 nt, Artificial Sequence
  Description of Artificial Sequence: Synthetic oligonucleotide
  Sense strand starting at position 1379 of SEQ ID NO: 1886062
ggcagaucucaguaugccu

SEQ ID NO: 2385667 - RNA, 19 nt, Artificial Sequence
  Description of Artificial Sequence: Synthetic oligonucleotide
  Antisense strand to SEQ ID NO: 2385666
aggcauacugagaucugcc

SEQ ID NO: 2385668 - RNA, 19 nt, Artificial Sequence
  Description of Artificial Sequence: Synthetic oligonucleotide
  Sense strand starting at position 1527 of SEQ ID NO: 1886062
ggcuuuguuagcuauacug

SEQ ID NO: 2385669 - RNA, 19 nt, Artificial Sequence
  Description of Artificial Sequence: Synthetic oligonucleotide
  Antisense strand to SEQ ID NO: 2385668
caguauagcuaacaaagcc

SEQ ID NO: 2385670 - RNA, 19 nt, Artificial Sequence
  Description of Artificial Sequence: Synthetic oligonucleotide
  Sense strand starting at position 1529 of SEQ ID NO: 1886062
cuuuguuagcuauacugca

SEQ ID NO: 2385671 - RNA, 19 nt, Artificial Sequence
  Description of Artificial Sequence: Synthetic oligonucleotide
  Antisense strand to SEQ ID NO: 2385670
ugcaguauagcuaacaaag

SEQ ID NO: 2385672 - RNA, 19 nt, Artificial Sequence
  Description of Artificial Sequence: Synthetic oligonucleotide
  Sense strand starting at position 2093 of SEQ ID NO: 1886062
auuguuauaagcugaagag

SEQ ID NO: 2385673 - RNA, 19 nt, Artificial Sequence
  Description of Artificial Sequence: Synthetic oligonucleotide
  Antisense strand to SEQ ID NO: 2385672
cucuucagcuuauaacaau

SEQ ID NO: 2385674 - RNA, 19 nt, Artificial Sequence
  Description of Artificial Sequence: Synthetic oligonucleotide
  Sense strand starting at position 2209 of SEQ ID NO: 1886062
accauuguguuuguaccua

SEQ ID NO: 2385675 - RNA, 19 nt, Artificial Sequence
  Description of Artificial Sequence: Synthetic oligonucleotide
  Antisense strand to SEQ ID NO: 2385674
uagguacaaacacaauggu

SEQ ID NO: 2385676 - RNA, 19 nt, Artificial Sequence
  Description of Artificial Sequence: Synthetic oligonucleotide
  Sense strand starting at position 2257 of SEQ ID NO: 1886062
auaguaaugugagcugguu

SEQ ID NO: 2385677 - RNA, 19 nt, Artificial Sequence
  Description of Artificial Sequence: Synthetic oligonucleotide
  Antisense strand to SEQ ID NO: 2385676
aaccagcucacauuacuau

SEQ ID NO: 2385678 - RNA, 19 nt, Artificial Sequence
  Description of Artificial Sequence: Synthetic oligonucleotide
  Sense strand starting at position 2682 of SEQ ID NO: 1886062
uuaaguuugccagguauua

SEQ ID NO: 2385679 - RNA, 19 nt, Artificial Sequence
  Description of Artificial Sequence: Synthetic oligonucleotide
  Antisense strand to SEQ ID NO: 2385678
uaauaccuggcaaacuuaa

SEQ ID NO: 2385680 - RNA, 19 nt, Artificial Sequence
  Description of Artificial Sequence: Synthetic oligonucleotide
  Sense strand starting at position 2691 of SEQ ID NO: 1886062
ccagguauuaugugagcca

SEQ ID NO: 2385681 - RNA, 19 nt, Artificial Sequence
  Description of Artificial Sequence: Synthetic oligonucleotide
  Antisense strand to SEQ ID NO: 2385680
uggcucacauaauaccugg

SEQ ID NO: 2385682 - RNA, 19 nt, Artificial Sequence
  Description of Artificial Sequence: Synthetic oligonucleotide
  Sense strand starting at position 2694 of SEQ ID NO: 1886062
gguauuaugugagccauag

SEQ ID NO: 2385683 - RNA, 19 nt, Artificial Sequence
  Description of Artificial Sequence: Synthetic oligonucleotide
  Antisense strand to SEQ ID NO: 2385682
cuauggcucacauaauacc

SEQ ID NO: 2385684 - RNA, 19 nt, Artificial Sequence
  Description of Artificial Sequence: Synthetic oligonucleotide
  Sense strand starting at position 2722 of SEQ ID NO: 1886062
uguauaugcuucucaugag

SEQ ID NO: 2385685 - RNA, 19 nt, Artificial Sequence
  Description of Artificial Sequence: Synthetic oligonucleotide
  Antisense strand to SEQ ID NO: 2385684
cucaugagaagcauauaca

SEQ ID NO: 2385686 - RNA, 19 nt, Artificial Sequence
  Description of Artificial Sequence: Synthetic oligonucleotide
  Sense strand starting at position 2726 of SEQ ID NO: 1886062
uaugcuucucaugagugga

SEQ ID NO: 2385687 - RNA, 19 nt, Artificial Sequence
  Description of Artificial Sequence: Synthetic oligonucleotide
  Antisense strand to SEQ ID NO: 2385686
uccacucaugagaagcaua

SEQ ID NO: 2385688 - RNA, 19 nt, Artificial Sequence
  Description of Artificial Sequence: Synthetic oligonucleotide
  Sense strand starting at position 2759 of SEQ ID NO: 1886062
ggcauagaguaggcucuua

SEQ ID NO: 2385689 - RNA, 19 nt, Artificial Sequence
  Description of Artificial Sequence: Synthetic oligonucleotide
  Antisense strand to SEQ ID NO: 2385688
uaagagccuacucuaugcc

SEQ ID NO: 2385690 - RNA, 19 nt, Artificial Sequence
  Description of Artificial Sequence: Synthetic oligonucleotide
  Sense strand starting at position 2792 of SEQ ID NO: 1886062
uaauuacucgaugaaggca

SEQ ID NO: 2385691 - RNA, 19 nt, Artificial Sequence
  Description of Artificial Sequence: Synthetic oligonucleotide
  Antisense strand to SEQ ID NO: 2385690
ugccuucaucgaguaauua

SEQ ID NO: 2385692 - RNA, 19 nt, Artificial Sequence
  Description of Artificial Sequence: Synthetic oligonucleotide
  Sense strand starting at position 2806 of SEQ ID NO: 1886062
aggcacaauugaucuaagu

SEQ ID NO: 2385693 - RNA, 19 nt, Artificial Sequence
  Description of Artificial Sequence: Synthetic oligonucleotide
  Antisense strand to SEQ ID NO: 2385692
acuuagaucaauugugccu

SEQ ID NO: 2385694 - RNA, 19 nt, Artificial Sequence
  Description of Artificial Sequence: Synthetic oligonucleotide
  Sense strand starting at position 3031 of SEQ ID NO: 1886062
cacugauacuggguuuaua

SEQ ID NO: 2385695 - RNA, 19 nt, Artificial Sequence
  Description of Artificial Sequence: Synthetic oligonucleotide
  Antisense strand to SEQ ID NO: 2385694
uauaaacccaguaucagug

SEQ ID NO: 2385696 - RNA, 19 nt, Artificial Sequence
  Description of Artificial Sequence: Synthetic oligonucleotide
  Sense strand starting at position 3042 of SEQ ID NO: 1886062
gguuuauaaacauguuagg

SEQ ID NO: 2385697 - RNA, 19 nt, Artificial Sequence
  Description of Artificial Sequence: Synthetic oligonucleotide
  Antisense strand to SEQ ID NO: 2385696
ccuaacauguuuauaaacc

SEQ ID NO: 2385698 - RNA, 19 nt, Artificial Sequence
  Description of Artificial Sequence: Synthetic oligonucleotide
  Sense strand starting at position 3080 of SEQ ID NO: 1886062
uaaggcaugugucugcuaa

SEQ ID NO: 2385699 - RNA, 19 nt, Artificial Sequence
  Description of Artificial Sequence: Synthetic oligonucleotide
  Antisense strand to SEQ ID NO: 2385698
uuagcagacacaugccuua

SEQ ID NO: 2385700 - RNA, 19 nt, Artificial Sequence
  Description of Artificial Sequence: Synthetic oligonucleotide
  Sense strand starting at position 3090 of SEQ ID NO: 1886062
gucugcuaaugaucaggaa

SEQ ID NO: 2385701 - RNA, 19 nt, Artificial Sequence
  Description of Artificial Sequence: Synthetic oligonucleotide
  Antisense strand to SEQ ID NO: 2385700
uuccugaucauuagcagac

SEQ ID NO: 2385702 - RNA, 19 nt, Artificial Sequence
  Description of Artificial Sequence: Synthetic oligonucleotide
  Sense strand starting at position 3155 of SEQ ID NO: 1886062
caugguguggcucaaacau

SEQ ID NO: 2385703 - RNA, 19 nt, Artificial Sequence
  Description of Artificial Sequence: Synthetic oligonucleotide
  Antisense strand to SEQ ID NO: 2385702
auguuugagccacaccaug

SEQ ID NO: 2385704 - RNA, 19 nt, Artificial Sequence
  Description of Artificial Sequence: Synthetic oligonucleotide
  Sense strand starting at position 3196 of SEQ ID NO: 1886062
guaggaggucuguauucuc

SEQ ID NO: 2385705 - RNA, 19 nt, Artificial Sequence
  Description of Artificial Sequence: Synthetic oligonucleotide
  Antisense strand to SEQ ID NO: 2385704
gagaauacagaccuccuac

SEQ ID NO: 2385706 - RNA, 19 nt, Artificial Sequence
  Description of Artificial Sequence: Synthetic oligonucleotide
  Sense strand starting at position 3201 of SEQ ID NO: 1886062
aggucuguauucucuugau

SEQ ID NO: 2385707 - RNA, 19 nt, Artificial Sequence
  Description of Artificial Sequence: Synthetic oligonucleotide
  Antisense strand to SEQ ID NO: 2385706
aucaagagaauacagaccu

SEQ ID NO: 2385708 - RNA, 19 nt, Artificial Sequence
  Description of Artificial Sequence: Synthetic oligonucleotide
  Sense strand starting at position 3342 of SEQ ID NO: 1886062
ggugaacuccagggcucua

SEQ ID NO: 2385709 - RNA, 19 nt, Artificial Sequence
  Description of Artificial Sequence: Synthetic oligonucleotide
  Antisense strand to SEQ ID NO: 2385708
uagagcccuggaguucacc

SEQ ID NO: 2385710 - RNA, 19 nt, Artificial Sequence
  Description of Artificial Sequence: Synthetic oligonucleotide
  Sense strand starting at position 3489 of SEQ ID NO: 1886062
ugagauuagguucaucgua

SEQ ID NO: 2385711 - RNA, 19 nt, Artificial Sequence
  Description of Artificial Sequence: Synthetic oligonucleotide
  Antisense strand to SEQ ID NO: 2385710
uacgaugaaccuaaucuca

SEQ ID NO: 2385712 - RNA, 19 nt, Artificial Sequence
  Description of Artificial Sequence: Synthetic oligonucleotide
  Sense strand starting at position 3491 of SEQ ID NO: 1886062
agauuagguucaucguaga

SEQ ID NO: 2385713 - RNA, 19 nt, Artificial Sequence
  Description of Artificial Sequence: Synthetic oligonucleotide
  Antisense strand to SEQ ID NO: 2385712
ucuacgaugaaccuaaucu

SEQ ID NO: 2385714 - RNA, 19 nt, Artificial Sequence
  Description of Artificial Sequence: Synthetic oligonucleotide
  Sense strand starting at position 3793 of SEQ ID NO: 1886062
gguagacaauaucauaaga

SEQ ID NO: 2385715 - RNA, 19 nt, Artificial Sequence
  Description of Artificial Sequence: Synthetic oligonucleotide
  Antisense strand to SEQ ID NO: 2385714
ucuuaugauauugucuacc

SEQ ID NO: 2385716 - RNA, 19 nt, Artificial Sequence
  Description of Artificial Sequence: Synthetic oligonucleotide
  Sense strand starting at position 3861 of SEQ ID NO: 1886062
ggcauucucauccauggga

SEQ ID NO: 2385717 - RNA, 19 nt, Artificial Sequence
  Description of Artificial Sequence: Synthetic oligonucleotide
  Antisense strand to SEQ ID NO: 2385716
ucccauggaugagaaugcc

SEQ ID NO: 2385718 - RNA, 19 nt, Artificial Sequence
  Description of Artificial Sequence: Synthetic oligonucleotide
  Sense strand starting at position 10 of SEQ ID NO: 1886063
agaaaugagagcuaugcuu

SEQ ID NO: 2385719 - RNA, 19 nt, Artificial Sequence
  Description of Artificial Sequence: Synthetic oligonucleotide
  Antisense strand to SEQ ID NO: 2385718
aagcauagcucucauuucu

SEQ ID NO: 2385720 - RNA, 19 nt, Artificial Sequence
  Description of Artificial Sequence: Synthetic oligonucleotide
  Sense strand starting at position 127 of SEQ ID NO: 1886063
acacuuaugccgcauaaag

SEQ ID NO: 2385721 - RNA, 19 nt, Artificial Sequence
  Description of Artificial Sequence: Synthetic oligonucleotide
  Antisense strand to SEQ ID NO: 2385720
cuuuaugcggcauaagugu

SEQ ID NO: 2385722 - RNA, 19 nt, Artificial Sequence
  Description of Artificial Sequence: Synthetic oligonucleotide
  Sense strand starting at position 137 of SEQ ID NO: 1886063
cgcauaaagacagaguuau

SEQ ID NO: 2385723 - RNA, 19 nt, Artificial Sequence
  Description of Artificial Sequence: Synthetic oligonucleotide
  Antisense strand to SEQ ID NO: 2385722
auaacucugucuuuaugcg

SEQ ID NO: 2385724 - RNA, 19 nt, Artificial Sequence
  Description of Artificial Sequence: Synthetic oligonucleotide
  Sense strand starting at position 250 of SEQ ID NO: 1886063
ccaggugacuaccugagau

SEQ ID NO: 2385725 - RNA, 19 nt, Artificial Sequence
  Description of Artificial Sequence: Synthetic oligonucleotide
  Antisense strand to SEQ ID NO: 2385724
aucucagguagucaccugg

SEQ ID NO: 2385726 - RNA, 19 nt, Artificial Sequence
  Description of Artificial Sequence: Synthetic oligonucleotide
  Sense strand starting at position 508 of SEQ ID NO: 1886063
cugcaaucucaugaaagca

SEQ ID NO: 2385727 - RNA, 19 nt, Artificial Sequence
  Description of Artificial Sequence: Synthetic oligonucleotide
  Antisense strand to SEQ ID NO: 2385726
ugcuuucaugagauugcag

SEQ ID NO: 2385728 - RNA, 19 nt, Artificial Sequence
  Description of Artificial Sequence: Synthetic oligonucleotide
  Sense strand starting at position 600 of SEQ ID NO: 1886063
uccaguuugcuuuaaagga

SEQ ID NO: 2385729 - RNA, 19 nt, Artificial Sequence
  Description of Artificial Sequence: Synthetic oligonucleotide
  Antisense strand to SEQ ID NO: 2385728
uccuuuaaagcaaacugga

SEQ ID NO: 2385730 - RNA, 19 nt, Artificial Sequence
  Description of Artificial Sequence: Synthetic oligonucleotide
  Sense strand starting at position 820 of SEQ ID NO: 1886063
gaaugagauccaggcauca

SEQ ID NO: 2385731 - RNA, 19 nt, Artificial Sequence
  Description of Artificial Sequence: Synthetic oligonucleotide
  Antisense strand to SEQ ID NO: 2385730
ugaugccuggaucucauuc

SEQ ID NO: 2385732 - RNA, 19 nt, Artificial Sequence
  Description of Artificial Sequence: Synthetic oligonucleotide
  Sense strand starting at position 822 of SEQ ID NO: 1886063
augagauccaggcaucagu

SEQ ID NO: 2385733 - RNA, 19 nt, Artificial Sequence
  Description of Artificial Sequence: Synthetic oligonucleotide
  Antisense strand to SEQ ID NO: 2385732
acugaugccuggaucucau

SEQ ID NO: 2385734 - RNA, 19 nt, Artificial Sequence
  Description of Artificial Sequence: Synthetic oligonucleotide
  Sense strand starting at position 865 of SEQ ID NO: 1886063
ccugcauuaaagugagaag

SEQ ID NO: 2385735 - RNA, 19 nt, Artificial Sequence
  Description of Artificial Sequence: Synthetic oligonucleotide
  Antisense strand to SEQ ID NO: 2385734
cuucucacuuuaaugcagg

SEQ ID NO: 2385736 - RNA, 19 nt, Artificial Sequence
  Description of Artificial Sequence: Synthetic oligonucleotide
  Sense strand starting at position 972 of SEQ ID NO: 1886063
ugauguaauuugccaugca

SEQ ID NO: 2385737 - RNA, 19 nt, Artificial Sequence
  Description of Artificial Sequence: Synthetic oligonucleotide
  Antisense strand to SEQ ID NO: 2385736
ugcauggcaaauuacauca

SEQ ID NO: 2385738 - RNA, 19 nt, Artificial Sequence
  Description of Artificial Sequence: Synthetic oligonucleotide
  Sense strand starting at position 975 of SEQ ID NO: 1886063
uguaauuugccaugcauca

SEQ ID NO: 2385739 - RNA, 19 nt, Artificial Sequence
  Description of Artificial Sequence: Synthetic oligonucleotide
  Antisense strand to SEQ ID NO: 2385738
ugaugcauggcaaauuaca

SEQ ID NO: 2385740 - RNA, 19 nt, Artificial Sequence
  Description of Artificial Sequence: Synthetic oligonucleotide
  Sense strand starting at position 1328 of SEQ ID NO: 1886063
gguauaaguaauuaugagu

SEQ ID NO: 2385741 - RNA, 19 nt, Artificial Sequence
  Description of Artificial Sequence: Synthetic oligonucleotide
  Antisense strand to SEQ ID NO: 2385740
acucauaauuacuuauacc

SEQ ID NO: 2385742 - RNA, 19 nt, Artificial Sequence
  Description of Artificial Sequence: Synthetic oligonucleotide
  Sense strand starting at position 1361 of SEQ ID NO: 1886063
cugaaucaacaacguaaua

SEQ ID NO: 2385743 - RNA, 19 nt, Artificial Sequence
  Description of Artificial Sequence: Synthetic oligonucleotide
  Antisense strand to SEQ ID NO: 2385742
uauuacguuguugauucag

SEQ ID NO: 2385744 - RNA, 19 nt, Artificial Sequence
  Description of Artificial Sequence: Synthetic oligonucleotide
  Sense strand starting at position 1441 of SEQ ID NO: 1886063
agcacaugguuccuauaaa

SEQ ID NO: 2385745 - RNA, 19 nt, Artificial Sequence
  Description of Artificial Sequence: Synthetic oligonucleotide
  Antisense strand to SEQ ID NO: 2385744
uuuauaggaaccaugugcu

SEQ ID NO: 2385746 - RNA, 19 nt, Artificial Sequence
  Description of Artificial Sequence: Synthetic oligonucleotide
  Sense strand starting at position 1620 of SEQ ID NO: 1886063
uauaaagaagucuguggaa

SEQ ID NO: 2385747 - RNA, 19 nt, Artificial Sequence
  Description of Artificial Sequence: Synthetic oligonucleotide
  Antisense strand to SEQ ID NO: 2385746
uuccacagacuucuuuaua

SEQ ID NO: 2385748 - RNA, 19 nt, Artificial Sequence
  Description of Artificial Sequence: Synthetic oligonucleotide
  Sense strand starting at position 1622 of SEQ ID NO: 1886063
uaaagaagucuguggaaua

SEQ ID NO: 2385749 - RNA, 19 nt, Artificial Sequence
  Description of Artificial Sequence: Synthetic oligonucleotide
  Antisense strand to SEQ ID NO: 2385748
uauuccacagacuucuuua

SEQ ID NO: 2385750 - RNA, 19 nt, Artificial Sequence
  Description of Artificial Sequence: Synthetic oligonucleotide
  Sense strand starting at position 1994 of SEQ ID NO: 1886063
gugacuggccggcaaagaa

SEQ ID NO: 2385751 - RNA, 19 nt, Artificial Sequence
  Description of Artificial Sequence: Synthetic oligonucleotide
  Antisense strand to SEQ ID NO: 2385750
uucuuugccggccagucac

SEQ ID NO: 2385752 - RNA, 19 nt, Artificial Sequence
  Description of Artificial Sequence: Synthetic oligonucleotide
  Sense strand starting at position 2038 of SEQ ID NO: 1886063
gauguaaauggacguuuga

SEQ ID NO: 2385753 - RNA, 19 nt, Artificial Sequence
  Description of Artificial Sequence: Synthetic oligonucleotide
  Antisense strand to SEQ ID NO: 2385752
ucaaacguccauuuacauc

SEQ ID NO: 2385754 - RNA, 19 nt, Artificial Sequence
  Description of Artificial Sequence: Synthetic oligonucleotide
  Sense strand starting at position 2176 of SEQ ID NO: 1886063
uggagagucacuuauguuu

SEQ ID NO: 2385755 - RNA, 19 nt, Artificial Sequence
  Description of Artificial Sequence: Synthetic oligonucleotide
  Antisense strand to SEQ ID NO: 2385754
aaacauaagugacucucca

SEQ ID NO: 2385756 - RNA, 19 nt, Artificial Sequence
  Description of Artificial Sequence: Synthetic oligonucleotide
  Sense strand starting at position 2234 of SEQ ID NO: 1886063
uggaaaguaauagguucuu

SEQ ID NO: 2385757 - RNA, 19 nt, Artificial Sequence
  Description of Artificial Sequence: Synthetic oligonucleotide
  Antisense strand to SEQ ID NO: 2385756
aagaaccuauuacuuucca

SEQ ID NO: 2385758 - RNA, 19 nt, Artificial Sequence
  Description of Artificial Sequence: Synthetic oligonucleotide
  Sense strand starting at position 2321 of SEQ ID NO: 1886063
uagugaagucuuuacccag

SEQ ID NO: 2385759 - RNA, 19 nt, Artificial Sequence
  Description of Artificial Sequence: Synthetic oligonucleotide
  Antisense strand to SEQ ID NO: 2385758
cuggguaaagacuucacua

SEQ ID NO: 2385760 - RNA, 19 nt, Artificial Sequence
  Description of Artificial Sequence: Synthetic oligonucleotide
  Sense strand starting at position 2458 of SEQ ID NO: 1886063
caggauugguccuccagag

SEQ ID NO: 2385761 - RNA, 19 nt, Artificial Sequence
  Description of Artificial Sequence: Synthetic oligonucleotide
  Antisense strand to SEQ ID NO: 2385760
cucuggaggaccaauccug

SEQ ID NO: 2385762 - RNA, 19 nt, Artificial Sequence
  Description of Artificial Sequence: Synthetic oligonucleotide
  Sense strand starting at position 2582 of SEQ ID NO: 1886063
aaagguaagcgcguucuca

SEQ ID NO: 2385763 - RNA, 19 nt, Artificial Sequence
  Description of Artificial Sequence: Synthetic oligonucleotide
  Antisense strand to SEQ ID NO: 2385762
ugagaacgcgcuuaccuuu

SEQ ID NO: 2385764 - RNA, 19 nt, Artificial Sequence
  Description of Artificial Sequence: Synthetic oligonucleotide
  Sense strand starting at position 2583 of SEQ ID NO: 1886063
aagguaagcgcguucucau

SEQ ID NO: 2385765 - RNA, 19 nt, Artificial Sequence
  Description of Artificial Sequence: Synthetic oligonucleotide
  Antisense strand to SEQ ID NO: 2385764
augagaacgcgcuuaccuu

SEQ ID NO: 2385766 - RNA, 19 nt, Artificial Sequence
  Description of Artificial Sequence: Synthetic oligonucleotide
  Sense strand starting at position 2584 of SEQ ID NO: 1886063
agguaagcgcguucucaug

SEQ ID NO: 2385767 - RNA, 19 nt, Artificial Sequence
  Description of Artificial Sequence: Synthetic oligonucleotide
  Antisense strand to SEQ ID NO: 2385766
caugagaacgcgcuuaccu

SEQ ID NO: 2385768 - RNA, 19 nt, Artificial Sequence
  Description of Artificial Sequence: Synthetic oligonucleotide
  Sense strand starting at position 2590 of SEQ ID NO: 1886063
gcgcguucucauguaucca

SEQ ID NO: 2385769 - RNA, 19 nt, Artificial Sequence
  Description of Artificial Sequence: Synthetic oligonucleotide
  Antisense strand to SEQ ID NO: 2385768
uggauacaugagaacgcgc

SEQ ID NO: 2385770 - RNA, 19 nt, Artificial Sequence
  Description of Artificial Sequence: Synthetic oligonucleotide
  Sense strand starting at position 2729 of SEQ ID NO: 1886063
caugauucuguguaucgga

SEQ ID NO: 2385771 - RNA, 19 nt, Artificial Sequence
  Description of Artificial Sequence: Synthetic oligonucleotide
  Antisense strand to SEQ ID NO: 2385770
uccgauacacagaaucaug

SEQ ID NO: 2385772 - RNA, 19 nt, Artificial Sequence
  Description of Artificial Sequence: Synthetic oligonucleotide
  Sense strand starting at position 2794 of SEQ ID NO: 1886063
auaguauuacacuguggga

SEQ ID NO: 2385773 - RNA, 19 nt, Artificial Sequence
  Description of Artificial Sequence: Synthetic oligonucleotide
  Antisense strand to SEQ ID NO: 2385772
ucccacaguguaauacuau

SEQ ID NO: 2385774 - RNA, 19 nt, Artificial Sequence
  Description of Artificial Sequence: Synthetic oligonucleotide
  Sense strand starting at position 2939 of SEQ ID NO: 1886063
aggauugcugugggaagua

SEQ ID NO: 2385775 - RNA, 19 nt, Artificial Sequence
  Description of Artificial Sequence: Synthetic oligonucleotide
  Antisense strand to SEQ ID NO: 2385774
uacuucccacagcaauccu

SEQ ID NO: 2385776 - RNA, 19 nt, Artificial Sequence
  Description of Artificial Sequence: Synthetic oligonucleotide
  Sense strand starting at position 2948 of SEQ ID NO: 1886063
gugggaaguaagcgagaaa

SEQ ID NO: 2385777 - RNA, 19 nt, Artificial Sequence
  Description of Artificial Sequence: Synthetic oligonucleotide
  Antisense strand to SEQ ID NO: 2385776
uuucucgcuuacuucccac

SEQ ID NO: 2385778 - RNA, 19 nt, Artificial Sequence
  Description of Artificial Sequence: Synthetic oligonucleotide
  Sense strand starting at position 3064 of SEQ ID NO: 1886063
cucagugauuuauucggca

SEQ ID NO: 2385779 - RNA, 19 nt, Artificial Sequence
  Description of Artificial Sequence: Synthetic oligonucleotide
  Antisense strand to SEQ ID NO: 2385778
ugccgaauaaaucacugag

SEQ ID NO: 2385780 - RNA, 19 nt, Artificial Sequence
  Description of Artificial Sequence: Synthetic oligonucleotide
  Sense strand starting at position 3303 of SEQ ID NO: 1886063
ucaauuagaugagcuauaa

SEQ ID NO: 2385781 - RNA, 19 nt, Artificial Sequence
  Description of Artificial Sequence: Synthetic oligonucleotide
  Antisense strand to SEQ ID NO: 2385780
uuauagcucaucuaauuga

SEQ ID NO: 2385782 - RNA, 19 nt, Artificial Sequence
  Description of Artificial Sequence: Synthetic oligonucleotide
  Sense strand starting at position 3323 of SEQ ID NO: 1886063
aagcccuuagcauggagaa

SEQ ID NO: 2385783 - RNA, 19 nt, Artificial Sequence
  Description of Artificial Sequence: Synthetic oligonucleotide
  Antisense strand to SEQ ID NO: 2385782
uucuccaugcuaagggcuu

SEQ ID NO: 2385784 - RNA, 19 nt, Artificial Sequence
  Description of Artificial Sequence: Synthetic oligonucleotide
  Sense strand starting at position 3324 of SEQ ID NO: 1886063
agcccuuagcauggagaau

SEQ ID NO: 2385785 - RNA, 19 nt, Artificial Sequence
  Description of Artificial Sequence: Synthetic oligonucleotide
  Antisense strand to SEQ ID NO: 2385784
auucuccaugcuaagggcu

SEQ ID NO: 2385786 - RNA, 19 nt, Artificial Sequence
  Description of Artificial Sequence: Synthetic oligonucleotide
  Sense strand starting at position 3325 of SEQ ID NO: 1886063
gcccuuagcauggagaauu

SEQ ID NO: 2385787 - RNA, 19 nt, Artificial Sequence
  Description of Artificial Sequence: Synthetic oligonucleotide
  Antisense strand to SEQ ID NO: 2385786
aauucuccaugcuaagggc

SEQ ID NO: 2385788 - RNA, 19 nt, Artificial Sequence
  Description of Artificial Sequence: Synthetic oligonucleotide
  Sense strand starting at position 3346 of SEQ ID NO: 1886063
aaagauguguagcugauau

SEQ ID NO: 2385789 - RNA, 19 nt, Artificial Sequence
  Description of Artificial Sequence: Synthetic oligonucleotide
  Antisense strand to SEQ ID NO: 2385788
auaucagcuacacaucuuu

SEQ ID NO: 2385790 - RNA, 19 nt, Artificial Sequence
  Description of Artificial Sequence: Synthetic oligonucleotide
  Sense strand starting at position 3348 of SEQ ID NO: 1886063
agauguguagcugauauca

SEQ ID NO: 2385791 - RNA, 19 nt, Artificial Sequence
  Description of Artificial Sequence: Synthetic oligonucleotide
  Antisense strand to SEQ ID NO: 2385790
ugauaucagcuacacaucu

SEQ ID NO: 2385792 - RNA, 19 nt, Artificial Sequence
  Description of Artificial Sequence: Synthetic oligonucleotide
  Sense strand starting at position 3391 of SEQ ID NO: 1886063
cagugacauugacccagaa

SEQ ID NO: 2385793 - RNA, 19 nt, Artificial Sequence
  Description of Artificial Sequence: Synthetic oligonucleotide
  Antisense strand to SEQ ID NO: 2385792
uucugggucaaugucacug

SEQ ID NO: 2385794 - RNA, 19 nt, Artificial Sequence
  Description of Artificial Sequence: Synthetic oligonucleotide
  Sense strand starting at position 3571 of SEQ ID NO: 1886063
ggcacuaauuacuuuggaa

SEQ ID NO: 2385795 - RNA, 19 nt, Artificial Sequence
  Description of Artificial Sequence: Synthetic oligonucleotide
  Antisense strand to SEQ ID NO: 2385794
uuccaaaguaauuagugcc

SEQ ID NO: 2385796 - RNA, 19 nt, Artificial Sequence
  Description of Artificial Sequence: Synthetic oligonucleotide
  Sense strand starting at position 3913 of SEQ ID NO: 1886063
aaaucagagcccugguaga

SEQ ID NO: 2385797 - RNA, 19 nt, Artificial Sequence
  Description of Artificial Sequence: Synthetic oligonucleotide
  Antisense strand to SEQ ID NO: 2385796
ucuaccagggcucugauuu

SEQ ID NO: 2385798 - RNA, 19 nt, Artificial Sequence
  Description of Artificial Sequence: Synthetic oligonucleotide
  Sense strand starting at position 544 of SEQ ID NO: 1886064
agaacaugcuggucaguga

SEQ ID NO: 2385799 - RNA, 19 nt, Artificial Sequence
  Description of Artificial Sequence: Synthetic oligonucleotide
  Antisense strand to SEQ ID NO: 2385798
ucacugaccagcauguucu

SEQ ID NO: 2385800 - RNA, 19 nt, Artificial Sequence
  Description of Artificial Sequence: Synthetic oligonucleotide
  Sense strand starting at position 730 of SEQ ID NO: 1886064
cgguguucucuagcugugu

SEQ ID NO: 2385801 - RNA, 19 nt, Artificial Sequence
  Description of Artificial Sequence: Synthetic oligonucleotide
  Antisense strand to SEQ ID NO: 2385800
acacagcuagagaacaccg

SEQ ID NO: 2385802 - RNA, 19 nt, Artificial Sequence
  Description of Artificial Sequence: Synthetic oligonucleotide
  Sense strand starting at position 815 of SEQ ID NO: 1886064
aucgcuucucaauggagaa

SEQ ID NO: 2385803 - RNA, 19 nt, Artificial Sequence
  Description of Artificial Sequence: Synthetic oligonucleotide
  Antisense strand to SEQ ID NO: 2385802
uucuccauugagaagcgau

SEQ ID NO: 2385804 - RNA, 19 nt, Artificial Sequence
  Description of Artificial Sequence: Synthetic oligonucleotide
  Sense strand starting at position 816 of SEQ ID NO: 1886064
ucgcuucucaauggagaag

SEQ ID NO: 2385805 - RNA, 19 nt, Artificial Sequence
  Description of Artificial Sequence: Synthetic oligonucleotide
  Antisense strand to SEQ ID NO: 2385804
cuucuccauugagaagcga

SEQ ID NO: 2385806 - RNA, 19 nt, Artificial Sequence
  Description of Artificial Sequence: Synthetic oligonucleotide
  Sense strand starting at position 1052 of SEQ ID NO: 1886064
cauugagaacaguaguucu

SEQ ID NO: 2385807 - RNA, 19 nt, Artificial Sequence
  Description of Artificial Sequence: Synthetic oligonucleotide
  Antisense strand to SEQ ID NO: 2385806
agaacuacuguucucaaug

SEQ ID NO: 2385808 - RNA, 19 nt, Artificial Sequence
  Description of Artificial Sequence: Synthetic oligonucleotide
  Sense strand starting at position 1066 of SEQ ID NO: 1886064
guucucuuuccagaaagca

SEQ ID NO: 2385809 - RNA, 19 nt, Artificial Sequence
  Description of Artificial Sequence: Synthetic oligonucleotide
  Antisense strand to SEQ ID NO: 2385808
ugcuuucuggaaagagaac

SEQ ID NO: 2385810 - RNA, 19 nt, Artificial Sequence
  Description of Artificial Sequence: Synthetic oligonucleotide
  Sense strand starting at position 1241 of SEQ ID NO: 1886064
agucaauuaggcuaugaua

SEQ ID NO: 2385811 - RNA, 19 nt, Artificial Sequence
  Description of Artificial Sequence: Synthetic oligonucleotide
  Antisense strand to SEQ ID NO: 2385810
uaucauagccuaauugacu

SEQ ID NO: 2385812 - RNA, 19 nt, Artificial Sequence
  Description of Artificial Sequence: Synthetic oligonucleotide
  Sense strand starting at position 1243 of SEQ ID NO: 1886064
ucaauuaggcuaugauauu

SEQ ID NO: 2385813 - RNA, 19 nt, Artificial Sequence
  Description of Artificial Sequence: Synthetic oligonucleotide
  Antisense strand to SEQ ID NO: 2385812
aauaucauagccuaauuga

SEQ ID NO: 2385814 - RNA, 19 nt, Artificial Sequence
  Description of Artificial Sequence: Synthetic oligonucleotide
  Sense strand starting at position 1252 of SEQ ID NO: 1886064
cuaugauauuacuuuccga

SEQ ID NO: 2385815 - RNA, 19 nt, Artificial Sequence
  Description of Artificial Sequence: Synthetic oligonucleotide
  Antisense strand to SEQ ID NO: 2385814
ucggaaaguaauaucauag

SEQ ID NO: 2385816 - RNA, 19 nt, Artificial Sequence
  Description of Artificial Sequence: Synthetic oligonucleotide
  Sense strand starting at position 1255 of SEQ ID NO: 1886064
ugauauuacuuuccgauug

SEQ ID NO: 2385817 - RNA, 19 nt, Artificial Sequence
  Description of Artificial Sequence: Synthetic oligonucleotide
  Antisense strand to SEQ ID NO: 2385816
caaucggaaaguaauauca

SEQ ID NO: 2385818 - RNA, 19 nt, Artificial Sequence
  Description of Artificial Sequence: Synthetic oligonucleotide
  Sense strand starting at position 1381 of SEQ ID NO: 1886064
auauccaagguuuguacaa

SEQ ID NO: 2385819 - RNA, 19 nt, Artificial Sequence
  Description of Artificial Sequence: Synthetic oligonucleotide
  Antisense strand to SEQ ID NO: 2385818
uuguacaaaccuuggauau

SEQ ID NO: 2385820 - RNA, 19 nt, Artificial Sequence
  Description of Artificial Sequence: Synthetic oligonucleotide
  Sense strand starting at position 1454 of SEQ ID NO: 1886064
cuguuacugugaguggaaa

SEQ ID NO: 2385821 - RNA, 19 nt, Artificial Sequence
  Description of Artificial Sequence: Synthetic oligonucleotide
  Antisense strand to SEQ ID NO: 2385820
uuuccacucacaguaacag

SEQ ID NO: 2385822 - RNA, 19 nt, Artificial Sequence
  Description of Artificial Sequence: Synthetic oligonucleotide
  Sense strand starting at position 1492 of SEQ ID NO: 1886064
aucugugcuccuugaauuu

SEQ ID NO: 2385823 - RNA, 19 nt, Artificial Sequence
  Description of Artificial Sequence: Synthetic oligonucleotide
  Antisense strand to SEQ ID NO: 2385822
aaauucaaggagcacagau

SEQ ID NO: 2385824 - RNA, 19 nt, Artificial Sequence
  Description of Artificial Sequence: Synthetic oligonucleotide
  Sense strand starting at position 1576 of SEQ ID NO: 1886064
ugaaucuagauguguuuga

SEQ ID NO: 2385825 - RNA, 19 nt, Artificial Sequence
  Description of Artificial Sequence: Synthetic oligonucleotide
  Antisense strand to SEQ ID NO: 2385824
ucaaacacaucuagauuca

SEQ ID NO: 2385826 - RNA, 19 nt, Artificial Sequence
  Description of Artificial Sequence: Synthetic oligonucleotide
  Sense strand starting at position 1586 of SEQ ID NO: 1886064
uguguuugaggcuauaauc

SEQ ID NO: 2385827 - RNA, 19 nt, Artificial Sequence
  Description of Artificial Sequence: Synthetic oligonucleotide
  Antisense strand to SEQ ID NO: 2385826
gauuauagccucaaacaca

SEQ ID NO: 2385828 - RNA, 19 nt, Artificial Sequence
  Description of Artificial Sequence: Synthetic oligonucleotide
  Sense strand starting at position 1595 of SEQ ID NO: 1886064
ggcuauaauccugaccuuu

SEQ ID NO: 2385829 - RNA, 19 nt, Artificial Sequence
  Description of Artificial Sequence: Synthetic oligonucleotide
  Antisense strand to SEQ ID NO: 2385828
aaaggucaggauuauagcc

SEQ ID NO: 2385830 - RNA, 19 nt, Artificial Sequence
  Description of Artificial Sequence: Synthetic oligonucleotide
  Sense strand starting at position 1863 of SEQ ID NO: 1886064
uaacguguucuuuccuguu

SEQ ID NO: 2385831 - RNA, 19 nt, Artificial Sequence
  Description of Artificial Sequence: Synthetic oligonucleotide
  Antisense strand to SEQ ID NO: 2385830
aacaggaaagaacacguua

SEQ ID NO: 2385832 - RNA, 19 nt, Artificial Sequence
  Description of Artificial Sequence: Synthetic oligonucleotide
  Sense strand starting at position 2018 of SEQ ID NO: 1886064
uugacugagcucgagacua

SEQ ID NO: 2385833 - RNA, 19 nt, Artificial Sequence
  Description of Artificial Sequence: Synthetic oligonucleotide
  Antisense strand to SEQ ID NO: 2385832
uagucucgagcucagucaa

SEQ ID NO: 2385834 - RNA, 19 nt, Artificial Sequence
  Description of Artificial Sequence: Synthetic oligonucleotide
  Sense strand starting at position 2029 of SEQ ID NO: 1886064
cgagacuaggcacaguauu

SEQ ID NO: 2385835 - RNA, 19 nt, Artificial Sequence
  Description of Artificial Sequence: Synthetic oligonucleotide
  Antisense strand to SEQ ID NO: 2385834
aauacugugccuagucucg

SEQ ID NO: 2385836 - RNA, 19 nt, Artificial Sequence
  Description of Artificial Sequence: Synthetic oligonucleotide
  Sense strand starting at position 2081 of SEQ ID NO: 1886064
cagcaacuccgauaacugu

SEQ ID NO: 2385837 - RNA, 19 nt, Artificial Sequence
  Description of Artificial Sequence: Synthetic oligonucleotide
  Antisense strand to SEQ ID NO: 2385836
acaguuaucggaguugcug

SEQ ID NO: 2385838 - RNA, 19 nt, Artificial Sequence
  Description of Artificial Sequence: Synthetic oligonucleotide
  Sense strand starting at position 2091 of SEQ ID NO: 1886064
gauaacugucuuuggagca

SEQ ID NO: 2385839 - RNA, 19 nt, Artificial Sequence
  Description of Artificial Sequence: Synthetic oligonucleotide
  Antisense strand to SEQ ID NO: 2385838
ugcuccaaagacaguuauc

SEQ ID NO: 2385840 - RNA, 19 nt, Artificial Sequence
  Description of Artificial Sequence: Synthetic oligonucleotide
  Sense strand starting at position 2096 of SEQ ID NO: 1886064
cugucuuuggagcacaagu

SEQ ID NO: 2385841 - RNA, 19 nt, Artificial Sequence
  Description of Artificial Sequence: Synthetic oligonucleotide
  Antisense strand to SEQ ID NO: 2385840
acuugugcuccaaagacag

SEQ ID NO: 2385842 - RNA, 19 nt, Artificial Sequence
  Description of Artificial Sequence: Synthetic oligonucleotide
  Sense strand starting at position 2469 of SEQ ID NO: 1886064
ggguuauagggauguaaua

SEQ ID NO: 2385843 - RNA, 19 nt, Artificial Sequence
  Description of Artificial Sequence: Synthetic oligonucleotide
  Antisense strand to SEQ ID NO: 2385842
uauuacaucccuauaaccc

SEQ ID NO: 2385844 - RNA, 19 nt, Artificial Sequence
  Description of Artificial Sequence: Synthetic oligonucleotide
  Sense strand starting at position 2478 of SEQ ID NO: 1886064
ggauguaauaagcaauugu

SEQ ID NO: 2385845 - RNA, 19 nt, Artificial Sequence
  Description of Artificial Sequence: Synthetic oligonucleotide
  Antisense strand to SEQ ID NO: 2385844
acaauugcuuauuacaucc

SEQ ID NO: 2385846 - RNA, 19 nt, Artificial Sequence
  Description of Artificial Sequence: Synthetic oligonucleotide
  Sense strand starting at position 2485 of SEQ ID NO: 1886064
auaagcaauuguuuacuga

SEQ ID NO: 2385847 - RNA, 19 nt, Artificial Sequence
  Description of Artificial Sequence: Synthetic oligonucleotide
  Antisense strand to SEQ ID NO: 2385846
ucaguaaacaauugcuuau

SEQ ID NO: 2385848 - RNA, 19 nt, Artificial Sequence
  Description of Artificial Sequence: Synthetic oligonucleotide
  Sense strand starting at position 2500 of SEQ ID NO: 1886064
cugacaguacccugaggau

SEQ ID NO: 2385849 - RNA, 19 nt, Artificial Sequence
  Description of Artificial Sequence: Synthetic oligonucleotide
  Antisense strand to SEQ ID NO: 2385848
auccucaggguacugucag

SEQ ID NO: 2385850 - RNA, 19 nt, Artificial Sequence
  Description of Artificial Sequence: Synthetic oligonucleotide
  Sense strand starting at position 2779 of SEQ ID NO: 1886064
ugaagcauucuagaaguac

SEQ ID NO: 2385851 - RNA, 19 nt, Artificial Sequence
  Description of Artificial Sequence: Synthetic oligonucleotide
  Antisense strand to SEQ ID NO: 2385850
guacuucuagaaugcuuca

SEQ ID NO: 2385852 - RNA, 19 nt, Artificial Sequence
  Description of Artificial Sequence: Synthetic oligonucleotide
  Sense strand starting at position 2807 of SEQ ID NO: 1886064
uuccuaauacgaugggagu

SEQ ID NO: 2385853 - RNA, 19 nt, Artificial Sequence
  Description of Artificial Sequence: Synthetic oligonucleotide
  Antisense strand to SEQ ID NO: 2385852
acucccaucguauuaggaa

SEQ ID NO: 2385854 - RNA, 19 nt, Artificial Sequence
  Description of Artificial Sequence: Synthetic oligonucleotide
  Sense strand starting at position 2818 of SEQ ID NO: 1886064
augggagugagcuaaggua

SEQ ID NO: 2385855 - RNA, 19 nt, Artificial Sequence
  Description of Artificial Sequence: Synthetic oligonucleotide
  Antisense strand to SEQ ID NO: 2385854
uaccuuagcucacucccau

SEQ ID NO: 2385856 - RNA, 19 nt, Artificial Sequence
  Description of Artificial Sequence: Synthetic oligonucleotide
  Sense strand starting at position 3166 of SEQ ID NO: 1886064
cuguuauaccaugagcauu

SEQ ID NO: 2385857 - RNA, 19 nt, Artificial Sequence
  Description of Artificial Sequence: Synthetic oligonucleotide
  Antisense strand to SEQ ID NO: 2385856
aaugcucaugguauaacag

SEQ ID NO: 2385858 - RNA, 19 nt, Artificial Sequence
  Description of Artificial Sequence: Synthetic oligonucleotide
  Sense strand starting at position 3247 of SEQ ID NO: 1886064
auaauauuccuucgaggag

SEQ ID NO: 2385859 - RNA, 19 nt, Artificial Sequence
  Description of Artificial Sequence: Synthetic oligonucleotide
  Antisense strand to SEQ ID NO: 2385858
cuccucgaaggaauauuau

SEQ ID NO: 2385860 - RNA, 19 nt, Artificial Sequence
  Description of Artificial Sequence: Synthetic oligonucleotide
  Sense strand starting at position 3268 of SEQ ID NO: 1886064
gcucuaagggcacacauaa

SEQ ID NO: 2385861 - RNA, 19 nt, Artificial Sequence
  Description of Artificial Sequence: Synthetic oligonucleotide
  Antisense strand to SEQ ID NO: 2385860
uuaugugugcccuuagagc

SEQ ID NO: 2385862 - RNA, 19 nt, Artificial Sequence
  Description of Artificial Sequence: Synthetic oligonucleotide
  Sense strand starting at position 3311 of SEQ ID NO: 1886064
agacaagccuucucugaca

SEQ ID NO: 2385863 - RNA, 19 nt, Artificial Sequence
  Description of Artificial Sequence: Synthetic oligonucleotide
  Antisense strand to SEQ ID NO: 2385862
ugucagagaaggcuugucu

SEQ ID NO: 2385864 - RNA, 19 nt, Artificial Sequence
  Description of Artificial Sequence: Synthetic oligonucleotide
  Sense strand starting at position 3348 of SEQ ID NO: 1886064
gcugguauggacugaaacu

SEQ ID NO: 2385865 - RNA, 19 nt, Artificial Sequence
  Description of Artificial Sequence: Synthetic oligonucleotide
  Antisense strand to SEQ ID NO: 2385864
aguuucaguccauaccagc

SEQ ID NO: 2385866 - RNA, 19 nt, Artificial Sequence
  Description of Artificial Sequence: Synthetic oligonucleotide
  Sense strand starting at position 3627 of SEQ ID NO: 1886064
uucagugaugauggugaua

SEQ ID NO: 2385867 - RNA, 19 nt, Artificial Sequence
  Description of Artificial Sequence: Synthetic oligonucleotide
  Antisense strand to SEQ ID NO: 2385866
uaucaccaucaucacugaa

SEQ ID NO: 2385868 - RNA, 19 nt, Artificial Sequence
  Description of Artificial Sequence: Synthetic oligonucleotide
  Sense strand starting at position 3652 of SEQ ID NO: 1886064
gugauauaguuacuaucua

SEQ ID NO: 2385869 - RNA, 19 nt, Artificial Sequence
  Description of Artificial Sequence: Synthetic oligonucleotide
  Antisense strand to SEQ ID NO: 2385868
uagauaguaacuauaucac

SEQ ID NO: 2385870 - RNA, 19 nt, Artificial Sequence
  Description of Artificial Sequence: Synthetic oligonucleotide
  Sense strand starting at position 3875 of SEQ ID NO: 1886064
gcucuuagaauauggugaa

SEQ ID NO: 2385871 - RNA, 19 nt, Artificial Sequence
  Description of Artificial Sequence: Synthetic oligonucleotide
  Antisense strand to SEQ ID NO: 2385870
uucaccauauucuaagagc

SEQ ID NO: 2385872 - RNA, 19 nt, Artificial Sequence
  Description of Artificial Sequence: Synthetic oligonucleotide
  Sense strand starting at position 3879 of SEQ ID NO: 1886064
uuagaauauggugaagugu

SEQ ID NO: 2385873 - RNA, 19 nt, Artificial Sequence
  Description of Artificial Sequence: Synthetic oligonucleotide
  Antisense strand to SEQ ID NO: 2385872
acacuucaccauauucuaa

SEQ ID NO: 2385874 - RNA, 19 nt, Artificial Sequence
  Description of Artificial Sequence: Synthetic oligonucleotide
  Sense strand starting at position 3918 of SEQ ID NO: 1886064
gcuaauucuccaggagaac

SEQ ID NO: 2385875 - RNA, 19 nt, Artificial Sequence
  Description of Artificial Sequence: Synthetic oligonucleotide
  Antisense strand to SEQ ID NO: 2385874
guucuccuggagaauuagc

SEQ ID NO: 2385876 - RNA, 19 nt, Artificial Sequence
  Description of Artificial Sequence: Synthetic oligonucleotide
  Sense strand starting at position 3930 of SEQ ID NO: 1886064
ggagaacgaaugugucaac

SEQ ID NO: 2385877 - RNA, 19 nt, Artificial Sequence
  Description of Artificial Sequence: Synthetic oligonucleotide
  Antisense strand to SEQ ID NO: 2385876
guugacacauucguucucc

SEQ ID NO: 2385878 - RNA, 19 nt, Artificial Sequence
  Description of Artificial Sequence: Synthetic oligonucleotide
  Sense strand starting at position 278 of SEQ ID NO: 1886065
ggaauucaggcaugugaua

SEQ ID NO: 2385879 - RNA, 19 nt, Artificial Sequence
  Description of Artificial Sequence: Synthetic oligonucleotide
  Antisense strand to SEQ ID NO: 2385878
uaucacaugccugaauucc

SEQ ID NO: 2385880 - RNA, 19 nt, Artificial Sequence
  Description of Artificial Sequence: Synthetic oligonucleotide
  Sense strand starting at position 836 of SEQ ID NO: 1886065
auggcugucccugaagaau

SEQ ID NO: 2385881 - RNA, 19 nt, Artificial Sequence
  Description of Artificial Sequence: Synthetic oligonucleotide
  Antisense strand to SEQ ID NO: 2385880
auucuucagggacagccau

SEQ ID NO: 2385882 - RNA, 19 nt, Artificial Sequence
  Description of Artificial Sequence: Synthetic oligonucleotide
  Sense strand starting at position 906 of SEQ ID NO: 1886065
uggcuucucccuuaugaca

SEQ ID NO: 2385883 - RNA, 19 nt, Artificial Sequence
  Description of Artificial Sequence: Synthetic oligonucleotide
  Antisense strand to SEQ ID NO: 2385882
ugucauaagggagaagcca

SEQ ID NO: 2385884 - RNA, 19 nt, Artificial Sequence
  Description of Artificial Sequence: Synthetic oligonucleotide
  Sense strand starting at position 1064 of SEQ ID NO: 1886065
guagcauacaaaugaggua

SEQ ID NO: 2385885 - RNA, 19 nt, Artificial Sequence
  Description of Artificial Sequence: Synthetic oligonucleotide
  Antisense strand to SEQ ID NO: 2385884
uaccucauuuguaugcuac

SEQ ID NO: 2385886 - RNA, 19 nt, Artificial Sequence
  Description of Artificial Sequence: Synthetic oligonucleotide
  Sense strand starting at position 1432 of SEQ ID NO: 1886065
auuaguugugaugggaauu

SEQ ID NO: 2385887 - RNA, 19 nt, Artificial Sequence
  Description of Artificial Sequence: Synthetic oligonucleotide
  Antisense strand to SEQ ID NO: 2385886
aauucccaucacaacuaau

SEQ ID NO: 2385888 - RNA, 19 nt, Artificial Sequence
  Description of Artificial Sequence: Synthetic oligonucleotide
  Sense strand starting at position 1433 of SEQ ID NO: 1886065
uuaguugugaugggaauua

SEQ ID NO: 2385889 - RNA, 19 nt, Artificial Sequence
  Description of Artificial Sequence: Synthetic oligonucleotide
  Antisense strand to SEQ ID NO: 2385888
uaauucccaucacaacuaa

SEQ ID NO: 2385890 - RNA, 19 nt, Artificial Sequence
  Description of Artificial Sequence: Synthetic oligonucleotide
  Sense strand starting at position 1442 of SEQ ID NO: 1886065
augggaauuaguugaucga

SEQ ID NO: 2385891 - RNA, 19 nt, Artificial Sequence
  Description of Artificial Sequence: Synthetic oligonucleotide
  Antisense strand to SEQ ID NO: 2385890
ucgaucaacuaauucccau

SEQ ID NO: 2385892 - RNA, 19 nt, Artificial Sequence
  Description of Artificial Sequence: Synthetic oligonucleotide
  Sense strand starting at position 1443 of SEQ ID NO: 1886065
ugggaauuaguugaucgau

SEQ ID NO: 2385893 - RNA, 19 nt, Artificial Sequence
  Description of Artificial Sequence: Synthetic oligonucleotide
  Antisense strand to SEQ ID NO: 2385892
aucgaucaacuaauuccca

SEQ ID NO: 2385894 - RNA, 19 nt, Artificial Sequence
  Description of Artificial Sequence: Synthetic oligonucleotide
  Sense strand starting at position 1445 of SEQ ID NO: 1886065
ggaauuaguugaucgauau

SEQ ID NO: 2385895 - RNA, 19 nt, Artificial Sequence
  Description of Artificial Sequence: Synthetic oligonucleotide
  Antisense strand to SEQ ID NO: 2385894
auaucgaucaacuaauucc

SEQ ID NO: 2385896 - RNA, 19 nt, Artificial Sequence
  Description of Artificial Sequence: Synthetic oligonucleotide
  Sense strand starting at position 1446 of SEQ ID NO: 1886065
gaauuaguugaucgauauu

SEQ ID NO: 2385897 - RNA, 19 nt, Artificial Sequence
  Description of Artificial Sequence: Synthetic oligonucleotide
  Antisense strand to SEQ ID NO: 2385896
aauaucgaucaacuaauuc

SEQ ID NO: 2385898 - RNA, 19 nt, Artificial Sequence
  Description of Artificial Sequence: Synthetic oligonucleotide
  Sense strand starting at position 1449 of SEQ ID NO: 1886065
uuaguugaucgauauuaac

SEQ ID NO: 2385899 - RNA, 19 nt, Artificial Sequence
  Description of Artificial Sequence: Synthetic oligonucleotide
  Antisense strand to SEQ ID NO: 2385898
guuaauaucgaucaacuaa

SEQ ID NO: 2385900 - RNA, 19 nt, Artificial Sequence
  Description of Artificial Sequence: Synthetic oligonucleotide
  Sense strand starting at position 1525 of SEQ ID NO: 1886065
gccagcauugguuaagaga

SEQ ID NO: 2385901 - RNA, 19 nt, Artificial Sequence
  Description of Artificial Sequence: Synthetic oligonucleotide
  Antisense strand to SEQ ID NO: 2385900
ucucuuaaccaaugcuggc

SEQ ID NO: 2385902 - RNA, 19 nt, Artificial Sequence
  Description of Artificial Sequence: Synthetic oligonucleotide
  Sense strand starting at position 1642 of SEQ ID NO: 1886065
cuguguccaccagaguaau

SEQ ID NO: 2385903 - RNA, 19 nt, Artificial Sequence
  Description of Artificial Sequence: Synthetic oligonucleotide
  Antisense strand to SEQ ID NO: 2385902
auuacucugguggacacag

SEQ ID NO: 2385904 - RNA, 19 nt, Artificial Sequence
  Description of Artificial Sequence: Synthetic oligonucleotide
  Sense strand starting at position 1711 of SEQ ID NO: 1886065
aagcccugaccaggagaua

SEQ ID NO: 2385905 - RNA, 19 nt, Artificial Sequence
  Description of Artificial Sequence: Synthetic oligonucleotide
  Antisense strand to SEQ ID NO: 2385904
uaucuccuggucagggcuu

SEQ ID NO: 2385906 - RNA, 19 nt, Artificial Sequence
  Description of Artificial Sequence: Synthetic oligonucleotide
  Sense strand starting at position 1780 of SEQ ID NO: 1886065
ccaagcaaggauugauauu

SEQ ID NO: 2385907 - RNA, 19 nt, Artificial Sequence
  Description of Artificial Sequence: Synthetic oligonucleotide
  Antisense strand to SEQ ID NO: 2385906
aauaucaauccuugcuugg

SEQ ID NO: 2385908 - RNA, 19 nt, Artificial Sequence
  Description of Artificial Sequence: Synthetic oligonucleotide
  Sense strand starting at position 1808 of SEQ ID NO: 1886065
uaggaauaugguggccaaa

SEQ ID NO: 2385909 - RNA, 19 nt, Artificial Sequence
  Description of Artificial Sequence: Synthetic oligonucleotide
  Antisense strand to SEQ ID NO: 2385908
uuuggccaccauauuccua

SEQ ID NO: 2385910 - RNA, 19 nt, Artificial Sequence
  Description of Artificial Sequence: Synthetic oligonucleotide
  Sense strand starting at position 1810 of SEQ ID NO: 1886065
ggaauaugguggccaaauc

SEQ ID NO: 2385911 - RNA, 19 nt, Artificial Sequence
  Description of Artificial Sequence: Synthetic oligonucleotide
  Antisense strand to SEQ ID NO: 2385910
gauuuggccaccauauucc

SEQ ID NO: 2385912 - RNA, 19 nt, Artificial Sequence
  Description of Artificial Sequence: Synthetic oligonucleotide
  Sense strand starting at position 2062 of SEQ ID NO: 1886065
ucagucaucgaccaaugua

SEQ ID NO: 2385913 - RNA, 19 nt, Artificial Sequence
  Description of Artificial Sequence: Synthetic oligonucleotide
  Antisense strand to SEQ ID NO: 2385912
uacauuggucgaugacuga

SEQ ID NO: 2385914 - RNA, 19 nt, Artificial Sequence
  Description of Artificial Sequence: Synthetic oligonucleotide
  Sense strand starting at position 2072 of SEQ ID NO: 1886065
accaauguauucuucgaga

SEQ ID NO: 2385915 - RNA, 19 nt, Artificial Sequence
  Description of Artificial Sequence: Synthetic oligonucleotide
  Antisense strand to SEQ ID NO: 2385914
ucucgaagaauacauuggu

SEQ ID NO: 2385916 - RNA, 19 nt, Artificial Sequence
  Description of Artificial Sequence: Synthetic oligonucleotide
  Sense strand starting at position 2077 of SEQ ID NO: 1886065
uguauucuucgagaucuga

SEQ ID NO: 2385917 - RNA, 19 nt, Artificial Sequence
  Description of Artificial Sequence: Synthetic oligonucleotide
  Antisense strand to SEQ ID NO: 2385916
ucagaucucgaagaauaca

SEQ ID NO: 2385918 - RNA, 19 nt, Artificial Sequence
  Description of Artificial Sequence: Synthetic oligonucleotide
  Sense strand starting at position 2087 of SEQ ID NO: 1886065
gagaucugauucucggaaa

SEQ ID NO: 2385919 - RNA, 19 nt, Artificial Sequence
  Description of Artificial Sequence: Synthetic oligonucleotide
  Antisense strand to SEQ ID NO: 2385918
uuuccgagaaucagaucuc

SEQ ID NO: 2385920 - RNA, 19 nt, Artificial Sequence
  Description of Artificial Sequence: Synthetic oligonucleotide
  Sense strand starting at position 2198 of SEQ ID NO: 1886065
acuagauggucucccacaa

SEQ ID NO: 2385921 - RNA, 19 nt, Artificial Sequence
  Description of Artificial Sequence: Synthetic oligonucleotide
  Antisense strand to SEQ ID NO: 2385920
uugugggagaccaucuagu

SEQ ID NO: 2385922 - RNA, 19 nt, Artificial Sequence
  Description of Artificial Sequence: Synthetic oligonucleotide
  Sense strand starting at position 2268 of SEQ ID NO: 1886065
auuguuugacguuaagaau

SEQ ID NO: 2385923 - RNA, 19 nt, Artificial Sequence
  Description of Artificial Sequence: Synthetic oligonucleotide
  Antisense strand to SEQ ID NO: 2385922
auucuuaacgucaaacaau

SEQ ID NO: 2385924 - RNA, 19 nt, Artificial Sequence
  Description of Artificial Sequence: Synthetic oligonucleotide
  Sense strand starting at position 2294 of SEQ ID NO: 1886065
guauaaacaugcuccaaga

SEQ ID NO: 2385925 - RNA, 19 nt, Artificial Sequence
  Description of Artificial Sequence: Synthetic oligonucleotide
  Antisense strand to SEQ ID NO: 2385924
ucuuggagcauguuuauac

SEQ ID NO: 2385926 - RNA, 19 nt, Artificial Sequence
  Description of Artificial Sequence: Synthetic oligonucleotide
  Sense strand starting at position 2502 of SEQ ID NO: 1886065
gccaucuuagucuacauga

SEQ ID NO: 2385927 - RNA, 19 nt, Artificial Sequence
  Description of Artificial Sequence: Synthetic oligonucleotide
  Antisense strand to SEQ ID NO: 2385926
ucauguagacuaagauggc

SEQ ID NO: 2385928 - RNA, 19 nt, Artificial Sequence
  Description of Artificial Sequence: Synthetic oligonucleotide
  Sense strand starting at position 2515 of SEQ ID NO: 1886065
acaugaaaggcccagcauu

SEQ ID NO: 2385929 - RNA, 19 nt, Artificial Sequence
  Description of Artificial Sequence: Synthetic oligonucleotide
  Antisense strand to SEQ ID NO: 2385928
aaugcugggccuuucaugu

SEQ ID NO: 2385930 - RNA, 19 nt, Artificial Sequence
  Description of Artificial Sequence: Synthetic oligonucleotide
  Sense strand starting at position 2702 of SEQ ID NO: 1886065
gaggguuauuucgugcuaa

SEQ ID NO: 2385931 - RNA, 19 nt, Artificial Sequence
  Description of Artificial Sequence: Synthetic oligonucleotide
  Antisense strand to SEQ ID NO: 2385930
uuagcacgaaauaacccuc

SEQ ID NO: 2385932 - RNA, 19 nt, Artificial Sequence
  Description of Artificial Sequence: Synthetic oligonucleotide
  Sense strand starting at position 2764 of SEQ ID NO: 1886065
gugauuugguagguggcua

SEQ ID NO: 2385933 - RNA, 19 nt, Artificial Sequence
  Description of Artificial Sequence: Synthetic oligonucleotide
  Antisense strand to SEQ ID NO: 2385932
uagccaccuaccaaaucac

SEQ ID NO: 2385934 - RNA, 19 nt, Artificial Sequence
  Description of Artificial Sequence: Synthetic oligonucleotide
  Sense strand starting at position 2915 of SEQ ID NO: 1886065
gugccuuugccagcacuua

SEQ ID NO: 2385935 - RNA, 19 nt, Artificial Sequence
  Description of Artificial Sequence: Synthetic oligonucleotide
  Antisense strand to SEQ ID NO: 2385934
uaagugcuggcaaaggcac

SEQ ID NO: 2385936 - RNA, 19 nt, Artificial Sequence
  Description of Artificial Sequence: Synthetic oligonucleotide
  Sense strand starting at position 2941 of SEQ ID NO: 1886065
ugaucuucugcagggagau

SEQ ID NO: 2385937 - RNA, 19 nt, Artificial Sequence
  Description of Artificial Sequence: Synthetic oligonucleotide
  Antisense strand to SEQ ID NO: 2385936
aucucccugcagaagauca

SEQ ID NO: 2385938 - RNA, 19 nt, Artificial Sequence
  Description of Artificial Sequence: Synthetic oligonucleotide
  Sense strand starting at position 3016 of SEQ ID NO: 1886065
cauugucagccaggaugaa

SEQ ID NO: 2385939 - RNA, 19 nt, Artificial Sequence
  Description of Artificial Sequence: Synthetic oligonucleotide
  Antisense strand to SEQ ID NO: 2385938
uucauccuggcugacaaug

SEQ ID NO: 2385940 - RNA, 19 nt, Artificial Sequence
  Description of Artificial Sequence: Synthetic oligonucleotide
  Sense strand starting at position 3044 of SEQ ID NO: 1886065
ggaguuguugagcacagag

SEQ ID NO: 2385941 - RNA, 19 nt, Artificial Sequence
  Description of Artificial Sequence: Synthetic oligonucleotide
  Antisense strand to SEQ ID NO: 2385940
cucugugcucaacaacucc

SEQ ID NO: 2385942 - RNA, 19 nt, Artificial Sequence
  Description of Artificial Sequence: Synthetic oligonucleotide
  Sense strand starting at position 3067 of SEQ ID NO: 1886065
uacuuagaggguuggacau

SEQ ID NO: 2385943 - RNA, 19 nt, Artificial Sequence
  Description of Artificial Sequence: Synthetic oligonucleotide
  Antisense strand to SEQ ID NO: 2385942
auguccaacccucuaagua

SEQ ID NO: 2385944 - RNA, 19 nt, Artificial Sequence
  Description of Artificial Sequence: Synthetic oligonucleotide
  Sense strand starting at position 3137 of SEQ ID NO: 1886065
gcaggacuuggauguuaag

SEQ ID NO: 2385945 - RNA, 19 nt, Artificial Sequence
  Description of Artificial Sequence: Synthetic oligonucleotide
  Antisense strand to SEQ ID NO: 2385944
cuuaacauccaaguccugc

SEQ ID NO: 2385946 - RNA, 19 nt, Artificial Sequence
  Description of Artificial Sequence: Synthetic oligonucleotide
  Sense strand starting at position 3322 of SEQ ID NO: 1886065
uggcauuuaucacagagaa

SEQ ID NO: 2385947 - RNA, 19 nt, Artificial Sequence
  Description of Artificial Sequence: Synthetic oligonucleotide
  Antisense strand to SEQ ID NO: 2385946
uucucugugauaaaugcca

SEQ ID NO: 2385948 - RNA, 19 nt, Artificial Sequence
  Description of Artificial Sequence: Synthetic oligonucleotide
  Sense strand starting at position 3447 of SEQ ID NO: 1886065
ccuccauaucaugggaugu

SEQ ID NO: 2385949 - RNA, 19 nt, Artificial Sequence
  Description of Artificial Sequence: Synthetic oligonucleotide
  Antisense strand to SEQ ID NO: 2385948
acaucccaugauauggagg

SEQ ID NO: 2385950 - RNA, 19 nt, Artificial Sequence
  Description of Artificial Sequence: Synthetic oligonucleotide
  Sense strand starting at position 3563 of SEQ ID NO: 1886065
guuacauuacuguaugauu

SEQ ID NO: 2385951 - RNA, 19 nt, Artificial Sequence
  Description of Artificial Sequence: Synthetic oligonucleotide
  Antisense strand to SEQ ID NO: 2385950
aaucauacaguaauguaac

SEQ ID NO: 2385952 - RNA, 19 nt, Artificial Sequence
  Description of Artificial Sequence: Synthetic oligonucleotide
  Sense strand starting at position 3661 of SEQ ID NO: 1886065
aggagugagguauauguau

SEQ ID NO: 2385953 - RNA, 19 nt, Artificial Sequence
  Description of Artificial Sequence: Synthetic oligonucleotide
  Antisense strand to SEQ ID NO: 2385952
auacauauaccucacuccu

SEQ ID NO: 2385954 - RNA, 19 nt, Artificial Sequence
  Description of Artificial Sequence: Synthetic oligonucleotide
  Sense strand starting at position 3669 of SEQ ID NO: 1886065
gguauauguauaugaaagg

SEQ ID NO: 2385955 - RNA, 19 nt, Artificial Sequence
  Description of Artificial Sequence: Synthetic oligonucleotide
  Antisense strand to SEQ ID NO: 2385954
ccuuucauauacauauacc

SEQ ID NO: 2385956 - RNA, 19 nt, Artificial Sequence
  Description of Artificial Sequence: Synthetic oligonucleotide
  Sense strand starting at position 3731 of SEQ ID NO: 1886065
ugaccuuaucaaugacagu

SEQ ID NO: 2385957 - RNA, 19 nt, Artificial Sequence
  Description of Artificial Sequence: Synthetic oligonucleotide
  Antisense strand to SEQ ID NO: 2385956
acugucauugauaagguca

SEQ ID NO: 2385958 - RNA, 19 nt, Artificial Sequence
  Description of Artificial Sequence: Synthetic oligonucleotide
  Sense strand starting at position 55 of SEQ ID NO: 1886066
ucucuaugccaguacugaa

SEQ ID NO: 2385959 - RNA, 19 nt, Artificial Sequence
  Description of Artificial Sequence: Synthetic oligonucleotide
  Antisense strand to SEQ ID NO: 2385958
uucaguacuggcauagaga

SEQ ID NO: 2385960 - RNA, 19 nt, Artificial Sequence
  Description of Artificial Sequence: Synthetic oligonucleotide
  Sense strand starting at position 170 of SEQ ID NO: 1886066
uuccuaacuugguucugau

SEQ ID NO: 2385961 - RNA, 19 nt, Artificial Sequence
  Description of Artificial Sequence: Synthetic oligonucleotide
  Antisense strand to SEQ ID NO: 2385960
aucagaaccaaguuaggaa

SEQ ID NO: 2385962 - RNA, 19 nt, Artificial Sequence
  Description of Artificial Sequence: Synthetic oligonucleotide
  Sense strand starting at position 183 of SEQ ID NO: 1886066
ucugauuacuggccuaacu

SEQ ID NO: 2385963 - RNA, 19 nt, Artificial Sequence
  Description of Artificial Sequence: Synthetic oligonucleotide
  Antisense strand to SEQ ID NO: 2385962
aguuaggccaguaaucaga

SEQ ID NO: 2385964 - RNA, 19 nt, Artificial Sequence
  Description of Artificial Sequence: Synthetic oligonucleotide
  Sense strand starting at position 185 of SEQ ID NO: 1886066
ugauuacuggccuaacuca

SEQ ID NO: 2385965 - RNA, 19 nt, Artificial Sequence
  Description of Artificial Sequence: Synthetic oligonucleotide
  Antisense strand to SEQ ID NO: 2385964
ugaguuaggccaguaauca

SEQ ID NO: 2385966 - RNA, 19 nt, Artificial Sequence
  Description of Artificial Sequence: Synthetic oligonucleotide
  Sense strand starting at position 435 of SEQ ID NO: 1886066
uggugcucccaugacagau

SEQ ID NO: 2385967 - RNA, 19 nt, Artificial Sequence
  Description of Artificial Sequence: Synthetic oligonucleotide
  Antisense strand to SEQ ID NO: 2385966
aucugucaugggagcacca

SEQ ID NO: 2385968 - RNA, 19 nt, Artificial Sequence
  Description of Artificial Sequence: Synthetic oligonucleotide
  Sense strand starting at position 512 of SEQ ID NO: 1886066
aaauuugagugugaacagu

SEQ ID NO: 2385969 - RNA, 19 nt, Artificial Sequence
  Description of Artificial Sequence: Synthetic oligonucleotide
  Antisense strand to SEQ ID NO: 2385968
acuguucacacucaaauuu

SEQ ID NO: 2385970 - RNA, 19 nt, Artificial Sequence
  Description of Artificial Sequence: Synthetic oligonucleotide
  Sense strand starting at position 572 of SEQ ID NO: 1886066
auaagauaguaagugucaa

SEQ ID NO: 2385971 - RNA, 19 nt, Artificial Sequence
  Description of Artificial Sequence: Synthetic oligonucleotide
  Antisense strand to SEQ ID NO: 2385970
uugacacuuacuaucuuau

SEQ ID NO: 2385972 - RNA, 19 nt, Artificial Sequence
  Description of Artificial Sequence: Synthetic oligonucleotide
  Sense strand starting at position 586 of SEQ ID NO: 1886066
gucaaagugcuugauacaa

SEQ ID NO: 2385973 - RNA, 19 nt, Artificial Sequence
  Description of Artificial Sequence: Synthetic oligonucleotide
  Antisense strand to SEQ ID NO: 2385972
uuguaucaagcacuuugac

SEQ ID NO: 2385974 - RNA, 19 nt, Artificial Sequence
  Description of Artificial Sequence: Synthetic oligonucleotide
  Sense strand starting at position 1003 of SEQ ID NO: 1886066
gaagacauaccugggcaau

SEQ ID NO: 2385975 - RNA, 19 nt, Artificial Sequence
  Description of Artificial Sequence: Synthetic oligonucleotide
  Antisense strand to SEQ ID NO: 2385974
auugcccagguaugucuuc

SEQ ID NO: 2385976 - RNA, 19 nt, Artificial Sequence
  Description of Artificial Sequence: Synthetic oligonucleotide
  Sense strand starting at position 1273 of SEQ ID NO: 1886066
ugagcugaauguuuaggaa

SEQ ID NO: 2385977 - RNA, 19 nt, Artificial Sequence
  Description of Artificial Sequence: Synthetic oligonucleotide
  Antisense strand to SEQ ID NO: 2385976
uuccuaaacauucagcuca

SEQ ID NO: 2385978 - RNA, 19 nt, Artificial Sequence
  Description of Artificial Sequence: Synthetic oligonucleotide
  Sense strand starting at position 1393 of SEQ ID NO: 1886066
ggacucaucugcuuagcaa

SEQ ID NO: 2385979 - RNA, 19 nt, Artificial Sequence
  Description of Artificial Sequence: Synthetic oligonucleotide
  Antisense strand to SEQ ID NO: 2385978
uugcuaagcagaugagucc

SEQ ID NO: 2385980 - RNA, 19 nt, Artificial Sequence
  Description of Artificial Sequence: Synthetic oligonucleotide
  Sense strand starting at position 1468 of SEQ ID NO: 1886066
guccuuuauccagggaaau

SEQ ID NO: 2385981 - RNA, 19 nt, Artificial Sequence
  Description of Artificial Sequence: Synthetic oligonucleotide
  Antisense strand to SEQ ID NO: 2385980
auuucccuggauaaaggac

SEQ ID NO: 2385982 - RNA, 19 nt, Artificial Sequence
  Description of Artificial Sequence: Synthetic oligonucleotide
  Sense strand starting at position 1469 of SEQ ID NO: 1886066
uccuuuauccagggaaauu

SEQ ID NO: 2385983 - RNA, 19 nt, Artificial Sequence
  Description of Artificial Sequence: Synthetic oligonucleotide
  Antisense strand to SEQ ID NO: 2385982
aauuucccuggauaaagga

SEQ ID NO: 2385984 - RNA, 19 nt, Artificial Sequence
  Description of Artificial Sequence: Synthetic oligonucleotide
  Sense strand starting at position 1648 of SEQ ID NO: 1886066
uucuguguggaguaagagu

SEQ ID NO: 2385985 - RNA, 19 nt, Artificial Sequence
  Description of Artificial Sequence: Synthetic oligonucleotide
  Antisense strand to SEQ ID NO: 2385984
acucuuacuccacacagaa

SEQ ID NO: 2385986 - RNA, 19 nt, Artificial Sequence
  Description of Artificial Sequence: Synthetic oligonucleotide
  Sense strand starting at position 1701 of SEQ ID NO: 1886066
gcagaacaucuuuaaugca

SEQ ID NO: 2385987 - RNA, 19 nt, Artificial Sequence
  Description of Artificial Sequence: Synthetic oligonucleotide
  Antisense strand to SEQ ID NO: 2385986
ugcauuaaagauguucugc

SEQ ID NO: 2385988 - RNA, 19 nt, Artificial Sequence
  Description of Artificial Sequence: Synthetic oligonucleotide
  Sense strand starting at position 1735 of SEQ ID NO: 1886066
uccugauuaaaguaguguu

SEQ ID NO: 2385989 - RNA, 19 nt, Artificial Sequence
  Description of Artificial Sequence: Synthetic oligonucleotide
  Antisense strand to SEQ ID NO: 2385988
aacacuacuuuaaucagga

SEQ ID NO: 2385990 - RNA, 19 nt, Artificial Sequence
  Description of Artificial Sequence: Synthetic oligonucleotide
  Sense strand starting at position 1775 of SEQ ID NO: 1886066
cgauucuuggaggaagcua

SEQ ID NO: 2385991 - RNA, 19 nt, Artificial Sequence
  Description of Artificial Sequence: Synthetic oligonucleotide
  Antisense strand to SEQ ID NO: 2385990
uagcuuccuccaagaaucg

SEQ ID NO: 2385992 - RNA, 19 nt, Artificial Sequence
  Description of Artificial Sequence: Synthetic oligonucleotide
  Sense strand starting at position 1841 of SEQ ID NO: 1886066
gaggauuuccugugucagc

SEQ ID NO: 2385993 - RNA, 19 nt, Artificial Sequence
  Description of Artificial Sequence: Synthetic oligonucleotide
  Antisense strand to SEQ ID NO: 2385992
gcugacacaggaaauccuc

SEQ ID NO: 2385994 - RNA, 19 nt, Artificial Sequence
  Description of Artificial Sequence: Synthetic oligonucleotide
  Sense strand starting at position 1859 of SEQ ID NO: 1886066
cggaacuuagucuaggagu

SEQ ID NO: 2385995 - RNA, 19 nt, Artificial Sequence
  Description of Artificial Sequence: Synthetic oligonucleotide
  Antisense strand to SEQ ID NO: 2385994
acuccuagacuaaguuccg

SEQ ID NO: 2385996 - RNA, 19 nt, Artificial Sequence
  Description of Artificial Sequence: Synthetic oligonucleotide
  Sense strand starting at position 1861 of SEQ ID NO: 1886066
gaacuuagucuaggaguuc

SEQ ID NO: 2385997 - RNA, 19 nt, Artificial Sequence
  Description of Artificial Sequence: Synthetic oligonucleotide
  Antisense strand to SEQ ID NO: 2385996
gaacuccuagacuaaguuc

SEQ ID NO: 2385998 - RNA, 19 nt, Artificial Sequence
  Description of Artificial Sequence: Synthetic oligonucleotide
  Sense strand starting at position 1875 of SEQ ID NO: 1886066
aguucuuaccaugggagga

SEQ ID NO: 2385999 - RNA, 19 nt, Artificial Sequence
  Description of Artificial Sequence: Synthetic oligonucleotide
  Antisense strand to SEQ ID NO: 2385998
uccucccaugguaagaacu

SEQ ID NO: 2386000 - RNA, 19 nt, Artificial Sequence
  Description of Artificial Sequence: Synthetic oligonucleotide
  Sense strand starting at position 1890 of SEQ ID NO: 1886066
aggacuucgggaggacuua

SEQ ID NO: 2386001 - RNA, 19 nt, Artificial Sequence
  Description of Artificial Sequence: Synthetic oligonucleotide
  Antisense strand to SEQ ID NO: 2386000
uaaguccucccgaaguccu

SEQ ID NO: 2386002 - RNA, 19 nt, Artificial Sequence
  Description of Artificial Sequence: Synthetic oligonucleotide
  Sense strand starting at position 1950 of SEQ ID NO: 1886066
gacuucuuagcaugggaag

SEQ ID NO: 2386003 - RNA, 19 nt, Artificial Sequence
  Description of Artificial Sequence: Synthetic oligonucleotide
  Antisense strand to SEQ ID NO: 2386002
cuucccaugcuaagaaguc

SEQ ID NO: 2386004 - RNA, 19 nt, Artificial Sequence
  Description of Artificial Sequence: Synthetic oligonucleotide
  Sense strand starting at position 1951 of SEQ ID NO: 1886066
acuucuuagcaugggaaga

SEQ ID NO: 2386005 - RNA, 19 nt, Artificial Sequence
  Description of Artificial Sequence: Synthetic oligonucleotide
  Antisense strand to SEQ ID NO: 2386004
ucuucccaugcuaagaagu

SEQ ID NO: 2386006 - RNA, 19 nt, Artificial Sequence
  Description of Artificial Sequence: Synthetic oligonucleotide
  Sense strand starting at position 2128 of SEQ ID NO: 1886066
ugagaauuggagcgaagag

SEQ ID NO: 2386007 - RNA, 19 nt, Artificial Sequence
  Description of Artificial Sequence: Synthetic oligonucleotide
  Antisense strand to SEQ ID NO: 2386006
cucuucgcuccaauucuca

SEQ ID NO: 2386008 - RNA, 19 nt, Artificial Sequence
  Description of Artificial Sequence: Synthetic oligonucleotide
  Sense strand starting at position 2145 of SEQ ID NO: 1886066
agagcaucucacgaugacu

SEQ ID NO: 2386009 - RNA, 19 nt, Artificial Sequence
  Description of Artificial Sequence: Synthetic oligonucleotide
  Antisense strand to SEQ ID NO: 2386008
agucaucgugagaugcucu

SEQ ID NO: 2386010 - RNA, 19 nt, Artificial Sequence
  Description of Artificial Sequence: Synthetic oligonucleotide
  Sense strand starting at position 2295 of SEQ ID NO: 1886066
cucugaauccuuggcucua

SEQ ID NO: 2386011 - RNA, 19 nt, Artificial Sequence
  Description of Artificial Sequence: Synthetic oligonucleotide
  Antisense strand to SEQ ID NO: 2386010
uagagccaaggauucagag

SEQ ID NO: 2386012 - RNA, 19 nt, Artificial Sequence
  Description of Artificial Sequence: Synthetic oligonucleotide
  Sense strand starting at position 2324 of SEQ ID NO: 1886066
agaaauuauucucugaggu

SEQ ID NO: 2386013 - RNA, 19 nt, Artificial Sequence
  Description of Artificial Sequence: Synthetic oligonucleotide
  Antisense strand to SEQ ID NO: 2386012
accucagagaauaauuucu

SEQ ID NO: 2386014 - RNA, 19 nt, Artificial Sequence
  Description of Artificial Sequence: Synthetic oligonucleotide
  Sense strand starting at position 2325 of SEQ ID NO: 1886066
gaaauuauucucugaggug

SEQ ID NO: 2386015 - RNA, 19 nt, Artificial Sequence
  Description of Artificial Sequence: Synthetic oligonucleotide
  Antisense strand to SEQ ID NO: 2386014
caccucagagaauaauuuc

SEQ ID NO: 2386016 - RNA, 19 nt, Artificial Sequence
  Description of Artificial Sequence: Synthetic oligonucleotide
  Sense strand starting at position 2368 of SEQ ID NO: 1886066
acacguuucgguuacaaga

SEQ ID NO: 2386017 - RNA, 19 nt, Artificial Sequence
  Description of Artificial Sequence: Synthetic oligonucleotide
  Antisense strand to SEQ ID NO: 2386016
ucuuguaaccgaaacgugu

SEQ ID NO: 2386018 - RNA, 19 nt, Artificial Sequence
  Description of Artificial Sequence: Synthetic oligonucleotide
  Sense strand starting at position 2437 of SEQ ID NO: 1886066
gguaccuucuuccugacau

SEQ ID NO: 2386019 - RNA, 19 nt, Artificial Sequence
  Description of Artificial Sequence: Synthetic oligonucleotide
  Antisense strand to SEQ ID NO: 2386018
augucaggaagaagguacc

SEQ ID NO: 2386020 - RNA, 19 nt, Artificial Sequence
  Description of Artificial Sequence: Synthetic oligonucleotide
  Sense strand starting at position 2478 of SEQ ID NO: 1886066
gagucuucccuuugggaca

SEQ ID NO: 2386021 - RNA, 19 nt, Artificial Sequence
  Description of Artificial Sequence: Synthetic oligonucleotide
  Antisense strand to SEQ ID NO: 2386020
ugucccaaagggaagacuc

SEQ ID NO: 2386022 - RNA, 19 nt, Artificial Sequence
  Description of Artificial Sequence: Synthetic oligonucleotide
  Sense strand starting at position 2645 of SEQ ID NO: 1886066
cagacaagauccguucuau

SEQ ID NO: 2386023 - RNA, 19 nt, Artificial Sequence
  Description of Artificial Sequence: Synthetic oligonucleotide
  Antisense strand to SEQ ID NO: 2386022
auagaacggaucuugucug

SEQ ID NO: 2386024 - RNA, 19 nt, Artificial Sequence
  Description of Artificial Sequence: Synthetic oligonucleotide
  Sense strand starting at position 3102 of SEQ ID NO: 1886066
gguggacagacauggucaa

SEQ ID NO: 2386025 - RNA, 19 nt, Artificial Sequence
  Description of Artificial Sequence: Synthetic oligonucleotide
  Antisense strand to SEQ ID NO: 2386024
uugaccaugucuguccacc

SEQ ID NO: 2386026 - RNA, 19 nt, Artificial Sequence
  Description of Artificial Sequence: Synthetic oligonucleotide
  Sense strand starting at position 3103 of SEQ ID NO: 1886066
guggacagacauggucaau

SEQ ID NO: 2386027 - RNA, 19 nt, Artificial Sequence
  Description of Artificial Sequence: Synthetic oligonucleotide
  Antisense strand to SEQ ID NO: 2386026
auugaccaugucuguccac

SEQ ID NO: 2386028 - RNA, 19 nt, Artificial Sequence
  Description of Artificial Sequence: Synthetic oligonucleotide
  Sense strand starting at position 3109 of SEQ ID NO: 1886066
agacauggucaaugugaug

SEQ ID NO: 2386029 - RNA, 19 nt, Artificial Sequence
  Description of Artificial Sequence: Synthetic oligonucleotide
  Antisense strand to SEQ ID NO: 2386028
caucacauugaccaugucu

SEQ ID NO: 2386030 - RNA, 19 nt, Artificial Sequence
  Description of Artificial Sequence: Synthetic oligonucleotide
  Sense strand starting at position 3491 of SEQ ID NO: 1886066
cugauauauugucauuuga

SEQ ID NO: 2386031 - RNA, 19 nt, Artificial Sequence
  Description of Artificial Sequence: Synthetic oligonucleotide
  Antisense strand to SEQ ID NO: 2386030
ucaaaugacaauauaucag

SEQ ID NO: 2386032 - RNA, 19 nt, Artificial Sequence
  Description of Artificial Sequence: Synthetic oligonucleotide
  Sense strand starting at position 3677 of SEQ ID NO: 1886066
caugcuuccguuguuuauu

SEQ ID NO: 2386033 - RNA, 19 nt, Artificial Sequence
  Description of Artificial Sequence: Synthetic oligonucleotide
  Antisense strand to SEQ ID NO: 2386032
aauaaacaacggaagcaug

SEQ ID NO: 2386034 - RNA, 19 nt, Artificial Sequence
  Description of Artificial Sequence: Synthetic oligonucleotide
  Sense strand starting at position 3892 of SEQ ID NO: 1886066
ggaugaggauacucugcaa

SEQ ID NO: 2386035 - RNA, 19 nt, Artificial Sequence
  Description of Artificial Sequence: Synthetic oligonucleotide
  Antisense strand to SEQ ID NO: 2386034
uugcagaguauccucaucc

SEQ ID NO: 2386036 - RNA, 19 nt, Artificial Sequence
  Description of Artificial Sequence: Synthetic oligonucleotide
  Sense strand starting at position 3895 of SEQ ID NO: 1886066
ugaggauacucugcaauau

SEQ ID NO: 2386037 - RNA, 19 nt, Artificial Sequence
  Description of Artificial Sequence: Synthetic oligonucleotide
  Antisense strand to SEQ ID NO: 2386036
auauugcagaguauccuca

SEQ ID NO: 2386038 - RNA, 19 nt, Artificial Sequence
  Description of Artificial Sequence: Synthetic oligonucleotide
  Sense strand starting at position 2138 of SEQ ID NO: 1886068
aggaaagaaucccagaauc

SEQ ID NO: 2386039 - RNA, 19 nt, Artificial Sequence
  Description of Artificial Sequence: Synthetic oligonucleotide
  Antisense strand to SEQ ID NO: 2386038
gauucugggauucuuuccu

SEQ ID NO: 2386040 - RNA, 19 nt, Artificial Sequence
  Description of Artificial Sequence: Synthetic oligonucleotide
  Sense strand starting at position 454 of SEQ ID NO: 1886069
cagggacaucuaugacucu

SEQ ID NO: 2386041 - RNA, 19 nt, Artificial Sequence
  Description of Artificial Sequence: Synthetic oligonucleotide
  Antisense strand to SEQ ID NO: 2386040
agagucauagaugucccug

SEQ ID NO: 2386042 - RNA, 19 nt, Artificial Sequence
  Description of Artificial Sequence: Synthetic oligonucleotide
  Sense strand starting at position 455 of SEQ ID NO: 1886069
agggacaucuaugacucua

SEQ ID NO: 2386043 - RNA, 19 nt, Artificial Sequence
  Description of Artificial Sequence: Synthetic oligonucleotide
  Antisense strand to SEQ ID NO: 2386042
uagagucauagaugucccu

SEQ ID NO: 2386044 - RNA, 19 nt, Artificial Sequence
  Description of Artificial Sequence: Synthetic oligonucleotide
  Sense strand starting at position 2138 of SEQ ID NO: 1886071
aggaaagaaucccagaauc

SEQ ID NO: 2386045 - RNA, 19 nt, Artificial Sequence
  Description of Artificial Sequence: Synthetic oligonucleotide
  Antisense strand to SEQ ID NO: 2386044
gauucugggauucuuuccu

SEQ ID NO: 2386046 - RNA, 19 nt, Artificial Sequence
  Description of Artificial Sequence: Synthetic oligonucleotide
  Sense strand starting at position 454 of SEQ ID NO: 1886072
cagggacaucuaugacucu

SEQ ID NO: 2386047 - RNA, 19 nt, Artificial Sequence
  Description of Artificial Sequence: Synthetic oligonucleotide
  Antisense strand to SEQ ID NO: 2386046
agagucauagaugucccug

SEQ ID NO: 2386048 - RNA, 19 nt, Artificial Sequence
  Description of Artificial Sequence: Synthetic oligonucleotide
  Sense strand starting at position 455 of SEQ ID NO: 1886072
agggacaucuaugacucua

SEQ ID NO: 2386049 - RNA, 19 nt, Artificial Sequence
  Description of Artificial Sequence: Synthetic oligonucleotide
  Antisense strand to SEQ ID NO: 2386048
uagagucauagaugucccu

SEQ ID NO: 2386050 - RNA, 19 nt, Artificial Sequence
  Description of Artificial Sequence: Synthetic oligonucleotide
  Sense strand starting at position 2138 of SEQ ID NO: 1886074
aggaaagaaucccagaauc

SEQ ID NO: 2386051 - RNA, 19 nt, Artificial Sequence
  Description of Artificial Sequence: Synthetic oligonucleotide
  Antisense strand to SEQ ID NO: 2386050
gauucugggauucuuuccu

SEQ ID NO: 2386052 - RNA, 19 nt, Artificial Sequence
  Description of Artificial Sequence: Synthetic oligonucleotide
  Sense strand starting at position 454 of SEQ ID NO: 1886075
cagggacaucuaugacucu

SEQ ID NO: 2386053 - RNA, 19 nt, Artificial Sequence
  Description of Artificial Sequence: Synthetic oligonucleotide
  Antisense strand to SEQ ID NO: 2386052
agagucauagaugucccug

SEQ ID NO: 2386054 - RNA, 19 nt, Artificial Sequence
  Description of Artificial Sequence: Synthetic oligonucleotide
  Sense strand starting at position 455 of SEQ ID NO: 1886075
agggacaucuaugacucua

SEQ ID NO: 2386055 - RNA, 19 nt, Artificial Sequence
  Description of Artificial Sequence: Synthetic oligonucleotide
  Antisense strand to SEQ ID NO: 2386054
uagagucauagaugucccu

SEQ ID NO: 2386056 - RNA, 19 nt, Artificial Sequence
  Description of Artificial Sequence: Synthetic oligonucleotide
  Sense strand starting at position 9 of SEQ ID NO: 1886076
guacacugaggccaucaua

SEQ ID NO: 2386057 - RNA, 19 nt, Artificial Sequence
  Description of Artificial Sequence: Synthetic oligonucleotide
  Antisense strand to SEQ ID NO: 2386056
uaugauggccucaguguac

SEQ ID NO: 2386058 - RNA, 19 nt, Artificial Sequence
  Description of Artificial Sequence: Synthetic oligonucleotide
  Sense strand starting at position 106 of SEQ ID NO: 1886076
cgugccaccgacugauuua

SEQ ID NO: 2386059 - RNA, 19 nt, Artificial Sequence
  Description of Artificial Sequence: Synthetic oligonucleotide
  Antisense strand to SEQ ID NO: 2386058
uaaaucagucgguggcacg

SEQ ID NO: 2386060 - RNA, 19 nt, Artificial Sequence
  Description of Artificial Sequence: Synthetic oligonucleotide
  Sense strand starting at position 343 of SEQ ID NO: 1886076
acacguauacuauauacau

SEQ ID NO: 2386061 - RNA, 19 nt, Artificial Sequence
  Description of Artificial Sequence: Synthetic oligonucleotide
  Antisense strand to SEQ ID NO: 2386060
auguauauaguauacgugu

SEQ ID NO: 2386062 - RNA, 19 nt, Artificial Sequence
  Description of Artificial Sequence: Synthetic oligonucleotide
  Sense strand starting at position 534 of SEQ ID NO: 1886076
gucugugagccauacacau

SEQ ID NO: 2386063 - RNA, 19 nt, Artificial Sequence
  Description of Artificial Sequence: Synthetic oligonucleotide
  Antisense strand to SEQ ID NO: 2386062
auguguauggcucacagac

SEQ ID NO: 2386064 - RNA, 19 nt, Artificial Sequence
  Description of Artificial Sequence: Synthetic oligonucleotide
  Sense strand starting at position 547 of SEQ ID NO: 1886076
acacauuaauuaguaggua

SEQ ID NO: 2386065 - RNA, 19 nt, Artificial Sequence
  Description of Artificial Sequence: Synthetic oligonucleotide
  Antisense strand to SEQ ID NO: 2386064
uaccuacuaauuaaugugu

SEQ ID NO: 2386066 - RNA, 19 nt, Artificial Sequence
  Description of Artificial Sequence: Synthetic oligonucleotide
  Sense strand starting at position 607 of SEQ ID NO: 1886076
cauauauuuggcugugcuu

SEQ ID NO: 2386067 - RNA, 19 nt, Artificial Sequence
  Description of Artificial Sequence: Synthetic oligonucleotide
  Antisense strand to SEQ ID NO: 2386066
aagcacagccaaauauaug

SEQ ID NO: 2386068 - RNA, 19 nt, Artificial Sequence
  Description of Artificial Sequence: Synthetic oligonucleotide
  Sense strand starting at position 806 of SEQ ID NO: 1886076
augaguugggcccaacagu

SEQ ID NO: 2386069 - RNA, 19 nt, Artificial Sequence
  Description of Artificial Sequence: Synthetic oligonucleotide
  Antisense strand to SEQ ID NO: 2386068
acuguugggcccaacucau

SEQ ID NO: 2386070 - RNA, 19 nt, Artificial Sequence
  Description of Artificial Sequence: Synthetic oligonucleotide
  Sense strand starting at position 869 of SEQ ID NO: 1886076
caaggugcuuccuugggaa

SEQ ID NO: 2386071 - RNA, 19 nt, Artificial Sequence
  Description of Artificial Sequence: Synthetic oligonucleotide
  Antisense strand to SEQ ID NO: 2386070
uucccaaggaagcaccuug

SEQ ID NO: 2386072 - RNA, 19 nt, Artificial Sequence
  Description of Artificial Sequence: Synthetic oligonucleotide
  Sense strand starting at position 918 of SEQ ID NO: 1886076
gggagaugcuuacuuguaa

SEQ ID NO: 2386073 - RNA, 19 nt, Artificial Sequence
  Description of Artificial Sequence: Synthetic oligonucleotide
  Antisense strand to SEQ ID NO: 2386072
uuacaaguaagcaucuccc

SEQ ID NO: 2386074 - RNA, 19 nt, Artificial Sequence
  Description of Artificial Sequence: Synthetic oligonucleotide
  Sense strand starting at position 919 of SEQ ID NO: 1886076
ggagaugcuuacuuguaaa

SEQ ID NO: 2386075 - RNA, 19 nt, Artificial Sequence
  Description of Artificial Sequence: Synthetic oligonucleotide
  Antisense strand to SEQ ID NO: 2386074
uuuacaaguaagcaucucc

SEQ ID NO: 2386076 - RNA, 19 nt, Artificial Sequence
  Description of Artificial Sequence: Synthetic oligonucleotide
  Sense strand starting at position 1068 of SEQ ID NO: 1886076
ggcucugaggcuuacuaga

SEQ ID NO: 2386077 - RNA, 19 nt, Artificial Sequence
  Description of Artificial Sequence: Synthetic oligonucleotide
  Antisense strand to SEQ ID NO: 2386076
ucuaguaagccucagagcc

SEQ ID NO: 2386078 - RNA, 19 nt, Artificial Sequence
  Description of Artificial Sequence: Synthetic oligonucleotide
  Sense strand starting at position 1070 of SEQ ID NO: 1886076
cucugaggcuuacuagauc

SEQ ID NO: 2386079 - RNA, 19 nt, Artificial Sequence
  Description of Artificial Sequence: Synthetic oligonucleotide
  Antisense strand to SEQ ID NO: 2386078
gaucuaguaagccucagag

SEQ ID NO: 2386080 - RNA, 19 nt, Artificial Sequence
  Description of Artificial Sequence: Synthetic oligonucleotide
  Sense strand starting at position 1079 of SEQ ID NO: 1886076
uuacuagaucugugaccuc

SEQ ID NO: 2386081 - RNA, 19 nt, Artificial Sequence
  Description of Artificial Sequence: Synthetic oligonucleotide
  Antisense strand to SEQ ID NO: 2386080
gaggucacagaucuaguaa

SEQ ID NO: 2386082 - RNA, 19 nt, Artificial Sequence
  Description of Artificial Sequence: Synthetic oligonucleotide
  Sense strand starting at position 1088 of SEQ ID NO: 1886076
cugugaccuccagaaaggu

SEQ ID NO: 2386083 - RNA, 19 nt, Artificial Sequence
  Description of Artificial Sequence: Synthetic oligonucleotide
  Antisense strand to SEQ ID NO: 2386082
accuuucuggaggucacag

SEQ ID NO: 2386084 - RNA, 19 nt, Artificial Sequence
  Description of Artificial Sequence: Synthetic oligonucleotide
  Sense strand starting at position 1118 of SEQ ID NO: 1886076
augagcuaacaguauguau

SEQ ID NO: 2386085 - RNA, 19 nt, Artificial Sequence
  Description of Artificial Sequence: Synthetic oligonucleotide
  Antisense strand to SEQ ID NO: 2386084
auacauacuguuagcucau

SEQ ID NO: 2386086 - RNA, 19 nt, Artificial Sequence
  Description of Artificial Sequence: Synthetic oligonucleotide
  Sense strand starting at position 1120 of SEQ ID NO: 1886076
gagcuaacaguauguauaa

SEQ ID NO: 2386087 - RNA, 19 nt, Artificial Sequence
  Description of Artificial Sequence: Synthetic oligonucleotide
  Antisense strand to SEQ ID NO: 2386086
uuauacauacuguuagcuc

SEQ ID NO: 2386088 - RNA, 19 nt, Artificial Sequence
  Description of Artificial Sequence: Synthetic oligonucleotide
  Sense strand starting at position 1146 of SEQ ID NO: 1886076
acaauuaugccuggcauau

SEQ ID NO: 2386089 - RNA, 19 nt, Artificial Sequence
  Description of Artificial Sequence: Synthetic oligonucleotide
  Antisense strand to SEQ ID NO: 2386088
auaugccaggcauaauugu

SEQ ID NO: 2386090 - RNA, 19 nt, Artificial Sequence
  Description of Artificial Sequence: Synthetic oligonucleotide
  Sense strand starting at position 1172 of SEQ ID NO: 1886076
gcuguauaacaagagaguu

SEQ ID NO: 2386091 - RNA, 19 nt, Artificial Sequence
  Description of Artificial Sequence: Synthetic oligonucleotide
  Antisense strand to SEQ ID NO: 2386090
aacucucuuguuauacagc

SEQ ID NO: 2386092 - RNA, 19 nt, Artificial Sequence
  Description of Artificial Sequence: Synthetic oligonucleotide
  Sense strand starting at position 1182 of SEQ ID NO: 1886076
aagagaguugggugagguu

SEQ ID NO: 2386093 - RNA, 19 nt, Artificial Sequence
  Description of Artificial Sequence: Synthetic oligonucleotide
  Antisense strand to SEQ ID NO: 2386092
aaccucacccaacucucuu

SEQ ID NO: 2386094 - RNA, 19 nt, Artificial Sequence
  Description of Artificial Sequence: Synthetic oligonucleotide
  Sense strand starting at position 1183 of SEQ ID NO: 1886076
agagaguugggugagguua

SEQ ID NO: 2386095 - RNA, 19 nt, Artificial Sequence
  Description of Artificial Sequence: Synthetic oligonucleotide
  Antisense strand to SEQ ID NO: 2386094
uaaccucacccaacucucu

SEQ ID NO: 2386096 - RNA, 19 nt, Artificial Sequence
  Description of Artificial Sequence: Synthetic oligonucleotide
  Sense strand starting at position 1191 of SEQ ID NO: 1886076
gggugagguuaguccagua

SEQ ID NO: 2386097 - RNA, 19 nt, Artificial Sequence
  Description of Artificial Sequence: Synthetic oligonucleotide
  Antisense strand to SEQ ID NO: 2386096
uacuggacuaaccucaccc

SEQ ID NO: 2386098 - RNA, 19 nt, Artificial Sequence
  Description of Artificial Sequence: Synthetic oligonucleotide
  Sense strand starting at position 1196 of SEQ ID NO: 1886076
agguuaguccaguaagaca

SEQ ID NO: 2386099 - RNA, 19 nt, Artificial Sequence
  Description of Artificial Sequence: Synthetic oligonucleotide
  Antisense strand to SEQ ID NO: 2386098
ugucuuacuggacuaaccu

SEQ ID NO: 2386100 - RNA, 19 nt, Artificial Sequence
  Description of Artificial Sequence: Synthetic oligonucleotide
  Sense strand starting at position 1381 of SEQ ID NO: 1886076
uggucuucucuacagugau

SEQ ID NO: 2386101 - RNA, 19 nt, Artificial Sequence
  Description of Artificial Sequence: Synthetic oligonucleotide
  Antisense strand to SEQ ID NO: 2386100
aucacuguagagaagacca

SEQ ID NO: 2386102 - RNA, 19 nt, Artificial Sequence
  Description of Artificial Sequence: Synthetic oligonucleotide
  Sense strand starting at position 1389 of SEQ ID NO: 1886076
ucuacagugaugugaaggu

SEQ ID NO: 2386103 - RNA, 19 nt, Artificial Sequence
  Description of Artificial Sequence: Synthetic oligonucleotide
  Antisense strand to SEQ ID NO: 2386102
accuucacaucacuguaga

SEQ ID NO: 2386104 - RNA, 19 nt, Artificial Sequence
  Description of Artificial Sequence: Synthetic oligonucleotide
  Sense strand starting at position 1393 of SEQ ID NO: 1886076
cagugaugugaaggucuca

SEQ ID NO: 2386105 - RNA, 19 nt, Artificial Sequence
  Description of Artificial Sequence: Synthetic oligonucleotide
  Antisense strand to SEQ ID NO: 2386104
ugagaccuucacaucacug

SEQ ID NO: 2386106 - RNA, 19 nt, Artificial Sequence
  Description of Artificial Sequence: Synthetic oligonucleotide
  Sense strand starting at position 1600 of SEQ ID NO: 1886076
aagacaaucucugugugca

SEQ ID NO: 2386107 - RNA, 19 nt, Artificial Sequence
  Description of Artificial Sequence: Synthetic oligonucleotide
  Antisense strand to SEQ ID NO: 2386106
ugcacacagagauugucuu

SEQ ID NO: 2386108 - RNA, 19 nt, Artificial Sequence
  Description of Artificial Sequence: Synthetic oligonucleotide
  Sense strand starting at position 1896 of SEQ ID NO: 1886076
ccaucagugcuuuacagac

SEQ ID NO: 2386109 - RNA, 19 nt, Artificial Sequence
  Description of Artificial Sequence: Synthetic oligonucleotide
  Antisense strand to SEQ ID NO: 2386108
gucuguaaagcacugaugg

SEQ ID NO: 2386110 - RNA, 19 nt, Artificial Sequence
  Description of Artificial Sequence: Synthetic oligonucleotide
  Sense strand starting at position 2306 of SEQ ID NO: 1886076
acagacugccaaugaauga

SEQ ID NO: 2386111 - RNA, 19 nt, Artificial Sequence
  Description of Artificial Sequence: Synthetic oligonucleotide
  Antisense strand to SEQ ID NO: 2386110
ucauucauuggcagucugu

SEQ ID NO: 2386112 - RNA, 19 nt, Artificial Sequence
  Description of Artificial Sequence: Synthetic oligonucleotide
  Sense strand starting at position 2371 of SEQ ID NO: 1886076
gcagguaauguuuacacau

SEQ ID NO: 2386113 - RNA, 19 nt, Artificial Sequence
  Description of Artificial Sequence: Synthetic oligonucleotide
  Antisense strand to SEQ ID NO: 2386112
auguguaaacauuaccugc

SEQ ID NO: 2386114 - RNA, 19 nt, Artificial Sequence
  Description of Artificial Sequence: Synthetic oligonucleotide
  Sense strand starting at position 2560 of SEQ ID NO: 1886076
agccacucugcuugaggaa

SEQ ID NO: 2386115 - RNA, 19 nt, Artificial Sequence
  Description of Artificial Sequence: Synthetic oligonucleotide
  Antisense strand to SEQ ID NO: 2386114
uuccucaagcagaguggcu

SEQ ID NO: 2386116 - RNA, 19 nt, Artificial Sequence
  Description of Artificial Sequence: Synthetic oligonucleotide
  Sense strand starting at position 2777 of SEQ ID NO: 1886076
guuccugagaggcaaaguu

SEQ ID NO: 2386117 - RNA, 19 nt, Artificial Sequence
  Description of Artificial Sequence: Synthetic oligonucleotide
  Antisense strand to SEQ ID NO: 2386116
aacuuugccucucaggaac

SEQ ID NO: 2386118 - RNA, 19 nt, Artificial Sequence
  Description of Artificial Sequence: Synthetic oligonucleotide
  Sense strand starting at position 2932 of SEQ ID NO: 1886076
gcauaauucuggccuaaga

SEQ ID NO: 2386119 - RNA, 19 nt, Artificial Sequence
  Description of Artificial Sequence: Synthetic oligonucleotide
  Antisense strand to SEQ ID NO: 2386118
ucuuaggccagaauuaugc

SEQ ID NO: 2386120 - RNA, 19 nt, Artificial Sequence
  Description of Artificial Sequence: Synthetic oligonucleotide
  Sense strand starting at position 3405 of SEQ ID NO: 1886076
gcuuguuugaagcaaugac

SEQ ID NO: 2386121 - RNA, 19 nt, Artificial Sequence
  Description of Artificial Sequence: Synthetic oligonucleotide
  Antisense strand to SEQ ID NO: 2386120
gucauugcuucaaacaagc

SEQ ID NO: 2386122 - RNA, 19 nt, Artificial Sequence
  Description of Artificial Sequence: Synthetic oligonucleotide
  Sense strand starting at position 3496 of SEQ ID NO: 1886076
gcaggcaaaucuucccuaa

SEQ ID NO: 2386123 - RNA, 19 nt, Artificial Sequence
  Description of Artificial Sequence: Synthetic oligonucleotide
  Antisense strand to SEQ ID NO: 2386122
uuagggaagauuugccugc

SEQ ID NO: 2386124 - RNA, 19 nt, Artificial Sequence
  Description of Artificial Sequence: Synthetic oligonucleotide
  Sense strand starting at position 3498 of SEQ ID NO: 1886076
aggcaaaucuucccuaaug

SEQ ID NO: 2386125 - RNA, 19 nt, Artificial Sequence
  Description of Artificial Sequence: Synthetic oligonucleotide
  Antisense strand to SEQ ID NO: 2386124
cauuagggaagauuugccu

SEQ ID NO: 2386126 - RNA, 19 nt, Artificial Sequence
  Description of Artificial Sequence: Synthetic oligonucleotide
  Sense strand starting at position 3499 of SEQ ID NO: 1886076
ggcaaaucuucccuaaugu

SEQ ID NO: 2386127 - RNA, 19 nt, Artificial Sequence
  Description of Artificial Sequence: Synthetic oligonucleotide
  Antisense strand to SEQ ID NO: 2386126
acauuagggaagauuugcc

SEQ ID NO: 2386128 - RNA, 19 nt, Artificial Sequence
  Description of Artificial Sequence: Synthetic oligonucleotide
  Sense strand starting at position 3761 of SEQ ID NO: 1886076
aauggugugaugugagaaa

SEQ ID NO: 2386129 - RNA, 19 nt, Artificial Sequence
  Description of Artificial Sequence: Synthetic oligonucleotide
  Antisense strand to SEQ ID NO: 2386128
uuucucacaucacaccauu

SEQ ID NO: 2386130 - RNA, 19 nt, Artificial Sequence
  Description of Artificial Sequence: Synthetic oligonucleotide
  Sense strand starting at position 3806 of SEQ ID NO: 1886076
auuguuggacuuugaagaa

SEQ ID NO: 2386131 - RNA, 19 nt, Artificial Sequence
  Description of Artificial Sequence: Synthetic oligonucleotide
  Antisense strand to SEQ ID NO: 2386130
uucuucaaaguccaacaau

SEQ ID NO: 2386132 - RNA, 19 nt, Artificial Sequence
  Description of Artificial Sequence: Synthetic oligonucleotide
  Sense strand starting at position 3815 of SEQ ID NO: 1886076
cuuugaagaagucaguguu

SEQ ID NO: 2386133 - RNA, 19 nt, Artificial Sequence
  Description of Artificial Sequence: Synthetic oligonucleotide
  Antisense strand to SEQ ID NO: 2386132
aacacugacuucuucaaag

SEQ ID NO: 2386134 - RNA, 19 nt, Artificial Sequence
  Description of Artificial Sequence: Synthetic oligonucleotide
  Sense strand starting at position 3831 of SEQ ID NO: 1886076
guugaaacagccugaauca

SEQ ID NO: 2386135 - RNA, 19 nt, Artificial Sequence
  Description of Artificial Sequence: Synthetic oligonucleotide
  Antisense strand to SEQ ID NO: 2386134
ugauucaggcuguuucaac

SEQ ID NO: 2386136 - RNA, 19 nt, Artificial Sequence
  Description of Artificial Sequence: Synthetic oligonucleotide
  Sense strand starting at position 87 of SEQ ID NO: 1886077
gccaaauacuaguuggaaa

SEQ ID NO: 2386137 - RNA, 19 nt, Artificial Sequence
  Description of Artificial Sequence: Synthetic oligonucleotide
  Antisense strand to SEQ ID NO: 2386136
uuuccaacuaguauuuggc

SEQ ID NO: 2386138 - RNA, 19 nt, Artificial Sequence
  Description of Artificial Sequence: Synthetic oligonucleotide
  Sense strand starting at position 89 of SEQ ID NO: 1886077
caaauacuaguuggaaagu

SEQ ID NO: 2386139 - RNA, 19 nt, Artificial Sequence
  Description of Artificial Sequence: Synthetic oligonucleotide
  Antisense strand to SEQ ID NO: 2386138
acuuuccaacuaguauuug

SEQ ID NO: 2386140 - RNA, 19 nt, Artificial Sequence
  Description of Artificial Sequence: Synthetic oligonucleotide
  Sense strand starting at position 264 of SEQ ID NO: 1886077
cuuaauuggcugcaagauu

SEQ ID NO: 2386141 - RNA, 19 nt, Artificial Sequence
  Description of Artificial Sequence: Synthetic oligonucleotide
  Antisense strand to SEQ ID NO: 2386140
aaucuugcagccaauuaag

SEQ ID NO: 2386142 - RNA, 19 nt, Artificial Sequence
  Description of Artificial Sequence: Synthetic oligonucleotide
  Sense strand starting at position 528 of SEQ ID NO: 1886077
gcagguauacuuuaaguug

SEQ ID NO: 2386143 - RNA, 19 nt, Artificial Sequence
  Description of Artificial Sequence: Synthetic oligonucleotide
  Antisense strand to SEQ ID NO: 2386142
caacuuaaaguauaccugc

SEQ ID NO: 2386144 - RNA, 19 nt, Artificial Sequence
  Description of Artificial Sequence: Synthetic oligonucleotide
  Sense strand starting at position 531 of SEQ ID NO: 1886077
gguauacuuuaaguuggaa

SEQ ID NO: 2386145 - RNA, 19 nt, Artificial Sequence
  Description of Artificial Sequence: Synthetic oligonucleotide
  Antisense strand to SEQ ID NO: 2386144
uuccaacuuaaaguauacc

SEQ ID NO: 2386146 - RNA, 19 nt, Artificial Sequence
  Description of Artificial Sequence: Synthetic oligonucleotide
  Sense strand starting at position 546 of SEQ ID NO: 1886077
ggaagcuacaguuaaacgu

SEQ ID NO: 2386147 - RNA, 19 nt, Artificial Sequence
  Description of Artificial Sequence: Synthetic oligonucleotide
  Antisense strand to SEQ ID NO: 2386146
acguuuaacuguagcuucc

SEQ ID NO: 2386148 - RNA, 19 nt, Artificial Sequence
  Description of Artificial Sequence: Synthetic oligonucleotide
  Sense strand starting at position 842 of SEQ ID NO: 1886077
gggucaacaucuccuuuga

SEQ ID NO: 2386149 - RNA, 19 nt, Artificial Sequence
  Description of Artificial Sequence: Synthetic oligonucleotide
  Antisense strand to SEQ ID NO: 2386148
ucaaaggagauguugaccc

SEQ ID NO: 2386150 - RNA, 19 nt, Artificial Sequence
  Description of Artificial Sequence: Synthetic oligonucleotide
  Sense strand starting at position 844 of SEQ ID NO: 1886077
gucaacaucuccuuugaag

SEQ ID NO: 2386151 - RNA, 19 nt, Artificial Sequence
  Description of Artificial Sequence: Synthetic oligonucleotide
  Antisense strand to SEQ ID NO: 2386150
cuucaaaggagauguugac

SEQ ID NO: 2386152 - RNA, 19 nt, Artificial Sequence
  Description of Artificial Sequence: Synthetic oligonucleotide
  Sense strand starting at position 956 of SEQ ID NO: 1886077
cuuuguccacaguagauaa

SEQ ID NO: 2386153 - RNA, 19 nt, Artificial Sequence
  Description of Artificial Sequence: Synthetic oligonucleotide
  Antisense strand to SEQ ID NO: 2386152
uuaucuacuguggacaaag

SEQ ID NO: 2386154 - RNA, 19 nt, Artificial Sequence
  Description of Artificial Sequence: Synthetic oligonucleotide
  Sense strand starting at position 980 of SEQ ID NO: 1886077
cugaauuucuugcuugcuu

SEQ ID NO: 2386155 - RNA, 19 nt, Artificial Sequence
  Description of Artificial Sequence: Synthetic oligonucleotide
  Antisense strand to SEQ ID NO: 2386154
aagcaagcaagaaauucag

SEQ ID NO: 2386156 - RNA, 19 nt, Artificial Sequence
  Description of Artificial Sequence: Synthetic oligonucleotide
  Sense strand starting at position 981 of SEQ ID NO: 1886077
ugaauuucuugcuugcuua

SEQ ID NO: 2386157 - RNA, 19 nt, Artificial Sequence
  Description of Artificial Sequence: Synthetic oligonucleotide
  Antisense strand to SEQ ID NO: 2386156
uaagcaagcaagaaauuca

SEQ ID NO: 2386158 - RNA, 19 nt, Artificial Sequence
  Description of Artificial Sequence: Synthetic oligonucleotide
  Sense strand starting at position 1028 of SEQ ID NO: 1886077
gacaucguugcugaacgau

SEQ ID NO: 2386159 - RNA, 19 nt, Artificial Sequence
  Description of Artificial Sequence: Synthetic oligonucleotide
  Antisense strand to SEQ ID NO: 2386158
aucguucagcaacgauguc

SEQ ID NO: 2386160 - RNA, 19 nt, Artificial Sequence
  Description of Artificial Sequence: Synthetic oligonucleotide
  Sense strand starting at position 1067 of SEQ ID NO: 1886077
uuguaaagguuuccaaaca

SEQ ID NO: 2386161 - RNA, 19 nt, Artificial Sequence
  Description of Artificial Sequence: Synthetic oligonucleotide
  Antisense strand to SEQ ID NO: 2386160
uguuuggaaaccuuuacaa

SEQ ID NO: 2386162 - RNA, 19 nt, Artificial Sequence
  Description of Artificial Sequence: Synthetic oligonucleotide
  Sense strand starting at position 1085 of SEQ ID NO: 1886077
aaggcaaaucagugagcau

SEQ ID NO: 2386163 - RNA, 19 nt, Artificial Sequence
  Description of Artificial Sequence: Synthetic oligonucleotide
  Antisense strand to SEQ ID NO: 2386162
augcucacugauuugccuu

SEQ ID NO: 2386164 - RNA, 19 nt, Artificial Sequence
  Description of Artificial Sequence: Synthetic oligonucleotide
  Sense strand starting at position 1086 of SEQ ID NO: 1886077
aggcaaaucagugagcaua

SEQ ID NO: 2386165 - RNA, 19 nt, Artificial Sequence
  Description of Artificial Sequence: Synthetic oligonucleotide
  Antisense strand to SEQ ID NO: 2386164
uaugcucacugauuugccu

SEQ ID NO: 2386166 - RNA, 19 nt, Artificial Sequence
  Description of Artificial Sequence: Synthetic oligonucleotide
  Sense strand starting at position 1088 of SEQ ID NO: 1886077
gcaaaucagugagcauaaa

SEQ ID NO: 2386167 - RNA, 19 nt, Artificial Sequence
  Description of Artificial Sequence: Synthetic oligonucleotide
  Antisense strand to SEQ ID NO: 2386166
uuuaugcucacugauuugc

SEQ ID NO: 2386168 - RNA, 19 nt, Artificial Sequence
  Description of Artificial Sequence: Synthetic oligonucleotide
  Sense strand starting at position 1162 of SEQ ID NO: 1886077
ugcgaagauuuggccaagu

SEQ ID NO: 2386169 - RNA, 19 nt, Artificial Sequence
  Description of Artificial Sequence: Synthetic oligonucleotide
  Antisense strand to SEQ ID NO: 2386168
acuuggccaaaucuucgca

SEQ ID NO: 2386170 - RNA, 19 nt, Artificial Sequence
  Description of Artificial Sequence: Synthetic oligonucleotide
  Sense strand starting at position 1286 of SEQ ID NO: 1886077
cgcuguauucugccacuuu

SEQ ID NO: 2386171 - RNA, 19 nt, Artificial Sequence
  Description of Artificial Sequence: Synthetic oligonucleotide
  Antisense strand to SEQ ID NO: 2386170
aaaguggcagaauacagcg

SEQ ID NO: 2386172 - RNA, 19 nt, Artificial Sequence
  Description of Artificial Sequence: Synthetic oligonucleotide
  Sense strand starting at position 1307 of SEQ ID NO: 1886077
aauguuauugaacgugaaa

SEQ ID NO: 2386173 - RNA, 19 nt, Artificial Sequence
  Description of Artificial Sequence: Synthetic oligonucleotide
  Antisense strand to SEQ ID NO: 2386172
uuucacguucaauaacauu

SEQ ID NO: 2386174 - RNA, 19 nt, Artificial Sequence
  Description of Artificial Sequence: Synthetic oligonucleotide
  Sense strand starting at position 1309 of SEQ ID NO: 1886077
uguuauugaacgugaaauu

SEQ ID NO: 2386175 - RNA, 19 nt, Artificial Sequence
  Description of Artificial Sequence: Synthetic oligonucleotide
  Antisense strand to SEQ ID NO: 2386174
aauuucacguucaauaaca

SEQ ID NO: 2386176 - RNA, 19 nt, Artificial Sequence
  Description of Artificial Sequence: Synthetic oligonucleotide
  Sense strand starting at position 1747 of SEQ ID NO: 1886077
ccgcuucucaaagaggaua

SEQ ID NO: 2386177 - RNA, 19 nt, Artificial Sequence
  Description of Artificial Sequence: Synthetic oligonucleotide
  Antisense strand to SEQ ID NO: 2386176
uauccucuuugagaagcgg

SEQ ID NO: 2386178 - RNA, 19 nt, Artificial Sequence
  Description of Artificial Sequence: Synthetic oligonucleotide
  Sense strand starting at position 2321 of SEQ ID NO: 1886077
ggaaauaggcuuugguauu

SEQ ID NO: 2386179 - RNA, 19 nt, Artificial Sequence
  Description of Artificial Sequence: Synthetic oligonucleotide
  Antisense strand to SEQ ID NO: 2386178
aauaccaaagccuauuucc

SEQ ID NO: 2386180 - RNA, 19 nt, Artificial Sequence
  Description of Artificial Sequence: Synthetic oligonucleotide
  Sense strand starting at position 2517 of SEQ ID NO: 1886077
guaggauuuacccgcaccu

SEQ ID NO: 2386181 - RNA, 19 nt, Artificial Sequence
  Description of Artificial Sequence: Synthetic oligonucleotide
  Antisense strand to SEQ ID NO: 2386180
aggugcggguaaauccuac

SEQ ID NO: 2386182 - RNA, 19 nt, Artificial Sequence
  Description of Artificial Sequence: Synthetic oligonucleotide
  Sense strand starting at position 2565 of SEQ ID NO: 1886077
gcagacgauuuggagauaa

SEQ ID NO: 2386183 - RNA, 19 nt, Artificial Sequence
  Description of Artificial Sequence: Synthetic oligonucleotide
  Antisense strand to SEQ ID NO: 2386182
uuaucuccaaaucgucugc

SEQ ID NO: 2386184 - RNA, 19 nt, Artificial Sequence
  Description of Artificial Sequence: Synthetic oligonucleotide
  Sense strand starting at position 2680 of SEQ ID NO: 1886077
cuuugauguuacuuaaguu

SEQ ID NO: 2386185 - RNA, 19 nt, Artificial Sequence
  Description of Artificial Sequence: Synthetic oligonucleotide
  Antisense strand to SEQ ID NO: 2386184
aacuuaaguaacaucaaag

SEQ ID NO: 2386186 - RNA, 19 nt, Artificial Sequence
  Description of Artificial Sequence: Synthetic oligonucleotide
  Sense strand starting at position 2744 of SEQ ID NO: 1886077
ucguauguccaucauuaga

SEQ ID NO: 2386187 - RNA, 19 nt, Artificial Sequence
  Description of Artificial Sequence: Synthetic oligonucleotide
  Antisense strand to SEQ ID NO: 2386186
ucuaaugauggacauacga

SEQ ID NO: 2386188 - RNA, 19 nt, Artificial Sequence
  Description of Artificial Sequence: Synthetic oligonucleotide
  Sense strand starting at position 2746 of SEQ ID NO: 1886077
guauguccaucauuagaac

SEQ ID NO: 2386189 - RNA, 19 nt, Artificial Sequence
  Description of Artificial Sequence: Synthetic oligonucleotide
  Antisense strand to SEQ ID NO: 2386188
guucuaaugauggacauac

SEQ ID NO: 2386190 - RNA, 19 nt, Artificial Sequence
  Description of Artificial Sequence: Synthetic oligonucleotide
  Sense strand starting at position 3069 of SEQ ID NO: 1886077
cguaguauucccuaaacac

SEQ ID NO: 2386191 - RNA, 19 nt, Artificial Sequence
  Description of Artificial Sequence: Synthetic oligonucleotide
  Antisense strand to SEQ ID NO: 2386190
guguuuagggaauacuacg

SEQ ID NO: 2386192 - RNA, 19 nt, Artificial Sequence
  Description of Artificial Sequence: Synthetic oligonucleotide
  Sense strand starting at position 3086 of SEQ ID NO: 1886077
acuauacuuugggcaauaa

SEQ ID NO: 2386193 - RNA, 19 nt, Artificial Sequence
  Description of Artificial Sequence: Synthetic oligonucleotide
  Antisense strand to SEQ ID NO: 2386192
uuauugcccaaaguauagu

SEQ ID NO: 2386194 - RNA, 19 nt, Artificial Sequence
  Description of Artificial Sequence: Synthetic oligonucleotide
  Sense strand starting at position 3131 of SEQ ID NO: 1886077
uacuaauuacagggacagu

SEQ ID NO: 2386195 - RNA, 19 nt, Artificial Sequence
  Description of Artificial Sequence: Synthetic oligonucleotide
  Antisense strand to SEQ ID NO: 2386194
acugucccuguaauuagua

SEQ ID NO: 2386196 - RNA, 19 nt, Artificial Sequence
  Description of Artificial Sequence: Synthetic oligonucleotide
  Sense strand starting at position 3257 of SEQ ID NO: 1886077
auaugaaauuuaggguaac

SEQ ID NO: 2386197 - RNA, 19 nt, Artificial Sequence
  Description of Artificial Sequence: Synthetic oligonucleotide
  Antisense strand to SEQ ID NO: 2386196
guuacccuaaauuucauau

SEQ ID NO: 2386198 - RNA, 19 nt, Artificial Sequence
  Description of Artificial Sequence: Synthetic oligonucleotide
  Sense strand starting at position 3258 of SEQ ID NO: 1886077
uaugaaauuuaggguaacu

SEQ ID NO: 2386199 - RNA, 19 nt, Artificial Sequence
  Description of Artificial Sequence: Synthetic oligonucleotide
  Antisense strand to SEQ ID NO: 2386198
aguuacccuaaauuucaua

SEQ ID NO: 2386200 - RNA, 19 nt, Artificial Sequence
  Description of Artificial Sequence: Synthetic oligonucleotide
  Sense strand starting at position 3434 of SEQ ID NO: 1886077
ugacaacuuccagguaguu

SEQ ID NO: 2386201 - RNA, 19 nt, Artificial Sequence
  Description of Artificial Sequence: Synthetic oligonucleotide
  Antisense strand to SEQ ID NO: 2386200
aacuaccuggaaguuguca

SEQ ID NO: 2386202 - RNA, 19 nt, Artificial Sequence
  Description of Artificial Sequence: Synthetic oligonucleotide
  Sense strand starting at position 3512 of SEQ ID NO: 1886077
gaaagcacagucugaucaa

SEQ ID NO: 2386203 - RNA, 19 nt, Artificial Sequence
  Description of Artificial Sequence: Synthetic oligonucleotide
  Antisense strand to SEQ ID NO: 2386202
uugaucagacugugcuuuc

SEQ ID NO: 2386204 - RNA, 19 nt, Artificial Sequence
  Description of Artificial Sequence: Synthetic oligonucleotide
  Sense strand starting at position 3515 of SEQ ID NO: 1886077
agcacagucugaucaauga

SEQ ID NO: 2386205 - RNA, 19 nt, Artificial Sequence
  Description of Artificial Sequence: Synthetic oligonucleotide
  Antisense strand to SEQ ID NO: 2386204
ucauugaucagacugugcu

SEQ ID NO: 2386206 - RNA, 19 nt, Artificial Sequence
  Description of Artificial Sequence: Synthetic oligonucleotide
  Sense strand starting at position 3519 of SEQ ID NO: 1886077
cagucugaucaaugauguu

SEQ ID NO: 2386207 - RNA, 19 nt, Artificial Sequence
  Description of Artificial Sequence: Synthetic oligonucleotide
  Antisense strand to SEQ ID NO: 2386206
aacaucauugaucagacug

SEQ ID NO: 2386208 - RNA, 19 nt, Artificial Sequence
  Description of Artificial Sequence: Synthetic oligonucleotide
  Sense strand starting at position 3571 of SEQ ID NO: 1886077
augugagaccuaugcaaau

SEQ ID NO: 2386209 - RNA, 19 nt, Artificial Sequence
  Description of Artificial Sequence: Synthetic oligonucleotide
  Antisense strand to SEQ ID NO: 2386208
auuugcauaggucucacau

SEQ ID NO: 2386210 - RNA, 19 nt, Artificial Sequence
  Description of Artificial Sequence: Synthetic oligonucleotide
  Sense strand starting at position 3616 of SEQ ID NO: 1886077
agugcugaaucuuuaauaa

SEQ ID NO: 2386211 - RNA, 19 nt, Artificial Sequence
  Description of Artificial Sequence: Synthetic oligonucleotide
  Antisense strand to SEQ ID NO: 2386210
uuauuaaagauucagcacu

SEQ ID NO: 2386212 - RNA, 19 nt, Artificial Sequence
  Description of Artificial Sequence: Synthetic oligonucleotide
  Sense strand starting at position 3638 of SEQ ID NO: 1886077
gccaaauauaucuggaggu

SEQ ID NO: 2386213 - RNA, 19 nt, Artificial Sequence
  Description of Artificial Sequence: Synthetic oligonucleotide
  Antisense strand to SEQ ID NO: 2386212
accuccagauauauuuggc

SEQ ID NO: 2386214 - RNA, 19 nt, Artificial Sequence
  Description of Artificial Sequence: Synthetic oligonucleotide
  Sense strand starting at position 3694 of SEQ ID NO: 1886077
aacagcuuaggaugaguaa

SEQ ID NO: 2386215 - RNA, 19 nt, Artificial Sequence
  Description of Artificial Sequence: Synthetic oligonucleotide
  Antisense strand to SEQ ID NO: 2386214
uuacucauccuaagcuguu

SEQ ID NO: 2386216 - RNA, 19 nt, Artificial Sequence
  Description of Artificial Sequence: Synthetic oligonucleotide
  Sense strand starting at position 12 of SEQ ID NO: 1886078
gagagucccugcucucaua

SEQ ID NO: 2386217 - RNA, 19 nt, Artificial Sequence
  Description of Artificial Sequence: Synthetic oligonucleotide
  Antisense strand to SEQ ID NO: 2386216
uaugagagcagggacucuc

SEQ ID NO: 2386218 - RNA, 19 nt, Artificial Sequence
  Description of Artificial Sequence: Synthetic oligonucleotide
  Sense strand starting at position 23 of SEQ ID NO: 1886078
cucucauagugagcuucua

SEQ ID NO: 2386219 - RNA, 19 nt, Artificial Sequence
  Description of Artificial Sequence: Synthetic oligonucleotide
  Antisense strand to SEQ ID NO: 2386218
uagaagcucacuaugagag

SEQ ID NO: 2386220 - RNA, 19 nt, Artificial Sequence
  Description of Artificial Sequence: Synthetic oligonucleotide
  Sense strand starting at position 80 of SEQ ID NO: 1886078
uugcucauguaagcuagau

SEQ ID NO: 2386221 - RNA, 19 nt, Artificial Sequence
  Description of Artificial Sequence: Synthetic oligonucleotide
  Antisense strand to SEQ ID NO: 2386220
aucuagcuuacaugagcaa

SEQ ID NO: 2386222 - RNA, 19 nt, Artificial Sequence
  Description of Artificial Sequence: Synthetic oligonucleotide
  Sense strand starting at position 84 of SEQ ID NO: 1886078
ucauguaagcuagaucagu

SEQ ID NO: 2386223 - RNA, 19 nt, Artificial Sequence
  Description of Artificial Sequence: Synthetic oligonucleotide
  Antisense strand to SEQ ID NO: 2386222
acugaucuagcuuacauga

SEQ ID NO: 2386224 - RNA, 19 nt, Artificial Sequence
  Description of Artificial Sequence: Synthetic oligonucleotide
  Sense strand starting at position 131 of SEQ ID NO: 1886078
ugcugugguucucuccaaa

SEQ ID NO: 2386225 - RNA, 19 nt, Artificial Sequence
  Description of Artificial Sequence: Synthetic oligonucleotide
  Antisense strand to SEQ ID NO: 2386224
uuuggagagaaccacagca

SEQ ID NO: 2386226 - RNA, 19 nt, Artificial Sequence
  Description of Artificial Sequence: Synthetic oligonucleotide
  Sense strand starting at position 175 of SEQ ID NO: 1886078
gucuauuacuucucaaagu

SEQ ID NO: 2386227 - RNA, 19 nt, Artificial Sequence
  Description of Artificial Sequence: Synthetic oligonucleotide
  Antisense strand to SEQ ID NO: 2386226
acuuugagaaguaauagac

SEQ ID NO: 2386228 - RNA, 19 nt, Artificial Sequence
  Description of Artificial Sequence: Synthetic oligonucleotide
  Sense strand starting at position 198 of SEQ ID NO: 1886078
uugccaggucccuaagaaa

SEQ ID NO: 2386229 - RNA, 19 nt, Artificial Sequence
  Description of Artificial Sequence: Synthetic oligonucleotide
  Antisense strand to SEQ ID NO: 2386228
uuucuuagggaccuggcaa

SEQ ID NO: 2386230 - RNA, 19 nt, Artificial Sequence
  Description of Artificial Sequence: Synthetic oligonucleotide
  Sense strand starting at position 269 of SEQ ID NO: 1886078
ggguuaccuuaguuagcau

SEQ ID NO: 2386231 - RNA, 19 nt, Artificial Sequence
  Description of Artificial Sequence: Synthetic oligonucleotide
  Antisense strand to SEQ ID NO: 2386230
augcuaacuaagguaaccc

SEQ ID NO: 2386232 - RNA, 19 nt, Artificial Sequence
  Description of Artificial Sequence: Synthetic oligonucleotide
  Sense strand starting at position 281 of SEQ ID NO: 1886078
uuagcauuguucucuaaug

SEQ ID NO: 2386233 - RNA, 19 nt, Artificial Sequence
  Description of Artificial Sequence: Synthetic oligonucleotide
  Antisense strand to SEQ ID NO: 2386232
cauuagagaacaaugcuaa

SEQ ID NO: 2386234 - RNA, 19 nt, Artificial Sequence
  Description of Artificial Sequence: Synthetic oligonucleotide
  Sense strand starting at position 283 of SEQ ID NO: 1886078
agcauuguucucuaauggu

SEQ ID NO: 2386235 - RNA, 19 nt, Artificial Sequence
  Description of Artificial Sequence: Synthetic oligonucleotide
  Antisense strand to SEQ ID NO: 2386234
accauuagagaacaaugcu

SEQ ID NO: 2386236 - RNA, 19 nt, Artificial Sequence
  Description of Artificial Sequence: Synthetic oligonucleotide
  Sense strand starting at position 306 of SEQ ID NO: 1886078
ucagguccuugucucuaaa

SEQ ID NO: 2386237 - RNA, 19 nt, Artificial Sequence
  Description of Artificial Sequence: Synthetic oligonucleotide
  Antisense strand to SEQ ID NO: 2386236
uuuagagacaaggaccuga

SEQ ID NO: 2386238 - RNA, 19 nt, Artificial Sequence
  Description of Artificial Sequence: Synthetic oligonucleotide
  Sense strand starting at position 425 of SEQ ID NO: 1886078
ccaucucuguuucuugaua

SEQ ID NO: 2386239 - RNA, 19 nt, Artificial Sequence
  Description of Artificial Sequence: Synthetic oligonucleotide
  Antisense strand to SEQ ID NO: 2386238
uaucaagaaacagagaugg

SEQ ID NO: 2386240 - RNA, 19 nt, Artificial Sequence
  Description of Artificial Sequence: Synthetic oligonucleotide
  Sense strand starting at position 613 of SEQ ID NO: 1886078
agagaugugcccugucuca

SEQ ID NO: 2386241 - RNA, 19 nt, Artificial Sequence
  Description of Artificial Sequence: Synthetic oligonucleotide
  Antisense strand to SEQ ID NO: 2386240
ugagacagggcacaucucu

SEQ ID NO: 2386242 - RNA, 19 nt, Artificial Sequence
  Description of Artificial Sequence: Synthetic oligonucleotide
  Sense strand starting at position 653 of SEQ ID NO: 1886078
gggacucagagcuagguau

SEQ ID NO: 2386243 - RNA, 19 nt, Artificial Sequence
  Description of Artificial Sequence: Synthetic oligonucleotide
  Antisense strand to SEQ ID NO: 2386242
auaccuagcucugaguccc

SEQ ID NO: 2386244 - RNA, 19 nt, Artificial Sequence
  Description of Artificial Sequence: Synthetic oligonucleotide
  Sense strand starting at position 671 of SEQ ID NO: 1886078
uugccagucuucuccauga

SEQ ID NO: 2386245 - RNA, 19 nt, Artificial Sequence
  Description of Artificial Sequence: Synthetic oligonucleotide
  Antisense strand to SEQ ID NO: 2386244
ucauggagaagacuggcaa

SEQ ID NO: 2386246 - RNA, 19 nt, Artificial Sequence
  Description of Artificial Sequence: Synthetic oligonucleotide
  Sense strand starting at position 673 of SEQ ID NO: 1886078
gccagucuucuccaugacu

SEQ ID NO: 2386247 - RNA, 19 nt, Artificial Sequence
  Description of Artificial Sequence: Synthetic oligonucleotide
  Antisense strand to SEQ ID NO: 2386246
agucauggagaagacuggc

SEQ ID NO: 2386248 - RNA, 19 nt, Artificial Sequence
  Description of Artificial Sequence: Synthetic oligonucleotide
  Sense strand starting at position 1299 of SEQ ID NO: 1886078
gcuuuaugauuaguaaagg

SEQ ID NO: 2386249 - RNA, 19 nt, Artificial Sequence
  Description of Artificial Sequence: Synthetic oligonucleotide
  Antisense strand to SEQ ID NO: 2386248
ccuuuacuaaucauaaagc

SEQ ID NO: 2386250 - RNA, 19 nt, Artificial Sequence
  Description of Artificial Sequence: Synthetic oligonucleotide
  Sense strand starting at position 1300 of SEQ ID NO: 1886078
cuuuaugauuaguaaagga

SEQ ID NO: 2386251 - RNA, 19 nt, Artificial Sequence
  Description of Artificial Sequence: Synthetic oligonucleotide
  Antisense strand to SEQ ID NO: 2386250
uccuuuacuaaucauaaag

SEQ ID NO: 2386252 - RNA, 19 nt, Artificial Sequence
  Description of Artificial Sequence: Synthetic oligonucleotide
  Sense strand starting at position 1491 of SEQ ID NO: 1886078
cugagaccuugucuuuacu

SEQ ID NO: 2386253 - RNA, 19 nt, Artificial Sequence
  Description of Artificial Sequence: Synthetic oligonucleotide
  Antisense strand to SEQ ID NO: 2386252
aguaaagacaaggucucag

SEQ ID NO: 2386254 - RNA, 19 nt, Artificial Sequence
  Description of Artificial Sequence: Synthetic oligonucleotide
  Sense strand starting at position 1589 of SEQ ID NO: 1886078
ucgagucuggaagguugaa

SEQ ID NO: 2386255 - RNA, 19 nt, Artificial Sequence
  Description of Artificial Sequence: Synthetic oligonucleotide
  Antisense strand to SEQ ID NO: 2386254
uucaaccuuccagacucga

SEQ ID NO: 2386256 - RNA, 19 nt, Artificial Sequence
  Description of Artificial Sequence: Synthetic oligonucleotide
  Sense strand starting at position 2124 of SEQ ID NO: 1886078
ucggcagacucuuccagaa

SEQ ID NO: 2386257 - RNA, 19 nt, Artificial Sequence
  Description of Artificial Sequence: Synthetic oligonucleotide
  Antisense strand to SEQ ID NO: 2386256
uucuggaagagucugccga

SEQ ID NO: 2386258 - RNA, 19 nt, Artificial Sequence
  Description of Artificial Sequence: Synthetic oligonucleotide
  Sense strand starting at position 2487 of SEQ ID NO: 1886078
guggacuuguguguaugga

SEQ ID NO: 2386259 - RNA, 19 nt, Artificial Sequence
  Description of Artificial Sequence: Synthetic oligonucleotide
  Antisense strand to SEQ ID NO: 2386258
uccauacacacaaguccac

SEQ ID NO: 2386260 - RNA, 19 nt, Artificial Sequence
  Description of Artificial Sequence: Synthetic oligonucleotide
  Sense strand starting at position 2488 of SEQ ID NO: 1886078
uggacuuguguguauggaa

SEQ ID NO: 2386261 - RNA, 19 nt, Artificial Sequence
  Description of Artificial Sequence: Synthetic oligonucleotide
  Antisense strand to SEQ ID NO: 2386260
uuccauacacacaagucca

SEQ ID NO: 2386262 - RNA, 19 nt, Artificial Sequence
  Description of Artificial Sequence: Synthetic oligonucleotide
  Sense strand starting at position 2603 of SEQ ID NO: 1886078
ggaauacaauuagaauuag

SEQ ID NO: 2386263 - RNA, 19 nt, Artificial Sequence
  Description of Artificial Sequence: Synthetic oligonucleotide
  Antisense strand to SEQ ID NO: 2386262
cuaauucuaauuguauucc

SEQ ID NO: 2386264 - RNA, 19 nt, Artificial Sequence
  Description of Artificial Sequence: Synthetic oligonucleotide
  Sense strand starting at position 2980 of SEQ ID NO: 1886078
cagccuuucugccugggau

SEQ ID NO: 2386265 - RNA, 19 nt, Artificial Sequence
  Description of Artificial Sequence: Synthetic oligonucleotide
  Antisense strand to SEQ ID NO: 2386264
aucccaggcagaaaggcug

SEQ ID NO: 2386266 - RNA, 19 nt, Artificial Sequence
  Description of Artificial Sequence: Synthetic oligonucleotide
  Sense strand starting at position 3218 of SEQ ID NO: 1886078
accauuagcugagcucauu

SEQ ID NO: 2386267 - RNA, 19 nt, Artificial Sequence
  Description of Artificial Sequence: Synthetic oligonucleotide
  Antisense strand to SEQ ID NO: 2386266
aaugagcucagcuaauggu

SEQ ID NO: 2386268 - RNA, 19 nt, Artificial Sequence
  Description of Artificial Sequence: Synthetic oligonucleotide
  Sense strand starting at position 3482 of SEQ ID NO: 1886078
uggugucacucagcaggua

SEQ ID NO: 2386269 - RNA, 19 nt, Artificial Sequence
  Description of Artificial Sequence: Synthetic oligonucleotide
  Antisense strand to SEQ ID NO: 2386268
uaccugcugagugacacca

SEQ ID NO: 2386270 - RNA, 19 nt, Artificial Sequence
  Description of Artificial Sequence: Synthetic oligonucleotide
  Sense strand starting at position 3483 of SEQ ID NO: 1886078
ggugucacucagcagguau

SEQ ID NO: 2386271 - RNA, 19 nt, Artificial Sequence
  Description of Artificial Sequence: Synthetic oligonucleotide
  Antisense strand to SEQ ID NO: 2386270
auaccugcugagugacacc

SEQ ID NO: 2386272 - RNA, 19 nt, Artificial Sequence
  Description of Artificial Sequence: Synthetic oligonucleotide
  Sense strand starting at position 3629 of SEQ ID NO: 1886078
gggagagauugugucucag

SEQ ID NO: 2386273 - RNA, 19 nt, Artificial Sequence
  Description of Artificial Sequence: Synthetic oligonucleotide
  Antisense strand to SEQ ID NO: 2386272
cugagacacaaucucuccc

SEQ ID NO: 2386274 - RNA, 19 nt, Artificial Sequence
  Description of Artificial Sequence: Synthetic oligonucleotide
  Sense strand starting at position 3631 of SEQ ID NO: 1886078
gagagauugugucucagug

SEQ ID NO: 2386275 - RNA, 19 nt, Artificial Sequence
  Description of Artificial Sequence: Synthetic oligonucleotide
  Antisense strand to SEQ ID NO: 2386274
cacugagacacaaucucuc

SEQ ID NO: 2386276 - RNA, 19 nt, Artificial Sequence
  Description of Artificial Sequence: Synthetic oligonucleotide
  Sense strand starting at position 3635 of SEQ ID NO: 1886078
gauugugucucagugaaac

SEQ ID NO: 2386277 - RNA, 19 nt, Artificial Sequence
  Description of Artificial Sequence: Synthetic oligonucleotide
  Antisense strand to SEQ ID NO: 2386276
guuucacugagacacaauc

SEQ ID NO: 2386278 - RNA, 19 nt, Artificial Sequence
  Description of Artificial Sequence: Synthetic oligonucleotide
  Sense strand starting at position 3797 of SEQ ID NO: 1886078
gacuuugagucagucacuu

SEQ ID NO: 2386279 - RNA, 19 nt, Artificial Sequence
  Description of Artificial Sequence: Synthetic oligonucleotide
  Antisense strand to SEQ ID NO: 2386278
aagugacugacucaaaguc

SEQ ID NO: 2386280 - RNA, 19 nt, Artificial Sequence
  Description of Artificial Sequence: Synthetic oligonucleotide
  Sense strand starting at position 3801 of SEQ ID NO: 1886078
uugagucagucacuuaaca

SEQ ID NO: 2386281 - RNA, 19 nt, Artificial Sequence
  Description of Artificial Sequence: Synthetic oligonucleotide
  Antisense strand to SEQ ID NO: 2386280
uguuaagugacugacucaa

SEQ ID NO: 2386282 - RNA, 19 nt, Artificial Sequence
  Description of Artificial Sequence: Synthetic oligonucleotide
  Sense strand starting at position 3827 of SEQ ID NO: 1886078
gucucagauuccucaacug

SEQ ID NO: 2386283 - RNA, 19 nt, Artificial Sequence
  Description of Artificial Sequence: Synthetic oligonucleotide
  Antisense strand to SEQ ID NO: 2386282
caguugaggaaucugagac

SEQ ID NO: 2386284 - RNA, 19 nt, Artificial Sequence
  Description of Artificial Sequence: Synthetic oligonucleotide
  Sense strand starting at position 3866 of SEQ ID NO: 1886078
cuaccuugcuagguuauua

SEQ ID NO: 2386285 - RNA, 19 nt, Artificial Sequence
  Description of Artificial Sequence: Synthetic oligonucleotide
  Antisense strand to SEQ ID NO: 2386284
uaauaaccuagcaagguag

SEQ ID NO: 2386286 - RNA, 19 nt, Artificial Sequence
  Description of Artificial Sequence: Synthetic oligonucleotide
  Sense strand starting at position 3876 of SEQ ID NO: 1886078
agguuauuacgauaaguag

SEQ ID NO: 2386287 - RNA, 19 nt, Artificial Sequence
  Description of Artificial Sequence: Synthetic oligonucleotide
  Antisense strand to SEQ ID NO: 2386286
cuacuuaucguaauaaccu

SEQ ID NO: 2386288 - RNA, 19 nt, Artificial Sequence
  Description of Artificial Sequence: Synthetic oligonucleotide
  Sense strand starting at position 3884 of SEQ ID NO: 1886078
acgauaaguaggcaaguga

SEQ ID NO: 2386289 - RNA, 19 nt, Artificial Sequence
  Description of Artificial Sequence: Synthetic oligonucleotide
  Antisense strand to SEQ ID NO: 2386288
ucacuugccuacuuaucgu

SEQ ID NO: 2386290 - RNA, 19 nt, Artificial Sequence
  Description of Artificial Sequence: Synthetic oligonucleotide
  Sense strand starting at position 3893 of SEQ ID NO: 1886078
aggcaagugaagugucaua

SEQ ID NO: 2386291 - RNA, 19 nt, Artificial Sequence
  Description of Artificial Sequence: Synthetic oligonucleotide
  Antisense strand to SEQ ID NO: 2386290
uaugacacuucacuugccu

SEQ ID NO: 2386292 - RNA, 19 nt, Artificial Sequence
  Description of Artificial Sequence: Synthetic oligonucleotide
  Sense strand starting at position 3924 of SEQ ID NO: 1886078
auggguauauacccaauau

SEQ ID NO: 2386293 - RNA, 19 nt, Artificial Sequence
  Description of Artificial Sequence: Synthetic oligonucleotide
  Antisense strand to SEQ ID NO: 2386292
auauuggguauauacccau

SEQ ID NO: 2386294 - RNA, 19 nt, Artificial Sequence
  Description of Artificial Sequence: Synthetic oligonucleotide
  Sense strand starting at position 3928 of SEQ ID NO: 1886078
guauauacccaauauuggu

SEQ ID NO: 2386295 - RNA, 19 nt, Artificial Sequence
  Description of Artificial Sequence: Synthetic oligonucleotide
  Antisense strand to SEQ ID NO: 2386294
accaauauuggguauauac

SEQ ID NO: 2386296 - RNA, 19 nt, Artificial Sequence
  Description of Artificial Sequence: Synthetic oligonucleotide
  Sense strand starting at position 42 of SEQ ID NO: 1886079
aauacucacguugaaugua

SEQ ID NO: 2386297 - RNA, 19 nt, Artificial Sequence
  Description of Artificial Sequence: Synthetic oligonucleotide
  Antisense strand to SEQ ID NO: 2386296
uacauucaacgugaguauu

SEQ ID NO: 2386298 - RNA, 19 nt, Artificial Sequence
  Description of Artificial Sequence: Synthetic oligonucleotide
  Sense strand starting at position 45 of SEQ ID NO: 1886079
acucacguugaauguaaau

SEQ ID NO: 2386299 - RNA, 19 nt, Artificial Sequence
  Description of Artificial Sequence: Synthetic oligonucleotide
  Antisense strand to SEQ ID NO: 2386298
auuuacauucaacgugagu

SEQ ID NO: 2386300 - RNA, 19 nt, Artificial Sequence
  Description of Artificial Sequence: Synthetic oligonucleotide
  Sense strand starting at position 224 of SEQ ID NO: 1886079
agcgaauaggaguagcuau

SEQ ID NO: 2386301 - RNA, 19 nt, Artificial Sequence
  Description of Artificial Sequence: Synthetic oligonucleotide
  Antisense strand to SEQ ID NO: 2386300
auagcuacuccuauucgcu

SEQ ID NO: 2386302 - RNA, 19 nt, Artificial Sequence
  Description of Artificial Sequence: Synthetic oligonucleotide
  Sense strand starting at position 745 of SEQ ID NO: 1886079
acaguagcacaguaauagu

SEQ ID NO: 2386303 - RNA, 19 nt, Artificial Sequence
  Description of Artificial Sequence: Synthetic oligonucleotide
  Antisense strand to SEQ ID NO: 2386302
acuauuacugugcuacugu

SEQ ID NO: 2386304 - RNA, 19 nt, Artificial Sequence
  Description of Artificial Sequence: Synthetic oligonucleotide
  Sense strand starting at position 1201 of SEQ ID NO: 1886079
agaggaaaguuguucauag

SEQ ID NO: 2386305 - RNA, 19 nt, Artificial Sequence
  Description of Artificial Sequence: Synthetic oligonucleotide
  Antisense strand to SEQ ID NO: 2386304
cuaugaacaacuuuccucu

SEQ ID NO: 2386306 - RNA, 19 nt, Artificial Sequence
  Description of Artificial Sequence: Synthetic oligonucleotide
  Sense strand starting at position 1444 of SEQ ID NO: 1886079
ccauucuauugauugggaa

SEQ ID NO: 2386307 - RNA, 19 nt, Artificial Sequence
  Description of Artificial Sequence: Synthetic oligonucleotide
  Antisense strand to SEQ ID NO: 2386306
uucccaaucaauagaaugg

SEQ ID NO: 2386308 - RNA, 19 nt, Artificial Sequence
  Description of Artificial Sequence: Synthetic oligonucleotide
  Sense strand starting at position 1936 of SEQ ID NO: 1886079
aguagacuugagcaucuga

SEQ ID NO: 2386309 - RNA, 19 nt, Artificial Sequence
  Description of Artificial Sequence: Synthetic oligonucleotide
  Antisense strand to SEQ ID NO: 2386308
ucagaugcucaagucuacu

SEQ ID NO: 2386310 - RNA, 19 nt, Artificial Sequence
  Description of Artificial Sequence: Synthetic oligonucleotide
  Sense strand starting at position 2146 of SEQ ID NO: 1886079
aucucuagugcucacugau

SEQ ID NO: 2386311 - RNA, 19 nt, Artificial Sequence
  Description of Artificial Sequence: Synthetic oligonucleotide
  Antisense strand to SEQ ID NO: 2386310
aucagugagcacuagagau

SEQ ID NO: 2386312 - RNA, 19 nt, Artificial Sequence
  Description of Artificial Sequence: Synthetic oligonucleotide
  Sense strand starting at position 2149 of SEQ ID NO: 1886079
ucuagugcucacugauuug

SEQ ID NO: 2386313 - RNA, 19 nt, Artificial Sequence
  Description of Artificial Sequence: Synthetic oligonucleotide
  Antisense strand to SEQ ID NO: 2386312
caaaucagugagcacuaga

SEQ ID NO: 2386314 - RNA, 19 nt, Artificial Sequence
  Description of Artificial Sequence: Synthetic oligonucleotide
  Sense strand starting at position 2214 of SEQ ID NO: 1886079
ggaaauggcuaauuccuga

SEQ ID NO: 2386315 - RNA, 19 nt, Artificial Sequence
  Description of Artificial Sequence: Synthetic oligonucleotide
  Antisense strand to SEQ ID NO: 2386314
ucaggaauuagccauuucc

SEQ ID NO: 2386316 - RNA, 19 nt, Artificial Sequence
  Description of Artificial Sequence: Synthetic oligonucleotide
  Sense strand starting at position 2219 of SEQ ID NO: 1886079
uggcuaauuccugaucuga

SEQ ID NO: 2386317 - RNA, 19 nt, Artificial Sequence
  Description of Artificial Sequence: Synthetic oligonucleotide
  Antisense strand to SEQ ID NO: 2386316
ucagaucaggaauuagcca

SEQ ID NO: 2386318 - RNA, 19 nt, Artificial Sequence
  Description of Artificial Sequence: Synthetic oligonucleotide
  Sense strand starting at position 2221 of SEQ ID NO: 1886079
gcuaauuccugaucugaau

SEQ ID NO: 2386319 - RNA, 19 nt, Artificial Sequence
  Description of Artificial Sequence: Synthetic oligonucleotide
  Antisense strand to SEQ ID NO: 2386318
auucagaucaggaauuagc

SEQ ID NO: 2386320 - RNA, 19 nt, Artificial Sequence
  Description of Artificial Sequence: Synthetic oligonucleotide
  Sense strand starting at position 2227 of SEQ ID NO: 1886079
uccugaucugaaugucuaa

SEQ ID NO: 2386321 - RNA, 19 nt, Artificial Sequence
  Description of Artificial Sequence: Synthetic oligonucleotide
  Antisense strand to SEQ ID NO: 2386320
uuagacauucagaucagga

SEQ ID NO: 2386322 - RNA, 19 nt, Artificial Sequence
  Description of Artificial Sequence: Synthetic oligonucleotide
  Sense strand starting at position 2230 of SEQ ID NO: 1886079
ugaucugaaugucuaaaua

SEQ ID NO: 2386323 - RNA, 19 nt, Artificial Sequence
  Description of Artificial Sequence: Synthetic oligonucleotide
  Antisense strand to SEQ ID NO: 2386322
uauuuagacauucagauca

SEQ ID NO: 2386324 - RNA, 19 nt, Artificial Sequence
  Description of Artificial Sequence: Synthetic oligonucleotide
  Sense strand starting at position 2273 of SEQ ID NO: 1886079
uccagauaugaaugucuca

SEQ ID NO: 2386325 - RNA, 19 nt, Artificial Sequence
  Description of Artificial Sequence: Synthetic oligonucleotide
  Antisense strand to SEQ ID NO: 2386324
ugagacauucauaucugga

SEQ ID NO: 2386326 - RNA, 19 nt, Artificial Sequence
  Description of Artificial Sequence: Synthetic oligonucleotide
  Sense strand starting at position 2540 of SEQ ID NO: 1886079
cagacuugagcuuagaguu

SEQ ID NO: 2386327 - RNA, 19 nt, Artificial Sequence
  Description of Artificial Sequence: Synthetic oligonucleotide
  Antisense strand to SEQ ID NO: 2386326
aacucuaagcucaagucug

SEQ ID NO: 2386328 - RNA, 19 nt, Artificial Sequence
  Description of Artificial Sequence: Synthetic oligonucleotide
  Sense strand starting at position 2559 of SEQ ID NO: 1886079
gcugaaauuuguuccaguu

SEQ ID NO: 2386329 - RNA, 19 nt, Artificial Sequence
  Description of Artificial Sequence: Synthetic oligonucleotide
  Antisense strand to SEQ ID NO: 2386328
aacuggaacaaauuucagc

SEQ ID NO: 2386330 - RNA, 19 nt, Artificial Sequence
  Description of Artificial Sequence: Synthetic oligonucleotide
  Sense strand starting at position 2640 of SEQ ID NO: 1886079
ucauauuccuagguuggga

SEQ ID NO: 2386331 - RNA, 19 nt, Artificial Sequence
  Description of Artificial Sequence: Synthetic oligonucleotide
  Antisense strand to SEQ ID NO: 2386330
ucccaaccuaggaauauga

SEQ ID NO: 2386332 - RNA, 19 nt, Artificial Sequence
  Description of Artificial Sequence: Synthetic oligonucleotide
  Sense strand starting at position 2797 of SEQ ID NO: 1886079
gagcuugacuucucugaca

SEQ ID NO: 2386333 - RNA, 19 nt, Artificial Sequence
  Description of Artificial Sequence: Synthetic oligonucleotide
  Antisense strand to SEQ ID NO: 2386332
ugucagagaagucaagcuc

SEQ ID NO: 2386334 - RNA, 19 nt, Artificial Sequence
  Description of Artificial Sequence: Synthetic oligonucleotide
  Sense strand starting at position 2950 of SEQ ID NO: 1886079
uuggcauucuuucuugaag

SEQ ID NO: 2386335 - RNA, 19 nt, Artificial Sequence
  Description of Artificial Sequence: Synthetic oligonucleotide
  Antisense strand to SEQ ID NO: 2386334
cuucaagaaagaaugccaa

SEQ ID NO: 2386336 - RNA, 19 nt, Artificial Sequence
  Description of Artificial Sequence: Synthetic oligonucleotide
  Sense strand starting at position 2953 of SEQ ID NO: 1886079
gcauucuuucuugaaggau

SEQ ID NO: 2386337 - RNA, 19 nt, Artificial Sequence
  Description of Artificial Sequence: Synthetic oligonucleotide
  Antisense strand to SEQ ID NO: 2386336
auccuucaagaaagaaugc

SEQ ID NO: 2386338 - RNA, 19 nt, Artificial Sequence
  Description of Artificial Sequence: Synthetic oligonucleotide
  Sense strand starting at position 2986 of SEQ ID NO: 1886079
uuuaccucagggugaaaua

SEQ ID NO: 2386339 - RNA, 19 nt, Artificial Sequence
  Description of Artificial Sequence: Synthetic oligonucleotide
  Antisense strand to SEQ ID NO: 2386338
uauuucacccugagguaaa

SEQ ID NO: 2386340 - RNA, 19 nt, Artificial Sequence
  Description of Artificial Sequence: Synthetic oligonucleotide
  Sense strand starting at position 3069 of SEQ ID NO: 1886079
gucaaaugucagcauucuu

SEQ ID NO: 2386341 - RNA, 19 nt, Artificial Sequence
  Description of Artificial Sequence: Synthetic oligonucleotide
  Antisense strand to SEQ ID NO: 2386340
aagaaugcugacauuugac

SEQ ID NO: 2386342 - RNA, 19 nt, Artificial Sequence
  Description of Artificial Sequence: Synthetic oligonucleotide
  Sense strand starting at position 3077 of SEQ ID NO: 1886079
ucagcauucuuguuaagaa

SEQ ID NO: 2386343 - RNA, 19 nt, Artificial Sequence
  Description of Artificial Sequence: Synthetic oligonucleotide
  Antisense strand to SEQ ID NO: 2386342
uucuuaacaagaaugcuga

SEQ ID NO: 2386344 - RNA, 19 nt, Artificial Sequence
  Description of Artificial Sequence: Synthetic oligonucleotide
  Sense strand starting at position 3119 of SEQ ID NO: 1886079
guugcuauggcugcauauu

SEQ ID NO: 2386345 - RNA, 19 nt, Artificial Sequence
  Description of Artificial Sequence: Synthetic oligonucleotide
  Antisense strand to SEQ ID NO: 2386344
aauaugcagccauagcaac

SEQ ID NO: 2386346 - RNA, 19 nt, Artificial Sequence
  Description of Artificial Sequence: Synthetic oligonucleotide
  Sense strand starting at position 3120 of SEQ ID NO: 1886079
uugcuauggcugcauauuu

SEQ ID NO: 2386347 - RNA, 19 nt, Artificial Sequence
  Description of Artificial Sequence: Synthetic oligonucleotide
  Antisense strand to SEQ ID NO: 2386346
aaauaugcagccauagcaa

SEQ ID NO: 2386348 - RNA, 19 nt, Artificial Sequence
  Description of Artificial Sequence: Synthetic oligonucleotide
  Sense strand starting at position 3128 of SEQ ID NO: 1886079
gcugcauauuuaguuacau

SEQ ID NO: 2386349 - RNA, 19 nt, Artificial Sequence
  Description of Artificial Sequence: Synthetic oligonucleotide
  Antisense strand to SEQ ID NO: 2386348
auguaacuaaauaugcagc

SEQ ID NO: 2386350 - RNA, 19 nt, Artificial Sequence
  Description of Artificial Sequence: Synthetic oligonucleotide
  Sense strand starting at position 3223 of SEQ ID NO: 1886079
acauaaggucaguaacuuu

SEQ ID NO: 2386351 - RNA, 19 nt, Artificial Sequence
  Description of Artificial Sequence: Synthetic oligonucleotide
  Antisense strand to SEQ ID NO: 2386350
aaaguuacugaccuuaugu

SEQ ID NO: 2386352 - RNA, 19 nt, Artificial Sequence
  Description of Artificial Sequence: Synthetic oligonucleotide
  Sense strand starting at position 3237 of SEQ ID NO: 1886079
acuuuaauuggaugugacu

SEQ ID NO: 2386353 - RNA, 19 nt, Artificial Sequence
  Description of Artificial Sequence: Synthetic oligonucleotide
  Antisense strand to SEQ ID NO: 2386352
agucacauccaauuaaagu

SEQ ID NO: 2386354 - RNA, 19 nt, Artificial Sequence
  Description of Artificial Sequence: Synthetic oligonucleotide
  Sense strand starting at position 3262 of SEQ ID NO: 1886079
cauauuugauuggaaggua

SEQ ID NO: 2386355 - RNA, 19 nt, Artificial Sequence
  Description of Artificial Sequence: Synthetic oligonucleotide
  Antisense strand to SEQ ID NO: 2386354
uaccuuccaaucaaauaug

SEQ ID NO: 2386356 - RNA, 19 nt, Artificial Sequence
  Description of Artificial Sequence: Synthetic oligonucleotide
  Sense strand starting at position 3372 of SEQ ID NO: 1886079
guaauaauagucgaccauu

SEQ ID NO: 2386357 - RNA, 19 nt, Artificial Sequence
  Description of Artificial Sequence: Synthetic oligonucleotide
  Antisense strand to SEQ ID NO: 2386356
aauggucgacuauuauuac

SEQ ID NO: 2386358 - RNA, 19 nt, Artificial Sequence
  Description of Artificial Sequence: Synthetic oligonucleotide
  Sense strand starting at position 3409 of SEQ ID NO: 1886079
guguguggugucaggauua

SEQ ID NO: 2386359 - RNA, 19 nt, Artificial Sequence
  Description of Artificial Sequence: Synthetic oligonucleotide
  Antisense strand to SEQ ID NO: 2386358
uaauccugacaccacacac

SEQ ID NO: 2386360 - RNA, 19 nt, Artificial Sequence
  Description of Artificial Sequence: Synthetic oligonucleotide
  Sense strand starting at position 3414 of SEQ ID NO: 1886079
uggugucaggauuauuaua

SEQ ID NO: 2386361 - RNA, 19 nt, Artificial Sequence
  Description of Artificial Sequence: Synthetic oligonucleotide
  Antisense strand to SEQ ID NO: 2386360
uauaauaauccugacacca

SEQ ID NO: 2386362 - RNA, 19 nt, Artificial Sequence
  Description of Artificial Sequence: Synthetic oligonucleotide
  Sense strand starting at position 3646 of SEQ ID NO: 1886079
ugaggcuuaaacugaaguu

SEQ ID NO: 2386363 - RNA, 19 nt, Artificial Sequence
  Description of Artificial Sequence: Synthetic oligonucleotide
  Antisense strand to SEQ ID NO: 2386362
aacuucaguuuaagccuca

SEQ ID NO: 2386364 - RNA, 19 nt, Artificial Sequence
  Description of Artificial Sequence: Synthetic oligonucleotide
  Sense strand starting at position 3683 of SEQ ID NO: 1886079
uggcauuuguuguuguauu

SEQ ID NO: 2386365 - RNA, 19 nt, Artificial Sequence
  Description of Artificial Sequence: Synthetic oligonucleotide
  Antisense strand to SEQ ID NO: 2386364
aauacaacaacaaaugcca

SEQ ID NO: 2386366 - RNA, 19 nt, Artificial Sequence
  Description of Artificial Sequence: Synthetic oligonucleotide
  Sense strand starting at position 3737 of SEQ ID NO: 1886079
augaaauuguauucuggga

SEQ ID NO: 2386367 - RNA, 19 nt, Artificial Sequence
  Description of Artificial Sequence: Synthetic oligonucleotide
  Antisense strand to SEQ ID NO: 2386366
ucccagaauacaauuucau

SEQ ID NO: 2386368 - RNA, 19 nt, Artificial Sequence
  Description of Artificial Sequence: Synthetic oligonucleotide
  Sense strand starting at position 3741 of SEQ ID NO: 1886079
aauuguauucugggaauau

SEQ ID NO: 2386369 - RNA, 19 nt, Artificial Sequence
  Description of Artificial Sequence: Synthetic oligonucleotide
  Antisense strand to SEQ ID NO: 2386368
auauucccagaauacaauu

SEQ ID NO: 2386370 - RNA, 19 nt, Artificial Sequence
  Description of Artificial Sequence: Synthetic oligonucleotide
  Sense strand starting at position 3787 of SEQ ID NO: 1886079
uuaaauugaggcuggacau

SEQ ID NO: 2386371 - RNA, 19 nt, Artificial Sequence
  Description of Artificial Sequence: Synthetic oligonucleotide
  Antisense strand to SEQ ID NO: 2386370
auguccagccucaauuuaa

SEQ ID NO: 2386372 - RNA, 19 nt, Artificial Sequence
  Description of Artificial Sequence: Synthetic oligonucleotide
  Sense strand starting at position 3968 of SEQ ID NO: 1886079
agcauaagauuugaagauu

SEQ ID NO: 2386373 - RNA, 19 nt, Artificial Sequence
  Description of Artificial Sequence: Synthetic oligonucleotide
  Antisense strand to SEQ ID NO: 2386372
aaucuucaaaucuuaugcu

SEQ ID NO: 2386374 - RNA, 19 nt, Artificial Sequence
  Description of Artificial Sequence: Synthetic oligonucleotide
  Sense strand starting at position 3982 of SEQ ID NO: 1886079
agauuaaaggcuuagguuu

SEQ ID NO: 2386375 - RNA, 19 nt, Artificial Sequence
  Description of Artificial Sequence: Synthetic oligonucleotide
  Antisense strand to SEQ ID NO: 2386374
aaaccuaagccuuuaaucu

SEQ ID NO: 2386376 - RNA, 19 nt, Artificial Sequence
  Description of Artificial Sequence: Synthetic oligonucleotide
  Sense strand starting at position 725 of SEQ ID NO: 1886080
agcuauauacugcaugaaa

SEQ ID NO: 2386377 - RNA, 19 nt, Artificial Sequence
  Description of Artificial Sequence: Synthetic oligonucleotide
  Antisense strand to SEQ ID NO: 2386376
uuucaugcaguauauagcu

SEQ ID NO: 2386378 - RNA, 19 nt, Artificial Sequence
  Description of Artificial Sequence: Synthetic oligonucleotide
  Sense strand starting at position 817 of SEQ ID NO: 1886080
guugcuaaggguuaaagga

SEQ ID NO: 2386379 - RNA, 19 nt, Artificial Sequence
  Description of Artificial Sequence: Synthetic oligonucleotide
  Antisense strand to SEQ ID NO: 2386378
uccuuuaacccuuagcaac

SEQ ID NO: 2386380 - RNA, 19 nt, Artificial Sequence
  Description of Artificial Sequence: Synthetic oligonucleotide
  Sense strand starting at position 899 of SEQ ID NO: 1886080
uacuauaacgguugacaaa

SEQ ID NO: 2386381 - RNA, 19 nt, Artificial Sequence
  Description of Artificial Sequence: Synthetic oligonucleotide
  Antisense strand to SEQ ID NO: 2386380
uuugucaaccguuauagua

SEQ ID NO: 2386382 - RNA, 19 nt, Artificial Sequence
  Description of Artificial Sequence: Synthetic oligonucleotide
  Sense strand starting at position 1047 of SEQ ID NO: 1886080
auuauaagacauugacggu

SEQ ID NO: 2386383 - RNA, 19 nt, Artificial Sequence
  Description of Artificial Sequence: Synthetic oligonucleotide
  Antisense strand to SEQ ID NO: 2386382
accgucaaugucuuauaau

SEQ ID NO: 2386384 - RNA, 19 nt, Artificial Sequence
  Description of Artificial Sequence: Synthetic oligonucleotide
  Sense strand starting at position 1271 of SEQ ID NO: 1886080
cuaauuguccaauaacguu

SEQ ID NO: 2386385 - RNA, 19 nt, Artificial Sequence
  Description of Artificial Sequence: Synthetic oligonucleotide
  Antisense strand to SEQ ID NO: 2386384
aacguuauuggacaauuag

SEQ ID NO: 2386386 - RNA, 19 nt, Artificial Sequence
  Description of Artificial Sequence: Synthetic oligonucleotide
  Sense strand starting at position 1277 of SEQ ID NO: 1886080
guccaauaacguugaaaca

SEQ ID NO: 2386387 - RNA, 19 nt, Artificial Sequence
  Description of Artificial Sequence: Synthetic oligonucleotide
  Antisense strand to SEQ ID NO: 2386386
uguuucaacguuauuggac

SEQ ID NO: 2386388 - RNA, 19 nt, Artificial Sequence
  Description of Artificial Sequence: Synthetic oligonucleotide
  Sense strand starting at position 1340 of SEQ ID NO: 1886080
ggcgacacccaguagaaua

SEQ ID NO: 2386389 - RNA, 19 nt, Artificial Sequence
  Description of Artificial Sequence: Synthetic oligonucleotide
  Antisense strand to SEQ ID NO: 2386388
uauucuacugggugucgcc

SEQ ID NO: 2386390 - RNA, 19 nt, Artificial Sequence
  Description of Artificial Sequence: Synthetic oligonucleotide
  Sense strand starting at position 1354 of SEQ ID NO: 1886080
gaauaagcuugacuggcua

SEQ ID NO: 2386391 - RNA, 19 nt, Artificial Sequence
  Description of Artificial Sequence: Synthetic oligonucleotide
  Antisense strand to SEQ ID NO: 2386390
uagccagucaagcuuauuc

SEQ ID NO: 2386392 - RNA, 19 nt, Artificial Sequence
  Description of Artificial Sequence: Synthetic oligonucleotide
  Sense strand starting at position 1423 of SEQ ID NO: 1886080
acauuauugguagggauug

SEQ ID NO: 2386393 - RNA, 19 nt, Artificial Sequence
  Description of Artificial Sequence: Synthetic oligonucleotide
  Antisense strand to SEQ ID NO: 2386392
caaucccuaccaauaaugu

SEQ ID NO: 2386394 - RNA, 19 nt, Artificial Sequence
  Description of Artificial Sequence: Synthetic oligonucleotide
  Sense strand starting at position 1578 of SEQ ID NO: 1886080
ccaagaaaguuggcacuau

SEQ ID NO: 2386395 - RNA, 19 nt, Artificial Sequence
  Description of Artificial Sequence: Synthetic oligonucleotide
  Antisense strand to SEQ ID NO: 2386394
auagugccaacuuucuugg

SEQ ID NO: 2386396 - RNA, 19 nt, Artificial Sequence
  Description of Artificial Sequence: Synthetic oligonucleotide
  Sense strand starting at position 1582 of SEQ ID NO: 1886080
gaaaguuggcacuauuaau

SEQ ID NO: 2386397 - RNA, 19 nt, Artificial Sequence
  Description of Artificial Sequence: Synthetic oligonucleotide
  Antisense strand to SEQ ID NO: 2386396
auuaauagugccaacuuuc

SEQ ID NO: 2386398 - RNA, 19 nt, Artificial Sequence
  Description of Artificial Sequence: Synthetic oligonucleotide
  Sense strand starting at position 1705 of SEQ ID NO: 1886080
uagucauaguaacugagaa

SEQ ID NO: 2386399 - RNA, 19 nt, Artificial Sequence
  Description of Artificial Sequence: Synthetic oligonucleotide
  Antisense strand to SEQ ID NO: 2386398
uucucaguuacuaugacua

SEQ ID NO: 2386400 - RNA, 19 nt, Artificial Sequence
  Description of Artificial Sequence: Synthetic oligonucleotide
  Sense strand starting at position 1744 of SEQ ID NO: 1886080
uauagaaauggugguuuaa

SEQ ID NO: 2386401 - RNA, 19 nt, Artificial Sequence
  Description of Artificial Sequence: Synthetic oligonucleotide
  Antisense strand to SEQ ID NO: 2386400
uuaaaccaccauuucuaua

SEQ ID NO: 2386402 - RNA, 19 nt, Artificial Sequence
  Description of Artificial Sequence: Synthetic oligonucleotide
  Sense strand starting at position 1746 of SEQ ID NO: 1886080
uagaaauggugguuuaaug

SEQ ID NO: 2386403 - RNA, 19 nt, Artificial Sequence
  Description of Artificial Sequence: Synthetic oligonucleotide
  Antisense strand to SEQ ID NO: 2386402
cauuaaaccaccauuucua

SEQ ID NO: 2386404 - RNA, 19 nt, Artificial Sequence
  Description of Artificial Sequence: Synthetic oligonucleotide
  Sense strand starting at position 1755 of SEQ ID NO: 1886080
ugguuuaaugaacaauguu

SEQ ID NO: 2386405 - RNA, 19 nt, Artificial Sequence
  Description of Artificial Sequence: Synthetic oligonucleotide
  Antisense strand to SEQ ID NO: 2386404
aacauuguucauuaaacca

SEQ ID NO: 2386406 - RNA, 19 nt, Artificial Sequence
  Description of Artificial Sequence: Synthetic oligonucleotide
  Sense strand starting at position 1889 of SEQ ID NO: 1886080
agugucagugaauaugaca

SEQ ID NO: 2386407 - RNA, 19 nt, Artificial Sequence
  Description of Artificial Sequence: Synthetic oligonucleotide
  Antisense strand to SEQ ID NO: 2386406
ugucauauucacugacacu

SEQ ID NO: 2386408 - RNA, 19 nt, Artificial Sequence
  Description of Artificial Sequence: Synthetic oligonucleotide
  Sense strand starting at position 1918 of SEQ ID NO: 1886080
guaauacuguuaucugaaa

SEQ ID NO: 2386409 - RNA, 19 nt, Artificial Sequence
  Description of Artificial Sequence: Synthetic oligonucleotide
  Antisense strand to SEQ ID NO: 2386408
uuucagauaacaguauuac

SEQ ID NO: 2386410 - RNA, 19 nt, Artificial Sequence
  Description of Artificial Sequence: Synthetic oligonucleotide
  Sense strand starting at position 1941 of SEQ ID NO: 1886080
guuaucuucgcagccuauu

SEQ ID NO: 2386411 - RNA, 19 nt, Artificial Sequence
  Description of Artificial Sequence: Synthetic oligonucleotide
  Antisense strand to SEQ ID NO: 2386410
aauaggcugcgaagauaac

SEQ ID NO: 2386412 - RNA, 19 nt, Artificial Sequence
  Description of Artificial Sequence: Synthetic oligonucleotide
  Sense strand starting at position 2041 of SEQ ID NO: 1886080
ucggguagagcugaacaua

SEQ ID NO: 2386413 - RNA, 19 nt, Artificial Sequence
  Description of Artificial Sequence: Synthetic oligonucleotide
  Antisense strand to SEQ ID NO: 2386412
uauguucagcucuacccga

SEQ ID NO: 2386414 - RNA, 19 nt, Artificial Sequence
  Description of Artificial Sequence: Synthetic oligonucleotide
  Sense strand starting at position 2176 of SEQ ID NO: 1886080
uggauaguguaacuuaauu

SEQ ID NO: 2386415 - RNA, 19 nt, Artificial Sequence
  Description of Artificial Sequence: Synthetic oligonucleotide
  Antisense strand to SEQ ID NO: 2386414
aauuaaguuacacuaucca

SEQ ID NO: 2386416 - RNA, 19 nt, Artificial Sequence
  Description of Artificial Sequence: Synthetic oligonucleotide
  Sense strand starting at position 2283 of SEQ ID NO: 1886080
gucauucuucuggagaacu

SEQ ID NO: 2386417 - RNA, 19 nt, Artificial Sequence
  Description of Artificial Sequence: Synthetic oligonucleotide
  Antisense strand to SEQ ID NO: 2386416
aguucuccagaagaaugac

SEQ ID NO: 2386418 - RNA, 19 nt, Artificial Sequence
  Description of Artificial Sequence: Synthetic oligonucleotide
  Sense strand starting at position 2653 of SEQ ID NO: 1886080
guaucuugacaguguauuu

SEQ ID NO: 2386419 - RNA, 19 nt, Artificial Sequence
  Description of Artificial Sequence: Synthetic oligonucleotide
  Antisense strand to SEQ ID NO: 2386418
aaauacacugucaagauac

SEQ ID NO: 2386420 - RNA, 19 nt, Artificial Sequence
  Description of Artificial Sequence: Synthetic oligonucleotide
  Sense strand starting at position 2827 of SEQ ID NO: 1886080
gcuuauguacaguaacuua

SEQ ID NO: 2386421 - RNA, 19 nt, Artificial Sequence
  Description of Artificial Sequence: Synthetic oligonucleotide
  Antisense strand to SEQ ID NO: 2386420
uaaguuacuguacauaagc

SEQ ID NO: 2386422 - RNA, 19 nt, Artificial Sequence
  Description of Artificial Sequence: Synthetic oligonucleotide
  Sense strand starting at position 2849 of SEQ ID NO: 1886080
gugauccugcuagaugauu

SEQ ID NO: 2386423 - RNA, 19 nt, Artificial Sequence
  Description of Artificial Sequence: Synthetic oligonucleotide
  Antisense strand to SEQ ID NO: 2386422
aaucaucuagcaggaucac

SEQ ID NO: 2386424 - RNA, 19 nt, Artificial Sequence
  Description of Artificial Sequence: Synthetic oligonucleotide
  Sense strand starting at position 2889 of SEQ ID NO: 1886080
ccucccauuguuuaaugua

SEQ ID NO: 2386425 - RNA, 19 nt, Artificial Sequence
  Description of Artificial Sequence: Synthetic oligonucleotide
  Antisense strand to SEQ ID NO: 2386424
uacauuaaacaaugggagg

SEQ ID NO: 2386426 - RNA, 19 nt, Artificial Sequence
  Description of Artificial Sequence: Synthetic oligonucleotide
  Sense strand starting at position 3003 of SEQ ID NO: 1886080
cuuaguuauugacugagga

SEQ ID NO: 2386427 - RNA, 19 nt, Artificial Sequence
  Description of Artificial Sequence: Synthetic oligonucleotide
  Antisense strand to SEQ ID NO: 2386426
uccucagucaauaacuaag

SEQ ID NO: 2386428 - RNA, 19 nt, Artificial Sequence
  Description of Artificial Sequence: Synthetic oligonucleotide
  Sense strand starting at position 3004 of SEQ ID NO: 1886080
uuaguuauugacugaggag

SEQ ID NO: 2386429 - RNA, 19 nt, Artificial Sequence
  Description of Artificial Sequence: Synthetic oligonucleotide
  Antisense strand to SEQ ID NO: 2386428
cuccucagucaauaacuaa

SEQ ID NO: 2386430 - RNA, 19 nt, Artificial Sequence
  Description of Artificial Sequence: Synthetic oligonucleotide
  Sense strand starting at position 3125 of SEQ ID NO: 1886080
uugaaaucacugugaaucu

SEQ ID NO: 2386431 - RNA, 19 nt, Artificial Sequence
  Description of Artificial Sequence: Synthetic oligonucleotide
  Antisense strand to SEQ ID NO: 2386430
agauucacagugauuucaa

SEQ ID NO: 2386432 - RNA, 19 nt, Artificial Sequence
  Description of Artificial Sequence: Synthetic oligonucleotide
  Sense strand starting at position 3206 of SEQ ID NO: 1886080
aaugcaucagcugaaugua

SEQ ID NO: 2386433 - RNA, 19 nt, Artificial Sequence
  Description of Artificial Sequence: Synthetic oligonucleotide
  Antisense strand to SEQ ID NO: 2386432
uacauucagcugaugcauu

SEQ ID NO: 2386434 - RNA, 19 nt, Artificial Sequence
  Description of Artificial Sequence: Synthetic oligonucleotide
  Sense strand starting at position 3220 of SEQ ID NO: 1886080
auguaugacuacuucugau

SEQ ID NO: 2386435 - RNA, 19 nt, Artificial Sequence
  Description of Artificial Sequence: Synthetic oligonucleotide
  Antisense strand to SEQ ID NO: 2386434
aucagaaguagucauacau

SEQ ID NO: 2386436 - RNA, 19 nt, Artificial Sequence
  Description of Artificial Sequence: Synthetic oligonucleotide
  Sense strand starting at position 3345 of SEQ ID NO: 1886080
uuaucuccauugguauaca

SEQ ID NO: 2386437 - RNA, 19 nt, Artificial Sequence
  Description of Artificial Sequence: Synthetic oligonucleotide
  Antisense strand to SEQ ID NO: 2386436
uguauaccaauggagauaa

SEQ ID NO: 2386438 - RNA, 19 nt, Artificial Sequence
  Description of Artificial Sequence: Synthetic oligonucleotide
  Sense strand starting at position 3551 of SEQ ID NO: 1886080
ucacguauuugcuugguau

SEQ ID NO: 2386439 - RNA, 19 nt, Artificial Sequence
  Description of Artificial Sequence: Synthetic oligonucleotide
  Antisense strand to SEQ ID NO: 2386438
auaccaagcaaauacguga

SEQ ID NO: 2386440 - RNA, 19 nt, Artificial Sequence
  Description of Artificial Sequence: Synthetic oligonucleotide
  Sense strand starting at position 3552 of SEQ ID NO: 1886080
cacguauuugcuugguaua

SEQ ID NO: 2386441 - RNA, 19 nt, Artificial Sequence
  Description of Artificial Sequence: Synthetic oligonucleotide
  Antisense strand to SEQ ID NO: 2386440
uauaccaagcaaauacgug

SEQ ID NO: 2386442 - RNA, 19 nt, Artificial Sequence
  Description of Artificial Sequence: Synthetic oligonucleotide
  Sense strand starting at position 3553 of SEQ ID NO: 1886080
acguauuugcuugguauag

SEQ ID NO: 2386443 - RNA, 19 nt, Artificial Sequence
  Description of Artificial Sequence: Synthetic oligonucleotide
  Antisense strand to SEQ ID NO: 2386442
cuauaccaagcaaauacgu

SEQ ID NO: 2386444 - RNA, 19 nt, Artificial Sequence
  Description of Artificial Sequence: Synthetic oligonucleotide
  Sense strand starting at position 3565 of SEQ ID NO: 1886080
gguauaggcuaagcauuaa

SEQ ID NO: 2386445 - RNA, 19 nt, Artificial Sequence
  Description of Artificial Sequence: Synthetic oligonucleotide
  Antisense strand to SEQ ID NO: 2386444
uuaaugcuuagccuauacc

SEQ ID NO: 2386446 - RNA, 19 nt, Artificial Sequence
  Description of Artificial Sequence: Synthetic oligonucleotide
  Sense strand starting at position 3584 of SEQ ID NO: 1886080
acauuagugcuuuaucuuc

SEQ ID NO: 2386447 - RNA, 19 nt, Artificial Sequence
  Description of Artificial Sequence: Synthetic oligonucleotide
  Antisense strand to SEQ ID NO: 2386446
gaagauaaagcacuaaugu

SEQ ID NO: 2386448 - RNA, 19 nt, Artificial Sequence
  Description of Artificial Sequence: Synthetic oligonucleotide
  Sense strand starting at position 3673 of SEQ ID NO: 1886080
agcaguacuggugaugauu

SEQ ID NO: 2386449 - RNA, 19 nt, Artificial Sequence
  Description of Artificial Sequence: Synthetic oligonucleotide
  Antisense strand to SEQ ID NO: 2386448
aaucaucaccaguacugcu

SEQ ID NO: 2386450 - RNA, 19 nt, Artificial Sequence
  Description of Artificial Sequence: Synthetic oligonucleotide
  Sense strand starting at position 3798 of SEQ ID NO: 1886080
gcaccauauggauacaugu

SEQ ID NO: 2386451 - RNA, 19 nt, Artificial Sequence
  Description of Artificial Sequence: Synthetic oligonucleotide
  Antisense strand to SEQ ID NO: 2386450
acauguauccauauggugc

SEQ ID NO: 2386452 - RNA, 19 nt, Artificial Sequence
  Description of Artificial Sequence: Synthetic oligonucleotide
  Sense strand starting at position 3867 of SEQ ID NO: 1886080
cuaagauuauguguaaagu

SEQ ID NO: 2386453 - RNA, 19 nt, Artificial Sequence
  Description of Artificial Sequence: Synthetic oligonucleotide
  Antisense strand to SEQ ID NO: 2386452
acuuuacacauaaucuuag

SEQ ID NO: 2386454 - RNA, 19 nt, Artificial Sequence
  Description of Artificial Sequence: Synthetic oligonucleotide
  Sense strand starting at position 3977 of SEQ ID NO: 1886080
acuuuagugccuugggaag

SEQ ID NO: 2386455 - RNA, 19 nt, Artificial Sequence
  Description of Artificial Sequence: Synthetic oligonucleotide
  Antisense strand to SEQ ID NO: 2386454
cuucccaaggcacuaaagu

SEQ ID NO: 2386456 - RNA, 19 nt, Artificial Sequence
  Description of Artificial Sequence: Synthetic oligonucleotide
  Sense strand starting at position 156 of SEQ ID NO: 1886081
gugguuauggaaugaccau

SEQ ID NO: 2386457 - RNA, 19 nt, Artificial Sequence
  Description of Artificial Sequence: Synthetic oligonucleotide
  Antisense strand to SEQ ID NO: 2386456
auggucauuccauaaccac

SEQ ID NO: 2386458 - RNA, 19 nt, Artificial Sequence
  Description of Artificial Sequence: Synthetic oligonucleotide
  Sense strand starting at position 207 of SEQ ID NO: 1886081
cuaggucucugggcuaaca

SEQ ID NO: 2386459 - RNA, 19 nt, Artificial Sequence
  Description of Artificial Sequence: Synthetic oligonucleotide
  Antisense strand to SEQ ID NO: 2386458
uguuagcccagagaccuag

SEQ ID NO: 2386460 - RNA, 19 nt, Artificial Sequence
  Description of Artificial Sequence: Synthetic oligonucleotide
  Sense strand starting at position 303 of SEQ ID NO: 1886081
agacgauauucuucucauc

SEQ ID NO: 2386461 - RNA, 19 nt, Artificial Sequence
  Description of Artificial Sequence: Synthetic oligonucleotide
  Antisense strand to SEQ ID NO: 2386460
gaugagaagaauaucgucu

SEQ ID NO: 2386462 - RNA, 19 nt, Artificial Sequence
  Description of Artificial Sequence: Synthetic oligonucleotide
  Sense strand starting at position 500 of SEQ ID NO: 1886081
ggaggauucccucaggcca

SEQ ID NO: 2386463 - RNA, 19 nt, Artificial Sequence
  Description of Artificial Sequence: Synthetic oligonucleotide
  Antisense strand to SEQ ID NO: 2386462
uggccugagggaauccucc

SEQ ID NO: 2386464 - RNA, 19 nt, Artificial Sequence
  Description of Artificial Sequence: Synthetic oligonucleotide
  Sense strand starting at position 773 of SEQ ID NO: 1886081
ggaggacuugaaugcuaug

SEQ ID NO: 2386465 - RNA, 19 nt, Artificial Sequence
  Description of Artificial Sequence: Synthetic oligonucleotide
  Antisense strand to SEQ ID NO: 2386464
cauagcauucaaguccucc

SEQ ID NO: 2386466 - RNA, 19 nt, Artificial Sequence
  Description of Artificial Sequence: Synthetic oligonucleotide
  Sense strand starting at position 778 of SEQ ID NO: 1886081
acuugaaugcuaugagaag

SEQ ID NO: 2386467 - RNA, 19 nt, Artificial Sequence
  Description of Artificial Sequence: Synthetic oligonucleotide
  Antisense strand to SEQ ID NO: 2386466
cuucucauagcauucaagu

SEQ ID NO: 2386468 - RNA, 19 nt, Artificial Sequence
  Description of Artificial Sequence: Synthetic oligonucleotide
  Sense strand starting at position 823 of SEQ ID NO: 1886081
ccaauuugcuaugaugaaa

SEQ ID NO: 2386469 - RNA, 19 nt, Artificial Sequence
  Description of Artificial Sequence: Synthetic oligonucleotide
  Antisense strand to SEQ ID NO: 2386468
uuucaucauagcaaauugg

SEQ ID NO: 2386470 - RNA, 19 nt, Artificial Sequence
  Description of Artificial Sequence: Synthetic oligonucleotide
  Sense strand starting at position 1102 of SEQ ID NO: 1886081
guuuaaagaagugagcuua

SEQ ID NO: 2386471 - RNA, 19 nt, Artificial Sequence
  Description of Artificial Sequence: Synthetic oligonucleotide
  Antisense strand to SEQ ID NO: 2386470
uaagcucacuucuuuaaac

SEQ ID NO: 2386472 - RNA, 19 nt, Artificial Sequence
  Description of Artificial Sequence: Synthetic oligonucleotide
  Sense strand starting at position 1127 of SEQ ID NO: 1886081
ccucaugugauguauguua

SEQ ID NO: 2386473 - RNA, 19 nt, Artificial Sequence
  Description of Artificial Sequence: Synthetic oligonucleotide
  Antisense strand to SEQ ID NO: 2386472
uaacauacaucacaugagg

SEQ ID NO: 2386474 - RNA, 19 nt, Artificial Sequence
  Description of Artificial Sequence: Synthetic oligonucleotide
  Sense strand starting at position 1164 of SEQ ID NO: 1886081
ggcauuaggcaaugaggua

SEQ ID NO: 2386475 - RNA, 19 nt, Artificial Sequence
  Description of Artificial Sequence: Synthetic oligonucleotide
  Antisense strand to SEQ ID NO: 2386474
uaccucauugccuaaugcc

SEQ ID NO: 2386476 - RNA, 19 nt, Artificial Sequence
  Description of Artificial Sequence: Synthetic oligonucleotide
  Sense strand starting at position 1165 of SEQ ID NO: 1886081
gcauuaggcaaugagguau

SEQ ID NO: 2386477 - RNA, 19 nt, Artificial Sequence
  Description of Artificial Sequence: Synthetic oligonucleotide
  Antisense strand to SEQ ID NO: 2386476
auaccucauugccuaaugc

SEQ ID NO: 2386478 - RNA, 19 nt, Artificial Sequence
  Description of Artificial Sequence: Synthetic oligonucleotide
  Sense strand starting at position 1169 of SEQ ID NO: 1886081
uaggcaaugagguauguca

SEQ ID NO: 2386479 - RNA, 19 nt, Artificial Sequence
  Description of Artificial Sequence: Synthetic oligonucleotide
  Antisense strand to SEQ ID NO: 2386478
ugacauaccucauugccua

SEQ ID NO: 2386480 - RNA, 19 nt, Artificial Sequence
  Description of Artificial Sequence: Synthetic oligonucleotide
  Sense strand starting at position 1177 of SEQ ID NO: 1886081
gagguaugucaacgaacaa

SEQ ID NO: 2386481 - RNA, 19 nt, Artificial Sequence
  Description of Artificial Sequence: Synthetic oligonucleotide
  Antisense strand to SEQ ID NO: 2386480
uuguucguugacauaccuc

SEQ ID NO: 2386482 - RNA, 19 nt, Artificial Sequence
  Description of Artificial Sequence: Synthetic oligonucleotide
  Sense strand starting at position 1178 of SEQ ID NO: 1886081
agguaugucaacgaacaau

SEQ ID NO: 2386483 - RNA, 19 nt, Artificial Sequence
  Description of Artificial Sequence: Synthetic oligonucleotide
  Antisense strand to SEQ ID NO: 2386482
auuguucguugacauaccu

SEQ ID NO: 2386484 - RNA, 19 nt, Artificial Sequence
  Description of Artificial Sequence: Synthetic oligonucleotide
  Sense strand starting at position 1197 of SEQ ID NO: 1886081
uaugacucaccguggaaau

SEQ ID NO: 2386485 - RNA, 19 nt, Artificial Sequence
  Description of Artificial Sequence: Synthetic oligonucleotide
  Antisense strand to SEQ ID NO: 2386484
auuuccacggugagucaua

SEQ ID NO: 2386486 - RNA, 19 nt, Artificial Sequence
  Description of Artificial Sequence: Synthetic oligonucleotide
  Sense strand starting at position 1198 of SEQ ID NO: 1886081
augacucaccguggaaaua

SEQ ID NO: 2386487 - RNA, 19 nt, Artificial Sequence
  Description of Artificial Sequence: Synthetic oligonucleotide
  Antisense strand to SEQ ID NO: 2386486
uauuuccacggugagucau

SEQ ID NO: 2386488 - RNA, 19 nt, Artificial Sequence
  Description of Artificial Sequence: Synthetic oligonucleotide
  Sense strand starting at position 1298 of SEQ ID NO: 1886081
cauagucuaggaugugaca

SEQ ID NO: 2386489 - RNA, 19 nt, Artificial Sequence
  Description of Artificial Sequence: Synthetic oligonucleotide
  Antisense strand to SEQ ID NO: 2386488
ugucacauccuagacuaug

SEQ ID NO: 2386490 - RNA, 19 nt, Artificial Sequence
  Description of Artificial Sequence: Synthetic oligonucleotide
  Sense strand starting at position 1333 of SEQ ID NO: 1886081
gauagagcccuugauugcu

SEQ ID NO: 2386491 - RNA, 19 nt, Artificial Sequence
  Description of Artificial Sequence: Synthetic oligonucleotide
  Antisense strand to SEQ ID NO: 2386490
agcaaucaagggcucuauc

SEQ ID NO: 2386492 - RNA, 19 nt, Artificial Sequence
  Description of Artificial Sequence: Synthetic oligonucleotide
  Sense strand starting at position 1338 of SEQ ID NO: 1886081
agcccuugauugcuaagaa

SEQ ID NO: 2386493 - RNA, 19 nt, Artificial Sequence
  Description of Artificial Sequence: Synthetic oligonucleotide
  Antisense strand to SEQ ID NO: 2386492
uucuuagcaaucaagggcu

SEQ ID NO: 2386494 - RNA, 19 nt, Artificial Sequence
  Description of Artificial Sequence: Synthetic oligonucleotide
  Sense strand starting at position 1441 of SEQ ID NO: 1886081
uuaggaugucagggucuaa

SEQ ID NO: 2386495 - RNA, 19 nt, Artificial Sequence
  Description of Artificial Sequence: Synthetic oligonucleotide
  Antisense strand to SEQ ID NO: 2386494
uuagacccugacauccuaa

SEQ ID NO: 2386496 - RNA, 19 nt, Artificial Sequence
  Description of Artificial Sequence: Synthetic oligonucleotide
  Sense strand starting at position 1470 of SEQ ID NO: 1886081
ugaucuuggcccuaaggau

SEQ ID NO: 2386497 - RNA, 19 nt, Artificial Sequence
  Description of Artificial Sequence: Synthetic oligonucleotide
  Antisense strand to SEQ ID NO: 2386496
auccuuagggccaagauca

SEQ ID NO: 2386498 - RNA, 19 nt, Artificial Sequence
  Description of Artificial Sequence: Synthetic oligonucleotide
  Sense strand starting at position 1697 of SEQ ID NO: 1886081
uguccagaugcugagaguu

SEQ ID NO: 2386499 - RNA, 19 nt, Artificial Sequence
  Description of Artificial Sequence: Synthetic oligonucleotide
  Antisense strand to SEQ ID NO: 2386498
aacucucagcaucuggaca

SEQ ID NO: 2386500 - RNA, 19 nt, Artificial Sequence
  Description of Artificial Sequence: Synthetic oligonucleotide
  Sense strand starting at position 1722 of SEQ ID NO: 1886081
cuuugcugucuccaggaau

SEQ ID NO: 2386501 - RNA, 19 nt, Artificial Sequence
  Description of Artificial Sequence: Synthetic oligonucleotide
  Antisense strand to SEQ ID NO: 2386500
auuccuggagacagcaaag

SEQ ID NO: 2386502 - RNA, 19 nt, Artificial Sequence
  Description of Artificial Sequence: Synthetic oligonucleotide
  Sense strand starting at position 1725 of SEQ ID NO: 1886081
ugcugucuccaggaauauu

SEQ ID NO: 2386503 - RNA, 19 nt, Artificial Sequence
  Description of Artificial Sequence: Synthetic oligonucleotide
  Antisense strand to SEQ ID NO: 2386502
aauauuccuggagacagca

SEQ ID NO: 2386504 - RNA, 19 nt, Artificial Sequence
  Description of Artificial Sequence: Synthetic oligonucleotide
  Sense strand starting at position 1872 of SEQ ID NO: 1886081
ggaggccaugccuaaauga

SEQ ID NO: 2386505 - RNA, 19 nt, Artificial Sequence
  Description of Artificial Sequence: Synthetic oligonucleotide
  Antisense strand to SEQ ID NO: 2386504
ucauuuaggcauggccucc

SEQ ID NO: 2386506 - RNA, 19 nt, Artificial Sequence
  Description of Artificial Sequence: Synthetic oligonucleotide
  Sense strand starting at position 2044 of SEQ ID NO: 1886081
uaugcucaccaaugaggua

SEQ ID NO: 2386507 - RNA, 19 nt, Artificial Sequence
  Description of Artificial Sequence: Synthetic oligonucleotide
  Antisense strand to SEQ ID NO: 2386506
uaccucauuggugagcaua

SEQ ID NO: 2386508 - RNA, 19 nt, Artificial Sequence
  Description of Artificial Sequence: Synthetic oligonucleotide
  Sense strand starting at position 2150 of SEQ ID NO: 1886081
uuaccacuacccugugauu

SEQ ID NO: 2386509 - RNA, 19 nt, Artificial Sequence
  Description of Artificial Sequence: Synthetic oligonucleotide
  Antisense strand to SEQ ID NO: 2386508
aaucacaggguagugguaa

SEQ ID NO: 2386510 - RNA, 19 nt, Artificial Sequence
  Description of Artificial Sequence: Synthetic oligonucleotide
  Sense strand starting at position 2183 of SEQ ID NO: 1886081
cgucaucaucaucguauuu

SEQ ID NO: 2386511 - RNA, 19 nt, Artificial Sequence
  Description of Artificial Sequence: Synthetic oligonucleotide
  Antisense strand to SEQ ID NO: 2386510
aaauacgaugaugaugacg

SEQ ID NO: 2386512 - RNA, 19 nt, Artificial Sequence
  Description of Artificial Sequence: Synthetic oligonucleotide
  Sense strand starting at position 2251 of SEQ ID NO: 1886081
acuggagucaguugugaga

SEQ ID NO: 2386513 - RNA, 19 nt, Artificial Sequence
  Description of Artificial Sequence: Synthetic oligonucleotide
  Antisense strand to SEQ ID NO: 2386512
ucucacaacugacuccagu

SEQ ID NO: 2386514 - RNA, 19 nt, Artificial Sequence
  Description of Artificial Sequence: Synthetic oligonucleotide
  Sense strand starting at position 2302 of SEQ ID NO: 1886081
ggacaucugagcuggauag

SEQ ID NO: 2386515 - RNA, 19 nt, Artificial Sequence
  Description of Artificial Sequence: Synthetic oligonucleotide
  Antisense strand to SEQ ID NO: 2386514
cuauccagcucagaugucc

SEQ ID NO: 2386516 - RNA, 19 nt, Artificial Sequence
  Description of Artificial Sequence: Synthetic oligonucleotide
  Sense strand starting at position 2303 of SEQ ID NO: 1886081
gacaucugagcuggauaga

SEQ ID NO: 2386517 - RNA, 19 nt, Artificial Sequence
  Description of Artificial Sequence: Synthetic oligonucleotide
  Antisense strand to SEQ ID NO: 2386516
ucuauccagcucagauguc

SEQ ID NO: 2386518 - RNA, 19 nt, Artificial Sequence
  Description of Artificial Sequence: Synthetic oligonucleotide
  Sense strand starting at position 2552 of SEQ ID NO: 1886081
agggaacaugugcauuagu

SEQ ID NO: 2386519 - RNA, 19 nt, Artificial Sequence
  Description of Artificial Sequence: Synthetic oligonucleotide
  Antisense strand to SEQ ID NO: 2386518
acuaaugcacauguucccu

SEQ ID NO: 2386520 - RNA, 19 nt, Artificial Sequence
  Description of Artificial Sequence: Synthetic oligonucleotide
  Sense strand starting at position 3224 of SEQ ID NO: 1886081
agucauaucgcugugccaa

SEQ ID NO: 2386521 - RNA, 19 nt, Artificial Sequence
  Description of Artificial Sequence: Synthetic oligonucleotide
  Antisense strand to SEQ ID NO: 2386520
uuggcacagcgauaugacu

SEQ ID NO: 2386522 - RNA, 19 nt, Artificial Sequence
  Description of Artificial Sequence: Synthetic oligonucleotide
  Sense strand starting at position 3237 of SEQ ID NO: 1886081
ugccaaacuugccucaaga

SEQ ID NO: 2386523 - RNA, 19 nt, Artificial Sequence
  Description of Artificial Sequence: Synthetic oligonucleotide
  Antisense strand to SEQ ID NO: 2386522
ucuugaggcaaguuuggca

SEQ ID NO: 2386524 - RNA, 19 nt, Artificial Sequence
  Description of Artificial Sequence: Synthetic oligonucleotide
  Sense strand starting at position 3239 of SEQ ID NO: 1886081
ccaaacuugccucaagaug

SEQ ID NO: 2386525 - RNA, 19 nt, Artificial Sequence
  Description of Artificial Sequence: Synthetic oligonucleotide
  Antisense strand to SEQ ID NO: 2386524
caucuugaggcaaguuugg

SEQ ID NO: 2386526 - RNA, 19 nt, Artificial Sequence
  Description of Artificial Sequence: Synthetic oligonucleotide
  Sense strand starting at position 3718 of SEQ ID NO: 1886081
agauaagucaccugaggug

SEQ ID NO: 2386527 - RNA, 19 nt, Artificial Sequence
  Description of Artificial Sequence: Synthetic oligonucleotide
  Antisense strand to SEQ ID NO: 2386526
caccucaggugacuuaucu

SEQ ID NO: 2386528 - RNA, 19 nt, Artificial Sequence
  Description of Artificial Sequence: Synthetic oligonucleotide
  Sense strand starting at position 3790 of SEQ ID NO: 1886081
cgaccuggaaguugagauu

SEQ ID NO: 2386529 - RNA, 19 nt, Artificial Sequence
  Description of Artificial Sequence: Synthetic oligonucleotide
  Antisense strand to SEQ ID NO: 2386528
aaucucaacuuccaggucg

SEQ ID NO: 2386530 - RNA, 19 nt, Artificial Sequence
  Description of Artificial Sequence: Synthetic oligonucleotide
  Sense strand starting at position 3825 of SEQ ID NO: 1886081
aggaaaucuuuagcucaag

SEQ ID NO: 2386531 - RNA, 19 nt, Artificial Sequence
  Description of Artificial Sequence: Synthetic oligonucleotide
  Antisense strand to SEQ ID NO: 2386530
cuugagcuaaagauuuccu

SEQ ID NO: 2386532 - RNA, 19 nt, Artificial Sequence
  Description of Artificial Sequence: Synthetic oligonucleotide
  Sense strand starting at position 3884 of SEQ ID NO: 1886081
cugcacugccguguaagau

SEQ ID NO: 2386533 - RNA, 19 nt, Artificial Sequence
  Description of Artificial Sequence: Synthetic oligonucleotide
  Antisense strand to SEQ ID NO: 2386532
aucuuacacggcagugcag

SEQ ID NO: 2386534 - RNA, 19 nt, Artificial Sequence
  Description of Artificial Sequence: Synthetic oligonucleotide
  Sense strand starting at position 3893 of SEQ ID NO: 1886081
cguguaagauacuuugaug

SEQ ID NO: 2386535 - RNA, 19 nt, Artificial Sequence
  Description of Artificial Sequence: Synthetic oligonucleotide
  Antisense strand to SEQ ID NO: 2386534
caucaaaguaucuuacacg

SEQ ID NO: 2386536 - RNA, 19 nt, Artificial Sequence
  Description of Artificial Sequence: Synthetic oligonucleotide
  Sense strand starting at position 86 of SEQ ID NO: 1886082
ucggcuucuugguugaaga

SEQ ID NO: 2386537 - RNA, 19 nt, Artificial Sequence
  Description of Artificial Sequence: Synthetic oligonucleotide
  Antisense strand to SEQ ID NO: 2386536
ucuucaaccaagaagccga

SEQ ID NO: 2386538 - RNA, 19 nt, Artificial Sequence
  Description of Artificial Sequence: Synthetic oligonucleotide
  Sense strand starting at position 88 of SEQ ID NO: 1886082
ggcuucuugguugaagaga

SEQ ID NO: 2386539 - RNA, 19 nt, Artificial Sequence
  Description of Artificial Sequence: Synthetic oligonucleotide
  Antisense strand to SEQ ID NO: 2386538
ucucuucaaccaagaagcc

SEQ ID NO: 2386540 - RNA, 19 nt, Artificial Sequence
  Description of Artificial Sequence: Synthetic oligonucleotide
  Sense strand starting at position 115 of SEQ ID NO: 1886082
gagguuguggaauggaaca

SEQ ID NO: 2386541 - RNA, 19 nt, Artificial Sequence
  Description of Artificial Sequence: Synthetic oligonucleotide
  Antisense strand to SEQ ID NO: 2386540
uguuccauuccacaaccuc

SEQ ID NO: 2386542 - RNA, 19 nt, Artificial Sequence
  Description of Artificial Sequence: Synthetic oligonucleotide
  Sense strand starting at position 282 of SEQ ID NO: 1886082
uucuguagagcuuguuuaa

SEQ ID NO: 2386543 - RNA, 19 nt, Artificial Sequence
  Description of Artificial Sequence: Synthetic oligonucleotide
  Antisense strand to SEQ ID NO: 2386542
uuaaacaagcucuacagaa

SEQ ID NO: 2386544 - RNA, 19 nt, Artificial Sequence
  Description of Artificial Sequence: Synthetic oligonucleotide
  Sense strand starting at position 285 of SEQ ID NO: 1886082
uguagagcuuguuuaaauu

SEQ ID NO: 2386545 - RNA, 19 nt, Artificial Sequence
  Description of Artificial Sequence: Synthetic oligonucleotide
  Antisense strand to SEQ ID NO: 2386544
aauuuaaacaagcucuaca

SEQ ID NO: 2386546 - RNA, 19 nt, Artificial Sequence
  Description of Artificial Sequence: Synthetic oligonucleotide
  Sense strand starting at position 309 of SEQ ID NO: 1886082
agcacuuuccuaugaagug

SEQ ID NO: 2386547 - RNA, 19 nt, Artificial Sequence
  Description of Artificial Sequence: Synthetic oligonucleotide
  Antisense strand to SEQ ID NO: 2386546
cacuucauaggaaagugcu

SEQ ID NO: 2386548 - RNA, 19 nt, Artificial Sequence
  Description of Artificial Sequence: Synthetic oligonucleotide
  Sense strand starting at position 321 of SEQ ID NO: 1886082
ugaagugccucauuugcaa

SEQ ID NO: 2386549 - RNA, 19 nt, Artificial Sequence
  Description of Artificial Sequence: Synthetic oligonucleotide
  Antisense strand to SEQ ID NO: 2386548
uugcaaaugaggcacuuca

SEQ ID NO: 2386550 - RNA, 19 nt, Artificial Sequence
  Description of Artificial Sequence: Synthetic oligonucleotide
  Sense strand starting at position 325 of SEQ ID NO: 1886082
gugccucauuugcaaggua

SEQ ID NO: 2386551 - RNA, 19 nt, Artificial Sequence
  Description of Artificial Sequence: Synthetic oligonucleotide
  Antisense strand to SEQ ID NO: 2386550
uaccuugcaaaugaggcac

SEQ ID NO: 2386552 - RNA, 19 nt, Artificial Sequence
  Description of Artificial Sequence: Synthetic oligonucleotide
  Sense strand starting at position 476 of SEQ ID NO: 1886082
uggcacagcgucugugaaa

SEQ ID NO: 2386553 - RNA, 19 nt, Artificial Sequence
  Description of Artificial Sequence: Synthetic oligonucleotide
  Antisense strand to SEQ ID NO: 2386552
uuucacagacgcugugcca

SEQ ID NO: 2386554 - RNA, 19 nt, Artificial Sequence
  Description of Artificial Sequence: Synthetic oligonucleotide
  Sense strand starting at position 477 of SEQ ID NO: 1886082
ggcacagcgucugugaaau

SEQ ID NO: 2386555 - RNA, 19 nt, Artificial Sequence
  Description of Artificial Sequence: Synthetic oligonucleotide
  Antisense strand to SEQ ID NO: 2386554
auuucacagacgcugugcc

SEQ ID NO: 2386556 - RNA, 19 nt, Artificial Sequence
  Description of Artificial Sequence: Synthetic oligonucleotide
  Sense strand starting at position 502 of SEQ ID NO: 1886082
auuaacaagggaugucuua

SEQ ID NO: 2386557 - RNA, 19 nt, Artificial Sequence
  Description of Artificial Sequence: Synthetic oligonucleotide
  Antisense strand to SEQ ID NO: 2386556
uaagacaucccuuguuaau

SEQ ID NO: 2386558 - RNA, 19 nt, Artificial Sequence
  Description of Artificial Sequence: Synthetic oligonucleotide
  Sense strand starting at position 509 of SEQ ID NO: 1886082
agggaugucuuagguuuaa

SEQ ID NO: 2386559 - RNA, 19 nt, Artificial Sequence
  Description of Artificial Sequence: Synthetic oligonucleotide
  Antisense strand to SEQ ID NO: 2386558
uuaaaccuaagacaucccu

SEQ ID NO: 2386560 - RNA, 19 nt, Artificial Sequence
  Description of Artificial Sequence: Synthetic oligonucleotide
  Sense strand starting at position 648 of SEQ ID NO: 1886082
agaaauagauguuuggugu

SEQ ID NO: 2386561 - RNA, 19 nt, Artificial Sequence
  Description of Artificial Sequence: Synthetic oligonucleotide
  Antisense strand to SEQ ID NO: 2386560
acaccaaacaucuauuucu

SEQ ID NO: 2386562 - RNA, 19 nt, Artificial Sequence
  Description of Artificial Sequence: Synthetic oligonucleotide
  Sense strand starting at position 649 of SEQ ID NO: 1886082
gaaauagauguuuggugug

SEQ ID NO: 2386563 - RNA, 19 nt, Artificial Sequence
  Description of Artificial Sequence: Synthetic oligonucleotide
  Antisense strand to SEQ ID NO: 2386562
cacaccaaacaucuauuuc

SEQ ID NO: 2386564 - RNA, 19 nt, Artificial Sequence
  Description of Artificial Sequence: Synthetic oligonucleotide
  Sense strand starting at position 713 of SEQ ID NO: 1886082
cugaaauagucacacugaa

SEQ ID NO: 2386565 - RNA, 19 nt, Artificial Sequence
  Description of Artificial Sequence: Synthetic oligonucleotide
  Antisense strand to SEQ ID NO: 2386564
uucagugugacuauuucag

SEQ ID NO: 2386566 - RNA, 19 nt, Artificial Sequence
  Description of Artificial Sequence: Synthetic oligonucleotide
  Sense strand starting at position 729 of SEQ ID NO: 1886082
gaaggugggcgcugauuau

SEQ ID NO: 2386567 - RNA, 19 nt, Artificial Sequence
  Description of Artificial Sequence: Synthetic oligonucleotide
  Antisense strand to SEQ ID NO: 2386566
auaaucagcgcccaccuuc

SEQ ID NO: 2386568 - RNA, 19 nt, Artificial Sequence
  Description of Artificial Sequence: Synthetic oligonucleotide
  Sense strand starting at position 738 of SEQ ID NO: 1886082
cgcugauuaucugccacau

SEQ ID NO: 2386569 - RNA, 19 nt, Artificial Sequence
  Description of Artificial Sequence: Synthetic oligonucleotide
  Antisense strand to SEQ ID NO: 2386568
auguggcagauaaucagcg

SEQ ID NO: 2386570 - RNA, 19 nt, Artificial Sequence
  Description of Artificial Sequence: Synthetic oligonucleotide
  Sense strand starting at position 866 of SEQ ID NO: 1886082
agcagcauccuauauaaug

SEQ ID NO: 2386571 - RNA, 19 nt, Artificial Sequence
  Description of Artificial Sequence: Synthetic oligonucleotide
  Antisense strand to SEQ ID NO: 2386570
cauuauauaggaugcugcu

SEQ ID NO: 2386572 - RNA, 19 nt, Artificial Sequence
  Description of Artificial Sequence: Synthetic oligonucleotide
  Sense strand starting at position 914 of SEQ ID NO: 1886082
guguaauacuaccaacuag

SEQ ID NO: 2386573 - RNA, 19 nt, Artificial Sequence
  Description of Artificial Sequence: Synthetic oligonucleotide
  Antisense strand to SEQ ID NO: 2386572
cuaguugguaguauuacac

SEQ ID NO: 2386574 - RNA, 19 nt, Artificial Sequence
  Description of Artificial Sequence: Synthetic oligonucleotide
  Sense strand starting at position 992 of SEQ ID NO: 1886082
gggauaggucuaugcaguu

SEQ ID NO: 2386575 - RNA, 19 nt, Artificial Sequence
  Description of Artificial Sequence: Synthetic oligonucleotide
  Antisense strand to SEQ ID NO: 2386574
aacugcauagaccuauccc

SEQ ID NO: 2386576 - RNA, 19 nt, Artificial Sequence
  Description of Artificial Sequence: Synthetic oligonucleotide
  Sense strand starting at position 1260 of SEQ ID NO: 1886082
ggccgaguuuccucggaac

SEQ ID NO: 2386577 - RNA, 19 nt, Artificial Sequence
  Description of Artificial Sequence: Synthetic oligonucleotide
  Antisense strand to SEQ ID NO: 2386576
guuccgaggaaacucggcc

SEQ ID NO: 2386578 - RNA, 19 nt, Artificial Sequence
  Description of Artificial Sequence: Synthetic oligonucleotide
  Sense strand starting at position 1262 of SEQ ID NO: 1886082
ccgaguuuccucggaacuc

SEQ ID NO: 2386579 - RNA, 19 nt, Artificial Sequence
  Description of Artificial Sequence: Synthetic oligonucleotide
  Antisense strand to SEQ ID NO: 2386578
gaguuccgaggaaacucgg

SEQ ID NO: 2386580 - RNA, 19 nt, Artificial Sequence
  Description of Artificial Sequence: Synthetic oligonucleotide
  Sense strand starting at position 1322 of SEQ ID NO: 1886082
ggcccaggucaccaacauu

SEQ ID NO: 2386581 - RNA, 19 nt, Artificial Sequence
  Description of Artificial Sequence: Synthetic oligonucleotide
  Antisense strand to SEQ ID NO: 2386580
aauguuggugaccugggcc

SEQ ID NO: 2386582 - RNA, 19 nt, Artificial Sequence
  Description of Artificial Sequence: Synthetic oligonucleotide
  Sense strand starting at position 1525 of SEQ ID NO: 1886082
gcaggaacuccaggaaguu

SEQ ID NO: 2386583 - RNA, 19 nt, Artificial Sequence
  Description of Artificial Sequence: Synthetic oligonucleotide
  Antisense strand to SEQ ID NO: 2386582
aacuuccuggaguuccugc

SEQ ID NO: 2386584 - RNA, 19 nt, Artificial Sequence
  Description of Artificial Sequence: Synthetic oligonucleotide
  Sense strand starting at position 1649 of SEQ ID NO: 1886082
gugacucugugccaggaga

SEQ ID NO: 2386585 - RNA, 19 nt, Artificial Sequence
  Description of Artificial Sequence: Synthetic oligonucleotide
  Antisense strand to SEQ ID NO: 2386584
ucuccuggcacagagucac

SEQ ID NO: 2386586 - RNA, 19 nt, Artificial Sequence
  Description of Artificial Sequence: Synthetic oligonucleotide
  Sense strand starting at position 1701 of SEQ ID NO: 1886082
ggacaucuugccugcugca

SEQ ID NO: 2386587 - RNA, 19 nt, Artificial Sequence
  Description of Artificial Sequence: Synthetic oligonucleotide
  Antisense strand to SEQ ID NO: 2386586
ugcagcaggcaagaugucc

SEQ ID NO: 2386588 - RNA, 19 nt, Artificial Sequence
  Description of Artificial Sequence: Synthetic oligonucleotide
  Sense strand starting at position 1784 of SEQ ID NO: 1886082
gguuguuaccuuggcaaca

SEQ ID NO: 2386589 - RNA, 19 nt, Artificial Sequence
  Description of Artificial Sequence: Synthetic oligonucleotide
  Antisense strand to SEQ ID NO: 2386588
uguugccaagguaacaacc

SEQ ID NO: 2386590 - RNA, 19 nt, Artificial Sequence
  Description of Artificial Sequence: Synthetic oligonucleotide
  Sense strand starting at position 1786 of SEQ ID NO: 1886082
uuguuaccuuggcaacaga

SEQ ID NO: 2386591 - RNA, 19 nt, Artificial Sequence
  Description of Artificial Sequence: Synthetic oligonucleotide
  Antisense strand to SEQ ID NO: 2386590
ucuguugccaagguaacaa

SEQ ID NO: 2386592 - RNA, 19 nt, Artificial Sequence
  Description of Artificial Sequence: Synthetic oligonucleotide
  Sense strand starting at position 2051 of SEQ ID NO: 1886082
ggcagcaccugguaaauga

SEQ ID NO: 2386593 - RNA, 19 nt, Artificial Sequence
  Description of Artificial Sequence: Synthetic oligonucleotide
  Antisense strand to SEQ ID NO: 2386592
ucauuuaccaggugcugcc

SEQ ID NO: 2386594 - RNA, 19 nt, Artificial Sequence
  Description of Artificial Sequence: Synthetic oligonucleotide
  Sense strand starting at position 2062 of SEQ ID NO: 1886082
guaaaugagcccugaaggu

SEQ ID NO: 2386595 - RNA, 19 nt, Artificial Sequence
  Description of Artificial Sequence: Synthetic oligonucleotide
  Antisense strand to SEQ ID NO: 2386594
accuucagggcucauuuac

SEQ ID NO: 2386596 - RNA, 19 nt, Artificial Sequence
  Description of Artificial Sequence: Synthetic oligonucleotide
  Sense strand starting at position 2079 of SEQ ID NO: 1886082
guuccagcuccggaagguu

SEQ ID NO: 2386597 - RNA, 19 nt, Artificial Sequence
  Description of Artificial Sequence: Synthetic oligonucleotide
  Antisense strand to SEQ ID NO: 2386596
aaccuuccggagcuggaac

SEQ ID NO: 2386598 - RNA, 19 nt, Artificial Sequence
  Description of Artificial Sequence: Synthetic oligonucleotide
  Sense strand starting at position 2231 of SEQ ID NO: 1886082
uggugaggucuccacacaa

SEQ ID NO: 2386599 - RNA, 19 nt, Artificial Sequence
  Description of Artificial Sequence: Synthetic oligonucleotide
  Antisense strand to SEQ ID NO: 2386598
uuguguggagaccucacca

SEQ ID NO: 2386600 - RNA, 19 nt, Artificial Sequence
  Description of Artificial Sequence: Synthetic oligonucleotide
  Sense strand starting at position 2326 of SEQ ID NO: 1886082
cacaguguugcggugugaa

SEQ ID NO: 2386601 - RNA, 19 nt, Artificial Sequence
  Description of Artificial Sequence: Synthetic oligonucleotide
  Antisense strand to SEQ ID NO: 2386600
uucacaccgcaacacugug

SEQ ID NO: 2386602 - RNA, 19 nt, Artificial Sequence
  Description of Artificial Sequence: Synthetic oligonucleotide
  Sense strand starting at position 2327 of SEQ ID NO: 1886082
acaguguugcggugugaag

SEQ ID NO: 2386603 - RNA, 19 nt, Artificial Sequence
  Description of Artificial Sequence: Synthetic oligonucleotide
  Antisense strand to SEQ ID NO: 2386602
cuucacaccgcaacacugu

SEQ ID NO: 2386604 - RNA, 19 nt, Artificial Sequence
  Description of Artificial Sequence: Synthetic oligonucleotide
  Sense strand starting at position 2358 of SEQ ID NO: 1886082
ugucgagugugguuccagu

SEQ ID NO: 2386605 - RNA, 19 nt, Artificial Sequence
  Description of Artificial Sequence: Synthetic oligonucleotide
  Antisense strand to SEQ ID NO: 2386604
acuggaaccacacucgaca

SEQ ID NO: 2386606 - RNA, 19 nt, Artificial Sequence
  Description of Artificial Sequence: Synthetic oligonucleotide
  Sense strand starting at position 3013 of SEQ ID NO: 1886082
ucaggaagaccucgugcuu

SEQ ID NO: 2386607 - RNA, 19 nt, Artificial Sequence
  Description of Artificial Sequence: Synthetic oligonucleotide
  Antisense strand to SEQ ID NO: 2386606
aagcacgaggucuuccuga

SEQ ID NO: 2386608 - RNA, 19 nt, Artificial Sequence
  Description of Artificial Sequence: Synthetic oligonucleotide
  Sense strand starting at position 3019 of SEQ ID NO: 1886082
agaccucgugcuugcgaau

SEQ ID NO: 2386609 - RNA, 19 nt, Artificial Sequence
  Description of Artificial Sequence: Synthetic oligonucleotide
  Antisense strand to SEQ ID NO: 2386608
auucgcaagcacgaggucu

SEQ ID NO: 2386610 - RNA, 19 nt, Artificial Sequence
  Description of Artificial Sequence: Synthetic oligonucleotide
  Sense strand starting at position 3399 of SEQ ID NO: 1886082
acagcugccucauauuaga

SEQ ID NO: 2386611 - RNA, 19 nt, Artificial Sequence
  Description of Artificial Sequence: Synthetic oligonucleotide
  Antisense strand to SEQ ID NO: 2386610
ucuaauaugaggcagcugu

SEQ ID NO: 2386612 - RNA, 19 nt, Artificial Sequence
  Description of Artificial Sequence: Synthetic oligonucleotide
  Sense strand starting at position 3402 of SEQ ID NO: 1886082
gcugccucauauuagagaa

SEQ ID NO: 2386613 - RNA, 19 nt, Artificial Sequence
  Description of Artificial Sequence: Synthetic oligonucleotide
  Antisense strand to SEQ ID NO: 2386612
uucucuaauaugaggcagc

SEQ ID NO: 2386614 - RNA, 19 nt, Artificial Sequence
  Description of Artificial Sequence: Synthetic oligonucleotide
  Sense strand starting at position 3547 of SEQ ID NO: 1886082
ggccgcacucucugaggaa

SEQ ID NO: 2386615 - RNA, 19 nt, Artificial Sequence
  Description of Artificial Sequence: Synthetic oligonucleotide
  Antisense strand to SEQ ID NO: 2386614
uuccucagagagugcggcc

SEQ ID NO: 2386616 - RNA, 19 nt, Artificial Sequence
  Description of Artificial Sequence: Synthetic oligonucleotide
  Sense strand starting at position 127 of SEQ ID NO: 1886083
gggaaagaaaucugugcau

SEQ ID NO: 2386617 - RNA, 19 nt, Artificial Sequence
  Description of Artificial Sequence: Synthetic oligonucleotide
  Antisense strand to SEQ ID NO: 2386616
augcacagauuucuuuccc

SEQ ID NO: 2386618 - RNA, 19 nt, Artificial Sequence
  Description of Artificial Sequence: Synthetic oligonucleotide
  Sense strand starting at position 129 of SEQ ID NO: 1886083
gaaagaaaucugugcauuc

SEQ ID NO: 2386619 - RNA, 19 nt, Artificial Sequence
  Description of Artificial Sequence: Synthetic oligonucleotide
  Antisense strand to SEQ ID NO: 2386618
gaaugcacagauuucuuuc

SEQ ID NO: 2386620 - RNA, 19 nt, Artificial Sequence
  Description of Artificial Sequence: Synthetic oligonucleotide
  Sense strand starting at position 131 of SEQ ID NO: 1886083
aagaaaucugugcauucug

SEQ ID NO: 2386621 - RNA, 19 nt, Artificial Sequence
  Description of Artificial Sequence: Synthetic oligonucleotide
  Antisense strand to SEQ ID NO: 2386620
cagaaugcacagauuucuu

SEQ ID NO: 2386622 - RNA, 19 nt, Artificial Sequence
  Description of Artificial Sequence: Synthetic oligonucleotide
  Sense strand starting at position 140 of SEQ ID NO: 1886083
gugcauucugucucugcua

SEQ ID NO: 2386623 - RNA, 19 nt, Artificial Sequence
  Description of Artificial Sequence: Synthetic oligonucleotide
  Antisense strand to SEQ ID NO: 2386622
uagcagagacagaaugcac

SEQ ID NO: 2386624 - RNA, 19 nt, Artificial Sequence
  Description of Artificial Sequence: Synthetic oligonucleotide
  Sense strand starting at position 317 of SEQ ID NO: 1886083
ggcugacccugguuuagau

SEQ ID NO: 2386625 - RNA, 19 nt, Artificial Sequence
  Description of Artificial Sequence: Synthetic oligonucleotide
  Antisense strand to SEQ ID NO: 2386624
aucuaaaccagggucagcc

SEQ ID NO: 2386626 - RNA, 19 nt, Artificial Sequence
  Description of Artificial Sequence: Synthetic oligonucleotide
  Sense strand starting at position 428 of SEQ ID NO: 1886083
augauauuaugagcccuaa

SEQ ID NO: 2386627 - RNA, 19 nt, Artificial Sequence
  Description of Artificial Sequence: Synthetic oligonucleotide
  Antisense strand to SEQ ID NO: 2386626
uuagggcucauaauaucau

SEQ ID NO: 2386628 - RNA, 19 nt, Artificial Sequence
  Description of Artificial Sequence: Synthetic oligonucleotide
  Sense strand starting at position 577 of SEQ ID NO: 1886083
ucugcuauuggagagcaaa

SEQ ID NO: 2386629 - RNA, 19 nt, Artificial Sequence
  Description of Artificial Sequence: Synthetic oligonucleotide
  Antisense strand to SEQ ID NO: 2386628
uuugcucuccaauagcaga

SEQ ID NO: 2386630 - RNA, 19 nt, Artificial Sequence
  Description of Artificial Sequence: Synthetic oligonucleotide
  Sense strand starting at position 952 of SEQ ID NO: 1886083
gucugugagccuuaauaaa

SEQ ID NO: 2386631 - RNA, 19 nt, Artificial Sequence
  Description of Artificial Sequence: Synthetic oligonucleotide
  Antisense strand to SEQ ID NO: 2386630
uuuauuaaggcucacagac

SEQ ID NO: 2386632 - RNA, 19 nt, Artificial Sequence
  Description of Artificial Sequence: Synthetic oligonucleotide
  Sense strand starting at position 985 of SEQ ID NO: 1886083
ugcccagucgaucaacuua

SEQ ID NO: 2386633 - RNA, 19 nt, Artificial Sequence
  Description of Artificial Sequence: Synthetic oligonucleotide
  Antisense strand to SEQ ID NO: 2386632
uaaguugaucgacugggca

SEQ ID NO: 2386634 - RNA, 19 nt, Artificial Sequence
  Description of Artificial Sequence: Synthetic oligonucleotide
  Sense strand starting at position 1078 of SEQ ID NO: 1886083
gucagcuucuuauuuacca

SEQ ID NO: 2386635 - RNA, 19 nt, Artificial Sequence
  Description of Artificial Sequence: Synthetic oligonucleotide
  Antisense strand to SEQ ID NO: 2386634
ugguaaauaagaagcugac

SEQ ID NO: 2386636 - RNA, 19 nt, Artificial Sequence
  Description of Artificial Sequence: Synthetic oligonucleotide
  Sense strand starting at position 1323 of SEQ ID NO: 1886083
cccuuccucugaguggaua

SEQ ID NO: 2386637 - RNA, 19 nt, Artificial Sequence
  Description of Artificial Sequence: Synthetic oligonucleotide
  Antisense strand to SEQ ID NO: 2386636
uauccacucagaggaaggg

SEQ ID NO: 2386638 - RNA, 19 nt, Artificial Sequence
  Description of Artificial Sequence: Synthetic oligonucleotide
  Sense strand starting at position 1494 of SEQ ID NO: 1886083
gaugacagucgugauguga

SEQ ID NO: 2386639 - RNA, 19 nt, Artificial Sequence
  Description of Artificial Sequence: Synthetic oligonucleotide
  Antisense strand to SEQ ID NO: 2386638
ucacaucacgacugucauc

SEQ ID NO: 2386640 - RNA, 19 nt, Artificial Sequence
  Description of Artificial Sequence: Synthetic oligonucleotide
  Sense strand starting at position 1744 of SEQ ID NO: 1886083
guacccaaucugcauuagu

SEQ ID NO: 2386641 - RNA, 19 nt, Artificial Sequence
  Description of Artificial Sequence: Synthetic oligonucleotide
  Antisense strand to SEQ ID NO: 2386640
acuaaugcagauuggguac

SEQ ID NO: 2386642 - RNA, 19 nt, Artificial Sequence
  Description of Artificial Sequence: Synthetic oligonucleotide
  Sense strand starting at position 1777 of SEQ ID NO: 1886083
gaugauuguuaugugagaa

SEQ ID NO: 2386643 - RNA, 19 nt, Artificial Sequence
  Description of Artificial Sequence: Synthetic oligonucleotide
  Antisense strand to SEQ ID NO: 2386642
uucucacauaacaaucauc

SEQ ID NO: 2386644 - RNA, 19 nt, Artificial Sequence
  Description of Artificial Sequence: Synthetic oligonucleotide
  Sense strand starting at position 1778 of SEQ ID NO: 1886083
augauuguuaugugagaaa

SEQ ID NO: 2386645 - RNA, 19 nt, Artificial Sequence
  Description of Artificial Sequence: Synthetic oligonucleotide
  Antisense strand to SEQ ID NO: 2386644
uuucucacauaacaaucau

SEQ ID NO: 2386646 - RNA, 19 nt, Artificial Sequence
  Description of Artificial Sequence: Synthetic oligonucleotide
  Sense strand starting at position 1801 of SEQ ID NO: 1886083
ccgggauugcauuagugaa

SEQ ID NO: 2386647 - RNA, 19 nt, Artificial Sequence
  Description of Artificial Sequence: Synthetic oligonucleotide
  Antisense strand to SEQ ID NO: 2386646
uucacuaaugcaaucccgg

SEQ ID NO: 2386648 - RNA, 19 nt, Artificial Sequence
  Description of Artificial Sequence: Synthetic oligonucleotide
  Sense strand starting at position 1803 of SEQ ID NO: 1886083
gggauugcauuagugaaac

SEQ ID NO: 2386649 - RNA, 19 nt, Artificial Sequence
  Description of Artificial Sequence: Synthetic oligonucleotide
  Antisense strand to SEQ ID NO: 2386648
guuucacuaaugcaauccc

SEQ ID NO: 2386650 - RNA, 19 nt, Artificial Sequence
  Description of Artificial Sequence: Synthetic oligonucleotide
  Sense strand starting at position 1899 of SEQ ID NO: 1886083
gcugaaucugagggccaaa

SEQ ID NO: 2386651 - RNA, 19 nt, Artificial Sequence
  Description of Artificial Sequence: Synthetic oligonucleotide
  Antisense strand to SEQ ID NO: 2386650
uuuggcccucagauucagc

SEQ ID NO: 2386652 - RNA, 19 nt, Artificial Sequence
  Description of Artificial Sequence: Synthetic oligonucleotide
  Sense strand starting at position 2067 of SEQ ID NO: 1886083
gguuacauuugucuuccuu

SEQ ID NO: 2386653 - RNA, 19 nt, Artificial Sequence
  Description of Artificial Sequence: Synthetic oligonucleotide
  Antisense strand to SEQ ID NO: 2386652
aaggaagacaaauguaacc

SEQ ID NO: 2386654 - RNA, 19 nt, Artificial Sequence
  Description of Artificial Sequence: Synthetic oligonucleotide
  Sense strand starting at position 2139 of SEQ ID NO: 1886083
cagcgaacaucauugaaag

SEQ ID NO: 2386655 - RNA, 19 nt, Artificial Sequence
  Description of Artificial Sequence: Synthetic oligonucleotide
  Antisense strand to SEQ ID NO: 2386654
cuuucaaugauguucgcug

SEQ ID NO: 2386656 - RNA, 19 nt, Artificial Sequence
  Description of Artificial Sequence: Synthetic oligonucleotide
  Sense strand starting at position 2140 of SEQ ID NO: 1886083
agcgaacaucauugaaaga

SEQ ID NO: 2386657 - RNA, 19 nt, Artificial Sequence
  Description of Artificial Sequence: Synthetic oligonucleotide
  Antisense strand to SEQ ID NO: 2386656
ucuuucaaugauguucgcu

SEQ ID NO: 2386658 - RNA, 19 nt, Artificial Sequence
  Description of Artificial Sequence: Synthetic oligonucleotide
  Sense strand starting at position 2549 of SEQ ID NO: 1886083
aggcuuccuagaggaugua

SEQ ID NO: 2386659 - RNA, 19 nt, Artificial Sequence
  Description of Artificial Sequence: Synthetic oligonucleotide
  Antisense strand to SEQ ID NO: 2386658
uacauccucuaggaagccu

SEQ ID NO: 2386660 - RNA, 19 nt, Artificial Sequence
  Description of Artificial Sequence: Synthetic oligonucleotide
  Sense strand starting at position 2562 of SEQ ID NO: 1886083
gauguaguccgguggagaa

SEQ ID NO: 2386661 - RNA, 19 nt, Artificial Sequence
  Description of Artificial Sequence: Synthetic oligonucleotide
  Antisense strand to SEQ ID NO: 2386660
uucuccaccggacuacauc

SEQ ID NO: 2386662 - RNA, 19 nt, Artificial Sequence
  Description of Artificial Sequence: Synthetic oligonucleotide
  Sense strand starting at position 2601 of SEQ ID NO: 1886083
aaucgagaccuagguugaa

SEQ ID NO: 2386663 - RNA, 19 nt, Artificial Sequence
  Description of Artificial Sequence: Synthetic oligonucleotide
  Antisense strand to SEQ ID NO: 2386662
uucaaccuaggucucgauu

SEQ ID NO: 2386664 - RNA, 19 nt, Artificial Sequence
  Description of Artificial Sequence: Synthetic oligonucleotide
  Sense strand starting at position 2699 of SEQ ID NO: 1886083
gucuguaaaguagggagaa

SEQ ID NO: 2386665 - RNA, 19 nt, Artificial Sequence
  Description of Artificial Sequence: Synthetic oligonucleotide
  Antisense strand to SEQ ID NO: 2386664
uucucccuacuuuacagac

SEQ ID NO: 2386666 - RNA, 19 nt, Artificial Sequence
  Description of Artificial Sequence: Synthetic oligonucleotide
  Sense strand starting at position 2715 of SEQ ID NO: 1886083
gaaugccuaucugugagaa

SEQ ID NO: 2386667 - RNA, 19 nt, Artificial Sequence
  Description of Artificial Sequence: Synthetic oligonucleotide
  Antisense strand to SEQ ID NO: 2386666
uucucacagauaggcauuc

SEQ ID NO: 2386668 - RNA, 19 nt, Artificial Sequence
  Description of Artificial Sequence: Synthetic oligonucleotide
  Sense strand starting at position 2716 of SEQ ID NO: 1886083
aaugccuaucugugagaac

SEQ ID NO: 2386669 - RNA, 19 nt, Artificial Sequence
  Description of Artificial Sequence: Synthetic oligonucleotide
  Antisense strand to SEQ ID NO: 2386668
guucucacagauaggcauu

SEQ ID NO: 2386670 - RNA, 19 nt, Artificial Sequence
  Description of Artificial Sequence: Synthetic oligonucleotide
  Sense strand starting at position 2767 of SEQ ID NO: 1886083
cagugcucagcacauuaga

SEQ ID NO: 2386671 - RNA, 19 nt, Artificial Sequence
  Description of Artificial Sequence: Synthetic oligonucleotide
  Antisense strand to SEQ ID NO: 2386670
ucuaaugugcugagcacug

SEQ ID NO: 2386672 - RNA, 19 nt, Artificial Sequence
  Description of Artificial Sequence: Synthetic oligonucleotide
  Sense strand starting at position 2972 of SEQ ID NO: 1886083
gagcauuuauccuugcuga

SEQ ID NO: 2386673 - RNA, 19 nt, Artificial Sequence
  Description of Artificial Sequence: Synthetic oligonucleotide
  Antisense strand to SEQ ID NO: 2386672
ucagcaaggauaaaugcuc

SEQ ID NO: 2386674 - RNA, 19 nt, Artificial Sequence
  Description of Artificial Sequence: Synthetic oligonucleotide
  Sense strand starting at position 2973 of SEQ ID NO: 1886083
agcauuuauccuugcugac

SEQ ID NO: 2386675 - RNA, 19 nt, Artificial Sequence
  Description of Artificial Sequence: Synthetic oligonucleotide
  Antisense strand to SEQ ID NO: 2386674
gucagcaaggauaaaugcu

SEQ ID NO: 2386676 - RNA, 19 nt, Artificial Sequence
  Description of Artificial Sequence: Synthetic oligonucleotide
  Sense strand starting at position 3240 of SEQ ID NO: 1886083
acuguaauuugagaaccau

SEQ ID NO: 2386677 - RNA, 19 nt, Artificial Sequence
  Description of Artificial Sequence: Synthetic oligonucleotide
  Antisense strand to SEQ ID NO: 2386676
augguucucaaauuacagu

SEQ ID NO: 2386678 - RNA, 19 nt, Artificial Sequence
  Description of Artificial Sequence: Synthetic oligonucleotide
  Sense strand starting at position 3288 of SEQ ID NO: 1886083
cccugagugaacuguuaag

SEQ ID NO: 2386679 - RNA, 19 nt, Artificial Sequence
  Description of Artificial Sequence: Synthetic oligonucleotide
  Antisense strand to SEQ ID NO: 2386678
cuuaacaguucacucaggg

SEQ ID NO: 2386680 - RNA, 19 nt, Artificial Sequence
  Description of Artificial Sequence: Synthetic oligonucleotide
  Sense strand starting at position 3315 of SEQ ID NO: 1886083
gugcccaaggguuaaacua

SEQ ID NO: 2386681 - RNA, 19 nt, Artificial Sequence
  Description of Artificial Sequence: Synthetic oligonucleotide
  Antisense strand to SEQ ID NO: 2386680
uaguuuaacccuugggcac

SEQ ID NO: 2386682 - RNA, 19 nt, Artificial Sequence
  Description of Artificial Sequence: Synthetic oligonucleotide
  Sense strand starting at position 3405 of SEQ ID NO: 1886083
cagugagacccaggugauu

SEQ ID NO: 2386683 - RNA, 19 nt, Artificial Sequence
  Description of Artificial Sequence: Synthetic oligonucleotide
  Antisense strand to SEQ ID NO: 2386682
aaucaccugggucucacug

SEQ ID NO: 2386684 - RNA, 19 nt, Artificial Sequence
  Description of Artificial Sequence: Synthetic oligonucleotide
  Sense strand starting at position 3471 of SEQ ID NO: 1886083
gcauuauaaggugggaaga

SEQ ID NO: 2386685 - RNA, 19 nt, Artificial Sequence
  Description of Artificial Sequence: Synthetic oligonucleotide
  Antisense strand to SEQ ID NO: 2386684
ucuucccaccuuauaaugc

SEQ ID NO: 2386686 - RNA, 19 nt, Artificial Sequence
  Description of Artificial Sequence: Synthetic oligonucleotide
  Sense strand starting at position 3535 of SEQ ID NO: 1886083
ucauaauaggugugaccuu

SEQ ID NO: 2386687 - RNA, 19 nt, Artificial Sequence
  Description of Artificial Sequence: Synthetic oligonucleotide
  Antisense strand to SEQ ID NO: 2386686
aaggucacaccuauuauga

SEQ ID NO: 2386688 - RNA, 19 nt, Artificial Sequence
  Description of Artificial Sequence: Synthetic oligonucleotide
  Sense strand starting at position 3563 of SEQ ID NO: 1886083
guaguuguaacugaagcaa

SEQ ID NO: 2386689 - RNA, 19 nt, Artificial Sequence
  Description of Artificial Sequence: Synthetic oligonucleotide
  Antisense strand to SEQ ID NO: 2386688
uugcuucaguuacaacuac

SEQ ID NO: 2386690 - RNA, 19 nt, Artificial Sequence
  Description of Artificial Sequence: Synthetic oligonucleotide
  Sense strand starting at position 3667 of SEQ ID NO: 1886083
augggaugugcuugaacag

SEQ ID NO: 2386691 - RNA, 19 nt, Artificial Sequence
  Description of Artificial Sequence: Synthetic oligonucleotide
  Antisense strand to SEQ ID NO: 2386690
cuguucaagcacaucccau

SEQ ID NO: 2386692 - RNA, 19 nt, Artificial Sequence
  Description of Artificial Sequence: Synthetic oligonucleotide
  Sense strand starting at position 3885 of SEQ ID NO: 1886083
ugacaugcccauggucaaa

SEQ ID NO: 2386693 - RNA, 19 nt, Artificial Sequence
  Description of Artificial Sequence: Synthetic oligonucleotide
  Antisense strand to SEQ ID NO: 2386692
uuugaccaugggcauguca

SEQ ID NO: 2386694 - RNA, 19 nt, Artificial Sequence
  Description of Artificial Sequence: Synthetic oligonucleotide
  Sense strand starting at position 3887 of SEQ ID NO: 1886083
acaugcccauggucaaaua

SEQ ID NO: 2386695 - RNA, 19 nt, Artificial Sequence
  Description of Artificial Sequence: Synthetic oligonucleotide
  Antisense strand to SEQ ID NO: 2386694
uauuugaccaugggcaugu

SEQ ID NO: 2386696 - RNA, 19 nt, Artificial Sequence
  Description of Artificial Sequence: Synthetic oligonucleotide
  Sense strand starting at position 55 of SEQ ID NO: 1886084
guaagaaggucucuagauc

SEQ ID NO: 2386697 - RNA, 19 nt, Artificial Sequence
  Description of Artificial Sequence: Synthetic oligonucleotide
  Antisense strand to SEQ ID NO: 2386696
gaucuagagaccuucuuac

SEQ ID NO: 2386698 - RNA, 19 nt, Artificial Sequence
  Description of Artificial Sequence: Synthetic oligonucleotide
  Sense strand starting at position 182 of SEQ ID NO: 1886084
uaaagagugcuggaugcuu

SEQ ID NO: 2386699 - RNA, 19 nt, Artificial Sequence
  Description of Artificial Sequence: Synthetic oligonucleotide
  Antisense strand to SEQ ID NO: 2386698
aagcauccagcacucuuua

SEQ ID NO: 2386700 - RNA, 19 nt, Artificial Sequence
  Description of Artificial Sequence: Synthetic oligonucleotide
  Sense strand starting at position 190 of SEQ ID NO: 1886084
gcuggaugcuuauuagaug

SEQ ID NO: 2386701 - RNA, 19 nt, Artificial Sequence
  Description of Artificial Sequence: Synthetic oligonucleotide
  Antisense strand to SEQ ID NO: 2386700
caucuaauaagcauccagc

SEQ ID NO: 2386702 - RNA, 19 nt, Artificial Sequence
  Description of Artificial Sequence: Synthetic oligonucleotide
  Sense strand starting at position 238 of SEQ ID NO: 1886084
caaagagagcucugagucu

SEQ ID NO: 2386703 - RNA, 19 nt, Artificial Sequence
  Description of Artificial Sequence: Synthetic oligonucleotide
  Antisense strand to SEQ ID NO: 2386702
agacucagagcucucuuug

SEQ ID NO: 2386704 - RNA, 19 nt, Artificial Sequence
  Description of Artificial Sequence: Synthetic oligonucleotide
  Sense strand starting at position 298 of SEQ ID NO: 1886084
agcauuacuugcuuuagga

SEQ ID NO: 2386705 - RNA, 19 nt, Artificial Sequence
  Description of Artificial Sequence: Synthetic oligonucleotide
  Antisense strand to SEQ ID NO: 2386704
uccuaaagcaaguaaugcu

SEQ ID NO: 2386706 - RNA, 19 nt, Artificial Sequence
  Description of Artificial Sequence: Synthetic oligonucleotide
  Sense strand starting at position 393 of SEQ ID NO: 1886084
uaaagauaccgugguaaac

SEQ ID NO: 2386707 - RNA, 19 nt, Artificial Sequence
  Description of Artificial Sequence: Synthetic oligonucleotide
  Antisense strand to SEQ ID NO: 2386706
guuuaccacgguaucuuua

SEQ ID NO: 2386708 - RNA, 19 nt, Artificial Sequence
  Description of Artificial Sequence: Synthetic oligonucleotide
  Sense strand starting at position 498 of SEQ ID NO: 1886084
guaugaaugcugcaaagaa

SEQ ID NO: 2386709 - RNA, 19 nt, Artificial Sequence
  Description of Artificial Sequence: Synthetic oligonucleotide
  Antisense strand to SEQ ID NO: 2386708
uucuuugcagcauucauac

SEQ ID NO: 2386710 - RNA, 19 nt, Artificial Sequence
  Description of Artificial Sequence: Synthetic oligonucleotide
  Sense strand starting at position 913 of SEQ ID NO: 1886084
gugagcuuucagcagagac

SEQ ID NO: 2386711 - RNA, 19 nt, Artificial Sequence
  Description of Artificial Sequence: Synthetic oligonucleotide
  Antisense strand to SEQ ID NO: 2386710
gucucugcugaaagcucac

SEQ ID NO: 2386712 - RNA, 19 nt, Artificial Sequence
  Description of Artificial Sequence: Synthetic oligonucleotide
  Sense strand starting at position 1224 of SEQ ID NO: 1886084
guaguuaagaccugagauc

SEQ ID NO: 2386713 - RNA, 19 nt, Artificial Sequence
  Description of Artificial Sequence: Synthetic oligonucleotide
  Antisense strand to SEQ ID NO: 2386712
gaucucaggucuuaacuac

SEQ ID NO: 2386714 - RNA, 19 nt, Artificial Sequence
  Description of Artificial Sequence: Synthetic oligonucleotide
  Sense strand starting at position 1231 of SEQ ID NO: 1886084
agaccugagaucuggccau

SEQ ID NO: 2386715 - RNA, 19 nt, Artificial Sequence
  Description of Artificial Sequence: Synthetic oligonucleotide
  Antisense strand to SEQ ID NO: 2386714
auggccagaucucaggucu

SEQ ID NO: 2386716 - RNA, 19 nt, Artificial Sequence
  Description of Artificial Sequence: Synthetic oligonucleotide
  Sense strand starting at position 1235 of SEQ ID NO: 1886084
cugagaucuggccauaagc

SEQ ID NO: 2386717 - RNA, 19 nt, Artificial Sequence
  Description of Artificial Sequence: Synthetic oligonucleotide
  Antisense strand to SEQ ID NO: 2386716
gcuuauggccagaucucag

SEQ ID NO: 2386718 - RNA, 19 nt, Artificial Sequence
  Description of Artificial Sequence: Synthetic oligonucleotide
  Sense strand starting at position 1237 of SEQ ID NO: 1886084
gagaucuggccauaagccu

SEQ ID NO: 2386719 - RNA, 19 nt, Artificial Sequence
  Description of Artificial Sequence: Synthetic oligonucleotide
  Antisense strand to SEQ ID NO: 2386718
aggcuuauggccagaucuc

SEQ ID NO: 2386720 - RNA, 19 nt, Artificial Sequence
  Description of Artificial Sequence: Synthetic oligonucleotide
  Sense strand starting at position 1243 of SEQ ID NO: 1886084
uggccauaagccuaagagu

SEQ ID NO: 2386721 - RNA, 19 nt, Artificial Sequence
  Description of Artificial Sequence: Synthetic oligonucleotide
  Antisense strand to SEQ ID NO: 2386720
acucuuaggcuuauggcca

SEQ ID NO: 2386722 - RNA, 19 nt, Artificial Sequence
  Description of Artificial Sequence: Synthetic oligonucleotide
  Sense strand starting at position 1265 of SEQ ID NO: 1886084
cuugcucugccuuaaagga

SEQ ID NO: 2386723 - RNA, 19 nt, Artificial Sequence
  Description of Artificial Sequence: Synthetic oligonucleotide
  Antisense strand to SEQ ID NO: 2386722
uccuuuaaggcagagcaag

SEQ ID NO: 2386724 - RNA, 19 nt, Artificial Sequence
  Description of Artificial Sequence: Synthetic oligonucleotide
  Sense strand starting at position 1446 of SEQ ID NO: 1886084
augagaaguagucggaaga

SEQ ID NO: 2386725 - RNA, 19 nt, Artificial Sequence
  Description of Artificial Sequence: Synthetic oligonucleotide
  Antisense strand to SEQ ID NO: 2386724
ucuuccgacuacuucucau

SEQ ID NO: 2386726 - RNA, 19 nt, Artificial Sequence
  Description of Artificial Sequence: Synthetic oligonucleotide
  Sense strand starting at position 1447 of SEQ ID NO: 1886084
ugagaaguagucggaagau

SEQ ID NO: 2386727 - RNA, 19 nt, Artificial Sequence
  Description of Artificial Sequence: Synthetic oligonucleotide
  Antisense strand to SEQ ID NO: 2386726
aucuuccgacuacuucuca

SEQ ID NO: 2386728 - RNA, 19 nt, Artificial Sequence
  Description of Artificial Sequence: Synthetic oligonucleotide
  Sense strand starting at position 1479 of SEQ ID NO: 1886084
aggcuuuacugcuuacaaa

SEQ ID NO: 2386729 - RNA, 19 nt, Artificial Sequence
  Description of Artificial Sequence: Synthetic oligonucleotide
  Antisense strand to SEQ ID NO: 2386728
uuuguaagcaguaaagccu

SEQ ID NO: 2386730 - RNA, 19 nt, Artificial Sequence
  Description of Artificial Sequence: Synthetic oligonucleotide
  Sense strand starting at position 1480 of SEQ ID NO: 1886084
ggcuuuacugcuuacaaac

SEQ ID NO: 2386731 - RNA, 19 nt, Artificial Sequence
  Description of Artificial Sequence: Synthetic oligonucleotide
  Antisense strand to SEQ ID NO: 2386730
guuuguaagcaguaaagcc

SEQ ID NO: 2386732 - RNA, 19 nt, Artificial Sequence
  Description of Artificial Sequence: Synthetic oligonucleotide
  Sense strand starting at position 1612 of SEQ ID NO: 1886084
caggcuguccuagagguua

SEQ ID NO: 2386733 - RNA, 19 nt, Artificial Sequence
  Description of Artificial Sequence: Synthetic oligonucleotide
  Antisense strand to SEQ ID NO: 2386732
uaaccucuaggacagccug

SEQ ID NO: 2386734 - RNA, 19 nt, Artificial Sequence
  Description of Artificial Sequence: Synthetic oligonucleotide
  Sense strand starting at position 1649 of SEQ ID NO: 1886084
gcauguuucuuacccaaga

SEQ ID NO: 2386735 - RNA, 19 nt, Artificial Sequence
  Description of Artificial Sequence: Synthetic oligonucleotide
  Antisense strand to SEQ ID NO: 2386734
ucuuggguaagaaacaugc

SEQ ID NO: 2386736 - RNA, 19 nt, Artificial Sequence
  Description of Artificial Sequence: Synthetic oligonucleotide
  Sense strand starting at position 1691 of SEQ ID NO: 1886084
ugagguauuaugcaacuga

SEQ ID NO: 2386737 - RNA, 19 nt, Artificial Sequence
  Description of Artificial Sequence: Synthetic oligonucleotide
  Antisense strand to SEQ ID NO: 2386736
ucaguugcauaauaccuca

SEQ ID NO: 2386738 - RNA, 19 nt, Artificial Sequence
  Description of Artificial Sequence: Synthetic oligonucleotide
  Sense strand starting at position 1826 of SEQ ID NO: 1886084
uugccagaaugcuccagaa

SEQ ID NO: 2386739 - RNA, 19 nt, Artificial Sequence
  Description of Artificial Sequence: Synthetic oligonucleotide
  Antisense strand to SEQ ID NO: 2386738
uucuggagcauucuggcaa

SEQ ID NO: 2386740 - RNA, 19 nt, Artificial Sequence
  Description of Artificial Sequence: Synthetic oligonucleotide
  Sense strand starting at position 1828 of SEQ ID NO: 1886084
gccagaaugcuccagaaca

SEQ ID NO: 2386741 - RNA, 19 nt, Artificial Sequence
  Description of Artificial Sequence: Synthetic oligonucleotide
  Antisense strand to SEQ ID NO: 2386740
uguucuggagcauucuggc

SEQ ID NO: 2386742 - RNA, 19 nt, Artificial Sequence
  Description of Artificial Sequence: Synthetic oligonucleotide
  Sense strand starting at position 1830 of SEQ ID NO: 1886084
cagaaugcuccagaacagu

SEQ ID NO: 2386743 - RNA, 19 nt, Artificial Sequence
  Description of Artificial Sequence: Synthetic oligonucleotide
  Antisense strand to SEQ ID NO: 2386742
acuguucuggagcauucug

SEQ ID NO: 2386744 - RNA, 19 nt, Artificial Sequence
  Description of Artificial Sequence: Synthetic oligonucleotide
  Sense strand starting at position 1917 of SEQ ID NO: 1886084
aggauaaacucugaggaau

SEQ ID NO: 2386745 - RNA, 19 nt, Artificial Sequence
  Description of Artificial Sequence: Synthetic oligonucleotide
  Antisense strand to SEQ ID NO: 2386744
auuccucagaguuuauccu

SEQ ID NO: 2386746 - RNA, 19 nt, Artificial Sequence
  Description of Artificial Sequence: Synthetic oligonucleotide
  Sense strand starting at position 2046 of SEQ ID NO: 1886084
ugcagauuacccuagcaca

SEQ ID NO: 2386747 - RNA, 19 nt, Artificial Sequence
  Description of Artificial Sequence: Synthetic oligonucleotide
  Antisense strand to SEQ ID NO: 2386746
ugugcuaggguaaucugca

SEQ ID NO: 2386748 - RNA, 19 nt, Artificial Sequence
  Description of Artificial Sequence: Synthetic oligonucleotide
  Sense strand starting at position 2360 of SEQ ID NO: 1886084
agcaucucucuagaauguu

SEQ ID NO: 2386749 - RNA, 19 nt, Artificial Sequence
  Description of Artificial Sequence: Synthetic oligonucleotide
  Antisense strand to SEQ ID NO: 2386748
aacauucuagagagaugcu

SEQ ID NO: 2386750 - RNA, 19 nt, Artificial Sequence
  Description of Artificial Sequence: Synthetic oligonucleotide
  Sense strand starting at position 2470 of SEQ ID NO: 1886084
cauggaguuuguguaagag

SEQ ID NO: 2386751 - RNA, 19 nt, Artificial Sequence
  Description of Artificial Sequence: Synthetic oligonucleotide
  Antisense strand to SEQ ID NO: 2386750
cucuuacacaaacuccaug

SEQ ID NO: 2386752 - RNA, 19 nt, Artificial Sequence
  Description of Artificial Sequence: Synthetic oligonucleotide
  Sense strand starting at position 2549 of SEQ ID NO: 1886084
accagucucuuauugauga

SEQ ID NO: 2386753 - RNA, 19 nt, Artificial Sequence
  Description of Artificial Sequence: Synthetic oligonucleotide
  Antisense strand to SEQ ID NO: 2386752
ucaucaauaagagacuggu

SEQ ID NO: 2386754 - RNA, 19 nt, Artificial Sequence
  Description of Artificial Sequence: Synthetic oligonucleotide
  Sense strand starting at position 2554 of SEQ ID NO: 1886084
ucucuuauugaugaguauc

SEQ ID NO: 2386755 - RNA, 19 nt, Artificial Sequence
  Description of Artificial Sequence: Synthetic oligonucleotide
  Antisense strand to SEQ ID NO: 2386754
gauacucaucaauaagaga

SEQ ID NO: 2386756 - RNA, 19 nt, Artificial Sequence
  Description of Artificial Sequence: Synthetic oligonucleotide
  Sense strand starting at position 2657 of SEQ ID NO: 1886084
cggauaagagcuggaauca

SEQ ID NO: 2386757 - RNA, 19 nt, Artificial Sequence
  Description of Artificial Sequence: Synthetic oligonucleotide
  Antisense strand to SEQ ID NO: 2386756
ugauuccagcucuuauccg

SEQ ID NO: 2386758 - RNA, 19 nt, Artificial Sequence
  Description of Artificial Sequence: Synthetic oligonucleotide
  Sense strand starting at position 2669 of SEQ ID NO: 1886084
ggaaucagaucccauuucu

SEQ ID NO: 2386759 - RNA, 19 nt, Artificial Sequence
  Description of Artificial Sequence: Synthetic oligonucleotide
  Antisense strand to SEQ ID NO: 2386758
agaaaugggaucugauucc

SEQ ID NO: 2386760 - RNA, 19 nt, Artificial Sequence
  Description of Artificial Sequence: Synthetic oligonucleotide
  Sense strand starting at position 2717 of SEQ ID NO: 1886084
agaguccuauuaucuuauu

SEQ ID NO: 2386761 - RNA, 19 nt, Artificial Sequence
  Description of Artificial Sequence: Synthetic oligonucleotide
  Antisense strand to SEQ ID NO: 2386760
aauaagauaauaggacucu

SEQ ID NO: 2386762 - RNA, 19 nt, Artificial Sequence
  Description of Artificial Sequence: Synthetic oligonucleotide
  Sense strand starting at position 3038 of SEQ ID NO: 1886084
acuaucuaaugucuaaguu

SEQ ID NO: 2386763 - RNA, 19 nt, Artificial Sequence
  Description of Artificial Sequence: Synthetic oligonucleotide
  Antisense strand to SEQ ID NO: 2386762
aacuuagacauuagauagu

SEQ ID NO: 2386764 - RNA, 19 nt, Artificial Sequence
  Description of Artificial Sequence: Synthetic oligonucleotide
  Sense strand starting at position 3039 of SEQ ID NO: 1886084
cuaucuaaugucuaaguua

SEQ ID NO: 2386765 - RNA, 19 nt, Artificial Sequence
  Description of Artificial Sequence: Synthetic oligonucleotide
  Antisense strand to SEQ ID NO: 2386764
uaacuuagacauuagauag

SEQ ID NO: 2386766 - RNA, 19 nt, Artificial Sequence
  Description of Artificial Sequence: Synthetic oligonucleotide
  Sense strand starting at position 3042 of SEQ ID NO: 1886084
ucuaaugucuaaguuacuu

SEQ ID NO: 2386767 - RNA, 19 nt, Artificial Sequence
  Description of Artificial Sequence: Synthetic oligonucleotide
  Antisense strand to SEQ ID NO: 2386766
aaguaacuuagacauuaga

SEQ ID NO: 2386768 - RNA, 19 nt, Artificial Sequence
  Description of Artificial Sequence: Synthetic oligonucleotide
  Sense strand starting at position 3135 of SEQ ID NO: 1886084
ugauaaaggugucuuugac

SEQ ID NO: 2386769 - RNA, 19 nt, Artificial Sequence
  Description of Artificial Sequence: Synthetic oligonucleotide
  Antisense strand to SEQ ID NO: 2386768
gucaaagacaccuuuauca

SEQ ID NO: 2386770 - RNA, 19 nt, Artificial Sequence
  Description of Artificial Sequence: Synthetic oligonucleotide
  Sense strand starting at position 3254 of SEQ ID NO: 1886084
aggccaaucucugucagga

SEQ ID NO: 2386771 - RNA, 19 nt, Artificial Sequence
  Description of Artificial Sequence: Synthetic oligonucleotide
  Antisense strand to SEQ ID NO: 2386770
uccugacagagauuggccu

SEQ ID NO: 2386772 - RNA, 19 nt, Artificial Sequence
  Description of Artificial Sequence: Synthetic oligonucleotide
  Sense strand starting at position 3320 of SEQ ID NO: 1886084
agauaaugcuugccaagua

SEQ ID NO: 2386773 - RNA, 19 nt, Artificial Sequence
  Description of Artificial Sequence: Synthetic oligonucleotide
  Antisense strand to SEQ ID NO: 2386772
uacuuggcaagcauuaucu

SEQ ID NO: 2386774 - RNA, 19 nt, Artificial Sequence
  Description of Artificial Sequence: Synthetic oligonucleotide
  Sense strand starting at position 3433 of SEQ ID NO: 1886084
caagguguuccaggcaaag

SEQ ID NO: 2386775 - RNA, 19 nt, Artificial Sequence
  Description of Artificial Sequence: Synthetic oligonucleotide
  Antisense strand to SEQ ID NO: 2386774
cuuugccuggaacaccuug

SEQ ID NO: 2386776 - RNA, 19 nt, Artificial Sequence
  Description of Artificial Sequence: Synthetic oligonucleotide
  Sense strand starting at position 353 of SEQ ID NO: 1886085
uuacaugucucccaccaga

SEQ ID NO: 2386777 - RNA, 19 nt, Artificial Sequence
  Description of Artificial Sequence: Synthetic oligonucleotide
  Antisense strand to SEQ ID NO: 2386776
ucuggugggagacauguaa

SEQ ID NO: 2386778 - RNA, 19 nt, Artificial Sequence
  Description of Artificial Sequence: Synthetic oligonucleotide
  Sense strand starting at position 395 of SEQ ID NO: 1886085
agcagcagcuguuaaauua

SEQ ID NO: 2386779 - RNA, 19 nt, Artificial Sequence
  Description of Artificial Sequence: Synthetic oligonucleotide
  Antisense strand to SEQ ID NO: 2386778
uaauuuaacagcugcugcu

SEQ ID NO: 2386780 - RNA, 19 nt, Artificial Sequence
  Description of Artificial Sequence: Synthetic oligonucleotide
  Sense strand starting at position 402 of SEQ ID NO: 1886085
gcuguuaaauuaucagcaa

SEQ ID NO: 2386781 - RNA, 19 nt, Artificial Sequence
  Description of Artificial Sequence: Synthetic oligonucleotide
  Antisense strand to SEQ ID NO: 2386780
uugcugauaauuuaacagc

SEQ ID NO: 2386782 - RNA, 19 nt, Artificial Sequence
  Description of Artificial Sequence: Synthetic oligonucleotide
  Sense strand starting at position 449 of SEQ ID NO: 1886085
ugggcaguguauuccauua

SEQ ID NO: 2386783 - RNA, 19 nt, Artificial Sequence
  Description of Artificial Sequence: Synthetic oligonucleotide
  Antisense strand to SEQ ID NO: 2386782
uaauggaauacacugccca

SEQ ID NO: 2386784 - RNA, 19 nt, Artificial Sequence
  Description of Artificial Sequence: Synthetic oligonucleotide
  Sense strand starting at position 612 of SEQ ID NO: 1886085
agauaagcguggccacauu

SEQ ID NO: 2386785 - RNA, 19 nt, Artificial Sequence
  Description of Artificial Sequence: Synthetic oligonucleotide
  Antisense strand to SEQ ID NO: 2386784
aauguggccacgcuuaucu

SEQ ID NO: 2386786 - RNA, 19 nt, Artificial Sequence
  Description of Artificial Sequence: Synthetic oligonucleotide
  Sense strand starting at position 643 of SEQ ID NO: 1886085
ucuuuauggacauggaagu

SEQ ID NO: 2386787 - RNA, 19 nt, Artificial Sequence
  Description of Artificial Sequence: Synthetic oligonucleotide
  Antisense strand to SEQ ID NO: 2386786
acuuccauguccauaaaga

SEQ ID NO: 2386788 - RNA, 19 nt, Artificial Sequence
  Description of Artificial Sequence: Synthetic oligonucleotide
  Sense strand starting at position 653 of SEQ ID NO: 1886085
cauggaaguuugcaucuca

SEQ ID NO: 2386789 - RNA, 19 nt, Artificial Sequence
  Description of Artificial Sequence: Synthetic oligonucleotide
  Antisense strand to SEQ ID NO: 2386788
ugagaugcaaacuuccaug

SEQ ID NO: 2386790 - RNA, 19 nt, Artificial Sequence
  Description of Artificial Sequence: Synthetic oligonucleotide
  Sense strand starting at position 658 of SEQ ID NO: 1886085
aaguuugcaucucacguaa

SEQ ID NO: 2386791 - RNA, 19 nt, Artificial Sequence
  Description of Artificial Sequence: Synthetic oligonucleotide
  Antisense strand to SEQ ID NO: 2386790
uuacgugagaugcaaacuu

SEQ ID NO: 2386792 - RNA, 19 nt, Artificial Sequence
  Description of Artificial Sequence: Synthetic oligonucleotide
  Sense strand starting at position 660 of SEQ ID NO: 1886085
guuugcaucucacguaauu

SEQ ID NO: 2386793 - RNA, 19 nt, Artificial Sequence
  Description of Artificial Sequence: Synthetic oligonucleotide
  Antisense strand to SEQ ID NO: 2386792
aauuacgugagaugcaaac

SEQ ID NO: 2386794 - RNA, 19 nt, Artificial Sequence
  Description of Artificial Sequence: Synthetic oligonucleotide
  Sense strand starting at position 669 of SEQ ID NO: 1886085
ucacguaauucucaugugu

SEQ ID NO: 2386795 - RNA, 19 nt, Artificial Sequence
  Description of Artificial Sequence: Synthetic oligonucleotide
  Antisense strand to SEQ ID NO: 2386794
acacaugagaauuacguga

SEQ ID NO: 2386796 - RNA, 19 nt, Artificial Sequence
  Description of Artificial Sequence: Synthetic oligonucleotide
  Sense strand starting at position 671 of SEQ ID NO: 1886085
acguaauucucauguguca

SEQ ID NO: 2386797 - RNA, 19 nt, Artificial Sequence
  Description of Artificial Sequence: Synthetic oligonucleotide
  Antisense strand to SEQ ID NO: 2386796
ugacacaugagaauuacgu

SEQ ID NO: 2386798 - RNA, 19 nt, Artificial Sequence
  Description of Artificial Sequence: Synthetic oligonucleotide
  Sense strand starting at position 676 of SEQ ID NO: 1886085
auucucaugugucacaaga

SEQ ID NO: 2386799 - RNA, 19 nt, Artificial Sequence
  Description of Artificial Sequence: Synthetic oligonucleotide
  Antisense strand to SEQ ID NO: 2386798
ucuugugacacaugagaau

SEQ ID NO: 2386800 - RNA, 19 nt, Artificial Sequence
  Description of Artificial Sequence: Synthetic oligonucleotide
  Sense strand starting at position 678 of SEQ ID NO: 1886085
ucucaugugucacaagaua

SEQ ID NO: 2386801 - RNA, 19 nt, Artificial Sequence
  Description of Artificial Sequence: Synthetic oligonucleotide
  Antisense strand to SEQ ID NO: 2386800
uaucuugugacacaugaga

SEQ ID NO: 2386802 - RNA, 19 nt, Artificial Sequence
  Description of Artificial Sequence: Synthetic oligonucleotide
  Sense strand starting at position 921 of SEQ ID NO: 1886085
gcuggugcuguaugaaguu

SEQ ID NO: 2386803 - RNA, 19 nt, Artificial Sequence
  Description of Artificial Sequence: Synthetic oligonucleotide
  Antisense strand to SEQ ID NO: 2386802
aacuucauacagcaccagc

SEQ ID NO: 2386804 - RNA, 19 nt, Artificial Sequence
  Description of Artificial Sequence: Synthetic oligonucleotide
  Sense strand starting at position 931 of SEQ ID NO: 1886085
uaugaaguuuggcugcaga

SEQ ID NO: 2386805 - RNA, 19 nt, Artificial Sequence
  Description of Artificial Sequence: Synthetic oligonucleotide
  Antisense strand to SEQ ID NO: 2386804
ucugcagccaaacuucaua

SEQ ID NO: 2386806 - RNA, 19 nt, Artificial Sequence
  Description of Artificial Sequence: Synthetic oligonucleotide
  Sense strand starting at position 993 of SEQ ID NO: 1886085
ccuugaguucugggcacuu

SEQ ID NO: 2386807 - RNA, 19 nt, Artificial Sequence
  Description of Artificial Sequence: Synthetic oligonucleotide
  Antisense strand to SEQ ID NO: 2386806
aagugcccagaacucaagg

SEQ ID NO: 2386808 - RNA, 19 nt, Artificial Sequence
  Description of Artificial Sequence: Synthetic oligonucleotide
  Sense strand starting at position 1032 of SEQ ID NO: 1886085
ggugaaguggcgggaugaa

SEQ ID NO: 2386809 - RNA, 19 nt, Artificial Sequence
  Description of Artificial Sequence: Synthetic oligonucleotide
  Antisense strand to SEQ ID NO: 2386808
uucaucccgccacuucacc

SEQ ID NO: 2386810 - RNA, 19 nt, Artificial Sequence
  Description of Artificial Sequence: Synthetic oligonucleotide
  Sense strand starting at position 1063 of SEQ ID NO: 1886085
ggaagaagccucgggaaga

SEQ ID NO: 2386811 - RNA, 19 nt, Artificial Sequence
  Description of Artificial Sequence: Synthetic oligonucleotide
  Antisense strand to SEQ ID NO: 2386810
ucuucccgaggcuucuucc

SEQ ID NO: 2386812 - RNA, 19 nt, Artificial Sequence
  Description of Artificial Sequence: Synthetic oligonucleotide
  Sense strand starting at position 1064 of SEQ ID NO: 1886085
gaagaagccucgggaagau

SEQ ID NO: 2386813 - RNA, 19 nt, Artificial Sequence
  Description of Artificial Sequence: Synthetic oligonucleotide
  Antisense strand to SEQ ID NO: 2386812
aucuucccgaggcuucuuc

SEQ ID NO: 2386814 - RNA, 19 nt, Artificial Sequence
  Description of Artificial Sequence: Synthetic oligonucleotide
  Sense strand starting at position 1094 of SEQ ID NO: 1886085
ggacaagacuuugguagag

SEQ ID NO: 2386815 - RNA, 19 nt, Artificial Sequence
  Description of Artificial Sequence: Synthetic oligonucleotide
  Antisense strand to SEQ ID NO: 2386814
cucuaccaaagucuugucc

SEQ ID NO: 2386816 - RNA, 19 nt, Artificial Sequence
  Description of Artificial Sequence: Synthetic oligonucleotide
  Sense strand starting at position 1096 of SEQ ID NO: 1886085
acaagacuuugguagagcu

SEQ ID NO: 2386817 - RNA, 19 nt, Artificial Sequence
  Description of Artificial Sequence: Synthetic oligonucleotide
  Antisense strand to SEQ ID NO: 2386816
agcucuaccaaagucuugu

SEQ ID NO: 2386818 - RNA, 19 nt, Artificial Sequence
  Description of Artificial Sequence: Synthetic oligonucleotide
  Sense strand starting at position 1541 of SEQ ID NO: 1886085
ucuacaugcccugaucuga

SEQ ID NO: 2386819 - RNA, 19 nt, Artificial Sequence
  Description of Artificial Sequence: Synthetic oligonucleotide
  Antisense strand to SEQ ID NO: 2386818
ucagaucagggcauguaga

SEQ ID NO: 2386820 - RNA, 19 nt, Artificial Sequence
  Description of Artificial Sequence: Synthetic oligonucleotide
  Sense strand starting at position 1623 of SEQ ID NO: 1886085
agcaacuucuggugccaga

SEQ ID NO: 2386821 - RNA, 19 nt, Artificial Sequence
  Description of Artificial Sequence: Synthetic oligonucleotide
  Antisense strand to SEQ ID NO: 2386820
ucuggcaccagaaguugcu

SEQ ID NO: 2386822 - RNA, 19 nt, Artificial Sequence
  Description of Artificial Sequence: Synthetic oligonucleotide
  Sense strand starting at position 1636 of SEQ ID NO: 1886085
gccagauucugccuucuca

SEQ ID NO: 2386823 - RNA, 19 nt, Artificial Sequence
  Description of Artificial Sequence: Synthetic oligonucleotide
  Antisense strand to SEQ ID NO: 2386822
ugagaaggcagaaucuggc

SEQ ID NO: 2386824 - RNA, 19 nt, Artificial Sequence
  Description of Artificial Sequence: Synthetic oligonucleotide
  Sense strand starting at position 1643 of SEQ ID NO: 1886085
ucugccuucucagaagucu

SEQ ID NO: 2386825 - RNA, 19 nt, Artificial Sequence
  Description of Artificial Sequence: Synthetic oligonucleotide
  Antisense strand to SEQ ID NO: 2386824
agacuucugagaaggcaga

SEQ ID NO: 2386826 - RNA, 19 nt, Artificial Sequence
  Description of Artificial Sequence: Synthetic oligonucleotide
  Sense strand starting at position 1651 of SEQ ID NO: 1886085
cucagaagucugggaggca

SEQ ID NO: 2386827 - RNA, 19 nt, Artificial Sequence
  Description of Artificial Sequence: Synthetic oligonucleotide
  Antisense strand to SEQ ID NO: 2386826
ugccucccagacuucugag

SEQ ID NO: 2386828 - RNA, 19 nt, Artificial Sequence
  Description of Artificial Sequence: Synthetic oligonucleotide
  Sense strand starting at position 1783 of SEQ ID NO: 1886085
gccuccugcucgucacauu

SEQ ID NO: 2386829 - RNA, 19 nt, Artificial Sequence
  Description of Artificial Sequence: Synthetic oligonucleotide
  Antisense strand to SEQ ID NO: 2386828
aaugugacgagcaggaggc

SEQ ID NO: 2386830 - RNA, 19 nt, Artificial Sequence
  Description of Artificial Sequence: Synthetic oligonucleotide
  Sense strand starting at position 1802 of SEQ ID NO: 1886085
cacccuuguccuggugagu

SEQ ID NO: 2386831 - RNA, 19 nt, Artificial Sequence
  Description of Artificial Sequence: Synthetic oligonucleotide
  Antisense strand to SEQ ID NO: 2386830
acucaccaggacaagggug

SEQ ID NO: 2386832 - RNA, 19 nt, Artificial Sequence
  Description of Artificial Sequence: Synthetic oligonucleotide
  Sense strand starting at position 2683 of SEQ ID NO: 1886085
gcugcucccucugcugaaa

SEQ ID NO: 2386833 - RNA, 19 nt, Artificial Sequence
  Description of Artificial Sequence: Synthetic oligonucleotide
  Antisense strand to SEQ ID NO: 2386832
uuucagcagagggagcagc

SEQ ID NO: 2386834 - RNA, 19 nt, Artificial Sequence
  Description of Artificial Sequence: Synthetic oligonucleotide
  Sense strand starting at position 2774 of SEQ ID NO: 1886085
gaggaaugaauccgaaguu

SEQ ID NO: 2386835 - RNA, 19 nt, Artificial Sequence
  Description of Artificial Sequence: Synthetic oligonucleotide
  Antisense strand to SEQ ID NO: 2386834
aacuucggauucauuccuc

SEQ ID NO: 2386836 - RNA, 19 nt, Artificial Sequence
  Description of Artificial Sequence: Synthetic oligonucleotide
  Sense strand starting at position 2863 of SEQ ID NO: 1886085
agggcuucuucccuccgaa

SEQ ID NO: 2386837 - RNA, 19 nt, Artificial Sequence
  Description of Artificial Sequence: Synthetic oligonucleotide
  Antisense strand to SEQ ID NO: 2386836
uucggagggaagaagcccu

SEQ ID NO: 2386838 - RNA, 19 nt, Artificial Sequence
  Description of Artificial Sequence: Synthetic oligonucleotide
  Sense strand starting at position 2979 of SEQ ID NO: 1886085
ggugcauaaaguugaggaa

SEQ ID NO: 2386839 - RNA, 19 nt, Artificial Sequence
  Description of Artificial Sequence: Synthetic oligonucleotide
  Antisense strand to SEQ ID NO: 2386838
uuccucaacuuuaugcacc

SEQ ID NO: 2386840 - RNA, 19 nt, Artificial Sequence
  Description of Artificial Sequence: Synthetic oligonucleotide
  Sense strand starting at position 3077 of SEQ ID NO: 1886085
agguauuggucucguuuac

SEQ ID NO: 2386841 - RNA, 19 nt, Artificial Sequence
  Description of Artificial Sequence: Synthetic oligonucleotide
  Antisense strand to SEQ ID NO: 2386840
guaaacgagaccaauaccu

SEQ ID NO: 2386842 - RNA, 19 nt, Artificial Sequence
  Description of Artificial Sequence: Synthetic oligonucleotide
  Sense strand starting at position 3081 of SEQ ID NO: 1886085
auuggucucguuuacagau

SEQ ID NO: 2386843 - RNA, 19 nt, Artificial Sequence
  Description of Artificial Sequence: Synthetic oligonucleotide
  Antisense strand to SEQ ID NO: 2386842
aucuguaaacgagaccaau

SEQ ID NO: 2386844 - RNA, 19 nt, Artificial Sequence
  Description of Artificial Sequence: Synthetic oligonucleotide
  Sense strand starting at position 3312 of SEQ ID NO: 1886085
gagagacugucaguccuaa

SEQ ID NO: 2386845 - RNA, 19 nt, Artificial Sequence
  Description of Artificial Sequence: Synthetic oligonucleotide
  Antisense strand to SEQ ID NO: 2386844
uuaggacugacagucucuc

SEQ ID NO: 2386846 - RNA, 19 nt, Artificial Sequence
  Description of Artificial Sequence: Synthetic oligonucleotide
  Sense strand starting at position 3374 of SEQ ID NO: 1886085
auccaaaguugguauuuaa

SEQ ID NO: 2386847 - RNA, 19 nt, Artificial Sequence
  Description of Artificial Sequence: Synthetic oligonucleotide
  Antisense strand to SEQ ID NO: 2386846
uuaaauaccaacuuuggau

SEQ ID NO: 2386848 - RNA, 19 nt, Artificial Sequence
  Description of Artificial Sequence: Synthetic oligonucleotide
  Sense strand starting at position 3862 of SEQ ID NO: 1886085
aaggauaguccuggccuga

SEQ ID NO: 2386849 - RNA, 19 nt, Artificial Sequence
  Description of Artificial Sequence: Synthetic oligonucleotide
  Antisense strand to SEQ ID NO: 2386848
ucaggccaggacuauccuu

SEQ ID NO: 2386850 - RNA, 19 nt, Artificial Sequence
  Description of Artificial Sequence: Synthetic oligonucleotide
  Sense strand starting at position 3941 of SEQ ID NO: 1886085
augagcuuacguggccaaa

SEQ ID NO: 2386851 - RNA, 19 nt, Artificial Sequence
  Description of Artificial Sequence: Synthetic oligonucleotide
  Antisense strand to SEQ ID NO: 2386850
uuuggccacguaagcucau

SEQ ID NO: 2386852 - RNA, 19 nt, Artificial Sequence
  Description of Artificial Sequence: Synthetic oligonucleotide
  Sense strand starting at position 3943 of SEQ ID NO: 1886085
gagcuuacguggccaaaga

SEQ ID NO: 2386853 - RNA, 19 nt, Artificial Sequence
  Description of Artificial Sequence: Synthetic oligonucleotide
  Antisense strand to SEQ ID NO: 2386852
ucuuuggccacguaagcuc

SEQ ID NO: 2386854 - RNA, 19 nt, Artificial Sequence
  Description of Artificial Sequence: Synthetic oligonucleotide
  Sense strand starting at position 28 of SEQ ID NO: 1886086
agguguaaauacuccuaca

SEQ ID NO: 2386855 - RNA, 19 nt, Artificial Sequence
  Description of Artificial Sequence: Synthetic oligonucleotide
  Antisense strand to SEQ ID NO: 2386854
uguaggaguauuuacaccu

SEQ ID NO: 2386856 - RNA, 19 nt, Artificial Sequence
  Description of Artificial Sequence: Synthetic oligonucleotide
  Sense strand starting at position 177 of SEQ ID NO: 1886086
acguuaaugugguuaacag

SEQ ID NO: 2386857 - RNA, 19 nt, Artificial Sequence
  Description of Artificial Sequence: Synthetic oligonucleotide
  Antisense strand to SEQ ID NO: 2386856
cuguuaaccacauuaacgu

SEQ ID NO: 2386858 - RNA, 19 nt, Artificial Sequence
  Description of Artificial Sequence: Synthetic oligonucleotide
  Sense strand starting at position 178 of SEQ ID NO: 1886086
cguuaaugugguuaacaga

SEQ ID NO: 2386859 - RNA, 19 nt, Artificial Sequence
  Description of Artificial Sequence: Synthetic oligonucleotide
  Antisense strand to SEQ ID NO: 2386858
ucuguuaaccacauuaacg

SEQ ID NO: 2386860 - RNA, 19 nt, Artificial Sequence
  Description of Artificial Sequence: Synthetic oligonucleotide
  Sense strand starting at position 202 of SEQ ID NO: 1886086
gucauauugcuaugacaaa

SEQ ID NO: 2386861 - RNA, 19 nt, Artificial Sequence
  Description of Artificial Sequence: Synthetic oligonucleotide
  Antisense strand to SEQ ID NO: 2386860
uuugucauagcaauaugac

SEQ ID NO: 2386862 - RNA, 19 nt, Artificial Sequence
  Description of Artificial Sequence: Synthetic oligonucleotide
  Sense strand starting at position 241 of SEQ ID NO: 1886086
ucaauuaugucaguaguau

SEQ ID NO: 2386863 - RNA, 19 nt, Artificial Sequence
  Description of Artificial Sequence: Synthetic oligonucleotide
  Antisense strand to SEQ ID NO: 2386862
auacuacugacauaauuga

SEQ ID NO: 2386864 - RNA, 19 nt, Artificial Sequence
  Description of Artificial Sequence: Synthetic oligonucleotide
  Sense strand starting at position 330 of SEQ ID NO: 1886086
cccucucguggucauauau

SEQ ID NO: 2386865 - RNA, 19 nt, Artificial Sequence
  Description of Artificial Sequence: Synthetic oligonucleotide
  Antisense strand to SEQ ID NO: 2386864
auauaugaccacgagaggg

SEQ ID NO: 2386866 - RNA, 19 nt, Artificial Sequence
  Description of Artificial Sequence: Synthetic oligonucleotide
  Sense strand starting at position 394 of SEQ ID NO: 1886086
ucuggucaugcagguauga

SEQ ID NO: 2386867 - RNA, 19 nt, Artificial Sequence
  Description of Artificial Sequence: Synthetic oligonucleotide
  Antisense strand to SEQ ID NO: 2386866
ucauaccugcaugaccaga

SEQ ID NO: 2386868 - RNA, 19 nt, Artificial Sequence
  Description of Artificial Sequence: Synthetic oligonucleotide
  Sense strand starting at position 396 of SEQ ID NO: 1886086
uggucaugcagguaugauu

SEQ ID NO: 2386869 - RNA, 19 nt, Artificial Sequence
  Description of Artificial Sequence: Synthetic oligonucleotide
  Antisense strand to SEQ ID NO: 2386868
aaucauaccugcaugacca

SEQ ID NO: 2386870 - RNA, 19 nt, Artificial Sequence
  Description of Artificial Sequence: Synthetic oligonucleotide
  Sense strand starting at position 420 of SEQ ID NO: 1886086
acuguacgacuguacaauu

SEQ ID NO: 2386871 - RNA, 19 nt, Artificial Sequence
  Description of Artificial Sequence: Synthetic oligonucleotide
  Antisense strand to SEQ ID NO: 2386870
aauuguacagucguacagu

SEQ ID NO: 2386872 - RNA, 19 nt, Artificial Sequence
  Description of Artificial Sequence: Synthetic oligonucleotide
  Sense strand starting at position 539 of SEQ ID NO: 1886086
ccaguuaauucuguccuuu

SEQ ID NO: 2386873 - RNA, 19 nt, Artificial Sequence
  Description of Artificial Sequence: Synthetic oligonucleotide
  Antisense strand to SEQ ID NO: 2386872
aaaggacagaauuaacugg

SEQ ID NO: 2386874 - RNA, 19 nt, Artificial Sequence
  Description of Artificial Sequence: Synthetic oligonucleotide
  Sense strand starting at position 576 of SEQ ID NO: 1886086
ugcagaucuaaguguacga

SEQ ID NO: 2386875 - RNA, 19 nt, Artificial Sequence
  Description of Artificial Sequence: Synthetic oligonucleotide
  Antisense strand to SEQ ID NO: 2386874
ucguacacuuagaucugca

SEQ ID NO: 2386876 - RNA, 19 nt, Artificial Sequence
  Description of Artificial Sequence: Synthetic oligonucleotide
  Sense strand starting at position 578 of SEQ ID NO: 1886086
cagaucuaaguguacgaau

SEQ ID NO: 2386877 - RNA, 19 nt, Artificial Sequence
  Description of Artificial Sequence: Synthetic oligonucleotide
  Antisense strand to SEQ ID NO: 2386876
auucguacacuuagaucug

SEQ ID NO: 2386878 - RNA, 19 nt, Artificial Sequence
  Description of Artificial Sequence: Synthetic oligonucleotide
  Sense strand starting at position 589 of SEQ ID NO: 1886086
guacgaauggcacaugguu

SEQ ID NO: 2386879 - RNA, 19 nt, Artificial Sequence
  Description of Artificial Sequence: Synthetic oligonucleotide
  Antisense strand to SEQ ID NO: 2386878
aaccaugugccauucguac

SEQ ID NO: 2386880 - RNA, 19 nt, Artificial Sequence
  Description of Artificial Sequence: Synthetic oligonucleotide
  Sense strand starting at position 591 of SEQ ID NO: 1886086
acgaauggcacaugguuua

SEQ ID NO: 2386881 - RNA, 19 nt, Artificial Sequence
  Description of Artificial Sequence: Synthetic oligonucleotide
  Antisense strand to SEQ ID NO: 2386880
uaaaccaugugccauucgu

SEQ ID NO: 2386882 - RNA, 19 nt, Artificial Sequence
  Description of Artificial Sequence: Synthetic oligonucleotide
  Sense strand starting at position 743 of SEQ ID NO: 1886086
cuuucuugcgaaugcauuu

SEQ ID NO: 2386883 - RNA, 19 nt, Artificial Sequence
  Description of Artificial Sequence: Synthetic oligonucleotide
  Antisense strand to SEQ ID NO: 2386882
aaaugcauucgcaagaaag

SEQ ID NO: 2386884 - RNA, 19 nt, Artificial Sequence
  Description of Artificial Sequence: Synthetic oligonucleotide
  Sense strand starting at position 788 of SEQ ID NO: 1886086
gccucuaagcaugacuuua

SEQ ID NO: 2386885 - RNA, 19 nt, Artificial Sequence
  Description of Artificial Sequence: Synthetic oligonucleotide
  Antisense strand to SEQ ID NO: 2386884
uaaagucaugcuuagaggc

SEQ ID NO: 2386886 - RNA, 19 nt, Artificial Sequence
  Description of Artificial Sequence: Synthetic oligonucleotide
  Sense strand starting at position 799 of SEQ ID NO: 1886086
ugacuuuaagugcaaccua

SEQ ID NO: 2386887 - RNA, 19 nt, Artificial Sequence
  Description of Artificial Sequence: Synthetic oligonucleotide
  Antisense strand to SEQ ID NO: 2386886
uagguugcacuuaaaguca

SEQ ID NO: 2386888 - RNA, 19 nt, Artificial Sequence
  Description of Artificial Sequence: Synthetic oligonucleotide
  Sense strand starting at position 831 of SEQ ID NO: 1886086
guuauacacucauuacugu

SEQ ID NO: 2386889 - RNA, 19 nt, Artificial Sequence
  Description of Artificial Sequence: Synthetic oligonucleotide
  Antisense strand to SEQ ID NO: 2386888
acaguaaugaguguauaac

SEQ ID NO: 2386890 - RNA, 19 nt, Artificial Sequence
  Description of Artificial Sequence: Synthetic oligonucleotide
  Sense strand starting at position 1118 of SEQ ID NO: 1886086
uguuaaccaccuuaaaguu

SEQ ID NO: 2386891 - RNA, 19 nt, Artificial Sequence
  Description of Artificial Sequence: Synthetic oligonucleotide
  Antisense strand to SEQ ID NO: 2386890
aacuuuaaggugguuaaca

SEQ ID NO: 2386892 - RNA, 19 nt, Artificial Sequence
  Description of Artificial Sequence: Synthetic oligonucleotide
  Sense strand starting at position 1134 of SEQ ID NO: 1886086
guugaaauguaguugaauu

SEQ ID NO: 2386893 - RNA, 19 nt, Artificial Sequence
  Description of Artificial Sequence: Synthetic oligonucleotide
  Antisense strand to SEQ ID NO: 2386892
aauucaacuacauuucaac

SEQ ID NO: 2386894 - RNA, 19 nt, Artificial Sequence
  Description of Artificial Sequence: Synthetic oligonucleotide
  Sense strand starting at position 1237 of SEQ ID NO: 1886086
ugaucuuuaagugguugua

SEQ ID NO: 2386895 - RNA, 19 nt, Artificial Sequence
  Description of Artificial Sequence: Synthetic oligonucleotide
  Antisense strand to SEQ ID NO: 2386894
uacaaccacuuaaagauca

SEQ ID NO: 2386896 - RNA, 19 nt, Artificial Sequence
  Description of Artificial Sequence: Synthetic oligonucleotide
  Sense strand starting at position 1240 of SEQ ID NO: 1886086
ucuuuaagugguuguagga

SEQ ID NO: 2386897 - RNA, 19 nt, Artificial Sequence
  Description of Artificial Sequence: Synthetic oligonucleotide
  Antisense strand to SEQ ID NO: 2386896
uccuacaaccacuuaaaga

SEQ ID NO: 2386898 - RNA, 19 nt, Artificial Sequence
  Description of Artificial Sequence: Synthetic oligonucleotide
  Sense strand starting at position 1595 of SEQ ID NO: 1886086
auagaaaucugacugcugu

SEQ ID NO: 2386899 - RNA, 19 nt, Artificial Sequence
  Description of Artificial Sequence: Synthetic oligonucleotide
  Antisense strand to SEQ ID NO: 2386898
acagcagucagauuucuau

SEQ ID NO: 2386900 - RNA, 19 nt, Artificial Sequence
  Description of Artificial Sequence: Synthetic oligonucleotide
  Sense strand starting at position 1651 of SEQ ID NO: 1886086
gauucuuugggugguucua

SEQ ID NO: 2386901 - RNA, 19 nt, Artificial Sequence
  Description of Artificial Sequence: Synthetic oligonucleotide
  Antisense strand to SEQ ID NO: 2386900
uagaaccacccaaagaauc

SEQ ID NO: 2386902 - RNA, 19 nt, Artificial Sequence
  Description of Artificial Sequence: Synthetic oligonucleotide
  Sense strand starting at position 1653 of SEQ ID NO: 1886086
uucuuugggugguucuaaa

SEQ ID NO: 2386903 - RNA, 19 nt, Artificial Sequence
  Description of Artificial Sequence: Synthetic oligonucleotide
  Antisense strand to SEQ ID NO: 2386902
uuuagaaccacccaaagaa

SEQ ID NO: 2386904 - RNA, 19 nt, Artificial Sequence
  Description of Artificial Sequence: Synthetic oligonucleotide
  Sense strand starting at position 1760 of SEQ ID NO: 1886086
acagcaaaccugugaacua

SEQ ID NO: 2386905 - RNA, 19 nt, Artificial Sequence
  Description of Artificial Sequence: Synthetic oligonucleotide
  Antisense strand to SEQ ID NO: 2386904
uaguucacagguuugcugu

SEQ ID NO: 2386906 - RNA, 19 nt, Artificial Sequence
  Description of Artificial Sequence: Synthetic oligonucleotide
  Sense strand starting at position 1806 of SEQ ID NO: 1886086
cccguugucagaugggaua

SEQ ID NO: 2386907 - RNA, 19 nt, Artificial Sequence
  Description of Artificial Sequence: Synthetic oligonucleotide
  Antisense strand to SEQ ID NO: 2386906
uaucccaucugacaacggg

SEQ ID NO: 2386908 - RNA, 19 nt, Artificial Sequence
  Description of Artificial Sequence: Synthetic oligonucleotide
  Sense strand starting at position 1808 of SEQ ID NO: 1886086
cguugucagaugggauaaa

SEQ ID NO: 2386909 - RNA, 19 nt, Artificial Sequence
  Description of Artificial Sequence: Synthetic oligonucleotide
  Antisense strand to SEQ ID NO: 2386908
uuuaucccaucugacaacg

SEQ ID NO: 2386910 - RNA, 19 nt, Artificial Sequence
  Description of Artificial Sequence: Synthetic oligonucleotide
  Sense strand starting at position 1862 of SEQ ID NO: 1886086
gauagugaccaguggauuc

SEQ ID NO: 2386911 - RNA, 19 nt, Artificial Sequence
  Description of Artificial Sequence: Synthetic oligonucleotide
  Antisense strand to SEQ ID NO: 2386910
gaauccacuggucacuauc

SEQ ID NO: 2386912 - RNA, 19 nt, Artificial Sequence
  Description of Artificial Sequence: Synthetic oligonucleotide
  Sense strand starting at position 2022 of SEQ ID NO: 1886086
gugccuaaagguuagaucu

SEQ ID NO: 2386913 - RNA, 19 nt, Artificial Sequence
  Description of Artificial Sequence: Synthetic oligonucleotide
  Antisense strand to SEQ ID NO: 2386912
agaucuaaccuuuaggcac

SEQ ID NO: 2386914 - RNA, 19 nt, Artificial Sequence
  Description of Artificial Sequence: Synthetic oligonucleotide
  Sense strand starting at position 2052 of SEQ ID NO: 1886086
gagugcugagaaggauaau

SEQ ID NO: 2386915 - RNA, 19 nt, Artificial Sequence
  Description of Artificial Sequence: Synthetic oligonucleotide
  Antisense strand to SEQ ID NO: 2386914
auuauccuucucagcacuc

SEQ ID NO: 2386916 - RNA, 19 nt, Artificial Sequence
  Description of Artificial Sequence: Synthetic oligonucleotide
  Sense strand starting at position 2097 of SEQ ID NO: 1886086
uuuaaauacggacauguua

SEQ ID NO: 2386917 - RNA, 19 nt, Artificial Sequence
  Description of Artificial Sequence: Synthetic oligonucleotide
  Antisense strand to SEQ ID NO: 2386916
uaacauguccguauuuaaa

SEQ ID NO: 2386918 - RNA, 19 nt, Artificial Sequence
  Description of Artificial Sequence: Synthetic oligonucleotide
  Sense strand starting at position 2499 of SEQ ID NO: 1886086
uguauauaucauggcagga

SEQ ID NO: 2386919 - RNA, 19 nt, Artificial Sequence
  Description of Artificial Sequence: Synthetic oligonucleotide
  Antisense strand to SEQ ID NO: 2386918
uccugccaugauauauaca

SEQ ID NO: 2386920 - RNA, 19 nt, Artificial Sequence
  Description of Artificial Sequence: Synthetic oligonucleotide
  Sense strand starting at position 2593 of SEQ ID NO: 1886086
agaugcacugcccaguuau

SEQ ID NO: 2386921 - RNA, 19 nt, Artificial Sequence
  Description of Artificial Sequence: Synthetic oligonucleotide
  Antisense strand to SEQ ID NO: 2386920
auaacugggcagugcaucu

SEQ ID NO: 2386922 - RNA, 19 nt, Artificial Sequence
  Description of Artificial Sequence: Synthetic oligonucleotide
  Sense strand starting at position 2678 of SEQ ID NO: 1886086
uaugaaauauugucacgac

SEQ ID NO: 2386923 - RNA, 19 nt, Artificial Sequence
  Description of Artificial Sequence: Synthetic oligonucleotide
  Antisense strand to SEQ ID NO: 2386922
gucgugacaauauuucaua

SEQ ID NO: 2386924 - RNA, 19 nt, Artificial Sequence
  Description of Artificial Sequence: Synthetic oligonucleotide
  Sense strand starting at position 3040 of SEQ ID NO: 1886086
cacagaaaguuccucugga

SEQ ID NO: 2386925 - RNA, 19 nt, Artificial Sequence
  Description of Artificial Sequence: Synthetic oligonucleotide
  Antisense strand to SEQ ID NO: 2386924
uccagaggaacuuucugug

SEQ ID NO: 2386926 - RNA, 19 nt, Artificial Sequence
  Description of Artificial Sequence: Synthetic oligonucleotide
  Sense strand starting at position 3041 of SEQ ID NO: 1886086
acagaaaguuccucuggac

SEQ ID NO: 2386927 - RNA, 19 nt, Artificial Sequence
  Description of Artificial Sequence: Synthetic oligonucleotide
  Antisense strand to SEQ ID NO: 2386926
guccagaggaacuuucugu

SEQ ID NO: 2386928 - RNA, 19 nt, Artificial Sequence
  Description of Artificial Sequence: Synthetic oligonucleotide
  Sense strand starting at position 3189 of SEQ ID NO: 1886086
ggauucuuauguuugugaa

SEQ ID NO: 2386929 - RNA, 19 nt, Artificial Sequence
  Description of Artificial Sequence: Synthetic oligonucleotide
  Antisense strand to SEQ ID NO: 2386928
uucacaaacauaagaaucc

SEQ ID NO: 2386930 - RNA, 19 nt, Artificial Sequence
  Description of Artificial Sequence: Synthetic oligonucleotide
  Sense strand starting at position 3190 of SEQ ID NO: 1886086
gauucuuauguuugugaau

SEQ ID NO: 2386931 - RNA, 19 nt, Artificial Sequence
  Description of Artificial Sequence: Synthetic oligonucleotide
  Antisense strand to SEQ ID NO: 2386930
auucacaaacauaagaauc

SEQ ID NO: 2386932 - RNA, 19 nt, Artificial Sequence
  Description of Artificial Sequence: Synthetic oligonucleotide
  Sense strand starting at position 3587 of SEQ ID NO: 1886086
uuaguuuaauuccuagguu

SEQ ID NO: 2386933 - RNA, 19 nt, Artificial Sequence
  Description of Artificial Sequence: Synthetic oligonucleotide
  Antisense strand to SEQ ID NO: 2386932
aaccuaggaauuaaacuaa

SEQ ID NO: 2386934 - RNA, 19 nt, Artificial Sequence
  Description of Artificial Sequence: Synthetic oligonucleotide
  Sense strand starting at position 66 of SEQ ID NO: 1886087
uuggaacuuuaacguuuaa

SEQ ID NO: 2386935 - RNA, 19 nt, Artificial Sequence
  Description of Artificial Sequence: Synthetic oligonucleotide
  Antisense strand to SEQ ID NO: 2386934
uuaaacguuaaaguuccaa

SEQ ID NO: 2386936 - RNA, 19 nt, Artificial Sequence
  Description of Artificial Sequence: Synthetic oligonucleotide
  Sense strand starting at position 1257 of SEQ ID NO: 1886087
gagaauaguuuguguacug

SEQ ID NO: 2386937 - RNA, 19 nt, Artificial Sequence
  Description of Artificial Sequence: Synthetic oligonucleotide
  Antisense strand to SEQ ID NO: 2386936
caguacacaaacuauucuc

SEQ ID NO: 2386938 - RNA, 19 nt, Artificial Sequence
  Description of Artificial Sequence: Synthetic oligonucleotide
  Sense strand starting at position 3212 of SEQ ID NO: 1886087
uccacaugauuccgacuca

SEQ ID NO: 2386939 - RNA, 19 nt, Artificial Sequence
  Description of Artificial Sequence: Synthetic oligonucleotide
  Antisense strand to SEQ ID NO: 2386938
ugagucggaaucaugugga

SEQ ID NO: 2386940 - RNA, 19 nt, Artificial Sequence
  Description of Artificial Sequence: Synthetic oligonucleotide
  Sense strand starting at position 3306 of SEQ ID NO: 1886087
caagaagucugucgccaaa

SEQ ID NO: 2386941 - RNA, 19 nt, Artificial Sequence
  Description of Artificial Sequence: Synthetic oligonucleotide
  Antisense strand to SEQ ID NO: 2386940
uuuggcgacagacuucuug

SEQ ID NO: 2386942 - RNA, 19 nt, Artificial Sequence
  Description of Artificial Sequence: Synthetic oligonucleotide
  Sense strand starting at position 3308 of SEQ ID NO: 1886087
agaagucugucgccaaaug

SEQ ID NO: 2386943 - RNA, 19 nt, Artificial Sequence
  Description of Artificial Sequence: Synthetic oligonucleotide
  Antisense strand to SEQ ID NO: 2386942
cauuuggcgacagacuucu

SEQ ID NO: 2386944 - RNA, 19 nt, Artificial Sequence
  Description of Artificial Sequence: Synthetic oligonucleotide
  Sense strand starting at position 3488 of SEQ ID NO: 1886087
ugaccuuuaaggugagaua

SEQ ID NO: 2386945 - RNA, 19 nt, Artificial Sequence
  Description of Artificial Sequence: Synthetic oligonucleotide
  Antisense strand to SEQ ID NO: 2386944
uaucucaccuuaaagguca

SEQ ID NO: 2386946 - RNA, 19 nt, Artificial Sequence
  Description of Artificial Sequence: Synthetic oligonucleotide
  Sense strand starting at position 1257 of SEQ ID NO: 1886088
gagaauaguuuguguacua

SEQ ID NO: 2386947 - RNA, 19 nt, Artificial Sequence
  Description of Artificial Sequence: Synthetic oligonucleotide
  Antisense strand to SEQ ID NO: 2386946
uaguacacaaacuauucuc

SEQ ID NO: 2386948 - RNA, 19 nt, Artificial Sequence
  Description of Artificial Sequence: Synthetic oligonucleotide
  Sense strand starting at position 1258 of SEQ ID NO: 1886088
agaauaguuuguguacuag

SEQ ID NO: 2386949 - RNA, 19 nt, Artificial Sequence
  Description of Artificial Sequence: Synthetic oligonucleotide
  Antisense strand to SEQ ID NO: 2386948
cuaguacacaaacuauucu

SEQ ID NO: 2386950 - RNA, 19 nt, Artificial Sequence
  Description of Artificial Sequence: Synthetic oligonucleotide
  Sense strand starting at position 1262 of SEQ ID NO: 1886088
uaguuuguguacuagggaa

SEQ ID NO: 2386951 - RNA, 19 nt, Artificial Sequence
  Description of Artificial Sequence: Synthetic oligonucleotide
  Antisense strand to SEQ ID NO: 2386950
uucccuaguacacaaacua

SEQ ID NO: 2386952 - RNA, 19 nt, Artificial Sequence
  Description of Artificial Sequence: Synthetic oligonucleotide
  Sense strand starting at position 1264 of SEQ ID NO: 1886088
guuuguguacuagggaaag

SEQ ID NO: 2386953 - RNA, 19 nt, Artificial Sequence
  Description of Artificial Sequence: Synthetic oligonucleotide
  Antisense strand to SEQ ID NO: 2386952
cuuucccuaguacacaaac

SEQ ID NO: 2386954 - RNA, 19 nt, Artificial Sequence
  Description of Artificial Sequence: Synthetic oligonucleotide
  Sense strand starting at position 2782 of SEQ ID NO: 1886088
uuuaaugaccagugaugcu

SEQ ID NO: 2386955 - RNA, 19 nt, Artificial Sequence
  Description of Artificial Sequence: Synthetic oligonucleotide
  Antisense strand to SEQ ID NO: 2386954
agcaucacuggucauuaaa

SEQ ID NO: 2386956 - RNA, 19 nt, Artificial Sequence
  Description of Artificial Sequence: Synthetic oligonucleotide
  Sense strand starting at position 294 of SEQ ID NO: 1886089
ucaguuaauguugaaacga

SEQ ID NO: 2386957 - RNA, 19 nt, Artificial Sequence
  Description of Artificial Sequence: Synthetic oligonucleotide
  Antisense strand to SEQ ID NO: 2386956
ucguuucaacauuaacuga

SEQ ID NO: 2386958 - RNA, 19 nt, Artificial Sequence
  Description of Artificial Sequence: Synthetic oligonucleotide
  Sense strand starting at position 528 of SEQ ID NO: 1886089
ugugaaaccgaauaagucu

SEQ ID NO: 2386959 - RNA, 19 nt, Artificial Sequence
  Description of Artificial Sequence: Synthetic oligonucleotide
  Antisense strand to SEQ ID NO: 2386958
agacuuauucgguuucaca

SEQ ID NO: 2386960 - RNA, 19 nt, Artificial Sequence
  Description of Artificial Sequence: Synthetic oligonucleotide
  Sense strand starting at position 845 of SEQ ID NO: 1886089
aaaucauccugcguacaag

SEQ ID NO: 2386961 - RNA, 19 nt, Artificial Sequence
  Description of Artificial Sequence: Synthetic oligonucleotide
  Antisense strand to SEQ ID NO: 2386960
cuuguacgcaggaugauuu

SEQ ID NO: 2386962 - RNA, 19 nt, Artificial Sequence
  Description of Artificial Sequence: Synthetic oligonucleotide
  Sense strand starting at position 846 of SEQ ID NO: 1886089
aaucauccugcguacaaga

SEQ ID NO: 2386963 - RNA, 19 nt, Artificial Sequence
  Description of Artificial Sequence: Synthetic oligonucleotide
  Antisense strand to SEQ ID NO: 2386962
ucuuguacgcaggaugauu

SEQ ID NO: 2386964 - RNA, 19 nt, Artificial Sequence
  Description of Artificial Sequence: Synthetic oligonucleotide
  Sense strand starting at position 848 of SEQ ID NO: 1886089
ucauccugcguacaagaaa

SEQ ID NO: 2386965 - RNA, 19 nt, Artificial Sequence
  Description of Artificial Sequence: Synthetic oligonucleotide
  Antisense strand to SEQ ID NO: 2386964
uuucuuguacgcaggauga

SEQ ID NO: 2386966 - RNA, 19 nt, Artificial Sequence
  Description of Artificial Sequence: Synthetic oligonucleotide
  Sense strand starting at position 868 of SEQ ID NO: 1886089
augaaacuguaugcugaau

SEQ ID NO: 2386967 - RNA, 19 nt, Artificial Sequence
  Description of Artificial Sequence: Synthetic oligonucleotide
  Antisense strand to SEQ ID NO: 2386966
auucagcauacaguuucau

SEQ ID NO: 2386968 - RNA, 19 nt, Artificial Sequence
  Description of Artificial Sequence: Synthetic oligonucleotide
  Sense strand starting at position 968 of SEQ ID NO: 1886089
cuaugaacaguauguagaa

SEQ ID NO: 2386969 - RNA, 19 nt, Artificial Sequence
  Description of Artificial Sequence: Synthetic oligonucleotide
  Antisense strand to SEQ ID NO: 2386968
uucuacauacuguucauag

SEQ ID NO: 2386970 - RNA, 19 nt, Artificial Sequence
  Description of Artificial Sequence: Synthetic oligonucleotide
  Sense strand starting at position 1113 of SEQ ID NO: 1886089
cagggaaauccguggagaa

SEQ ID NO: 2386971 - RNA, 19 nt, Artificial Sequence
  Description of Artificial Sequence: Synthetic oligonucleotide
  Antisense strand to SEQ ID NO: 2386970
uucuccacggauuucccug

SEQ ID NO: 2386972 - RNA, 19 nt, Artificial Sequence
  Description of Artificial Sequence: Synthetic oligonucleotide
  Sense strand starting at position 1243 of SEQ ID NO: 1886089
cagguuccaccucgagaau

SEQ ID NO: 2386973 - RNA, 19 nt, Artificial Sequence
  Description of Artificial Sequence: Synthetic oligonucleotide
  Antisense strand to SEQ ID NO: 2386972
auucucgagguggaaccug

SEQ ID NO: 2386974 - RNA, 19 nt, Artificial Sequence
  Description of Artificial Sequence: Synthetic oligonucleotide
  Sense strand starting at position 1244 of SEQ ID NO: 1886089
agguuccaccucgagaaua

SEQ ID NO: 2386975 - RNA, 19 nt, Artificial Sequence
  Description of Artificial Sequence: Synthetic oligonucleotide
  Antisense strand to SEQ ID NO: 2386974
uauucucgagguggaaccu

SEQ ID NO: 2386976 - RNA, 19 nt, Artificial Sequence
  Description of Artificial Sequence: Synthetic oligonucleotide
  Sense strand starting at position 1246 of SEQ ID NO: 1886089
guuccaccucgagaauagu

SEQ ID NO: 2386977 - RNA, 19 nt, Artificial Sequence
  Description of Artificial Sequence: Synthetic oligonucleotide
  Antisense strand to SEQ ID NO: 2386976
acuauucucgagguggaac

SEQ ID NO: 2386978 - RNA, 19 nt, Artificial Sequence
  Description of Artificial Sequence: Synthetic oligonucleotide
  Sense strand starting at position 1381 of SEQ ID NO: 1886089
aaggaagaguucuccauau

SEQ ID NO: 2386979 - RNA, 19 nt, Artificial Sequence
  Description of Artificial Sequence: Synthetic oligonucleotide
  Antisense strand to SEQ ID NO: 2386978
auauggagaacucuuccuu

SEQ ID NO: 2386980 - RNA, 19 nt, Artificial Sequence
  Description of Artificial Sequence: Synthetic oligonucleotide
  Sense strand starting at position 1497 of SEQ ID NO: 1886089
cuguuaacauuauuagaag

SEQ ID NO: 2386981 - RNA, 19 nt, Artificial Sequence
  Description of Artificial Sequence: Synthetic oligonucleotide
  Antisense strand to SEQ ID NO: 2386980
cuucuaauaauguuaacag

SEQ ID NO: 2386982 - RNA, 19 nt, Artificial Sequence
  Description of Artificial Sequence: Synthetic oligonucleotide
  Sense strand starting at position 1547 of SEQ ID NO: 1886089
ucaagaggaucauaaauau

SEQ ID NO: 2386983 - RNA, 19 nt, Artificial Sequence
  Description of Artificial Sequence: Synthetic oligonucleotide
  Antisense strand to SEQ ID NO: 2386982
auauuuaugauccucuuga

SEQ ID NO: 2386984 - RNA, 19 nt, Artificial Sequence
  Description of Artificial Sequence: Synthetic oligonucleotide
  Sense strand starting at position 1565 of SEQ ID NO: 1886089
ucagguugucuuuaccuga

SEQ ID NO: 2386985 - RNA, 19 nt, Artificial Sequence
  Description of Artificial Sequence: Synthetic oligonucleotide
  Antisense strand to SEQ ID NO: 2386984
ucagguaaagacaaccuga

SEQ ID NO: 2386986 - RNA, 19 nt, Artificial Sequence
  Description of Artificial Sequence: Synthetic oligonucleotide
  Sense strand starting at position 1572 of SEQ ID NO: 1886089
gucuuuaccugaguacgaa

SEQ ID NO: 2386987 - RNA, 19 nt, Artificial Sequence
  Description of Artificial Sequence: Synthetic oligonucleotide
  Antisense strand to SEQ ID NO: 2386986
uucguacucagguaaagac

SEQ ID NO: 2386988 - RNA, 19 nt, Artificial Sequence
  Description of Artificial Sequence: Synthetic oligonucleotide
  Sense strand starting at position 1601 of SEQ ID NO: 1886089
cuguauauccagcacugau

SEQ ID NO: 2386989 - RNA, 19 nt, Artificial Sequence
  Description of Artificial Sequence: Synthetic oligonucleotide
  Antisense strand to SEQ ID NO: 2386988
aucagugcuggauauacag

SEQ ID NO: 2386990 - RNA, 19 nt, Artificial Sequence
  Description of Artificial Sequence: Synthetic oligonucleotide
  Sense strand starting at position 1694 of SEQ ID NO: 1886089
ggauuaggaaguugugaag

SEQ ID NO: 2386991 - RNA, 19 nt, Artificial Sequence
  Description of Artificial Sequence: Synthetic oligonucleotide
  Antisense strand to SEQ ID NO: 2386990
cuucacaacuuccuaaucc

SEQ ID NO: 2386992 - RNA, 19 nt, Artificial Sequence
  Description of Artificial Sequence: Synthetic oligonucleotide
  Sense strand starting at position 1846 of SEQ ID NO: 1886089
uuauaaucauguuccaagu

SEQ ID NO: 2386993 - RNA, 19 nt, Artificial Sequence
  Description of Artificial Sequence: Synthetic oligonucleotide
  Antisense strand to SEQ ID NO: 2386992
acuuggaacaugauuauaa

SEQ ID NO: 2386994 - RNA, 19 nt, Artificial Sequence
  Description of Artificial Sequence: Synthetic oligonucleotide
  Sense strand starting at position 1875 of SEQ ID NO: 1886089
gauagugagaauugucagu

SEQ ID NO: 2386995 - RNA, 19 nt, Artificial Sequence
  Description of Artificial Sequence: Synthetic oligonucleotide
  Antisense strand to SEQ ID NO: 2386994
acugacaauucucacuauc

SEQ ID NO: 2386996 - RNA, 19 nt, Artificial Sequence
  Description of Artificial Sequence: Synthetic oligonucleotide
  Sense strand starting at position 1877 of SEQ ID NO: 1886089
uagugagaauugucaguaa

SEQ ID NO: 2386997 - RNA, 19 nt, Artificial Sequence
  Description of Artificial Sequence: Synthetic oligonucleotide
  Antisense strand to SEQ ID NO: 2386996
uuacugacaauucucacua

SEQ ID NO: 2386998 - RNA, 19 nt, Artificial Sequence
  Description of Artificial Sequence: Synthetic oligonucleotide
  Sense strand starting at position 1880 of SEQ ID NO: 1886089
ugagaauugucaguaagau

SEQ ID NO: 2386999 - RNA, 19 nt, Artificial Sequence
  Description of Artificial Sequence: Synthetic oligonucleotide
  Antisense strand to SEQ ID NO: 2386998
aucuuacugacaauucuca

SEQ ID NO: 2387000 - RNA, 19 nt, Artificial Sequence
  Description of Artificial Sequence: Synthetic oligonucleotide
  Sense strand starting at position 1886 of SEQ ID NO: 1886089
uugucaguaagauaguaag

SEQ ID NO: 2387001 - RNA, 19 nt, Artificial Sequence
  Description of Artificial Sequence: Synthetic oligonucleotide
  Antisense strand to SEQ ID NO: 2387000
cuuacuaucuuacugacaa

SEQ ID NO: 2387002 - RNA, 19 nt, Artificial Sequence
  Description of Artificial Sequence: Synthetic oligonucleotide
  Sense strand starting at position 2025 of SEQ ID NO: 1886089
uccggauucugaccacauu

SEQ ID NO: 2387003 - RNA, 19 nt, Artificial Sequence
  Description of Artificial Sequence: Synthetic oligonucleotide
  Antisense strand to SEQ ID NO: 2387002
aauguggucagaauccgga

SEQ ID NO: 2387004 - RNA, 19 nt, Artificial Sequence
  Description of Artificial Sequence: Synthetic oligonucleotide
  Sense strand starting at position 2066 of SEQ ID NO: 1886089
gacgauuccuagucuaagc

SEQ ID NO: 2387005 - RNA, 19 nt, Artificial Sequence
  Description of Artificial Sequence: Synthetic oligonucleotide
  Antisense strand to SEQ ID NO: 2387004
gcuuagacuaggaaucguc

SEQ ID NO: 2387006 - RNA, 19 nt, Artificial Sequence
  Description of Artificial Sequence: Synthetic oligonucleotide
  Sense strand starting at position 2095 of SEQ ID NO: 1886089
uccucuuaugguuauugca

SEQ ID NO: 2387007 - RNA, 19 nt, Artificial Sequence
  Description of Artificial Sequence: Synthetic oligonucleotide
  Antisense strand to SEQ ID NO: 2387006
ugcaauaaccauaagagga

SEQ ID NO: 2387008 - RNA, 19 nt, Artificial Sequence
  Description of Artificial Sequence: Synthetic oligonucleotide
  Sense strand starting at position 2097 of SEQ ID NO: 1886089
cucuuaugguuauugcaaa

SEQ ID NO: 2387009 - RNA, 19 nt, Artificial Sequence
  Description of Artificial Sequence: Synthetic oligonucleotide
  Antisense strand to SEQ ID NO: 2387008
uuugcaauaaccauaagag

SEQ ID NO: 2387010 - RNA, 19 nt, Artificial Sequence
  Description of Artificial Sequence: Synthetic oligonucleotide
  Sense strand starting at position 2134 of SEQ ID NO: 1886089
ccagcuucugccguugauu

SEQ ID NO: 2387011 - RNA, 19 nt, Artificial Sequence
  Description of Artificial Sequence: Synthetic oligonucleotide
  Antisense strand to SEQ ID NO: 2387010
aaucaacggcagaagcugg

SEQ ID NO: 2387012 - RNA, 19 nt, Artificial Sequence
  Description of Artificial Sequence: Synthetic oligonucleotide
  Sense strand starting at position 2748 of SEQ ID NO: 1886089
auaguaucucauuguacuu

SEQ ID NO: 2387013 - RNA, 19 nt, Artificial Sequence
  Description of Artificial Sequence: Synthetic oligonucleotide
  Antisense strand to SEQ ID NO: 2387012
aaguacaaugagauacuau

SEQ ID NO: 2387014 - RNA, 19 nt, Artificial Sequence
  Description of Artificial Sequence: Synthetic oligonucleotide
  Sense strand starting at position 2904 of SEQ ID NO: 1886089
agguuuaccauguggguaa

SEQ ID NO: 2387015 - RNA, 19 nt, Artificial Sequence
  Description of Artificial Sequence: Synthetic oligonucleotide
  Antisense strand to SEQ ID NO: 2387014
uuacccacaugguaaaccu

SEQ ID NO: 2387016 - RNA, 19 nt, Artificial Sequence
  Description of Artificial Sequence: Synthetic oligonucleotide
  Sense strand starting at position 2922 of SEQ ID NO: 1886089
acagaauaauccguacaac

SEQ ID NO: 2387017 - RNA, 19 nt, Artificial Sequence
  Description of Artificial Sequence: Synthetic oligonucleotide
  Antisense strand to SEQ ID NO: 2387016
guuguacggauuauucugu

SEQ ID NO: 2387018 - RNA, 19 nt, Artificial Sequence
  Description of Artificial Sequence: Synthetic oligonucleotide
  Sense strand starting at position 3121 of SEQ ID NO: 1886089
guuuauuucucugccacca

SEQ ID NO: 2387019 - RNA, 19 nt, Artificial Sequence
  Description of Artificial Sequence: Synthetic oligonucleotide
  Antisense strand to SEQ ID NO: 2387018
ugguggcagagaaauaaac

SEQ ID NO: 2387020 - RNA, 19 nt, Artificial Sequence
  Description of Artificial Sequence: Synthetic oligonucleotide
  Sense strand starting at position 3248 of SEQ ID NO: 1886089
uguggucucucuuuggaau

SEQ ID NO: 2387021 - RNA, 19 nt, Artificial Sequence
  Description of Artificial Sequence: Synthetic oligonucleotide
  Antisense strand to SEQ ID NO: 2387020
auuccaaagagagaccaca

SEQ ID NO: 2387022 - RNA, 19 nt, Artificial Sequence
  Description of Artificial Sequence: Synthetic oligonucleotide
  Sense strand starting at position 3249 of SEQ ID NO: 1886089
guggucucucuuuggaaug

SEQ ID NO: 2387023 - RNA, 19 nt, Artificial Sequence
  Description of Artificial Sequence: Synthetic oligonucleotide
  Antisense strand to SEQ ID NO: 2387022
cauuccaaagagagaccac

SEQ ID NO: 2387024 - RNA, 19 nt, Artificial Sequence
  Description of Artificial Sequence: Synthetic oligonucleotide
  Sense strand starting at position 3282 of SEQ ID NO: 1886089
gagcacgauuccuccucau

SEQ ID NO: 2387025 - RNA, 19 nt, Artificial Sequence
  Description of Artificial Sequence: Synthetic oligonucleotide
  Antisense strand to SEQ ID NO: 2387024
augaggaggaaucgugcuc

SEQ ID NO: 2387026 - RNA, 19 nt, Artificial Sequence
  Description of Artificial Sequence: Synthetic oligonucleotide
  Sense strand starting at position 3344 of SEQ ID NO: 1886089
uugucauguguggcaguuu

SEQ ID NO: 2387027 - RNA, 19 nt, Artificial Sequence
  Description of Artificial Sequence: Synthetic oligonucleotide
  Antisense strand to SEQ ID NO: 2387026
aaacugccacacaugacaa

SEQ ID NO: 2387028 - RNA, 19 nt, Artificial Sequence
  Description of Artificial Sequence: Synthetic oligonucleotide
  Sense strand starting at position 3382 of SEQ ID NO: 1886089
gguugauauucuucucauc

SEQ ID NO: 2387029 - RNA, 19 nt, Artificial Sequence
  Description of Artificial Sequence: Synthetic oligonucleotide
  Antisense strand to SEQ ID NO: 2387028
gaugagaagaauaucaacc

SEQ ID NO: 2387030 - RNA, 19 nt, Artificial Sequence
  Description of Artificial Sequence: Synthetic oligonucleotide
  Sense strand starting at position 3443 of SEQ ID NO: 1886089
uugugacugcuacaaucaa

SEQ ID NO: 2387031 - RNA, 19 nt, Artificial Sequence
  Description of Artificial Sequence: Synthetic oligonucleotide
  Antisense strand to SEQ ID NO: 2387030
uugauuguagcagucacaa

SEQ ID NO: 2387032 - RNA, 19 nt, Artificial Sequence
  Description of Artificial Sequence: Synthetic oligonucleotide
  Sense strand starting at position 3450 of SEQ ID NO: 1886089
ugcuacaaucaauagagua

SEQ ID NO: 2387033 - RNA, 19 nt, Artificial Sequence
  Description of Artificial Sequence: Synthetic oligonucleotide
  Antisense strand to SEQ ID NO: 2387032
uacucuauugauuguagca

SEQ ID NO: 2387034 - RNA, 19 nt, Artificial Sequence
  Description of Artificial Sequence: Synthetic oligonucleotide
  Sense strand starting at position 3575 of SEQ ID NO: 1886089
agaaguuuacccugugcag

SEQ ID NO: 2387035 - RNA, 19 nt, Artificial Sequence
  Description of Artificial Sequence: Synthetic oligonucleotide
  Antisense strand to SEQ ID NO: 2387034
cugcacaggguaaacuucu

SEQ ID NO: 2387036 - RNA, 19 nt, Artificial Sequence
  Description of Artificial Sequence: Synthetic oligonucleotide
  Sense strand starting at position 66 of SEQ ID NO: 1886090
uuggaacuuuaacguuuaa

SEQ ID NO: 2387037 - RNA, 19 nt, Artificial Sequence
  Description of Artificial Sequence: Synthetic oligonucleotide
  Antisense strand to SEQ ID NO: 2387036
uuaaacguuaaaguuccaa

SEQ ID NO: 2387038 - RNA, 19 nt, Artificial Sequence
  Description of Artificial Sequence: Synthetic oligonucleotide
  Sense strand starting at position 1257 of SEQ ID NO: 1886090
gagaauaguuuguguacug

SEQ ID NO: 2387039 - RNA, 19 nt, Artificial Sequence
  Description of Artificial Sequence: Synthetic oligonucleotide
  Antisense strand to SEQ ID NO: 2387038
caguacacaaacuauucuc

SEQ ID NO: 2387040 - RNA, 19 nt, Artificial Sequence
  Description of Artificial Sequence: Synthetic oligonucleotide
  Sense strand starting at position 3212 of SEQ ID NO: 1886090
uccacaugauuccgacuca

SEQ ID NO: 2387041 - RNA, 19 nt, Artificial Sequence
  Description of Artificial Sequence: Synthetic oligonucleotide
  Antisense strand to SEQ ID NO: 2387040
ugagucggaaucaugugga

SEQ ID NO: 2387042 - RNA, 19 nt, Artificial Sequence
  Description of Artificial Sequence: Synthetic oligonucleotide
  Sense strand starting at position 3306 of SEQ ID NO: 1886090
caagaagucugucgccaaa

SEQ ID NO: 2387043 - RNA, 19 nt, Artificial Sequence
  Description of Artificial Sequence: Synthetic oligonucleotide
  Antisense strand to SEQ ID NO: 2387042
uuuggcgacagacuucuug

SEQ ID NO: 2387044 - RNA, 19 nt, Artificial Sequence
  Description of Artificial Sequence: Synthetic oligonucleotide
  Sense strand starting at position 3308 of SEQ ID NO: 1886090
agaagucugucgccaaaug

SEQ ID NO: 2387045 - RNA, 19 nt, Artificial Sequence
  Description of Artificial Sequence: Synthetic oligonucleotide
  Antisense strand to SEQ ID NO: 2387044
cauuuggcgacagacuucu

SEQ ID NO: 2387046 - RNA, 19 nt, Artificial Sequence
  Description of Artificial Sequence: Synthetic oligonucleotide
  Sense strand starting at position 3488 of SEQ ID NO: 1886090
ugaccuuuaaggugagaua

SEQ ID NO: 2387047 - RNA, 19 nt, Artificial Sequence
  Description of Artificial Sequence: Synthetic oligonucleotide
  Antisense strand to SEQ ID NO: 2387046
uaucucaccuuaaagguca

SEQ ID NO: 2387048 - RNA, 19 nt, Artificial Sequence
  Description of Artificial Sequence: Synthetic oligonucleotide
  Sense strand starting at position 1257 of SEQ ID NO: 1886091
gagaauaguuuguguacua

SEQ ID NO: 2387049 - RNA, 19 nt, Artificial Sequence
  Description of Artificial Sequence: Synthetic oligonucleotide
  Antisense strand to SEQ ID NO: 2387048
uaguacacaaacuauucuc

SEQ ID NO: 2387050 - RNA, 19 nt, Artificial Sequence
  Description of Artificial Sequence: Synthetic oligonucleotide
  Sense strand starting at position 1258 of SEQ ID NO: 1886091
agaauaguuuguguacuag

SEQ ID NO: 2387051 - RNA, 19 nt, Artificial Sequence
  Description of Artificial Sequence: Synthetic oligonucleotide
  Antisense strand to SEQ ID NO: 2387050
cuaguacacaaacuauucu

SEQ ID NO: 2387052 - RNA, 19 nt, Artificial Sequence
  Description of Artificial Sequence: Synthetic oligonucleotide
  Sense strand starting at position 1262 of SEQ ID NO: 1886091
uaguuuguguacuagggaa

SEQ ID NO: 2387053 - RNA, 19 nt, Artificial Sequence
  Description of Artificial Sequence: Synthetic oligonucleotide
  Antisense strand to SEQ ID NO: 2387052
uucccuaguacacaaacua

SEQ ID NO: 2387054 - RNA, 19 nt, Artificial Sequence
  Description of Artificial Sequence: Synthetic oligonucleotide
  Sense strand starting at position 1264 of SEQ ID NO: 1886091
guuuguguacuagggaaag

SEQ ID NO: 2387055 - RNA, 19 nt, Artificial Sequence
  Description of Artificial Sequence: Synthetic oligonucleotide
  Antisense strand to SEQ ID NO: 2387054
cuuucccuaguacacaaac

SEQ ID NO: 2387056 - RNA, 19 nt, Artificial Sequence
  Description of Artificial Sequence: Synthetic oligonucleotide
  Sense strand starting at position 2782 of SEQ ID NO: 1886091
uuuaaugaccagugaugcu

SEQ ID NO: 2387057 - RNA, 19 nt, Artificial Sequence
  Description of Artificial Sequence: Synthetic oligonucleotide
  Antisense strand to SEQ ID NO: 2387056
agcaucacuggucauuaaa

SEQ ID NO: 2387058 - RNA, 19 nt, Artificial Sequence
  Description of Artificial Sequence: Synthetic oligonucleotide
  Sense strand starting at position 294 of SEQ ID NO: 1886092
ucaguuaauguugaaacga

SEQ ID NO: 2387059 - RNA, 19 nt, Artificial Sequence
  Description of Artificial Sequence: Synthetic oligonucleotide
  Antisense strand to SEQ ID NO: 2387058
ucguuucaacauuaacuga

SEQ ID NO: 2387060 - RNA, 19 nt, Artificial Sequence
  Description of Artificial Sequence: Synthetic oligonucleotide
  Sense strand starting at position 528 of SEQ ID NO: 1886092
ugugaaaccgaauaagucu

SEQ ID NO: 2387061 - RNA, 19 nt, Artificial Sequence
  Description of Artificial Sequence: Synthetic oligonucleotide
  Antisense strand to SEQ ID NO: 2387060
agacuuauucgguuucaca

SEQ ID NO: 2387062 - RNA, 19 nt, Artificial Sequence
  Description of Artificial Sequence: Synthetic oligonucleotide
  Sense strand starting at position 845 of SEQ ID NO: 1886092
aaaucauccugcguacaag

SEQ ID NO: 2387063 - RNA, 19 nt, Artificial Sequence
  Description of Artificial Sequence: Synthetic oligonucleotide
  Antisense strand to SEQ ID NO: 2387062
cuuguacgcaggaugauuu

SEQ ID NO: 2387064 - RNA, 19 nt, Artificial Sequence
  Description of Artificial Sequence: Synthetic oligonucleotide
  Sense strand starting at position 846 of SEQ ID NO: 1886092
aaucauccugcguacaaga

SEQ ID NO: 2387065 - RNA, 19 nt, Artificial Sequence
  Description of Artificial Sequence: Synthetic oligonucleotide
  Antisense strand to SEQ ID NO: 2387064
ucuuguacgcaggaugauu

SEQ ID NO: 2387066 - RNA, 19 nt, Artificial Sequence
  Description of Artificial Sequence: Synthetic oligonucleotide
  Sense strand starting at position 848 of SEQ ID NO: 1886092
ucauccugcguacaagaaa

SEQ ID NO: 2387067 - RNA, 19 nt, Artificial Sequence
  Description of Artificial Sequence: Synthetic oligonucleotide
  Antisense strand to SEQ ID NO: 2387066
uuucuuguacgcaggauga

SEQ ID NO: 2387068 - RNA, 19 nt, Artificial Sequence
  Description of Artificial Sequence: Synthetic oligonucleotide
  Sense strand starting at position 868 of SEQ ID NO: 1886092
augaaacuguaugcugaau

SEQ ID NO: 2387069 - RNA, 19 nt, Artificial Sequence
  Description of Artificial Sequence: Synthetic oligonucleotide
  Antisense strand to SEQ ID NO: 2387068
auucagcauacaguuucau

SEQ ID NO: 2387070 - RNA, 19 nt, Artificial Sequence
  Description of Artificial Sequence: Synthetic oligonucleotide
  Sense strand starting at position 968 of SEQ ID NO: 1886092
cuaugaacaguauguagaa

SEQ ID NO: 2387071 - RNA, 19 nt, Artificial Sequence
  Description of Artificial Sequence: Synthetic oligonucleotide
  Antisense strand to SEQ ID NO: 2387070
uucuacauacuguucauag

SEQ ID NO: 2387072 - RNA, 19 nt, Artificial Sequence
  Description of Artificial Sequence: Synthetic oligonucleotide
  Sense strand starting at position 1113 of SEQ ID NO: 1886092
cagggaaauccguggagaa

SEQ ID NO: 2387073 - RNA, 19 nt, Artificial Sequence
  Description of Artificial Sequence: Synthetic oligonucleotide
  Antisense strand to SEQ ID NO: 2387072
uucuccacggauuucccug

SEQ ID NO: 2387074 - RNA, 19 nt, Artificial Sequence
  Description of Artificial Sequence: Synthetic oligonucleotide
  Sense strand starting at position 1243 of SEQ ID NO: 1886092
cagguuccaccucgagaau

SEQ ID NO: 2387075 - RNA, 19 nt, Artificial Sequence
  Description of Artificial Sequence: Synthetic oligonucleotide
  Antisense strand to SEQ ID NO: 2387074
auucucgagguggaaccug

SEQ ID NO: 2387076 - RNA, 19 nt, Artificial Sequence
  Description of Artificial Sequence: Synthetic oligonucleotide
  Sense strand starting at position 1244 of SEQ ID NO: 1886092
agguuccaccucgagaaua

SEQ ID NO: 2387077 - RNA, 19 nt, Artificial Sequence
  Description of Artificial Sequence: Synthetic oligonucleotide
  Antisense strand to SEQ ID NO: 2387076
uauucucgagguggaaccu

SEQ ID NO: 2387078 - RNA, 19 nt, Artificial Sequence
  Description of Artificial Sequence: Synthetic oligonucleotide
  Sense strand starting at position 1246 of SEQ ID NO: 1886092
guuccaccucgagaauagu

SEQ ID NO: 2387079 - RNA, 19 nt, Artificial Sequence
  Description of Artificial Sequence: Synthetic oligonucleotide
  Antisense strand to SEQ ID NO: 2387078
acuauucucgagguggaac

SEQ ID NO: 2387080 - RNA, 19 nt, Artificial Sequence
  Description of Artificial Sequence: Synthetic oligonucleotide
  Sense strand starting at position 1381 of SEQ ID NO: 1886092
aaggaagaguucuccauau

SEQ ID NO: 2387081 - RNA, 19 nt, Artificial Sequence
  Description of Artificial Sequence: Synthetic oligonucleotide
  Antisense strand to SEQ ID NO: 2387080
auauggagaacucuuccuu

SEQ ID NO: 2387082 - RNA, 19 nt, Artificial Sequence
  Description of Artificial Sequence: Synthetic oligonucleotide
  Sense strand starting at position 1497 of SEQ ID NO: 1886092
cuguuaacauuauuagaag

SEQ ID NO: 2387083 - RNA, 19 nt, Artificial Sequence
  Description of Artificial Sequence: Synthetic oligonucleotide
  Antisense strand to SEQ ID NO: 2387082
cuucuaauaauguuaacag

SEQ ID NO: 2387084 - RNA, 19 nt, Artificial Sequence
  Description of Artificial Sequence: Synthetic oligonucleotide
  Sense strand starting at position 1547 of SEQ ID NO: 1886092
ucaagaggaucauaaauau

SEQ ID NO: 2387085 - RNA, 19 nt, Artificial Sequence
  Description of Artificial Sequence: Synthetic oligonucleotide
  Antisense strand to SEQ ID NO: 2387084
auauuuaugauccucuuga

SEQ ID NO: 2387086 - RNA, 19 nt, Artificial Sequence
  Description of Artificial Sequence: Synthetic oligonucleotide
  Sense strand starting at position 1565 of SEQ ID NO: 1886092
ucagguugucuuuaccuga

SEQ ID NO: 2387087 - RNA, 19 nt, Artificial Sequence
  Description of Artificial Sequence: Synthetic oligonucleotide
  Antisense strand to SEQ ID NO: 2387086
ucagguaaagacaaccuga

SEQ ID NO: 2387088 - RNA, 19 nt, Artificial Sequence
  Description of Artificial Sequence: Synthetic oligonucleotide
  Sense strand starting at position 1572 of SEQ ID NO: 1886092
gucuuuaccugaguacgaa

SEQ ID NO: 2387089 - RNA, 19 nt, Artificial Sequence
  Description of Artificial Sequence: Synthetic oligonucleotide
  Antisense strand to SEQ ID NO: 2387088
uucguacucagguaaagac

SEQ ID NO: 2387090 - RNA, 19 nt, Artificial Sequence
  Description of Artificial Sequence: Synthetic oligonucleotide
  Sense strand starting at position 1601 of SEQ ID NO: 1886092
cuguauauccagcacugau

SEQ ID NO: 2387091 - RNA, 19 nt, Artificial Sequence
  Description of Artificial Sequence: Synthetic oligonucleotide
  Antisense strand to SEQ ID NO: 2387090
aucagugcuggauauacag

SEQ ID NO: 2387092 - RNA, 19 nt, Artificial Sequence
  Description of Artificial Sequence: Synthetic oligonucleotide
  Sense strand starting at position 1694 of SEQ ID NO: 1886092
ggauuaggaaguugugaag

SEQ ID NO: 2387093 - RNA, 19 nt, Artificial Sequence
  Description of Artificial Sequence: Synthetic oligonucleotide
  Antisense strand to SEQ ID NO: 2387092
cuucacaacuuccuaaucc

SEQ ID NO: 2387094 - RNA, 19 nt, Artificial Sequence
  Description of Artificial Sequence: Synthetic oligonucleotide
  Sense strand starting at position 1846 of SEQ ID NO: 1886092
uuauaaucauguuccaagu

SEQ ID NO: 2387095 - RNA, 19 nt, Artificial Sequence
  Description of Artificial Sequence: Synthetic oligonucleotide
  Antisense strand to SEQ ID NO: 2387094
acuuggaacaugauuauaa

SEQ ID NO: 2387096 - RNA, 19 nt, Artificial Sequence
  Description of Artificial Sequence: Synthetic oligonucleotide
  Sense strand starting at position 1875 of SEQ ID NO: 1886092
gauagugagaauugucagu

SEQ ID NO: 2387097 - RNA, 19 nt, Artificial Sequence
  Description of Artificial Sequence: Synthetic oligonucleotide
  Antisense strand to SEQ ID NO: 2387096
acugacaauucucacuauc

SEQ ID NO: 2387098 - RNA, 19 nt, Artificial Sequence
  Description of Artificial Sequence: Synthetic oligonucleotide
  Sense strand starting at position 1877 of SEQ ID NO: 1886092
uagugagaauugucaguaa

SEQ ID NO: 2387099 - RNA, 19 nt, Artificial Sequence
  Description of Artificial Sequence: Synthetic oligonucleotide
  Antisense strand to SEQ ID NO: 2387098
uuacugacaauucucacua

SEQ ID NO: 2387100 - RNA, 19 nt, Artificial Sequence
  Description of Artificial Sequence: Synthetic oligonucleotide
  Sense strand starting at position 1880 of SEQ ID NO: 1886092
ugagaauugucaguaagau

SEQ ID NO: 2387101 - RNA, 19 nt, Artificial Sequence
  Description of Artificial Sequence: Synthetic oligonucleotide
  Antisense strand to SEQ ID NO: 2387100
aucuuacugacaauucuca

SEQ ID NO: 2387102 - RNA, 19 nt, Artificial Sequence
  Description of Artificial Sequence: Synthetic oligonucleotide
  Sense strand starting at position 1886 of SEQ ID NO: 1886092
uugucaguaagauaguaag

SEQ ID NO: 2387103 - RNA, 19 nt, Artificial Sequence
  Description of Artificial Sequence: Synthetic oligonucleotide
  Antisense strand to SEQ ID NO: 2387102
cuuacuaucuuacugacaa

SEQ ID NO: 2387104 - RNA, 19 nt, Artificial Sequence
  Description of Artificial Sequence: Synthetic oligonucleotide
  Sense strand starting at position 2025 of SEQ ID NO: 1886092
uccggauucugaccacauu

SEQ ID NO: 2387105 - RNA, 19 nt, Artificial Sequence
  Description of Artificial Sequence: Synthetic oligonucleotide
  Antisense strand to SEQ ID NO: 2387104
aauguggucagaauccgga

SEQ ID NO: 2387106 - RNA, 19 nt, Artificial Sequence
  Description of Artificial Sequence: Synthetic oligonucleotide
  Sense strand starting at position 2066 of SEQ ID NO: 1886092
gacgauuccuagucuaagc

SEQ ID NO: 2387107 - RNA, 19 nt, Artificial Sequence
  Description of Artificial Sequence: Synthetic oligonucleotide
  Antisense strand to SEQ ID NO: 2387106
gcuuagacuaggaaucguc

SEQ ID NO: 2387108 - RNA, 19 nt, Artificial Sequence
  Description of Artificial Sequence: Synthetic oligonucleotide
  Sense strand starting at position 2095 of SEQ ID NO: 1886092
uccucuuaugguuauugca

SEQ ID NO: 2387109 - RNA, 19 nt, Artificial Sequence
  Description of Artificial Sequence: Synthetic oligonucleotide
  Antisense strand to SEQ ID NO: 2387108
ugcaauaaccauaagagga

SEQ ID NO: 2387110 - RNA, 19 nt, Artificial Sequence
  Description of Artificial Sequence: Synthetic oligonucleotide
  Sense strand starting at position 2097 of SEQ ID NO: 1886092
cucuuaugguuauugcaaa

SEQ ID NO: 2387111 - RNA, 19 nt, Artificial Sequence
  Description of Artificial Sequence: Synthetic oligonucleotide
  Antisense strand to SEQ ID NO: 2387110
uuugcaauaaccauaagag

SEQ ID NO: 2387112 - RNA, 19 nt, Artificial Sequence
  Description of Artificial Sequence: Synthetic oligonucleotide
  Sense strand starting at position 2134 of SEQ ID NO: 1886092
ccagcuucugccguugauu

SEQ ID NO: 2387113 - RNA, 19 nt, Artificial Sequence
  Description of Artificial Sequence: Synthetic oligonucleotide
  Antisense strand to SEQ ID NO: 2387112
aaucaacggcagaagcugg

SEQ ID NO: 2387114 - RNA, 19 nt, Artificial Sequence
  Description of Artificial Sequence: Synthetic oligonucleotide
  Sense strand starting at position 2748 of SEQ ID NO: 1886092
auaguaucucauuguacuu

SEQ ID NO: 2387115 - RNA, 19 nt, Artificial Sequence
  Description of Artificial Sequence: Synthetic oligonucleotide
  Antisense strand to SEQ ID NO: 2387114
aaguacaaugagauacuau

SEQ ID NO: 2387116 - RNA, 19 nt, Artificial Sequence
  Description of Artificial Sequence: Synthetic oligonucleotide
  Sense strand starting at position 2904 of SEQ ID NO: 1886092
agguuuaccauguggguaa

SEQ ID NO: 2387117 - RNA, 19 nt, Artificial Sequence
  Description of Artificial Sequence: Synthetic oligonucleotide
  Antisense strand to SEQ ID NO: 2387116
uuacccacaugguaaaccu

SEQ ID NO: 2387118 - RNA, 19 nt, Artificial Sequence
  Description of Artificial Sequence: Synthetic oligonucleotide
  Sense strand starting at position 2922 of SEQ ID NO: 1886092
acagaauaauccguacaac

SEQ ID NO: 2387119 - RNA, 19 nt, Artificial Sequence
  Description of Artificial Sequence: Synthetic oligonucleotide
  Antisense strand to SEQ ID NO: 2387118
guuguacggauuauucugu

SEQ ID NO: 2387120 - RNA, 19 nt, Artificial Sequence
  Description of Artificial Sequence: Synthetic oligonucleotide
  Sense strand starting at position 3121 of SEQ ID NO: 1886092
guuuauuucucugccacca

SEQ ID NO: 2387121 - RNA, 19 nt, Artificial Sequence
  Description of Artificial Sequence: Synthetic oligonucleotide
  Antisense strand to SEQ ID NO: 2387120
ugguggcagagaaauaaac

SEQ ID NO: 2387122 - RNA, 19 nt, Artificial Sequence
  Description of Artificial Sequence: Synthetic oligonucleotide
  Sense strand starting at position 3248 of SEQ ID NO: 1886092
uguggucucucuuuggaau

SEQ ID NO: 2387123 - RNA, 19 nt, Artificial Sequence
  Description of Artificial Sequence: Synthetic oligonucleotide
  Antisense strand to SEQ ID NO: 2387122
auuccaaagagagaccaca

SEQ ID NO: 2387124 - RNA, 19 nt, Artificial Sequence
  Description of Artificial Sequence: Synthetic oligonucleotide
  Sense strand starting at position 3249 of SEQ ID NO: 1886092
guggucucucuuuggaaug

SEQ ID NO: 2387125 - RNA, 19 nt, Artificial Sequence
  Description of Artificial Sequence: Synthetic oligonucleotide
  Antisense strand to SEQ ID NO: 2387124
cauuccaaagagagaccac

SEQ ID NO: 2387126 - RNA, 19 nt, Artificial Sequence
  Description of Artificial Sequence: Synthetic oligonucleotide
  Sense strand starting at position 3282 of SEQ ID NO: 1886092
gagcacgauuccuccucau

SEQ ID NO: 2387127 - RNA, 19 nt, Artificial Sequence
  Description of Artificial Sequence: Synthetic oligonucleotide
  Antisense strand to SEQ ID NO: 2387126
augaggaggaaucgugcuc

SEQ ID NO: 2387128 - RNA, 19 nt, Artificial Sequence
  Description of Artificial Sequence: Synthetic oligonucleotide
  Sense strand starting at position 3344 of SEQ ID NO: 1886092
uugucauguguggcaguuu

SEQ ID NO: 2387129 - RNA, 19 nt, Artificial Sequence
  Description of Artificial Sequence: Synthetic oligonucleotide
  Antisense strand to SEQ ID NO: 2387128
aaacugccacacaugacaa

SEQ ID NO: 2387130 - RNA, 19 nt, Artificial Sequence
  Description of Artificial Sequence: Synthetic oligonucleotide
  Sense strand starting at position 3382 of SEQ ID NO: 1886092
gguugauauucuucucauc

SEQ ID NO: 2387131 - RNA, 19 nt, Artificial Sequence
  Description of Artificial Sequence: Synthetic oligonucleotide
  Antisense strand to SEQ ID NO: 2387130
gaugagaagaauaucaacc

SEQ ID NO: 2387132 - RNA, 19 nt, Artificial Sequence
  Description of Artificial Sequence: Synthetic oligonucleotide
  Sense strand starting at position 3443 of SEQ ID NO: 1886092
uugugacugcuacaaucaa

SEQ ID NO: 2387133 - RNA, 19 nt, Artificial Sequence
  Description of Artificial Sequence: Synthetic oligonucleotide
  Antisense strand to SEQ ID NO: 2387132
uugauuguagcagucacaa

SEQ ID NO: 2387134 - RNA, 19 nt, Artificial Sequence
  Description of Artificial Sequence: Synthetic oligonucleotide
  Sense strand starting at position 3450 of SEQ ID NO: 1886092
ugcuacaaucaauagagua

SEQ ID NO: 2387135 - RNA, 19 nt, Artificial Sequence
  Description of Artificial Sequence: Synthetic oligonucleotide
  Antisense strand to SEQ ID NO: 2387134
uacucuauugauuguagca

SEQ ID NO: 2387136 - RNA, 19 nt, Artificial Sequence
  Description of Artificial Sequence: Synthetic oligonucleotide
  Sense strand starting at position 3575 of SEQ ID NO: 1886092
agaaguuuacccugugcag

SEQ ID NO: 2387137 - RNA, 19 nt, Artificial Sequence
  Description of Artificial Sequence: Synthetic oligonucleotide
  Antisense strand to SEQ ID NO: 2387136
cugcacaggguaaacuucu

SEQ ID NO: 2387138 - RNA, 19 nt, Artificial Sequence
  Description of Artificial Sequence: Synthetic oligonucleotide
  Sense strand starting at position 66 of SEQ ID NO: 1886093
uuggaacuuuaacguuuaa

SEQ ID NO: 2387139 - RNA, 19 nt, Artificial Sequence
  Description of Artificial Sequence: Synthetic oligonucleotide
  Antisense strand to SEQ ID NO: 2387138
uuaaacguuaaaguuccaa

SEQ ID NO: 2387140 - RNA, 19 nt, Artificial Sequence
  Description of Artificial Sequence: Synthetic oligonucleotide
  Sense strand starting at position 1257 of SEQ ID NO: 1886093
gagaauaguuuguguacug

SEQ ID NO: 2387141 - RNA, 19 nt, Artificial Sequence
  Description of Artificial Sequence: Synthetic oligonucleotide
  Antisense strand to SEQ ID NO: 2387140
caguacacaaacuauucuc

SEQ ID NO: 2387142 - RNA, 19 nt, Artificial Sequence
  Description of Artificial Sequence: Synthetic oligonucleotide
  Sense strand starting at position 3212 of SEQ ID NO: 1886093
uccacaugauuccgacuca

SEQ ID NO: 2387143 - RNA, 19 nt, Artificial Sequence
  Description of Artificial Sequence: Synthetic oligonucleotide
  Antisense strand to SEQ ID NO: 2387142
ugagucggaaucaugugga

SEQ ID NO: 2387144 - RNA, 19 nt, Artificial Sequence
  Description of Artificial Sequence: Synthetic oligonucleotide
  Sense strand starting at position 3306 of SEQ ID NO: 1886093
caagaagucugucgccaaa

SEQ ID NO: 2387145 - RNA, 19 nt, Artificial Sequence
  Description of Artificial Sequence: Synthetic oligonucleotide
  Antisense strand to SEQ ID NO: 2387144
uuuggcgacagacuucuug

SEQ ID NO: 2387146 - RNA, 19 nt, Artificial Sequence
  Description of Artificial Sequence: Synthetic oligonucleotide
  Sense strand starting at position 3308 of SEQ ID NO: 1886093
agaagucugucgccaaaug

SEQ ID NO: 2387147 - RNA, 19 nt, Artificial Sequence
  Description of Artificial Sequence: Synthetic oligonucleotide
  Antisense strand to SEQ ID NO: 2387146
cauuuggcgacagacuucu

SEQ ID NO: 2387148 - RNA, 19 nt, Artificial Sequence
  Description of Artificial Sequence: Synthetic oligonucleotide
  Sense strand starting at position 3488 of SEQ ID NO: 1886093
ugaccuuuaaggugagaua

SEQ ID NO: 2387149 - RNA, 19 nt, Artificial Sequence
  Description of Artificial Sequence: Synthetic oligonucleotide
  Antisense strand to SEQ ID NO: 2387148
uaucucaccuuaaagguca

SEQ ID NO: 2387150 - RNA, 19 nt, Artificial Sequence
  Description of Artificial Sequence: Synthetic oligonucleotide
  Sense strand starting at position 1257 of SEQ ID NO: 1886094
gagaauaguuuguguacua

SEQ ID NO: 2387151 - RNA, 19 nt, Artificial Sequence
  Description of Artificial Sequence: Synthetic oligonucleotide
  Antisense strand to SEQ ID NO: 2387150
uaguacacaaacuauucuc

SEQ ID NO: 2387152 - RNA, 19 nt, Artificial Sequence
  Description of Artificial Sequence: Synthetic oligonucleotide
  Sense strand starting at position 1258 of SEQ ID NO: 1886094
agaauaguuuguguacuag

SEQ ID NO: 2387153 - RNA, 19 nt, Artificial Sequence
  Description of Artificial Sequence: Synthetic oligonucleotide
  Antisense strand to SEQ ID NO: 2387152
cuaguacacaaacuauucu

SEQ ID NO: 2387154 - RNA, 19 nt, Artificial Sequence
  Description of Artificial Sequence: Synthetic oligonucleotide
  Sense strand starting at position 1262 of SEQ ID NO: 1886094
uaguuuguguacuagggaa

SEQ ID NO: 2387155 - RNA, 19 nt, Artificial Sequence
  Description of Artificial Sequence: Synthetic oligonucleotide
  Antisense strand to SEQ ID NO: 2387154
uucccuaguacacaaacua

SEQ ID NO: 2387156 - RNA, 19 nt, Artificial Sequence
  Description of Artificial Sequence: Synthetic oligonucleotide
  Sense strand starting at position 1264 of SEQ ID NO: 1886094
guuuguguacuagggaaag

SEQ ID NO: 2387157 - RNA, 19 nt, Artificial Sequence
  Description of Artificial Sequence: Synthetic oligonucleotide
  Antisense strand to SEQ ID NO: 2387156
cuuucccuaguacacaaac

SEQ ID NO: 2387158 - RNA, 19 nt, Artificial Sequence
  Description of Artificial Sequence: Synthetic oligonucleotide
  Sense strand starting at position 2782 of SEQ ID NO: 1886094
uuuaaugaccagugaugcu

SEQ ID NO: 2387159 - RNA, 19 nt, Artificial Sequence
  Description of Artificial Sequence: Synthetic oligonucleotide
  Antisense strand to SEQ ID NO: 2387158
agcaucacuggucauuaaa

SEQ ID NO: 2387160 - RNA, 19 nt, Artificial Sequence
  Description of Artificial Sequence: Synthetic oligonucleotide
  Sense strand starting at position 294 of SEQ ID NO: 1886095
ucaguuaauguugaaacga

SEQ ID NO: 2387161 - RNA, 19 nt, Artificial Sequence
  Description of Artificial Sequence: Synthetic oligonucleotide
  Antisense strand to SEQ ID NO: 2387160
ucguuucaacauuaacuga

SEQ ID NO: 2387162 - RNA, 19 nt, Artificial Sequence
  Description of Artificial Sequence: Synthetic oligonucleotide
  Sense strand starting at position 528 of SEQ ID NO: 1886095
ugugaaaccgaauaagucu

SEQ ID NO: 2387163 - RNA, 19 nt, Artificial Sequence
  Description of Artificial Sequence: Synthetic oligonucleotide
  Antisense strand to SEQ ID NO: 2387162
agacuuauucgguuucaca

SEQ ID NO: 2387164 - RNA, 19 nt, Artificial Sequence
  Description of Artificial Sequence: Synthetic oligonucleotide
  Sense strand starting at position 845 of SEQ ID NO: 1886095
aaaucauccugcguacaag

SEQ ID NO: 2387165 - RNA, 19 nt, Artificial Sequence
  Description of Artificial Sequence: Synthetic oligonucleotide
  Antisense strand to SEQ ID NO: 2387164
cuuguacgcaggaugauuu

SEQ ID NO: 2387166 - RNA, 19 nt, Artificial Sequence
  Description of Artificial Sequence: Synthetic oligonucleotide
  Sense strand starting at position 846 of SEQ ID NO: 1886095
aaucauccugcguacaaga

SEQ ID NO: 2387167 - RNA, 19 nt, Artificial Sequence
  Description of Artificial Sequence: Synthetic oligonucleotide
  Antisense strand to SEQ ID NO: 2387166
ucuuguacgcaggaugauu

SEQ ID NO: 2387168 - RNA, 19 nt, Artificial Sequence
  Description of Artificial Sequence: Synthetic oligonucleotide
  Sense strand starting at position 848 of SEQ ID NO: 1886095
ucauccugcguacaagaaa

SEQ ID NO: 2387169 - RNA, 19 nt, Artificial Sequence
  Description of Artificial Sequence: Synthetic oligonucleotide
  Antisense strand to SEQ ID NO: 2387168
uuucuuguacgcaggauga

SEQ ID NO: 2387170 - RNA, 19 nt, Artificial Sequence
  Description of Artificial Sequence: Synthetic oligonucleotide
  Sense strand starting at position 868 of SEQ ID NO: 1886095
augaaacuguaugcugaau

SEQ ID NO: 2387171 - RNA, 19 nt, Artificial Sequence
  Description of Artificial Sequence: Synthetic oligonucleotide
  Antisense strand to SEQ ID NO: 2387170
auucagcauacaguuucau

SEQ ID NO: 2387172 - RNA, 19 nt, Artificial Sequence
  Description of Artificial Sequence: Synthetic oligonucleotide
  Sense strand starting at position 968 of SEQ ID NO: 1886095
cuaugaacaguauguagaa

SEQ ID NO: 2387173 - RNA, 19 nt, Artificial Sequence
  Description of Artificial Sequence: Synthetic oligonucleotide
  Antisense strand to SEQ ID NO: 2387172
uucuacauacuguucauag

SEQ ID NO: 2387174 - RNA, 19 nt, Artificial Sequence
  Description of Artificial Sequence: Synthetic oligonucleotide
  Sense strand starting at position 1113 of SEQ ID NO: 1886095
cagggaaauccguggagaa

SEQ ID NO: 2387175 - RNA, 19 nt, Artificial Sequence
  Description of Artificial Sequence: Synthetic oligonucleotide
  Antisense strand to SEQ ID NO: 2387174
uucuccacggauuucccug

SEQ ID NO: 2387176 - RNA, 19 nt, Artificial Sequence
  Description of Artificial Sequence: Synthetic oligonucleotide
  Sense strand starting at position 1243 of SEQ ID NO: 1886095
cagguuccaccucgagaau

SEQ ID NO: 2387177 - RNA, 19 nt, Artificial Sequence
  Description of Artificial Sequence: Synthetic oligonucleotide
  Antisense strand to SEQ ID NO: 2387176
auucucgagguggaaccug

SEQ ID NO: 2387178 - RNA, 19 nt, Artificial Sequence
  Description of Artificial Sequence: Synthetic oligonucleotide
  Sense strand starting at position 1244 of SEQ ID NO: 1886095
agguuccaccucgagaaua

SEQ ID NO: 2387179 - RNA, 19 nt, Artificial Sequence
  Description of Artificial Sequence: Synthetic oligonucleotide
  Antisense strand to SEQ ID NO: 2387178
uauucucgagguggaaccu

SEQ ID NO: 2387180 - RNA, 19 nt, Artificial Sequence
  Description of Artificial Sequence: Synthetic oligonucleotide
  Sense strand starting at position 1246 of SEQ ID NO: 1886095
guuccaccucgagaauagu

SEQ ID NO: 2387181 - RNA, 19 nt, Artificial Sequence
  Description of Artificial Sequence: Synthetic oligonucleotide
  Antisense strand to SEQ ID NO: 2387180
acuauucucgagguggaac

SEQ ID NO: 2387182 - RNA, 19 nt, Artificial Sequence
  Description of Artificial Sequence: Synthetic oligonucleotide
  Sense strand starting at position 1381 of SEQ ID NO: 1886095
aaggaagaguucuccauau

SEQ ID NO: 2387183 - RNA, 19 nt, Artificial Sequence
  Description of Artificial Sequence: Synthetic oligonucleotide
  Antisense strand to SEQ ID NO: 2387182
auauggagaacucuuccuu

SEQ ID NO: 2387184 - RNA, 19 nt, Artificial Sequence
  Description of Artificial Sequence: Synthetic oligonucleotide
  Sense strand starting at position 1497 of SEQ ID NO: 1886095
cuguuaacauuauuagaag

SEQ ID NO: 2387185 - RNA, 19 nt, Artificial Sequence
  Description of Artificial Sequence: Synthetic oligonucleotide
  Antisense strand to SEQ ID NO: 2387184
cuucuaauaauguuaacag

SEQ ID NO: 2387186 - RNA, 19 nt, Artificial Sequence
  Description of Artificial Sequence: Synthetic oligonucleotide
  Sense strand starting at position 1547 of SEQ ID NO: 1886095
ucaagaggaucauaaauau

SEQ ID NO: 2387187 - RNA, 19 nt, Artificial Sequence
  Description of Artificial Sequence: Synthetic oligonucleotide
  Antisense strand to SEQ ID NO: 2387186
auauuuaugauccucuuga

SEQ ID NO: 2387188 - RNA, 19 nt, Artificial Sequence
  Description of Artificial Sequence: Synthetic oligonucleotide
  Sense strand starting at position 1565 of SEQ ID NO: 1886095
ucagguugucuuuaccuga

SEQ ID NO: 2387189 - RNA, 19 nt, Artificial Sequence
  Description of Artificial Sequence: Synthetic oligonucleotide
  Antisense strand to SEQ ID NO: 2387188
ucagguaaagacaaccuga

SEQ ID NO: 2387190 - RNA, 19 nt, Artificial Sequence
  Description of Artificial Sequence: Synthetic oligonucleotide
  Sense strand starting at position 1572 of SEQ ID NO: 1886095
gucuuuaccugaguacgaa

SEQ ID NO: 2387191 - RNA, 19 nt, Artificial Sequence
  Description of Artificial Sequence: Synthetic oligonucleotide
  Antisense strand to SEQ ID NO: 2387190
uucguacucagguaaagac

SEQ ID NO: 2387192 - RNA, 19 nt, Artificial Sequence
  Description of Artificial Sequence: Synthetic oligonucleotide
  Sense strand starting at position 1601 of SEQ ID NO: 1886095
cuguauauccagcacugau

SEQ ID NO: 2387193 - RNA, 19 nt, Artificial Sequence
  Description of Artificial Sequence: Synthetic oligonucleotide
  Antisense strand to SEQ ID NO: 2387192
aucagugcuggauauacag

SEQ ID NO: 2387194 - RNA, 19 nt, Artificial Sequence
  Description of Artificial Sequence: Synthetic oligonucleotide
  Sense strand starting at position 1694 of SEQ ID NO: 1886095
ggauuaggaaguugugaag

SEQ ID NO: 2387195 - RNA, 19 nt, Artificial Sequence
  Description of Artificial Sequence: Synthetic oligonucleotide
  Antisense strand to SEQ ID NO: 2387194
cuucacaacuuccuaaucc

SEQ ID NO: 2387196 - RNA, 19 nt, Artificial Sequence
  Description of Artificial Sequence: Synthetic oligonucleotide
  Sense strand starting at position 1846 of SEQ ID NO: 1886095
uuauaaucauguuccaagu

SEQ ID NO: 2387197 - RNA, 19 nt, Artificial Sequence
  Description of Artificial Sequence: Synthetic oligonucleotide
  Antisense strand to SEQ ID NO: 2387196
acuuggaacaugauuauaa

SEQ ID NO: 2387198 - RNA, 19 nt, Artificial Sequence
  Description of Artificial Sequence: Synthetic oligonucleotide
  Sense strand starting at position 1875 of SEQ ID NO: 1886095
gauagugagaauugucagu

SEQ ID NO: 2387199 - RNA, 19 nt, Artificial Sequence
  Description of Artificial Sequence: Synthetic oligonucleotide
  Antisense strand to SEQ ID NO: 2387198
acugacaauucucacuauc

SEQ ID NO: 2387200 - RNA, 19 nt, Artificial Sequence
  Description of Artificial Sequence: Synthetic oligonucleotide
  Sense strand starting at position 1877 of SEQ ID NO: 1886095
uagugagaauugucaguaa

SEQ ID NO: 2387201 - RNA, 19 nt, Artificial Sequence
  Description of Artificial Sequence: Synthetic oligonucleotide
  Antisense strand to SEQ ID NO: 2387200
uuacugacaauucucacua

SEQ ID NO: 2387202 - RNA, 19 nt, Artificial Sequence
  Description of Artificial Sequence: Synthetic oligonucleotide
  Sense strand starting at position 1880 of SEQ ID NO: 1886095
ugagaauugucaguaagau

SEQ ID NO: 2387203 - RNA, 19 nt, Artificial Sequence
  Description of Artificial Sequence: Synthetic oligonucleotide
  Antisense strand to SEQ ID NO: 2387202
aucuuacugacaauucuca

SEQ ID NO: 2387204 - RNA, 19 nt, Artificial Sequence
  Description of Artificial Sequence: Synthetic oligonucleotide
  Sense strand starting at position 1886 of SEQ ID NO: 1886095
uugucaguaagauaguaag

SEQ ID NO: 2387205 - RNA, 19 nt, Artificial Sequence
  Description of Artificial Sequence: Synthetic oligonucleotide
  Antisense strand to SEQ ID NO: 2387204
cuuacuaucuuacugacaa

SEQ ID NO: 2387206 - RNA, 19 nt, Artificial Sequence
  Description of Artificial Sequence: Synthetic oligonucleotide
  Sense strand starting at position 2025 of SEQ ID NO: 1886095
uccggauucugaccacauu

SEQ ID NO: 2387207 - RNA, 19 nt, Artificial Sequence
  Description of Artificial Sequence: Synthetic oligonucleotide
  Antisense strand to SEQ ID NO: 2387206
aauguggucagaauccgga

SEQ ID NO: 2387208 - RNA, 19 nt, Artificial Sequence
  Description of Artificial Sequence: Synthetic oligonucleotide
  Sense strand starting at position 2066 of SEQ ID NO: 1886095
gacgauuccuagucuaagc

SEQ ID NO: 2387209 - RNA, 19 nt, Artificial Sequence
  Description of Artificial Sequence: Synthetic oligonucleotide
  Antisense strand to SEQ ID NO: 2387208
gcuuagacuaggaaucguc

SEQ ID NO: 2387210 - RNA, 19 nt, Artificial Sequence
  Description of Artificial Sequence: Synthetic oligonucleotide
  Sense strand starting at position 2095 of SEQ ID NO: 1886095
uccucuuaugguuauugca

SEQ ID NO: 2387211 - RNA, 19 nt, Artificial Sequence
  Description of Artificial Sequence: Synthetic oligonucleotide
  Antisense strand to SEQ ID NO: 2387210
ugcaauaaccauaagagga

SEQ ID NO: 2387212 - RNA, 19 nt, Artificial Sequence
  Description of Artificial Sequence: Synthetic oligonucleotide
  Sense strand starting at position 2097 of SEQ ID NO: 1886095
cucuuaugguuauugcaaa

SEQ ID NO: 2387213 - RNA, 19 nt, Artificial Sequence
  Description of Artificial Sequence: Synthetic oligonucleotide
  Antisense strand to SEQ ID NO: 2387212
uuugcaauaaccauaagag

SEQ ID NO: 2387214 - RNA, 19 nt, Artificial Sequence
  Description of Artificial Sequence: Synthetic oligonucleotide
  Sense strand starting at position 2134 of SEQ ID NO: 1886095
ccagcuucugccguugauu

SEQ ID NO: 2387215 - RNA, 19 nt, Artificial Sequence
  Description of Artificial Sequence: Synthetic oligonucleotide
  Antisense strand to SEQ ID NO: 2387214
aaucaacggcagaagcugg

SEQ ID NO: 2387216 - RNA, 19 nt, Artificial Sequence
  Description of Artificial Sequence: Synthetic oligonucleotide
  Sense strand starting at position 2748 of SEQ ID NO: 1886095
auaguaucucauuguacuu

SEQ ID NO: 2387217 - RNA, 19 nt, Artificial Sequence
  Description of Artificial Sequence: Synthetic oligonucleotide
  Antisense strand to SEQ ID NO: 2387216
aaguacaaugagauacuau

SEQ ID NO: 2387218 - RNA, 19 nt, Artificial Sequence
  Description of Artificial Sequence: Synthetic oligonucleotide
  Sense strand starting at position 2904 of SEQ ID NO: 1886095
agguuuaccauguggguaa

SEQ ID NO: 2387219 - RNA, 19 nt, Artificial Sequence
  Description of Artificial Sequence: Synthetic oligonucleotide
  Antisense strand to SEQ ID NO: 2387218
uuacccacaugguaaaccu

SEQ ID NO: 2387220 - RNA, 19 nt, Artificial Sequence
  Description of Artificial Sequence: Synthetic oligonucleotide
  Sense strand starting at position 2922 of SEQ ID NO: 1886095
acagaauaauccguacaac

SEQ ID NO: 2387221 - RNA, 19 nt, Artificial Sequence
  Description of Artificial Sequence: Synthetic oligonucleotide
  Antisense strand to SEQ ID NO: 2387220
guuguacggauuauucugu

SEQ ID NO: 2387222 - RNA, 19 nt, Artificial Sequence
  Description of Artificial Sequence: Synthetic oligonucleotide
  Sense strand starting at position 3121 of SEQ ID NO: 1886095
guuuauuucucugccacca

SEQ ID NO: 2387223 - RNA, 19 nt, Artificial Sequence
  Description of Artificial Sequence: Synthetic oligonucleotide
  Antisense strand to SEQ ID NO: 2387222
ugguggcagagaaauaaac

SEQ ID NO: 2387224 - RNA, 19 nt, Artificial Sequence
  Description of Artificial Sequence: Synthetic oligonucleotide
  Sense strand starting at position 3248 of SEQ ID NO: 1886095
uguggucucucuuuggaau

SEQ ID NO: 2387225 - RNA, 19 nt, Artificial Sequence
  Description of Artificial Sequence: Synthetic oligonucleotide
  Antisense strand to SEQ ID NO: 2387224
auuccaaagagagaccaca

SEQ ID NO: 2387226 - RNA, 19 nt, Artificial Sequence
  Description of Artificial Sequence: Synthetic oligonucleotide
  Sense strand starting at position 3249 of SEQ ID NO: 1886095
guggucucucuuuggaaug

SEQ ID NO: 2387227 - RNA, 19 nt, Artificial Sequence
  Description of Artificial Sequence: Synthetic oligonucleotide
  Antisense strand to SEQ ID NO: 2387226
cauuccaaagagagaccac

SEQ ID NO: 2387228 - RNA, 19 nt, Artificial Sequence
  Description of Artificial Sequence: Synthetic oligonucleotide
  Sense strand starting at position 3282 of SEQ ID NO: 1886095
gagcacgauuccuccucau

SEQ ID NO: 2387229 - RNA, 19 nt, Artificial Sequence
  Description of Artificial Sequence: Synthetic oligonucleotide
  Antisense strand to SEQ ID NO: 2387228
augaggaggaaucgugcuc

SEQ ID NO: 2387230 - RNA, 19 nt, Artificial Sequence
  Description of Artificial Sequence: Synthetic oligonucleotide
  Sense strand starting at position 3344 of SEQ ID NO: 1886095
uugucauguguggcaguuu

SEQ ID NO: 2387231 - RNA, 19 nt, Artificial Sequence
  Description of Artificial Sequence: Synthetic oligonucleotide
  Antisense strand to SEQ ID NO: 2387230
aaacugccacacaugacaa

SEQ ID NO: 2387232 - RNA, 19 nt, Artificial Sequence
  Description of Artificial Sequence: Synthetic oligonucleotide
  Sense strand starting at position 3382 of SEQ ID NO: 1886095
gguugauauucuucucauc

SEQ ID NO: 2387233 - RNA, 19 nt, Artificial Sequence
  Description of Artificial Sequence: Synthetic oligonucleotide
  Antisense strand to SEQ ID NO: 2387232
gaugagaagaauaucaacc

SEQ ID NO: 2387234 - RNA, 19 nt, Artificial Sequence
  Description of Artificial Sequence: Synthetic oligonucleotide
  Sense strand starting at position 3443 of SEQ ID NO: 1886095
uugugacugcuacaaucaa

SEQ ID NO: 2387235 - RNA, 19 nt, Artificial Sequence
  Description of Artificial Sequence: Synthetic oligonucleotide
  Antisense strand to SEQ ID NO: 2387234
uugauuguagcagucacaa

SEQ ID NO: 2387236 - RNA, 19 nt, Artificial Sequence
  Description of Artificial Sequence: Synthetic oligonucleotide
  Sense strand starting at position 3450 of SEQ ID NO: 1886095
ugcuacaaucaauagagua

SEQ ID NO: 2387237 - RNA, 19 nt, Artificial Sequence
  Description of Artificial Sequence: Synthetic oligonucleotide
  Antisense strand to SEQ ID NO: 2387236
uacucuauugauuguagca

SEQ ID NO: 2387238 - RNA, 19 nt, Artificial Sequence
  Description of Artificial Sequence: Synthetic oligonucleotide
  Sense strand starting at position 3575 of SEQ ID NO: 1886095
agaaguuuacccugugcag

SEQ ID NO: 2387239 - RNA, 19 nt, Artificial Sequence
  Description of Artificial Sequence: Synthetic oligonucleotide
  Antisense strand to SEQ ID NO: 2387238
cugcacaggguaaacuucu

SEQ ID NO: 2387240 - RNA, 19 nt, Artificial Sequence
  Description of Artificial Sequence: Synthetic oligonucleotide
  Sense strand starting at position 239 of SEQ ID NO: 1886096
agaaauguccuaugagcaa

SEQ ID NO: 2387241 - RNA, 19 nt, Artificial Sequence
  Description of Artificial Sequence: Synthetic oligonucleotide
  Antisense strand to SEQ ID NO: 2387240
uugcucauaggacauuucu

SEQ ID NO: 2387242 - RNA, 19 nt, Artificial Sequence
  Description of Artificial Sequence: Synthetic oligonucleotide
  Sense strand starting at position 243 of SEQ ID NO: 1886096
auguccuaugagcaaauau

SEQ ID NO: 2387243 - RNA, 19 nt, Artificial Sequence
  Description of Artificial Sequence: Synthetic oligonucleotide
  Antisense strand to SEQ ID NO: 2387242
auauuugcucauaggacau

SEQ ID NO: 2387244 - RNA, 19 nt, Artificial Sequence
  Description of Artificial Sequence: Synthetic oligonucleotide
  Sense strand starting at position 385 of SEQ ID NO: 1886096
cuucuaaugguguaaggac

SEQ ID NO: 2387245 - RNA, 19 nt, Artificial Sequence
  Description of Artificial Sequence: Synthetic oligonucleotide
  Antisense strand to SEQ ID NO: 2387244
guccuuacaccauuagaag

SEQ ID NO: 2387246 - RNA, 19 nt, Artificial Sequence
  Description of Artificial Sequence: Synthetic oligonucleotide
  Sense strand starting at position 412 of SEQ ID NO: 1886096
aaugaagaagaguguguaa

SEQ ID NO: 2387247 - RNA, 19 nt, Artificial Sequence
  Description of Artificial Sequence: Synthetic oligonucleotide
  Antisense strand to SEQ ID NO: 2387246
uuacacacucuucuucauu

SEQ ID NO: 2387248 - RNA, 19 nt, Artificial Sequence
  Description of Artificial Sequence: Synthetic oligonucleotide
  Sense strand starting at position 414 of SEQ ID NO: 1886096
ugaagaagaguguguaaag

SEQ ID NO: 2387249 - RNA, 19 nt, Artificial Sequence
  Description of Artificial Sequence: Synthetic oligonucleotide
  Antisense strand to SEQ ID NO: 2387248
cuuuacacacucuucuuca

SEQ ID NO: 2387250 - RNA, 19 nt, Artificial Sequence
  Description of Artificial Sequence: Synthetic oligonucleotide
  Sense strand starting at position 440 of SEQ ID NO: 1886096
uuauauugugaccaucuuu

SEQ ID NO: 2387251 - RNA, 19 nt, Artificial Sequence
  Description of Artificial Sequence: Synthetic oligonucleotide
  Antisense strand to SEQ ID NO: 2387250
aaagauggucacaauauaa

SEQ ID NO: 2387252 - RNA, 19 nt, Artificial Sequence
  Description of Artificial Sequence: Synthetic oligonucleotide
  Sense strand starting at position 492 of SEQ ID NO: 1886096
cucuguacucuggaaucaa

SEQ ID NO: 2387253 - RNA, 19 nt, Artificial Sequence
  Description of Artificial Sequence: Synthetic oligonucleotide
  Antisense strand to SEQ ID NO: 2387252
uugauuccagaguacagag

SEQ ID NO: 2387254 - RNA, 19 nt, Artificial Sequence
  Description of Artificial Sequence: Synthetic oligonucleotide
  Sense strand starting at position 554 of SEQ ID NO: 1886096
uaaggcaugguauaaaguu

SEQ ID NO: 2387255 - RNA, 19 nt, Artificial Sequence
  Description of Artificial Sequence: Synthetic oligonucleotide
  Antisense strand to SEQ ID NO: 2387254
aacuuuauaccaugccuua

SEQ ID NO: 2387256 - RNA, 19 nt, Artificial Sequence
  Description of Artificial Sequence: Synthetic oligonucleotide
  Sense strand starting at position 589 of SEQ ID NO: 1886096
guaagauguagugacuuug

SEQ ID NO: 2387257 - RNA, 19 nt, Artificial Sequence
  Description of Artificial Sequence: Synthetic oligonucleotide
  Antisense strand to SEQ ID NO: 2387256
caaagucacuacaucuuac

SEQ ID NO: 2387258 - RNA, 19 nt, Artificial Sequence
  Description of Artificial Sequence: Synthetic oligonucleotide
  Sense strand starting at position 599 of SEQ ID NO: 1886096
gugacuuugacauguaaag

SEQ ID NO: 2387259 - RNA, 19 nt, Artificial Sequence
  Description of Artificial Sequence: Synthetic oligonucleotide
  Antisense strand to SEQ ID NO: 2387258
cuuuacaugucaaagucac

SEQ ID NO: 2387260 - RNA, 19 nt, Artificial Sequence
  Description of Artificial Sequence: Synthetic oligonucleotide
  Sense strand starting at position 723 of SEQ ID NO: 1886096
ucuaacugugucuauauaa

SEQ ID NO: 2387261 - RNA, 19 nt, Artificial Sequence
  Description of Artificial Sequence: Synthetic oligonucleotide
  Antisense strand to SEQ ID NO: 2387260
uuauauagacacaguuaga

SEQ ID NO: 2387262 - RNA, 19 nt, Artificial Sequence
  Description of Artificial Sequence: Synthetic oligonucleotide
  Sense strand starting at position 745 of SEQ ID NO: 1886096
gaggucuggauuggauaau

SEQ ID NO: 2387263 - RNA, 19 nt, Artificial Sequence
  Description of Artificial Sequence: Synthetic oligonucleotide
  Antisense strand to SEQ ID NO: 2387262
auuauccaauccagaccuc

SEQ ID NO: 2387264 - RNA, 19 nt, Artificial Sequence
  Description of Artificial Sequence: Synthetic oligonucleotide
  Sense strand starting at position 751 of SEQ ID NO: 1886096
uggauuggauaaucuguaa

SEQ ID NO: 2387265 - RNA, 19 nt, Artificial Sequence
  Description of Artificial Sequence: Synthetic oligonucleotide
  Antisense strand to SEQ ID NO: 2387264
uuacagauuauccaaucca

SEQ ID NO: 2387266 - RNA, 19 nt, Artificial Sequence
  Description of Artificial Sequence: Synthetic oligonucleotide
  Sense strand starting at position 828 of SEQ ID NO: 1886096
gcgggucagggagaauaau

SEQ ID NO: 2387267 - RNA, 19 nt, Artificial Sequence
  Description of Artificial Sequence: Synthetic oligonucleotide
  Antisense strand to SEQ ID NO: 2387266
auuauucucccugacccgc

SEQ ID NO: 2387268 - RNA, 19 nt, Artificial Sequence
  Description of Artificial Sequence: Synthetic oligonucleotide
  Sense strand starting at position 944 of SEQ ID NO: 1886096
uauugaugacauugauugu

SEQ ID NO: 2387269 - RNA, 19 nt, Artificial Sequence
  Description of Artificial Sequence: Synthetic oligonucleotide
  Antisense strand to SEQ ID NO: 2387268
acaaucaaugucaucaaua

SEQ ID NO: 2387270 - RNA, 19 nt, Artificial Sequence
  Description of Artificial Sequence: Synthetic oligonucleotide
  Sense strand starting at position 948 of SEQ ID NO: 1886096
gaugacauugauuguuaga

SEQ ID NO: 2387271 - RNA, 19 nt, Artificial Sequence
  Description of Artificial Sequence: Synthetic oligonucleotide
  Antisense strand to SEQ ID NO: 2387270
ucuaacaaucaaugucauc

SEQ ID NO: 2387272 - RNA, 19 nt, Artificial Sequence
  Description of Artificial Sequence: Synthetic oligonucleotide
  Sense strand starting at position 950 of SEQ ID NO: 1886096
ugacauugauuguuagauu

SEQ ID NO: 2387273 - RNA, 19 nt, Artificial Sequence
  Description of Artificial Sequence: Synthetic oligonucleotide
  Antisense strand to SEQ ID NO: 2387272
aaucuaacaaucaauguca

SEQ ID NO: 2387274 - RNA, 19 nt, Artificial Sequence
  Description of Artificial Sequence: Synthetic oligonucleotide
  Sense strand starting at position 1093 of SEQ ID NO: 1886096
agauguggaagcugacaaa

SEQ ID NO: 2387275 - RNA, 19 nt, Artificial Sequence
  Description of Artificial Sequence: Synthetic oligonucleotide
  Antisense strand to SEQ ID NO: 2387274
uuugucagcuuccacaucu

SEQ ID NO: 2387276 - RNA, 19 nt, Artificial Sequence
  Description of Artificial Sequence: Synthetic oligonucleotide
  Sense strand starting at position 1285 of SEQ ID NO: 1886096
auaugauagcuguaucuaa

SEQ ID NO: 2387277 - RNA, 19 nt, Artificial Sequence
  Description of Artificial Sequence: Synthetic oligonucleotide
  Antisense strand to SEQ ID NO: 2387276
uuagauacagcuaucauau

SEQ ID NO: 2387278 - RNA, 19 nt, Artificial Sequence
  Description of Artificial Sequence: Synthetic oligonucleotide
  Sense strand starting at position 1424 of SEQ ID NO: 1886096
auggauucucuccagcgaa

SEQ ID NO: 2387279 - RNA, 19 nt, Artificial Sequence
  Description of Artificial Sequence: Synthetic oligonucleotide
  Antisense strand to SEQ ID NO: 2387278
uucgcuggagagaauccau

SEQ ID NO: 2387280 - RNA, 19 nt, Artificial Sequence
  Description of Artificial Sequence: Synthetic oligonucleotide
  Sense strand starting at position 1507 of SEQ ID NO: 1886096
cggaguuuagcauaggaua

SEQ ID NO: 2387281 - RNA, 19 nt, Artificial Sequence
  Description of Artificial Sequence: Synthetic oligonucleotide
  Antisense strand to SEQ ID NO: 2387280
uauccuaugcuaaacuccg

SEQ ID NO: 2387282 - RNA, 19 nt, Artificial Sequence
  Description of Artificial Sequence: Synthetic oligonucleotide
  Sense strand starting at position 1828 of SEQ ID NO: 1886096
uguauuggaggcuaucaaa

SEQ ID NO: 2387283 - RNA, 19 nt, Artificial Sequence
  Description of Artificial Sequence: Synthetic oligonucleotide
  Antisense strand to SEQ ID NO: 2387282
uuugauagccuccaauaca

SEQ ID NO: 2387284 - RNA, 19 nt, Artificial Sequence
  Description of Artificial Sequence: Synthetic oligonucleotide
  Sense strand starting at position 1836 of SEQ ID NO: 1886096
aggcuaucaaaggguauau

SEQ ID NO: 2387285 - RNA, 19 nt, Artificial Sequence
  Description of Artificial Sequence: Synthetic oligonucleotide
  Antisense strand to SEQ ID NO: 2387284
auauacccuuugauagccu

SEQ ID NO: 2387286 - RNA, 19 nt, Artificial Sequence
  Description of Artificial Sequence: Synthetic oligonucleotide
  Sense strand starting at position 1905 of SEQ ID NO: 1886096
auuucugagugccuacuua

SEQ ID NO: 2387287 - RNA, 19 nt, Artificial Sequence
  Description of Artificial Sequence: Synthetic oligonucleotide
  Antisense strand to SEQ ID NO: 2387286
uaaguaggcacucagaaau

SEQ ID NO: 2387288 - RNA, 19 nt, Artificial Sequence
  Description of Artificial Sequence: Synthetic oligonucleotide
  Sense strand starting at position 2053 of SEQ ID NO: 1886096
gccagaucaccugaguuac

SEQ ID NO: 2387289 - RNA, 19 nt, Artificial Sequence
  Description of Artificial Sequence: Synthetic oligonucleotide
  Antisense strand to SEQ ID NO: 2387288
guaacucaggugaucuggc

SEQ ID NO: 2387290 - RNA, 19 nt, Artificial Sequence
  Description of Artificial Sequence: Synthetic oligonucleotide
  Sense strand starting at position 2081 of SEQ ID NO: 1886096
gucacuacugaauaacagu

SEQ ID NO: 2387291 - RNA, 19 nt, Artificial Sequence
  Description of Artificial Sequence: Synthetic oligonucleotide
  Antisense strand to SEQ ID NO: 2387290
acuguuauucaguagugac

SEQ ID NO: 2387292 - RNA, 19 nt, Artificial Sequence
  Description of Artificial Sequence: Synthetic oligonucleotide
  Sense strand starting at position 2566 of SEQ ID NO: 1886096
guuguaagugcuguguaag

SEQ ID NO: 2387293 - RNA, 19 nt, Artificial Sequence
  Description of Artificial Sequence: Synthetic oligonucleotide
  Antisense strand to SEQ ID NO: 2387292
cuuacacagcacuuacaac

SEQ ID NO: 2387294 - RNA, 19 nt, Artificial Sequence
  Description of Artificial Sequence: Synthetic oligonucleotide
  Sense strand starting at position 2659 of SEQ ID NO: 1886096
aucaacucugguugaaaug

SEQ ID NO: 2387295 - RNA, 19 nt, Artificial Sequence
  Description of Artificial Sequence: Synthetic oligonucleotide
  Antisense strand to SEQ ID NO: 2387294
cauuucaaccagaguugau

SEQ ID NO: 2387296 - RNA, 19 nt, Artificial Sequence
  Description of Artificial Sequence: Synthetic oligonucleotide
  Sense strand starting at position 2814 of SEQ ID NO: 1886096
uucucaccucuggaaguua

SEQ ID NO: 2387297 - RNA, 19 nt, Artificial Sequence
  Description of Artificial Sequence: Synthetic oligonucleotide
  Antisense strand to SEQ ID NO: 2387296
uaacuuccagaggugagaa

SEQ ID NO: 2387298 - RNA, 19 nt, Artificial Sequence
  Description of Artificial Sequence: Synthetic oligonucleotide
  Sense strand starting at position 2839 of SEQ ID NO: 1886096
aggauauaagguuggagua

SEQ ID NO: 2387299 - RNA, 19 nt, Artificial Sequence
  Description of Artificial Sequence: Synthetic oligonucleotide
  Antisense strand to SEQ ID NO: 2387298
uacuccaaccuuauauccu

SEQ ID NO: 2387300 - RNA, 19 nt, Artificial Sequence
  Description of Artificial Sequence: Synthetic oligonucleotide
  Sense strand starting at position 2840 of SEQ ID NO: 1886096
ggauauaagguuggaguaa

SEQ ID NO: 2387301 - RNA, 19 nt, Artificial Sequence
  Description of Artificial Sequence: Synthetic oligonucleotide
  Antisense strand to SEQ ID NO: 2387300
uuacuccaaccuuauaucc

SEQ ID NO: 2387302 - RNA, 19 nt, Artificial Sequence
  Description of Artificial Sequence: Synthetic oligonucleotide
  Sense strand starting at position 2951 of SEQ ID NO: 1886096
cauugagcccuugaaguca

SEQ ID NO: 2387303 - RNA, 19 nt, Artificial Sequence
  Description of Artificial Sequence: Synthetic oligonucleotide
  Antisense strand to SEQ ID NO: 2387302
ugacuucaagggcucaaug

SEQ ID NO: 2387304 - RNA, 19 nt, Artificial Sequence
  Description of Artificial Sequence: Synthetic oligonucleotide
  Sense strand starting at position 2960 of SEQ ID NO: 1886096
cuugaagucagugaucuug

SEQ ID NO: 2387305 - RNA, 19 nt, Artificial Sequence
  Description of Artificial Sequence: Synthetic oligonucleotide
  Antisense strand to SEQ ID NO: 2387304
caagaucacugacuucaag

SEQ ID NO: 2387306 - RNA, 19 nt, Artificial Sequence
  Description of Artificial Sequence: Synthetic oligonucleotide
  Sense strand starting at position 3337 of SEQ ID NO: 1886096
agaauaaaccucuggguca

SEQ ID NO: 2387307 - RNA, 19 nt, Artificial Sequence
  Description of Artificial Sequence: Synthetic oligonucleotide
  Antisense strand to SEQ ID NO: 2387306
ugacccagagguuuauucu

SEQ ID NO: 2387308 - RNA, 19 nt, Artificial Sequence
  Description of Artificial Sequence: Synthetic oligonucleotide
  Sense strand starting at position 3402 of SEQ ID NO: 1886096
acuccuucucuaugagaga

SEQ ID NO: 2387309 - RNA, 19 nt, Artificial Sequence
  Description of Artificial Sequence: Synthetic oligonucleotide
  Antisense strand to SEQ ID NO: 2387308
ucucucauagagaaggagu

SEQ ID NO: 2387310 - RNA, 19 nt, Artificial Sequence
  Description of Artificial Sequence: Synthetic oligonucleotide
  Sense strand starting at position 3407 of SEQ ID NO: 1886096
uucucuaugagagaugcga

SEQ ID NO: 2387311 - RNA, 19 nt, Artificial Sequence
  Description of Artificial Sequence: Synthetic oligonucleotide
  Antisense strand to SEQ ID NO: 2387310
ucgcaucucucauagagaa

SEQ ID NO: 2387312 - RNA, 19 nt, Artificial Sequence
  Description of Artificial Sequence: Synthetic oligonucleotide
  Sense strand starting at position 3692 of SEQ ID NO: 1886096
gccuuauuaucauuuguuu

SEQ ID NO: 2387313 - RNA, 19 nt, Artificial Sequence
  Description of Artificial Sequence: Synthetic oligonucleotide
  Antisense strand to SEQ ID NO: 2387312
aaacaaaugauaauaaggc

SEQ ID NO: 2387314 - RNA, 19 nt, Artificial Sequence
  Description of Artificial Sequence: Synthetic oligonucleotide
  Sense strand starting at position 3701 of SEQ ID NO: 1886096
ucauuuguuuggcuucuca

SEQ ID NO: 2387315 - RNA, 19 nt, Artificial Sequence
  Description of Artificial Sequence: Synthetic oligonucleotide
  Antisense strand to SEQ ID NO: 2387314
ugagaagccaaacaaauga

SEQ ID NO: 2387316 - RNA, 19 nt, Artificial Sequence
  Description of Artificial Sequence: Synthetic oligonucleotide
  Sense strand starting at position 3955 of SEQ ID NO: 1886096
aggucaaccugguugaaac

SEQ ID NO: 2387317 - RNA, 19 nt, Artificial Sequence
  Description of Artificial Sequence: Synthetic oligonucleotide
  Antisense strand to SEQ ID NO: 2387316
guuucaaccagguugaccu

SEQ ID NO: 2387318 - RNA, 19 nt, Artificial Sequence
  Description of Artificial Sequence: Synthetic oligonucleotide
  Sense strand starting at position 3979 of SEQ ID NO: 1886096
cucagucuaguauaucaau

SEQ ID NO: 2387319 - RNA, 19 nt, Artificial Sequence
  Description of Artificial Sequence: Synthetic oligonucleotide
  Antisense strand to SEQ ID NO: 2387318
auugauauacuagacugag

SEQ ID NO: 2387320 - RNA, 19 nt, Artificial Sequence
  Description of Artificial Sequence: Synthetic oligonucleotide
  Sense strand starting at position 248 of SEQ ID NO: 1886097
ugcuaaugggauuauaucu

SEQ ID NO: 2387321 - RNA, 19 nt, Artificial Sequence
  Description of Artificial Sequence: Synthetic oligonucleotide
  Antisense strand to SEQ ID NO: 2387320
agauauaaucccauuagca

SEQ ID NO: 2387322 - RNA, 19 nt, Artificial Sequence
  Description of Artificial Sequence: Synthetic oligonucleotide
  Sense strand starting at position 288 of SEQ ID NO: 1886097
guccuauggaaauggguaa

SEQ ID NO: 2387323 - RNA, 19 nt, Artificial Sequence
  Description of Artificial Sequence: Synthetic oligonucleotide
  Antisense strand to SEQ ID NO: 2387322
uuacccauuuccauaggac

SEQ ID NO: 2387324 - RNA, 19 nt, Artificial Sequence
  Description of Artificial Sequence: Synthetic oligonucleotide
  Sense strand starting at position 339 of SEQ ID NO: 1886097
auagguauguauucucaua

SEQ ID NO: 2387325 - RNA, 19 nt, Artificial Sequence
  Description of Artificial Sequence: Synthetic oligonucleotide
  Antisense strand to SEQ ID NO: 2387324
uaugagaauacauaccuau

SEQ ID NO: 2387326 - RNA, 19 nt, Artificial Sequence
  Description of Artificial Sequence: Synthetic oligonucleotide
  Sense strand starting at position 341 of SEQ ID NO: 1886097
agguauguauucucauaaa

SEQ ID NO: 2387327 - RNA, 19 nt, Artificial Sequence
  Description of Artificial Sequence: Synthetic oligonucleotide
  Antisense strand to SEQ ID NO: 2387326
uuuaugagaauacauaccu

SEQ ID NO: 2387328 - RNA, 19 nt, Artificial Sequence
  Description of Artificial Sequence: Synthetic oligonucleotide
  Sense strand starting at position 405 of SEQ ID NO: 1886097
gcucaauaaccugaaagcu

SEQ ID NO: 2387329 - RNA, 19 nt, Artificial Sequence
  Description of Artificial Sequence: Synthetic oligonucleotide
  Antisense strand to SEQ ID NO: 2387328
agcuuucagguuauugagc

SEQ ID NO: 2387330 - RNA, 19 nt, Artificial Sequence
  Description of Artificial Sequence: Synthetic oligonucleotide
  Sense strand starting at position 498 of SEQ ID NO: 1886097
uguuauuggccuuaaguau

SEQ ID NO: 2387331 - RNA, 19 nt, Artificial Sequence
  Description of Artificial Sequence: Synthetic oligonucleotide
  Antisense strand to SEQ ID NO: 2387330
auacuuaaggccaauaaca

SEQ ID NO: 2387332 - RNA, 19 nt, Artificial Sequence
  Description of Artificial Sequence: Synthetic oligonucleotide
  Sense strand starting at position 507 of SEQ ID NO: 1886097
ccuuaaguaugaucuguaa

SEQ ID NO: 2387333 - RNA, 19 nt, Artificial Sequence
  Description of Artificial Sequence: Synthetic oligonucleotide
  Antisense strand to SEQ ID NO: 2387332
uuacagaucauacuuaagg

SEQ ID NO: 2387334 - RNA, 19 nt, Artificial Sequence
  Description of Artificial Sequence: Synthetic oligonucleotide
  Sense strand starting at position 624 of SEQ ID NO: 1886097
ugcuaaauccaugagucca

SEQ ID NO: 2387335 - RNA, 19 nt, Artificial Sequence
  Description of Artificial Sequence: Synthetic oligonucleotide
  Antisense strand to SEQ ID NO: 2387334
uggacucauggauuuagca

SEQ ID NO: 2387336 - RNA, 19 nt, Artificial Sequence
  Description of Artificial Sequence: Synthetic oligonucleotide
  Sense strand starting at position 632 of SEQ ID NO: 1886097
ccaugaguccaucaucucu

SEQ ID NO: 2387337 - RNA, 19 nt, Artificial Sequence
  Description of Artificial Sequence: Synthetic oligonucleotide
  Antisense strand to SEQ ID NO: 2387336
agagaugauggacucaugg

SEQ ID NO: 2387338 - RNA, 19 nt, Artificial Sequence
  Description of Artificial Sequence: Synthetic oligonucleotide
  Sense strand starting at position 666 of SEQ ID NO: 1886097
ugugaagacauacaguguu

SEQ ID NO: 2387339 - RNA, 19 nt, Artificial Sequence
  Description of Artificial Sequence: Synthetic oligonucleotide
  Antisense strand to SEQ ID NO: 2387338
aacacuguaugucuucaca

SEQ ID NO: 2387340 - RNA, 19 nt, Artificial Sequence
  Description of Artificial Sequence: Synthetic oligonucleotide
  Sense strand starting at position 669 of SEQ ID NO: 1886097
gaagacauacaguguuagu

SEQ ID NO: 2387341 - RNA, 19 nt, Artificial Sequence
  Description of Artificial Sequence: Synthetic oligonucleotide
  Antisense strand to SEQ ID NO: 2387340
acuaacacuguaugucuuc

SEQ ID NO: 2387342 - RNA, 19 nt, Artificial Sequence
  Description of Artificial Sequence: Synthetic oligonucleotide
  Sense strand starting at position 792 of SEQ ID NO: 1886097
auacguaaaccuuagcaaa

SEQ ID NO: 2387343 - RNA, 19 nt, Artificial Sequence
  Description of Artificial Sequence: Synthetic oligonucleotide
  Antisense strand to SEQ ID NO: 2387342
uuugcuaagguuuacguau

SEQ ID NO: 2387344 - RNA, 19 nt, Artificial Sequence
  Description of Artificial Sequence: Synthetic oligonucleotide
  Sense strand starting at position 1000 of SEQ ID NO: 1886097
aagagagauucugucuuua

SEQ ID NO: 2387345 - RNA, 19 nt, Artificial Sequence
  Description of Artificial Sequence: Synthetic oligonucleotide
  Antisense strand to SEQ ID NO: 2387344
uaaagacagaaucucucuu

SEQ ID NO: 2387346 - RNA, 19 nt, Artificial Sequence
  Description of Artificial Sequence: Synthetic oligonucleotide
  Sense strand starting at position 1002 of SEQ ID NO: 1886097
gagagauucugucuuuaca

SEQ ID NO: 2387347 - RNA, 19 nt, Artificial Sequence
  Description of Artificial Sequence: Synthetic oligonucleotide
  Antisense strand to SEQ ID NO: 2387346
uguaaagacagaaucucuc

SEQ ID NO: 2387348 - RNA, 19 nt, Artificial Sequence
  Description of Artificial Sequence: Synthetic oligonucleotide
  Sense strand starting at position 1067 of SEQ ID NO: 1886097
uaaugauuguaaccgagaa

SEQ ID NO: 2387349 - RNA, 19 nt, Artificial Sequence
  Description of Artificial Sequence: Synthetic oligonucleotide
  Antisense strand to SEQ ID NO: 2387348
uucucgguuacaaucauua

SEQ ID NO: 2387350 - RNA, 19 nt, Artificial Sequence
  Description of Artificial Sequence: Synthetic oligonucleotide
  Sense strand starting at position 1071 of SEQ ID NO: 1886097
gauuguaaccgagaaggca

SEQ ID NO: 2387351 - RNA, 19 nt, Artificial Sequence
  Description of Artificial Sequence: Synthetic oligonucleotide
  Antisense strand to SEQ ID NO: 2387350
ugccuucucgguuacaauc

SEQ ID NO: 2387352 - RNA, 19 nt, Artificial Sequence
  Description of Artificial Sequence: Synthetic oligonucleotide
  Sense strand starting at position 1302 of SEQ ID NO: 1886097
acagaauugucuccauugu

SEQ ID NO: 2387353 - RNA, 19 nt, Artificial Sequence
  Description of Artificial Sequence: Synthetic oligonucleotide
  Antisense strand to SEQ ID NO: 2387352
acaauggagacaauucugu

SEQ ID NO: 2387354 - RNA, 19 nt, Artificial Sequence
  Description of Artificial Sequence: Synthetic oligonucleotide
  Sense strand starting at position 1755 of SEQ ID NO: 1886097
auguuaugugcacauacuu

SEQ ID NO: 2387355 - RNA, 19 nt, Artificial Sequence
  Description of Artificial Sequence: Synthetic oligonucleotide
  Antisense strand to SEQ ID NO: 2387354
aaguaugugcacauaacau

SEQ ID NO: 2387356 - RNA, 19 nt, Artificial Sequence
  Description of Artificial Sequence: Synthetic oligonucleotide
  Sense strand starting at position 1937 of SEQ ID NO: 1886097
uugcauuuacccugugcaa

SEQ ID NO: 2387357 - RNA, 19 nt, Artificial Sequence
  Description of Artificial Sequence: Synthetic oligonucleotide
  Antisense strand to SEQ ID NO: 2387356
uugcacaggguaaaugcaa

SEQ ID NO: 2387358 - RNA, 19 nt, Artificial Sequence
  Description of Artificial Sequence: Synthetic oligonucleotide
  Sense strand starting at position 1939 of SEQ ID NO: 1886097
gcauuuacccugugcaaac

SEQ ID NO: 2387359 - RNA, 19 nt, Artificial Sequence
  Description of Artificial Sequence: Synthetic oligonucleotide
  Antisense strand to SEQ ID NO: 2387358
guuugcacaggguaaaugc

SEQ ID NO: 2387360 - RNA, 19 nt, Artificial Sequence
  Description of Artificial Sequence: Synthetic oligonucleotide
  Sense strand starting at position 2080 of SEQ ID NO: 1886097
ugcuaaagccauuagauag

SEQ ID NO: 2387361 - RNA, 19 nt, Artificial Sequence
  Description of Artificial Sequence: Synthetic oligonucleotide
  Antisense strand to SEQ ID NO: 2387360
cuaucuaauggcuuuagca

SEQ ID NO: 2387362 - RNA, 19 nt, Artificial Sequence
  Description of Artificial Sequence: Synthetic oligonucleotide
  Sense strand starting at position 2142 of SEQ ID NO: 1886097
uuaaucaagugaucgaagu

SEQ ID NO: 2387363 - RNA, 19 nt, Artificial Sequence
  Description of Artificial Sequence: Synthetic oligonucleotide
  Antisense strand to SEQ ID NO: 2387362
acuucgaucacuugauuaa

SEQ ID NO: 2387364 - RNA, 19 nt, Artificial Sequence
  Description of Artificial Sequence: Synthetic oligonucleotide
  Sense strand starting at position 2422 of SEQ ID NO: 1886097
gugugauagcuugugucug

SEQ ID NO: 2387365 - RNA, 19 nt, Artificial Sequence
  Description of Artificial Sequence: Synthetic oligonucleotide
  Antisense strand to SEQ ID NO: 2387364
cagacacaagcuaucacac

SEQ ID NO: 2387366 - RNA, 19 nt, Artificial Sequence
  Description of Artificial Sequence: Synthetic oligonucleotide
  Sense strand starting at position 2584 of SEQ ID NO: 1886097
gguggccuguauuuauuau

SEQ ID NO: 2387367 - RNA, 19 nt, Artificial Sequence
  Description of Artificial Sequence: Synthetic oligonucleotide
  Antisense strand to SEQ ID NO: 2387366
auaauaaauacaggccacc

SEQ ID NO: 2387368 - RNA, 19 nt, Artificial Sequence
  Description of Artificial Sequence: Synthetic oligonucleotide
  Sense strand starting at position 2596 of SEQ ID NO: 1886097
uuauuaugagaaugcucag

SEQ ID NO: 2387369 - RNA, 19 nt, Artificial Sequence
  Description of Artificial Sequence: Synthetic oligonucleotide
  Antisense strand to SEQ ID NO: 2387368
cugagcauucucauaauaa

SEQ ID NO: 2387370 - RNA, 19 nt, Artificial Sequence
  Description of Artificial Sequence: Synthetic oligonucleotide
  Sense strand starting at position 2599 of SEQ ID NO: 1886097
uuaugagaaugcucagaca

SEQ ID NO: 2387371 - RNA, 19 nt, Artificial Sequence
  Description of Artificial Sequence: Synthetic oligonucleotide
  Antisense strand to SEQ ID NO: 2387370
ugucugagcauucucauaa

SEQ ID NO: 2387372 - RNA, 19 nt, Artificial Sequence
  Description of Artificial Sequence: Synthetic oligonucleotide
  Sense strand starting at position 2638 of SEQ ID NO: 1886097
cuacaaugguaaguauaau

SEQ ID NO: 2387373 - RNA, 19 nt, Artificial Sequence
  Description of Artificial Sequence: Synthetic oligonucleotide
  Antisense strand to SEQ ID NO: 2387372
auuauacuuaccauuguag

SEQ ID NO: 2387374 - RNA, 19 nt, Artificial Sequence
  Description of Artificial Sequence: Synthetic oligonucleotide
  Sense strand starting at position 2792 of SEQ ID NO: 1886097
cugaauguggucugaggau

SEQ ID NO: 2387375 - RNA, 19 nt, Artificial Sequence
  Description of Artificial Sequence: Synthetic oligonucleotide
  Antisense strand to SEQ ID NO: 2387374
auccucagaccacauucag

SEQ ID NO: 2387376 - RNA, 19 nt, Artificial Sequence
  Description of Artificial Sequence: Synthetic oligonucleotide
  Sense strand starting at position 2855 of SEQ ID NO: 1886097
uuacauuguagugauguca

SEQ ID NO: 2387377 - RNA, 19 nt, Artificial Sequence
  Description of Artificial Sequence: Synthetic oligonucleotide
  Antisense strand to SEQ ID NO: 2387376
ugacaucacuacaauguaa

SEQ ID NO: 2387378 - RNA, 19 nt, Artificial Sequence
  Description of Artificial Sequence: Synthetic oligonucleotide
  Sense strand starting at position 2878 of SEQ ID NO: 1886097
auguacuggguaggaaaua

SEQ ID NO: 2387379 - RNA, 19 nt, Artificial Sequence
  Description of Artificial Sequence: Synthetic oligonucleotide
  Antisense strand to SEQ ID NO: 2387378
uauuuccuacccaguacau

SEQ ID NO: 2387380 - RNA, 19 nt, Artificial Sequence
  Description of Artificial Sequence: Synthetic oligonucleotide
  Sense strand starting at position 2985 of SEQ ID NO: 1886097
aauuaaucgucuucgagag

SEQ ID NO: 2387381 - RNA, 19 nt, Artificial Sequence
  Description of Artificial Sequence: Synthetic oligonucleotide
  Antisense strand to SEQ ID NO: 2387380
cucucgaagacgauuaauu

SEQ ID NO: 2387382 - RNA, 19 nt, Artificial Sequence
  Description of Artificial Sequence: Synthetic oligonucleotide
  Sense strand starting at position 3411 of SEQ ID NO: 1886097
ccuuguuaacuguaugauc

SEQ ID NO: 2387383 - RNA, 19 nt, Artificial Sequence
  Description of Artificial Sequence: Synthetic oligonucleotide
  Antisense strand to SEQ ID NO: 2387382
gaucauacaguuaacaagg

SEQ ID NO: 2387384 - RNA, 19 nt, Artificial Sequence
  Description of Artificial Sequence: Synthetic oligonucleotide
  Sense strand starting at position 3416 of SEQ ID NO: 1886097
uuaacuguaugaucuguga

SEQ ID NO: 2387385 - RNA, 19 nt, Artificial Sequence
  Description of Artificial Sequence: Synthetic oligonucleotide
  Antisense strand to SEQ ID NO: 2387384
ucacagaucauacaguuaa

SEQ ID NO: 2387386 - RNA, 19 nt, Artificial Sequence
  Description of Artificial Sequence: Synthetic oligonucleotide
  Sense strand starting at position 3419 of SEQ ID NO: 1886097
acuguaugaucugugagaa

SEQ ID NO: 2387387 - RNA, 19 nt, Artificial Sequence
  Description of Artificial Sequence: Synthetic oligonucleotide
  Antisense strand to SEQ ID NO: 2387386
uucucacagaucauacagu

SEQ ID NO: 2387388 - RNA, 19 nt, Artificial Sequence
  Description of Artificial Sequence: Synthetic oligonucleotide
  Sense strand starting at position 3420 of SEQ ID NO: 1886097
cuguaugaucugugagaag

SEQ ID NO: 2387389 - RNA, 19 nt, Artificial Sequence
  Description of Artificial Sequence: Synthetic oligonucleotide
  Antisense strand to SEQ ID NO: 2387388
cuucucacagaucauacag

SEQ ID NO: 2387390 - RNA, 19 nt, Artificial Sequence
  Description of Artificial Sequence: Synthetic oligonucleotide
  Sense strand starting at position 3500 of SEQ ID NO: 1886097
gugcucugaagcuauaaag

SEQ ID NO: 2387391 - RNA, 19 nt, Artificial Sequence
  Description of Artificial Sequence: Synthetic oligonucleotide
  Antisense strand to SEQ ID NO: 2387390
cuuuauagcuucagagcac

SEQ ID NO: 2387392 - RNA, 19 nt, Artificial Sequence
  Description of Artificial Sequence: Synthetic oligonucleotide
  Sense strand starting at position 3525 of SEQ ID NO: 1886097
aguccuuaauuaucaguau

SEQ ID NO: 2387393 - RNA, 19 nt, Artificial Sequence
  Description of Artificial Sequence: Synthetic oligonucleotide
  Antisense strand to SEQ ID NO: 2387392
auacugauaauuaaggacu

SEQ ID NO: 2387394 - RNA, 19 nt, Artificial Sequence
  Description of Artificial Sequence: Synthetic oligonucleotide
  Sense strand starting at position 3861 of SEQ ID NO: 1886097
agcaauuaacuagguaaca

SEQ ID NO: 2387395 - RNA, 19 nt, Artificial Sequence
  Description of Artificial Sequence: Synthetic oligonucleotide
  Antisense strand to SEQ ID NO: 2387394
uguuaccuaguuaauugcu

SEQ ID NO: 2387396 - RNA, 19 nt, Artificial Sequence
  Description of Artificial Sequence: Synthetic oligonucleotide
  Sense strand starting at position 3862 of SEQ ID NO: 1886097
gcaauuaacuagguaacaa

SEQ ID NO: 2387397 - RNA, 19 nt, Artificial Sequence
  Description of Artificial Sequence: Synthetic oligonucleotide
  Antisense strand to SEQ ID NO: 2387396
uuguuaccuaguuaauugc

SEQ ID NO: 2387398 - RNA, 19 nt, Artificial Sequence
  Description of Artificial Sequence: Synthetic oligonucleotide
  Sense strand starting at position 3976 of SEQ ID NO: 1886097
ggaaucaucuacuuguuau

SEQ ID NO: 2387399 - RNA, 19 nt, Artificial Sequence
  Description of Artificial Sequence: Synthetic oligonucleotide
  Antisense strand to SEQ ID NO: 2387398
auaacaaguagaugauucc

SEQ ID NO: 2387400 - RNA, 19 nt, Artificial Sequence
  Description of Artificial Sequence: Synthetic oligonucleotide
  Sense strand starting at position 186 of SEQ ID NO: 1886098
agcccuuugggcuagguaa

SEQ ID NO: 2387401 - RNA, 19 nt, Artificial Sequence
  Description of Artificial Sequence: Synthetic oligonucleotide
  Antisense strand to SEQ ID NO: 2387400
uuaccuagcccaaagggcu

SEQ ID NO: 2387402 - RNA, 19 nt, Artificial Sequence
  Description of Artificial Sequence: Synthetic oligonucleotide
  Sense strand starting at position 278 of SEQ ID NO: 1886098
gcacuugauuaagcuuaca

SEQ ID NO: 2387403 - RNA, 19 nt, Artificial Sequence
  Description of Artificial Sequence: Synthetic oligonucleotide
  Antisense strand to SEQ ID NO: 2387402
uguaagcuuaaucaagugc

SEQ ID NO: 2387404 - RNA, 19 nt, Artificial Sequence
  Description of Artificial Sequence: Synthetic oligonucleotide
  Sense strand starting at position 286 of SEQ ID NO: 1886098
uuaagcuuacaucauguga

SEQ ID NO: 2387405 - RNA, 19 nt, Artificial Sequence
  Description of Artificial Sequence: Synthetic oligonucleotide
  Antisense strand to SEQ ID NO: 2387404
ucacaugauguaagcuuaa

SEQ ID NO: 2387406 - RNA, 19 nt, Artificial Sequence
  Description of Artificial Sequence: Synthetic oligonucleotide
  Sense strand starting at position 359 of SEQ ID NO: 1886098
cauugauuggagggcuaau

SEQ ID NO: 2387407 - RNA, 19 nt, Artificial Sequence
  Description of Artificial Sequence: Synthetic oligonucleotide
  Antisense strand to SEQ ID NO: 2387406
auuagcccuccaaucaaug

SEQ ID NO: 2387408 - RNA, 19 nt, Artificial Sequence
  Description of Artificial Sequence: Synthetic oligonucleotide
  Sense strand starting at position 429 of SEQ ID NO: 1886098
ggacuacugauguggguaa

SEQ ID NO: 2387409 - RNA, 19 nt, Artificial Sequence
  Description of Artificial Sequence: Synthetic oligonucleotide
  Antisense strand to SEQ ID NO: 2387408
uuacccacaucaguagucc

SEQ ID NO: 2387410 - RNA, 19 nt, Artificial Sequence
  Description of Artificial Sequence: Synthetic oligonucleotide
  Sense strand starting at position 503 of SEQ ID NO: 1886098
uguguugcucuagagggaa

SEQ ID NO: 2387411 - RNA, 19 nt, Artificial Sequence
  Description of Artificial Sequence: Synthetic oligonucleotide
  Antisense strand to SEQ ID NO: 2387410
uucccucuagagcaacaca

SEQ ID NO: 2387412 - RNA, 19 nt, Artificial Sequence
  Description of Artificial Sequence: Synthetic oligonucleotide
  Sense strand starting at position 507 of SEQ ID NO: 1886098
uugcucuagagggaaaguu

SEQ ID NO: 2387413 - RNA, 19 nt, Artificial Sequence
  Description of Artificial Sequence: Synthetic oligonucleotide
  Antisense strand to SEQ ID NO: 2387412
aacuuucccucuagagcaa

SEQ ID NO: 2387414 - RNA, 19 nt, Artificial Sequence
  Description of Artificial Sequence: Synthetic oligonucleotide
  Sense strand starting at position 656 of SEQ ID NO: 1886098
aaguacaagugugucauua

SEQ ID NO: 2387415 - RNA, 19 nt, Artificial Sequence
  Description of Artificial Sequence: Synthetic oligonucleotide
  Antisense strand to SEQ ID NO: 2387414
uaaugacacacuuguacuu

SEQ ID NO: 2387416 - RNA, 19 nt, Artificial Sequence
  Description of Artificial Sequence: Synthetic oligonucleotide
  Sense strand starting at position 688 of SEQ ID NO: 1886098
ucaucugauuccucagaga

SEQ ID NO: 2387417 - RNA, 19 nt, Artificial Sequence
  Description of Artificial Sequence: Synthetic oligonucleotide
  Antisense strand to SEQ ID NO: 2387416
ucucugaggaaucagauga

SEQ ID NO: 2387418 - RNA, 19 nt, Artificial Sequence
  Description of Artificial Sequence: Synthetic oligonucleotide
  Sense strand starting at position 728 of SEQ ID NO: 1886098
gcuguuacucaguaaugag

SEQ ID NO: 2387419 - RNA, 19 nt, Artificial Sequence
  Description of Artificial Sequence: Synthetic oligonucleotide
  Antisense strand to SEQ ID NO: 2387418
cucauuacugaguaacagc

SEQ ID NO: 2387420 - RNA, 19 nt, Artificial Sequence
  Description of Artificial Sequence: Synthetic oligonucleotide
  Sense strand starting at position 737 of SEQ ID NO: 1886098
caguaaugagaacgugaag

SEQ ID NO: 2387421 - RNA, 19 nt, Artificial Sequence
  Description of Artificial Sequence: Synthetic oligonucleotide
  Antisense strand to SEQ ID NO: 2387420
cuucacguucucauuacug

SEQ ID NO: 2387422 - RNA, 19 nt, Artificial Sequence
  Description of Artificial Sequence: Synthetic oligonucleotide
  Sense strand starting at position 771 of SEQ ID NO: 1886098
aacagagguguuugcugaa

SEQ ID NO: 2387423 - RNA, 19 nt, Artificial Sequence
  Description of Artificial Sequence: Synthetic oligonucleotide
  Antisense strand to SEQ ID NO: 2387422
uucagcaaacaccucuguu

SEQ ID NO: 2387424 - RNA, 19 nt, Artificial Sequence
  Description of Artificial Sequence: Synthetic oligonucleotide
  Sense strand starting at position 808 of SEQ ID NO: 1886098
uuuggagguggucaucaau

SEQ ID NO: 2387425 - RNA, 19 nt, Artificial Sequence
  Description of Artificial Sequence: Synthetic oligonucleotide
  Antisense strand to SEQ ID NO: 2387424
auugaugaccaccuccaaa

SEQ ID NO: 2387426 - RNA, 19 nt, Artificial Sequence
  Description of Artificial Sequence: Synthetic oligonucleotide
  Sense strand starting at position 1028 of SEQ ID NO: 1886098
aguauaacuucccuaagga

SEQ ID NO: 2387427 - RNA, 19 nt, Artificial Sequence
  Description of Artificial Sequence: Synthetic oligonucleotide
  Antisense strand to SEQ ID NO: 2387426
uccuuagggaaguuauacu

SEQ ID NO: 2387428 - RNA, 19 nt, Artificial Sequence
  Description of Artificial Sequence: Synthetic oligonucleotide
  Sense strand starting at position 1063 of SEQ ID NO: 1886098
ugauaugucacagguguac

SEQ ID NO: 2387429 - RNA, 19 nt, Artificial Sequence
  Description of Artificial Sequence: Synthetic oligonucleotide
  Antisense strand to SEQ ID NO: 2387428
guacaccugugacauauca

SEQ ID NO: 2387430 - RNA, 19 nt, Artificial Sequence
  Description of Artificial Sequence: Synthetic oligonucleotide
  Sense strand starting at position 1065 of SEQ ID NO: 1886098
auaugucacagguguacaa

SEQ ID NO: 2387431 - RNA, 19 nt, Artificial Sequence
  Description of Artificial Sequence: Synthetic oligonucleotide
  Antisense strand to SEQ ID NO: 2387430
uuguacaccugugacauau

SEQ ID NO: 2387432 - RNA, 19 nt, Artificial Sequence
  Description of Artificial Sequence: Synthetic oligonucleotide
  Sense strand starting at position 1067 of SEQ ID NO: 1886098
augucacagguguacaaua

SEQ ID NO: 2387433 - RNA, 19 nt, Artificial Sequence
  Description of Artificial Sequence: Synthetic oligonucleotide
  Antisense strand to SEQ ID NO: 2387432
uauuguacaccugugacau

SEQ ID NO: 2387434 - RNA, 19 nt, Artificial Sequence
  Description of Artificial Sequence: Synthetic oligonucleotide
  Sense strand starting at position 1096 of SEQ ID NO: 1886098
uacaaagggcuuugguaau

SEQ ID NO: 2387435 - RNA, 19 nt, Artificial Sequence
  Description of Artificial Sequence: Synthetic oligonucleotide
  Antisense strand to SEQ ID NO: 2387434
auuaccaaagcccuuugua

SEQ ID NO: 2387436 - RNA, 19 nt, Artificial Sequence
  Description of Artificial Sequence: Synthetic oligonucleotide
  Sense strand starting at position 1228 of SEQ ID NO: 1886098
ucgagaacaccuuggccaa

SEQ ID NO: 2387437 - RNA, 19 nt, Artificial Sequence
  Description of Artificial Sequence: Synthetic oligonucleotide
  Antisense strand to SEQ ID NO: 2387436
uuggccaagguguucucga

SEQ ID NO: 2387438 - RNA, 19 nt, Artificial Sequence
  Description of Artificial Sequence: Synthetic oligonucleotide
  Sense strand starting at position 1451 of SEQ ID NO: 1886098
gaaugcugagcagggauua

SEQ ID NO: 2387439 - RNA, 19 nt, Artificial Sequence
  Description of Artificial Sequence: Synthetic oligonucleotide
  Antisense strand to SEQ ID NO: 2387438
uaaucccugcucagcauuc

SEQ ID NO: 2387440 - RNA, 19 nt, Artificial Sequence
  Description of Artificial Sequence: Synthetic oligonucleotide
  Sense strand starting at position 1852 of SEQ ID NO: 1886098
gaaggugaagcacgagaau

SEQ ID NO: 2387441 - RNA, 19 nt, Artificial Sequence
  Description of Artificial Sequence: Synthetic oligonucleotide
  Antisense strand to SEQ ID NO: 2387440
auucucgugcuucaccuuc

SEQ ID NO: 2387442 - RNA, 19 nt, Artificial Sequence
  Description of Artificial Sequence: Synthetic oligonucleotide
  Sense strand starting at position 2091 of SEQ ID NO: 1886098
ccggaagcuccagacguua

SEQ ID NO: 2387443 - RNA, 19 nt, Artificial Sequence
  Description of Artificial Sequence: Synthetic oligonucleotide
  Antisense strand to SEQ ID NO: 2387442
uaacgucuggagcuuccgg

SEQ ID NO: 2387444 - RNA, 19 nt, Artificial Sequence
  Description of Artificial Sequence: Synthetic oligonucleotide
  Sense strand starting at position 2154 of SEQ ID NO: 1886098
augggaggaucuaggaguu

SEQ ID NO: 2387445 - RNA, 19 nt, Artificial Sequence
  Description of Artificial Sequence: Synthetic oligonucleotide
  Antisense strand to SEQ ID NO: 2387444
aacuccuagauccucccau

SEQ ID NO: 2387446 - RNA, 19 nt, Artificial Sequence
  Description of Artificial Sequence: Synthetic oligonucleotide
  Sense strand starting at position 2304 of SEQ ID NO: 1886098
gucugagggcgaugaacau

SEQ ID NO: 2387447 - RNA, 19 nt, Artificial Sequence
  Description of Artificial Sequence: Synthetic oligonucleotide
  Antisense strand to SEQ ID NO: 2387446
auguucaucgcccucagac

SEQ ID NO: 2387448 - RNA, 19 nt, Artificial Sequence
  Description of Artificial Sequence: Synthetic oligonucleotide
  Sense strand starting at position 2971 of SEQ ID NO: 1886098
ugaagaaaucuuggguuug

SEQ ID NO: 2387449 - RNA, 19 nt, Artificial Sequence
  Description of Artificial Sequence: Synthetic oligonucleotide
  Antisense strand to SEQ ID NO: 2387448
caaacccaagauuucuuca

SEQ ID NO: 2387450 - RNA, 19 nt, Artificial Sequence
  Description of Artificial Sequence: Synthetic oligonucleotide
  Sense strand starting at position 2995 of SEQ ID NO: 1886098
ccuuuaauccgauaggcca

SEQ ID NO: 2387451 - RNA, 19 nt, Artificial Sequence
  Description of Artificial Sequence: Synthetic oligonucleotide
  Antisense strand to SEQ ID NO: 2387450
uggccuaucggauuaaagg

SEQ ID NO: 2387452 - RNA, 19 nt, Artificial Sequence
  Description of Artificial Sequence: Synthetic oligonucleotide
  Sense strand starting at position 3083 of SEQ ID NO: 1886098
ccaaguggcuaucuuuaac

SEQ ID NO: 2387453 - RNA, 19 nt, Artificial Sequence
  Description of Artificial Sequence: Synthetic oligonucleotide
  Antisense strand to SEQ ID NO: 2387452
guuaaagauagccacuugg

SEQ ID NO: 2387454 - RNA, 19 nt, Artificial Sequence
  Description of Artificial Sequence: Synthetic oligonucleotide
  Sense strand starting at position 3134 of SEQ ID NO: 1886098
gcaccaaaucaguagcaca

SEQ ID NO: 2387455 - RNA, 19 nt, Artificial Sequence
  Description of Artificial Sequence: Synthetic oligonucleotide
  Antisense strand to SEQ ID NO: 2387454
ugugcuacugauuuggugc

SEQ ID NO: 2387456 - RNA, 19 nt, Artificial Sequence
  Description of Artificial Sequence: Synthetic oligonucleotide
  Sense strand starting at position 3153 of SEQ ID NO: 1886098
ugaacucuacuguguuaag

SEQ ID NO: 2387457 - RNA, 19 nt, Artificial Sequence
  Description of Artificial Sequence: Synthetic oligonucleotide
  Antisense strand to SEQ ID NO: 2387456
cuuaacacaguagaguuca

SEQ ID NO: 2387458 - RNA, 19 nt, Artificial Sequence
  Description of Artificial Sequence: Synthetic oligonucleotide
  Sense strand starting at position 3154 of SEQ ID NO: 1886098
gaacucuacuguguuaaga

SEQ ID NO: 2387459 - RNA, 19 nt, Artificial Sequence
  Description of Artificial Sequence: Synthetic oligonucleotide
  Antisense strand to SEQ ID NO: 2387458
ucuuaacacaguagaguuc

SEQ ID NO: 2387460 - RNA, 19 nt, Artificial Sequence
  Description of Artificial Sequence: Synthetic oligonucleotide
  Sense strand starting at position 3272 of SEQ ID NO: 1886098
gugcuuaagaacugagauu

SEQ ID NO: 2387461 - RNA, 19 nt, Artificial Sequence
  Description of Artificial Sequence: Synthetic oligonucleotide
  Antisense strand to SEQ ID NO: 2387460
aaucucaguucuuaagcac

SEQ ID NO: 2387462 - RNA, 19 nt, Artificial Sequence
  Description of Artificial Sequence: Synthetic oligonucleotide
  Sense strand starting at position 3334 of SEQ ID NO: 1886098
aacugagacugucuugaca

SEQ ID NO: 2387463 - RNA, 19 nt, Artificial Sequence
  Description of Artificial Sequence: Synthetic oligonucleotide
  Antisense strand to SEQ ID NO: 2387462
ugucaagacagucucaguu

SEQ ID NO: 2387464 - RNA, 19 nt, Artificial Sequence
  Description of Artificial Sequence: Synthetic oligonucleotide
  Sense strand starting at position 3337 of SEQ ID NO: 1886098
ugagacugucuugacaguu

SEQ ID NO: 2387465 - RNA, 19 nt, Artificial Sequence
  Description of Artificial Sequence: Synthetic oligonucleotide
  Antisense strand to SEQ ID NO: 2387464
aacugucaagacagucuca

SEQ ID NO: 2387466 - RNA, 19 nt, Artificial Sequence
  Description of Artificial Sequence: Synthetic oligonucleotide
  Sense strand starting at position 3350 of SEQ ID NO: 1886098
acaguucgagacugucaga

SEQ ID NO: 2387467 - RNA, 19 nt, Artificial Sequence
  Description of Artificial Sequence: Synthetic oligonucleotide
  Antisense strand to SEQ ID NO: 2387466
ucugacagucucgaacugu

SEQ ID NO: 2387468 - RNA, 19 nt, Artificial Sequence
  Description of Artificial Sequence: Synthetic oligonucleotide
  Sense strand starting at position 3426 of SEQ ID NO: 1886098
agguuaauucuaggguaau

SEQ ID NO: 2387469 - RNA, 19 nt, Artificial Sequence
  Description of Artificial Sequence: Synthetic oligonucleotide
  Antisense strand to SEQ ID NO: 2387468
auuacccuagaauuaaccu

SEQ ID NO: 2387470 - RNA, 19 nt, Artificial Sequence
  Description of Artificial Sequence: Synthetic oligonucleotide
  Sense strand starting at position 3479 of SEQ ID NO: 1886098
cccuuauaucuggaggcau

SEQ ID NO: 2387471 - RNA, 19 nt, Artificial Sequence
  Description of Artificial Sequence: Synthetic oligonucleotide
  Antisense strand to SEQ ID NO: 2387470
augccuccagauauaaggg

SEQ ID NO: 2387472 - RNA, 19 nt, Artificial Sequence
  Description of Artificial Sequence: Synthetic oligonucleotide
  Sense strand starting at position 3516 of SEQ ID NO: 1886098
gaacacaguugguuaacau

SEQ ID NO: 2387473 - RNA, 19 nt, Artificial Sequence
  Description of Artificial Sequence: Synthetic oligonucleotide
  Antisense strand to SEQ ID NO: 2387472
auguuaaccaacuguguuc

SEQ ID NO: 2387474 - RNA, 19 nt, Artificial Sequence
  Description of Artificial Sequence: Synthetic oligonucleotide
  Sense strand starting at position 3583 of SEQ ID NO: 1886098
cagagagucuugcucugac

SEQ ID NO: 2387475 - RNA, 19 nt, Artificial Sequence
  Description of Artificial Sequence: Synthetic oligonucleotide
  Antisense strand to SEQ ID NO: 2387474
gucagagcaagacucucug

SEQ ID NO: 2387476 - RNA, 19 nt, Artificial Sequence
  Description of Artificial Sequence: Synthetic oligonucleotide
  Sense strand starting at position 3778 of SEQ ID NO: 1886098
ugaacucauuggcucaagu

SEQ ID NO: 2387477 - RNA, 19 nt, Artificial Sequence
  Description of Artificial Sequence: Synthetic oligonucleotide
  Antisense strand to SEQ ID NO: 2387476
acuugagccaaugaguuca

SEQ ID NO: 2387478 - RNA, 19 nt, Artificial Sequence
  Description of Artificial Sequence: Synthetic oligonucleotide
  Sense strand starting at position 3982 of SEQ ID NO: 1886098
cccucuugugguuaaaguu

SEQ ID NO: 2387479 - RNA, 19 nt, Artificial Sequence
  Description of Artificial Sequence: Synthetic oligonucleotide
  Antisense strand to SEQ ID NO: 2387478
aacuuuaaccacaagaggg

SEQ ID NO: 2387480 - RNA, 19 nt, Artificial Sequence
  Description of Artificial Sequence: Synthetic oligonucleotide
  Sense strand starting at position 138 of SEQ ID NO: 1886099
aacuuuggccuguggagua

SEQ ID NO: 2387481 - RNA, 19 nt, Artificial Sequence
  Description of Artificial Sequence: Synthetic oligonucleotide
  Antisense strand to SEQ ID NO: 2387480
uacuccacaggccaaaguu

SEQ ID NO: 2387482 - RNA, 19 nt, Artificial Sequence
  Description of Artificial Sequence: Synthetic oligonucleotide
  Sense strand starting at position 168 of SEQ ID NO: 1886099
cuggucuuaguguaaggga

SEQ ID NO: 2387483 - RNA, 19 nt, Artificial Sequence
  Description of Artificial Sequence: Synthetic oligonucleotide
  Antisense strand to SEQ ID NO: 2387482
ucccuuacacuaagaccag

SEQ ID NO: 2387484 - RNA, 19 nt, Artificial Sequence
  Description of Artificial Sequence: Synthetic oligonucleotide
  Sense strand starting at position 412 of SEQ ID NO: 1886099
cauccaagggcuggaaaua

SEQ ID NO: 2387485 - RNA, 19 nt, Artificial Sequence
  Description of Artificial Sequence: Synthetic oligonucleotide
  Antisense strand to SEQ ID NO: 2387484
uauuuccagcccuuggaug

SEQ ID NO: 2387486 - RNA, 19 nt, Artificial Sequence
  Description of Artificial Sequence: Synthetic oligonucleotide
  Sense strand starting at position 425 of SEQ ID NO: 1886099
gaaauagaauccgcuaagu

SEQ ID NO: 2387487 - RNA, 19 nt, Artificial Sequence
  Description of Artificial Sequence: Synthetic oligonucleotide
  Antisense strand to SEQ ID NO: 2387486
acuuagcggauucuauuuc

SEQ ID NO: 2387488 - RNA, 19 nt, Artificial Sequence
  Description of Artificial Sequence: Synthetic oligonucleotide
  Sense strand starting at position 430 of SEQ ID NO: 1886099
agaauccgcuaaguaauga

SEQ ID NO: 2387489 - RNA, 19 nt, Artificial Sequence
  Description of Artificial Sequence: Synthetic oligonucleotide
  Antisense strand to SEQ ID NO: 2387488
ucauuacuuagcggauucu

SEQ ID NO: 2387490 - RNA, 19 nt, Artificial Sequence
  Description of Artificial Sequence: Synthetic oligonucleotide
  Sense strand starting at position 576 of SEQ ID NO: 1886099
ucagaaguacuccaccagu

SEQ ID NO: 2387491 - RNA, 19 nt, Artificial Sequence
  Description of Artificial Sequence: Synthetic oligonucleotide
  Antisense strand to SEQ ID NO: 2387490
acugguggaguacuucuga

SEQ ID NO: 2387492 - RNA, 19 nt, Artificial Sequence
  Description of Artificial Sequence: Synthetic oligonucleotide
  Sense strand starting at position 618 of SEQ ID NO: 1886099
caugauguggcccauuaag

SEQ ID NO: 2387493 - RNA, 19 nt, Artificial Sequence
  Description of Artificial Sequence: Synthetic oligonucleotide
  Antisense strand to SEQ ID NO: 2387492
cuuaaugggccacaucaug

SEQ ID NO: 2387494 - RNA, 19 nt, Artificial Sequence
  Description of Artificial Sequence: Synthetic oligonucleotide
  Sense strand starting at position 723 of SEQ ID NO: 1886099
ggagaagugguuugucaag

SEQ ID NO: 2387495 - RNA, 19 nt, Artificial Sequence
  Description of Artificial Sequence: Synthetic oligonucleotide
  Antisense strand to SEQ ID NO: 2387494
cuugacaaaccacuucucc

SEQ ID NO: 2387496 - RNA, 19 nt, Artificial Sequence
  Description of Artificial Sequence: Synthetic oligonucleotide
  Sense strand starting at position 730 of SEQ ID NO: 1886099
ugguuugucaagcgacuau

SEQ ID NO: 2387497 - RNA, 19 nt, Artificial Sequence
  Description of Artificial Sequence: Synthetic oligonucleotide
  Antisense strand to SEQ ID NO: 2387496
auagucgcuugacaaacca

SEQ ID NO: 2387498 - RNA, 19 nt, Artificial Sequence
  Description of Artificial Sequence: Synthetic oligonucleotide
  Sense strand starting at position 858 of SEQ ID NO: 1886099
gucagcuucucaucacaca

SEQ ID NO: 2387499 - RNA, 19 nt, Artificial Sequence
  Description of Artificial Sequence: Synthetic oligonucleotide
  Antisense strand to SEQ ID NO: 2387498
ugugugaugagaagcugac

SEQ ID NO: 2387500 - RNA, 19 nt, Artificial Sequence
  Description of Artificial Sequence: Synthetic oligonucleotide
  Sense strand starting at position 993 of SEQ ID NO: 1886099
ugaucauggcaugguugua

SEQ ID NO: 2387501 - RNA, 19 nt, Artificial Sequence
  Description of Artificial Sequence: Synthetic oligonucleotide
  Antisense strand to SEQ ID NO: 2387500
uacaaccaugccaugauca

SEQ ID NO: 2387502 - RNA, 19 nt, Artificial Sequence
  Description of Artificial Sequence: Synthetic oligonucleotide
  Sense strand starting at position 1102 of SEQ ID NO: 1886099
ugcagacucgcgcaucuau

SEQ ID NO: 2387503 - RNA, 19 nt, Artificial Sequence
  Description of Artificial Sequence: Synthetic oligonucleotide
  Antisense strand to SEQ ID NO: 2387502
auagaugcgcgagucugca

SEQ ID NO: 2387504 - RNA, 19 nt, Artificial Sequence
  Description of Artificial Sequence: Synthetic oligonucleotide
  Sense strand starting at position 1339 of SEQ ID NO: 1886099
aaaguugagaaguguuuga

SEQ ID NO: 2387505 - RNA, 19 nt, Artificial Sequence
  Description of Artificial Sequence: Synthetic oligonucleotide
  Antisense strand to SEQ ID NO: 2387504
ucaaacacuucucaacuuu

SEQ ID NO: 2387506 - RNA, 19 nt, Artificial Sequence
  Description of Artificial Sequence: Synthetic oligonucleotide
  Sense strand starting at position 1343 of SEQ ID NO: 1886099
uugagaaguguuugaagaa

SEQ ID NO: 2387507 - RNA, 19 nt, Artificial Sequence
  Description of Artificial Sequence: Synthetic oligonucleotide
  Antisense strand to SEQ ID NO: 2387506
uucuucaaacacuucucaa

SEQ ID NO: 2387508 - RNA, 19 nt, Artificial Sequence
  Description of Artificial Sequence: Synthetic oligonucleotide
  Sense strand starting at position 1344 of SEQ ID NO: 1886099
ugagaaguguuugaagaag

SEQ ID NO: 2387509 - RNA, 19 nt, Artificial Sequence
  Description of Artificial Sequence: Synthetic oligonucleotide
  Antisense strand to SEQ ID NO: 2387508
cuucuucaaacacuucuca

SEQ ID NO: 2387510 - RNA, 19 nt, Artificial Sequence
  Description of Artificial Sequence: Synthetic oligonucleotide
  Sense strand starting at position 1375 of SEQ ID NO: 1886099
aggagagguccuuguuuga

SEQ ID NO: 2387511 - RNA, 19 nt, Artificial Sequence
  Description of Artificial Sequence: Synthetic oligonucleotide
  Antisense strand to SEQ ID NO: 2387510
ucaaacaaggaccucuccu

SEQ ID NO: 2387512 - RNA, 19 nt, Artificial Sequence
  Description of Artificial Sequence: Synthetic oligonucleotide
  Sense strand starting at position 1426 of SEQ ID NO: 1886099
uucugugugucccucgaca

SEQ ID NO: 2387513 - RNA, 19 nt, Artificial Sequence
  Description of Artificial Sequence: Synthetic oligonucleotide
  Antisense strand to SEQ ID NO: 2387512
ugucgagggacacacagaa

SEQ ID NO: 2387514 - RNA, 19 nt, Artificial Sequence
  Description of Artificial Sequence: Synthetic oligonucleotide
  Sense strand starting at position 1507 of SEQ ID NO: 1886099
cucugcuucccagagcaga

SEQ ID NO: 2387515 - RNA, 19 nt, Artificial Sequence
  Description of Artificial Sequence: Synthetic oligonucleotide
  Antisense strand to SEQ ID NO: 2387514
ucugcucugggaagcagag

SEQ ID NO: 2387516 - RNA, 19 nt, Artificial Sequence
  Description of Artificial Sequence: Synthetic oligonucleotide
  Sense strand starting at position 1587 of SEQ ID NO: 1886099
gucuguccugcacaaggaa

SEQ ID NO: 2387517 - RNA, 19 nt, Artificial Sequence
  Description of Artificial Sequence: Synthetic oligonucleotide
  Antisense strand to SEQ ID NO: 2387516
uuccuugugcaggacagac

SEQ ID NO: 2387518 - RNA, 19 nt, Artificial Sequence
  Description of Artificial Sequence: Synthetic oligonucleotide
  Sense strand starting at position 1667 of SEQ ID NO: 1886099
gcuaguuccuccucuguca

SEQ ID NO: 2387519 - RNA, 19 nt, Artificial Sequence
  Description of Artificial Sequence: Synthetic oligonucleotide
  Antisense strand to SEQ ID NO: 2387518
ugacagaggaggaacuagc

SEQ ID NO: 2387520 - RNA, 19 nt, Artificial Sequence
  Description of Artificial Sequence: Synthetic oligonucleotide
  Sense strand starting at position 1755 of SEQ ID NO: 1886099
uugggucagucagcuguaa

SEQ ID NO: 2387521 - RNA, 19 nt, Artificial Sequence
  Description of Artificial Sequence: Synthetic oligonucleotide
  Antisense strand to SEQ ID NO: 2387520
uuacagcugacugacccaa

SEQ ID NO: 2387522 - RNA, 19 nt, Artificial Sequence
  Description of Artificial Sequence: Synthetic oligonucleotide
  Sense strand starting at position 1757 of SEQ ID NO: 1886099
gggucagucagcuguaauu

SEQ ID NO: 2387523 - RNA, 19 nt, Artificial Sequence
  Description of Artificial Sequence: Synthetic oligonucleotide
  Antisense strand to SEQ ID NO: 2387522
aauuacagcugacugaccc

SEQ ID NO: 2387524 - RNA, 19 nt, Artificial Sequence
  Description of Artificial Sequence: Synthetic oligonucleotide
  Sense strand starting at position 1767 of SEQ ID NO: 1886099
gcuguaauucccguguucu

SEQ ID NO: 2387525 - RNA, 19 nt, Artificial Sequence
  Description of Artificial Sequence: Synthetic oligonucleotide
  Antisense strand to SEQ ID NO: 2387524
agaacacgggaauuacagc

SEQ ID NO: 2387526 - RNA, 19 nt, Artificial Sequence
  Description of Artificial Sequence: Synthetic oligonucleotide
  Sense strand starting at position 1904 of SEQ ID NO: 1886099
ugcagauccugguucugaa

SEQ ID NO: 2387527 - RNA, 19 nt, Artificial Sequence
  Description of Artificial Sequence: Synthetic oligonucleotide
  Antisense strand to SEQ ID NO: 2387526
uucagaaccaggaucugca

SEQ ID NO: 2387528 - RNA, 19 nt, Artificial Sequence
  Description of Artificial Sequence: Synthetic oligonucleotide
  Sense strand starting at position 1997 of SEQ ID NO: 1886099
gaauguggccaggagacuu

SEQ ID NO: 2387529 - RNA, 19 nt, Artificial Sequence
  Description of Artificial Sequence: Synthetic oligonucleotide
  Antisense strand to SEQ ID NO: 2387528
aagucuccuggccacauuc

SEQ ID NO: 2387530 - RNA, 19 nt, Artificial Sequence
  Description of Artificial Sequence: Synthetic oligonucleotide
  Sense strand starting at position 2009 of SEQ ID NO: 1886099
gagacuuccgggugaggga

SEQ ID NO: 2387531 - RNA, 19 nt, Artificial Sequence
  Description of Artificial Sequence: Synthetic oligonucleotide
  Antisense strand to SEQ ID NO: 2387530
ucccucacccggaagucuc

SEQ ID NO: 2387532 - RNA, 19 nt, Artificial Sequence
  Description of Artificial Sequence: Synthetic oligonucleotide
  Sense strand starting at position 2203 of SEQ ID NO: 1886099
aggcuccugagcgguaauu

SEQ ID NO: 2387533 - RNA, 19 nt, Artificial Sequence
  Description of Artificial Sequence: Synthetic oligonucleotide
  Antisense strand to SEQ ID NO: 2387532
aauuaccgcucaggagccu

SEQ ID NO: 2387534 - RNA, 19 nt, Artificial Sequence
  Description of Artificial Sequence: Synthetic oligonucleotide
  Sense strand starting at position 2205 of SEQ ID NO: 1886099
gcuccugagcgguaauuag

SEQ ID NO: 2387535 - RNA, 19 nt, Artificial Sequence
  Description of Artificial Sequence: Synthetic oligonucleotide
  Antisense strand to SEQ ID NO: 2387534
cuaauuaccgcucaggagc

SEQ ID NO: 2387536 - RNA, 19 nt, Artificial Sequence
  Description of Artificial Sequence: Synthetic oligonucleotide
  Sense strand starting at position 2498 of SEQ ID NO: 1886099
uucuucuguuccuucguaa

SEQ ID NO: 2387537 - RNA, 19 nt, Artificial Sequence
  Description of Artificial Sequence: Synthetic oligonucleotide
  Antisense strand to SEQ ID NO: 2387536
uuacgaaggaacagaagaa

SEQ ID NO: 2387538 - RNA, 19 nt, Artificial Sequence
  Description of Artificial Sequence: Synthetic oligonucleotide
  Sense strand starting at position 2566 of SEQ ID NO: 1886099
ugcugcucacccugagaca

SEQ ID NO: 2387539 - RNA, 19 nt, Artificial Sequence
  Description of Artificial Sequence: Synthetic oligonucleotide
  Antisense strand to SEQ ID NO: 2387538
ugucucagggugagcagca

SEQ ID NO: 2387540 - RNA, 19 nt, Artificial Sequence
  Description of Artificial Sequence: Synthetic oligonucleotide
  Sense strand starting at position 2697 of SEQ ID NO: 1886099
ccugguguccucugcagaa

SEQ ID NO: 2387541 - RNA, 19 nt, Artificial Sequence
  Description of Artificial Sequence: Synthetic oligonucleotide
  Antisense strand to SEQ ID NO: 2387540
uucugcagaggacaccagg

SEQ ID NO: 2387542 - RNA, 19 nt, Artificial Sequence
  Description of Artificial Sequence: Synthetic oligonucleotide
  Sense strand starting at position 2830 of SEQ ID NO: 1886099
cugccuguaucuguacuau

SEQ ID NO: 2387543 - RNA, 19 nt, Artificial Sequence
  Description of Artificial Sequence: Synthetic oligonucleotide
  Antisense strand to SEQ ID NO: 2387542
auaguacagauacaggcag

SEQ ID NO: 2387544 - RNA, 19 nt, Artificial Sequence
  Description of Artificial Sequence: Synthetic oligonucleotide
  Sense strand starting at position 2936 of SEQ ID NO: 1886099
agucuuaauccugguuuac

SEQ ID NO: 2387545 - RNA, 19 nt, Artificial Sequence
  Description of Artificial Sequence: Synthetic oligonucleotide
  Antisense strand to SEQ ID NO: 2387544
guaaaccaggauuaagacu

SEQ ID NO: 2387546 - RNA, 19 nt, Artificial Sequence
  Description of Artificial Sequence: Synthetic oligonucleotide
  Sense strand starting at position 3218 of SEQ ID NO: 1886099
ccucuugaguccuuuccuu

SEQ ID NO: 2387547 - RNA, 19 nt, Artificial Sequence
  Description of Artificial Sequence: Synthetic oligonucleotide
  Antisense strand to SEQ ID NO: 2387546
aaggaaaggacucaagagg

SEQ ID NO: 2387548 - RNA, 19 nt, Artificial Sequence
  Description of Artificial Sequence: Synthetic oligonucleotide
  Sense strand starting at position 3244 of SEQ ID NO: 1886099
cggauauccuggccuacca

SEQ ID NO: 2387549 - RNA, 19 nt, Artificial Sequence
  Description of Artificial Sequence: Synthetic oligonucleotide
  Antisense strand to SEQ ID NO: 2387548
ugguaggccaggauauccg

SEQ ID NO: 2387550 - RNA, 19 nt, Artificial Sequence
  Description of Artificial Sequence: Synthetic oligonucleotide
  Sense strand starting at position 3483 of SEQ ID NO: 1886099
ggcguaaacaguuacugaa

SEQ ID NO: 2387551 - RNA, 19 nt, Artificial Sequence
  Description of Artificial Sequence: Synthetic oligonucleotide
  Antisense strand to SEQ ID NO: 2387550
uucaguaacuguuuacgcc

SEQ ID NO: 2387552 - RNA, 19 nt, Artificial Sequence
  Description of Artificial Sequence: Synthetic oligonucleotide
  Sense strand starting at position 3638 of SEQ ID NO: 1886099
gggaguuucugggcuccca

SEQ ID NO: 2387553 - RNA, 19 nt, Artificial Sequence
  Description of Artificial Sequence: Synthetic oligonucleotide
  Antisense strand to SEQ ID NO: 2387552
ugggagcccagaaacuccc

SEQ ID NO: 2387554 - RNA, 19 nt, Artificial Sequence
  Description of Artificial Sequence: Synthetic oligonucleotide
  Sense strand starting at position 3891 of SEQ ID NO: 1886099
gguuaacuauaguccuauu

SEQ ID NO: 2387555 - RNA, 19 nt, Artificial Sequence
  Description of Artificial Sequence: Synthetic oligonucleotide
  Antisense strand to SEQ ID NO: 2387554
aauaggacuauaguuaacc

SEQ ID NO: 2387556 - RNA, 19 nt, Artificial Sequence
  Description of Artificial Sequence: Synthetic oligonucleotide
  Sense strand starting at position 3901 of SEQ ID NO: 1886099
aguccuauugguuaugaga

SEQ ID NO: 2387557 - RNA, 19 nt, Artificial Sequence
  Description of Artificial Sequence: Synthetic oligonucleotide
  Antisense strand to SEQ ID NO: 2387556
ucucauaaccaauaggacu

SEQ ID NO: 2387558 - RNA, 19 nt, Artificial Sequence
  Description of Artificial Sequence: Synthetic oligonucleotide
  Sense strand starting at position 3914 of SEQ ID NO: 1886099
augagaccucgguguggua

SEQ ID NO: 2387559 - RNA, 19 nt, Artificial Sequence
  Description of Artificial Sequence: Synthetic oligonucleotide
  Antisense strand to SEQ ID NO: 2387558
uaccacaccgaggucucau

SEQ ID NO: 2387560 - RNA, 19 nt, Artificial Sequence
  Description of Artificial Sequence: Synthetic oligonucleotide
  Sense strand starting at position 41 of SEQ ID NO: 1886100
uaggguuguggagagaguu

SEQ ID NO: 2387561 - RNA, 19 nt, Artificial Sequence
  Description of Artificial Sequence: Synthetic oligonucleotide
  Antisense strand to SEQ ID NO: 2387560
aacucucuccacaacccua

SEQ ID NO: 2387562 - RNA, 19 nt, Artificial Sequence
  Description of Artificial Sequence: Synthetic oligonucleotide
  Sense strand starting at position 97 of SEQ ID NO: 1886100
cugagcaggcaucauagua

SEQ ID NO: 2387563 - RNA, 19 nt, Artificial Sequence
  Description of Artificial Sequence: Synthetic oligonucleotide
  Antisense strand to SEQ ID NO: 2387562
uacuaugaugccugcucag

SEQ ID NO: 2387564 - RNA, 19 nt, Artificial Sequence
  Description of Artificial Sequence: Synthetic oligonucleotide
  Sense strand starting at position 130 of SEQ ID NO: 1886100
aagaaauaccugggucugu

SEQ ID NO: 2387565 - RNA, 19 nt, Artificial Sequence
  Description of Artificial Sequence: Synthetic oligonucleotide
  Antisense strand to SEQ ID NO: 2387564
acagacccagguauuucuu

SEQ ID NO: 2387566 - RNA, 19 nt, Artificial Sequence
  Description of Artificial Sequence: Synthetic oligonucleotide
  Sense strand starting at position 335 of SEQ ID NO: 1886100
aaagauggcuggccaguaa

SEQ ID NO: 2387567 - RNA, 19 nt, Artificial Sequence
  Description of Artificial Sequence: Synthetic oligonucleotide
  Antisense strand to SEQ ID NO: 2387566
uuacuggccagccaucuuu

SEQ ID NO: 2387568 - RNA, 19 nt, Artificial Sequence
  Description of Artificial Sequence: Synthetic oligonucleotide
  Sense strand starting at position 339 of SEQ ID NO: 1886100
auggcuggccaguaaauga

SEQ ID NO: 2387569 - RNA, 19 nt, Artificial Sequence
  Description of Artificial Sequence: Synthetic oligonucleotide
  Antisense strand to SEQ ID NO: 2387568
ucauuuacuggccagccau

SEQ ID NO: 2387570 - RNA, 19 nt, Artificial Sequence
  Description of Artificial Sequence: Synthetic oligonucleotide
  Sense strand starting at position 487 of SEQ ID NO: 1886100
guauaacugguccagcaca

SEQ ID NO: 2387571 - RNA, 19 nt, Artificial Sequence
  Description of Artificial Sequence: Synthetic oligonucleotide
  Antisense strand to SEQ ID NO: 2387570
ugugcuggaccaguuauac

SEQ ID NO: 2387572 - RNA, 19 nt, Artificial Sequence
  Description of Artificial Sequence: Synthetic oligonucleotide
  Sense strand starting at position 623 of SEQ ID NO: 1886100
guguucuuacuggauggga

SEQ ID NO: 2387573 - RNA, 19 nt, Artificial Sequence
  Description of Artificial Sequence: Synthetic oligonucleotide
  Antisense strand to SEQ ID NO: 2387572
ucccauccaguaagaacac

SEQ ID NO: 2387574 - RNA, 19 nt, Artificial Sequence
  Description of Artificial Sequence: Synthetic oligonucleotide
  Sense strand starting at position 679 of SEQ ID NO: 1886100
aggagagcgagguguuaga

SEQ ID NO: 2387575 - RNA, 19 nt, Artificial Sequence
  Description of Artificial Sequence: Synthetic oligonucleotide
  Antisense strand to SEQ ID NO: 2387574
ucuaacaccucgcucuccu

SEQ ID NO: 2387576 - RNA, 19 nt, Artificial Sequence
  Description of Artificial Sequence: Synthetic oligonucleotide
  Sense strand starting at position 683 of SEQ ID NO: 1886100
gagcgagguguuagacagu

SEQ ID NO: 2387577 - RNA, 19 nt, Artificial Sequence
  Description of Artificial Sequence: Synthetic oligonucleotide
  Antisense strand to SEQ ID NO: 2387576
acugucuaacaccucgcuc

SEQ ID NO: 2387578 - RNA, 19 nt, Artificial Sequence
  Description of Artificial Sequence: Synthetic oligonucleotide
  Sense strand starting at position 686 of SEQ ID NO: 1886100
cgagguguuagacagugau

SEQ ID NO: 2387579 - RNA, 19 nt, Artificial Sequence
  Description of Artificial Sequence: Synthetic oligonucleotide
  Antisense strand to SEQ ID NO: 2387578
aucacugucuaacaccucg

SEQ ID NO: 2387580 - RNA, 19 nt, Artificial Sequence
  Description of Artificial Sequence: Synthetic oligonucleotide
  Sense strand starting at position 690 of SEQ ID NO: 1886100
guguuagacagugaucuug

SEQ ID NO: 2387581 - RNA, 19 nt, Artificial Sequence
  Description of Artificial Sequence: Synthetic oligonucleotide
  Antisense strand to SEQ ID NO: 2387580
caagaucacugucuaacac

SEQ ID NO: 2387582 - RNA, 19 nt, Artificial Sequence
  Description of Artificial Sequence: Synthetic oligonucleotide
  Sense strand starting at position 891 of SEQ ID NO: 1886100
gagggacauugcuccaaag

SEQ ID NO: 2387583 - RNA, 19 nt, Artificial Sequence
  Description of Artificial Sequence: Synthetic oligonucleotide
  Antisense strand to SEQ ID NO: 2387582
cuuuggagcaaugucccuc

SEQ ID NO: 2387584 - RNA, 19 nt, Artificial Sequence
  Description of Artificial Sequence: Synthetic oligonucleotide
  Sense strand starting at position 1007 of SEQ ID NO: 1886100
ugugaaaguuggguaucaa

SEQ ID NO: 2387585 - RNA, 19 nt, Artificial Sequence
  Description of Artificial Sequence: Synthetic oligonucleotide
  Antisense strand to SEQ ID NO: 2387584
uugauacccaacuuucaca

SEQ ID NO: 2387586 - RNA, 19 nt, Artificial Sequence
  Description of Artificial Sequence: Synthetic oligonucleotide
  Sense strand starting at position 1008 of SEQ ID NO: 1886100
gugaaaguuggguaucaaa

SEQ ID NO: 2387587 - RNA, 19 nt, Artificial Sequence
  Description of Artificial Sequence: Synthetic oligonucleotide
  Antisense strand to SEQ ID NO: 2387586
uuugauacccaacuuucac

SEQ ID NO: 2387588 - RNA, 19 nt, Artificial Sequence
  Description of Artificial Sequence: Synthetic oligonucleotide
  Sense strand starting at position 1110 of SEQ ID NO: 1886100
gugagaccagucuggauau

SEQ ID NO: 2387589 - RNA, 19 nt, Artificial Sequence
  Description of Artificial Sequence: Synthetic oligonucleotide
  Antisense strand to SEQ ID NO: 2387588
auauccagacuggucucac

SEQ ID NO: 2387590 - RNA, 19 nt, Artificial Sequence
  Description of Artificial Sequence: Synthetic oligonucleotide
  Sense strand starting at position 1150 of SEQ ID NO: 1886100
agacuuucucgcuacuaaa

SEQ ID NO: 2387591 - RNA, 19 nt, Artificial Sequence
  Description of Artificial Sequence: Synthetic oligonucleotide
  Antisense strand to SEQ ID NO: 2387590
uuuaguagcgagaaagucu

SEQ ID NO: 2387592 - RNA, 19 nt, Artificial Sequence
  Description of Artificial Sequence: Synthetic oligonucleotide
  Sense strand starting at position 1209 of SEQ ID NO: 1886100
gagugcuuacaauggaaua

SEQ ID NO: 2387593 - RNA, 19 nt, Artificial Sequence
  Description of Artificial Sequence: Synthetic oligonucleotide
  Antisense strand to SEQ ID NO: 2387592
uauuccauuguaagcacuc

SEQ ID NO: 2387594 - RNA, 19 nt, Artificial Sequence
  Description of Artificial Sequence: Synthetic oligonucleotide
  Sense strand starting at position 1249 of SEQ ID NO: 1886100
gggaaauucccauguaugc

SEQ ID NO: 2387595 - RNA, 19 nt, Artificial Sequence
  Description of Artificial Sequence: Synthetic oligonucleotide
  Antisense strand to SEQ ID NO: 2387594
gcauacaugggaauuuccc

SEQ ID NO: 2387596 - RNA, 19 nt, Artificial Sequence
  Description of Artificial Sequence: Synthetic oligonucleotide
  Sense strand starting at position 1754 of SEQ ID NO: 1886100
guuacuuaauggguaugga

SEQ ID NO: 2387597 - RNA, 19 nt, Artificial Sequence
  Description of Artificial Sequence: Synthetic oligonucleotide
  Antisense strand to SEQ ID NO: 2387596
uccauacccauuaaguaac

SEQ ID NO: 2387598 - RNA, 19 nt, Artificial Sequence
  Description of Artificial Sequence: Synthetic oligonucleotide
  Sense strand starting at position 1773 of SEQ ID NO: 1886100
guuucaguugggcaagauu

SEQ ID NO: 2387599 - RNA, 19 nt, Artificial Sequence
  Description of Artificial Sequence: Synthetic oligonucleotide
  Antisense strand to SEQ ID NO: 2387598
aaucuugcccaacugaaac

SEQ ID NO: 2387600 - RNA, 19 nt, Artificial Sequence
  Description of Artificial Sequence: Synthetic oligonucleotide
  Sense strand starting at position 1789 of SEQ ID NO: 1886100
auuaaacauuucuggagau

SEQ ID NO: 2387601 - RNA, 19 nt, Artificial Sequence
  Description of Artificial Sequence: Synthetic oligonucleotide
  Antisense strand to SEQ ID NO: 2387600
aucuccagaaauguuuaau

SEQ ID NO: 2387602 - RNA, 19 nt, Artificial Sequence
  Description of Artificial Sequence: Synthetic oligonucleotide
  Sense strand starting at position 1790 of SEQ ID NO: 1886100
uuaaacauuucuggagaua

SEQ ID NO: 2387603 - RNA, 19 nt, Artificial Sequence
  Description of Artificial Sequence: Synthetic oligonucleotide
  Antisense strand to SEQ ID NO: 2387602
uaucuccagaaauguuuaa

SEQ ID NO: 2387604 - RNA, 19 nt, Artificial Sequence
  Description of Artificial Sequence: Synthetic oligonucleotide
  Sense strand starting at position 1819 of SEQ ID NO: 1886100
augguugcacgauaaugua

SEQ ID NO: 2387605 - RNA, 19 nt, Artificial Sequence
  Description of Artificial Sequence: Synthetic oligonucleotide
  Antisense strand to SEQ ID NO: 2387604
uacauuaucgugcaaccau

SEQ ID NO: 2387606 - RNA, 19 nt, Artificial Sequence
  Description of Artificial Sequence: Synthetic oligonucleotide
  Sense strand starting at position 1827 of SEQ ID NO: 1886100
acgauaauguacuuaacaa

SEQ ID NO: 2387607 - RNA, 19 nt, Artificial Sequence
  Description of Artificial Sequence: Synthetic oligonucleotide
  Antisense strand to SEQ ID NO: 2387606
uuguuaaguacauuaucgu

SEQ ID NO: 2387608 - RNA, 19 nt, Artificial Sequence
  Description of Artificial Sequence: Synthetic oligonucleotide
  Sense strand starting at position 1834 of SEQ ID NO: 1886100
uguacuuaacaauggguaa

SEQ ID NO: 2387609 - RNA, 19 nt, Artificial Sequence
  Description of Artificial Sequence: Synthetic oligonucleotide
  Antisense strand to SEQ ID NO: 2387608
uuacccauuguuaaguaca

SEQ ID NO: 2387610 - RNA, 19 nt, Artificial Sequence
  Description of Artificial Sequence: Synthetic oligonucleotide
  Sense strand starting at position 1898 of SEQ ID NO: 1886100
acagaaugcccauaauguu

SEQ ID NO: 2387611 - RNA, 19 nt, Artificial Sequence
  Description of Artificial Sequence: Synthetic oligonucleotide
  Antisense strand to SEQ ID NO: 2387610
aacauuaugggcauucugu

SEQ ID NO: 2387612 - RNA, 19 nt, Artificial Sequence
  Description of Artificial Sequence: Synthetic oligonucleotide
  Sense strand starting at position 2099 of SEQ ID NO: 1886100
caguauugagaaugcauuc

SEQ ID NO: 2387613 - RNA, 19 nt, Artificial Sequence
  Description of Artificial Sequence: Synthetic oligonucleotide
  Antisense strand to SEQ ID NO: 2387612
gaaugcauucucaauacug

SEQ ID NO: 2387614 - RNA, 19 nt, Artificial Sequence
  Description of Artificial Sequence: Synthetic oligonucleotide
  Sense strand starting at position 2528 of SEQ ID NO: 1886100
ugacacuggugauuaaguu

SEQ ID NO: 2387615 - RNA, 19 nt, Artificial Sequence
  Description of Artificial Sequence: Synthetic oligonucleotide
  Antisense strand to SEQ ID NO: 2387614
aacuuaaucaccaguguca

SEQ ID NO: 2387616 - RNA, 19 nt, Artificial Sequence
  Description of Artificial Sequence: Synthetic oligonucleotide
  Sense strand starting at position 2529 of SEQ ID NO: 1886100
gacacuggugauuaaguuu

SEQ ID NO: 2387617 - RNA, 19 nt, Artificial Sequence
  Description of Artificial Sequence: Synthetic oligonucleotide
  Antisense strand to SEQ ID NO: 2387616
aaacuuaaucaccaguguc

SEQ ID NO: 2387618 - RNA, 19 nt, Artificial Sequence
  Description of Artificial Sequence: Synthetic oligonucleotide
  Sense strand starting at position 2787 of SEQ ID NO: 1886100
uugcauguccacuacagau

SEQ ID NO: 2387619 - RNA, 19 nt, Artificial Sequence
  Description of Artificial Sequence: Synthetic oligonucleotide
  Antisense strand to SEQ ID NO: 2387618
aucuguaguggacaugcaa

SEQ ID NO: 2387620 - RNA, 19 nt, Artificial Sequence
  Description of Artificial Sequence: Synthetic oligonucleotide
  Sense strand starting at position 2789 of SEQ ID NO: 1886100
gcauguccacuacagauca

SEQ ID NO: 2387621 - RNA, 19 nt, Artificial Sequence
  Description of Artificial Sequence: Synthetic oligonucleotide
  Antisense strand to SEQ ID NO: 2387620
ugaucuguaguggacaugc

SEQ ID NO: 2387622 - RNA, 19 nt, Artificial Sequence
  Description of Artificial Sequence: Synthetic oligonucleotide
  Sense strand starting at position 2863 of SEQ ID NO: 1886100
gcagucuccgugguaguua

SEQ ID NO: 2387623 - RNA, 19 nt, Artificial Sequence
  Description of Artificial Sequence: Synthetic oligonucleotide
  Antisense strand to SEQ ID NO: 2387622
uaacuaccacggagacugc

SEQ ID NO: 2387624 - RNA, 19 nt, Artificial Sequence
  Description of Artificial Sequence: Synthetic oligonucleotide
  Sense strand starting at position 2876 of SEQ ID NO: 1886100
uaguuauaggagggcaaga

SEQ ID NO: 2387625 - RNA, 19 nt, Artificial Sequence
  Description of Artificial Sequence: Synthetic oligonucleotide
  Antisense strand to SEQ ID NO: 2387624
ucuugcccuccuauaacua

SEQ ID NO: 2387626 - RNA, 19 nt, Artificial Sequence
  Description of Artificial Sequence: Synthetic oligonucleotide
  Sense strand starting at position 2901 of SEQ ID NO: 1886100
agaauuacagauuggcuuu

SEQ ID NO: 2387627 - RNA, 19 nt, Artificial Sequence
  Description of Artificial Sequence: Synthetic oligonucleotide
  Antisense strand to SEQ ID NO: 2387626
aaagccaaucuguaauucu

SEQ ID NO: 2387628 - RNA, 19 nt, Artificial Sequence
  Description of Artificial Sequence: Synthetic oligonucleotide
  Sense strand starting at position 2922 of SEQ ID NO: 1886100
auugucucagccuagaagu

SEQ ID NO: 2387629 - RNA, 19 nt, Artificial Sequence
  Description of Artificial Sequence: Synthetic oligonucleotide
  Antisense strand to SEQ ID NO: 2387628
acuucuaggcugagacaau

SEQ ID NO: 2387630 - RNA, 19 nt, Artificial Sequence
  Description of Artificial Sequence: Synthetic oligonucleotide
  Sense strand starting at position 2924 of SEQ ID NO: 1886100
ugucucagccuagaaguaa

SEQ ID NO: 2387631 - RNA, 19 nt, Artificial Sequence
  Description of Artificial Sequence: Synthetic oligonucleotide
  Antisense strand to SEQ ID NO: 2387630
uuacuucuaggcugagaca

SEQ ID NO: 2387632 - RNA, 19 nt, Artificial Sequence
  Description of Artificial Sequence: Synthetic oligonucleotide
  Sense strand starting at position 2935 of SEQ ID NO: 1886100
agaaguaaccugcauagcu

SEQ ID NO: 2387633 - RNA, 19 nt, Artificial Sequence
  Description of Artificial Sequence: Synthetic oligonucleotide
  Antisense strand to SEQ ID NO: 2387632
agcuaugcagguuacuucu

SEQ ID NO: 2387634 - RNA, 19 nt, Artificial Sequence
  Description of Artificial Sequence: Synthetic oligonucleotide
  Sense strand starting at position 3025 of SEQ ID NO: 1886100
cugauuaucucugcuauag

SEQ ID NO: 2387635 - RNA, 19 nt, Artificial Sequence
  Description of Artificial Sequence: Synthetic oligonucleotide
  Antisense strand to SEQ ID NO: 2387634
cuauagcagagauaaucag

SEQ ID NO: 2387636 - RNA, 19 nt, Artificial Sequence
  Description of Artificial Sequence: Synthetic oligonucleotide
  Sense strand starting at position 3188 of SEQ ID NO: 1886100
gugauuguggagugauuga

SEQ ID NO: 2387637 - RNA, 19 nt, Artificial Sequence
  Description of Artificial Sequence: Synthetic oligonucleotide
  Antisense strand to SEQ ID NO: 2387636
ucaaucacuccacaaucac

SEQ ID NO: 2387638 - RNA, 19 nt, Artificial Sequence
  Description of Artificial Sequence: Synthetic oligonucleotide
  Sense strand starting at position 3397 of SEQ ID NO: 1886100
guggguuuccaucaacaac

SEQ ID NO: 2387639 - RNA, 19 nt, Artificial Sequence
  Description of Artificial Sequence: Synthetic oligonucleotide
  Antisense strand to SEQ ID NO: 2387638
guuguugauggaaacccac

SEQ ID NO: 2387640 - RNA, 19 nt, Artificial Sequence
  Description of Artificial Sequence: Synthetic oligonucleotide
  Sense strand starting at position 106 of SEQ ID NO: 1886101
gguuccuuuccaugacaua

SEQ ID NO: 2387641 - RNA, 19 nt, Artificial Sequence
  Description of Artificial Sequence: Synthetic oligonucleotide
  Antisense strand to SEQ ID NO: 2387640
uaugucauggaaaggaacc

SEQ ID NO: 2387642 - RNA, 19 nt, Artificial Sequence
  Description of Artificial Sequence: Synthetic oligonucleotide
  Sense strand starting at position 120 of SEQ ID NO: 1886101
acauaagggcuuuguucuu

SEQ ID NO: 2387643 - RNA, 19 nt, Artificial Sequence
  Description of Artificial Sequence: Synthetic oligonucleotide
  Antisense strand to SEQ ID NO: 2387642
aagaacaaagcccuuaugu

SEQ ID NO: 2387644 - RNA, 19 nt, Artificial Sequence
  Description of Artificial Sequence: Synthetic oligonucleotide
  Sense strand starting at position 796 of SEQ ID NO: 1886101
augauuugaugauaugguu

SEQ ID NO: 2387645 - RNA, 19 nt, Artificial Sequence
  Description of Artificial Sequence: Synthetic oligonucleotide
  Antisense strand to SEQ ID NO: 2387644
aaccauaucaucaaaucau

SEQ ID NO: 2387646 - RNA, 19 nt, Artificial Sequence
  Description of Artificial Sequence: Synthetic oligonucleotide
  Sense strand starting at position 824 of SEQ ID NO: 1886101
aggugugauaaugguauca

SEQ ID NO: 2387647 - RNA, 19 nt, Artificial Sequence
  Description of Artificial Sequence: Synthetic oligonucleotide
  Antisense strand to SEQ ID NO: 2387646
ugauaccauuaucacaccu

SEQ ID NO: 2387648 - RNA, 19 nt, Artificial Sequence
  Description of Artificial Sequence: Synthetic oligonucleotide
  Sense strand starting at position 834 of SEQ ID NO: 1886101
augguaucauuaguagcau

SEQ ID NO: 2387649 - RNA, 19 nt, Artificial Sequence
  Description of Artificial Sequence: Synthetic oligonucleotide
  Antisense strand to SEQ ID NO: 2387648
augcuacuaaugauaccau

SEQ ID NO: 2387650 - RNA, 19 nt, Artificial Sequence
  Description of Artificial Sequence: Synthetic oligonucleotide
  Sense strand starting at position 856 of SEQ ID NO: 1886101
gucccuuugucuuuaggaa

SEQ ID NO: 2387651 - RNA, 19 nt, Artificial Sequence
  Description of Artificial Sequence: Synthetic oligonucleotide
  Antisense strand to SEQ ID NO: 2387650
uuccuaaagacaaagggac

SEQ ID NO: 2387652 - RNA, 19 nt, Artificial Sequence
  Description of Artificial Sequence: Synthetic oligonucleotide
  Sense strand starting at position 857 of SEQ ID NO: 1886101
ucccuuugucuuuaggaau

SEQ ID NO: 2387653 - RNA, 19 nt, Artificial Sequence
  Description of Artificial Sequence: Synthetic oligonucleotide
  Antisense strand to SEQ ID NO: 2387652
auuccuaaagacaaaggga

SEQ ID NO: 2387654 - RNA, 19 nt, Artificial Sequence
  Description of Artificial Sequence: Synthetic oligonucleotide
  Sense strand starting at position 1072 of SEQ ID NO: 1886101
cggcauuuguaaucuguaa

SEQ ID NO: 2387655 - RNA, 19 nt, Artificial Sequence
  Description of Artificial Sequence: Synthetic oligonucleotide
  Antisense strand to SEQ ID NO: 2387654
uuacagauuacaaaugccg

SEQ ID NO: 2387656 - RNA, 19 nt, Artificial Sequence
  Description of Artificial Sequence: Synthetic oligonucleotide
  Sense strand starting at position 1090 of SEQ ID NO: 1886101
aggcucuuccugcaaagaa

SEQ ID NO: 2387657 - RNA, 19 nt, Artificial Sequence
  Description of Artificial Sequence: Synthetic oligonucleotide
  Antisense strand to SEQ ID NO: 2387656
uucuuugcaggaagagccu

SEQ ID NO: 2387658 - RNA, 19 nt, Artificial Sequence
  Description of Artificial Sequence: Synthetic oligonucleotide
  Sense strand starting at position 1111 of SEQ ID NO: 1886101
gguguuuccaacuauacgu

SEQ ID NO: 2387659 - RNA, 19 nt, Artificial Sequence
  Description of Artificial Sequence: Synthetic oligonucleotide
  Antisense strand to SEQ ID NO: 2387658
acguauaguuggaaacacc

SEQ ID NO: 2387660 - RNA, 19 nt, Artificial Sequence
  Description of Artificial Sequence: Synthetic oligonucleotide
  Sense strand starting at position 1239 of SEQ ID NO: 1886101
ucaugaugaccggguugua

SEQ ID NO: 2387661 - RNA, 19 nt, Artificial Sequence
  Description of Artificial Sequence: Synthetic oligonucleotide
  Antisense strand to SEQ ID NO: 2387660
uacaacccggucaucauga

SEQ ID NO: 2387662 - RNA, 19 nt, Artificial Sequence
  Description of Artificial Sequence: Synthetic oligonucleotide
  Sense strand starting at position 1242 of SEQ ID NO: 1886101
ugaugaccggguuguaaau

SEQ ID NO: 2387663 - RNA, 19 nt, Artificial Sequence
  Description of Artificial Sequence: Synthetic oligonucleotide
  Antisense strand to SEQ ID NO: 2387662
auuuacaacccggucauca

SEQ ID NO: 2387664 - RNA, 19 nt, Artificial Sequence
  Description of Artificial Sequence: Synthetic oligonucleotide
  Sense strand starting at position 1254 of SEQ ID NO: 1886101
uguaaauacugccugggaa

SEQ ID NO: 2387665 - RNA, 19 nt, Artificial Sequence
  Description of Artificial Sequence: Synthetic oligonucleotide
  Antisense strand to SEQ ID NO: 2387664
uucccaggcaguauuuaca

SEQ ID NO: 2387666 - RNA, 19 nt, Artificial Sequence
  Description of Artificial Sequence: Synthetic oligonucleotide
  Sense strand starting at position 1255 of SEQ ID NO: 1886101
guaaauacugccugggaag

SEQ ID NO: 2387667 - RNA, 19 nt, Artificial Sequence
  Description of Artificial Sequence: Synthetic oligonucleotide
  Antisense strand to SEQ ID NO: 2387666
cuucccaggcaguauuuac

SEQ ID NO: 2387668 - RNA, 19 nt, Artificial Sequence
  Description of Artificial Sequence: Synthetic oligonucleotide
  Sense strand starting at position 1434 of SEQ ID NO: 1886101
gucucuuaggcccagagga

SEQ ID NO: 2387669 - RNA, 19 nt, Artificial Sequence
  Description of Artificial Sequence: Synthetic oligonucleotide
  Antisense strand to SEQ ID NO: 2387668
uccucugggccuaagagac

SEQ ID NO: 2387670 - RNA, 19 nt, Artificial Sequence
  Description of Artificial Sequence: Synthetic oligonucleotide
  Sense strand starting at position 1538 of SEQ ID NO: 1886101
ccggaauuuccacggguuu

SEQ ID NO: 2387671 - RNA, 19 nt, Artificial Sequence
  Description of Artificial Sequence: Synthetic oligonucleotide
  Antisense strand to SEQ ID NO: 2387670
aaacccguggaaauuccgg

SEQ ID NO: 2387672 - RNA, 19 nt, Artificial Sequence
  Description of Artificial Sequence: Synthetic oligonucleotide
  Sense strand starting at position 2307 of SEQ ID NO: 1886101
gcgggaaccucucuacaac

SEQ ID NO: 2387673 - RNA, 19 nt, Artificial Sequence
  Description of Artificial Sequence: Synthetic oligonucleotide
  Antisense strand to SEQ ID NO: 2387672
guuguagagagguucccgc

SEQ ID NO: 2387674 - RNA, 19 nt, Artificial Sequence
  Description of Artificial Sequence: Synthetic oligonucleotide
  Sense strand starting at position 2308 of SEQ ID NO: 1886101
cgggaaccucucuacaacu

SEQ ID NO: 2387675 - RNA, 19 nt, Artificial Sequence
  Description of Artificial Sequence: Synthetic oligonucleotide
  Antisense strand to SEQ ID NO: 2387674
aguuguagagagguucccg

SEQ ID NO: 2387676 - RNA, 19 nt, Artificial Sequence
  Description of Artificial Sequence: Synthetic oligonucleotide
  Sense strand starting at position 2388 of SEQ ID NO: 1886101
gagcgaugugcgcuucgua

SEQ ID NO: 2387677 - RNA, 19 nt, Artificial Sequence
  Description of Artificial Sequence: Synthetic oligonucleotide
  Antisense strand to SEQ ID NO: 2387676
uacgaagcgcacaucgcuc

SEQ ID NO: 2387678 - RNA, 19 nt, Artificial Sequence
  Description of Artificial Sequence: Synthetic oligonucleotide
  Sense strand starting at position 2833 of SEQ ID NO: 1886101
uugaaaggcguuucgcauu

SEQ ID NO: 2387679 - RNA, 19 nt, Artificial Sequence
  Description of Artificial Sequence: Synthetic oligonucleotide
  Antisense strand to SEQ ID NO: 2387678
aaugcgaaacgccuuucaa

SEQ ID NO: 2387680 - RNA, 19 nt, Artificial Sequence
  Description of Artificial Sequence: Synthetic oligonucleotide
  Sense strand starting at position 2838 of SEQ ID NO: 1886101
aggcguuucgcauuccaau

SEQ ID NO: 2387681 - RNA, 19 nt, Artificial Sequence
  Description of Artificial Sequence: Synthetic oligonucleotide
  Antisense strand to SEQ ID NO: 2387680
auuggaaugcgaaacgccu

SEQ ID NO: 2387682 - RNA, 19 nt, Artificial Sequence
  Description of Artificial Sequence: Synthetic oligonucleotide
  Sense strand starting at position 2839 of SEQ ID NO: 1886101
ggcguuucgcauuccaauu

SEQ ID NO: 2387683 - RNA, 19 nt, Artificial Sequence
  Description of Artificial Sequence: Synthetic oligonucleotide
  Antisense strand to SEQ ID NO: 2387682
aauuggaaugcgaaacgcc

SEQ ID NO: 2387684 - RNA, 19 nt, Artificial Sequence
  Description of Artificial Sequence: Synthetic oligonucleotide
  Sense strand starting at position 2840 of SEQ ID NO: 1886101
gcguuucgcauuccaauua

SEQ ID NO: 2387685 - RNA, 19 nt, Artificial Sequence
  Description of Artificial Sequence: Synthetic oligonucleotide
  Antisense strand to SEQ ID NO: 2387684
uaauuggaaugcgaaacgc

SEQ ID NO: 2387686 - RNA, 19 nt, Artificial Sequence
  Description of Artificial Sequence: Synthetic oligonucleotide
  Sense strand starting at position 2859 of SEQ ID NO: 1886101
uggauugucgcucagacuu

SEQ ID NO: 2387687 - RNA, 19 nt, Artificial Sequence
  Description of Artificial Sequence: Synthetic oligonucleotide
  Antisense strand to SEQ ID NO: 2387686
aagucugagcgacaaucca

SEQ ID NO: 2387688 - RNA, 19 nt, Artificial Sequence
  Description of Artificial Sequence: Synthetic oligonucleotide
  Sense strand starting at position 2910 of SEQ ID NO: 1886101
agaucagguuguccugauu

SEQ ID NO: 2387689 - RNA, 19 nt, Artificial Sequence
  Description of Artificial Sequence: Synthetic oligonucleotide
  Antisense strand to SEQ ID NO: 2387688
aaucaggacaaccugaucu

SEQ ID NO: 2387690 - RNA, 19 nt, Artificial Sequence
  Description of Artificial Sequence: Synthetic oligonucleotide
  Sense strand starting at position 3358 of SEQ ID NO: 1886101
acguauuaguugucaagac

SEQ ID NO: 2387691 - RNA, 19 nt, Artificial Sequence
  Description of Artificial Sequence: Synthetic oligonucleotide
  Antisense strand to SEQ ID NO: 2387690
gucuugacaacuaauacgu

SEQ ID NO: 2387692 - RNA, 19 nt, Artificial Sequence
  Description of Artificial Sequence: Synthetic oligonucleotide
  Sense strand starting at position 3474 of SEQ ID NO: 1886101
auguuagaauuugcuuguu

SEQ ID NO: 2387693 - RNA, 19 nt, Artificial Sequence
  Description of Artificial Sequence: Synthetic oligonucleotide
  Antisense strand to SEQ ID NO: 2387692
aacaagcaaauucuaacau

SEQ ID NO: 2387694 - RNA, 19 nt, Artificial Sequence
  Description of Artificial Sequence: Synthetic oligonucleotide
  Sense strand starting at position 3477 of SEQ ID NO: 1886101
uuagaauuugcuuguuggu

SEQ ID NO: 2387695 - RNA, 19 nt, Artificial Sequence
  Description of Artificial Sequence: Synthetic oligonucleotide
  Antisense strand to SEQ ID NO: 2387694
accaacaagcaaauucuaa

SEQ ID NO: 2387696 - RNA, 19 nt, Artificial Sequence
  Description of Artificial Sequence: Synthetic oligonucleotide
  Sense strand starting at position 3479 of SEQ ID NO: 1886101
agaauuugcuuguugguua

SEQ ID NO: 2387697 - RNA, 19 nt, Artificial Sequence
  Description of Artificial Sequence: Synthetic oligonucleotide
  Antisense strand to SEQ ID NO: 2387696
uaaccaacaagcaaauucu

SEQ ID NO: 2387698 - RNA, 19 nt, Artificial Sequence
  Description of Artificial Sequence: Synthetic oligonucleotide
  Sense strand starting at position 3484 of SEQ ID NO: 1886101
uugcuuguugguuauuuga

SEQ ID NO: 2387699 - RNA, 19 nt, Artificial Sequence
  Description of Artificial Sequence: Synthetic oligonucleotide
  Antisense strand to SEQ ID NO: 2387698
ucaaauaaccaacaagcaa

SEQ ID NO: 2387700 - RNA, 19 nt, Artificial Sequence
  Description of Artificial Sequence: Synthetic oligonucleotide
  Sense strand starting at position 3527 of SEQ ID NO: 1886101
aaaggugauuguuuggcau

SEQ ID NO: 2387701 - RNA, 19 nt, Artificial Sequence
  Description of Artificial Sequence: Synthetic oligonucleotide
  Antisense strand to SEQ ID NO: 2387700
augccaaacaaucaccuuu

SEQ ID NO: 2387702 - RNA, 19 nt, Artificial Sequence
  Description of Artificial Sequence: Synthetic oligonucleotide
  Sense strand starting at position 3635 of SEQ ID NO: 1886101
aaguaucuugcccaaggua

SEQ ID NO: 2387703 - RNA, 19 nt, Artificial Sequence
  Description of Artificial Sequence: Synthetic oligonucleotide
  Antisense strand to SEQ ID NO: 2387702
uaccuugggcaagauacuu

SEQ ID NO: 2387704 - RNA, 19 nt, Artificial Sequence
  Description of Artificial Sequence: Synthetic oligonucleotide
  Sense strand starting at position 3709 of SEQ ID NO: 1886101
uuaaauagcugccugagua

SEQ ID NO: 2387705 - RNA, 19 nt, Artificial Sequence
  Description of Artificial Sequence: Synthetic oligonucleotide
  Antisense strand to SEQ ID NO: 2387704
uacucaggcagcuauuuaa

SEQ ID NO: 2387706 - RNA, 19 nt, Artificial Sequence
  Description of Artificial Sequence: Synthetic oligonucleotide
  Sense strand starting at position 3710 of SEQ ID NO: 1886101
uaaauagcugccugaguag

SEQ ID NO: 2387707 - RNA, 19 nt, Artificial Sequence
  Description of Artificial Sequence: Synthetic oligonucleotide
  Antisense strand to SEQ ID NO: 2387706
cuacucaggcagcuauuua

SEQ ID NO: 2387708 - RNA, 19 nt, Artificial Sequence
  Description of Artificial Sequence: Synthetic oligonucleotide
  Sense strand starting at position 3726 of SEQ ID NO: 1886101
uagaacguguuguuauuaa

SEQ ID NO: 2387709 - RNA, 19 nt, Artificial Sequence
  Description of Artificial Sequence: Synthetic oligonucleotide
  Antisense strand to SEQ ID NO: 2387708
uuaauaacaacacguucua

SEQ ID NO: 2387710 - RNA, 19 nt, Artificial Sequence
  Description of Artificial Sequence: Synthetic oligonucleotide
  Sense strand starting at position 3750 of SEQ ID NO: 1886101
cagagucuuggguaguacu

SEQ ID NO: 2387711 - RNA, 19 nt, Artificial Sequence
  Description of Artificial Sequence: Synthetic oligonucleotide
  Antisense strand to SEQ ID NO: 2387710
aguacuacccaagacucug

SEQ ID NO: 2387712 - RNA, 19 nt, Artificial Sequence
  Description of Artificial Sequence: Synthetic oligonucleotide
  Sense strand starting at position 3757 of SEQ ID NO: 1886101
uuggguaguacugaagcaa

SEQ ID NO: 2387713 - RNA, 19 nt, Artificial Sequence
  Description of Artificial Sequence: Synthetic oligonucleotide
  Antisense strand to SEQ ID NO: 2387712
uugcuucaguacuacccaa

SEQ ID NO: 2387714 - RNA, 19 nt, Artificial Sequence
  Description of Artificial Sequence: Synthetic oligonucleotide
  Sense strand starting at position 3792 of SEQ ID NO: 1886101
gggacagaauuagauacaa

SEQ ID NO: 2387715 - RNA, 19 nt, Artificial Sequence
  Description of Artificial Sequence: Synthetic oligonucleotide
  Antisense strand to SEQ ID NO: 2387714
uuguaucuaauucuguccc

SEQ ID NO: 2387716 - RNA, 19 nt, Artificial Sequence
  Description of Artificial Sequence: Synthetic oligonucleotide
  Sense strand starting at position 3914 of SEQ ID NO: 1886101
auagauaacuuagagaaag

SEQ ID NO: 2387717 - RNA, 19 nt, Artificial Sequence
  Description of Artificial Sequence: Synthetic oligonucleotide
  Antisense strand to SEQ ID NO: 2387716
cuuucucuaaguuaucuau

SEQ ID NO: 2387718 - RNA, 19 nt, Artificial Sequence
  Description of Artificial Sequence: Synthetic oligonucleotide
  Sense strand starting at position 3971 of SEQ ID NO: 1886101
guaauuaggaagugcaaau

SEQ ID NO: 2387719 - RNA, 19 nt, Artificial Sequence
  Description of Artificial Sequence: Synthetic oligonucleotide
  Antisense strand to SEQ ID NO: 2387718
auuugcacuuccuaauuac

SEQ ID NO: 2387720 - RNA, 19 nt, Artificial Sequence
  Description of Artificial Sequence: Synthetic oligonucleotide
  Sense strand starting at position 129 of SEQ ID NO: 1886102
uggcucagucagggaagua

SEQ ID NO: 2387721 - RNA, 19 nt, Artificial Sequence
  Description of Artificial Sequence: Synthetic oligonucleotide
  Antisense strand to SEQ ID NO: 2387720
uacuucccugacugagcca

SEQ ID NO: 2387722 - RNA, 19 nt, Artificial Sequence
  Description of Artificial Sequence: Synthetic oligonucleotide
  Sense strand starting at position 130 of SEQ ID NO: 1886102
ggcucagucagggaaguaa

SEQ ID NO: 2387723 - RNA, 19 nt, Artificial Sequence
  Description of Artificial Sequence: Synthetic oligonucleotide
  Antisense strand to SEQ ID NO: 2387722
uuacuucccugacugagcc

SEQ ID NO: 2387724 - RNA, 19 nt, Artificial Sequence
  Description of Artificial Sequence: Synthetic oligonucleotide
  Sense strand starting at position 134 of SEQ ID NO: 1886102
cagucagggaaguaauagu

SEQ ID NO: 2387725 - RNA, 19 nt, Artificial Sequence
  Description of Artificial Sequence: Synthetic oligonucleotide
  Antisense strand to SEQ ID NO: 2387724
acuauuacuucccugacug

SEQ ID NO: 2387726 - RNA, 19 nt, Artificial Sequence
  Description of Artificial Sequence: Synthetic oligonucleotide
  Sense strand starting at position 141 of SEQ ID NO: 1886102
ggaaguaauaguugguagu

SEQ ID NO: 2387727 - RNA, 19 nt, Artificial Sequence
  Description of Artificial Sequence: Synthetic oligonucleotide
  Antisense strand to SEQ ID NO: 2387726
acuaccaacuauuacuucc

SEQ ID NO: 2387728 - RNA, 19 nt, Artificial Sequence
  Description of Artificial Sequence: Synthetic oligonucleotide
  Sense strand starting at position 145 of SEQ ID NO: 1886102
guaauaguugguagugugu

SEQ ID NO: 2387729 - RNA, 19 nt, Artificial Sequence
  Description of Artificial Sequence: Synthetic oligonucleotide
  Antisense strand to SEQ ID NO: 2387728
acacacuaccaacuauuac

SEQ ID NO: 2387730 - RNA, 19 nt, Artificial Sequence
  Description of Artificial Sequence: Synthetic oligonucleotide
  Sense strand starting at position 307 of SEQ ID NO: 1886102
gcuuauuuggcucacgguu

SEQ ID NO: 2387731 - RNA, 19 nt, Artificial Sequence
  Description of Artificial Sequence: Synthetic oligonucleotide
  Antisense strand to SEQ ID NO: 2387730
aaccgugagccaaauaagc

SEQ ID NO: 2387732 - RNA, 19 nt, Artificial Sequence
  Description of Artificial Sequence: Synthetic oligonucleotide
  Sense strand starting at position 567 of SEQ ID NO: 1886102
acaugagacuugguagggu

SEQ ID NO: 2387733 - RNA, 19 nt, Artificial Sequence
  Description of Artificial Sequence: Synthetic oligonucleotide
  Antisense strand to SEQ ID NO: 2387732
acccuaccaagucucaugu

SEQ ID NO: 2387734 - RNA, 19 nt, Artificial Sequence
  Description of Artificial Sequence: Synthetic oligonucleotide
  Sense strand starting at position 729 of SEQ ID NO: 1886102
ucccuaaaucuagauuggu

SEQ ID NO: 2387735 - RNA, 19 nt, Artificial Sequence
  Description of Artificial Sequence: Synthetic oligonucleotide
  Antisense strand to SEQ ID NO: 2387734
accaaucuagauuuaggga

SEQ ID NO: 2387736 - RNA, 19 nt, Artificial Sequence
  Description of Artificial Sequence: Synthetic oligonucleotide
  Sense strand starting at position 875 of SEQ ID NO: 1886102
cauucuguuggaugugaga

SEQ ID NO: 2387737 - RNA, 19 nt, Artificial Sequence
  Description of Artificial Sequence: Synthetic oligonucleotide
  Antisense strand to SEQ ID NO: 2387736
ucucacauccaacagaaug

SEQ ID NO: 2387738 - RNA, 19 nt, Artificial Sequence
  Description of Artificial Sequence: Synthetic oligonucleotide
  Sense strand starting at position 877 of SEQ ID NO: 1886102
uucuguuggaugugagauu

SEQ ID NO: 2387739 - RNA, 19 nt, Artificial Sequence
  Description of Artificial Sequence: Synthetic oligonucleotide
  Antisense strand to SEQ ID NO: 2387738
aaucucacauccaacagaa

SEQ ID NO: 2387740 - RNA, 19 nt, Artificial Sequence
  Description of Artificial Sequence: Synthetic oligonucleotide
  Sense strand starting at position 1028 of SEQ ID NO: 1886102
ugaggugacuguuuaaguu

SEQ ID NO: 2387741 - RNA, 19 nt, Artificial Sequence
  Description of Artificial Sequence: Synthetic oligonucleotide
  Antisense strand to SEQ ID NO: 2387740
aacuuaaacagucaccuca

SEQ ID NO: 2387742 - RNA, 19 nt, Artificial Sequence
  Description of Artificial Sequence: Synthetic oligonucleotide
  Sense strand starting at position 1440 of SEQ ID NO: 1886102
uauuguagacaugaaugca

SEQ ID NO: 2387743 - RNA, 19 nt, Artificial Sequence
  Description of Artificial Sequence: Synthetic oligonucleotide
  Antisense strand to SEQ ID NO: 2387742
ugcauucaugucuacaaua

SEQ ID NO: 2387744 - RNA, 19 nt, Artificial Sequence
  Description of Artificial Sequence: Synthetic oligonucleotide
  Sense strand starting at position 1784 of SEQ ID NO: 1886102
augcuauuagaauaccagu

SEQ ID NO: 2387745 - RNA, 19 nt, Artificial Sequence
  Description of Artificial Sequence: Synthetic oligonucleotide
  Antisense strand to SEQ ID NO: 2387744
acugguauucuaauagcau

SEQ ID NO: 2387746 - RNA, 19 nt, Artificial Sequence
  Description of Artificial Sequence: Synthetic oligonucleotide
  Sense strand starting at position 1894 of SEQ ID NO: 1886102
gucuuuaugccagggaauu

SEQ ID NO: 2387747 - RNA, 19 nt, Artificial Sequence
  Description of Artificial Sequence: Synthetic oligonucleotide
  Antisense strand to SEQ ID NO: 2387746
aauucccuggcauaaagac

SEQ ID NO: 2387748 - RNA, 19 nt, Artificial Sequence
  Description of Artificial Sequence: Synthetic oligonucleotide
  Sense strand starting at position 1989 of SEQ ID NO: 1886102
cuggaauccugucuuuaac

SEQ ID NO: 2387749 - RNA, 19 nt, Artificial Sequence
  Description of Artificial Sequence: Synthetic oligonucleotide
  Antisense strand to SEQ ID NO: 2387748
guuaaagacaggauuccag

SEQ ID NO: 2387750 - RNA, 19 nt, Artificial Sequence
  Description of Artificial Sequence: Synthetic oligonucleotide
  Sense strand starting at position 1991 of SEQ ID NO: 1886102
ggaauccugucuuuaacac

SEQ ID NO: 2387751 - RNA, 19 nt, Artificial Sequence
  Description of Artificial Sequence: Synthetic oligonucleotide
  Antisense strand to SEQ ID NO: 2387750
guguuaaagacaggauucc

SEQ ID NO: 2387752 - RNA, 19 nt, Artificial Sequence
  Description of Artificial Sequence: Synthetic oligonucleotide
  Sense strand starting at position 2001 of SEQ ID NO: 1886102
cuuuaacaccuuugaggau

SEQ ID NO: 2387753 - RNA, 19 nt, Artificial Sequence
  Description of Artificial Sequence: Synthetic oligonucleotide
  Antisense strand to SEQ ID NO: 2387752
auccucaaagguguuaaag

SEQ ID NO: 2387754 - RNA, 19 nt, Artificial Sequence
  Description of Artificial Sequence: Synthetic oligonucleotide
  Sense strand starting at position 2007 of SEQ ID NO: 1886102
caccuuugaggauggugaa

SEQ ID NO: 2387755 - RNA, 19 nt, Artificial Sequence
  Description of Artificial Sequence: Synthetic oligonucleotide
  Antisense strand to SEQ ID NO: 2387754
uucaccauccucaaaggug

SEQ ID NO: 2387756 - RNA, 19 nt, Artificial Sequence
  Description of Artificial Sequence: Synthetic oligonucleotide
  Sense strand starting at position 2008 of SEQ ID NO: 1886102
accuuugaggauggugaau

SEQ ID NO: 2387757 - RNA, 19 nt, Artificial Sequence
  Description of Artificial Sequence: Synthetic oligonucleotide
  Antisense strand to SEQ ID NO: 2387756
auucaccauccucaaaggu

SEQ ID NO: 2387758 - RNA, 19 nt, Artificial Sequence
  Description of Artificial Sequence: Synthetic oligonucleotide
  Sense strand starting at position 2156 of SEQ ID NO: 1886102
gcauacaggaaacguuuaa

SEQ ID NO: 2387759 - RNA, 19 nt, Artificial Sequence
  Description of Artificial Sequence: Synthetic oligonucleotide
  Antisense strand to SEQ ID NO: 2387758
uuaaacguuuccuguaugc

SEQ ID NO: 2387760 - RNA, 19 nt, Artificial Sequence
  Description of Artificial Sequence: Synthetic oligonucleotide
  Sense strand starting at position 2199 of SEQ ID NO: 1886102
guuauuuccguguagcuuu

SEQ ID NO: 2387761 - RNA, 19 nt, Artificial Sequence
  Description of Artificial Sequence: Synthetic oligonucleotide
  Antisense strand to SEQ ID NO: 2387760
aaagcuacacggaaauaac

SEQ ID NO: 2387762 - RNA, 19 nt, Artificial Sequence
  Description of Artificial Sequence: Synthetic oligonucleotide
  Sense strand starting at position 2241 of SEQ ID NO: 1886102
augagcagauguccauuau

SEQ ID NO: 2387763 - RNA, 19 nt, Artificial Sequence
  Description of Artificial Sequence: Synthetic oligonucleotide
  Antisense strand to SEQ ID NO: 2387762
auaauggacaucugcucau

SEQ ID NO: 2387764 - RNA, 19 nt, Artificial Sequence
  Description of Artificial Sequence: Synthetic oligonucleotide
  Sense strand starting at position 2242 of SEQ ID NO: 1886102
ugagcagauguccauuaua

SEQ ID NO: 2387765 - RNA, 19 nt, Artificial Sequence
  Description of Artificial Sequence: Synthetic oligonucleotide
  Antisense strand to SEQ ID NO: 2387764
uauaauggacaucugcuca

SEQ ID NO: 2387766 - RNA, 19 nt, Artificial Sequence
  Description of Artificial Sequence: Synthetic oligonucleotide
  Sense strand starting at position 2245 of SEQ ID NO: 1886102
gcagauguccauuauaauu

SEQ ID NO: 2387767 - RNA, 19 nt, Artificial Sequence
  Description of Artificial Sequence: Synthetic oligonucleotide
  Antisense strand to SEQ ID NO: 2387766
aauuauaauggacaucugc

SEQ ID NO: 2387768 - RNA, 19 nt, Artificial Sequence
  Description of Artificial Sequence: Synthetic oligonucleotide
  Sense strand starting at position 2322 of SEQ ID NO: 1886102
ggaguuugguucuucugac

SEQ ID NO: 2387769 - RNA, 19 nt, Artificial Sequence
  Description of Artificial Sequence: Synthetic oligonucleotide
  Antisense strand to SEQ ID NO: 2387768
gucagaagaaccaaacucc

SEQ ID NO: 2387770 - RNA, 19 nt, Artificial Sequence
  Description of Artificial Sequence: Synthetic oligonucleotide
  Sense strand starting at position 3098 of SEQ ID NO: 1886102
guuaaacugcuauaaguuu

SEQ ID NO: 2387771 - RNA, 19 nt, Artificial Sequence
  Description of Artificial Sequence: Synthetic oligonucleotide
  Antisense strand to SEQ ID NO: 2387770
aaacuuauagcaguuuaac

SEQ ID NO: 2387772 - RNA, 19 nt, Artificial Sequence
  Description of Artificial Sequence: Synthetic oligonucleotide
  Sense strand starting at position 3132 of SEQ ID NO: 1886102
cuguaaaugccuugacaug

SEQ ID NO: 2387773 - RNA, 19 nt, Artificial Sequence
  Description of Artificial Sequence: Synthetic oligonucleotide
  Antisense strand to SEQ ID NO: 2387772
caugucaaggcauuuacag

SEQ ID NO: 2387774 - RNA, 19 nt, Artificial Sequence
  Description of Artificial Sequence: Synthetic oligonucleotide
  Sense strand starting at position 3141 of SEQ ID NO: 1886102
ccuugacauggauguguaa

SEQ ID NO: 2387775 - RNA, 19 nt, Artificial Sequence
  Description of Artificial Sequence: Synthetic oligonucleotide
  Antisense strand to SEQ ID NO: 2387774
uuacacauccaugucaagg

SEQ ID NO: 2387776 - RNA, 19 nt, Artificial Sequence
  Description of Artificial Sequence: Synthetic oligonucleotide
  Sense strand starting at position 3143 of SEQ ID NO: 1886102
uugacauggauguguaaca

SEQ ID NO: 2387777 - RNA, 19 nt, Artificial Sequence
  Description of Artificial Sequence: Synthetic oligonucleotide
  Antisense strand to SEQ ID NO: 2387776
uguuacacauccaugucaa

SEQ ID NO: 2387778 - RNA, 19 nt, Artificial Sequence
  Description of Artificial Sequence: Synthetic oligonucleotide
  Sense strand starting at position 3144 of SEQ ID NO: 1886102
ugacauggauguguaacaa

SEQ ID NO: 2387779 - RNA, 19 nt, Artificial Sequence
  Description of Artificial Sequence: Synthetic oligonucleotide
  Antisense strand to SEQ ID NO: 2387778
uuguuacacauccauguca

SEQ ID NO: 2387780 - RNA, 19 nt, Artificial Sequence
  Description of Artificial Sequence: Synthetic oligonucleotide
  Sense strand starting at position 3202 of SEQ ID NO: 1886102
uggugagacugcucuagag

SEQ ID NO: 2387781 - RNA, 19 nt, Artificial Sequence
  Description of Artificial Sequence: Synthetic oligonucleotide
  Antisense strand to SEQ ID NO: 2387780
cucuagagcagucucacca

SEQ ID NO: 2387782 - RNA, 19 nt, Artificial Sequence
  Description of Artificial Sequence: Synthetic oligonucleotide
  Sense strand starting at position 3477 of SEQ ID NO: 1886102
acuagacugcauuguccaa

SEQ ID NO: 2387783 - RNA, 19 nt, Artificial Sequence
  Description of Artificial Sequence: Synthetic oligonucleotide
  Antisense strand to SEQ ID NO: 2387782
uuggacaaugcagucuagu

SEQ ID NO: 2387784 - RNA, 19 nt, Artificial Sequence
  Description of Artificial Sequence: Synthetic oligonucleotide
  Sense strand starting at position 3481 of SEQ ID NO: 1886102
gacugcauuguccaauaug

SEQ ID NO: 2387785 - RNA, 19 nt, Artificial Sequence
  Description of Artificial Sequence: Synthetic oligonucleotide
  Antisense strand to SEQ ID NO: 2387784
cauauuggacaaugcaguc

SEQ ID NO: 2387786 - RNA, 19 nt, Artificial Sequence
  Description of Artificial Sequence: Synthetic oligonucleotide
  Sense strand starting at position 3499 of SEQ ID NO: 1886102
gguaauaacuugucccacu

SEQ ID NO: 2387787 - RNA, 19 nt, Artificial Sequence
  Description of Artificial Sequence: Synthetic oligonucleotide
  Antisense strand to SEQ ID NO: 2387786
agugggacaaguuauuacc

SEQ ID NO: 2387788 - RNA, 19 nt, Artificial Sequence
  Description of Artificial Sequence: Synthetic oligonucleotide
  Sense strand starting at position 3500 of SEQ ID NO: 1886102
guaauaacuugucccacuu

SEQ ID NO: 2387789 - RNA, 19 nt, Artificial Sequence
  Description of Artificial Sequence: Synthetic oligonucleotide
  Antisense strand to SEQ ID NO: 2387788
aagugggacaaguuauuac

SEQ ID NO: 2387790 - RNA, 19 nt, Artificial Sequence
  Description of Artificial Sequence: Synthetic oligonucleotide
  Sense strand starting at position 3538 of SEQ ID NO: 1886102
aggcuaauuuaggaacuga

SEQ ID NO: 2387791 - RNA, 19 nt, Artificial Sequence
  Description of Artificial Sequence: Synthetic oligonucleotide
  Antisense strand to SEQ ID NO: 2387790
ucaguuccuaaauuagccu

SEQ ID NO: 2387792 - RNA, 19 nt, Artificial Sequence
  Description of Artificial Sequence: Synthetic oligonucleotide
  Sense strand starting at position 3600 of SEQ ID NO: 1886102
acacgauucgauuaccgua

SEQ ID NO: 2387793 - RNA, 19 nt, Artificial Sequence
  Description of Artificial Sequence: Synthetic oligonucleotide
  Antisense strand to SEQ ID NO: 2387792
uacgguaaucgaaucgugu

SEQ ID NO: 2387794 - RNA, 19 nt, Artificial Sequence
  Description of Artificial Sequence: Synthetic oligonucleotide
  Sense strand starting at position 3625 of SEQ ID NO: 1886102
uuaaguaugcuuggaacga

SEQ ID NO: 2387795 - RNA, 19 nt, Artificial Sequence
  Description of Artificial Sequence: Synthetic oligonucleotide
  Antisense strand to SEQ ID NO: 2387794
ucguuccaagcauacuuaa

SEQ ID NO: 2387796 - RNA, 19 nt, Artificial Sequence
  Description of Artificial Sequence: Synthetic oligonucleotide
  Sense strand starting at position 3913 of SEQ ID NO: 1886102
uuuaauugguaagcaagau

SEQ ID NO: 2387797 - RNA, 19 nt, Artificial Sequence
  Description of Artificial Sequence: Synthetic oligonucleotide
  Antisense strand to SEQ ID NO: 2387796
aucuugcuuaccaauuaaa

SEQ ID NO: 2387798 - RNA, 19 nt, Artificial Sequence
  Description of Artificial Sequence: Synthetic oligonucleotide
  Sense strand starting at position 3974 of SEQ ID NO: 1886102
cuacuauccuaguccauga

SEQ ID NO: 2387799 - RNA, 19 nt, Artificial Sequence
  Description of Artificial Sequence: Synthetic oligonucleotide
  Antisense strand to SEQ ID NO: 2387798
ucauggacuaggauaguag

SEQ ID NO: 2387800 - RNA, 19 nt, Artificial Sequence
  Description of Artificial Sequence: Synthetic oligonucleotide
  Sense strand starting at position 5 of SEQ ID NO: 1886103
cuagaaugugccgauuaca

SEQ ID NO: 2387801 - RNA, 19 nt, Artificial Sequence
  Description of Artificial Sequence: Synthetic oligonucleotide
  Antisense strand to SEQ ID NO: 2387800
uguaaucggcacauucuag

SEQ ID NO: 2387802 - RNA, 19 nt, Artificial Sequence
  Description of Artificial Sequence: Synthetic oligonucleotide
  Sense strand starting at position 8 of SEQ ID NO: 1886103
gaaugugccgauuacaaua

SEQ ID NO: 2387803 - RNA, 19 nt, Artificial Sequence
  Description of Artificial Sequence: Synthetic oligonucleotide
  Antisense strand to SEQ ID NO: 2387802
uauuguaaucggcacauuc

SEQ ID NO: 2387804 - RNA, 19 nt, Artificial Sequence
  Description of Artificial Sequence: Synthetic oligonucleotide
  Sense strand starting at position 120 of SEQ ID NO: 1886103
gcacaagucugauugagag

SEQ ID NO: 2387805 - RNA, 19 nt, Artificial Sequence
  Description of Artificial Sequence: Synthetic oligonucleotide
  Antisense strand to SEQ ID NO: 2387804
cucucaaucagacuugugc

SEQ ID NO: 2387806 - RNA, 19 nt, Artificial Sequence
  Description of Artificial Sequence: Synthetic oligonucleotide
  Sense strand starting at position 128 of SEQ ID NO: 1886103
cugauugagagccauugca

SEQ ID NO: 2387807 - RNA, 19 nt, Artificial Sequence
  Description of Artificial Sequence: Synthetic oligonucleotide
  Antisense strand to SEQ ID NO: 2387806
ugcaauggcucucaaucag

SEQ ID NO: 2387808 - RNA, 19 nt, Artificial Sequence
  Description of Artificial Sequence: Synthetic oligonucleotide
  Sense strand starting at position 178 of SEQ ID NO: 1886103
aaggcaaaccuuggaguau

SEQ ID NO: 2387809 - RNA, 19 nt, Artificial Sequence
  Description of Artificial Sequence: Synthetic oligonucleotide
  Antisense strand to SEQ ID NO: 2387808
auacuccaagguuugccuu

SEQ ID NO: 2387810 - RNA, 19 nt, Artificial Sequence
  Description of Artificial Sequence: Synthetic oligonucleotide
  Sense strand starting at position 296 of SEQ ID NO: 1886103
cccugaaacucuguucuga

SEQ ID NO: 2387811 - RNA, 19 nt, Artificial Sequence
  Description of Artificial Sequence: Synthetic oligonucleotide
  Antisense strand to SEQ ID NO: 2387810
ucagaacagaguuucaggg

SEQ ID NO: 2387812 - RNA, 19 nt, Artificial Sequence
  Description of Artificial Sequence: Synthetic oligonucleotide
  Sense strand starting at position 298 of SEQ ID NO: 1886103
cugaaacucuguucugaga

SEQ ID NO: 2387813 - RNA, 19 nt, Artificial Sequence
  Description of Artificial Sequence: Synthetic oligonucleotide
  Antisense strand to SEQ ID NO: 2387812
ucucagaacagaguuucag

SEQ ID NO: 2387814 - RNA, 19 nt, Artificial Sequence
  Description of Artificial Sequence: Synthetic oligonucleotide
  Sense strand starting at position 589 of SEQ ID NO: 1886103
uagggauacuguuuaaucu

SEQ ID NO: 2387815 - RNA, 19 nt, Artificial Sequence
  Description of Artificial Sequence: Synthetic oligonucleotide
  Antisense strand to SEQ ID NO: 2387814
agauuaaacaguaucccua

SEQ ID NO: 2387816 - RNA, 19 nt, Artificial Sequence
  Description of Artificial Sequence: Synthetic oligonucleotide
  Sense strand starting at position 600 of SEQ ID NO: 1886103
uuuaaucuggcccauggua

SEQ ID NO: 2387817 - RNA, 19 nt, Artificial Sequence
  Description of Artificial Sequence: Synthetic oligonucleotide
  Antisense strand to SEQ ID NO: 2387816
uaccaugggccagauuaaa

SEQ ID NO: 2387818 - RNA, 19 nt, Artificial Sequence
  Description of Artificial Sequence: Synthetic oligonucleotide
  Sense strand starting at position 659 of SEQ ID NO: 1886103
cugagugagucacuuugaa

SEQ ID NO: 2387819 - RNA, 19 nt, Artificial Sequence
  Description of Artificial Sequence: Synthetic oligonucleotide
  Antisense strand to SEQ ID NO: 2387818
uucaaagugacucacucag

SEQ ID NO: 2387820 - RNA, 19 nt, Artificial Sequence
  Description of Artificial Sequence: Synthetic oligonucleotide
  Sense strand starting at position 734 of SEQ ID NO: 1886103
guguucuuacuguagaaac

SEQ ID NO: 2387821 - RNA, 19 nt, Artificial Sequence
  Description of Artificial Sequence: Synthetic oligonucleotide
  Antisense strand to SEQ ID NO: 2387820
guuucuacaguaagaacac

SEQ ID NO: 2387822 - RNA, 19 nt, Artificial Sequence
  Description of Artificial Sequence: Synthetic oligonucleotide
  Sense strand starting at position 736 of SEQ ID NO: 1886103
guucuuacuguagaaacuu

SEQ ID NO: 2387823 - RNA, 19 nt, Artificial Sequence
  Description of Artificial Sequence: Synthetic oligonucleotide
  Antisense strand to SEQ ID NO: 2387822
aaguuucuacaguaagaac

SEQ ID NO: 2387824 - RNA, 19 nt, Artificial Sequence
  Description of Artificial Sequence: Synthetic oligonucleotide
  Sense strand starting at position 946 of SEQ ID NO: 1886103
gggaaugcacgucacucua

SEQ ID NO: 2387825 - RNA, 19 nt, Artificial Sequence
  Description of Artificial Sequence: Synthetic oligonucleotide
  Antisense strand to SEQ ID NO: 2387824
uagagugacgugcauuccc

SEQ ID NO: 2387826 - RNA, 19 nt, Artificial Sequence
  Description of Artificial Sequence: Synthetic oligonucleotide
  Sense strand starting at position 997 of SEQ ID NO: 1886103
agaccaagcgucuaaagga

SEQ ID NO: 2387827 - RNA, 19 nt, Artificial Sequence
  Description of Artificial Sequence: Synthetic oligonucleotide
  Antisense strand to SEQ ID NO: 2387826
uccuuuagacgcuuggucu

SEQ ID NO: 2387828 - RNA, 19 nt, Artificial Sequence
  Description of Artificial Sequence: Synthetic oligonucleotide
  Sense strand starting at position 1292 of SEQ ID NO: 1886103
ugcugaacccgauacauua

SEQ ID NO: 2387829 - RNA, 19 nt, Artificial Sequence
  Description of Artificial Sequence: Synthetic oligonucleotide
  Antisense strand to SEQ ID NO: 2387828
uaauguaucggguucagca

SEQ ID NO: 2387830 - RNA, 19 nt, Artificial Sequence
  Description of Artificial Sequence: Synthetic oligonucleotide
  Sense strand starting at position 1383 of SEQ ID NO: 1886103
ucucuugguguggaauuau

SEQ ID NO: 2387831 - RNA, 19 nt, Artificial Sequence
  Description of Artificial Sequence: Synthetic oligonucleotide
  Antisense strand to SEQ ID NO: 2387830
auaauuccacaccaagaga

SEQ ID NO: 2387832 - RNA, 19 nt, Artificial Sequence
  Description of Artificial Sequence: Synthetic oligonucleotide
  Sense strand starting at position 1393 of SEQ ID NO: 1886103
uggaauuaugagggcacau

SEQ ID NO: 2387833 - RNA, 19 nt, Artificial Sequence
  Description of Artificial Sequence: Synthetic oligonucleotide
  Antisense strand to SEQ ID NO: 2387832
augugcccucauaauucca

SEQ ID NO: 2387834 - RNA, 19 nt, Artificial Sequence
  Description of Artificial Sequence: Synthetic oligonucleotide
  Sense strand starting at position 1411 of SEQ ID NO: 1886103
uccucaauaccagguaagu

SEQ ID NO: 2387835 - RNA, 19 nt, Artificial Sequence
  Description of Artificial Sequence: Synthetic oligonucleotide
  Antisense strand to SEQ ID NO: 2387834
acuuaccugguauugagga

SEQ ID NO: 2387836 - RNA, 19 nt, Artificial Sequence
  Description of Artificial Sequence: Synthetic oligonucleotide
  Sense strand starting at position 1649 of SEQ ID NO: 1886103
ugugcugugcuuucguaaa

SEQ ID NO: 2387837 - RNA, 19 nt, Artificial Sequence
  Description of Artificial Sequence: Synthetic oligonucleotide
  Antisense strand to SEQ ID NO: 2387836
uuuacgaaagcacagcaca

SEQ ID NO: 2387838 - RNA, 19 nt, Artificial Sequence
  Description of Artificial Sequence: Synthetic oligonucleotide
  Sense strand starting at position 1664 of SEQ ID NO: 1886103
uaaaguagacuuggcacaa

SEQ ID NO: 2387839 - RNA, 19 nt, Artificial Sequence
  Description of Artificial Sequence: Synthetic oligonucleotide
  Antisense strand to SEQ ID NO: 2387838
uugugccaagucuacuuua

SEQ ID NO: 2387840 - RNA, 19 nt, Artificial Sequence
  Description of Artificial Sequence: Synthetic oligonucleotide
  Sense strand starting at position 1895 of SEQ ID NO: 1886103
uuucucuuauucuugggaa

SEQ ID NO: 2387841 - RNA, 19 nt, Artificial Sequence
  Description of Artificial Sequence: Synthetic oligonucleotide
  Antisense strand to SEQ ID NO: 2387840
uucccaagaauaagagaaa

SEQ ID NO: 2387842 - RNA, 19 nt, Artificial Sequence
  Description of Artificial Sequence: Synthetic oligonucleotide
  Sense strand starting at position 1897 of SEQ ID NO: 1886103
ucucuuauucuugggaaug

SEQ ID NO: 2387843 - RNA, 19 nt, Artificial Sequence
  Description of Artificial Sequence: Synthetic oligonucleotide
  Antisense strand to SEQ ID NO: 2387842
cauucccaagaauaagaga

SEQ ID NO: 2387844 - RNA, 19 nt, Artificial Sequence
  Description of Artificial Sequence: Synthetic oligonucleotide
  Sense strand starting at position 2009 of SEQ ID NO: 1886103
gugcucuuggaacaucaua

SEQ ID NO: 2387845 - RNA, 19 nt, Artificial Sequence
  Description of Artificial Sequence: Synthetic oligonucleotide
  Antisense strand to SEQ ID NO: 2387844
uaugauguuccaagagcac

SEQ ID NO: 2387846 - RNA, 19 nt, Artificial Sequence
  Description of Artificial Sequence: Synthetic oligonucleotide
  Sense strand starting at position 2130 of SEQ ID NO: 1886103
agccgcaaugaucagauau

SEQ ID NO: 2387847 - RNA, 19 nt, Artificial Sequence
  Description of Artificial Sequence: Synthetic oligonucleotide
  Antisense strand to SEQ ID NO: 2387846
auaucugaucauugcggcu

SEQ ID NO: 2387848 - RNA, 19 nt, Artificial Sequence
  Description of Artificial Sequence: Synthetic oligonucleotide
  Sense strand starting at position 2254 of SEQ ID NO: 1886103
agacuuuaagagcauaguu

SEQ ID NO: 2387849 - RNA, 19 nt, Artificial Sequence
  Description of Artificial Sequence: Synthetic oligonucleotide
  Antisense strand to SEQ ID NO: 2387848
aacuaugcucuuaaagucu

SEQ ID NO: 2387850 - RNA, 19 nt, Artificial Sequence
  Description of Artificial Sequence: Synthetic oligonucleotide
  Sense strand starting at position 2527 of SEQ ID NO: 1886103
ggucuuuaacuugaacucu

SEQ ID NO: 2387851 - RNA, 19 nt, Artificial Sequence
  Description of Artificial Sequence: Synthetic oligonucleotide
  Antisense strand to SEQ ID NO: 2387850
agaguucaaguuaaagacc

SEQ ID NO: 2387852 - RNA, 19 nt, Artificial Sequence
  Description of Artificial Sequence: Synthetic oligonucleotide
  Sense strand starting at position 2696 of SEQ ID NO: 1886103
auuccaauuugucuguguu

SEQ ID NO: 2387853 - RNA, 19 nt, Artificial Sequence
  Description of Artificial Sequence: Synthetic oligonucleotide
  Antisense strand to SEQ ID NO: 2387852
aacacagacaaauuggaau

SEQ ID NO: 2387854 - RNA, 19 nt, Artificial Sequence
  Description of Artificial Sequence: Synthetic oligonucleotide
  Sense strand starting at position 2697 of SEQ ID NO: 1886103
uuccaauuugucuguguua

SEQ ID NO: 2387855 - RNA, 19 nt, Artificial Sequence
  Description of Artificial Sequence: Synthetic oligonucleotide
  Antisense strand to SEQ ID NO: 2387854
uaacacagacaaauuggaa

SEQ ID NO: 2387856 - RNA, 19 nt, Artificial Sequence
  Description of Artificial Sequence: Synthetic oligonucleotide
  Sense strand starting at position 2698 of SEQ ID NO: 1886103
uccaauuugucuguguuag

SEQ ID NO: 2387857 - RNA, 19 nt, Artificial Sequence
  Description of Artificial Sequence: Synthetic oligonucleotide
  Antisense strand to SEQ ID NO: 2387856
cuaacacagacaaauugga

SEQ ID NO: 2387858 - RNA, 19 nt, Artificial Sequence
  Description of Artificial Sequence: Synthetic oligonucleotide
  Sense strand starting at position 2700 of SEQ ID NO: 1886103
caauuugucuguguuagca

SEQ ID NO: 2387859 - RNA, 19 nt, Artificial Sequence
  Description of Artificial Sequence: Synthetic oligonucleotide
  Antisense strand to SEQ ID NO: 2387858
ugcuaacacagacaaauug

SEQ ID NO: 2387860 - RNA, 19 nt, Artificial Sequence
  Description of Artificial Sequence: Synthetic oligonucleotide
  Sense strand starting at position 2929 of SEQ ID NO: 1886103
uuaaucagcacugguggaa

SEQ ID NO: 2387861 - RNA, 19 nt, Artificial Sequence
  Description of Artificial Sequence: Synthetic oligonucleotide
  Antisense strand to SEQ ID NO: 2387860
uuccaccagugcugauuaa

SEQ ID NO: 2387862 - RNA, 19 nt, Artificial Sequence
  Description of Artificial Sequence: Synthetic oligonucleotide
  Sense strand starting at position 3008 of SEQ ID NO: 1886103
ccugaagcucuggaucagu

SEQ ID NO: 2387863 - RNA, 19 nt, Artificial Sequence
  Description of Artificial Sequence: Synthetic oligonucleotide
  Antisense strand to SEQ ID NO: 2387862
acugauccagagcuucagg

SEQ ID NO: 2387864 - RNA, 19 nt, Artificial Sequence
  Description of Artificial Sequence: Synthetic oligonucleotide
  Sense strand starting at position 3016 of SEQ ID NO: 1886103
ucuggaucagugggagagu

SEQ ID NO: 2387865 - RNA, 19 nt, Artificial Sequence
  Description of Artificial Sequence: Synthetic oligonucleotide
  Antisense strand to SEQ ID NO: 2387864
acucucccacugauccaga

SEQ ID NO: 2387866 - RNA, 19 nt, Artificial Sequence
  Description of Artificial Sequence: Synthetic oligonucleotide
  Sense strand starting at position 3100 of SEQ ID NO: 1886103
gaucaaguagcacagugau

SEQ ID NO: 2387867 - RNA, 19 nt, Artificial Sequence
  Description of Artificial Sequence: Synthetic oligonucleotide
  Antisense strand to SEQ ID NO: 2387866
aucacugugcuacuugauc

SEQ ID NO: 2387868 - RNA, 19 nt, Artificial Sequence
  Description of Artificial Sequence: Synthetic oligonucleotide
  Sense strand starting at position 3342 of SEQ ID NO: 1886103
uuuacaagugaaugguuaa

SEQ ID NO: 2387869 - RNA, 19 nt, Artificial Sequence
  Description of Artificial Sequence: Synthetic oligonucleotide
  Antisense strand to SEQ ID NO: 2387868
uuaaccauucacuuguaaa

SEQ ID NO: 2387870 - RNA, 19 nt, Artificial Sequence
  Description of Artificial Sequence: Synthetic oligonucleotide
  Sense strand starting at position 3353 of SEQ ID NO: 1886103
augguuaaagcccagugaa

SEQ ID NO: 2387871 - RNA, 19 nt, Artificial Sequence
  Description of Artificial Sequence: Synthetic oligonucleotide
  Antisense strand to SEQ ID NO: 2387870
uucacugggcuuuaaccau

SEQ ID NO: 2387872 - RNA, 19 nt, Artificial Sequence
  Description of Artificial Sequence: Synthetic oligonucleotide
  Sense strand starting at position 3371 of SEQ ID NO: 1886103
agggaaauggcuugucauc

SEQ ID NO: 2387873 - RNA, 19 nt, Artificial Sequence
  Description of Artificial Sequence: Synthetic oligonucleotide
  Antisense strand to SEQ ID NO: 2387872
gaugacaagccauuucccu

SEQ ID NO: 2387874 - RNA, 19 nt, Artificial Sequence
  Description of Artificial Sequence: Synthetic oligonucleotide
  Sense strand starting at position 3517 of SEQ ID NO: 1886103
guuagaauccacuaguagc

SEQ ID NO: 2387875 - RNA, 19 nt, Artificial Sequence
  Description of Artificial Sequence: Synthetic oligonucleotide
  Antisense strand to SEQ ID NO: 2387874
gcuacuaguggauucuaac

SEQ ID NO: 2387876 - RNA, 19 nt, Artificial Sequence
  Description of Artificial Sequence: Synthetic oligonucleotide
  Sense strand starting at position 3730 of SEQ ID NO: 1886103
agggacuuauaaugauuua

SEQ ID NO: 2387877 - RNA, 19 nt, Artificial Sequence
  Description of Artificial Sequence: Synthetic oligonucleotide
  Antisense strand to SEQ ID NO: 2387876
uaaaucauuauaagucccu

SEQ ID NO: 2387878 - RNA, 19 nt, Artificial Sequence
  Description of Artificial Sequence: Synthetic oligonucleotide
  Sense strand starting at position 3975 of SEQ ID NO: 1886103
agauuaaagagaugugguu

SEQ ID NO: 2387879 - RNA, 19 nt, Artificial Sequence
  Description of Artificial Sequence: Synthetic oligonucleotide
  Antisense strand to SEQ ID NO: 2387878
aaccacaucucuuuaaucu

SEQ ID NO: 2387880 - RNA, 19 nt, Artificial Sequence
  Description of Artificial Sequence: Synthetic oligonucleotide
  Sense strand starting at position 112 of SEQ ID NO: 1886104
cugacucugcauuagauga

SEQ ID NO: 2387881 - RNA, 19 nt, Artificial Sequence
  Description of Artificial Sequence: Synthetic oligonucleotide
  Antisense strand to SEQ ID NO: 2387880
ucaucuaaugcagagucag

SEQ ID NO: 2387882 - RNA, 19 nt, Artificial Sequence
  Description of Artificial Sequence: Synthetic oligonucleotide
  Sense strand starting at position 262 of SEQ ID NO: 1886104
acugaauacucaucuguag

SEQ ID NO: 2387883 - RNA, 19 nt, Artificial Sequence
  Description of Artificial Sequence: Synthetic oligonucleotide
  Antisense strand to SEQ ID NO: 2387882
cuacagaugaguauucagu

SEQ ID NO: 2387884 - RNA, 19 nt, Artificial Sequence
  Description of Artificial Sequence: Synthetic oligonucleotide
  Sense strand starting at position 306 of SEQ ID NO: 1886104
ugagauuaacaaggcugua

SEQ ID NO: 2387885 - RNA, 19 nt, Artificial Sequence
  Description of Artificial Sequence: Synthetic oligonucleotide
  Antisense strand to SEQ ID NO: 2387884
uacagccuuguuaaucuca

SEQ ID NO: 2387886 - RNA, 19 nt, Artificial Sequence
  Description of Artificial Sequence: Synthetic oligonucleotide
  Sense strand starting at position 697 of SEQ ID NO: 1886104
agagaauauuugcaucaau

SEQ ID NO: 2387887 - RNA, 19 nt, Artificial Sequence
  Description of Artificial Sequence: Synthetic oligonucleotide
  Antisense strand to SEQ ID NO: 2387886
auugaugcaaauauucucu

SEQ ID NO: 2387888 - RNA, 19 nt, Artificial Sequence
  Description of Artificial Sequence: Synthetic oligonucleotide
  Sense strand starting at position 732 of SEQ ID NO: 1886104
gcuagacugcuuuaccaac

SEQ ID NO: 2387889 - RNA, 19 nt, Artificial Sequence
  Description of Artificial Sequence: Synthetic oligonucleotide
  Antisense strand to SEQ ID NO: 2387888
guugguaaagcagucuagc

SEQ ID NO: 2387890 - RNA, 19 nt, Artificial Sequence
  Description of Artificial Sequence: Synthetic oligonucleotide
  Sense strand starting at position 845 of SEQ ID NO: 1886104
gggcuaaaguccucugaac

SEQ ID NO: 2387891 - RNA, 19 nt, Artificial Sequence
  Description of Artificial Sequence: Synthetic oligonucleotide
  Antisense strand to SEQ ID NO: 2387890
guucagaggacuuuagccc

SEQ ID NO: 2387892 - RNA, 19 nt, Artificial Sequence
  Description of Artificial Sequence: Synthetic oligonucleotide
  Sense strand starting at position 1157 of SEQ ID NO: 1886104
cuagauauacaguguauug

SEQ ID NO: 2387893 - RNA, 19 nt, Artificial Sequence
  Description of Artificial Sequence: Synthetic oligonucleotide
  Antisense strand to SEQ ID NO: 2387892
caauacacuguauaucuag

SEQ ID NO: 2387894 - RNA, 19 nt, Artificial Sequence
  Description of Artificial Sequence: Synthetic oligonucleotide
  Sense strand starting at position 1159 of SEQ ID NO: 1886104
agauauacaguguauuguu

SEQ ID NO: 2387895 - RNA, 19 nt, Artificial Sequence
  Description of Artificial Sequence: Synthetic oligonucleotide
  Antisense strand to SEQ ID NO: 2387894
aacaauacacuguauaucu

SEQ ID NO: 2387896 - RNA, 19 nt, Artificial Sequence
  Description of Artificial Sequence: Synthetic oligonucleotide
  Sense strand starting at position 1239 of SEQ ID NO: 1886104
ucugaugauuuggagguua

SEQ ID NO: 2387897 - RNA, 19 nt, Artificial Sequence
  Description of Artificial Sequence: Synthetic oligonucleotide
  Antisense strand to SEQ ID NO: 2387896
uaaccuccaaaucaucaga

SEQ ID NO: 2387898 - RNA, 19 nt, Artificial Sequence
  Description of Artificial Sequence: Synthetic oligonucleotide
  Sense strand starting at position 1250 of SEQ ID NO: 1886104
ggagguuaauuacuguaag

SEQ ID NO: 2387899 - RNA, 19 nt, Artificial Sequence
  Description of Artificial Sequence: Synthetic oligonucleotide
  Antisense strand to SEQ ID NO: 2387898
cuuacaguaauuaaccucc

SEQ ID NO: 2387900 - RNA, 19 nt, Artificial Sequence
  Description of Artificial Sequence: Synthetic oligonucleotide
  Sense strand starting at position 1253 of SEQ ID NO: 1886104
gguuaauuacuguaaggca

SEQ ID NO: 2387901 - RNA, 19 nt, Artificial Sequence
  Description of Artificial Sequence: Synthetic oligonucleotide
  Antisense strand to SEQ ID NO: 2387900
ugccuuacaguaauuaacc

SEQ ID NO: 2387902 - RNA, 19 nt, Artificial Sequence
  Description of Artificial Sequence: Synthetic oligonucleotide
  Sense strand starting at position 1563 of SEQ ID NO: 1886104
auggcagcgcuugcauaua

SEQ ID NO: 2387903 - RNA, 19 nt, Artificial Sequence
  Description of Artificial Sequence: Synthetic oligonucleotide
  Antisense strand to SEQ ID NO: 2387902
uauaugcaagcgcugccau

SEQ ID NO: 2387904 - RNA, 19 nt, Artificial Sequence
  Description of Artificial Sequence: Synthetic oligonucleotide
  Sense strand starting at position 1731 of SEQ ID NO: 1886104
auucuuaaucuguaguuga

SEQ ID NO: 2387905 - RNA, 19 nt, Artificial Sequence
  Description of Artificial Sequence: Synthetic oligonucleotide
  Antisense strand to SEQ ID NO: 2387904
ucaacuacagauuaagaau

SEQ ID NO: 2387906 - RNA, 19 nt, Artificial Sequence
  Description of Artificial Sequence: Synthetic oligonucleotide
  Sense strand starting at position 1735 of SEQ ID NO: 1886104
uuaaucuguaguugaagga

SEQ ID NO: 2387907 - RNA, 19 nt, Artificial Sequence
  Description of Artificial Sequence: Synthetic oligonucleotide
  Antisense strand to SEQ ID NO: 2387906
uccuucaacuacagauuaa

SEQ ID NO: 2387908 - RNA, 19 nt, Artificial Sequence
  Description of Artificial Sequence: Synthetic oligonucleotide
  Sense strand starting at position 1751 of SEQ ID NO: 1886104
ggaauccgcagauguagaa

SEQ ID NO: 2387909 - RNA, 19 nt, Artificial Sequence
  Description of Artificial Sequence: Synthetic oligonucleotide
  Antisense strand to SEQ ID NO: 2387908
uucuacaucugcggauucc

SEQ ID NO: 2387910 - RNA, 19 nt, Artificial Sequence
  Description of Artificial Sequence: Synthetic oligonucleotide
  Sense strand starting at position 1867 of SEQ ID NO: 1886104
agggcauauggucaaguau

SEQ ID NO: 2387911 - RNA, 19 nt, Artificial Sequence
  Description of Artificial Sequence: Synthetic oligonucleotide
  Antisense strand to SEQ ID NO: 2387910
auacuugaccauaugcccu

SEQ ID NO: 2387912 - RNA, 19 nt, Artificial Sequence
  Description of Artificial Sequence: Synthetic oligonucleotide
  Sense strand starting at position 1873 of SEQ ID NO: 1886104
uauggucaaguaugacuua

SEQ ID NO: 2387913 - RNA, 19 nt, Artificial Sequence
  Description of Artificial Sequence: Synthetic oligonucleotide
  Antisense strand to SEQ ID NO: 2387912
uaagucauacuugaccaua

SEQ ID NO: 2387914 - RNA, 19 nt, Artificial Sequence
  Description of Artificial Sequence: Synthetic oligonucleotide
  Sense strand starting at position 1899 of SEQ ID NO: 1886104
cuaaauugcucagcaggaa

SEQ ID NO: 2387915 - RNA, 19 nt, Artificial Sequence
  Description of Artificial Sequence: Synthetic oligonucleotide
  Antisense strand to SEQ ID NO: 2387914
uuccugcugagcaauuuag

SEQ ID NO: 2387916 - RNA, 19 nt, Artificial Sequence
  Description of Artificial Sequence: Synthetic oligonucleotide
  Sense strand starting at position 2106 of SEQ ID NO: 1886104
guuuacugccaugagaaga

SEQ ID NO: 2387917 - RNA, 19 nt, Artificial Sequence
  Description of Artificial Sequence: Synthetic oligonucleotide
  Antisense strand to SEQ ID NO: 2387916
ucuucucauggcaguaaac

SEQ ID NO: 2387918 - RNA, 19 nt, Artificial Sequence
  Description of Artificial Sequence: Synthetic oligonucleotide
  Sense strand starting at position 2119 of SEQ ID NO: 1886104
agaagaauaucagcuugca

SEQ ID NO: 2387919 - RNA, 19 nt, Artificial Sequence
  Description of Artificial Sequence: Synthetic oligonucleotide
  Antisense strand to SEQ ID NO: 2387918
ugcaagcugauauucuucu

SEQ ID NO: 2387920 - RNA, 19 nt, Artificial Sequence
  Description of Artificial Sequence: Synthetic oligonucleotide
  Sense strand starting at position 2475 of SEQ ID NO: 1886104
augccauaguauuugcaau

SEQ ID NO: 2387921 - RNA, 19 nt, Artificial Sequence
  Description of Artificial Sequence: Synthetic oligonucleotide
  Antisense strand to SEQ ID NO: 2387920
auugcaaauacuauggcau

SEQ ID NO: 2387922 - RNA, 19 nt, Artificial Sequence
  Description of Artificial Sequence: Synthetic oligonucleotide
  Sense strand starting at position 2477 of SEQ ID NO: 1886104
gccauaguauuugcaauag

SEQ ID NO: 2387923 - RNA, 19 nt, Artificial Sequence
  Description of Artificial Sequence: Synthetic oligonucleotide
  Antisense strand to SEQ ID NO: 2387922
cuauugcaaauacuauggc

SEQ ID NO: 2387924 - RNA, 19 nt, Artificial Sequence
  Description of Artificial Sequence: Synthetic oligonucleotide
  Sense strand starting at position 2514 of SEQ ID NO: 1886104
gugcauauagcacauaaau

SEQ ID NO: 2387925 - RNA, 19 nt, Artificial Sequence
  Description of Artificial Sequence: Synthetic oligonucleotide
  Antisense strand to SEQ ID NO: 2387924
auuuaugugcuauaugcac

SEQ ID NO: 2387926 - RNA, 19 nt, Artificial Sequence
  Description of Artificial Sequence: Synthetic oligonucleotide
  Sense strand starting at position 2535 of SEQ ID NO: 1886104
cuucuaaucuagccuagga

SEQ ID NO: 2387927 - RNA, 19 nt, Artificial Sequence
  Description of Artificial Sequence: Synthetic oligonucleotide
  Antisense strand to SEQ ID NO: 2387926
uccuaggcuagauuagaag

SEQ ID NO: 2387928 - RNA, 19 nt, Artificial Sequence
  Description of Artificial Sequence: Synthetic oligonucleotide
  Sense strand starting at position 2670 of SEQ ID NO: 1886104
uugacauaucuugagcaug

SEQ ID NO: 2387929 - RNA, 19 nt, Artificial Sequence
  Description of Artificial Sequence: Synthetic oligonucleotide
  Antisense strand to SEQ ID NO: 2387928
caugcucaagauaugucaa

SEQ ID NO: 2387930 - RNA, 19 nt, Artificial Sequence
  Description of Artificial Sequence: Synthetic oligonucleotide
  Sense strand starting at position 2672 of SEQ ID NO: 1886104
gacauaucuugagcaugua

SEQ ID NO: 2387931 - RNA, 19 nt, Artificial Sequence
  Description of Artificial Sequence: Synthetic oligonucleotide
  Antisense strand to SEQ ID NO: 2387930
uacaugcucaagauauguc

SEQ ID NO: 2387932 - RNA, 19 nt, Artificial Sequence
  Description of Artificial Sequence: Synthetic oligonucleotide
  Sense strand starting at position 2673 of SEQ ID NO: 1886104
acauaucuugagcauguau

SEQ ID NO: 2387933 - RNA, 19 nt, Artificial Sequence
  Description of Artificial Sequence: Synthetic oligonucleotide
  Antisense strand to SEQ ID NO: 2387932
auacaugcucaagauaugu

SEQ ID NO: 2387934 - RNA, 19 nt, Artificial Sequence
  Description of Artificial Sequence: Synthetic oligonucleotide
  Sense strand starting at position 2739 of SEQ ID NO: 1886104
guuguaucucuauauacug

SEQ ID NO: 2387935 - RNA, 19 nt, Artificial Sequence
  Description of Artificial Sequence: Synthetic oligonucleotide
  Antisense strand to SEQ ID NO: 2387934
caguauauagagauacaac

SEQ ID NO: 2387936 - RNA, 19 nt, Artificial Sequence
  Description of Artificial Sequence: Synthetic oligonucleotide
  Sense strand starting at position 2776 of SEQ ID NO: 1886104
aaauacuuaggguguaacu

SEQ ID NO: 2387937 - RNA, 19 nt, Artificial Sequence
  Description of Artificial Sequence: Synthetic oligonucleotide
  Antisense strand to SEQ ID NO: 2387936
aguuacacccuaaguauuu

SEQ ID NO: 2387938 - RNA, 19 nt, Artificial Sequence
  Description of Artificial Sequence: Synthetic oligonucleotide
  Sense strand starting at position 3026 of SEQ ID NO: 1886104
ugagucuauuuacagaaca

SEQ ID NO: 2387939 - RNA, 19 nt, Artificial Sequence
  Description of Artificial Sequence: Synthetic oligonucleotide
  Antisense strand to SEQ ID NO: 2387938
uguucuguaaauagacuca

SEQ ID NO: 2387940 - RNA, 19 nt, Artificial Sequence
  Description of Artificial Sequence: Synthetic oligonucleotide
  Sense strand starting at position 3072 of SEQ ID NO: 1886104
gagaacagguuaguuugua

SEQ ID NO: 2387941 - RNA, 19 nt, Artificial Sequence
  Description of Artificial Sequence: Synthetic oligonucleotide
  Antisense strand to SEQ ID NO: 2387940
uacaaacuaaccuguucuc

SEQ ID NO: 2387942 - RNA, 19 nt, Artificial Sequence
  Description of Artificial Sequence: Synthetic oligonucleotide
  Sense strand starting at position 3073 of SEQ ID NO: 1886104
agaacagguuaguuuguaa

SEQ ID NO: 2387943 - RNA, 19 nt, Artificial Sequence
  Description of Artificial Sequence: Synthetic oligonucleotide
  Antisense strand to SEQ ID NO: 2387942
uuacaaacuaaccuguucu

SEQ ID NO: 2387944 - RNA, 19 nt, Artificial Sequence
  Description of Artificial Sequence: Synthetic oligonucleotide
  Sense strand starting at position 3134 of SEQ ID NO: 1886104
uaccuuuguggugaugaca

SEQ ID NO: 2387945 - RNA, 19 nt, Artificial Sequence
  Description of Artificial Sequence: Synthetic oligonucleotide
  Antisense strand to SEQ ID NO: 2387944
ugucaucaccacaaaggua

SEQ ID NO: 2387946 - RNA, 19 nt, Artificial Sequence
  Description of Artificial Sequence: Synthetic oligonucleotide
  Sense strand starting at position 3137 of SEQ ID NO: 1886104
cuuuguggugaugacauau

SEQ ID NO: 2387947 - RNA, 19 nt, Artificial Sequence
  Description of Artificial Sequence: Synthetic oligonucleotide
  Antisense strand to SEQ ID NO: 2387946
auaugucaucaccacaaag

SEQ ID NO: 2387948 - RNA, 19 nt, Artificial Sequence
  Description of Artificial Sequence: Synthetic oligonucleotide
  Sense strand starting at position 3260 of SEQ ID NO: 1886104
cuugaaacugcaugugaau

SEQ ID NO: 2387949 - RNA, 19 nt, Artificial Sequence
  Description of Artificial Sequence: Synthetic oligonucleotide
  Antisense strand to SEQ ID NO: 2387948
auucacaugcaguuucaag

SEQ ID NO: 2387950 - RNA, 19 nt, Artificial Sequence
  Description of Artificial Sequence: Synthetic oligonucleotide
  Sense strand starting at position 3411 of SEQ ID NO: 1886104
gggccauccagauguagaa

SEQ ID NO: 2387951 - RNA, 19 nt, Artificial Sequence
  Description of Artificial Sequence: Synthetic oligonucleotide
  Antisense strand to SEQ ID NO: 2387950
uucuacaucuggauggccc

SEQ ID NO: 2387952 - RNA, 19 nt, Artificial Sequence
  Description of Artificial Sequence: Synthetic oligonucleotide
  Sense strand starting at position 3555 of SEQ ID NO: 1886104
guuguaacaguuuaggauu

SEQ ID NO: 2387953 - RNA, 19 nt, Artificial Sequence
  Description of Artificial Sequence: Synthetic oligonucleotide
  Antisense strand to SEQ ID NO: 2387952
aauccuaaacuguuacaac

SEQ ID NO: 2387954 - RNA, 19 nt, Artificial Sequence
  Description of Artificial Sequence: Synthetic oligonucleotide
  Sense strand starting at position 3706 of SEQ ID NO: 1886104
ccaagacacguuuauugca

SEQ ID NO: 2387955 - RNA, 19 nt, Artificial Sequence
  Description of Artificial Sequence: Synthetic oligonucleotide
  Antisense strand to SEQ ID NO: 2387954
ugcaauaaacgugucuugg

SEQ ID NO: 2387956 - RNA, 19 nt, Artificial Sequence
  Description of Artificial Sequence: Synthetic oligonucleotide
  Sense strand starting at position 3762 of SEQ ID NO: 1886104
augacuaauuuggagugau

SEQ ID NO: 2387957 - RNA, 19 nt, Artificial Sequence
  Description of Artificial Sequence: Synthetic oligonucleotide
  Antisense strand to SEQ ID NO: 2387956
aucacuccaaauuagucau

SEQ ID NO: 2387958 - RNA, 19 nt, Artificial Sequence
  Description of Artificial Sequence: Synthetic oligonucleotide
  Sense strand starting at position 3946 of SEQ ID NO: 1886104
aguagaacauaugcauaua

SEQ ID NO: 2387959 - RNA, 19 nt, Artificial Sequence
  Description of Artificial Sequence: Synthetic oligonucleotide
  Antisense strand to SEQ ID NO: 2387958
uauaugcauauguucuacu

SEQ ID NO: 2387960 - RNA, 19 nt, Artificial Sequence
  Description of Artificial Sequence: Synthetic oligonucleotide
  Sense strand starting at position 69 of SEQ ID NO: 1886105
gccgguaauuuauaaauaa

SEQ ID NO: 2387961 - RNA, 19 nt, Artificial Sequence
  Description of Artificial Sequence: Synthetic oligonucleotide
  Antisense strand to SEQ ID NO: 2387960
uuauuuauaaauuaccggc

SEQ ID NO: 2387962 - RNA, 19 nt, Artificial Sequence
  Description of Artificial Sequence: Synthetic oligonucleotide
  Sense strand starting at position 127 of SEQ ID NO: 1886105
uacugauagaggugugaga

SEQ ID NO: 2387963 - RNA, 19 nt, Artificial Sequence
  Description of Artificial Sequence: Synthetic oligonucleotide
  Antisense strand to SEQ ID NO: 2387962
ucucacaccucuaucagua

SEQ ID NO: 2387964 - RNA, 19 nt, Artificial Sequence
  Description of Artificial Sequence: Synthetic oligonucleotide
  Sense strand starting at position 129 of SEQ ID NO: 1886105
cugauagaggugugagauc

SEQ ID NO: 2387965 - RNA, 19 nt, Artificial Sequence
  Description of Artificial Sequence: Synthetic oligonucleotide
  Antisense strand to SEQ ID NO: 2387964
gaucucacaccucuaucag

SEQ ID NO: 2387966 - RNA, 19 nt, Artificial Sequence
  Description of Artificial Sequence: Synthetic oligonucleotide
  Sense strand starting at position 157 of SEQ ID NO: 1886105
ugaagacuguggcuguaau

SEQ ID NO: 2387967 - RNA, 19 nt, Artificial Sequence
  Description of Artificial Sequence: Synthetic oligonucleotide
  Antisense strand to SEQ ID NO: 2387966
auuacagccacagucuuca

SEQ ID NO: 2387968 - RNA, 19 nt, Artificial Sequence
  Description of Artificial Sequence: Synthetic oligonucleotide
  Sense strand starting at position 158 of SEQ ID NO: 1886105
gaagacuguggcuguaaug

SEQ ID NO: 2387969 - RNA, 19 nt, Artificial Sequence
  Description of Artificial Sequence: Synthetic oligonucleotide
  Antisense strand to SEQ ID NO: 2387968
cauuacagccacagucuuc

SEQ ID NO: 2387970 - RNA, 19 nt, Artificial Sequence
  Description of Artificial Sequence: Synthetic oligonucleotide
  Sense strand starting at position 256 of SEQ ID NO: 1886105
uguuaaauucuggguauug

SEQ ID NO: 2387971 - RNA, 19 nt, Artificial Sequence
  Description of Artificial Sequence: Synthetic oligonucleotide
  Antisense strand to SEQ ID NO: 2387970
caauacccagaauuuaaca

SEQ ID NO: 2387972 - RNA, 19 nt, Artificial Sequence
  Description of Artificial Sequence: Synthetic oligonucleotide
  Sense strand starting at position 284 of SEQ ID NO: 1886105
aggauaacuaucugguguu

SEQ ID NO: 2387973 - RNA, 19 nt, Artificial Sequence
  Description of Artificial Sequence: Synthetic oligonucleotide
  Antisense strand to SEQ ID NO: 2387972
aacaccagauaguuauccu

SEQ ID NO: 2387974 - RNA, 19 nt, Artificial Sequence
  Description of Artificial Sequence: Synthetic oligonucleotide
  Sense strand starting at position 424 of SEQ ID NO: 1886105
ugaguaacaucucuuggga

SEQ ID NO: 2387975 - RNA, 19 nt, Artificial Sequence
  Description of Artificial Sequence: Synthetic oligonucleotide
  Antisense strand to SEQ ID NO: 2387974
ucccaagagauguuacuca

SEQ ID NO: 2387976 - RNA, 19 nt, Artificial Sequence
  Description of Artificial Sequence: Synthetic oligonucleotide
  Sense strand starting at position 616 of SEQ ID NO: 1886105
gugcuagagaaauacguga

SEQ ID NO: 2387977 - RNA, 19 nt, Artificial Sequence
  Description of Artificial Sequence: Synthetic oligonucleotide
  Antisense strand to SEQ ID NO: 2387976
ucacguauuucucuagcac

SEQ ID NO: 2387978 - RNA, 19 nt, Artificial Sequence
  Description of Artificial Sequence: Synthetic oligonucleotide
  Sense strand starting at position 741 of SEQ ID NO: 1886105
ggagcuauuccauauauuc

SEQ ID NO: 2387979 - RNA, 19 nt, Artificial Sequence
  Description of Artificial Sequence: Synthetic oligonucleotide
  Antisense strand to SEQ ID NO: 2387978
gaauauauggaauagcucc

SEQ ID NO: 2387980 - RNA, 19 nt, Artificial Sequence
  Description of Artificial Sequence: Synthetic oligonucleotide
  Sense strand starting at position 1192 of SEQ ID NO: 1886105
gcagauagagccuguauuu

SEQ ID NO: 2387981 - RNA, 19 nt, Artificial Sequence
  Description of Artificial Sequence: Synthetic oligonucleotide
  Antisense strand to SEQ ID NO: 2387980
aaauacaggcucuaucugc

SEQ ID NO: 2387982 - RNA, 19 nt, Artificial Sequence
  Description of Artificial Sequence: Synthetic oligonucleotide
  Sense strand starting at position 1238 of SEQ ID NO: 1886105
cugugugaggcccagaagu

SEQ ID NO: 2387983 - RNA, 19 nt, Artificial Sequence
  Description of Artificial Sequence: Synthetic oligonucleotide
  Antisense strand to SEQ ID NO: 2387982
acuucugggccucacacag

SEQ ID NO: 2387984 - RNA, 19 nt, Artificial Sequence
  Description of Artificial Sequence: Synthetic oligonucleotide
  Sense strand starting at position 1358 of SEQ ID NO: 1886105
caugguaucuguuuguuaa

SEQ ID NO: 2387985 - RNA, 19 nt, Artificial Sequence
  Description of Artificial Sequence: Synthetic oligonucleotide
  Antisense strand to SEQ ID NO: 2387984
uuaacaaacagauaccaug

SEQ ID NO: 2387986 - RNA, 19 nt, Artificial Sequence
  Description of Artificial Sequence: Synthetic oligonucleotide
  Sense strand starting at position 1359 of SEQ ID NO: 1886105
augguaucuguuuguuaaa

SEQ ID NO: 2387987 - RNA, 19 nt, Artificial Sequence
  Description of Artificial Sequence: Synthetic oligonucleotide
  Antisense strand to SEQ ID NO: 2387986
uuuaacaaacagauaccau

SEQ ID NO: 2387988 - RNA, 19 nt, Artificial Sequence
  Description of Artificial Sequence: Synthetic oligonucleotide
  Sense strand starting at position 1360 of SEQ ID NO: 1886105
ugguaucuguuuguuaaac

SEQ ID NO: 2387989 - RNA, 19 nt, Artificial Sequence
  Description of Artificial Sequence: Synthetic oligonucleotide
  Antisense strand to SEQ ID NO: 2387988
guuuaacaaacagauacca

SEQ ID NO: 2387990 - RNA, 19 nt, Artificial Sequence
  Description of Artificial Sequence: Synthetic oligonucleotide
  Sense strand starting at position 1361 of SEQ ID NO: 1886105
gguaucuguuuguuaaacu

SEQ ID NO: 2387991 - RNA, 19 nt, Artificial Sequence
  Description of Artificial Sequence: Synthetic oligonucleotide
  Antisense strand to SEQ ID NO: 2387990
aguuuaacaaacagauacc

SEQ ID NO: 2387992 - RNA, 19 nt, Artificial Sequence
  Description of Artificial Sequence: Synthetic oligonucleotide
  Sense strand starting at position 1369 of SEQ ID NO: 1886105
uuuguuaaacucugcaaug

SEQ ID NO: 2387993 - RNA, 19 nt, Artificial Sequence
  Description of Artificial Sequence: Synthetic oligonucleotide
  Antisense strand to SEQ ID NO: 2387992
cauugcagaguuuaacaaa

SEQ ID NO: 2387994 - RNA, 19 nt, Artificial Sequence
  Description of Artificial Sequence: Synthetic oligonucleotide
  Sense strand starting at position 1370 of SEQ ID NO: 1886105
uuguuaaacucugcaauga

SEQ ID NO: 2387995 - RNA, 19 nt, Artificial Sequence
  Description of Artificial Sequence: Synthetic oligonucleotide
  Antisense strand to SEQ ID NO: 2387994
ucauugcagaguuuaacaa

SEQ ID NO: 2387996 - RNA, 19 nt, Artificial Sequence
  Description of Artificial Sequence: Synthetic oligonucleotide
  Sense strand starting at position 1371 of SEQ ID NO: 1886105
uguuaaacucugcaaugaa

SEQ ID NO: 2387997 - RNA, 19 nt, Artificial Sequence
  Description of Artificial Sequence: Synthetic oligonucleotide
  Antisense strand to SEQ ID NO: 2387996
uucauugcagaguuuaaca

SEQ ID NO: 2387998 - RNA, 19 nt, Artificial Sequence
  Description of Artificial Sequence: Synthetic oligonucleotide
  Sense strand starting at position 1434 of SEQ ID NO: 1886105
gguggcuugaaguaacaca

SEQ ID NO: 2387999 - RNA, 19 nt, Artificial Sequence
  Description of Artificial Sequence: Synthetic oligonucleotide
  Antisense strand to SEQ ID NO: 2387998
uguguuacuucaagccacc

SEQ ID NO: 2388000 - RNA, 19 nt, Artificial Sequence
  Description of Artificial Sequence: Synthetic oligonucleotide
  Sense strand starting at position 1645 of SEQ ID NO: 1886105
cacaauucuggaggucaau

SEQ ID NO: 2388001 - RNA, 19 nt, Artificial Sequence
  Description of Artificial Sequence: Synthetic oligonucleotide
  Antisense strand to SEQ ID NO: 2388000
auugaccuccagaauugug

SEQ ID NO: 2388002 - RNA, 19 nt, Artificial Sequence
  Description of Artificial Sequence: Synthetic oligonucleotide
  Sense strand starting at position 1669 of SEQ ID NO: 1886105
auggaucuuacugggucaa

SEQ ID NO: 2388003 - RNA, 19 nt, Artificial Sequence
  Description of Artificial Sequence: Synthetic oligonucleotide
  Antisense strand to SEQ ID NO: 2388002
uugacccaguaagauccau

SEQ ID NO: 2388004 - RNA, 19 nt, Artificial Sequence
  Description of Artificial Sequence: Synthetic oligonucleotide
  Sense strand starting at position 1670 of SEQ ID NO: 1886105
uggaucuuacugggucaaa

SEQ ID NO: 2388005 - RNA, 19 nt, Artificial Sequence
  Description of Artificial Sequence: Synthetic oligonucleotide
  Antisense strand to SEQ ID NO: 2388004
uuugacccaguaagaucca

SEQ ID NO: 2388006 - RNA, 19 nt, Artificial Sequence
  Description of Artificial Sequence: Synthetic oligonucleotide
  Sense strand starting at position 1853 of SEQ ID NO: 1886105
acagacuugugauuacacu

SEQ ID NO: 2388007 - RNA, 19 nt, Artificial Sequence
  Description of Artificial Sequence: Synthetic oligonucleotide
  Antisense strand to SEQ ID NO: 2388006
aguguaaucacaagucugu

SEQ ID NO: 2388008 - RNA, 19 nt, Artificial Sequence
  Description of Artificial Sequence: Synthetic oligonucleotide
  Sense strand starting at position 1929 of SEQ ID NO: 1886105
uagaauuggcugcaguuaa

SEQ ID NO: 2388009 - RNA, 19 nt, Artificial Sequence
  Description of Artificial Sequence: Synthetic oligonucleotide
  Antisense strand to SEQ ID NO: 2388008
uuaacugcagccaauucua

SEQ ID NO: 2388010 - RNA, 19 nt, Artificial Sequence
  Description of Artificial Sequence: Synthetic oligonucleotide
  Sense strand starting at position 2243 of SEQ ID NO: 1886105
gugccuuccaugggaaaga

SEQ ID NO: 2388011 - RNA, 19 nt, Artificial Sequence
  Description of Artificial Sequence: Synthetic oligonucleotide
  Antisense strand to SEQ ID NO: 2388010
ucuuucccauggaaggcac

SEQ ID NO: 2388012 - RNA, 19 nt, Artificial Sequence
  Description of Artificial Sequence: Synthetic oligonucleotide
  Sense strand starting at position 2288 of SEQ ID NO: 1886105
agaauccauuaguuugaau

SEQ ID NO: 2388013 - RNA, 19 nt, Artificial Sequence
  Description of Artificial Sequence: Synthetic oligonucleotide
  Antisense strand to SEQ ID NO: 2388012
auucaaacuaauggauucu

SEQ ID NO: 2388014 - RNA, 19 nt, Artificial Sequence
  Description of Artificial Sequence: Synthetic oligonucleotide
  Sense strand starting at position 2456 of SEQ ID NO: 1886105
gcagcaaugcuguuugcua

SEQ ID NO: 2388015 - RNA, 19 nt, Artificial Sequence
  Description of Artificial Sequence: Synthetic oligonucleotide
  Antisense strand to SEQ ID NO: 2388014
uagcaaacagcauugcugc

SEQ ID NO: 2388016 - RNA, 19 nt, Artificial Sequence
  Description of Artificial Sequence: Synthetic oligonucleotide
  Sense strand starting at position 2695 of SEQ ID NO: 1886105
gcgcauuaugaaggaauuc

SEQ ID NO: 2388017 - RNA, 19 nt, Artificial Sequence
  Description of Artificial Sequence: Synthetic oligonucleotide
  Antisense strand to SEQ ID NO: 2388016
gaauuccuucauaaugcgc

SEQ ID NO: 2388018 - RNA, 19 nt, Artificial Sequence
  Description of Artificial Sequence: Synthetic oligonucleotide
  Sense strand starting at position 2731 of SEQ ID NO: 1886105
acgcuuuacagaggaauua

SEQ ID NO: 2388019 - RNA, 19 nt, Artificial Sequence
  Description of Artificial Sequence: Synthetic oligonucleotide
  Antisense strand to SEQ ID NO: 2388018
uaauuccucuguaaagcgu

SEQ ID NO: 2388020 - RNA, 19 nt, Artificial Sequence
  Description of Artificial Sequence: Synthetic oligonucleotide
  Sense strand starting at position 2732 of SEQ ID NO: 1886105
cgcuuuacagaggaauuaa

SEQ ID NO: 2388021 - RNA, 19 nt, Artificial Sequence
  Description of Artificial Sequence: Synthetic oligonucleotide
  Antisense strand to SEQ ID NO: 2388020
uuaauuccucuguaaagcg

SEQ ID NO: 2388022 - RNA, 19 nt, Artificial Sequence
  Description of Artificial Sequence: Synthetic oligonucleotide
  Sense strand starting at position 2960 of SEQ ID NO: 1886105
ccagauuucuauggaauga

SEQ ID NO: 2388023 - RNA, 19 nt, Artificial Sequence
  Description of Artificial Sequence: Synthetic oligonucleotide
  Antisense strand to SEQ ID NO: 2388022
ucauuccauagaaaucugg

SEQ ID NO: 2388024 - RNA, 19 nt, Artificial Sequence
  Description of Artificial Sequence: Synthetic oligonucleotide
  Sense strand starting at position 3060 of SEQ ID NO: 1886105
gcaagucacaaugagaguu

SEQ ID NO: 2388025 - RNA, 19 nt, Artificial Sequence
  Description of Artificial Sequence: Synthetic oligonucleotide
  Antisense strand to SEQ ID NO: 2388024
aacucucauugugacuugc

SEQ ID NO: 2388026 - RNA, 19 nt, Artificial Sequence
  Description of Artificial Sequence: Synthetic oligonucleotide
  Sense strand starting at position 3107 of SEQ ID NO: 1886105
aaagucuguccuggcaaca

SEQ ID NO: 2388027 - RNA, 19 nt, Artificial Sequence
  Description of Artificial Sequence: Synthetic oligonucleotide
  Antisense strand to SEQ ID NO: 2388026
uguugccaggacagacuuu

SEQ ID NO: 2388028 - RNA, 19 nt, Artificial Sequence
  Description of Artificial Sequence: Synthetic oligonucleotide
  Sense strand starting at position 3170 of SEQ ID NO: 1886105
gccauuaccuagguuucua

SEQ ID NO: 2388029 - RNA, 19 nt, Artificial Sequence
  Description of Artificial Sequence: Synthetic oligonucleotide
  Antisense strand to SEQ ID NO: 2388028
uagaaaccuagguaauggc

SEQ ID NO: 2388030 - RNA, 19 nt, Artificial Sequence
  Description of Artificial Sequence: Synthetic oligonucleotide
  Sense strand starting at position 3237 of SEQ ID NO: 1886105
cacgcaggucgauaagauu

SEQ ID NO: 2388031 - RNA, 19 nt, Artificial Sequence
  Description of Artificial Sequence: Synthetic oligonucleotide
  Antisense strand to SEQ ID NO: 2388030
aaucuuaucgaccugcgug

SEQ ID NO: 2388032 - RNA, 19 nt, Artificial Sequence
  Description of Artificial Sequence: Synthetic oligonucleotide
  Sense strand starting at position 3243 of SEQ ID NO: 1886105
ggucgauaagauuacccuu

SEQ ID NO: 2388033 - RNA, 19 nt, Artificial Sequence
  Description of Artificial Sequence: Synthetic oligonucleotide
  Antisense strand to SEQ ID NO: 2388032
aaggguaaucuuaucgacc

SEQ ID NO: 2388034 - RNA, 19 nt, Artificial Sequence
  Description of Artificial Sequence: Synthetic oligonucleotide
  Sense strand starting at position 3295 of SEQ ID NO: 1886105
gaaacuguucaguggaggu

SEQ ID NO: 2388035 - RNA, 19 nt, Artificial Sequence
  Description of Artificial Sequence: Synthetic oligonucleotide
  Antisense strand to SEQ ID NO: 2388034
accuccacugaacaguuuc

SEQ ID NO: 2388036 - RNA, 19 nt, Artificial Sequence
  Description of Artificial Sequence: Synthetic oligonucleotide
  Sense strand starting at position 3325 of SEQ ID NO: 1886105
gcccauuauguguaugaga

SEQ ID NO: 2388037 - RNA, 19 nt, Artificial Sequence
  Description of Artificial Sequence: Synthetic oligonucleotide
  Antisense strand to SEQ ID NO: 2388036
ucucauacacauaaugggc

SEQ ID NO: 2388038 - RNA, 19 nt, Artificial Sequence
  Description of Artificial Sequence: Synthetic oligonucleotide
  Sense strand starting at position 3327 of SEQ ID NO: 1886105
ccauuauguguaugagaca

SEQ ID NO: 2388039 - RNA, 19 nt, Artificial Sequence
  Description of Artificial Sequence: Synthetic oligonucleotide
  Antisense strand to SEQ ID NO: 2388038
ugucucauacacauaaugg

SEQ ID NO: 2388040 - RNA, 19 nt, Artificial Sequence
  Description of Artificial Sequence: Synthetic oligonucleotide
  Sense strand starting at position 46 of SEQ ID NO: 1886106
uuagguuucuguuuaagac

SEQ ID NO: 2388041 - RNA, 19 nt, Artificial Sequence
  Description of Artificial Sequence: Synthetic oligonucleotide
  Antisense strand to SEQ ID NO: 2388040
gucuuaaacagaaaccuaa

SEQ ID NO: 2388042 - RNA, 19 nt, Artificial Sequence
  Description of Artificial Sequence: Synthetic oligonucleotide
  Sense strand starting at position 47 of SEQ ID NO: 1886106
uagguuucuguuuaagacu

SEQ ID NO: 2388043 - RNA, 19 nt, Artificial Sequence
  Description of Artificial Sequence: Synthetic oligonucleotide
  Antisense strand to SEQ ID NO: 2388042
agucuuaaacagaaaccua

SEQ ID NO: 2388044 - RNA, 19 nt, Artificial Sequence
  Description of Artificial Sequence: Synthetic oligonucleotide
  Sense strand starting at position 118 of SEQ ID NO: 1886106
aagagugccuacuugcaaa

SEQ ID NO: 2388045 - RNA, 19 nt, Artificial Sequence
  Description of Artificial Sequence: Synthetic oligonucleotide
  Antisense strand to SEQ ID NO: 2388044
uuugcaaguaggcacucuu

SEQ ID NO: 2388046 - RNA, 19 nt, Artificial Sequence
  Description of Artificial Sequence: Synthetic oligonucleotide
  Sense strand starting at position 595 of SEQ ID NO: 1886106
ucccauaaggauuguugga

SEQ ID NO: 2388047 - RNA, 19 nt, Artificial Sequence
  Description of Artificial Sequence: Synthetic oligonucleotide
  Antisense strand to SEQ ID NO: 2388046
uccaacaauccuuauggga

SEQ ID NO: 2388048 - RNA, 19 nt, Artificial Sequence
  Description of Artificial Sequence: Synthetic oligonucleotide
  Sense strand starting at position 627 of SEQ ID NO: 1886106
acaauaauauacgcaaagu

SEQ ID NO: 2388049 - RNA, 19 nt, Artificial Sequence
  Description of Artificial Sequence: Synthetic oligonucleotide
  Antisense strand to SEQ ID NO: 2388048
acuuugcguauauuauugu

SEQ ID NO: 2388050 - RNA, 19 nt, Artificial Sequence
  Description of Artificial Sequence: Synthetic oligonucleotide
  Sense strand starting at position 653 of SEQ ID NO: 1886106
uagcaagaugccuaguaua

SEQ ID NO: 2388051 - RNA, 19 nt, Artificial Sequence
  Description of Artificial Sequence: Synthetic oligonucleotide
  Antisense strand to SEQ ID NO: 2388050
uauacuaggcaucuugcua

SEQ ID NO: 2388052 - RNA, 19 nt, Artificial Sequence
  Description of Artificial Sequence: Synthetic oligonucleotide
  Sense strand starting at position 729 of SEQ ID NO: 1886106
guaguuuggacagguuauu

SEQ ID NO: 2388053 - RNA, 19 nt, Artificial Sequence
  Description of Artificial Sequence: Synthetic oligonucleotide
  Antisense strand to SEQ ID NO: 2388052
aauaaccuguccaaacuac

SEQ ID NO: 2388054 - RNA, 19 nt, Artificial Sequence
  Description of Artificial Sequence: Synthetic oligonucleotide
  Sense strand starting at position 897 of SEQ ID NO: 1886106
agucuagagaccuagguuu

SEQ ID NO: 2388055 - RNA, 19 nt, Artificial Sequence
  Description of Artificial Sequence: Synthetic oligonucleotide
  Antisense strand to SEQ ID NO: 2388054
aaaccuaggucucuagacu

SEQ ID NO: 2388056 - RNA, 19 nt, Artificial Sequence
  Description of Artificial Sequence: Synthetic oligonucleotide
  Sense strand starting at position 976 of SEQ ID NO: 1886106
uacuaauugcucuguaagg

SEQ ID NO: 2388057 - RNA, 19 nt, Artificial Sequence
  Description of Artificial Sequence: Synthetic oligonucleotide
  Antisense strand to SEQ ID NO: 2388056
ccuuacagagcaauuagua

SEQ ID NO: 2388058 - RNA, 19 nt, Artificial Sequence
  Description of Artificial Sequence: Synthetic oligonucleotide
  Sense strand starting at position 978 of SEQ ID NO: 1886106
cuaauugcucuguaaggug

SEQ ID NO: 2388059 - RNA, 19 nt, Artificial Sequence
  Description of Artificial Sequence: Synthetic oligonucleotide
  Antisense strand to SEQ ID NO: 2388058
caccuuacagagcaauuag

SEQ ID NO: 2388060 - RNA, 19 nt, Artificial Sequence
  Description of Artificial Sequence: Synthetic oligonucleotide
  Sense strand starting at position 1020 of SEQ ID NO: 1886106
uugagacugcaauagcaau

SEQ ID NO: 2388061 - RNA, 19 nt, Artificial Sequence
  Description of Artificial Sequence: Synthetic oligonucleotide
  Antisense strand to SEQ ID NO: 2388060
auugcuauugcagucucaa

SEQ ID NO: 2388062 - RNA, 19 nt, Artificial Sequence
  Description of Artificial Sequence: Synthetic oligonucleotide
  Sense strand starting at position 1135 of SEQ ID NO: 1886106
ucgaaacaguuucuacagu

SEQ ID NO: 2388063 - RNA, 19 nt, Artificial Sequence
  Description of Artificial Sequence: Synthetic oligonucleotide
  Antisense strand to SEQ ID NO: 2388062
acuguagaaacuguuucga

SEQ ID NO: 2388064 - RNA, 19 nt, Artificial Sequence
  Description of Artificial Sequence: Synthetic oligonucleotide
  Sense strand starting at position 1716 of SEQ ID NO: 1886106
acaucaaacugggauuuau

SEQ ID NO: 2388065 - RNA, 19 nt, Artificial Sequence
  Description of Artificial Sequence: Synthetic oligonucleotide
  Antisense strand to SEQ ID NO: 2388064
auaaaucccaguuugaugu

SEQ ID NO: 2388066 - RNA, 19 nt, Artificial Sequence
  Description of Artificial Sequence: Synthetic oligonucleotide
  Sense strand starting at position 1988 of SEQ ID NO: 1886106
gagacaaaguaugcauaua

SEQ ID NO: 2388067 - RNA, 19 nt, Artificial Sequence
  Description of Artificial Sequence: Synthetic oligonucleotide
  Antisense strand to SEQ ID NO: 2388066
uauaugcauacuuugucuc

SEQ ID NO: 2388068 - RNA, 19 nt, Artificial Sequence
  Description of Artificial Sequence: Synthetic oligonucleotide
  Sense strand starting at position 2021 of SEQ ID NO: 1886106
ggagcaguaacuuacugau

SEQ ID NO: 2388069 - RNA, 19 nt, Artificial Sequence
  Description of Artificial Sequence: Synthetic oligonucleotide
  Antisense strand to SEQ ID NO: 2388068
aucaguaaguuacugcucc

SEQ ID NO: 2388070 - RNA, 19 nt, Artificial Sequence
  Description of Artificial Sequence: Synthetic oligonucleotide
  Sense strand starting at position 2023 of SEQ ID NO: 1886106
agcaguaacuuacugaugu

SEQ ID NO: 2388071 - RNA, 19 nt, Artificial Sequence
  Description of Artificial Sequence: Synthetic oligonucleotide
  Antisense strand to SEQ ID NO: 2388070
acaucaguaaguuacugcu

SEQ ID NO: 2388072 - RNA, 19 nt, Artificial Sequence
  Description of Artificial Sequence: Synthetic oligonucleotide
  Sense strand starting at position 2040 of SEQ ID NO: 1886106
guauacaacuuaucgaauc

SEQ ID NO: 2388073 - RNA, 19 nt, Artificial Sequence
  Description of Artificial Sequence: Synthetic oligonucleotide
  Antisense strand to SEQ ID NO: 2388072
gauucgauaaguuguauac

SEQ ID NO: 2388074 - RNA, 19 nt, Artificial Sequence
  Description of Artificial Sequence: Synthetic oligonucleotide
  Sense strand starting at position 2050 of SEQ ID NO: 1886106
uaucgaaucucucugaguu

SEQ ID NO: 2388075 - RNA, 19 nt, Artificial Sequence
  Description of Artificial Sequence: Synthetic oligonucleotide
  Antisense strand to SEQ ID NO: 2388074
aacucagagagauucgaua

SEQ ID NO: 2388076 - RNA, 19 nt, Artificial Sequence
  Description of Artificial Sequence: Synthetic oligonucleotide
  Sense strand starting at position 2051 of SEQ ID NO: 1886106
aucgaaucucucugaguua

SEQ ID NO: 2388077 - RNA, 19 nt, Artificial Sequence
  Description of Artificial Sequence: Synthetic oligonucleotide
  Antisense strand to SEQ ID NO: 2388076
uaacucagagagauucgau

SEQ ID NO: 2388078 - RNA, 19 nt, Artificial Sequence
  Description of Artificial Sequence: Synthetic oligonucleotide
  Sense strand starting at position 2121 of SEQ ID NO: 1886106
gaaacuuuggaauggguuu

SEQ ID NO: 2388079 - RNA, 19 nt, Artificial Sequence
  Description of Artificial Sequence: Synthetic oligonucleotide
  Antisense strand to SEQ ID NO: 2388078
aaacccauuccaaaguuuc

SEQ ID NO: 2388080 - RNA, 19 nt, Artificial Sequence
  Description of Artificial Sequence: Synthetic oligonucleotide
  Sense strand starting at position 2135 of SEQ ID NO: 1886106
gguuuauugcuagcugucu

SEQ ID NO: 2388081 - RNA, 19 nt, Artificial Sequence
  Description of Artificial Sequence: Synthetic oligonucleotide
  Antisense strand to SEQ ID NO: 2388080
agacagcuagcaauaaacc

SEQ ID NO: 2388082 - RNA, 19 nt, Artificial Sequence
  Description of Artificial Sequence: Synthetic oligonucleotide
  Sense strand starting at position 2190 of SEQ ID NO: 1886106
agugcacuagauugagagu

SEQ ID NO: 2388083 - RNA, 19 nt, Artificial Sequence
  Description of Artificial Sequence: Synthetic oligonucleotide
  Antisense strand to SEQ ID NO: 2388082
acucucaaucuagugcacu

SEQ ID NO: 2388084 - RNA, 19 nt, Artificial Sequence
  Description of Artificial Sequence: Synthetic oligonucleotide
  Sense strand starting at position 2191 of SEQ ID NO: 1886106
gugcacuagauugagaguu

SEQ ID NO: 2388085 - RNA, 19 nt, Artificial Sequence
  Description of Artificial Sequence: Synthetic oligonucleotide
  Antisense strand to SEQ ID NO: 2388084
aacucucaaucuagugcac

SEQ ID NO: 2388086 - RNA, 19 nt, Artificial Sequence
  Description of Artificial Sequence: Synthetic oligonucleotide
  Sense strand starting at position 2427 of SEQ ID NO: 1886106
agugauguacuagggauag

SEQ ID NO: 2388087 - RNA, 19 nt, Artificial Sequence
  Description of Artificial Sequence: Synthetic oligonucleotide
  Antisense strand to SEQ ID NO: 2388086
cuaucccuaguacaucacu

SEQ ID NO: 2388088 - RNA, 19 nt, Artificial Sequence
  Description of Artificial Sequence: Synthetic oligonucleotide
  Sense strand starting at position 2431 of SEQ ID NO: 1886106
auguacuagggauagugua

SEQ ID NO: 2388089 - RNA, 19 nt, Artificial Sequence
  Description of Artificial Sequence: Synthetic oligonucleotide
  Antisense strand to SEQ ID NO: 2388088
uacacuaucccuaguacau

SEQ ID NO: 2388090 - RNA, 19 nt, Artificial Sequence
  Description of Artificial Sequence: Synthetic oligonucleotide
  Sense strand starting at position 2496 of SEQ ID NO: 1886106
gagguuuaacuggaugcua

SEQ ID NO: 2388091 - RNA, 19 nt, Artificial Sequence
  Description of Artificial Sequence: Synthetic oligonucleotide
  Antisense strand to SEQ ID NO: 2388090
uagcauccaguuaaaccuc

SEQ ID NO: 2388092 - RNA, 19 nt, Artificial Sequence
  Description of Artificial Sequence: Synthetic oligonucleotide
  Sense strand starting at position 2498 of SEQ ID NO: 1886106
gguuuaacuggaugcuaag

SEQ ID NO: 2388093 - RNA, 19 nt, Artificial Sequence
  Description of Artificial Sequence: Synthetic oligonucleotide
  Antisense strand to SEQ ID NO: 2388092
cuuagcauccaguuaaacc

SEQ ID NO: 2388094 - RNA, 19 nt, Artificial Sequence
  Description of Artificial Sequence: Synthetic oligonucleotide
  Sense strand starting at position 2554 of SEQ ID NO: 1886106
ucacuacuguguucuagga

SEQ ID NO: 2388095 - RNA, 19 nt, Artificial Sequence
  Description of Artificial Sequence: Synthetic oligonucleotide
  Antisense strand to SEQ ID NO: 2388094
uccuagaacacaguaguga

SEQ ID NO: 2388096 - RNA, 19 nt, Artificial Sequence
  Description of Artificial Sequence: Synthetic oligonucleotide
  Sense strand starting at position 2642 of SEQ ID NO: 1886106
uguugcuugauuuggaagu

SEQ ID NO: 2388097 - RNA, 19 nt, Artificial Sequence
  Description of Artificial Sequence: Synthetic oligonucleotide
  Antisense strand to SEQ ID NO: 2388096
acuuccaaaucaagcaaca

SEQ ID NO: 2388098 - RNA, 19 nt, Artificial Sequence
  Description of Artificial Sequence: Synthetic oligonucleotide
  Sense strand starting at position 2653 of SEQ ID NO: 1886106
uuggaaguaauccgcaaag

SEQ ID NO: 2388099 - RNA, 19 nt, Artificial Sequence
  Description of Artificial Sequence: Synthetic oligonucleotide
  Antisense strand to SEQ ID NO: 2388098
cuuugcggauuacuuccaa

SEQ ID NO: 2388100 - RNA, 19 nt, Artificial Sequence
  Description of Artificial Sequence: Synthetic oligonucleotide
  Sense strand starting at position 2704 of SEQ ID NO: 1886106
ggaguagcugcugaacaau

SEQ ID NO: 2388101 - RNA, 19 nt, Artificial Sequence
  Description of Artificial Sequence: Synthetic oligonucleotide
  Antisense strand to SEQ ID NO: 2388100
auuguucagcagcuacucc

SEQ ID NO: 2388102 - RNA, 19 nt, Artificial Sequence
  Description of Artificial Sequence: Synthetic oligonucleotide
  Sense strand starting at position 2707 of SEQ ID NO: 1886106
guagcugcugaacaauaaa

SEQ ID NO: 2388103 - RNA, 19 nt, Artificial Sequence
  Description of Artificial Sequence: Synthetic oligonucleotide
  Antisense strand to SEQ ID NO: 2388102
uuuauuguucagcagcuac

SEQ ID NO: 2388104 - RNA, 19 nt, Artificial Sequence
  Description of Artificial Sequence: Synthetic oligonucleotide
  Sense strand starting at position 2784 of SEQ ID NO: 1886106
ucagaaacuagguguaugu

SEQ ID NO: 2388105 - RNA, 19 nt, Artificial Sequence
  Description of Artificial Sequence: Synthetic oligonucleotide
  Antisense strand to SEQ ID NO: 2388104
acauacaccuaguuucuga

SEQ ID NO: 2388106 - RNA, 19 nt, Artificial Sequence
  Description of Artificial Sequence: Synthetic oligonucleotide
  Sense strand starting at position 2814 of SEQ ID NO: 1886106
uuaugacacuguucucuga

SEQ ID NO: 2388107 - RNA, 19 nt, Artificial Sequence
  Description of Artificial Sequence: Synthetic oligonucleotide
  Antisense strand to SEQ ID NO: 2388106
ucagagaacagugucauaa

SEQ ID NO: 2388108 - RNA, 19 nt, Artificial Sequence
  Description of Artificial Sequence: Synthetic oligonucleotide
  Sense strand starting at position 2816 of SEQ ID NO: 1886106
augacacuguucucugaca

SEQ ID NO: 2388109 - RNA, 19 nt, Artificial Sequence
  Description of Artificial Sequence: Synthetic oligonucleotide
  Antisense strand to SEQ ID NO: 2388108
ugucagagaacagugucau

SEQ ID NO: 2388110 - RNA, 19 nt, Artificial Sequence
  Description of Artificial Sequence: Synthetic oligonucleotide
  Sense strand starting at position 2817 of SEQ ID NO: 1886106
ugacacuguucucugacau

SEQ ID NO: 2388111 - RNA, 19 nt, Artificial Sequence
  Description of Artificial Sequence: Synthetic oligonucleotide
  Antisense strand to SEQ ID NO: 2388110
augucagagaacaguguca

SEQ ID NO: 2388112 - RNA, 19 nt, Artificial Sequence
  Description of Artificial Sequence: Synthetic oligonucleotide
  Sense strand starting at position 3475 of SEQ ID NO: 1886106
uuguaauuaguguacucuu

SEQ ID NO: 2388113 - RNA, 19 nt, Artificial Sequence
  Description of Artificial Sequence: Synthetic oligonucleotide
  Antisense strand to SEQ ID NO: 2388112
aagaguacacuaauuacaa

SEQ ID NO: 2388114 - RNA, 19 nt, Artificial Sequence
  Description of Artificial Sequence: Synthetic oligonucleotide
  Sense strand starting at position 3661 of SEQ ID NO: 1886106
acacgagaaucucugaacu

SEQ ID NO: 2388115 - RNA, 19 nt, Artificial Sequence
  Description of Artificial Sequence: Synthetic oligonucleotide
  Antisense strand to SEQ ID NO: 2388114
aguucagagauucucgugu

SEQ ID NO: 2388116 - RNA, 19 nt, Artificial Sequence
  Description of Artificial Sequence: Synthetic oligonucleotide
  Sense strand starting at position 3725 of SEQ ID NO: 1886106
acuaauaguuuagugaugu

SEQ ID NO: 2388117 - RNA, 19 nt, Artificial Sequence
  Description of Artificial Sequence: Synthetic oligonucleotide
  Antisense strand to SEQ ID NO: 2388116
acaucacuaaacuauuagu

SEQ ID NO: 2388118 - RNA, 19 nt, Artificial Sequence
  Description of Artificial Sequence: Synthetic oligonucleotide
  Sense strand starting at position 3779 of SEQ ID NO: 1886106
agaaauacuucguucugac

SEQ ID NO: 2388119 - RNA, 19 nt, Artificial Sequence
  Description of Artificial Sequence: Synthetic oligonucleotide
  Antisense strand to SEQ ID NO: 2388118
gucagaacgaaguauuucu

SEQ ID NO: 2388120 - RNA, 19 nt, Artificial Sequence
  Description of Artificial Sequence: Synthetic oligonucleotide
  Sense strand starting at position 118 of SEQ ID NO: 1886107
agcaacaugcauuaugauu

SEQ ID NO: 2388121 - RNA, 19 nt, Artificial Sequence
  Description of Artificial Sequence: Synthetic oligonucleotide
  Antisense strand to SEQ ID NO: 2388120
aaucauaaugcauguugcu

SEQ ID NO: 2388122 - RNA, 19 nt, Artificial Sequence
  Description of Artificial Sequence: Synthetic oligonucleotide
  Sense strand starting at position 185 of SEQ ID NO: 1886107
ggcacaaccguuugcauaa

SEQ ID NO: 2388123 - RNA, 19 nt, Artificial Sequence
  Description of Artificial Sequence: Synthetic oligonucleotide
  Antisense strand to SEQ ID NO: 2388122
uuaugcaaacgguugugcc

SEQ ID NO: 2388124 - RNA, 19 nt, Artificial Sequence
  Description of Artificial Sequence: Synthetic oligonucleotide
  Sense strand starting at position 186 of SEQ ID NO: 1886107
gcacaaccguuugcauaaa

SEQ ID NO: 2388125 - RNA, 19 nt, Artificial Sequence
  Description of Artificial Sequence: Synthetic oligonucleotide
  Antisense strand to SEQ ID NO: 2388124
uuuaugcaaacgguugugc

SEQ ID NO: 2388126 - RNA, 19 nt, Artificial Sequence
  Description of Artificial Sequence: Synthetic oligonucleotide
  Sense strand starting at position 199 of SEQ ID NO: 1886107
cauaaagacuuagaguagu

SEQ ID NO: 2388127 - RNA, 19 nt, Artificial Sequence
  Description of Artificial Sequence: Synthetic oligonucleotide
  Antisense strand to SEQ ID NO: 2388126
acuacucuaagucuuuaug

SEQ ID NO: 2388128 - RNA, 19 nt, Artificial Sequence
  Description of Artificial Sequence: Synthetic oligonucleotide
  Sense strand starting at position 245 of SEQ ID NO: 1886107
caaaguauccagugucugu

SEQ ID NO: 2388129 - RNA, 19 nt, Artificial Sequence
  Description of Artificial Sequence: Synthetic oligonucleotide
  Antisense strand to SEQ ID NO: 2388128
acagacacuggauacuuug

SEQ ID NO: 2388130 - RNA, 19 nt, Artificial Sequence
  Description of Artificial Sequence: Synthetic oligonucleotide
  Sense strand starting at position 315 of SEQ ID NO: 1886107
ccuguucugcuuugaccua

SEQ ID NO: 2388131 - RNA, 19 nt, Artificial Sequence
  Description of Artificial Sequence: Synthetic oligonucleotide
  Antisense strand to SEQ ID NO: 2388130
uaggucaaagcagaacagg

SEQ ID NO: 2388132 - RNA, 19 nt, Artificial Sequence
  Description of Artificial Sequence: Synthetic oligonucleotide
  Sense strand starting at position 851 of SEQ ID NO: 1886107
ugccuuuacugaguucuau

SEQ ID NO: 2388133 - RNA, 19 nt, Artificial Sequence
  Description of Artificial Sequence: Synthetic oligonucleotide
  Antisense strand to SEQ ID NO: 2388132
auagaacucaguaaaggca

SEQ ID NO: 2388134 - RNA, 19 nt, Artificial Sequence
  Description of Artificial Sequence: Synthetic oligonucleotide
  Sense strand starting at position 881 of SEQ ID NO: 1886107
acggaauuauacuugguuu

SEQ ID NO: 2388135 - RNA, 19 nt, Artificial Sequence
  Description of Artificial Sequence: Synthetic oligonucleotide
  Antisense strand to SEQ ID NO: 2388134
aaaccaaguauaauuccgu

SEQ ID NO: 2388136 - RNA, 19 nt, Artificial Sequence
  Description of Artificial Sequence: Synthetic oligonucleotide
  Sense strand starting at position 927 of SEQ ID NO: 1886107
ugggacuacugucaucuuu

SEQ ID NO: 2388137 - RNA, 19 nt, Artificial Sequence
  Description of Artificial Sequence: Synthetic oligonucleotide
  Antisense strand to SEQ ID NO: 2388136
aaagaugacaguaguccca

SEQ ID NO: 2388138 - RNA, 19 nt, Artificial Sequence
  Description of Artificial Sequence: Synthetic oligonucleotide
  Sense strand starting at position 935 of SEQ ID NO: 1886107
cugucaucuuugcuugacu

SEQ ID NO: 2388139 - RNA, 19 nt, Artificial Sequence
  Description of Artificial Sequence: Synthetic oligonucleotide
  Antisense strand to SEQ ID NO: 2388138
agucaagcaaagaugacag

SEQ ID NO: 2388140 - RNA, 19 nt, Artificial Sequence
  Description of Artificial Sequence: Synthetic oligonucleotide
  Sense strand starting at position 937 of SEQ ID NO: 1886107
gucaucuuugcuugacucu

SEQ ID NO: 2388141 - RNA, 19 nt, Artificial Sequence
  Description of Artificial Sequence: Synthetic oligonucleotide
  Antisense strand to SEQ ID NO: 2388140
agagucaagcaaagaugac

SEQ ID NO: 2388142 - RNA, 19 nt, Artificial Sequence
  Description of Artificial Sequence: Synthetic oligonucleotide
  Sense strand starting at position 968 of SEQ ID NO: 1886107
gagaguuuguagcuccauu

SEQ ID NO: 2388143 - RNA, 19 nt, Artificial Sequence
  Description of Artificial Sequence: Synthetic oligonucleotide
  Antisense strand to SEQ ID NO: 2388142
aauggagcuacaaacucuc

SEQ ID NO: 2388144 - RNA, 19 nt, Artificial Sequence
  Description of Artificial Sequence: Synthetic oligonucleotide
  Sense strand starting at position 1034 of SEQ ID NO: 1886107
uggaaucaaugucaaguau

SEQ ID NO: 2388145 - RNA, 19 nt, Artificial Sequence
  Description of Artificial Sequence: Synthetic oligonucleotide
  Antisense strand to SEQ ID NO: 2388144
auacuugacauugauucca

SEQ ID NO: 2388146 - RNA, 19 nt, Artificial Sequence
  Description of Artificial Sequence: Synthetic oligonucleotide
  Sense strand starting at position 1048 of SEQ ID NO: 1886107
aguauuccauaccaaguua

SEQ ID NO: 2388147 - RNA, 19 nt, Artificial Sequence
  Description of Artificial Sequence: Synthetic oligonucleotide
  Antisense strand to SEQ ID NO: 2388146
uaacuugguauggaauacu

SEQ ID NO: 2388148 - RNA, 19 nt, Artificial Sequence
  Description of Artificial Sequence: Synthetic oligonucleotide
  Sense strand starting at position 1168 of SEQ ID NO: 1886107
ggcuuuaucucauauucug

SEQ ID NO: 2388149 - RNA, 19 nt, Artificial Sequence
  Description of Artificial Sequence: Synthetic oligonucleotide
  Antisense strand to SEQ ID NO: 2388148
cagaauaugagauaaagcc

SEQ ID NO: 2388150 - RNA, 19 nt, Artificial Sequence
  Description of Artificial Sequence: Synthetic oligonucleotide
  Sense strand starting at position 1476 of SEQ ID NO: 1886107
cugcuuuagccacaugagu

SEQ ID NO: 2388151 - RNA, 19 nt, Artificial Sequence
  Description of Artificial Sequence: Synthetic oligonucleotide
  Antisense strand to SEQ ID NO: 2388150
acucauguggcuaaagcag

SEQ ID NO: 2388152 - RNA, 19 nt, Artificial Sequence
  Description of Artificial Sequence: Synthetic oligonucleotide
  Sense strand starting at position 1478 of SEQ ID NO: 1886107
gcuuuagccacaugaguag

SEQ ID NO: 2388153 - RNA, 19 nt, Artificial Sequence
  Description of Artificial Sequence: Synthetic oligonucleotide
  Antisense strand to SEQ ID NO: 2388152
cuacucauguggcuaaagc

SEQ ID NO: 2388154 - RNA, 19 nt, Artificial Sequence
  Description of Artificial Sequence: Synthetic oligonucleotide
  Sense strand starting at position 1694 of SEQ ID NO: 1886107
uugagauaacauuggcucu

SEQ ID NO: 2388155 - RNA, 19 nt, Artificial Sequence
  Description of Artificial Sequence: Synthetic oligonucleotide
  Antisense strand to SEQ ID NO: 2388154
agagccaauguuaucucaa

SEQ ID NO: 2388156 - RNA, 19 nt, Artificial Sequence
  Description of Artificial Sequence: Synthetic oligonucleotide
  Sense strand starting at position 1893 of SEQ ID NO: 1886107
aggaaaugcuuauugguca

SEQ ID NO: 2388157 - RNA, 19 nt, Artificial Sequence
  Description of Artificial Sequence: Synthetic oligonucleotide
  Antisense strand to SEQ ID NO: 2388156
ugaccaauaagcauuuccu

SEQ ID NO: 2388158 - RNA, 19 nt, Artificial Sequence
  Description of Artificial Sequence: Synthetic oligonucleotide
  Sense strand starting at position 1938 of SEQ ID NO: 1886107
ggauaaguauaaugcaaau

SEQ ID NO: 2388159 - RNA, 19 nt, Artificial Sequence
  Description of Artificial Sequence: Synthetic oligonucleotide
  Antisense strand to SEQ ID NO: 2388158
auuugcauuauacuuaucc

SEQ ID NO: 2388160 - RNA, 19 nt, Artificial Sequence
  Description of Artificial Sequence: Synthetic oligonucleotide
  Sense strand starting at position 2034 of SEQ ID NO: 1886107
cucauagugugccucugaa

SEQ ID NO: 2388161 - RNA, 19 nt, Artificial Sequence
  Description of Artificial Sequence: Synthetic oligonucleotide
  Antisense strand to SEQ ID NO: 2388160
uucagaggcacacuaugag

SEQ ID NO: 2388162 - RNA, 19 nt, Artificial Sequence
  Description of Artificial Sequence: Synthetic oligonucleotide
  Sense strand starting at position 2138 of SEQ ID NO: 1886107
auuccaguuugaguguauu

SEQ ID NO: 2388163 - RNA, 19 nt, Artificial Sequence
  Description of Artificial Sequence: Synthetic oligonucleotide
  Antisense strand to SEQ ID NO: 2388162
aauacacucaaacuggaau

SEQ ID NO: 2388164 - RNA, 19 nt, Artificial Sequence
  Description of Artificial Sequence: Synthetic oligonucleotide
  Sense strand starting at position 2248 of SEQ ID NO: 1886107
uuguuauacugacuugcau

SEQ ID NO: 2388165 - RNA, 19 nt, Artificial Sequence
  Description of Artificial Sequence: Synthetic oligonucleotide
  Antisense strand to SEQ ID NO: 2388164
augcaagucaguauaacaa

SEQ ID NO: 2388166 - RNA, 19 nt, Artificial Sequence
  Description of Artificial Sequence: Synthetic oligonucleotide
  Sense strand starting at position 2257 of SEQ ID NO: 1886107
ugacuugcauucuugggau

SEQ ID NO: 2388167 - RNA, 19 nt, Artificial Sequence
  Description of Artificial Sequence: Synthetic oligonucleotide
  Antisense strand to SEQ ID NO: 2388166
aucccaagaaugcaaguca

SEQ ID NO: 2388168 - RNA, 19 nt, Artificial Sequence
  Description of Artificial Sequence: Synthetic oligonucleotide
  Sense strand starting at position 2366 of SEQ ID NO: 1886107
ucuaguaucuuuguagauu

SEQ ID NO: 2388169 - RNA, 19 nt, Artificial Sequence
  Description of Artificial Sequence: Synthetic oligonucleotide
  Antisense strand to SEQ ID NO: 2388168
aaucuacaaagauacuaga

SEQ ID NO: 2388170 - RNA, 19 nt, Artificial Sequence
  Description of Artificial Sequence: Synthetic oligonucleotide
  Sense strand starting at position 2367 of SEQ ID NO: 1886107
cuaguaucuuuguagauua

SEQ ID NO: 2388171 - RNA, 19 nt, Artificial Sequence
  Description of Artificial Sequence: Synthetic oligonucleotide
  Antisense strand to SEQ ID NO: 2388170
uaaucuacaaagauacuag

SEQ ID NO: 2388172 - RNA, 19 nt, Artificial Sequence
  Description of Artificial Sequence: Synthetic oligonucleotide
  Sense strand starting at position 2445 of SEQ ID NO: 1886107
gccaauaaagccuagauga

SEQ ID NO: 2388173 - RNA, 19 nt, Artificial Sequence
  Description of Artificial Sequence: Synthetic oligonucleotide
  Antisense strand to SEQ ID NO: 2388172
ucaucuaggcuuuauuggc

SEQ ID NO: 2388174 - RNA, 19 nt, Artificial Sequence
  Description of Artificial Sequence: Synthetic oligonucleotide
  Sense strand starting at position 2472 of SEQ ID NO: 1886107
aggucacacugcuuguuaa

SEQ ID NO: 2388175 - RNA, 19 nt, Artificial Sequence
  Description of Artificial Sequence: Synthetic oligonucleotide
  Antisense strand to SEQ ID NO: 2388174
uuaacaagcagugugaccu

SEQ ID NO: 2388176 - RNA, 19 nt, Artificial Sequence
  Description of Artificial Sequence: Synthetic oligonucleotide
  Sense strand starting at position 2473 of SEQ ID NO: 1886107
ggucacacugcuuguuaau

SEQ ID NO: 2388177 - RNA, 19 nt, Artificial Sequence
  Description of Artificial Sequence: Synthetic oligonucleotide
  Antisense strand to SEQ ID NO: 2388176
auuaacaagcagugugacc

SEQ ID NO: 2388178 - RNA, 19 nt, Artificial Sequence
  Description of Artificial Sequence: Synthetic oligonucleotide
  Sense strand starting at position 2484 of SEQ ID NO: 1886107
uuguuaauggcagagucaa

SEQ ID NO: 2388179 - RNA, 19 nt, Artificial Sequence
  Description of Artificial Sequence: Synthetic oligonucleotide
  Antisense strand to SEQ ID NO: 2388178
uugacucugccauuaacaa

SEQ ID NO: 2388180 - RNA, 19 nt, Artificial Sequence
  Description of Artificial Sequence: Synthetic oligonucleotide
  Sense strand starting at position 2540 of SEQ ID NO: 1886107
aacugauugucggcuaaga

SEQ ID NO: 2388181 - RNA, 19 nt, Artificial Sequence
  Description of Artificial Sequence: Synthetic oligonucleotide
  Antisense strand to SEQ ID NO: 2388180
ucuuagccgacaaucaguu

SEQ ID NO: 2388182 - RNA, 19 nt, Artificial Sequence
  Description of Artificial Sequence: Synthetic oligonucleotide
  Sense strand starting at position 2542 of SEQ ID NO: 1886107
cugauugucggcuaagauu

SEQ ID NO: 2388183 - RNA, 19 nt, Artificial Sequence
  Description of Artificial Sequence: Synthetic oligonucleotide
  Antisense strand to SEQ ID NO: 2388182
aaucuuagccgacaaucag

SEQ ID NO: 2388184 - RNA, 19 nt, Artificial Sequence
  Description of Artificial Sequence: Synthetic oligonucleotide
  Sense strand starting at position 2595 of SEQ ID NO: 1886107
cgcaauauuugacgaacau

SEQ ID NO: 2388185 - RNA, 19 nt, Artificial Sequence
  Description of Artificial Sequence: Synthetic oligonucleotide
  Antisense strand to SEQ ID NO: 2388184
auguucgucaaauauugcg

SEQ ID NO: 2388186 - RNA, 19 nt, Artificial Sequence
  Description of Artificial Sequence: Synthetic oligonucleotide
  Sense strand starting at position 2984 of SEQ ID NO: 1886107
uaggauuccuuguucuaag

SEQ ID NO: 2388187 - RNA, 19 nt, Artificial Sequence
  Description of Artificial Sequence: Synthetic oligonucleotide
  Antisense strand to SEQ ID NO: 2388186
cuuagaacaaggaauccua

SEQ ID NO: 2388188 - RNA, 19 nt, Artificial Sequence
  Description of Artificial Sequence: Synthetic oligonucleotide
  Sense strand starting at position 2985 of SEQ ID NO: 1886107
aggauuccuuguucuaagu

SEQ ID NO: 2388189 - RNA, 19 nt, Artificial Sequence
  Description of Artificial Sequence: Synthetic oligonucleotide
  Antisense strand to SEQ ID NO: 2388188
acuuagaacaaggaauccu

SEQ ID NO: 2388190 - RNA, 19 nt, Artificial Sequence
  Description of Artificial Sequence: Synthetic oligonucleotide
  Sense strand starting at position 3133 of SEQ ID NO: 1886107
ccuuuauguugaccucauu

SEQ ID NO: 2388191 - RNA, 19 nt, Artificial Sequence
  Description of Artificial Sequence: Synthetic oligonucleotide
  Antisense strand to SEQ ID NO: 2388190
aaugaggucaacauaaagg

SEQ ID NO: 2388192 - RNA, 19 nt, Artificial Sequence
  Description of Artificial Sequence: Synthetic oligonucleotide
  Sense strand starting at position 3510 of SEQ ID NO: 1886107
uugguaguauaacuaugua

SEQ ID NO: 2388193 - RNA, 19 nt, Artificial Sequence
  Description of Artificial Sequence: Synthetic oligonucleotide
  Antisense strand to SEQ ID NO: 2388192
uacauaguuauacuaccaa

SEQ ID NO: 2388194 - RNA, 19 nt, Artificial Sequence
  Description of Artificial Sequence: Synthetic oligonucleotide
  Sense strand starting at position 3684 of SEQ ID NO: 1886107
ggaagacugccugagcuga

SEQ ID NO: 2388195 - RNA, 19 nt, Artificial Sequence
  Description of Artificial Sequence: Synthetic oligonucleotide
  Antisense strand to SEQ ID NO: 2388194
ucagcucaggcagucuucc

SEQ ID NO: 2388196 - RNA, 19 nt, Artificial Sequence
  Description of Artificial Sequence: Synthetic oligonucleotide
  Sense strand starting at position 3823 of SEQ ID NO: 1886107
auggguugagccugggaga

SEQ ID NO: 2388197 - RNA, 19 nt, Artificial Sequence
  Description of Artificial Sequence: Synthetic oligonucleotide
  Antisense strand to SEQ ID NO: 2388196
ucucccaggcucaacccau

SEQ ID NO: 2388198 - RNA, 19 nt, Artificial Sequence
  Description of Artificial Sequence: Synthetic oligonucleotide
  Sense strand starting at position 3824 of SEQ ID NO: 1886107
uggguugagccugggagau

SEQ ID NO: 2388199 - RNA, 19 nt, Artificial Sequence
  Description of Artificial Sequence: Synthetic oligonucleotide
  Antisense strand to SEQ ID NO: 2388198
aucucccaggcucaaccca

SEQ ID NO: 2388200 - RNA, 19 nt, Artificial Sequence
  Description of Artificial Sequence: Synthetic oligonucleotide
  Sense strand starting at position 30 of SEQ ID NO: 1886108
gggcaugguggcuauuaau

SEQ ID NO: 2388201 - RNA, 19 nt, Artificial Sequence
  Description of Artificial Sequence: Synthetic oligonucleotide
  Antisense strand to SEQ ID NO: 2388200
auuaauagccaccaugccc

SEQ ID NO: 2388202 - RNA, 19 nt, Artificial Sequence
  Description of Artificial Sequence: Synthetic oligonucleotide
  Sense strand starting at position 37 of SEQ ID NO: 1886108
guggcuauuaaugagccaa

SEQ ID NO: 2388203 - RNA, 19 nt, Artificial Sequence
  Description of Artificial Sequence: Synthetic oligonucleotide
  Antisense strand to SEQ ID NO: 2388202
uuggcucauuaauagccac

SEQ ID NO: 2388204 - RNA, 19 nt, Artificial Sequence
  Description of Artificial Sequence: Synthetic oligonucleotide
  Sense strand starting at position 39 of SEQ ID NO: 1886108
ggcuauuaaugagccaaag

SEQ ID NO: 2388205 - RNA, 19 nt, Artificial Sequence
  Description of Artificial Sequence: Synthetic oligonucleotide
  Antisense strand to SEQ ID NO: 2388204
cuuuggcucauuaauagcc

SEQ ID NO: 2388206 - RNA, 19 nt, Artificial Sequence
  Description of Artificial Sequence: Synthetic oligonucleotide
  Sense strand starting at position 110 of SEQ ID NO: 1886108
agagucaucuuggcccaga

SEQ ID NO: 2388207 - RNA, 19 nt, Artificial Sequence
  Description of Artificial Sequence: Synthetic oligonucleotide
  Antisense strand to SEQ ID NO: 2388206
ucugggccaagaugacucu

SEQ ID NO: 2388208 - RNA, 19 nt, Artificial Sequence
  Description of Artificial Sequence: Synthetic oligonucleotide
  Sense strand starting at position 129 of SEQ ID NO: 1886108
gucagacucuaguucccau

SEQ ID NO: 2388209 - RNA, 19 nt, Artificial Sequence
  Description of Artificial Sequence: Synthetic oligonucleotide
  Antisense strand to SEQ ID NO: 2388208
augggaacuagagucugac

SEQ ID NO: 2388210 - RNA, 19 nt, Artificial Sequence
  Description of Artificial Sequence: Synthetic oligonucleotide
  Sense strand starting at position 132 of SEQ ID NO: 1886108
agacucuaguucccauauu

SEQ ID NO: 2388211 - RNA, 19 nt, Artificial Sequence
  Description of Artificial Sequence: Synthetic oligonucleotide
  Antisense strand to SEQ ID NO: 2388210
aauaugggaacuagagucu

SEQ ID NO: 2388212 - RNA, 19 nt, Artificial Sequence
  Description of Artificial Sequence: Synthetic oligonucleotide
  Sense strand starting at position 201 of SEQ ID NO: 1886108
uauugaggaccugguacau

SEQ ID NO: 2388213 - RNA, 19 nt, Artificial Sequence
  Description of Artificial Sequence: Synthetic oligonucleotide
  Antisense strand to SEQ ID NO: 2388212
auguaccagguccucaaua

SEQ ID NO: 2388214 - RNA, 19 nt, Artificial Sequence
  Description of Artificial Sequence: Synthetic oligonucleotide
  Sense strand starting at position 291 of SEQ ID NO: 1886108
aggacugacuauccucauu

SEQ ID NO: 2388215 - RNA, 19 nt, Artificial Sequence
  Description of Artificial Sequence: Synthetic oligonucleotide
  Antisense strand to SEQ ID NO: 2388214
aaugaggauagucaguccu

SEQ ID NO: 2388216 - RNA, 19 nt, Artificial Sequence
  Description of Artificial Sequence: Synthetic oligonucleotide
  Sense strand starting at position 372 of SEQ ID NO: 1886108
gaugucuauguagguguaa

SEQ ID NO: 2388217 - RNA, 19 nt, Artificial Sequence
  Description of Artificial Sequence: Synthetic oligonucleotide
  Antisense strand to SEQ ID NO: 2388216
uuacaccuacauagacauc

SEQ ID NO: 2388218 - RNA, 19 nt, Artificial Sequence
  Description of Artificial Sequence: Synthetic oligonucleotide
  Sense strand starting at position 451 of SEQ ID NO: 1886108
guugacuucuagcuaggga

SEQ ID NO: 2388219 - RNA, 19 nt, Artificial Sequence
  Description of Artificial Sequence: Synthetic oligonucleotide
  Antisense strand to SEQ ID NO: 2388218
ucccuagcuagaagucaac

SEQ ID NO: 2388220 - RNA, 19 nt, Artificial Sequence
  Description of Artificial Sequence: Synthetic oligonucleotide
  Sense strand starting at position 1177 of SEQ ID NO: 1886108
acugccauuuaugagugaa

SEQ ID NO: 2388221 - RNA, 19 nt, Artificial Sequence
  Description of Artificial Sequence: Synthetic oligonucleotide
  Antisense strand to SEQ ID NO: 2388220
uucacucauaaauggcagu

SEQ ID NO: 2388222 - RNA, 19 nt, Artificial Sequence
  Description of Artificial Sequence: Synthetic oligonucleotide
  Sense strand starting at position 1369 of SEQ ID NO: 1886108
agagcugucugguccuaag

SEQ ID NO: 2388223 - RNA, 19 nt, Artificial Sequence
  Description of Artificial Sequence: Synthetic oligonucleotide
  Antisense strand to SEQ ID NO: 2388222
cuuaggaccagacagcucu

SEQ ID NO: 2388224 - RNA, 19 nt, Artificial Sequence
  Description of Artificial Sequence: Synthetic oligonucleotide
  Sense strand starting at position 1456 of SEQ ID NO: 1886108
cucuuagugucuucugaau

SEQ ID NO: 2388225 - RNA, 19 nt, Artificial Sequence
  Description of Artificial Sequence: Synthetic oligonucleotide
  Antisense strand to SEQ ID NO: 2388224
auucagaagacacuaagag

SEQ ID NO: 2388226 - RNA, 19 nt, Artificial Sequence
  Description of Artificial Sequence: Synthetic oligonucleotide
  Sense strand starting at position 1480 of SEQ ID NO: 1886108
uuaugaacuguuugaucuu

SEQ ID NO: 2388227 - RNA, 19 nt, Artificial Sequence
  Description of Artificial Sequence: Synthetic oligonucleotide
  Antisense strand to SEQ ID NO: 2388226
aagaucaaacaguucauaa

SEQ ID NO: 2388228 - RNA, 19 nt, Artificial Sequence
  Description of Artificial Sequence: Synthetic oligonucleotide
  Sense strand starting at position 1525 of SEQ ID NO: 1886108
cuagaugucuucuugucau

SEQ ID NO: 2388229 - RNA, 19 nt, Artificial Sequence
  Description of Artificial Sequence: Synthetic oligonucleotide
  Antisense strand to SEQ ID NO: 2388228
augacaagaagacaucuag

SEQ ID NO: 2388230 - RNA, 19 nt, Artificial Sequence
  Description of Artificial Sequence: Synthetic oligonucleotide
  Sense strand starting at position 1612 of SEQ ID NO: 1886108
uuguuucagugggcaauga

SEQ ID NO: 2388231 - RNA, 19 nt, Artificial Sequence
  Description of Artificial Sequence: Synthetic oligonucleotide
  Antisense strand to SEQ ID NO: 2388230
ucauugcccacugaaacaa

SEQ ID NO: 2388232 - RNA, 19 nt, Artificial Sequence
  Description of Artificial Sequence: Synthetic oligonucleotide
  Sense strand starting at position 1715 of SEQ ID NO: 1886108
gcauuagaaucacucuaag

SEQ ID NO: 2388233 - RNA, 19 nt, Artificial Sequence
  Description of Artificial Sequence: Synthetic oligonucleotide
  Antisense strand to SEQ ID NO: 2388232
cuuagagugauucuaaugc

SEQ ID NO: 2388234 - RNA, 19 nt, Artificial Sequence
  Description of Artificial Sequence: Synthetic oligonucleotide
  Sense strand starting at position 1727 of SEQ ID NO: 1886108
cucuaagcacucuacgaua

SEQ ID NO: 2388235 - RNA, 19 nt, Artificial Sequence
  Description of Artificial Sequence: Synthetic oligonucleotide
  Antisense strand to SEQ ID NO: 2388234
uaucguagagugcuuagag

SEQ ID NO: 2388236 - RNA, 19 nt, Artificial Sequence
  Description of Artificial Sequence: Synthetic oligonucleotide
  Sense strand starting at position 1729 of SEQ ID NO: 1886108
cuaagcacucuacgauaca

SEQ ID NO: 2388237 - RNA, 19 nt, Artificial Sequence
  Description of Artificial Sequence: Synthetic oligonucleotide
  Antisense strand to SEQ ID NO: 2388236
uguaucguagagugcuuag

SEQ ID NO: 2388238 - RNA, 19 nt, Artificial Sequence
  Description of Artificial Sequence: Synthetic oligonucleotide
  Sense strand starting at position 1732 of SEQ ID NO: 1886108
agcacucuacgauacacau

SEQ ID NO: 2388239 - RNA, 19 nt, Artificial Sequence
  Description of Artificial Sequence: Synthetic oligonucleotide
  Antisense strand to SEQ ID NO: 2388238
auguguaucguagagugcu

SEQ ID NO: 2388240 - RNA, 19 nt, Artificial Sequence
  Description of Artificial Sequence: Synthetic oligonucleotide
  Sense strand starting at position 1802 of SEQ ID NO: 1886108
augucacacucauuccaga

SEQ ID NO: 2388241 - RNA, 19 nt, Artificial Sequence
  Description of Artificial Sequence: Synthetic oligonucleotide
  Antisense strand to SEQ ID NO: 2388240
ucuggaaugagugugacau

SEQ ID NO: 2388242 - RNA, 19 nt, Artificial Sequence
  Description of Artificial Sequence: Synthetic oligonucleotide
  Sense strand starting at position 1834 of SEQ ID NO: 1886108
aguagaauugagggcauau

SEQ ID NO: 2388243 - RNA, 19 nt, Artificial Sequence
  Description of Artificial Sequence: Synthetic oligonucleotide
  Antisense strand to SEQ ID NO: 2388242
auaugcccucaauucuacu

SEQ ID NO: 2388244 - RNA, 19 nt, Artificial Sequence
  Description of Artificial Sequence: Synthetic oligonucleotide
  Sense strand starting at position 1852 of SEQ ID NO: 1886108
uucguacuguauuuagaau

SEQ ID NO: 2388245 - RNA, 19 nt, Artificial Sequence
  Description of Artificial Sequence: Synthetic oligonucleotide
  Antisense strand to SEQ ID NO: 2388244
auucuaaauacaguacgaa

SEQ ID NO: 2388246 - RNA, 19 nt, Artificial Sequence
  Description of Artificial Sequence: Synthetic oligonucleotide
  Sense strand starting at position 2047 of SEQ ID NO: 1886108
agagcagaggcgugaucau

SEQ ID NO: 2388247 - RNA, 19 nt, Artificial Sequence
  Description of Artificial Sequence: Synthetic oligonucleotide
  Antisense strand to SEQ ID NO: 2388246
augaucacgccucugcucu

SEQ ID NO: 2388248 - RNA, 19 nt, Artificial Sequence
  Description of Artificial Sequence: Synthetic oligonucleotide
  Sense strand starting at position 2345 of SEQ ID NO: 1886108
auuguuaagagcuggaaga

SEQ ID NO: 2388249 - RNA, 19 nt, Artificial Sequence
  Description of Artificial Sequence: Synthetic oligonucleotide
  Antisense strand to SEQ ID NO: 2388248
ucuuccagcucuuaacaau

SEQ ID NO: 2388250 - RNA, 19 nt, Artificial Sequence
  Description of Artificial Sequence: Synthetic oligonucleotide
  Sense strand starting at position 2346 of SEQ ID NO: 1886108
uuguuaagagcuggaagaa

SEQ ID NO: 2388251 - RNA, 19 nt, Artificial Sequence
  Description of Artificial Sequence: Synthetic oligonucleotide
  Antisense strand to SEQ ID NO: 2388250
uucuuccagcucuuaacaa

SEQ ID NO: 2388252 - RNA, 19 nt, Artificial Sequence
  Description of Artificial Sequence: Synthetic oligonucleotide
  Sense strand starting at position 2381 of SEQ ID NO: 1886108
uguggacccuguccuuaaa

SEQ ID NO: 2388253 - RNA, 19 nt, Artificial Sequence
  Description of Artificial Sequence: Synthetic oligonucleotide
  Antisense strand to SEQ ID NO: 2388252
uuuaaggacaggguccaca

SEQ ID NO: 2388254 - RNA, 19 nt, Artificial Sequence
  Description of Artificial Sequence: Synthetic oligonucleotide
  Sense strand starting at position 2383 of SEQ ID NO: 1886108
uggacccuguccuuaaaga

SEQ ID NO: 2388255 - RNA, 19 nt, Artificial Sequence
  Description of Artificial Sequence: Synthetic oligonucleotide
  Antisense strand to SEQ ID NO: 2388254
ucuuuaaggacagggucca

SEQ ID NO: 2388256 - RNA, 19 nt, Artificial Sequence
  Description of Artificial Sequence: Synthetic oligonucleotide
  Sense strand starting at position 2406 of SEQ ID NO: 1886108
agaaucaaguaagaaagau

SEQ ID NO: 2388257 - RNA, 19 nt, Artificial Sequence
  Description of Artificial Sequence: Synthetic oligonucleotide
  Antisense strand to SEQ ID NO: 2388256
aucuuucuuacuugauucu

SEQ ID NO: 2388258 - RNA, 19 nt, Artificial Sequence
  Description of Artificial Sequence: Synthetic oligonucleotide
  Sense strand starting at position 2506 of SEQ ID NO: 1886108
agagaaggguggccuuaaa

SEQ ID NO: 2388259 - RNA, 19 nt, Artificial Sequence
  Description of Artificial Sequence: Synthetic oligonucleotide
  Antisense strand to SEQ ID NO: 2388258
uuuaaggccacccuucucu

SEQ ID NO: 2388260 - RNA, 19 nt, Artificial Sequence
  Description of Artificial Sequence: Synthetic oligonucleotide
  Sense strand starting at position 2983 of SEQ ID NO: 1886108
uauauaguugacugcagua

SEQ ID NO: 2388261 - RNA, 19 nt, Artificial Sequence
  Description of Artificial Sequence: Synthetic oligonucleotide
  Antisense strand to SEQ ID NO: 2388260
uacugcagucaacuauaua

SEQ ID NO: 2388262 - RNA, 19 nt, Artificial Sequence
  Description of Artificial Sequence: Synthetic oligonucleotide
  Sense strand starting at position 2985 of SEQ ID NO: 1886108
uauaguugacugcaguaaa

SEQ ID NO: 2388263 - RNA, 19 nt, Artificial Sequence
  Description of Artificial Sequence: Synthetic oligonucleotide
  Antisense strand to SEQ ID NO: 2388262
uuuacugcagucaacuaua

SEQ ID NO: 2388264 - RNA, 19 nt, Artificial Sequence
  Description of Artificial Sequence: Synthetic oligonucleotide
  Sense strand starting at position 2988 of SEQ ID NO: 1886108
aguugacugcaguaaagua

SEQ ID NO: 2388265 - RNA, 19 nt, Artificial Sequence
  Description of Artificial Sequence: Synthetic oligonucleotide
  Antisense strand to SEQ ID NO: 2388264
uacuuuacugcagucaacu

SEQ ID NO: 2388266 - RNA, 19 nt, Artificial Sequence
  Description of Artificial Sequence: Synthetic oligonucleotide
  Sense strand starting at position 3050 of SEQ ID NO: 1886108
ccuauuaugagucaggguu

SEQ ID NO: 2388267 - RNA, 19 nt, Artificial Sequence
  Description of Artificial Sequence: Synthetic oligonucleotide
  Antisense strand to SEQ ID NO: 2388266
aacccugacucauaauagg

SEQ ID NO: 2388268 - RNA, 19 nt, Artificial Sequence
  Description of Artificial Sequence: Synthetic oligonucleotide
  Sense strand starting at position 3062 of SEQ ID NO: 1886108
caggguucuccgugaaauc

SEQ ID NO: 2388269 - RNA, 19 nt, Artificial Sequence
  Description of Artificial Sequence: Synthetic oligonucleotide
  Antisense strand to SEQ ID NO: 2388268
gauuucacggagaacccug

SEQ ID NO: 2388270 - RNA, 19 nt, Artificial Sequence
  Description of Artificial Sequence: Synthetic oligonucleotide
  Sense strand starting at position 3063 of SEQ ID NO: 1886108
aggguucuccgugaaauca

SEQ ID NO: 2388271 - RNA, 19 nt, Artificial Sequence
  Description of Artificial Sequence: Synthetic oligonucleotide
  Antisense strand to SEQ ID NO: 2388270
ugauuucacggagaacccu

SEQ ID NO: 2388272 - RNA, 19 nt, Artificial Sequence
  Description of Artificial Sequence: Synthetic oligonucleotide
  Sense strand starting at position 3469 of SEQ ID NO: 1886108
gaaccagaguucuuagcug

SEQ ID NO: 2388273 - RNA, 19 nt, Artificial Sequence
  Description of Artificial Sequence: Synthetic oligonucleotide
  Antisense strand to SEQ ID NO: 2388272
cagcuaagaacucugguuc

SEQ ID NO: 2388274 - RNA, 19 nt, Artificial Sequence
  Description of Artificial Sequence: Synthetic oligonucleotide
  Sense strand starting at position 3485 of SEQ ID NO: 1886108
cugccaggcuuauucuaaa

SEQ ID NO: 2388275 - RNA, 19 nt, Artificial Sequence
  Description of Artificial Sequence: Synthetic oligonucleotide
  Antisense strand to SEQ ID NO: 2388274
uuuagaauaagccuggcag

SEQ ID NO: 2388276 - RNA, 19 nt, Artificial Sequence
  Description of Artificial Sequence: Synthetic oligonucleotide
  Sense strand starting at position 3590 of SEQ ID NO: 1886108
cucggauguugguuaauuu

SEQ ID NO: 2388277 - RNA, 19 nt, Artificial Sequence
  Description of Artificial Sequence: Synthetic oligonucleotide
  Antisense strand to SEQ ID NO: 2388276
aaauuaaccaacauccgag

SEQ ID NO: 2388278 - RNA, 19 nt, Artificial Sequence
  Description of Artificial Sequence: Synthetic oligonucleotide
  Sense strand starting at position 3724 of SEQ ID NO: 1886108
aagagagcucacuacuguu

SEQ ID NO: 2388279 - RNA, 19 nt, Artificial Sequence
  Description of Artificial Sequence: Synthetic oligonucleotide
  Antisense strand to SEQ ID NO: 2388278
aacaguagugagcucucuu

SEQ ID NO: 2388280 - RNA, 19 nt, Artificial Sequence
  Description of Artificial Sequence: Synthetic oligonucleotide
  Sense strand starting at position 166 of SEQ ID NO: 1886109
guuugucuuagagacagua

SEQ ID NO: 2388281 - RNA, 19 nt, Artificial Sequence
  Description of Artificial Sequence: Synthetic oligonucleotide
  Antisense strand to SEQ ID NO: 2388280
uacugucucuaagacaaac

SEQ ID NO: 2388282 - RNA, 19 nt, Artificial Sequence
  Description of Artificial Sequence: Synthetic oligonucleotide
  Sense strand starting at position 217 of SEQ ID NO: 1886109
uccagagaugccgacagau

SEQ ID NO: 2388283 - RNA, 19 nt, Artificial Sequence
  Description of Artificial Sequence: Synthetic oligonucleotide
  Antisense strand to SEQ ID NO: 2388282
aucugucggcaucucugga

SEQ ID NO: 2388284 - RNA, 19 nt, Artificial Sequence
  Description of Artificial Sequence: Synthetic oligonucleotide
  Sense strand starting at position 230 of SEQ ID NO: 1886109
acagauuaguacuucuaca

SEQ ID NO: 2388285 - RNA, 19 nt, Artificial Sequence
  Description of Artificial Sequence: Synthetic oligonucleotide
  Antisense strand to SEQ ID NO: 2388284
uguagaaguacuaaucugu

SEQ ID NO: 2388286 - RNA, 19 nt, Artificial Sequence
  Description of Artificial Sequence: Synthetic oligonucleotide
  Sense strand starting at position 262 of SEQ ID NO: 1886109
ugugcugagggaugagaua

SEQ ID NO: 2388287 - RNA, 19 nt, Artificial Sequence
  Description of Artificial Sequence: Synthetic oligonucleotide
  Antisense strand to SEQ ID NO: 2388286
uaucucaucccucagcaca

SEQ ID NO: 2388288 - RNA, 19 nt, Artificial Sequence
  Description of Artificial Sequence: Synthetic oligonucleotide
  Sense strand starting at position 271 of SEQ ID NO: 1886109
ggaugagauacuugcagca

SEQ ID NO: 2388289 - RNA, 19 nt, Artificial Sequence
  Description of Artificial Sequence: Synthetic oligonucleotide
  Antisense strand to SEQ ID NO: 2388288
ugcugcaaguaucucaucc

SEQ ID NO: 2388290 - RNA, 19 nt, Artificial Sequence
  Description of Artificial Sequence: Synthetic oligonucleotide
  Sense strand starting at position 304 of SEQ ID NO: 1886109
cucuuagaccacugaguaa

SEQ ID NO: 2388291 - RNA, 19 nt, Artificial Sequence
  Description of Artificial Sequence: Synthetic oligonucleotide
  Antisense strand to SEQ ID NO: 2388290
uuacucaguggucuaagag

SEQ ID NO: 2388292 - RNA, 19 nt, Artificial Sequence
  Description of Artificial Sequence: Synthetic oligonucleotide
  Sense strand starting at position 405 of SEQ ID NO: 1886109
auuccagguuucuuguaaa

SEQ ID NO: 2388293 - RNA, 19 nt, Artificial Sequence
  Description of Artificial Sequence: Synthetic oligonucleotide
  Antisense strand to SEQ ID NO: 2388292
uuuacaagaaaccuggaau

SEQ ID NO: 2388294 - RNA, 19 nt, Artificial Sequence
  Description of Artificial Sequence: Synthetic oligonucleotide
  Sense strand starting at position 525 of SEQ ID NO: 1886109
aggaacguuucuguacuau

SEQ ID NO: 2388295 - RNA, 19 nt, Artificial Sequence
  Description of Artificial Sequence: Synthetic oligonucleotide
  Antisense strand to SEQ ID NO: 2388294
auaguacagaaacguuccu

SEQ ID NO: 2388296 - RNA, 19 nt, Artificial Sequence
  Description of Artificial Sequence: Synthetic oligonucleotide
  Sense strand starting at position 535 of SEQ ID NO: 1886109
cuguacuaucagcauguuu

SEQ ID NO: 2388297 - RNA, 19 nt, Artificial Sequence
  Description of Artificial Sequence: Synthetic oligonucleotide
  Antisense strand to SEQ ID NO: 2388296
aaacaugcugauaguacag

SEQ ID NO: 2388298 - RNA, 19 nt, Artificial Sequence
  Description of Artificial Sequence: Synthetic oligonucleotide
  Sense strand starting at position 906 of SEQ ID NO: 1886109
guggcagacuuauucuaug

SEQ ID NO: 2388299 - RNA, 19 nt, Artificial Sequence
  Description of Artificial Sequence: Synthetic oligonucleotide
  Antisense strand to SEQ ID NO: 2388298
cauagaauaagucugccac

SEQ ID NO: 2388300 - RNA, 19 nt, Artificial Sequence
  Description of Artificial Sequence: Synthetic oligonucleotide
  Sense strand starting at position 911 of SEQ ID NO: 1886109
agacuuauucuauggucca

SEQ ID NO: 2388301 - RNA, 19 nt, Artificial Sequence
  Description of Artificial Sequence: Synthetic oligonucleotide
  Antisense strand to SEQ ID NO: 2388300
uggaccauagaauaagucu

SEQ ID NO: 2388302 - RNA, 19 nt, Artificial Sequence
  Description of Artificial Sequence: Synthetic oligonucleotide
  Sense strand starting at position 948 of SEQ ID NO: 1886109
auagguuccuuccugucaa

SEQ ID NO: 2388303 - RNA, 19 nt, Artificial Sequence
  Description of Artificial Sequence: Synthetic oligonucleotide
  Antisense strand to SEQ ID NO: 2388302
uugacaggaaggaaccuau

SEQ ID NO: 2388304 - RNA, 19 nt, Artificial Sequence
  Description of Artificial Sequence: Synthetic oligonucleotide
  Sense strand starting at position 1372 of SEQ ID NO: 1886109
agugcuguaguucaaggau

SEQ ID NO: 2388305 - RNA, 19 nt, Artificial Sequence
  Description of Artificial Sequence: Synthetic oligonucleotide
  Antisense strand to SEQ ID NO: 2388304
auccuugaacuacagcacu

SEQ ID NO: 2388306 - RNA, 19 nt, Artificial Sequence
  Description of Artificial Sequence: Synthetic oligonucleotide
  Sense strand starting at position 1424 of SEQ ID NO: 1886109
aaugauagcuugucggaag

SEQ ID NO: 2388307 - RNA, 19 nt, Artificial Sequence
  Description of Artificial Sequence: Synthetic oligonucleotide
  Antisense strand to SEQ ID NO: 2388306
cuuccgacaagcuaucauu

SEQ ID NO: 2388308 - RNA, 19 nt, Artificial Sequence
  Description of Artificial Sequence: Synthetic oligonucleotide
  Sense strand starting at position 1527 of SEQ ID NO: 1886109
gugauuugaaguggcggua

SEQ ID NO: 2388309 - RNA, 19 nt, Artificial Sequence
  Description of Artificial Sequence: Synthetic oligonucleotide
  Antisense strand to SEQ ID NO: 2388308
uaccgccacuucaaaucac

SEQ ID NO: 2388310 - RNA, 19 nt, Artificial Sequence
  Description of Artificial Sequence: Synthetic oligonucleotide
  Sense strand starting at position 1532 of SEQ ID NO: 1886109
uugaaguggcgguaggauu

SEQ ID NO: 2388311 - RNA, 19 nt, Artificial Sequence
  Description of Artificial Sequence: Synthetic oligonucleotide
  Antisense strand to SEQ ID NO: 2388310
aauccuaccgccacuucaa

SEQ ID NO: 2388312 - RNA, 19 nt, Artificial Sequence
  Description of Artificial Sequence: Synthetic oligonucleotide
  Sense strand starting at position 1616 of SEQ ID NO: 1886109
gacaguguucuugggugga

SEQ ID NO: 2388313 - RNA, 19 nt, Artificial Sequence
  Description of Artificial Sequence: Synthetic oligonucleotide
  Antisense strand to SEQ ID NO: 2388312
uccacccaagaacacuguc

SEQ ID NO: 2388314 - RNA, 19 nt, Artificial Sequence
  Description of Artificial Sequence: Synthetic oligonucleotide
  Sense strand starting at position 1618 of SEQ ID NO: 1886109
caguguucuuggguggaag

SEQ ID NO: 2388315 - RNA, 19 nt, Artificial Sequence
  Description of Artificial Sequence: Synthetic oligonucleotide
  Antisense strand to SEQ ID NO: 2388314
cuuccacccaagaacacug

SEQ ID NO: 2388316 - RNA, 19 nt, Artificial Sequence
  Description of Artificial Sequence: Synthetic oligonucleotide
  Sense strand starting at position 1889 of SEQ ID NO: 1886109
guuacacugucucccuaaa

SEQ ID NO: 2388317 - RNA, 19 nt, Artificial Sequence
  Description of Artificial Sequence: Synthetic oligonucleotide
  Antisense strand to SEQ ID NO: 2388316
uuuagggagacaguguaac

SEQ ID NO: 2388318 - RNA, 19 nt, Artificial Sequence
  Description of Artificial Sequence: Synthetic oligonucleotide
  Sense strand starting at position 1990 of SEQ ID NO: 1886109
cuaggaauuggucacagcu

SEQ ID NO: 2388319 - RNA, 19 nt, Artificial Sequence
  Description of Artificial Sequence: Synthetic oligonucleotide
  Antisense strand to SEQ ID NO: 2388318
agcugugaccaauuccuag

SEQ ID NO: 2388320 - RNA, 19 nt, Artificial Sequence
  Description of Artificial Sequence: Synthetic oligonucleotide
  Sense strand starting at position 2073 of SEQ ID NO: 1886109
cagugagaucucuagaguu

SEQ ID NO: 2388321 - RNA, 19 nt, Artificial Sequence
  Description of Artificial Sequence: Synthetic oligonucleotide
  Antisense strand to SEQ ID NO: 2388320
aacucuagagaucucacug

SEQ ID NO: 2388322 - RNA, 19 nt, Artificial Sequence
  Description of Artificial Sequence: Synthetic oligonucleotide
  Sense strand starting at position 2079 of SEQ ID NO: 1886109
gaucucuagaguuggguga

SEQ ID NO: 2388323 - RNA, 19 nt, Artificial Sequence
  Description of Artificial Sequence: Synthetic oligonucleotide
  Antisense strand to SEQ ID NO: 2388322
ucacccaacucuagagauc

SEQ ID NO: 2388324 - RNA, 19 nt, Artificial Sequence
  Description of Artificial Sequence: Synthetic oligonucleotide
  Sense strand starting at position 2131 of SEQ ID NO: 1886109
gacggaguuuaaccaguau

SEQ ID NO: 2388325 - RNA, 19 nt, Artificial Sequence
  Description of Artificial Sequence: Synthetic oligonucleotide
  Antisense strand to SEQ ID NO: 2388324
auacugguuaaacuccguc

SEQ ID NO: 2388326 - RNA, 19 nt, Artificial Sequence
  Description of Artificial Sequence: Synthetic oligonucleotide
  Sense strand starting at position 2318 of SEQ ID NO: 1886109
gaagcaugccauuguauaa

SEQ ID NO: 2388327 - RNA, 19 nt, Artificial Sequence
  Description of Artificial Sequence: Synthetic oligonucleotide
  Antisense strand to SEQ ID NO: 2388326
uuauacaauggcaugcuuc

SEQ ID NO: 2388328 - RNA, 19 nt, Artificial Sequence
  Description of Artificial Sequence: Synthetic oligonucleotide
  Sense strand starting at position 2543 of SEQ ID NO: 1886109
guugcaaacccauaaugau

SEQ ID NO: 2388329 - RNA, 19 nt, Artificial Sequence
  Description of Artificial Sequence: Synthetic oligonucleotide
  Antisense strand to SEQ ID NO: 2388328
aucauuauggguuugcaac

SEQ ID NO: 2388330 - RNA, 19 nt, Artificial Sequence
  Description of Artificial Sequence: Synthetic oligonucleotide
  Sense strand starting at position 2557 of SEQ ID NO: 1886109
augauuugccacugcuauc

SEQ ID NO: 2388331 - RNA, 19 nt, Artificial Sequence
  Description of Artificial Sequence: Synthetic oligonucleotide
  Antisense strand to SEQ ID NO: 2388330
gauagcaguggcaaaucau

SEQ ID NO: 2388332 - RNA, 19 nt, Artificial Sequence
  Description of Artificial Sequence: Synthetic oligonucleotide
  Sense strand starting at position 2596 of SEQ ID NO: 1886109
aucccuuuccaguagguga

SEQ ID NO: 2388333 - RNA, 19 nt, Artificial Sequence
  Description of Artificial Sequence: Synthetic oligonucleotide
  Antisense strand to SEQ ID NO: 2388332
ucaccuacuggaaagggau

SEQ ID NO: 2388334 - RNA, 19 nt, Artificial Sequence
  Description of Artificial Sequence: Synthetic oligonucleotide
  Sense strand starting at position 2598 of SEQ ID NO: 1886109
cccuuuccaguaggugaua

SEQ ID NO: 2388335 - RNA, 19 nt, Artificial Sequence
  Description of Artificial Sequence: Synthetic oligonucleotide
  Antisense strand to SEQ ID NO: 2388334
uaucaccuacuggaaaggg

SEQ ID NO: 2388336 - RNA, 19 nt, Artificial Sequence
  Description of Artificial Sequence: Synthetic oligonucleotide
  Sense strand starting at position 2611 of SEQ ID NO: 1886109
gugauaacauggcucagua

SEQ ID NO: 2388337 - RNA, 19 nt, Artificial Sequence
  Description of Artificial Sequence: Synthetic oligonucleotide
  Antisense strand to SEQ ID NO: 2388336
uacugagccauguuaucac

SEQ ID NO: 2388338 - RNA, 19 nt, Artificial Sequence
  Description of Artificial Sequence: Synthetic oligonucleotide
  Sense strand starting at position 2613 of SEQ ID NO: 1886109
gauaacauggcucaguaau

SEQ ID NO: 2388339 - RNA, 19 nt, Artificial Sequence
  Description of Artificial Sequence: Synthetic oligonucleotide
  Antisense strand to SEQ ID NO: 2388338
auuacugagccauguuauc

SEQ ID NO: 2388340 - RNA, 19 nt, Artificial Sequence
  Description of Artificial Sequence: Synthetic oligonucleotide
  Sense strand starting at position 3043 of SEQ ID NO: 1886109
agauacuaugccugcuuga

SEQ ID NO: 2388341 - RNA, 19 nt, Artificial Sequence
  Description of Artificial Sequence: Synthetic oligonucleotide
  Antisense strand to SEQ ID NO: 2388340
ucaagcaggcauaguaucu

SEQ ID NO: 2388342 - RNA, 19 nt, Artificial Sequence
  Description of Artificial Sequence: Synthetic oligonucleotide
  Sense strand starting at position 3069 of SEQ ID NO: 1886109
ugcuauggaucccugaaug

SEQ ID NO: 2388343 - RNA, 19 nt, Artificial Sequence
  Description of Artificial Sequence: Synthetic oligonucleotide
  Antisense strand to SEQ ID NO: 2388342
cauucagggauccauagca

SEQ ID NO: 2388344 - RNA, 19 nt, Artificial Sequence
  Description of Artificial Sequence: Synthetic oligonucleotide
  Sense strand starting at position 3080 of SEQ ID NO: 1886109
ccugaaugguagucauggu

SEQ ID NO: 2388345 - RNA, 19 nt, Artificial Sequence
  Description of Artificial Sequence: Synthetic oligonucleotide
  Antisense strand to SEQ ID NO: 2388344
accaugacuaccauucagg

SEQ ID NO: 2388346 - RNA, 19 nt, Artificial Sequence
  Description of Artificial Sequence: Synthetic oligonucleotide
  Sense strand starting at position 3081 of SEQ ID NO: 1886109
cugaaugguagucauggua

SEQ ID NO: 2388347 - RNA, 19 nt, Artificial Sequence
  Description of Artificial Sequence: Synthetic oligonucleotide
  Antisense strand to SEQ ID NO: 2388346
uaccaugacuaccauucag

SEQ ID NO: 2388348 - RNA, 19 nt, Artificial Sequence
  Description of Artificial Sequence: Synthetic oligonucleotide
  Sense strand starting at position 3113 of SEQ ID NO: 1886109
uaggaaguuccacgauaua

SEQ ID NO: 2388349 - RNA, 19 nt, Artificial Sequence
  Description of Artificial Sequence: Synthetic oligonucleotide
  Antisense strand to SEQ ID NO: 2388348
uauaucguggaacuuccua

SEQ ID NO: 2388350 - RNA, 19 nt, Artificial Sequence
  Description of Artificial Sequence: Synthetic oligonucleotide
  Sense strand starting at position 3212 of SEQ ID NO: 1886109
cucuguugaccucaucauu

SEQ ID NO: 2388351 - RNA, 19 nt, Artificial Sequence
  Description of Artificial Sequence: Synthetic oligonucleotide
  Antisense strand to SEQ ID NO: 2388350
aaugaugaggucaacagag

SEQ ID NO: 2388352 - RNA, 19 nt, Artificial Sequence
  Description of Artificial Sequence: Synthetic oligonucleotide
  Sense strand starting at position 3215 of SEQ ID NO: 1886109
uguugaccucaucauugaa

SEQ ID NO: 2388353 - RNA, 19 nt, Artificial Sequence
  Description of Artificial Sequence: Synthetic oligonucleotide
  Antisense strand to SEQ ID NO: 2388352
uucaaugaugaggucaaca

SEQ ID NO: 2388354 - RNA, 19 nt, Artificial Sequence
  Description of Artificial Sequence: Synthetic oligonucleotide
  Sense strand starting at position 3265 of SEQ ID NO: 1886109
agagguugucaucaaagca

SEQ ID NO: 2388355 - RNA, 19 nt, Artificial Sequence
  Description of Artificial Sequence: Synthetic oligonucleotide
  Antisense strand to SEQ ID NO: 2388354
ugcuuugaugacaaccucu

SEQ ID NO: 2388356 - RNA, 19 nt, Artificial Sequence
  Description of Artificial Sequence: Synthetic oligonucleotide
  Sense strand starting at position 3312 of SEQ ID NO: 1886109
cuagaaagcaucugaaggu

SEQ ID NO: 2388357 - RNA, 19 nt, Artificial Sequence
  Description of Artificial Sequence: Synthetic oligonucleotide
  Antisense strand to SEQ ID NO: 2388356
accuucagaugcuuucuag

SEQ ID NO: 2388358 - RNA, 19 nt, Artificial Sequence
  Description of Artificial Sequence: Synthetic oligonucleotide
  Sense strand starting at position 3360 of SEQ ID NO: 1886109
ggcggagucaacuauugca

SEQ ID NO: 2388359 - RNA, 19 nt, Artificial Sequence
  Description of Artificial Sequence: Synthetic oligonucleotide
  Antisense strand to SEQ ID NO: 2388358
ugcaauaguugacuccgcc

SEQ ID NO: 2388360 - RNA, 19 nt, Artificial Sequence
  Description of Artificial Sequence: Synthetic oligonucleotide
  Sense strand starting at position 104 of SEQ ID NO: 1886110
ggaucaguguucuccagga

SEQ ID NO: 2388361 - RNA, 19 nt, Artificial Sequence
  Description of Artificial Sequence: Synthetic oligonucleotide
  Antisense strand to SEQ ID NO: 2388360
uccuggagaacacugaucc

SEQ ID NO: 2388362 - RNA, 19 nt, Artificial Sequence
  Description of Artificial Sequence: Synthetic oligonucleotide
  Sense strand starting at position 106 of SEQ ID NO: 1886110
aucaguguucuccaggagu

SEQ ID NO: 2388363 - RNA, 19 nt, Artificial Sequence
  Description of Artificial Sequence: Synthetic oligonucleotide
  Antisense strand to SEQ ID NO: 2388362
acuccuggagaacacugau

SEQ ID NO: 2388364 - RNA, 19 nt, Artificial Sequence
  Description of Artificial Sequence: Synthetic oligonucleotide
  Sense strand starting at position 109 of SEQ ID NO: 1886110
aguguucuccaggagucuu

SEQ ID NO: 2388365 - RNA, 19 nt, Artificial Sequence
  Description of Artificial Sequence: Synthetic oligonucleotide
  Antisense strand to SEQ ID NO: 2388364
aagacuccuggagaacacu

SEQ ID NO: 2388366 - RNA, 19 nt, Artificial Sequence
  Description of Artificial Sequence: Synthetic oligonucleotide
  Sense strand starting at position 133 of SEQ ID NO: 1886110
gcaagugugauguggaagu

SEQ ID NO: 2388367 - RNA, 19 nt, Artificial Sequence
  Description of Artificial Sequence: Synthetic oligonucleotide
  Antisense strand to SEQ ID NO: 2388366
acuuccacaucacacuugc

SEQ ID NO: 2388368 - RNA, 19 nt, Artificial Sequence
  Description of Artificial Sequence: Synthetic oligonucleotide
  Sense strand starting at position 403 of SEQ ID NO: 1886110
uuaaauguuuguuuggguu

SEQ ID NO: 2388369 - RNA, 19 nt, Artificial Sequence
  Description of Artificial Sequence: Synthetic oligonucleotide
  Antisense strand to SEQ ID NO: 2388368
aacccaaacaaacauuuaa

SEQ ID NO: 2388370 - RNA, 19 nt, Artificial Sequence
  Description of Artificial Sequence: Synthetic oligonucleotide
  Sense strand starting at position 423 of SEQ ID NO: 1886110
ucuggaagcuccuugaagu

SEQ ID NO: 2388371 - RNA, 19 nt, Artificial Sequence
  Description of Artificial Sequence: Synthetic oligonucleotide
  Antisense strand to SEQ ID NO: 2388370
acuucaaggagcuuccaga

SEQ ID NO: 2388372 - RNA, 19 nt, Artificial Sequence
  Description of Artificial Sequence: Synthetic oligonucleotide
  Sense strand starting at position 424 of SEQ ID NO: 1886110
cuggaagcuccuugaaguu

SEQ ID NO: 2388373 - RNA, 19 nt, Artificial Sequence
  Description of Artificial Sequence: Synthetic oligonucleotide
  Antisense strand to SEQ ID NO: 2388372
aacuucaaggagcuuccag

SEQ ID NO: 2388374 - RNA, 19 nt, Artificial Sequence
  Description of Artificial Sequence: Synthetic oligonucleotide
  Sense strand starting at position 508 of SEQ ID NO: 1886110
gcauucccugaagaaguaa

SEQ ID NO: 2388375 - RNA, 19 nt, Artificial Sequence
  Description of Artificial Sequence: Synthetic oligonucleotide
  Antisense strand to SEQ ID NO: 2388374
uuacuucuucagggaaugc

SEQ ID NO: 2388376 - RNA, 19 nt, Artificial Sequence
  Description of Artificial Sequence: Synthetic oligonucleotide
  Sense strand starting at position 752 of SEQ ID NO: 1886110
gcaggcuuucuggagugga

SEQ ID NO: 2388377 - RNA, 19 nt, Artificial Sequence
  Description of Artificial Sequence: Synthetic oligonucleotide
  Antisense strand to SEQ ID NO: 2388376
uccacuccagaaagccugc

SEQ ID NO: 2388378 - RNA, 19 nt, Artificial Sequence
  Description of Artificial Sequence: Synthetic oligonucleotide
  Sense strand starting at position 1104 of SEQ ID NO: 1886110
gcuggaaauccagauguuu

SEQ ID NO: 2388379 - RNA, 19 nt, Artificial Sequence
  Description of Artificial Sequence: Synthetic oligonucleotide
  Antisense strand to SEQ ID NO: 2388378
aaacaucuggauuuccagc

SEQ ID NO: 2388380 - RNA, 19 nt, Artificial Sequence
  Description of Artificial Sequence: Synthetic oligonucleotide
  Sense strand starting at position 1106 of SEQ ID NO: 1886110
uggaaauccagauguuugu

SEQ ID NO: 2388381 - RNA, 19 nt, Artificial Sequence
  Description of Artificial Sequence: Synthetic oligonucleotide
  Antisense strand to SEQ ID NO: 2388380
acaaacaucuggauuucca

SEQ ID NO: 2388382 - RNA, 19 nt, Artificial Sequence
  Description of Artificial Sequence: Synthetic oligonucleotide
  Sense strand starting at position 1445 of SEQ ID NO: 1886110
ggauaugacuucuagaauu

SEQ ID NO: 2388383 - RNA, 19 nt, Artificial Sequence
  Description of Artificial Sequence: Synthetic oligonucleotide
  Antisense strand to SEQ ID NO: 2388382
aauucuagaagucauaucc

SEQ ID NO: 2388384 - RNA, 19 nt, Artificial Sequence
  Description of Artificial Sequence: Synthetic oligonucleotide
  Sense strand starting at position 1531 of SEQ ID NO: 1886110
cugguauguuuaucaggag

SEQ ID NO: 2388385 - RNA, 19 nt, Artificial Sequence
  Description of Artificial Sequence: Synthetic oligonucleotide
  Antisense strand to SEQ ID NO: 2388384
cuccugauaaacauaccag

SEQ ID NO: 2388386 - RNA, 19 nt, Artificial Sequence
  Description of Artificial Sequence: Synthetic oligonucleotide
  Sense strand starting at position 1637 of SEQ ID NO: 1886110
gguguuggccaaugacaag

SEQ ID NO: 2388387 - RNA, 19 nt, Artificial Sequence
  Description of Artificial Sequence: Synthetic oligonucleotide
  Antisense strand to SEQ ID NO: 2388386
cuugucauuggccaacacc

SEQ ID NO: 2388388 - RNA, 19 nt, Artificial Sequence
  Description of Artificial Sequence: Synthetic oligonucleotide
  Sense strand starting at position 1702 of SEQ ID NO: 1886110
gggaauuaauagcaacauu

SEQ ID NO: 2388389 - RNA, 19 nt, Artificial Sequence
  Description of Artificial Sequence: Synthetic oligonucleotide
  Antisense strand to SEQ ID NO: 2388388
aauguugcuauuaauuccc

SEQ ID NO: 2388390 - RNA, 19 nt, Artificial Sequence
  Description of Artificial Sequence: Synthetic oligonucleotide
  Sense strand starting at position 1734 of SEQ ID NO: 1886110
gcaugagauuugggaucac

SEQ ID NO: 2388391 - RNA, 19 nt, Artificial Sequence
  Description of Artificial Sequence: Synthetic oligonucleotide
  Antisense strand to SEQ ID NO: 2388390
gugaucccaaaucucaugc

SEQ ID NO: 2388392 - RNA, 19 nt, Artificial Sequence
  Description of Artificial Sequence: Synthetic oligonucleotide
  Sense strand starting at position 1795 of SEQ ID NO: 1886110
uugagacagcugcacaaau

SEQ ID NO: 2388393 - RNA, 19 nt, Artificial Sequence
  Description of Artificial Sequence: Synthetic oligonucleotide
  Antisense strand to SEQ ID NO: 2388392
auuugugcagcugucucaa

SEQ ID NO: 2388394 - RNA, 19 nt, Artificial Sequence
  Description of Artificial Sequence: Synthetic oligonucleotide
  Sense strand starting at position 1835 of SEQ ID NO: 1886110
ucuguaaauggugauacua

SEQ ID NO: 2388395 - RNA, 19 nt, Artificial Sequence
  Description of Artificial Sequence: Synthetic oligonucleotide
  Antisense strand to SEQ ID NO: 2388394
uaguaucaccauuuacaga

SEQ ID NO: 2388396 - RNA, 19 nt, Artificial Sequence
  Description of Artificial Sequence: Synthetic oligonucleotide
  Sense strand starting at position 1901 of SEQ ID NO: 1886110
cagugccugggauauauua

SEQ ID NO: 2388397 - RNA, 19 nt, Artificial Sequence
  Description of Artificial Sequence: Synthetic oligonucleotide
  Antisense strand to SEQ ID NO: 2388396
uaauauaucccaggcacug

SEQ ID NO: 2388398 - RNA, 19 nt, Artificial Sequence
  Description of Artificial Sequence: Synthetic oligonucleotide
  Sense strand starting at position 1903 of SEQ ID NO: 1886110
gugccugggauauauuaag

SEQ ID NO: 2388399 - RNA, 19 nt, Artificial Sequence
  Description of Artificial Sequence: Synthetic oligonucleotide
  Antisense strand to SEQ ID NO: 2388398
cuuaauauaucccaggcac

SEQ ID NO: 2388400 - RNA, 19 nt, Artificial Sequence
  Description of Artificial Sequence: Synthetic oligonucleotide
  Sense strand starting at position 1978 of SEQ ID NO: 1886110
auauauucuugaguugcau

SEQ ID NO: 2388401 - RNA, 19 nt, Artificial Sequence
  Description of Artificial Sequence: Synthetic oligonucleotide
  Antisense strand to SEQ ID NO: 2388400
augcaacucaagaauauau

SEQ ID NO: 2388402 - RNA, 19 nt, Artificial Sequence
  Description of Artificial Sequence: Synthetic oligonucleotide
  Sense strand starting at position 1984 of SEQ ID NO: 1886110
ucuugaguugcaugucuau

SEQ ID NO: 2388403 - RNA, 19 nt, Artificial Sequence
  Description of Artificial Sequence: Synthetic oligonucleotide
  Antisense strand to SEQ ID NO: 2388402
auagacaugcaacucaaga

SEQ ID NO: 2388404 - RNA, 19 nt, Artificial Sequence
  Description of Artificial Sequence: Synthetic oligonucleotide
  Sense strand starting at position 2017 of SEQ ID NO: 1886110
ccagguucucaacagucaa

SEQ ID NO: 2388405 - RNA, 19 nt, Artificial Sequence
  Description of Artificial Sequence: Synthetic oligonucleotide
  Antisense strand to SEQ ID NO: 2388404
uugacuguugagaaccugg

SEQ ID NO: 2388406 - RNA, 19 nt, Artificial Sequence
  Description of Artificial Sequence: Synthetic oligonucleotide
  Sense strand starting at position 2071 of SEQ ID NO: 1886110
guaccauuuguacguguau

SEQ ID NO: 2388407 - RNA, 19 nt, Artificial Sequence
  Description of Artificial Sequence: Synthetic oligonucleotide
  Antisense strand to SEQ ID NO: 2388406
auacacguacaaaugguac

SEQ ID NO: 2388408 - RNA, 19 nt, Artificial Sequence
  Description of Artificial Sequence: Synthetic oligonucleotide
  Sense strand starting at position 2072 of SEQ ID NO: 1886110
uaccauuuguacguguauu

SEQ ID NO: 2388409 - RNA, 19 nt, Artificial Sequence
  Description of Artificial Sequence: Synthetic oligonucleotide
  Antisense strand to SEQ ID NO: 2388408
aauacacguacaaauggua

SEQ ID NO: 2388410 - RNA, 19 nt, Artificial Sequence
  Description of Artificial Sequence: Synthetic oligonucleotide
  Sense strand starting at position 2073 of SEQ ID NO: 1886110
accauuuguacguguauua

SEQ ID NO: 2388411 - RNA, 19 nt, Artificial Sequence
  Description of Artificial Sequence: Synthetic oligonucleotide
  Antisense strand to SEQ ID NO: 2388410
uaauacacguacaaauggu

SEQ ID NO: 2388412 - RNA, 19 nt, Artificial Sequence
  Description of Artificial Sequence: Synthetic oligonucleotide
  Sense strand starting at position 2156 of SEQ ID NO: 1886110
augaauuacgcacaaagua

SEQ ID NO: 2388413 - RNA, 19 nt, Artificial Sequence
  Description of Artificial Sequence: Synthetic oligonucleotide
  Antisense strand to SEQ ID NO: 2388412
uacuuugugcguaauucau

SEQ ID NO: 2388414 - RNA, 19 nt, Artificial Sequence
  Description of Artificial Sequence: Synthetic oligonucleotide
  Sense strand starting at position 2250 of SEQ ID NO: 1886110
uggucuucuguguuugcua

SEQ ID NO: 2388415 - RNA, 19 nt, Artificial Sequence
  Description of Artificial Sequence: Synthetic oligonucleotide
  Antisense strand to SEQ ID NO: 2388414
uagcaaacacagaagacca

SEQ ID NO: 2388416 - RNA, 19 nt, Artificial Sequence
  Description of Artificial Sequence: Synthetic oligonucleotide
  Sense strand starting at position 2338 of SEQ ID NO: 1886110
agaugauugcagcaagguu

SEQ ID NO: 2388417 - RNA, 19 nt, Artificial Sequence
  Description of Artificial Sequence: Synthetic oligonucleotide
  Antisense strand to SEQ ID NO: 2388416
aaccuugcugcaaucaucu

SEQ ID NO: 2388418 - RNA, 19 nt, Artificial Sequence
  Description of Artificial Sequence: Synthetic oligonucleotide
  Sense strand starting at position 2711 of SEQ ID NO: 1886110
gaagacaucugggagaucu

SEQ ID NO: 2388419 - RNA, 19 nt, Artificial Sequence
  Description of Artificial Sequence: Synthetic oligonucleotide
  Antisense strand to SEQ ID NO: 2388418
agaucucccagaugucuuc

SEQ ID NO: 2388420 - RNA, 19 nt, Artificial Sequence
  Description of Artificial Sequence: Synthetic oligonucleotide
  Sense strand starting at position 2737 of SEQ ID NO: 1886110
aggcuugagguuugagaga

SEQ ID NO: 2388421 - RNA, 19 nt, Artificial Sequence
  Description of Artificial Sequence: Synthetic oligonucleotide
  Antisense strand to SEQ ID NO: 2388420
ucucucaaaccucaagccu

SEQ ID NO: 2388422 - RNA, 19 nt, Artificial Sequence
  Description of Artificial Sequence: Synthetic oligonucleotide
  Sense strand starting at position 2928 of SEQ ID NO: 1886110
gagaacaucuugcuaguga

SEQ ID NO: 2388423 - RNA, 19 nt, Artificial Sequence
  Description of Artificial Sequence: Synthetic oligonucleotide
  Antisense strand to SEQ ID NO: 2388422
ucacuagcaagauguucuc

SEQ ID NO: 2388424 - RNA, 19 nt, Artificial Sequence
  Description of Artificial Sequence: Synthetic oligonucleotide
  Sense strand starting at position 2949 of SEQ ID NO: 1886110
ggugaugagcuggaccaua

SEQ ID NO: 2388425 - RNA, 19 nt, Artificial Sequence
  Description of Artificial Sequence: Synthetic oligonucleotide
  Antisense strand to SEQ ID NO: 2388424
uaugguccagcucaucacc

SEQ ID NO: 2388426 - RNA, 19 nt, Artificial Sequence
  Description of Artificial Sequence: Synthetic oligonucleotide
  Sense strand starting at position 3048 of SEQ ID NO: 1886110
gacugucuuagguguugua

SEQ ID NO: 2388427 - RNA, 19 nt, Artificial Sequence
  Description of Artificial Sequence: Synthetic oligonucleotide
  Antisense strand to SEQ ID NO: 2388426
uacaacaccuaagacaguc

SEQ ID NO: 2388428 - RNA, 19 nt, Artificial Sequence
  Description of Artificial Sequence: Synthetic oligonucleotide
  Sense strand starting at position 3197 of SEQ ID NO: 1886110
gagcuagucugacuccaga

SEQ ID NO: 2388429 - RNA, 19 nt, Artificial Sequence
  Description of Artificial Sequence: Synthetic oligonucleotide
  Antisense strand to SEQ ID NO: 2388428
ucuggagucagacuagcuc

SEQ ID NO: 2388430 - RNA, 19 nt, Artificial Sequence
  Description of Artificial Sequence: Synthetic oligonucleotide
  Sense strand starting at position 3286 of SEQ ID NO: 1886110
ccguuuagaugcuuugaau

SEQ ID NO: 2388431 - RNA, 19 nt, Artificial Sequence
  Description of Artificial Sequence: Synthetic oligonucleotide
  Antisense strand to SEQ ID NO: 2388430
auucaaagcaucuaaacgg

SEQ ID NO: 2388432 - RNA, 19 nt, Artificial Sequence
  Description of Artificial Sequence: Synthetic oligonucleotide
  Sense strand starting at position 3563 of SEQ ID NO: 1886110
gaaggacagucauagaaua

SEQ ID NO: 2388433 - RNA, 19 nt, Artificial Sequence
  Description of Artificial Sequence: Synthetic oligonucleotide
  Antisense strand to SEQ ID NO: 2388432
uauucuaugacuguccuuc

SEQ ID NO: 2388434 - RNA, 19 nt, Artificial Sequence
  Description of Artificial Sequence: Synthetic oligonucleotide
  Sense strand starting at position 3623 of SEQ ID NO: 1886110
cuauauggagcuggacaua

SEQ ID NO: 2388435 - RNA, 19 nt, Artificial Sequence
  Description of Artificial Sequence: Synthetic oligonucleotide
  Antisense strand to SEQ ID NO: 2388434
uauguccagcuccauauag

SEQ ID NO: 2388436 - RNA, 19 nt, Artificial Sequence
  Description of Artificial Sequence: Synthetic oligonucleotide
  Sense strand starting at position 3673 of SEQ ID NO: 1886110
ccauguguugaggagauca

SEQ ID NO: 2388437 - RNA, 19 nt, Artificial Sequence
  Description of Artificial Sequence: Synthetic oligonucleotide
  Antisense strand to SEQ ID NO: 2388436
ugaucuccucaacacaugg

SEQ ID NO: 2388438 - RNA, 19 nt, Artificial Sequence
  Description of Artificial Sequence: Synthetic oligonucleotide
  Sense strand starting at position 3869 of SEQ ID NO: 1886110
cagucauugcccgaggcuu

SEQ ID NO: 2388439 - RNA, 19 nt, Artificial Sequence
  Description of Artificial Sequence: Synthetic oligonucleotide
  Antisense strand to SEQ ID NO: 2388438
aagccucgggcaaugacug

SEQ ID NO: 2388440 - RNA, 19 nt, Artificial Sequence
  Description of Artificial Sequence: Synthetic oligonucleotide
  Sense strand starting at position 32 of SEQ ID NO: 1886111
ccugucuuccagggcugau

SEQ ID NO: 2388441 - RNA, 19 nt, Artificial Sequence
  Description of Artificial Sequence: Synthetic oligonucleotide
  Antisense strand to SEQ ID NO: 2388440
aucagcccuggaagacagg

SEQ ID NO: 2388442 - RNA, 19 nt, Artificial Sequence
  Description of Artificial Sequence: Synthetic oligonucleotide
  Sense strand starting at position 77 of SEQ ID NO: 1886111
ugaguagaucggugccaga

SEQ ID NO: 2388443 - RNA, 19 nt, Artificial Sequence
  Description of Artificial Sequence: Synthetic oligonucleotide
  Antisense strand to SEQ ID NO: 2388442
ucuggcaccgaucuacuca

SEQ ID NO: 2388444 - RNA, 19 nt, Artificial Sequence
  Description of Artificial Sequence: Synthetic oligonucleotide
  Sense strand starting at position 213 of SEQ ID NO: 1886111
aaggaucucacgugugacu

SEQ ID NO: 2388445 - RNA, 19 nt, Artificial Sequence
  Description of Artificial Sequence: Synthetic oligonucleotide
  Antisense strand to SEQ ID NO: 2388444
agucacacgugagauccuu

SEQ ID NO: 2388446 - RNA, 19 nt, Artificial Sequence
  Description of Artificial Sequence: Synthetic oligonucleotide
  Sense strand starting at position 239 of SEQ ID NO: 1886111
gguggaugcuauccugaga

SEQ ID NO: 2388447 - RNA, 19 nt, Artificial Sequence
  Description of Artificial Sequence: Synthetic oligonucleotide
  Antisense strand to SEQ ID NO: 2388446
ucucaggauagcauccacc

SEQ ID NO: 2388448 - RNA, 19 nt, Artificial Sequence
  Description of Artificial Sequence: Synthetic oligonucleotide
  Sense strand starting at position 259 of SEQ ID NO: 1886111
acaggauucugggcucaag

SEQ ID NO: 2388449 - RNA, 19 nt, Artificial Sequence
  Description of Artificial Sequence: Synthetic oligonucleotide
  Antisense strand to SEQ ID NO: 2388448
cuugagcccagaauccugu

SEQ ID NO: 2388450 - RNA, 19 nt, Artificial Sequence
  Description of Artificial Sequence: Synthetic oligonucleotide
  Sense strand starting at position 277 of SEQ ID NO: 1886111
ggugguaaccgugcugagu

SEQ ID NO: 2388451 - RNA, 19 nt, Artificial Sequence
  Description of Artificial Sequence: Synthetic oligonucleotide
  Antisense strand to SEQ ID NO: 2388450
acucagcacgguuaccacc

SEQ ID NO: 2388452 - RNA, 19 nt, Artificial Sequence
  Description of Artificial Sequence: Synthetic oligonucleotide
  Sense strand starting at position 327 of SEQ ID NO: 1886111
guuucuccuuccucagaca

SEQ ID NO: 2388453 - RNA, 19 nt, Artificial Sequence
  Description of Artificial Sequence: Synthetic oligonucleotide
  Antisense strand to SEQ ID NO: 2388452
ugucugaggaaggagaaac

SEQ ID NO: 2388454 - RNA, 19 nt, Artificial Sequence
  Description of Artificial Sequence: Synthetic oligonucleotide
  Sense strand starting at position 388 of SEQ ID NO: 1886111
gagaauacuuaacagacga

SEQ ID NO: 2388455 - RNA, 19 nt, Artificial Sequence
  Description of Artificial Sequence: Synthetic oligonucleotide
  Antisense strand to SEQ ID NO: 2388454
ucgucuguuaaguauucuc

SEQ ID NO: 2388456 - RNA, 19 nt, Artificial Sequence
  Description of Artificial Sequence: Synthetic oligonucleotide
  Sense strand starting at position 450 of SEQ ID NO: 1886111
caagcauggccucaggaaa

SEQ ID NO: 2388457 - RNA, 19 nt, Artificial Sequence
  Description of Artificial Sequence: Synthetic oligonucleotide
  Antisense strand to SEQ ID NO: 2388456
uuuccugaggccaugcuug

SEQ ID NO: 2388458 - RNA, 19 nt, Artificial Sequence
  Description of Artificial Sequence: Synthetic oligonucleotide
  Sense strand starting at position 926 of SEQ ID NO: 1886111
gcaguucuaauggaagcuu

SEQ ID NO: 2388459 - RNA, 19 nt, Artificial Sequence
  Description of Artificial Sequence: Synthetic oligonucleotide
  Antisense strand to SEQ ID NO: 2388458
aagcuuccauuagaacugc

SEQ ID NO: 2388460 - RNA, 19 nt, Artificial Sequence
  Description of Artificial Sequence: Synthetic oligonucleotide
  Sense strand starting at position 965 of SEQ ID NO: 1886111
ucagauguuugggcucaga

SEQ ID NO: 2388461 - RNA, 19 nt, Artificial Sequence
  Description of Artificial Sequence: Synthetic oligonucleotide
  Antisense strand to SEQ ID NO: 2388460
ucugagcccaaacaucuga

SEQ ID NO: 2388462 - RNA, 19 nt, Artificial Sequence
  Description of Artificial Sequence: Synthetic oligonucleotide
  Sense strand starting at position 968 of SEQ ID NO: 1886111
gauguuugggcucagauuc

SEQ ID NO: 2388463 - RNA, 19 nt, Artificial Sequence
  Description of Artificial Sequence: Synthetic oligonucleotide
  Antisense strand to SEQ ID NO: 2388462
gaaucugagcccaaacauc

SEQ ID NO: 2388464 - RNA, 19 nt, Artificial Sequence
  Description of Artificial Sequence: Synthetic oligonucleotide
  Sense strand starting at position 988 of SEQ ID NO: 1886111
cgcucaucugaggaaucaa

SEQ ID NO: 2388465 - RNA, 19 nt, Artificial Sequence
  Description of Artificial Sequence: Synthetic oligonucleotide
  Antisense strand to SEQ ID NO: 2388464
uugauuccucagaugagcg

SEQ ID NO: 2388466 - RNA, 19 nt, Artificial Sequence
  Description of Artificial Sequence: Synthetic oligonucleotide
  Sense strand starting at position 1053 of SEQ ID NO: 1886111
gugaccucacugugagaaa

SEQ ID NO: 2388467 - RNA, 19 nt, Artificial Sequence
  Description of Artificial Sequence: Synthetic oligonucleotide
  Antisense strand to SEQ ID NO: 2388466
uuucucacagugaggucac

SEQ ID NO: 2388468 - RNA, 19 nt, Artificial Sequence
  Description of Artificial Sequence: Synthetic oligonucleotide
  Sense strand starting at position 1243 of SEQ ID NO: 1886111
ccucuauggccugagguuu

SEQ ID NO: 2388469 - RNA, 19 nt, Artificial Sequence
  Description of Artificial Sequence: Synthetic oligonucleotide
  Antisense strand to SEQ ID NO: 2388468
aaaccucaggccauagagg

SEQ ID NO: 2388470 - RNA, 19 nt, Artificial Sequence
  Description of Artificial Sequence: Synthetic oligonucleotide
  Sense strand starting at position 1317 of SEQ ID NO: 1886111
aguguuauuuaugcaauug

SEQ ID NO: 2388471 - RNA, 19 nt, Artificial Sequence
  Description of Artificial Sequence: Synthetic oligonucleotide
  Antisense strand to SEQ ID NO: 2388470
caauugcauaaauaacacu

SEQ ID NO: 2388472 - RNA, 19 nt, Artificial Sequence
  Description of Artificial Sequence: Synthetic oligonucleotide
  Sense strand starting at position 1328 of SEQ ID NO: 1886111
ugcaauugauugucucuau

SEQ ID NO: 2388473 - RNA, 19 nt, Artificial Sequence
  Description of Artificial Sequence: Synthetic oligonucleotide
  Antisense strand to SEQ ID NO: 2388472
auagagacaaucaauugca

SEQ ID NO: 2388474 - RNA, 19 nt, Artificial Sequence
  Description of Artificial Sequence: Synthetic oligonucleotide
  Sense strand starting at position 1329 of SEQ ID NO: 1886111
gcaauugauugucucuaua

SEQ ID NO: 2388475 - RNA, 19 nt, Artificial Sequence
  Description of Artificial Sequence: Synthetic oligonucleotide
  Antisense strand to SEQ ID NO: 2388474
uauagagacaaucaauugc

SEQ ID NO: 2388476 - RNA, 19 nt, Artificial Sequence
  Description of Artificial Sequence: Synthetic oligonucleotide
  Sense strand starting at position 1332 of SEQ ID NO: 1886111
auugauugucucuauagcu

SEQ ID NO: 2388477 - RNA, 19 nt, Artificial Sequence
  Description of Artificial Sequence: Synthetic oligonucleotide
  Antisense strand to SEQ ID NO: 2388476
agcuauagagacaaucaau

SEQ ID NO: 2388478 - RNA, 19 nt, Artificial Sequence
  Description of Artificial Sequence: Synthetic oligonucleotide
  Sense strand starting at position 1415 of SEQ ID NO: 1886111
agggccauaauggguuaaa

SEQ ID NO: 2388479 - RNA, 19 nt, Artificial Sequence
  Description of Artificial Sequence: Synthetic oligonucleotide
  Antisense strand to SEQ ID NO: 2388478
uuuaacccauuauggcccu

SEQ ID NO: 2388480 - RNA, 19 nt, Artificial Sequence
  Description of Artificial Sequence: Synthetic oligonucleotide
  Sense strand starting at position 2108 of SEQ ID NO: 1886111
ucuggagucugguuaccaa

SEQ ID NO: 2388481 - RNA, 19 nt, Artificial Sequence
  Description of Artificial Sequence: Synthetic oligonucleotide
  Antisense strand to SEQ ID NO: 2388480
uugguaaccagacuccaga

SEQ ID NO: 2388482 - RNA, 19 nt, Artificial Sequence
  Description of Artificial Sequence: Synthetic oligonucleotide
  Sense strand starting at position 2250 of SEQ ID NO: 1886111
gccagagguccagaguagu

SEQ ID NO: 2388483 - RNA, 19 nt, Artificial Sequence
  Description of Artificial Sequence: Synthetic oligonucleotide
  Antisense strand to SEQ ID NO: 2388482
acuacucuggaccucuggc

SEQ ID NO: 2388484 - RNA, 19 nt, Artificial Sequence
  Description of Artificial Sequence: Synthetic oligonucleotide
  Sense strand starting at position 2731 of SEQ ID NO: 1886111
ccugguuugcaugagucua

SEQ ID NO: 2388485 - RNA, 19 nt, Artificial Sequence
  Description of Artificial Sequence: Synthetic oligonucleotide
  Antisense strand to SEQ ID NO: 2388484
uagacucaugcaaaccagg

SEQ ID NO: 2388486 - RNA, 19 nt, Artificial Sequence
  Description of Artificial Sequence: Synthetic oligonucleotide
  Sense strand starting at position 2806 of SEQ ID NO: 1886111
gcagcacgucacuagagaa

SEQ ID NO: 2388487 - RNA, 19 nt, Artificial Sequence
  Description of Artificial Sequence: Synthetic oligonucleotide
  Antisense strand to SEQ ID NO: 2388486
uucucuagugacgugcugc

SEQ ID NO: 2388488 - RNA, 19 nt, Artificial Sequence
  Description of Artificial Sequence: Synthetic oligonucleotide
  Sense strand starting at position 2999 of SEQ ID NO: 1886111
cugcucucagcagaugauu

SEQ ID NO: 2388489 - RNA, 19 nt, Artificial Sequence
  Description of Artificial Sequence: Synthetic oligonucleotide
  Antisense strand to SEQ ID NO: 2388488
aaucaucugcugagagcag

SEQ ID NO: 2388490 - RNA, 19 nt, Artificial Sequence
  Description of Artificial Sequence: Synthetic oligonucleotide
  Sense strand starting at position 3013 of SEQ ID NO: 1886111
ugauuugguucccagaaag

SEQ ID NO: 2388491 - RNA, 19 nt, Artificial Sequence
  Description of Artificial Sequence: Synthetic oligonucleotide
  Antisense strand to SEQ ID NO: 2388490
cuuucugggaaccaaauca

SEQ ID NO: 2388492 - RNA, 19 nt, Artificial Sequence
  Description of Artificial Sequence: Synthetic oligonucleotide
  Sense strand starting at position 3031 of SEQ ID NO: 1886111
gagagaagcuucuuagaau

SEQ ID NO: 2388493 - RNA, 19 nt, Artificial Sequence
  Description of Artificial Sequence: Synthetic oligonucleotide
  Antisense strand to SEQ ID NO: 2388492
auucuaagaagcuucucuc

SEQ ID NO: 2388494 - RNA, 19 nt, Artificial Sequence
  Description of Artificial Sequence: Synthetic oligonucleotide
  Sense strand starting at position 3208 of SEQ ID NO: 1886111
uccugcuacccagaguuua

SEQ ID NO: 2388495 - RNA, 19 nt, Artificial Sequence
  Description of Artificial Sequence: Synthetic oligonucleotide
  Antisense strand to SEQ ID NO: 2388494
uaaacucuggguagcagga

SEQ ID NO: 2388496 - RNA, 19 nt, Artificial Sequence
  Description of Artificial Sequence: Synthetic oligonucleotide
  Sense strand starting at position 3259 of SEQ ID NO: 1886111
cucaguuugucuuuauuag

SEQ ID NO: 2388497 - RNA, 19 nt, Artificial Sequence
  Description of Artificial Sequence: Synthetic oligonucleotide
  Antisense strand to SEQ ID NO: 2388496
cuaauaaagacaaacugag

SEQ ID NO: 2388498 - RNA, 19 nt, Artificial Sequence
  Description of Artificial Sequence: Synthetic oligonucleotide
  Sense strand starting at position 3316 of SEQ ID NO: 1886111
aggcuaaaucucugacccu

SEQ ID NO: 2388499 - RNA, 19 nt, Artificial Sequence
  Description of Artificial Sequence: Synthetic oligonucleotide
  Antisense strand to SEQ ID NO: 2388498
agggucagagauuuagccu

SEQ ID NO: 2388500 - RNA, 19 nt, Artificial Sequence
  Description of Artificial Sequence: Synthetic oligonucleotide
  Sense strand starting at position 3392 of SEQ ID NO: 1886111
ccaggcuaugucgauuaca

SEQ ID NO: 2388501 - RNA, 19 nt, Artificial Sequence
  Description of Artificial Sequence: Synthetic oligonucleotide
  Antisense strand to SEQ ID NO: 2388500
uguaaucgacauagccugg

SEQ ID NO: 2388502 - RNA, 19 nt, Artificial Sequence
  Description of Artificial Sequence: Synthetic oligonucleotide
  Sense strand starting at position 3395 of SEQ ID NO: 1886111
ggcuaugucgauuacauga

SEQ ID NO: 2388503 - RNA, 19 nt, Artificial Sequence
  Description of Artificial Sequence: Synthetic oligonucleotide
  Antisense strand to SEQ ID NO: 2388502
ucauguaaucgacauagcc

SEQ ID NO: 2388504 - RNA, 19 nt, Artificial Sequence
  Description of Artificial Sequence: Synthetic oligonucleotide
  Sense strand starting at position 3520 of SEQ ID NO: 1886111
gcccaugaaucagucaagu

SEQ ID NO: 2388505 - RNA, 19 nt, Artificial Sequence
  Description of Artificial Sequence: Synthetic oligonucleotide
  Antisense strand to SEQ ID NO: 2388504
acuugacugauucaugggc

SEQ ID NO: 2388506 - RNA, 19 nt, Artificial Sequence
  Description of Artificial Sequence: Synthetic oligonucleotide
  Sense strand starting at position 3558 of SEQ ID NO: 1886111
cacagaaggcuuugguaga

SEQ ID NO: 2388507 - RNA, 19 nt, Artificial Sequence
  Description of Artificial Sequence: Synthetic oligonucleotide
  Antisense strand to SEQ ID NO: 2388506
ucuaccaaagccuucugug

SEQ ID NO: 2388508 - RNA, 19 nt, Artificial Sequence
  Description of Artificial Sequence: Synthetic oligonucleotide
  Sense strand starting at position 3614 of SEQ ID NO: 1886111
ucagcagagauuggguaaa

SEQ ID NO: 2388509 - RNA, 19 nt, Artificial Sequence
  Description of Artificial Sequence: Synthetic oligonucleotide
  Antisense strand to SEQ ID NO: 2388508
uuuacccaaucucugcuga

SEQ ID NO: 2388510 - RNA, 19 nt, Artificial Sequence
  Description of Artificial Sequence: Synthetic oligonucleotide
  Sense strand starting at position 3709 of SEQ ID NO: 1886111
agacauucuugagcugauc

SEQ ID NO: 2388511 - RNA, 19 nt, Artificial Sequence
  Description of Artificial Sequence: Synthetic oligonucleotide
  Antisense strand to SEQ ID NO: 2388510
gaucagcucaagaaugucu

SEQ ID NO: 2388512 - RNA, 19 nt, Artificial Sequence
  Description of Artificial Sequence: Synthetic oligonucleotide
  Sense strand starting at position 3715 of SEQ ID NO: 1886111
ucuugagcugaucauugua

SEQ ID NO: 2388513 - RNA, 19 nt, Artificial Sequence
  Description of Artificial Sequence: Synthetic oligonucleotide
  Antisense strand to SEQ ID NO: 2388512
uacaaugaucagcucaaga

SEQ ID NO: 2388514 - RNA, 19 nt, Artificial Sequence
  Description of Artificial Sequence: Synthetic oligonucleotide
  Sense strand starting at position 3717 of SEQ ID NO: 1886111
uugagcugaucauuguaaa

SEQ ID NO: 2388515 - RNA, 19 nt, Artificial Sequence
  Description of Artificial Sequence: Synthetic oligonucleotide
  Antisense strand to SEQ ID NO: 2388514
uuuacaaugaucagcucaa

SEQ ID NO: 2388516 - RNA, 19 nt, Artificial Sequence
  Description of Artificial Sequence: Synthetic oligonucleotide
  Sense strand starting at position 3823 of SEQ ID NO: 1886111
cuccuuccugaugaaagua

SEQ ID NO: 2388517 - RNA, 19 nt, Artificial Sequence
  Description of Artificial Sequence: Synthetic oligonucleotide
  Antisense strand to SEQ ID NO: 2388516
uacuuucaucaggaaggag

SEQ ID NO: 2388518 - RNA, 19 nt, Artificial Sequence
  Description of Artificial Sequence: Synthetic oligonucleotide
  Sense strand starting at position 3862 of SEQ ID NO: 1886111
uggucacuauugucuagua

SEQ ID NO: 2388519 - RNA, 19 nt, Artificial Sequence
  Description of Artificial Sequence: Synthetic oligonucleotide
  Antisense strand to SEQ ID NO: 2388518
uacuagacaauagugacca

SEQ ID NO: 2388520 - RNA, 19 nt, Artificial Sequence
  Description of Artificial Sequence: Synthetic oligonucleotide
  Sense strand starting at position 1420 of SEQ ID NO: 1886112
aguagugacaccuggaaua

SEQ ID NO: 2388521 - RNA, 19 nt, Artificial Sequence
  Description of Artificial Sequence: Synthetic oligonucleotide
  Antisense strand to SEQ ID NO: 2388520
uauuccaggugucacuacu

SEQ ID NO: 2388522 - RNA, 19 nt, Artificial Sequence
  Description of Artificial Sequence: Synthetic oligonucleotide
  Sense strand starting at position 1881 of SEQ ID NO: 1886112
acguucugauuggaugaga

SEQ ID NO: 2388523 - RNA, 19 nt, Artificial Sequence
  Description of Artificial Sequence: Synthetic oligonucleotide
  Antisense strand to SEQ ID NO: 2388522
ucucauccaaucagaacgu

SEQ ID NO: 2388524 - RNA, 19 nt, Artificial Sequence
  Description of Artificial Sequence: Synthetic oligonucleotide
  Sense strand starting at position 2076 of SEQ ID NO: 1886112
gagcuagaguugcacuauu

SEQ ID NO: 2388525 - RNA, 19 nt, Artificial Sequence
  Description of Artificial Sequence: Synthetic oligonucleotide
  Antisense strand to SEQ ID NO: 2388524
aauagugcaacucuagcuc

SEQ ID NO: 2388526 - RNA, 19 nt, Artificial Sequence
  Description of Artificial Sequence: Synthetic oligonucleotide
  Sense strand starting at position 3127 of SEQ ID NO: 1886112
uugucaagcguuuaagaua

SEQ ID NO: 2388527 - RNA, 19 nt, Artificial Sequence
  Description of Artificial Sequence: Synthetic oligonucleotide
  Antisense strand to SEQ ID NO: 2388526
uaucuuaaacgcuugacaa

SEQ ID NO: 2388528 - RNA, 19 nt, Artificial Sequence
  Description of Artificial Sequence: Synthetic oligonucleotide
  Sense strand starting at position 3130 of SEQ ID NO: 1886112
ucaagcguuuaagauacuu

SEQ ID NO: 2388529 - RNA, 19 nt, Artificial Sequence
  Description of Artificial Sequence: Synthetic oligonucleotide
  Antisense strand to SEQ ID NO: 2388528
aaguaucuuaaacgcuuga

SEQ ID NO: 2388530 - RNA, 19 nt, Artificial Sequence
  Description of Artificial Sequence: Synthetic oligonucleotide
  Sense strand starting at position 3831 of SEQ ID NO: 1886112
aaugaaauccuguaguuug

SEQ ID NO: 2388531 - RNA, 19 nt, Artificial Sequence
  Description of Artificial Sequence: Synthetic oligonucleotide
  Antisense strand to SEQ ID NO: 2388530
caaacuacaggauuucauu

SEQ ID NO: 2388532 - RNA, 19 nt, Artificial Sequence
  Description of Artificial Sequence: Synthetic oligonucleotide
  Sense strand starting at position 3839 of SEQ ID NO: 1886112
ccuguaguuugaggcacau

SEQ ID NO: 2388533 - RNA, 19 nt, Artificial Sequence
  Description of Artificial Sequence: Synthetic oligonucleotide
  Antisense strand to SEQ ID NO: 2388532
augugccucaaacuacagg

SEQ ID NO: 2388534 - RNA, 19 nt, Artificial Sequence
  Description of Artificial Sequence: Synthetic oligonucleotide
  Sense strand starting at position 920 of SEQ ID NO: 1886113
ggcagucuggcccgauagu

SEQ ID NO: 2388535 - RNA, 19 nt, Artificial Sequence
  Description of Artificial Sequence: Synthetic oligonucleotide
  Antisense strand to SEQ ID NO: 2388534
acuaucgggccagacugcc

SEQ ID NO: 2388536 - RNA, 19 nt, Artificial Sequence
  Description of Artificial Sequence: Synthetic oligonucleotide
  Sense strand starting at position 1115 of SEQ ID NO: 1886113
caccgcugucagcaaugaa

SEQ ID NO: 2388537 - RNA, 19 nt, Artificial Sequence
  Description of Artificial Sequence: Synthetic oligonucleotide
  Antisense strand to SEQ ID NO: 2388536
uucauugcugacagcggug

SEQ ID NO: 2388538 - RNA, 19 nt, Artificial Sequence
  Description of Artificial Sequence: Synthetic oligonucleotide
  Sense strand starting at position 3270 of SEQ ID NO: 1886114
aggaacucuugacaucuga

SEQ ID NO: 2388539 - RNA, 19 nt, Artificial Sequence
  Description of Artificial Sequence: Synthetic oligonucleotide
  Antisense strand to SEQ ID NO: 2388538
ucagaugucaagaguuccu

SEQ ID NO: 2388540 - RNA, 19 nt, Artificial Sequence
  Description of Artificial Sequence: Synthetic oligonucleotide
  Sense strand starting at position 1420 of SEQ ID NO: 1886115
aguagugacaccuggaaua

SEQ ID NO: 2388541 - RNA, 19 nt, Artificial Sequence
  Description of Artificial Sequence: Synthetic oligonucleotide
  Antisense strand to SEQ ID NO: 2388540
uauuccaggugucacuacu

SEQ ID NO: 2388542 - RNA, 19 nt, Artificial Sequence
  Description of Artificial Sequence: Synthetic oligonucleotide
  Sense strand starting at position 1881 of SEQ ID NO: 1886115
acguucugauuggaugaga

SEQ ID NO: 2388543 - RNA, 19 nt, Artificial Sequence
  Description of Artificial Sequence: Synthetic oligonucleotide
  Antisense strand to SEQ ID NO: 2388542
ucucauccaaucagaacgu

SEQ ID NO: 2388544 - RNA, 19 nt, Artificial Sequence
  Description of Artificial Sequence: Synthetic oligonucleotide
  Sense strand starting at position 2076 of SEQ ID NO: 1886115
gagcuagaguugcacuauu

SEQ ID NO: 2388545 - RNA, 19 nt, Artificial Sequence
  Description of Artificial Sequence: Synthetic oligonucleotide
  Antisense strand to SEQ ID NO: 2388544
aauagugcaacucuagcuc

SEQ ID NO: 2388546 - RNA, 19 nt, Artificial Sequence
  Description of Artificial Sequence: Synthetic oligonucleotide
  Sense strand starting at position 3127 of SEQ ID NO: 1886115
uugucaagcguuuaagaua

SEQ ID NO: 2388547 - RNA, 19 nt, Artificial Sequence
  Description of Artificial Sequence: Synthetic oligonucleotide
  Antisense strand to SEQ ID NO: 2388546
uaucuuaaacgcuugacaa

SEQ ID NO: 2388548 - RNA, 19 nt, Artificial Sequence
  Description of Artificial Sequence: Synthetic oligonucleotide
  Sense strand starting at position 3130 of SEQ ID NO: 1886115
ucaagcguuuaagauacuu

SEQ ID NO: 2388549 - RNA, 19 nt, Artificial Sequence
  Description of Artificial Sequence: Synthetic oligonucleotide
  Antisense strand to SEQ ID NO: 2388548
aaguaucuuaaacgcuuga

SEQ ID NO: 2388550 - RNA, 19 nt, Artificial Sequence
  Description of Artificial Sequence: Synthetic oligonucleotide
  Sense strand starting at position 3831 of SEQ ID NO: 1886115
aaugaaauccuguaguuug

SEQ ID NO: 2388551 - RNA, 19 nt, Artificial Sequence
  Description of Artificial Sequence: Synthetic oligonucleotide
  Antisense strand to SEQ ID NO: 2388550
caaacuacaggauuucauu

SEQ ID NO: 2388552 - RNA, 19 nt, Artificial Sequence
  Description of Artificial Sequence: Synthetic oligonucleotide
  Sense strand starting at position 3839 of SEQ ID NO: 1886115
ccuguaguuugaggcacau

SEQ ID NO: 2388553 - RNA, 19 nt, Artificial Sequence
  Description of Artificial Sequence: Synthetic oligonucleotide
  Antisense strand to SEQ ID NO: 2388552
augugccucaaacuacagg

SEQ ID NO: 2388554 - RNA, 19 nt, Artificial Sequence
  Description of Artificial Sequence: Synthetic oligonucleotide
  Sense strand starting at position 920 of SEQ ID NO: 1886116
ggcagucuggcccgauagu

SEQ ID NO: 2388555 - RNA, 19 nt, Artificial Sequence
  Description of Artificial Sequence: Synthetic oligonucleotide
  Antisense strand to SEQ ID NO: 2388554
acuaucgggccagacugcc

SEQ ID NO: 2388556 - RNA, 19 nt, Artificial Sequence
  Description of Artificial Sequence: Synthetic oligonucleotide
  Sense strand starting at position 1115 of SEQ ID NO: 1886116
caccgcugucagcaaugaa

SEQ ID NO: 2388557 - RNA, 19 nt, Artificial Sequence
  Description of Artificial Sequence: Synthetic oligonucleotide
  Antisense strand to SEQ ID NO: 2388556
uucauugcugacagcggug

SEQ ID NO: 2388558 - RNA, 19 nt, Artificial Sequence
  Description of Artificial Sequence: Synthetic oligonucleotide
  Sense strand starting at position 3270 of SEQ ID NO: 1886117
aggaacucuugacaucuga

SEQ ID NO: 2388559 - RNA, 19 nt, Artificial Sequence
  Description of Artificial Sequence: Synthetic oligonucleotide
  Antisense strand to SEQ ID NO: 2388558
ucagaugucaagaguuccu

SEQ ID NO: 2388560 - RNA, 19 nt, Artificial Sequence
  Description of Artificial Sequence: Synthetic oligonucleotide
  Sense strand starting at position 1420 of SEQ ID NO: 1886118
aguagugacaccuggaaua

SEQ ID NO: 2388561 - RNA, 19 nt, Artificial Sequence
  Description of Artificial Sequence: Synthetic oligonucleotide
  Antisense strand to SEQ ID NO: 2388560
uauuccaggugucacuacu

SEQ ID NO: 2388562 - RNA, 19 nt, Artificial Sequence
  Description of Artificial Sequence: Synthetic oligonucleotide
  Sense strand starting at position 1881 of SEQ ID NO: 1886118
acguucugauuggaugaga

SEQ ID NO: 2388563 - RNA, 19 nt, Artificial Sequence
  Description of Artificial Sequence: Synthetic oligonucleotide
  Antisense strand to SEQ ID NO: 2388562
ucucauccaaucagaacgu

SEQ ID NO: 2388564 - RNA, 19 nt, Artificial Sequence
  Description of Artificial Sequence: Synthetic oligonucleotide
  Sense strand starting at position 2076 of SEQ ID NO: 1886118
gagcuagaguugcacuauu

SEQ ID NO: 2388565 - RNA, 19 nt, Artificial Sequence
  Description of Artificial Sequence: Synthetic oligonucleotide
  Antisense strand to SEQ ID NO: 2388564
aauagugcaacucuagcuc

SEQ ID NO: 2388566 - RNA, 19 nt, Artificial Sequence
  Description of Artificial Sequence: Synthetic oligonucleotide
  Sense strand starting at position 3127 of SEQ ID NO: 1886118
uugucaagcguuuaagaua

SEQ ID NO: 2388567 - RNA, 19 nt, Artificial Sequence
  Description of Artificial Sequence: Synthetic oligonucleotide
  Antisense strand to SEQ ID NO: 2388566
uaucuuaaacgcuugacaa

SEQ ID NO: 2388568 - RNA, 19 nt, Artificial Sequence
  Description of Artificial Sequence: Synthetic oligonucleotide
  Sense strand starting at position 3130 of SEQ ID NO: 1886118
ucaagcguuuaagauacuu

SEQ ID NO: 2388569 - RNA, 19 nt, Artificial Sequence
  Description of Artificial Sequence: Synthetic oligonucleotide
  Antisense strand to SEQ ID NO: 2388568
aaguaucuuaaacgcuuga

SEQ ID NO: 2388570 - RNA, 19 nt, Artificial Sequence
  Description of Artificial Sequence: Synthetic oligonucleotide
  Sense strand starting at position 3831 of SEQ ID NO: 1886118
aaugaaauccuguaguuug

SEQ ID NO: 2388571 - RNA, 19 nt, Artificial Sequence
  Description of Artificial Sequence: Synthetic oligonucleotide
  Antisense strand to SEQ ID NO: 2388570
caaacuacaggauuucauu

SEQ ID NO: 2388572 - RNA, 19 nt, Artificial Sequence
  Description of Artificial Sequence: Synthetic oligonucleotide
  Sense strand starting at position 3839 of SEQ ID NO: 1886118
ccuguaguuugaggcacau

SEQ ID NO: 2388573 - RNA, 19 nt, Artificial Sequence
  Description of Artificial Sequence: Synthetic oligonucleotide
  Antisense strand to SEQ ID NO: 2388572
augugccucaaacuacagg

SEQ ID NO: 2388574 - RNA, 19 nt, Artificial Sequence
  Description of Artificial Sequence: Synthetic oligonucleotide
  Sense strand starting at position 920 of SEQ ID NO: 1886119
ggcagucuggcccgauagu

SEQ ID NO: 2388575 - RNA, 19 nt, Artificial Sequence
  Description of Artificial Sequence: Synthetic oligonucleotide
  Antisense strand to SEQ ID NO: 2388574
acuaucgggccagacugcc

SEQ ID NO: 2388576 - RNA, 19 nt, Artificial Sequence
  Description of Artificial Sequence: Synthetic oligonucleotide
  Sense strand starting at position 1115 of SEQ ID NO: 1886119
caccgcugucagcaaugaa

SEQ ID NO: 2388577 - RNA, 19 nt, Artificial Sequence
  Description of Artificial Sequence: Synthetic oligonucleotide
  Antisense strand to SEQ ID NO: 2388576
uucauugcugacagcggug

SEQ ID NO: 2388578 - RNA, 19 nt, Artificial Sequence
  Description of Artificial Sequence: Synthetic oligonucleotide
  Sense strand starting at position 3270 of SEQ ID NO: 1886120
aggaacucuugacaucuga

SEQ ID NO: 2388579 - RNA, 19 nt, Artificial Sequence
  Description of Artificial Sequence: Synthetic oligonucleotide
  Antisense strand to SEQ ID NO: 2388578
ucagaugucaagaguuccu

SEQ ID NO: 2388580 - RNA, 19 nt, Artificial Sequence
  Description of Artificial Sequence: Synthetic oligonucleotide
  Sense strand starting at position 26 of SEQ ID NO: 1886121
guuugaaggcuugauuauc

SEQ ID NO: 2388581 - RNA, 19 nt, Artificial Sequence
  Description of Artificial Sequence: Synthetic oligonucleotide
  Antisense strand to SEQ ID NO: 2388580
gauaaucaagccuucaaac

SEQ ID NO: 2388582 - RNA, 19 nt, Artificial Sequence
  Description of Artificial Sequence: Synthetic oligonucleotide
  Sense strand starting at position 71 of SEQ ID NO: 1886121
agaagaugcugaccuggau

SEQ ID NO: 2388583 - RNA, 19 nt, Artificial Sequence
  Description of Artificial Sequence: Synthetic oligonucleotide
  Antisense strand to SEQ ID NO: 2388582
auccaggucagcaucuucu

SEQ ID NO: 2388584 - RNA, 19 nt, Artificial Sequence
  Description of Artificial Sequence: Synthetic oligonucleotide
  Sense strand starting at position 181 of SEQ ID NO: 1886121
cuggaaaguuugguauaga

SEQ ID NO: 2388585 - RNA, 19 nt, Artificial Sequence
  Description of Artificial Sequence: Synthetic oligonucleotide
  Antisense strand to SEQ ID NO: 2388584
ucuauaccaaacuuuccag

SEQ ID NO: 2388586 - RNA, 19 nt, Artificial Sequence
  Description of Artificial Sequence: Synthetic oligonucleotide
  Sense strand starting at position 242 of SEQ ID NO: 1886121
ggaagacaaugggauacau

SEQ ID NO: 2388587 - RNA, 19 nt, Artificial Sequence
  Description of Artificial Sequence: Synthetic oligonucleotide
  Antisense strand to SEQ ID NO: 2388586
auguaucccauugucuucc

SEQ ID NO: 2388588 - RNA, 19 nt, Artificial Sequence
  Description of Artificial Sequence: Synthetic oligonucleotide
  Sense strand starting at position 323 of SEQ ID NO: 1886121
uggacagcacucuaucuaa

SEQ ID NO: 2388589 - RNA, 19 nt, Artificial Sequence
  Description of Artificial Sequence: Synthetic oligonucleotide
  Antisense strand to SEQ ID NO: 2388588
uuagauagagugcugucca

SEQ ID NO: 2388590 - RNA, 19 nt, Artificial Sequence
  Description of Artificial Sequence: Synthetic oligonucleotide
  Sense strand starting at position 551 of SEQ ID NO: 1886121
ggcugcuuauaugugauau

SEQ ID NO: 2388591 - RNA, 19 nt, Artificial Sequence
  Description of Artificial Sequence: Synthetic oligonucleotide
  Antisense strand to SEQ ID NO: 2388590
auaucacauauaagcagcc

SEQ ID NO: 2388592 - RNA, 19 nt, Artificial Sequence
  Description of Artificial Sequence: Synthetic oligonucleotide
  Sense strand starting at position 553 of SEQ ID NO: 1886121
cugcuuauaugugauauuu

SEQ ID NO: 2388593 - RNA, 19 nt, Artificial Sequence
  Description of Artificial Sequence: Synthetic oligonucleotide
  Antisense strand to SEQ ID NO: 2388592
aaauaucacauauaagcag

SEQ ID NO: 2388594 - RNA, 19 nt, Artificial Sequence
  Description of Artificial Sequence: Synthetic oligonucleotide
  Sense strand starting at position 585 of SEQ ID NO: 1886121
ugaugacaacaugguuuau

SEQ ID NO: 2388595 - RNA, 19 nt, Artificial Sequence
  Description of Artificial Sequence: Synthetic oligonucleotide
  Antisense strand to SEQ ID NO: 2388594
auaaaccauguugucauca

SEQ ID NO: 2388596 - RNA, 19 nt, Artificial Sequence
  Description of Artificial Sequence: Synthetic oligonucleotide
  Sense strand starting at position 606 of SEQ ID NO: 1886121
uugucauugcuuucgugac

SEQ ID NO: 2388597 - RNA, 19 nt, Artificial Sequence
  Description of Artificial Sequence: Synthetic oligonucleotide
  Antisense strand to SEQ ID NO: 2388596
gucacgaaagcaaugacaa

SEQ ID NO: 2388598 - RNA, 19 nt, Artificial Sequence
  Description of Artificial Sequence: Synthetic oligonucleotide
  Sense strand starting at position 610 of SEQ ID NO: 1886121
cauugcuuucgugaccaca

SEQ ID NO: 2388599 - RNA, 19 nt, Artificial Sequence
  Description of Artificial Sequence: Synthetic oligonucleotide
  Antisense strand to SEQ ID NO: 2388598
uguggucacgaaagcaaug

SEQ ID NO: 2388600 - RNA, 19 nt, Artificial Sequence
  Description of Artificial Sequence: Synthetic oligonucleotide
  Sense strand starting at position 613 of SEQ ID NO: 1886121
ugcuuucgugaccacauuu

SEQ ID NO: 2388601 - RNA, 19 nt, Artificial Sequence
  Description of Artificial Sequence: Synthetic oligonucleotide
  Antisense strand to SEQ ID NO: 2388600
aaauguggucacgaaagca

SEQ ID NO: 2388602 - RNA, 19 nt, Artificial Sequence
  Description of Artificial Sequence: Synthetic oligonucleotide
  Sense strand starting at position 831 of SEQ ID NO: 1886121
agagauagcuguucuguca

SEQ ID NO: 2388603 - RNA, 19 nt, Artificial Sequence
  Description of Artificial Sequence: Synthetic oligonucleotide
  Antisense strand to SEQ ID NO: 2388602
ugacagaacagcuaucucu

SEQ ID NO: 2388604 - RNA, 19 nt, Artificial Sequence
  Description of Artificial Sequence: Synthetic oligonucleotide
  Sense strand starting at position 915 of SEQ ID NO: 1886121
ucaaguugcaugugcagaa

SEQ ID NO: 2388605 - RNA, 19 nt, Artificial Sequence
  Description of Artificial Sequence: Synthetic oligonucleotide
  Antisense strand to SEQ ID NO: 2388604
uucugcacaugcaacuuga

SEQ ID NO: 2388606 - RNA, 19 nt, Artificial Sequence
  Description of Artificial Sequence: Synthetic oligonucleotide
  Sense strand starting at position 928 of SEQ ID NO: 1886121
gcagaagccucauuccuaa

SEQ ID NO: 2388607 - RNA, 19 nt, Artificial Sequence
  Description of Artificial Sequence: Synthetic oligonucleotide
  Antisense strand to SEQ ID NO: 2388606
uuaggaaugaggcuucugc

SEQ ID NO: 2388608 - RNA, 19 nt, Artificial Sequence
  Description of Artificial Sequence: Synthetic oligonucleotide
  Sense strand starting at position 966 of SEQ ID NO: 1886121
aaagauaaggacuguguca

SEQ ID NO: 2388609 - RNA, 19 nt, Artificial Sequence
  Description of Artificial Sequence: Synthetic oligonucleotide
  Antisense strand to SEQ ID NO: 2388608
ugacacaguccuuaucuuu

SEQ ID NO: 2388610 - RNA, 19 nt, Artificial Sequence
  Description of Artificial Sequence: Synthetic oligonucleotide
  Sense strand starting at position 968 of SEQ ID NO: 1886121
agauaaggacugugucaau

SEQ ID NO: 2388611 - RNA, 19 nt, Artificial Sequence
  Description of Artificial Sequence: Synthetic oligonucleotide
  Antisense strand to SEQ ID NO: 2388610
auugacacaguccuuaucu

SEQ ID NO: 2388612 - RNA, 19 nt, Artificial Sequence
  Description of Artificial Sequence: Synthetic oligonucleotide
  Sense strand starting at position 1045 of SEQ ID NO: 1886121
gcaggcugucaauaaaugu

SEQ ID NO: 2388613 - RNA, 19 nt, Artificial Sequence
  Description of Artificial Sequence: Synthetic oligonucleotide
  Antisense strand to SEQ ID NO: 2388612
acauuuauugacagccugc

SEQ ID NO: 2388614 - RNA, 19 nt, Artificial Sequence
  Description of Artificial Sequence: Synthetic oligonucleotide
  Sense strand starting at position 1052 of SEQ ID NO: 1886121
gucaauaaaugucucugaa

SEQ ID NO: 2388615 - RNA, 19 nt, Artificial Sequence
  Description of Artificial Sequence: Synthetic oligonucleotide
  Antisense strand to SEQ ID NO: 2388614
uucagagacauuuauugac

SEQ ID NO: 2388616 - RNA, 19 nt, Artificial Sequence
  Description of Artificial Sequence: Synthetic oligonucleotide
  Sense strand starting at position 1181 of SEQ ID NO: 1886121
uguguagcacucgagucaa

SEQ ID NO: 2388617 - RNA, 19 nt, Artificial Sequence
  Description of Artificial Sequence: Synthetic oligonucleotide
  Antisense strand to SEQ ID NO: 2388616
uugacucgagugcuacaca

SEQ ID NO: 2388618 - RNA, 19 nt, Artificial Sequence
  Description of Artificial Sequence: Synthetic oligonucleotide
  Sense strand starting at position 1257 of SEQ ID NO: 1886121
ggaagucauccugaauggu

SEQ ID NO: 2388619 - RNA, 19 nt, Artificial Sequence
  Description of Artificial Sequence: Synthetic oligonucleotide
  Antisense strand to SEQ ID NO: 2388618
accauucaggaugacuucc

SEQ ID NO: 2388620 - RNA, 19 nt, Artificial Sequence
  Description of Artificial Sequence: Synthetic oligonucleotide
  Sense strand starting at position 1263 of SEQ ID NO: 1886121
cauccugaaugguugcuaa

SEQ ID NO: 2388621 - RNA, 19 nt, Artificial Sequence
  Description of Artificial Sequence: Synthetic oligonucleotide
  Antisense strand to SEQ ID NO: 2388620
uuagcaaccauucaggaug

SEQ ID NO: 2388622 - RNA, 19 nt, Artificial Sequence
  Description of Artificial Sequence: Synthetic oligonucleotide
  Sense strand starting at position 1266 of SEQ ID NO: 1886121
ccugaaugguugcuaaaga

SEQ ID NO: 2388623 - RNA, 19 nt, Artificial Sequence
  Description of Artificial Sequence: Synthetic oligonucleotide
  Antisense strand to SEQ ID NO: 2388622
ucuuuagcaaccauucagg

SEQ ID NO: 2388624 - RNA, 19 nt, Artificial Sequence
  Description of Artificial Sequence: Synthetic oligonucleotide
  Sense strand starting at position 1391 of SEQ ID NO: 1886121
gcagguguggcucauauuc

SEQ ID NO: 2388625 - RNA, 19 nt, Artificial Sequence
  Description of Artificial Sequence: Synthetic oligonucleotide
  Antisense strand to SEQ ID NO: 2388624
gaauaugagccacaccugc

SEQ ID NO: 2388626 - RNA, 19 nt, Artificial Sequence
  Description of Artificial Sequence: Synthetic oligonucleotide
  Sense strand starting at position 1670 of SEQ ID NO: 1886121
gcgagaggcacugauagaa

SEQ ID NO: 2388627 - RNA, 19 nt, Artificial Sequence
  Description of Artificial Sequence: Synthetic oligonucleotide
  Antisense strand to SEQ ID NO: 2388626
uucuaucagugccucucgc

SEQ ID NO: 2388628 - RNA, 19 nt, Artificial Sequence
  Description of Artificial Sequence: Synthetic oligonucleotide
  Sense strand starting at position 1869 of SEQ ID NO: 1886121
cauccugaugucuggguga

SEQ ID NO: 2388629 - RNA, 19 nt, Artificial Sequence
  Description of Artificial Sequence: Synthetic oligonucleotide
  Antisense strand to SEQ ID NO: 2388628
ucacccagacaucaggaug

SEQ ID NO: 2388630 - RNA, 19 nt, Artificial Sequence
  Description of Artificial Sequence: Synthetic oligonucleotide
  Sense strand starting at position 1871 of SEQ ID NO: 1886121
uccugaugucugggugauc

SEQ ID NO: 2388631 - RNA, 19 nt, Artificial Sequence
  Description of Artificial Sequence: Synthetic oligonucleotide
  Antisense strand to SEQ ID NO: 2388630
gaucacccagacaucagga

SEQ ID NO: 2388632 - RNA, 19 nt, Artificial Sequence
  Description of Artificial Sequence: Synthetic oligonucleotide
  Sense strand starting at position 1872 of SEQ ID NO: 1886121
ccugaugucugggugaucu

SEQ ID NO: 2388633 - RNA, 19 nt, Artificial Sequence
  Description of Artificial Sequence: Synthetic oligonucleotide
  Antisense strand to SEQ ID NO: 2388632
agaucacccagacaucagg

SEQ ID NO: 2388634 - RNA, 19 nt, Artificial Sequence
  Description of Artificial Sequence: Synthetic oligonucleotide
  Sense strand starting at position 2293 of SEQ ID NO: 1886121
gacggaaucuuaccauguu

SEQ ID NO: 2388635 - RNA, 19 nt, Artificial Sequence
  Description of Artificial Sequence: Synthetic oligonucleotide
  Antisense strand to SEQ ID NO: 2388634
aacaugguaagauuccguc

SEQ ID NO: 2388636 - RNA, 19 nt, Artificial Sequence
  Description of Artificial Sequence: Synthetic oligonucleotide
  Sense strand starting at position 2935 of SEQ ID NO: 1886121
cacagaagccuuuguuaag

SEQ ID NO: 2388637 - RNA, 19 nt, Artificial Sequence
  Description of Artificial Sequence: Synthetic oligonucleotide
  Antisense strand to SEQ ID NO: 2388636
cuuaacaaaggcuucugug

SEQ ID NO: 2388638 - RNA, 19 nt, Artificial Sequence
  Description of Artificial Sequence: Synthetic oligonucleotide
  Sense strand starting at position 2936 of SEQ ID NO: 1886121
acagaagccuuuguuaagu

SEQ ID NO: 2388639 - RNA, 19 nt, Artificial Sequence
  Description of Artificial Sequence: Synthetic oligonucleotide
  Antisense strand to SEQ ID NO: 2388638
acuuaacaaaggcuucugu

SEQ ID NO: 2388640 - RNA, 19 nt, Artificial Sequence
  Description of Artificial Sequence: Synthetic oligonucleotide
  Sense strand starting at position 3028 of SEQ ID NO: 1886121
ugaggucugccagggaaua

SEQ ID NO: 2388641 - RNA, 19 nt, Artificial Sequence
  Description of Artificial Sequence: Synthetic oligonucleotide
  Antisense strand to SEQ ID NO: 2388640
uauucccuggcagaccuca

SEQ ID NO: 2388642 - RNA, 19 nt, Artificial Sequence
  Description of Artificial Sequence: Synthetic oligonucleotide
  Sense strand starting at position 3093 of SEQ ID NO: 1886121
ugucucuacccuggaggaa

SEQ ID NO: 2388643 - RNA, 19 nt, Artificial Sequence
  Description of Artificial Sequence: Synthetic oligonucleotide
  Antisense strand to SEQ ID NO: 2388642
uuccuccaggguagagaca

SEQ ID NO: 2388644 - RNA, 19 nt, Artificial Sequence
  Description of Artificial Sequence: Synthetic oligonucleotide
  Sense strand starting at position 3109 of SEQ ID NO: 1886121
gaauuuccuuugggucuga

SEQ ID NO: 2388645 - RNA, 19 nt, Artificial Sequence
  Description of Artificial Sequence: Synthetic oligonucleotide
  Antisense strand to SEQ ID NO: 2388644
ucagacccaaaggaaauuc

SEQ ID NO: 2388646 - RNA, 19 nt, Artificial Sequence
  Description of Artificial Sequence: Synthetic oligonucleotide
  Sense strand starting at position 3113 of SEQ ID NO: 1886121
uuccuuugggucugagaca

SEQ ID NO: 2388647 - RNA, 19 nt, Artificial Sequence
  Description of Artificial Sequence: Synthetic oligonucleotide
  Antisense strand to SEQ ID NO: 2388646
ugucucagacccaaaggaa

SEQ ID NO: 2388648 - RNA, 19 nt, Artificial Sequence
  Description of Artificial Sequence: Synthetic oligonucleotide
  Sense strand starting at position 3163 of SEQ ID NO: 1886121
ccgucuaucuugucucaau

SEQ ID NO: 2388649 - RNA, 19 nt, Artificial Sequence
  Description of Artificial Sequence: Synthetic oligonucleotide
  Antisense strand to SEQ ID NO: 2388648
auugagacaagauagacgg

SEQ ID NO: 2388650 - RNA, 19 nt, Artificial Sequence
  Description of Artificial Sequence: Synthetic oligonucleotide
  Sense strand starting at position 3164 of SEQ ID NO: 1886121
cgucuaucuugucucaaua

SEQ ID NO: 2388651 - RNA, 19 nt, Artificial Sequence
  Description of Artificial Sequence: Synthetic oligonucleotide
  Antisense strand to SEQ ID NO: 2388650
uauugagacaagauagacg

SEQ ID NO: 2388652 - RNA, 19 nt, Artificial Sequence
  Description of Artificial Sequence: Synthetic oligonucleotide
  Sense strand starting at position 3352 of SEQ ID NO: 1886121
cuucuccugccagaauuga

SEQ ID NO: 2388653 - RNA, 19 nt, Artificial Sequence
  Description of Artificial Sequence: Synthetic oligonucleotide
  Antisense strand to SEQ ID NO: 2388652
ucaauucuggcaggagaag

SEQ ID NO: 2388654 - RNA, 19 nt, Artificial Sequence
  Description of Artificial Sequence: Synthetic oligonucleotide
  Sense strand starting at position 3385 of SEQ ID NO: 1886121
uguaucacuucuguagcau

SEQ ID NO: 2388655 - RNA, 19 nt, Artificial Sequence
  Description of Artificial Sequence: Synthetic oligonucleotide
  Antisense strand to SEQ ID NO: 2388654
augcuacagaagugauaca

SEQ ID NO: 2388656 - RNA, 19 nt, Artificial Sequence
  Description of Artificial Sequence: Synthetic oligonucleotide
  Sense strand starting at position 3386 of SEQ ID NO: 1886121
guaucacuucuguagcauu

SEQ ID NO: 2388657 - RNA, 19 nt, Artificial Sequence
  Description of Artificial Sequence: Synthetic oligonucleotide
  Antisense strand to SEQ ID NO: 2388656
aaugcuacagaagugauac

SEQ ID NO: 2388658 - RNA, 19 nt, Artificial Sequence
  Description of Artificial Sequence: Synthetic oligonucleotide
  Sense strand starting at position 3530 of SEQ ID NO: 1886121
gcaagucuuccaggagaaa

SEQ ID NO: 2388659 - RNA, 19 nt, Artificial Sequence
  Description of Artificial Sequence: Synthetic oligonucleotide
  Antisense strand to SEQ ID NO: 2388658
uuucuccuggaagacuugc

SEQ ID NO: 2388660 - RNA, 19 nt, Artificial Sequence
  Description of Artificial Sequence: Synthetic oligonucleotide
  Sense strand starting at position 63 of SEQ ID NO: 1886122
uuacaugaauguguaguua

SEQ ID NO: 2388661 - RNA, 19 nt, Artificial Sequence
  Description of Artificial Sequence: Synthetic oligonucleotide
  Antisense strand to SEQ ID NO: 2388660
uaacuacacauucauguaa

SEQ ID NO: 2388662 - RNA, 19 nt, Artificial Sequence
  Description of Artificial Sequence: Synthetic oligonucleotide
  Sense strand starting at position 78 of SEQ ID NO: 1886122
guuacuuguuccuugcaca

SEQ ID NO: 2388663 - RNA, 19 nt, Artificial Sequence
  Description of Artificial Sequence: Synthetic oligonucleotide
  Antisense strand to SEQ ID NO: 2388662
ugugcaaggaacaaguaac

SEQ ID NO: 2388664 - RNA, 19 nt, Artificial Sequence
  Description of Artificial Sequence: Synthetic oligonucleotide
  Sense strand starting at position 899 of SEQ ID NO: 1886122
ccaguuagaauguggaaga

SEQ ID NO: 2388665 - RNA, 19 nt, Artificial Sequence
  Description of Artificial Sequence: Synthetic oligonucleotide
  Antisense strand to SEQ ID NO: 2388664
ucuuccacauucuaacugg

SEQ ID NO: 2388666 - RNA, 19 nt, Artificial Sequence
  Description of Artificial Sequence: Synthetic oligonucleotide
  Sense strand starting at position 900 of SEQ ID NO: 1886122
caguuagaauguggaagau

SEQ ID NO: 2388667 - RNA, 19 nt, Artificial Sequence
  Description of Artificial Sequence: Synthetic oligonucleotide
  Antisense strand to SEQ ID NO: 2388666
aucuuccacauucuaacug

SEQ ID NO: 2388668 - RNA, 19 nt, Artificial Sequence
  Description of Artificial Sequence: Synthetic oligonucleotide
  Sense strand starting at position 937 of SEQ ID NO: 1886122
uugccauaaccaugagaaa

SEQ ID NO: 2388669 - RNA, 19 nt, Artificial Sequence
  Description of Artificial Sequence: Synthetic oligonucleotide
  Antisense strand to SEQ ID NO: 2388668
uuucucaugguuauggcaa

SEQ ID NO: 2388670 - RNA, 19 nt, Artificial Sequence
  Description of Artificial Sequence: Synthetic oligonucleotide
  Sense strand starting at position 1084 of SEQ ID NO: 1886122
cagcauuugcacuguguga

SEQ ID NO: 2388671 - RNA, 19 nt, Artificial Sequence
  Description of Artificial Sequence: Synthetic oligonucleotide
  Antisense strand to SEQ ID NO: 2388670
ucacacagugcaaaugcug

SEQ ID NO: 2388672 - RNA, 19 nt, Artificial Sequence
  Description of Artificial Sequence: Synthetic oligonucleotide
  Sense strand starting at position 1086 of SEQ ID NO: 1886122
gcauuugcacugugugaag

SEQ ID NO: 2388673 - RNA, 19 nt, Artificial Sequence
  Description of Artificial Sequence: Synthetic oligonucleotide
  Antisense strand to SEQ ID NO: 2388672
cuucacacagugcaaaugc

SEQ ID NO: 2388674 - RNA, 19 nt, Artificial Sequence
  Description of Artificial Sequence: Synthetic oligonucleotide
  Sense strand starting at position 1289 of SEQ ID NO: 1886122
aaaggcuggccuggaaaua

SEQ ID NO: 2388675 - RNA, 19 nt, Artificial Sequence
  Description of Artificial Sequence: Synthetic oligonucleotide
  Antisense strand to SEQ ID NO: 2388674
uauuuccaggccagccuuu

SEQ ID NO: 2388676 - RNA, 19 nt, Artificial Sequence
  Description of Artificial Sequence: Synthetic oligonucleotide
  Sense strand starting at position 1309 of SEQ ID NO: 1886122
gagaacauguagucuacca

SEQ ID NO: 2388677 - RNA, 19 nt, Artificial Sequence
  Description of Artificial Sequence: Synthetic oligonucleotide
  Antisense strand to SEQ ID NO: 2388676
ugguagacuacauguucuc

SEQ ID NO: 2388678 - RNA, 19 nt, Artificial Sequence
  Description of Artificial Sequence: Synthetic oligonucleotide
  Sense strand starting at position 1491 of SEQ ID NO: 1886122
gucagagaucucugggaca

SEQ ID NO: 2388679 - RNA, 19 nt, Artificial Sequence
  Description of Artificial Sequence: Synthetic oligonucleotide
  Antisense strand to SEQ ID NO: 2388678
ugucccagagaucucugac

SEQ ID NO: 2388680 - RNA, 19 nt, Artificial Sequence
  Description of Artificial Sequence: Synthetic oligonucleotide
  Sense strand starting at position 1494 of SEQ ID NO: 1886122
agagaucucugggacaaca

SEQ ID NO: 2388681 - RNA, 19 nt, Artificial Sequence
  Description of Artificial Sequence: Synthetic oligonucleotide
  Antisense strand to SEQ ID NO: 2388680
uguugucccagagaucucu

SEQ ID NO: 2388682 - RNA, 19 nt, Artificial Sequence
  Description of Artificial Sequence: Synthetic oligonucleotide
  Sense strand starting at position 1634 of SEQ ID NO: 1886122
ccaagaagcucaguaagca

SEQ ID NO: 2388683 - RNA, 19 nt, Artificial Sequence
  Description of Artificial Sequence: Synthetic oligonucleotide
  Antisense strand to SEQ ID NO: 2388682
ugcuuacugagcuucuugg

SEQ ID NO: 2388684 - RNA, 19 nt, Artificial Sequence
  Description of Artificial Sequence: Synthetic oligonucleotide
  Sense strand starting at position 1684 of SEQ ID NO: 1886122
agucauaucuaggcacauc

SEQ ID NO: 2388685 - RNA, 19 nt, Artificial Sequence
  Description of Artificial Sequence: Synthetic oligonucleotide
  Antisense strand to SEQ ID NO: 2388684
gaugugccuagauaugacu

SEQ ID NO: 2388686 - RNA, 19 nt, Artificial Sequence
  Description of Artificial Sequence: Synthetic oligonucleotide
  Sense strand starting at position 1826 of SEQ ID NO: 1886122
cuauguaagucagaagaca

SEQ ID NO: 2388687 - RNA, 19 nt, Artificial Sequence
  Description of Artificial Sequence: Synthetic oligonucleotide
  Antisense strand to SEQ ID NO: 2388686
ugucuucugacuuacauag

SEQ ID NO: 2388688 - RNA, 19 nt, Artificial Sequence
  Description of Artificial Sequence: Synthetic oligonucleotide
  Sense strand starting at position 2012 of SEQ ID NO: 1886122
ucuacuuacuuguacuaga

SEQ ID NO: 2388689 - RNA, 19 nt, Artificial Sequence
  Description of Artificial Sequence: Synthetic oligonucleotide
  Antisense strand to SEQ ID NO: 2388688
ucuaguacaaguaaguaga

SEQ ID NO: 2388690 - RNA, 19 nt, Artificial Sequence
  Description of Artificial Sequence: Synthetic oligonucleotide
  Sense strand starting at position 2017 of SEQ ID NO: 1886122
uuacuuguacuagagauuc

SEQ ID NO: 2388691 - RNA, 19 nt, Artificial Sequence
  Description of Artificial Sequence: Synthetic oligonucleotide
  Antisense strand to SEQ ID NO: 2388690
gaaucucuaguacaaguaa

SEQ ID NO: 2388692 - RNA, 19 nt, Artificial Sequence
  Description of Artificial Sequence: Synthetic oligonucleotide
  Sense strand starting at position 2027 of SEQ ID NO: 1886122
uagagauucuaucaggaug

SEQ ID NO: 2388693 - RNA, 19 nt, Artificial Sequence
  Description of Artificial Sequence: Synthetic oligonucleotide
  Antisense strand to SEQ ID NO: 2388692
cauccugauagaaucucua

SEQ ID NO: 2388694 - RNA, 19 nt, Artificial Sequence
  Description of Artificial Sequence: Synthetic oligonucleotide
  Sense strand starting at position 2029 of SEQ ID NO: 1886122
gagauucuaucaggaugau

SEQ ID NO: 2388695 - RNA, 19 nt, Artificial Sequence
  Description of Artificial Sequence: Synthetic oligonucleotide
  Antisense strand to SEQ ID NO: 2388694
aucauccugauagaaucuc

SEQ ID NO: 2388696 - RNA, 19 nt, Artificial Sequence
  Description of Artificial Sequence: Synthetic oligonucleotide
  Sense strand starting at position 2038 of SEQ ID NO: 1886122
ucaggaugauuaggcaaga

SEQ ID NO: 2388697 - RNA, 19 nt, Artificial Sequence
  Description of Artificial Sequence: Synthetic oligonucleotide
  Antisense strand to SEQ ID NO: 2388696
ucuugccuaaucauccuga

SEQ ID NO: 2388698 - RNA, 19 nt, Artificial Sequence
  Description of Artificial Sequence: Synthetic oligonucleotide
  Sense strand starting at position 2112 of SEQ ID NO: 1886122
acagguaaaugaucuugua

SEQ ID NO: 2388699 - RNA, 19 nt, Artificial Sequence
  Description of Artificial Sequence: Synthetic oligonucleotide
  Antisense strand to SEQ ID NO: 2388698
uacaagaucauuuaccugu

SEQ ID NO: 2388700 - RNA, 19 nt, Artificial Sequence
  Description of Artificial Sequence: Synthetic oligonucleotide
  Sense strand starting at position 2179 of SEQ ID NO: 1886122
ucaguuuagcaagauucca

SEQ ID NO: 2388701 - RNA, 19 nt, Artificial Sequence
  Description of Artificial Sequence: Synthetic oligonucleotide
  Antisense strand to SEQ ID NO: 2388700
uggaaucuugcuaaacuga

SEQ ID NO: 2388702 - RNA, 19 nt, Artificial Sequence
  Description of Artificial Sequence: Synthetic oligonucleotide
  Sense strand starting at position 2238 of SEQ ID NO: 1886122
acuagcaaugaaugucaaa

SEQ ID NO: 2388703 - RNA, 19 nt, Artificial Sequence
  Description of Artificial Sequence: Synthetic oligonucleotide
  Antisense strand to SEQ ID NO: 2388702
uuugacauucauugcuagu

SEQ ID NO: 2388704 - RNA, 19 nt, Artificial Sequence
  Description of Artificial Sequence: Synthetic oligonucleotide
  Sense strand starting at position 2449 of SEQ ID NO: 1886122
agcaauaaucccuaaagug

SEQ ID NO: 2388705 - RNA, 19 nt, Artificial Sequence
  Description of Artificial Sequence: Synthetic oligonucleotide
  Antisense strand to SEQ ID NO: 2388704
cacuuuagggauuauugcu

SEQ ID NO: 2388706 - RNA, 19 nt, Artificial Sequence
  Description of Artificial Sequence: Synthetic oligonucleotide
  Sense strand starting at position 2613 of SEQ ID NO: 1886122
aaacaaaguucucagagga

SEQ ID NO: 2388707 - RNA, 19 nt, Artificial Sequence
  Description of Artificial Sequence: Synthetic oligonucleotide
  Antisense strand to SEQ ID NO: 2388706
uccucugagaacuuuguuu

SEQ ID NO: 2388708 - RNA, 19 nt, Artificial Sequence
  Description of Artificial Sequence: Synthetic oligonucleotide
  Sense strand starting at position 2670 of SEQ ID NO: 1886122
uaauuaagacagugugucu

SEQ ID NO: 2388709 - RNA, 19 nt, Artificial Sequence
  Description of Artificial Sequence: Synthetic oligonucleotide
  Antisense strand to SEQ ID NO: 2388708
agacacacugucuuaauua

SEQ ID NO: 2388710 - RNA, 19 nt, Artificial Sequence
  Description of Artificial Sequence: Synthetic oligonucleotide
  Sense strand starting at position 2673 of SEQ ID NO: 1886122
uuaagacagugugucuauu

SEQ ID NO: 2388711 - RNA, 19 nt, Artificial Sequence
  Description of Artificial Sequence: Synthetic oligonucleotide
  Antisense strand to SEQ ID NO: 2388710
aauagacacacugucuuaa

SEQ ID NO: 2388712 - RNA, 19 nt, Artificial Sequence
  Description of Artificial Sequence: Synthetic oligonucleotide
  Sense strand starting at position 2687 of SEQ ID NO: 1886122
cuauuaguuugguuugguu

SEQ ID NO: 2388713 - RNA, 19 nt, Artificial Sequence
  Description of Artificial Sequence: Synthetic oligonucleotide
  Antisense strand to SEQ ID NO: 2388712
aaccaaaccaaacuaauag

SEQ ID NO: 2388714 - RNA, 19 nt, Artificial Sequence
  Description of Artificial Sequence: Synthetic oligonucleotide
  Sense strand starting at position 2878 of SEQ ID NO: 1886122
gagacagguucucuuuagu

SEQ ID NO: 2388715 - RNA, 19 nt, Artificial Sequence
  Description of Artificial Sequence: Synthetic oligonucleotide
  Antisense strand to SEQ ID NO: 2388714
acuaaagagaaccugucuc

SEQ ID NO: 2388716 - RNA, 19 nt, Artificial Sequence
  Description of Artificial Sequence: Synthetic oligonucleotide
  Sense strand starting at position 2881 of SEQ ID NO: 1886122
acagguucucuuuaguaga

SEQ ID NO: 2388717 - RNA, 19 nt, Artificial Sequence
  Description of Artificial Sequence: Synthetic oligonucleotide
  Antisense strand to SEQ ID NO: 2388716
ucuacuaaagagaaccugu

SEQ ID NO: 2388718 - RNA, 19 nt, Artificial Sequence
  Description of Artificial Sequence: Synthetic oligonucleotide
  Sense strand starting at position 2883 of SEQ ID NO: 1886122
agguucucuuuaguagaga

SEQ ID NO: 2388719 - RNA, 19 nt, Artificial Sequence
  Description of Artificial Sequence: Synthetic oligonucleotide
  Antisense strand to SEQ ID NO: 2388718
ucucuacuaaagagaaccu

SEQ ID NO: 2388720 - RNA, 19 nt, Artificial Sequence
  Description of Artificial Sequence: Synthetic oligonucleotide
  Sense strand starting at position 3007 of SEQ ID NO: 1886122
cccagucaacagugugaua

SEQ ID NO: 2388721 - RNA, 19 nt, Artificial Sequence
  Description of Artificial Sequence: Synthetic oligonucleotide
  Antisense strand to SEQ ID NO: 2388720
uaucacacuguugacuggg

SEQ ID NO: 2388722 - RNA, 19 nt, Artificial Sequence
  Description of Artificial Sequence: Synthetic oligonucleotide
  Sense strand starting at position 3009 of SEQ ID NO: 1886122
cagucaacagugugauauu

SEQ ID NO: 2388723 - RNA, 19 nt, Artificial Sequence
  Description of Artificial Sequence: Synthetic oligonucleotide
  Antisense strand to SEQ ID NO: 2388722
aauaucacacuguugacug

SEQ ID NO: 2388724 - RNA, 19 nt, Artificial Sequence
  Description of Artificial Sequence: Synthetic oligonucleotide
  Sense strand starting at position 3018 of SEQ ID NO: 1886122
gugugauauugacauuaag

SEQ ID NO: 2388725 - RNA, 19 nt, Artificial Sequence
  Description of Artificial Sequence: Synthetic oligonucleotide
  Antisense strand to SEQ ID NO: 2388724
cuuaaugucaauaucacac

SEQ ID NO: 2388726 - RNA, 19 nt, Artificial Sequence
  Description of Artificial Sequence: Synthetic oligonucleotide
  Sense strand starting at position 3203 of SEQ ID NO: 1886122
acagcaacauuauucguaa

SEQ ID NO: 2388727 - RNA, 19 nt, Artificial Sequence
  Description of Artificial Sequence: Synthetic oligonucleotide
  Antisense strand to SEQ ID NO: 2388726
uuacgaauaauguugcugu

SEQ ID NO: 2388728 - RNA, 19 nt, Artificial Sequence
  Description of Artificial Sequence: Synthetic oligonucleotide
  Sense strand starting at position 3244 of SEQ ID NO: 1886122
cuguccaacugaugaauaa

SEQ ID NO: 2388729 - RNA, 19 nt, Artificial Sequence
  Description of Artificial Sequence: Synthetic oligonucleotide
  Antisense strand to SEQ ID NO: 2388728
uuauucaucaguuggacag

SEQ ID NO: 2388730 - RNA, 19 nt, Artificial Sequence
  Description of Artificial Sequence: Synthetic oligonucleotide
  Sense strand starting at position 3269 of SEQ ID NO: 1886122
ugugguaauguccacacaa

SEQ ID NO: 2388731 - RNA, 19 nt, Artificial Sequence
  Description of Artificial Sequence: Synthetic oligonucleotide
  Antisense strand to SEQ ID NO: 2388730
uuguguggacauuaccaca

SEQ ID NO: 2388732 - RNA, 19 nt, Artificial Sequence
  Description of Artificial Sequence: Synthetic oligonucleotide
  Sense strand starting at position 3271 of SEQ ID NO: 1886122
ugguaauguccacacaaua

SEQ ID NO: 2388733 - RNA, 19 nt, Artificial Sequence
  Description of Artificial Sequence: Synthetic oligonucleotide
  Antisense strand to SEQ ID NO: 2388732
uauuguguggacauuacca

SEQ ID NO: 2388734 - RNA, 19 nt, Artificial Sequence
  Description of Artificial Sequence: Synthetic oligonucleotide
  Sense strand starting at position 3567 of SEQ ID NO: 1886122
ugaaguaacgguugugcaa

SEQ ID NO: 2388735 - RNA, 19 nt, Artificial Sequence
  Description of Artificial Sequence: Synthetic oligonucleotide
  Antisense strand to SEQ ID NO: 2388734
uugcacaaccguuacuuca

SEQ ID NO: 2388736 - RNA, 19 nt, Artificial Sequence
  Description of Artificial Sequence: Synthetic oligonucleotide
  Sense strand starting at position 3579 of SEQ ID NO: 1886122
ugugcaauccugugaauau

SEQ ID NO: 2388737 - RNA, 19 nt, Artificial Sequence
  Description of Artificial Sequence: Synthetic oligonucleotide
  Antisense strand to SEQ ID NO: 2388736
auauucacaggauugcaca

SEQ ID NO: 2388738 - RNA, 19 nt, Artificial Sequence
  Description of Artificial Sequence: Synthetic oligonucleotide
  Sense strand starting at position 3623 of SEQ ID NO: 1886122
uucaguugguaggugaauu

SEQ ID NO: 2388739 - RNA, 19 nt, Artificial Sequence
  Description of Artificial Sequence: Synthetic oligonucleotide
  Antisense strand to SEQ ID NO: 2388738
aauucaccuaccaacugaa

SEQ ID NO: 2388740 - RNA, 19 nt, Artificial Sequence
  Description of Artificial Sequence: Synthetic oligonucleotide
  Sense strand starting at position 42 of SEQ ID NO: 1886123
ggaaaugacucagaucaga

SEQ ID NO: 2388741 - RNA, 19 nt, Artificial Sequence
  Description of Artificial Sequence: Synthetic oligonucleotide
  Antisense strand to SEQ ID NO: 2388740
ucugaucugagucauuucc

SEQ ID NO: 2388742 - RNA, 19 nt, Artificial Sequence
  Description of Artificial Sequence: Synthetic oligonucleotide
  Sense strand starting at position 214 of SEQ ID NO: 1886123
gucuauuucuggcccacau

SEQ ID NO: 2388743 - RNA, 19 nt, Artificial Sequence
  Description of Artificial Sequence: Synthetic oligonucleotide
  Antisense strand to SEQ ID NO: 2388742
augugggccagaaauagac

SEQ ID NO: 2388744 - RNA, 19 nt, Artificial Sequence
  Description of Artificial Sequence: Synthetic oligonucleotide
  Sense strand starting at position 341 of SEQ ID NO: 1886123
uuaaucuaccuauggcgaa

SEQ ID NO: 2388745 - RNA, 19 nt, Artificial Sequence
  Description of Artificial Sequence: Synthetic oligonucleotide
  Antisense strand to SEQ ID NO: 2388744
uucgccauagguagauuaa

SEQ ID NO: 2388746 - RNA, 19 nt, Artificial Sequence
  Description of Artificial Sequence: Synthetic oligonucleotide
  Sense strand starting at position 438 of SEQ ID NO: 1886123
aggguuccaagccagauua

SEQ ID NO: 2388747 - RNA, 19 nt, Artificial Sequence
  Description of Artificial Sequence: Synthetic oligonucleotide
  Antisense strand to SEQ ID NO: 2388746
uaaucuggcuuggaacccu

SEQ ID NO: 2388748 - RNA, 19 nt, Artificial Sequence
  Description of Artificial Sequence: Synthetic oligonucleotide
  Sense strand starting at position 477 of SEQ ID NO: 1886123
ggucuauacuguguugaga

SEQ ID NO: 2388749 - RNA, 19 nt, Artificial Sequence
  Description of Artificial Sequence: Synthetic oligonucleotide
  Antisense strand to SEQ ID NO: 2388748
ucucaacacaguauagacc

SEQ ID NO: 2388750 - RNA, 19 nt, Artificial Sequence
  Description of Artificial Sequence: Synthetic oligonucleotide
  Sense strand starting at position 568 of SEQ ID NO: 1886123
acaauuguugaaugcugaa

SEQ ID NO: 2388751 - RNA, 19 nt, Artificial Sequence
  Description of Artificial Sequence: Synthetic oligonucleotide
  Antisense strand to SEQ ID NO: 2388750
uucagcauucaacaauugu

SEQ ID NO: 2388752 - RNA, 19 nt, Artificial Sequence
  Description of Artificial Sequence: Synthetic oligonucleotide
  Sense strand starting at position 1131 of SEQ ID NO: 1886123
ggcagaguuaaguaguaac

SEQ ID NO: 2388753 - RNA, 19 nt, Artificial Sequence
  Description of Artificial Sequence: Synthetic oligonucleotide
  Antisense strand to SEQ ID NO: 2388752
guuacuacuuaacucugcc

SEQ ID NO: 2388754 - RNA, 19 nt, Artificial Sequence
  Description of Artificial Sequence: Synthetic oligonucleotide
  Sense strand starting at position 1195 of SEQ ID NO: 1886123
caaguuugcugacccugau

SEQ ID NO: 2388755 - RNA, 19 nt, Artificial Sequence
  Description of Artificial Sequence: Synthetic oligonucleotide
  Antisense strand to SEQ ID NO: 2388754
aucagggucagcaaacuug

SEQ ID NO: 2388756 - RNA, 19 nt, Artificial Sequence
  Description of Artificial Sequence: Synthetic oligonucleotide
  Sense strand starting at position 1198 of SEQ ID NO: 1886123
guuugcugacccugauuua

SEQ ID NO: 2388757 - RNA, 19 nt, Artificial Sequence
  Description of Artificial Sequence: Synthetic oligonucleotide
  Antisense strand to SEQ ID NO: 2388756
uaaaucagggucagcaaac

SEQ ID NO: 2388758 - RNA, 19 nt, Artificial Sequence
  Description of Artificial Sequence: Synthetic oligonucleotide
  Sense strand starting at position 1205 of SEQ ID NO: 1886123
gacccugauuuagaggaca

SEQ ID NO: 2388759 - RNA, 19 nt, Artificial Sequence
  Description of Artificial Sequence: Synthetic oligonucleotide
  Antisense strand to SEQ ID NO: 2388758
uguccucuaaaucaggguc

SEQ ID NO: 2388760 - RNA, 19 nt, Artificial Sequence
  Description of Artificial Sequence: Synthetic oligonucleotide
  Sense strand starting at position 1445 of SEQ ID NO: 1886123
guaugaaauuaacugcaga

SEQ ID NO: 2388761 - RNA, 19 nt, Artificial Sequence
  Description of Artificial Sequence: Synthetic oligonucleotide
  Antisense strand to SEQ ID NO: 2388760
ucugcaguuaauuucauac

SEQ ID NO: 2388762 - RNA, 19 nt, Artificial Sequence
  Description of Artificial Sequence: Synthetic oligonucleotide
  Sense strand starting at position 1630 of SEQ ID NO: 1886123
acagucacauuugauuaga

SEQ ID NO: 2388763 - RNA, 19 nt, Artificial Sequence
  Description of Artificial Sequence: Synthetic oligonucleotide
  Antisense strand to SEQ ID NO: 2388762
ucuaaucaaaugugacugu

SEQ ID NO: 2388764 - RNA, 19 nt, Artificial Sequence
  Description of Artificial Sequence: Synthetic oligonucleotide
  Sense strand starting at position 1665 of SEQ ID NO: 1886123
uuucuucgagccuauuauu

SEQ ID NO: 2388765 - RNA, 19 nt, Artificial Sequence
  Description of Artificial Sequence: Synthetic oligonucleotide
  Antisense strand to SEQ ID NO: 2388764
aauaauaggcucgaagaaa

SEQ ID NO: 2388766 - RNA, 19 nt, Artificial Sequence
  Description of Artificial Sequence: Synthetic oligonucleotide
  Sense strand starting at position 1737 of SEQ ID NO: 1886123
gaaagaacuugcucacggu

SEQ ID NO: 2388767 - RNA, 19 nt, Artificial Sequence
  Description of Artificial Sequence: Synthetic oligonucleotide
  Antisense strand to SEQ ID NO: 2388766
accgugagcaaguucuuuc

SEQ ID NO: 2388768 - RNA, 19 nt, Artificial Sequence
  Description of Artificial Sequence: Synthetic oligonucleotide
  Sense strand starting at position 1841 of SEQ ID NO: 1886123
aaucgauguugccuaauuu

SEQ ID NO: 2388769 - RNA, 19 nt, Artificial Sequence
  Description of Artificial Sequence: Synthetic oligonucleotide
  Antisense strand to SEQ ID NO: 2388768
aaauuaggcaacaucgauu

SEQ ID NO: 2388770 - RNA, 19 nt, Artificial Sequence
  Description of Artificial Sequence: Synthetic oligonucleotide
  Sense strand starting at position 1889 of SEQ ID NO: 1886123
gaagcuuaugcccauuagu

SEQ ID NO: 2388771 - RNA, 19 nt, Artificial Sequence
  Description of Artificial Sequence: Synthetic oligonucleotide
  Antisense strand to SEQ ID NO: 2388770
acuaaugggcauaagcuuc

SEQ ID NO: 2388772 - RNA, 19 nt, Artificial Sequence
  Description of Artificial Sequence: Synthetic oligonucleotide
  Sense strand starting at position 1913 of SEQ ID NO: 1886123
uucuuauuauugguaguga

SEQ ID NO: 2388773 - RNA, 19 nt, Artificial Sequence
  Description of Artificial Sequence: Synthetic oligonucleotide
  Antisense strand to SEQ ID NO: 2388772
ucacuaccaauaauaagaa

SEQ ID NO: 2388774 - RNA, 19 nt, Artificial Sequence
  Description of Artificial Sequence: Synthetic oligonucleotide
  Sense strand starting at position 2143 of SEQ ID NO: 1886123
uuuaaugguccaggaauaa

SEQ ID NO: 2388775 - RNA, 19 nt, Artificial Sequence
  Description of Artificial Sequence: Synthetic oligonucleotide
  Antisense strand to SEQ ID NO: 2388774
uuauuccuggaccauuaaa

SEQ ID NO: 2388776 - RNA, 19 nt, Artificial Sequence
  Description of Artificial Sequence: Synthetic oligonucleotide
  Sense strand starting at position 2173 of SEQ ID NO: 1886123
guuguauacuagcugacua

SEQ ID NO: 2388777 - RNA, 19 nt, Artificial Sequence
  Description of Artificial Sequence: Synthetic oligonucleotide
  Antisense strand to SEQ ID NO: 2388776
uagucagcuaguauacaac

SEQ ID NO: 2388778 - RNA, 19 nt, Artificial Sequence
  Description of Artificial Sequence: Synthetic oligonucleotide
  Sense strand starting at position 2175 of SEQ ID NO: 1886123
uguauacuagcugacuauu

SEQ ID NO: 2388779 - RNA, 19 nt, Artificial Sequence
  Description of Artificial Sequence: Synthetic oligonucleotide
  Antisense strand to SEQ ID NO: 2388778
aauagucagcuaguauaca

SEQ ID NO: 2388780 - RNA, 19 nt, Artificial Sequence
  Description of Artificial Sequence: Synthetic oligonucleotide
  Sense strand starting at position 2253 of SEQ ID NO: 1886123
agaagaagauguccuuguu

SEQ ID NO: 2388781 - RNA, 19 nt, Artificial Sequence
  Description of Artificial Sequence: Synthetic oligonucleotide
  Antisense strand to SEQ ID NO: 2388780
aacaaggacaucuucuucu

SEQ ID NO: 2388782 - RNA, 19 nt, Artificial Sequence
  Description of Artificial Sequence: Synthetic oligonucleotide
  Sense strand starting at position 2256 of SEQ ID NO: 1886123
agaagauguccuuguuugg

SEQ ID NO: 2388783 - RNA, 19 nt, Artificial Sequence
  Description of Artificial Sequence: Synthetic oligonucleotide
  Antisense strand to SEQ ID NO: 2388782
ccaaacaaggacaucuucu

SEQ ID NO: 2388784 - RNA, 19 nt, Artificial Sequence
  Description of Artificial Sequence: Synthetic oligonucleotide
  Sense strand starting at position 2283 of SEQ ID NO: 1886123
agaagccauuccucuggaa

SEQ ID NO: 2388785 - RNA, 19 nt, Artificial Sequence
  Description of Artificial Sequence: Synthetic oligonucleotide
  Antisense strand to SEQ ID NO: 2388784
uuccagaggaauggcuucu

SEQ ID NO: 2388786 - RNA, 19 nt, Artificial Sequence
  Description of Artificial Sequence: Synthetic oligonucleotide
  Sense strand starting at position 2339 of SEQ ID NO: 1886123
agcuuugagaaaggucaau

SEQ ID NO: 2388787 - RNA, 19 nt, Artificial Sequence
  Description of Artificial Sequence: Synthetic oligonucleotide
  Antisense strand to SEQ ID NO: 2388786
auugaccuuucucaaagcu

SEQ ID NO: 2388788 - RNA, 19 nt, Artificial Sequence
  Description of Artificial Sequence: Synthetic oligonucleotide
  Sense strand starting at position 2351 of SEQ ID NO: 1886123
ggucaaucagcuugaguau

SEQ ID NO: 2388789 - RNA, 19 nt, Artificial Sequence
  Description of Artificial Sequence: Synthetic oligonucleotide
  Antisense strand to SEQ ID NO: 2388788
auacucaagcugauugacc

SEQ ID NO: 2388790 - RNA, 19 nt, Artificial Sequence
  Description of Artificial Sequence: Synthetic oligonucleotide
  Sense strand starting at position 2352 of SEQ ID NO: 1886123
gucaaucagcuugaguaua

SEQ ID NO: 2388791 - RNA, 19 nt, Artificial Sequence
  Description of Artificial Sequence: Synthetic oligonucleotide
  Antisense strand to SEQ ID NO: 2388790
uauacucaagcugauugac

SEQ ID NO: 2388792 - RNA, 19 nt, Artificial Sequence
  Description of Artificial Sequence: Synthetic oligonucleotide
  Sense strand starting at position 2360 of SEQ ID NO: 1886123
gcuugaguauaacccuauu

SEQ ID NO: 2388793 - RNA, 19 nt, Artificial Sequence
  Description of Artificial Sequence: Synthetic oligonucleotide
  Antisense strand to SEQ ID NO: 2388792
aauaggguuauacucaagc

SEQ ID NO: 2388794 - RNA, 19 nt, Artificial Sequence
  Description of Artificial Sequence: Synthetic oligonucleotide
  Sense strand starting at position 2398 of SEQ ID NO: 1886123
aucagaaaucaauguguca

SEQ ID NO: 2388795 - RNA, 19 nt, Artificial Sequence
  Description of Artificial Sequence: Synthetic oligonucleotide
  Antisense strand to SEQ ID NO: 2388794
ugacacauugauuucugau

SEQ ID NO: 2388796 - RNA, 19 nt, Artificial Sequence
  Description of Artificial Sequence: Synthetic oligonucleotide
  Sense strand starting at position 3093 of SEQ ID NO: 1886123
acagcaguauuaucuguaa

SEQ ID NO: 2388797 - RNA, 19 nt, Artificial Sequence
  Description of Artificial Sequence: Synthetic oligonucleotide
  Antisense strand to SEQ ID NO: 2388796
uuacagauaauacugcugu

SEQ ID NO: 2388798 - RNA, 19 nt, Artificial Sequence
  Description of Artificial Sequence: Synthetic oligonucleotide
  Sense strand starting at position 3096 of SEQ ID NO: 1886123
gcaguauuaucuguaauag

SEQ ID NO: 2388799 - RNA, 19 nt, Artificial Sequence
  Description of Artificial Sequence: Synthetic oligonucleotide
  Antisense strand to SEQ ID NO: 2388798
cuauuacagauaauacugc

SEQ ID NO: 2388800 - RNA, 19 nt, Artificial Sequence
  Description of Artificial Sequence: Synthetic oligonucleotide
  Sense strand starting at position 3170 of SEQ ID NO: 1886123
guggcaugucuauauaacg

SEQ ID NO: 2388801 - RNA, 19 nt, Artificial Sequence
  Description of Artificial Sequence: Synthetic oligonucleotide
  Antisense strand to SEQ ID NO: 2388800
cguuauauagacaugccac

SEQ ID NO: 2388802 - RNA, 19 nt, Artificial Sequence
  Description of Artificial Sequence: Synthetic oligonucleotide
  Sense strand starting at position 3186 of SEQ ID NO: 1886123
acggaauauuagcuaacaa

SEQ ID NO: 2388803 - RNA, 19 nt, Artificial Sequence
  Description of Artificial Sequence: Synthetic oligonucleotide
  Antisense strand to SEQ ID NO: 2388802
uuguuagcuaauauuccgu

SEQ ID NO: 2388804 - RNA, 19 nt, Artificial Sequence
  Description of Artificial Sequence: Synthetic oligonucleotide
  Sense strand starting at position 3404 of SEQ ID NO: 1886123
gguacugaguuucuucuga

SEQ ID NO: 2388805 - RNA, 19 nt, Artificial Sequence
  Description of Artificial Sequence: Synthetic oligonucleotide
  Antisense strand to SEQ ID NO: 2388804
ucagaagaaacucaguacc

SEQ ID NO: 2388806 - RNA, 19 nt, Artificial Sequence
  Description of Artificial Sequence: Synthetic oligonucleotide
  Sense strand starting at position 3454 of SEQ ID NO: 1886123
cugauaguugcauaacucu

SEQ ID NO: 2388807 - RNA, 19 nt, Artificial Sequence
  Description of Artificial Sequence: Synthetic oligonucleotide
  Antisense strand to SEQ ID NO: 2388806
agaguuaugcaacuaucag

SEQ ID NO: 2388808 - RNA, 19 nt, Artificial Sequence
  Description of Artificial Sequence: Synthetic oligonucleotide
  Sense strand starting at position 3716 of SEQ ID NO: 1886123
ugcccaaucuggucuccaa

SEQ ID NO: 2388809 - RNA, 19 nt, Artificial Sequence
  Description of Artificial Sequence: Synthetic oligonucleotide
  Antisense strand to SEQ ID NO: 2388808
uuggagaccagauugggca

SEQ ID NO: 2388810 - RNA, 19 nt, Artificial Sequence
  Description of Artificial Sequence: Synthetic oligonucleotide
  Sense strand starting at position 3833 of SEQ ID NO: 1886123
cuaggcuagugguucuuaa

SEQ ID NO: 2388811 - RNA, 19 nt, Artificial Sequence
  Description of Artificial Sequence: Synthetic oligonucleotide
  Antisense strand to SEQ ID NO: 2388810
uuaagaaccacuagccuag

SEQ ID NO: 2388812 - RNA, 19 nt, Artificial Sequence
  Description of Artificial Sequence: Synthetic oligonucleotide
  Sense strand starting at position 3844 of SEQ ID NO: 1886123
guucuuaaacuuuagugua

SEQ ID NO: 2388813 - RNA, 19 nt, Artificial Sequence
  Description of Artificial Sequence: Synthetic oligonucleotide
  Antisense strand to SEQ ID NO: 2388812
uacacuaaaguuuaagaac

SEQ ID NO: 2388814 - RNA, 19 nt, Artificial Sequence
  Description of Artificial Sequence: Synthetic oligonucleotide
  Sense strand starting at position 3863 of SEQ ID NO: 1886123
ucacaauuauuugagaguu

SEQ ID NO: 2388815 - RNA, 19 nt, Artificial Sequence
  Description of Artificial Sequence: Synthetic oligonucleotide
  Antisense strand to SEQ ID NO: 2388814
aacucucaaauaauuguga

SEQ ID NO: 2388816 - RNA, 19 nt, Artificial Sequence
  Description of Artificial Sequence: Synthetic oligonucleotide
  Sense strand starting at position 3865 of SEQ ID NO: 1886123
acaauuauuugagaguuug

SEQ ID NO: 2388817 - RNA, 19 nt, Artificial Sequence
  Description of Artificial Sequence: Synthetic oligonucleotide
  Antisense strand to SEQ ID NO: 2388816
caaacucucaaauaauugu

SEQ ID NO: 2388818 - RNA, 19 nt, Artificial Sequence
  Description of Artificial Sequence: Synthetic oligonucleotide
  Sense strand starting at position 3916 of SEQ ID NO: 1886123
gcaucugauuuaguagguu

SEQ ID NO: 2388819 - RNA, 19 nt, Artificial Sequence
  Description of Artificial Sequence: Synthetic oligonucleotide
  Antisense strand to SEQ ID NO: 2388818
aaccuacuaaaucagaugc

SEQ ID NO: 2388820 - RNA, 19 nt, Artificial Sequence
  Description of Artificial Sequence: Synthetic oligonucleotide
  Sense strand starting at position 423 of SEQ ID NO: 1886124
aacuuaguuuaagugugau

SEQ ID NO: 2388821 - RNA, 19 nt, Artificial Sequence
  Description of Artificial Sequence: Synthetic oligonucleotide
  Antisense strand to SEQ ID NO: 2388820
aucacacuuaaacuaaguu

SEQ ID NO: 2388822 - RNA, 19 nt, Artificial Sequence
  Description of Artificial Sequence: Synthetic oligonucleotide
  Sense strand starting at position 426 of SEQ ID NO: 1886124
uuaguuuaagugugauucu

SEQ ID NO: 2388823 - RNA, 19 nt, Artificial Sequence
  Description of Artificial Sequence: Synthetic oligonucleotide
  Antisense strand to SEQ ID NO: 2388822
agaaucacacuuaaacuaa

SEQ ID NO: 2388824 - RNA, 19 nt, Artificial Sequence
  Description of Artificial Sequence: Synthetic oligonucleotide
  Sense strand starting at position 429 of SEQ ID NO: 1886124
guuuaagugugauucuaaa

SEQ ID NO: 2388825 - RNA, 19 nt, Artificial Sequence
  Description of Artificial Sequence: Synthetic oligonucleotide
  Antisense strand to SEQ ID NO: 2388824
uuuagaaucacacuuaaac

SEQ ID NO: 2388826 - RNA, 19 nt, Artificial Sequence
  Description of Artificial Sequence: Synthetic oligonucleotide
  Sense strand starting at position 529 of SEQ ID NO: 1886124
ugguuauuauccuuacauu

SEQ ID NO: 2388827 - RNA, 19 nt, Artificial Sequence
  Description of Artificial Sequence: Synthetic oligonucleotide
  Antisense strand to SEQ ID NO: 2388826
aauguaaggauaauaacca

SEQ ID NO: 2388828 - RNA, 19 nt, Artificial Sequence
  Description of Artificial Sequence: Synthetic oligonucleotide
  Sense strand starting at position 601 of SEQ ID NO: 1886124
ccacuucccgaaugagaaa

SEQ ID NO: 2388829 - RNA, 19 nt, Artificial Sequence
  Description of Artificial Sequence: Synthetic oligonucleotide
  Antisense strand to SEQ ID NO: 2388828
uuucucauucgggaagugg

SEQ ID NO: 2388830 - RNA, 19 nt, Artificial Sequence
  Description of Artificial Sequence: Synthetic oligonucleotide
  Sense strand starting at position 719 of SEQ ID NO: 1886124
aucccaucagguuauguau

SEQ ID NO: 2388831 - RNA, 19 nt, Artificial Sequence
  Description of Artificial Sequence: Synthetic oligonucleotide
  Antisense strand to SEQ ID NO: 2388830
auacauaaccugaugggau

SEQ ID NO: 2388832 - RNA, 19 nt, Artificial Sequence
  Description of Artificial Sequence: Synthetic oligonucleotide
  Sense strand starting at position 722 of SEQ ID NO: 1886124
ccaucagguuauguauaac

SEQ ID NO: 2388833 - RNA, 19 nt, Artificial Sequence
  Description of Artificial Sequence: Synthetic oligonucleotide
  Antisense strand to SEQ ID NO: 2388832
guuauacauaaccugaugg

SEQ ID NO: 2388834 - RNA, 19 nt, Artificial Sequence
  Description of Artificial Sequence: Synthetic oligonucleotide
  Sense strand starting at position 725 of SEQ ID NO: 1886124
ucagguuauguauaacaca

SEQ ID NO: 2388835 - RNA, 19 nt, Artificial Sequence
  Description of Artificial Sequence: Synthetic oligonucleotide
  Antisense strand to SEQ ID NO: 2388834
uguguuauacauaaccuga

SEQ ID NO: 2388836 - RNA, 19 nt, Artificial Sequence
  Description of Artificial Sequence: Synthetic oligonucleotide
  Sense strand starting at position 728 of SEQ ID NO: 1886124
gguuauguauaacacauuu

SEQ ID NO: 2388837 - RNA, 19 nt, Artificial Sequence
  Description of Artificial Sequence: Synthetic oligonucleotide
  Antisense strand to SEQ ID NO: 2388836
aaauguguuauacauaacc

SEQ ID NO: 2388838 - RNA, 19 nt, Artificial Sequence
  Description of Artificial Sequence: Synthetic oligonucleotide
  Sense strand starting at position 768 of SEQ ID NO: 1886124
ggccaaaucccaugcugau

SEQ ID NO: 2388839 - RNA, 19 nt, Artificial Sequence
  Description of Artificial Sequence: Synthetic oligonucleotide
  Antisense strand to SEQ ID NO: 2388838
aucagcaugggauuuggcc

SEQ ID NO: 2388840 - RNA, 19 nt, Artificial Sequence
  Description of Artificial Sequence: Synthetic oligonucleotide
  Sense strand starting at position 774 of SEQ ID NO: 1886124
aucccaugcugauugcaau

SEQ ID NO: 2388841 - RNA, 19 nt, Artificial Sequence
  Description of Artificial Sequence: Synthetic oligonucleotide
  Antisense strand to SEQ ID NO: 2388840
auugcaaucagcaugggau

SEQ ID NO: 2388842 - RNA, 19 nt, Artificial Sequence
  Description of Artificial Sequence: Synthetic oligonucleotide
  Sense strand starting at position 831 of SEQ ID NO: 1886124
ugaacugacguuuacucaa

SEQ ID NO: 2388843 - RNA, 19 nt, Artificial Sequence
  Description of Artificial Sequence: Synthetic oligonucleotide
  Antisense strand to SEQ ID NO: 2388842
uugaguaaacgucaguuca

SEQ ID NO: 2388844 - RNA, 19 nt, Artificial Sequence
  Description of Artificial Sequence: Synthetic oligonucleotide
  Sense strand starting at position 1663 of SEQ ID NO: 1886124
aaguauuauuucuggaaag

SEQ ID NO: 2388845 - RNA, 19 nt, Artificial Sequence
  Description of Artificial Sequence: Synthetic oligonucleotide
  Antisense strand to SEQ ID NO: 2388844
cuuuccagaaauaauacuu

SEQ ID NO: 2388846 - RNA, 19 nt, Artificial Sequence
  Description of Artificial Sequence: Synthetic oligonucleotide
  Sense strand starting at position 1664 of SEQ ID NO: 1886124
aguauuauuucuggaaaga

SEQ ID NO: 2388847 - RNA, 19 nt, Artificial Sequence
  Description of Artificial Sequence: Synthetic oligonucleotide
  Antisense strand to SEQ ID NO: 2388846
ucuuuccagaaauaauacu

SEQ ID NO: 2388848 - RNA, 19 nt, Artificial Sequence
  Description of Artificial Sequence: Synthetic oligonucleotide
  Sense strand starting at position 1813 of SEQ ID NO: 1886124
ggguguaucuggucucuag

SEQ ID NO: 2388849 - RNA, 19 nt, Artificial Sequence
  Description of Artificial Sequence: Synthetic oligonucleotide
  Antisense strand to SEQ ID NO: 2388848
cuagagaccagauacaccc

SEQ ID NO: 2388850 - RNA, 19 nt, Artificial Sequence
  Description of Artificial Sequence: Synthetic oligonucleotide
  Sense strand starting at position 1927 of SEQ ID NO: 1886124
ccacucuuacuagaagguu

SEQ ID NO: 2388851 - RNA, 19 nt, Artificial Sequence
  Description of Artificial Sequence: Synthetic oligonucleotide
  Antisense strand to SEQ ID NO: 2388850
aaccuucuaguaagagugg

SEQ ID NO: 2388852 - RNA, 19 nt, Artificial Sequence
  Description of Artificial Sequence: Synthetic oligonucleotide
  Sense strand starting at position 1930 of SEQ ID NO: 1886124
cucuuacuagaagguuauu

SEQ ID NO: 2388853 - RNA, 19 nt, Artificial Sequence
  Description of Artificial Sequence: Synthetic oligonucleotide
  Antisense strand to SEQ ID NO: 2388852
aauaaccuucuaguaagag

SEQ ID NO: 2388854 - RNA, 19 nt, Artificial Sequence
  Description of Artificial Sequence: Synthetic oligonucleotide
  Sense strand starting at position 1963 of SEQ ID NO: 1886124
guaaauaugucagcaugag

SEQ ID NO: 2388855 - RNA, 19 nt, Artificial Sequence
  Description of Artificial Sequence: Synthetic oligonucleotide
  Antisense strand to SEQ ID NO: 2388854
cucaugcugacauauuuac

SEQ ID NO: 2388856 - RNA, 19 nt, Artificial Sequence
  Description of Artificial Sequence: Synthetic oligonucleotide
  Sense strand starting at position 1995 of SEQ ID NO: 1886124
agcuaucuccgauauuaag

SEQ ID NO: 2388857 - RNA, 19 nt, Artificial Sequence
  Description of Artificial Sequence: Synthetic oligonucleotide
  Antisense strand to SEQ ID NO: 2388856
cuuaauaucggagauagcu

SEQ ID NO: 2388858 - RNA, 19 nt, Artificial Sequence
  Description of Artificial Sequence: Synthetic oligonucleotide
  Sense strand starting at position 2161 of SEQ ID NO: 1886124
acuguuucuuaugucaaca

SEQ ID NO: 2388859 - RNA, 19 nt, Artificial Sequence
  Description of Artificial Sequence: Synthetic oligonucleotide
  Antisense strand to SEQ ID NO: 2388858
uguugacauaagaaacagu

SEQ ID NO: 2388860 - RNA, 19 nt, Artificial Sequence
  Description of Artificial Sequence: Synthetic oligonucleotide
  Sense strand starting at position 2343 of SEQ ID NO: 1886124
acaggauauccaugccaca

SEQ ID NO: 2388861 - RNA, 19 nt, Artificial Sequence
  Description of Artificial Sequence: Synthetic oligonucleotide
  Antisense strand to SEQ ID NO: 2388860
uguggcauggauauccugu

SEQ ID NO: 2388862 - RNA, 19 nt, Artificial Sequence
  Description of Artificial Sequence: Synthetic oligonucleotide
  Sense strand starting at position 2500 of SEQ ID NO: 1886124
uacagaugccacugagaga

SEQ ID NO: 2388863 - RNA, 19 nt, Artificial Sequence
  Description of Artificial Sequence: Synthetic oligonucleotide
  Antisense strand to SEQ ID NO: 2388862
ucucucaguggcaucugua

SEQ ID NO: 2388864 - RNA, 19 nt, Artificial Sequence
  Description of Artificial Sequence: Synthetic oligonucleotide
  Sense strand starting at position 2543 of SEQ ID NO: 1886124
ccaucauguuuaucugguu

SEQ ID NO: 2388865 - RNA, 19 nt, Artificial Sequence
  Description of Artificial Sequence: Synthetic oligonucleotide
  Antisense strand to SEQ ID NO: 2388864
aaccagauaaacaugaugg

SEQ ID NO: 2388866 - RNA, 19 nt, Artificial Sequence
  Description of Artificial Sequence: Synthetic oligonucleotide
  Sense strand starting at position 2548 of SEQ ID NO: 1886124
auguuuaucugguuauucu

SEQ ID NO: 2388867 - RNA, 19 nt, Artificial Sequence
  Description of Artificial Sequence: Synthetic oligonucleotide
  Antisense strand to SEQ ID NO: 2388866
agaauaaccagauaaacau

SEQ ID NO: 2388868 - RNA, 19 nt, Artificial Sequence
  Description of Artificial Sequence: Synthetic oligonucleotide
  Sense strand starting at position 2549 of SEQ ID NO: 1886124
uguuuaucugguuauucuu

SEQ ID NO: 2388869 - RNA, 19 nt, Artificial Sequence
  Description of Artificial Sequence: Synthetic oligonucleotide
  Antisense strand to SEQ ID NO: 2388868
aagaauaaccagauaaaca

SEQ ID NO: 2388870 - RNA, 19 nt, Artificial Sequence
  Description of Artificial Sequence: Synthetic oligonucleotide
  Sense strand starting at position 2552 of SEQ ID NO: 1886124
uuaucugguuauucuugau

SEQ ID NO: 2388871 - RNA, 19 nt, Artificial Sequence
  Description of Artificial Sequence: Synthetic oligonucleotide
  Antisense strand to SEQ ID NO: 2388870
aucaagaauaaccagauaa

SEQ ID NO: 2388872 - RNA, 19 nt, Artificial Sequence
  Description of Artificial Sequence: Synthetic oligonucleotide
  Sense strand starting at position 2556 of SEQ ID NO: 1886124
cugguuauucuugaucacu

SEQ ID NO: 2388873 - RNA, 19 nt, Artificial Sequence
  Description of Artificial Sequence: Synthetic oligonucleotide
  Antisense strand to SEQ ID NO: 2388872
agugaucaagaauaaccag

SEQ ID NO: 2388874 - RNA, 19 nt, Artificial Sequence
  Description of Artificial Sequence: Synthetic oligonucleotide
  Sense strand starting at position 2676 of SEQ ID NO: 1886124
ucaugaucaugguuagagu

SEQ ID NO: 2388875 - RNA, 19 nt, Artificial Sequence
  Description of Artificial Sequence: Synthetic oligonucleotide
  Antisense strand to SEQ ID NO: 2388874
acucuaaccaugaucauga

SEQ ID NO: 2388876 - RNA, 19 nt, Artificial Sequence
  Description of Artificial Sequence: Synthetic oligonucleotide
  Sense strand starting at position 2699 of SEQ ID NO: 1886124
aagucaggcuuucugacau

SEQ ID NO: 2388877 - RNA, 19 nt, Artificial Sequence
  Description of Artificial Sequence: Synthetic oligonucleotide
  Antisense strand to SEQ ID NO: 2388876
augucagaaagccugacuu

SEQ ID NO: 2388878 - RNA, 19 nt, Artificial Sequence
  Description of Artificial Sequence: Synthetic oligonucleotide
  Sense strand starting at position 3002 of SEQ ID NO: 1886124
cugaacaccuguuuagagu

SEQ ID NO: 2388879 - RNA, 19 nt, Artificial Sequence
  Description of Artificial Sequence: Synthetic oligonucleotide
  Antisense strand to SEQ ID NO: 2388878
acucuaaacagguguucag

SEQ ID NO: 2388880 - RNA, 19 nt, Artificial Sequence
  Description of Artificial Sequence: Synthetic oligonucleotide
  Sense strand starting at position 3003 of SEQ ID NO: 1886124
ugaacaccuguuuagagua

SEQ ID NO: 2388881 - RNA, 19 nt, Artificial Sequence
  Description of Artificial Sequence: Synthetic oligonucleotide
  Antisense strand to SEQ ID NO: 2388880
uacucuaaacagguguuca

SEQ ID NO: 2388882 - RNA, 19 nt, Artificial Sequence
  Description of Artificial Sequence: Synthetic oligonucleotide
  Sense strand starting at position 3015 of SEQ ID NO: 1886124
uagaguauugcggaugaca

SEQ ID NO: 2388883 - RNA, 19 nt, Artificial Sequence
  Description of Artificial Sequence: Synthetic oligonucleotide
  Antisense strand to SEQ ID NO: 2388882
ugucauccgcaauacucua

SEQ ID NO: 2388884 - RNA, 19 nt, Artificial Sequence
  Description of Artificial Sequence: Synthetic oligonucleotide
  Sense strand starting at position 3017 of SEQ ID NO: 1886124
gaguauugcggaugacaac

SEQ ID NO: 2388885 - RNA, 19 nt, Artificial Sequence
  Description of Artificial Sequence: Synthetic oligonucleotide
  Antisense strand to SEQ ID NO: 2388884
guugucauccgcaauacuc

SEQ ID NO: 2388886 - RNA, 19 nt, Artificial Sequence
  Description of Artificial Sequence: Synthetic oligonucleotide
  Sense strand starting at position 3043 of SEQ ID NO: 1886124
uuuaaagcacucgguaaau

SEQ ID NO: 2388887 - RNA, 19 nt, Artificial Sequence
  Description of Artificial Sequence: Synthetic oligonucleotide
  Antisense strand to SEQ ID NO: 2388886
auuuaccgagugcuuuaaa

SEQ ID NO: 2388888 - RNA, 19 nt, Artificial Sequence
  Description of Artificial Sequence: Synthetic oligonucleotide
  Sense strand starting at position 3049 of SEQ ID NO: 1886124
gcacucgguaaauaguaaa

SEQ ID NO: 2388889 - RNA, 19 nt, Artificial Sequence
  Description of Artificial Sequence: Synthetic oligonucleotide
  Antisense strand to SEQ ID NO: 2388888
uuuacuauuuaccgagugc

SEQ ID NO: 2388890 - RNA, 19 nt, Artificial Sequence
  Description of Artificial Sequence: Synthetic oligonucleotide
  Sense strand starting at position 3090 of SEQ ID NO: 1886124
uagagaagcuggucagauu

SEQ ID NO: 2388891 - RNA, 19 nt, Artificial Sequence
  Description of Artificial Sequence: Synthetic oligonucleotide
  Antisense strand to SEQ ID NO: 2388890
aaucugaccagcuucucua

SEQ ID NO: 2388892 - RNA, 19 nt, Artificial Sequence
  Description of Artificial Sequence: Synthetic oligonucleotide
  Sense strand starting at position 3175 of SEQ ID NO: 1886124
auaugcacucaggaaucuu

SEQ ID NO: 2388893 - RNA, 19 nt, Artificial Sequence
  Description of Artificial Sequence: Synthetic oligonucleotide
  Antisense strand to SEQ ID NO: 2388892
aagauuccugagugcauau

SEQ ID NO: 2388894 - RNA, 19 nt, Artificial Sequence
  Description of Artificial Sequence: Synthetic oligonucleotide
  Sense strand starting at position 3244 of SEQ ID NO: 1886124
ggcauaaagcuauauuaua

SEQ ID NO: 2388895 - RNA, 19 nt, Artificial Sequence
  Description of Artificial Sequence: Synthetic oligonucleotide
  Antisense strand to SEQ ID NO: 2388894
uauaauauagcuuuaugcc

SEQ ID NO: 2388896 - RNA, 19 nt, Artificial Sequence
  Description of Artificial Sequence: Synthetic oligonucleotide
  Sense strand starting at position 3457 of SEQ ID NO: 1886124
cguacacugccacaagaau

SEQ ID NO: 2388897 - RNA, 19 nt, Artificial Sequence
  Description of Artificial Sequence: Synthetic oligonucleotide
  Antisense strand to SEQ ID NO: 2388896
auucuuguggcaguguacg

SEQ ID NO: 2388898 - RNA, 19 nt, Artificial Sequence
  Description of Artificial Sequence: Synthetic oligonucleotide
  Sense strand starting at position 3945 of SEQ ID NO: 1886124
uuuggcaacugguuuauau

SEQ ID NO: 2388899 - RNA, 19 nt, Artificial Sequence
  Description of Artificial Sequence: Synthetic oligonucleotide
  Antisense strand to SEQ ID NO: 2388898
auauaaaccaguugccaaa

SEQ ID NO: 2388900 - RNA, 19 nt, Artificial Sequence
  Description of Artificial Sequence: Synthetic oligonucleotide
  Sense strand starting at position 52 of SEQ ID NO: 1886125
agaauuccuugggcuaaca

SEQ ID NO: 2388901 - RNA, 19 nt, Artificial Sequence
  Description of Artificial Sequence: Synthetic oligonucleotide
  Antisense strand to SEQ ID NO: 2388900
uguuagcccaaggaauucu

SEQ ID NO: 2388902 - RNA, 19 nt, Artificial Sequence
  Description of Artificial Sequence: Synthetic oligonucleotide
  Sense strand starting at position 138 of SEQ ID NO: 1886125
acuaaagagccuuaugggu

SEQ ID NO: 2388903 - RNA, 19 nt, Artificial Sequence
  Description of Artificial Sequence: Synthetic oligonucleotide
  Antisense strand to SEQ ID NO: 2388902
acccauaaggcucuuuagu

SEQ ID NO: 2388904 - RNA, 19 nt, Artificial Sequence
  Description of Artificial Sequence: Synthetic oligonucleotide
  Sense strand starting at position 271 of SEQ ID NO: 1886125
ucagcuuucugccuagaac

SEQ ID NO: 2388905 - RNA, 19 nt, Artificial Sequence
  Description of Artificial Sequence: Synthetic oligonucleotide
  Antisense strand to SEQ ID NO: 2388904
guucuaggcagaaagcuga

SEQ ID NO: 2388906 - RNA, 19 nt, Artificial Sequence
  Description of Artificial Sequence: Synthetic oligonucleotide
  Sense strand starting at position 274 of SEQ ID NO: 1886125
gcuuucugccuagaacacu

SEQ ID NO: 2388907 - RNA, 19 nt, Artificial Sequence
  Description of Artificial Sequence: Synthetic oligonucleotide
  Antisense strand to SEQ ID NO: 2388906
aguguucuaggcagaaagc

SEQ ID NO: 2388908 - RNA, 19 nt, Artificial Sequence
  Description of Artificial Sequence: Synthetic oligonucleotide
  Sense strand starting at position 351 of SEQ ID NO: 1886125
gagagacaauuccuguuau

SEQ ID NO: 2388909 - RNA, 19 nt, Artificial Sequence
  Description of Artificial Sequence: Synthetic oligonucleotide
  Antisense strand to SEQ ID NO: 2388908
auaacaggaauugucucuc

SEQ ID NO: 2388910 - RNA, 19 nt, Artificial Sequence
  Description of Artificial Sequence: Synthetic oligonucleotide
  Sense strand starting at position 370 of SEQ ID NO: 1886125
aaaggacugucgcucauau

SEQ ID NO: 2388911 - RNA, 19 nt, Artificial Sequence
  Description of Artificial Sequence: Synthetic oligonucleotide
  Antisense strand to SEQ ID NO: 2388910
auaugagcgacaguccuuu

SEQ ID NO: 2388912 - RNA, 19 nt, Artificial Sequence
  Description of Artificial Sequence: Synthetic oligonucleotide
  Sense strand starting at position 520 of SEQ ID NO: 1886125
gcuauugacaucugagguc

SEQ ID NO: 2388913 - RNA, 19 nt, Artificial Sequence
  Description of Artificial Sequence: Synthetic oligonucleotide
  Antisense strand to SEQ ID NO: 2388912
gaccucagaugucaauagc

SEQ ID NO: 2388914 - RNA, 19 nt, Artificial Sequence
  Description of Artificial Sequence: Synthetic oligonucleotide
  Sense strand starting at position 677 of SEQ ID NO: 1886125
uuguuaaucuaguuaagug

SEQ ID NO: 2388915 - RNA, 19 nt, Artificial Sequence
  Description of Artificial Sequence: Synthetic oligonucleotide
  Antisense strand to SEQ ID NO: 2388914
cacuuaacuagauuaacaa

SEQ ID NO: 2388916 - RNA, 19 nt, Artificial Sequence
  Description of Artificial Sequence: Synthetic oligonucleotide
  Sense strand starting at position 681 of SEQ ID NO: 1886125
uaaucuaguuaagugggaa

SEQ ID NO: 2388917 - RNA, 19 nt, Artificial Sequence
  Description of Artificial Sequence: Synthetic oligonucleotide
  Antisense strand to SEQ ID NO: 2388916
uucccacuuaacuagauua

SEQ ID NO: 2388918 - RNA, 19 nt, Artificial Sequence
  Description of Artificial Sequence: Synthetic oligonucleotide
  Sense strand starting at position 857 of SEQ ID NO: 1886125
guaacaaguucucucaccu

SEQ ID NO: 2388919 - RNA, 19 nt, Artificial Sequence
  Description of Artificial Sequence: Synthetic oligonucleotide
  Antisense strand to SEQ ID NO: 2388918
aggugagagaacuuguuac

SEQ ID NO: 2388920 - RNA, 19 nt, Artificial Sequence
  Description of Artificial Sequence: Synthetic oligonucleotide
  Sense strand starting at position 1036 of SEQ ID NO: 1886125
cguaaauguuuggcccaaa

SEQ ID NO: 2388921 - RNA, 19 nt, Artificial Sequence
  Description of Artificial Sequence: Synthetic oligonucleotide
  Antisense strand to SEQ ID NO: 2388920
uuugggccaaacauuuacg

SEQ ID NO: 2388922 - RNA, 19 nt, Artificial Sequence
  Description of Artificial Sequence: Synthetic oligonucleotide
  Sense strand starting at position 1037 of SEQ ID NO: 1886125
guaaauguuuggcccaaag

SEQ ID NO: 2388923 - RNA, 19 nt, Artificial Sequence
  Description of Artificial Sequence: Synthetic oligonucleotide
  Antisense strand to SEQ ID NO: 2388922
cuuugggccaaacauuuac

SEQ ID NO: 2388924 - RNA, 19 nt, Artificial Sequence
  Description of Artificial Sequence: Synthetic oligonucleotide
  Sense strand starting at position 1054 of SEQ ID NO: 1886125
agaauaguaucacuggcau

SEQ ID NO: 2388925 - RNA, 19 nt, Artificial Sequence
  Description of Artificial Sequence: Synthetic oligonucleotide
  Antisense strand to SEQ ID NO: 2388924
augccagugauacuauucu

SEQ ID NO: 2388926 - RNA, 19 nt, Artificial Sequence
  Description of Artificial Sequence: Synthetic oligonucleotide
  Sense strand starting at position 1065 of SEQ ID NO: 1886125
acuggcaucucugcauuua

SEQ ID NO: 2388927 - RNA, 19 nt, Artificial Sequence
  Description of Artificial Sequence: Synthetic oligonucleotide
  Antisense strand to SEQ ID NO: 2388926
uaaaugcagagaugccagu

SEQ ID NO: 2388928 - RNA, 19 nt, Artificial Sequence
  Description of Artificial Sequence: Synthetic oligonucleotide
  Sense strand starting at position 1385 of SEQ ID NO: 1886125
gaggcagggugauuauaaa

SEQ ID NO: 2388929 - RNA, 19 nt, Artificial Sequence
  Description of Artificial Sequence: Synthetic oligonucleotide
  Antisense strand to SEQ ID NO: 2388928
uuuauaaucacccugccuc

SEQ ID NO: 2388930 - RNA, 19 nt, Artificial Sequence
  Description of Artificial Sequence: Synthetic oligonucleotide
  Sense strand starting at position 1419 of SEQ ID NO: 1886125
gccuccuuccacugguaaa

SEQ ID NO: 2388931 - RNA, 19 nt, Artificial Sequence
  Description of Artificial Sequence: Synthetic oligonucleotide
  Antisense strand to SEQ ID NO: 2388930
uuuaccaguggaaggaggc

SEQ ID NO: 2388932 - RNA, 19 nt, Artificial Sequence
  Description of Artificial Sequence: Synthetic oligonucleotide
  Sense strand starting at position 1453 of SEQ ID NO: 1886125
ggucucgggaguugacaaa

SEQ ID NO: 2388933 - RNA, 19 nt, Artificial Sequence
  Description of Artificial Sequence: Synthetic oligonucleotide
  Antisense strand to SEQ ID NO: 2388932
uuugucaacucccgagacc

SEQ ID NO: 2388934 - RNA, 19 nt, Artificial Sequence
  Description of Artificial Sequence: Synthetic oligonucleotide
  Sense strand starting at position 1749 of SEQ ID NO: 1886125
gcaacaaugccacacagau

SEQ ID NO: 2388935 - RNA, 19 nt, Artificial Sequence
  Description of Artificial Sequence: Synthetic oligonucleotide
  Antisense strand to SEQ ID NO: 2388934
aucuguguggcauuguugc

SEQ ID NO: 2388936 - RNA, 19 nt, Artificial Sequence
  Description of Artificial Sequence: Synthetic oligonucleotide
  Sense strand starting at position 2253 of SEQ ID NO: 1886125
auggaaagcuggcuuaaca

SEQ ID NO: 2388937 - RNA, 19 nt, Artificial Sequence
  Description of Artificial Sequence: Synthetic oligonucleotide
  Antisense strand to SEQ ID NO: 2388936
uguuaagccagcuuuccau

SEQ ID NO: 2388938 - RNA, 19 nt, Artificial Sequence
  Description of Artificial Sequence: Synthetic oligonucleotide
  Sense strand starting at position 2289 of SEQ ID NO: 1886125
aguaaugaccgcugauauc

SEQ ID NO: 2388939 - RNA, 19 nt, Artificial Sequence
  Description of Artificial Sequence: Synthetic oligonucleotide
  Antisense strand to SEQ ID NO: 2388938
gauaucagcggucauuacu

SEQ ID NO: 2388940 - RNA, 19 nt, Artificial Sequence
  Description of Artificial Sequence: Synthetic oligonucleotide
  Sense strand starting at position 2661 of SEQ ID NO: 1886125
acucgaucguauguuggaa

SEQ ID NO: 2388941 - RNA, 19 nt, Artificial Sequence
  Description of Artificial Sequence: Synthetic oligonucleotide
  Antisense strand to SEQ ID NO: 2388940
uuccaacauacgaucgagu

SEQ ID NO: 2388942 - RNA, 19 nt, Artificial Sequence
  Description of Artificial Sequence: Synthetic oligonucleotide
  Sense strand starting at position 2697 of SEQ ID NO: 1886125
uggcgcaauccguuaucga

SEQ ID NO: 2388943 - RNA, 19 nt, Artificial Sequence
  Description of Artificial Sequence: Synthetic oligonucleotide
  Antisense strand to SEQ ID NO: 2388942
ucgauaacggauugcgcca

SEQ ID NO: 2388944 - RNA, 19 nt, Artificial Sequence
  Description of Artificial Sequence: Synthetic oligonucleotide
  Sense strand starting at position 2833 of SEQ ID NO: 1886125
gaagauggcucccuuugga

SEQ ID NO: 2388945 - RNA, 19 nt, Artificial Sequence
  Description of Artificial Sequence: Synthetic oligonucleotide
  Antisense strand to SEQ ID NO: 2388944
uccaaagggagccaucuuc

SEQ ID NO: 2388946 - RNA, 19 nt, Artificial Sequence
  Description of Artificial Sequence: Synthetic oligonucleotide
  Sense strand starting at position 2836 of SEQ ID NO: 1886125
gauggcucccuuuggaaag

SEQ ID NO: 2388947 - RNA, 19 nt, Artificial Sequence
  Description of Artificial Sequence: Synthetic oligonucleotide
  Antisense strand to SEQ ID NO: 2388946
cuuuccaaagggagccauc

SEQ ID NO: 2388948 - RNA, 19 nt, Artificial Sequence
  Description of Artificial Sequence: Synthetic oligonucleotide
  Sense strand starting at position 2880 of SEQ ID NO: 1886125
gcuggugccgccuuugaaa

SEQ ID NO: 2388949 - RNA, 19 nt, Artificial Sequence
  Description of Artificial Sequence: Synthetic oligonucleotide
  Antisense strand to SEQ ID NO: 2388948
uuucaaaggcggcaccagc

SEQ ID NO: 2388950 - RNA, 19 nt, Artificial Sequence
  Description of Artificial Sequence: Synthetic oligonucleotide
  Sense strand starting at position 3071 of SEQ ID NO: 1886125
cccugcaucucugucaaga

SEQ ID NO: 2388951 - RNA, 19 nt, Artificial Sequence
  Description of Artificial Sequence: Synthetic oligonucleotide
  Antisense strand to SEQ ID NO: 2388950
ucuugacagagaugcaggg

SEQ ID NO: 2388952 - RNA, 19 nt, Artificial Sequence
  Description of Artificial Sequence: Synthetic oligonucleotide
  Sense strand starting at position 3081 of SEQ ID NO: 1886125
cugucaagauuguuaggca

SEQ ID NO: 2388953 - RNA, 19 nt, Artificial Sequence
  Description of Artificial Sequence: Synthetic oligonucleotide
  Antisense strand to SEQ ID NO: 2388952
ugccuaacaaucuugacag

SEQ ID NO: 2388954 - RNA, 19 nt, Artificial Sequence
  Description of Artificial Sequence: Synthetic oligonucleotide
  Sense strand starting at position 3085 of SEQ ID NO: 1886125
caagauuguuaggcaaaua

SEQ ID NO: 2388955 - RNA, 19 nt, Artificial Sequence
  Description of Artificial Sequence: Synthetic oligonucleotide
  Antisense strand to SEQ ID NO: 2388954
uauuugccuaacaaucuug

SEQ ID NO: 2388956 - RNA, 19 nt, Artificial Sequence
  Description of Artificial Sequence: Synthetic oligonucleotide
  Sense strand starting at position 3133 of SEQ ID NO: 1886125
aguguaauuucccaaacag

SEQ ID NO: 2388957 - RNA, 19 nt, Artificial Sequence
  Description of Artificial Sequence: Synthetic oligonucleotide
  Antisense strand to SEQ ID NO: 2388956
cuguuugggaaauuacacu

SEQ ID NO: 2388958 - RNA, 19 nt, Artificial Sequence
  Description of Artificial Sequence: Synthetic oligonucleotide
  Sense strand starting at position 3217 of SEQ ID NO: 1886125
cugaacaucuugcuguaaa

SEQ ID NO: 2388959 - RNA, 19 nt, Artificial Sequence
  Description of Artificial Sequence: Synthetic oligonucleotide
  Antisense strand to SEQ ID NO: 2388958
uuuacagcaagauguucag

SEQ ID NO: 2388960 - RNA, 19 nt, Artificial Sequence
  Description of Artificial Sequence: Synthetic oligonucleotide
  Sense strand starting at position 3228 of SEQ ID NO: 1886125
gcuguaaaccgaggguacu

SEQ ID NO: 2388961 - RNA, 19 nt, Artificial Sequence
  Description of Artificial Sequence: Synthetic oligonucleotide
  Antisense strand to SEQ ID NO: 2388960
aguacccucgguuuacagc

SEQ ID NO: 2388962 - RNA, 19 nt, Artificial Sequence
  Description of Artificial Sequence: Synthetic oligonucleotide
  Sense strand starting at position 3239 of SEQ ID NO: 1886125
aggguacuugagcauucua

SEQ ID NO: 2388963 - RNA, 19 nt, Artificial Sequence
  Description of Artificial Sequence: Synthetic oligonucleotide
  Antisense strand to SEQ ID NO: 2388962
uagaaugcucaaguacccu

SEQ ID NO: 2388964 - RNA, 19 nt, Artificial Sequence
  Description of Artificial Sequence: Synthetic oligonucleotide
  Sense strand starting at position 3441 of SEQ ID NO: 1886125
ggugacuguguccaacaca

SEQ ID NO: 2388965 - RNA, 19 nt, Artificial Sequence
  Description of Artificial Sequence: Synthetic oligonucleotide
  Antisense strand to SEQ ID NO: 2388964
uguguuggacacagucacc

SEQ ID NO: 2388966 - RNA, 19 nt, Artificial Sequence
  Description of Artificial Sequence: Synthetic oligonucleotide
  Sense strand starting at position 3486 of SEQ ID NO: 1886125
gucugucugcuaguuaguu

SEQ ID NO: 2388967 - RNA, 19 nt, Artificial Sequence
  Description of Artificial Sequence: Synthetic oligonucleotide
  Antisense strand to SEQ ID NO: 2388966
aacuaacuagcagacagac

SEQ ID NO: 2388968 - RNA, 19 nt, Artificial Sequence
  Description of Artificial Sequence: Synthetic oligonucleotide
  Sense strand starting at position 3666 of SEQ ID NO: 1886125
cauuuaguuguguggcuuu

SEQ ID NO: 2388969 - RNA, 19 nt, Artificial Sequence
  Description of Artificial Sequence: Synthetic oligonucleotide
  Antisense strand to SEQ ID NO: 2388968
aaagccacacaacuaaaug

SEQ ID NO: 2388970 - RNA, 19 nt, Artificial Sequence
  Description of Artificial Sequence: Synthetic oligonucleotide
  Sense strand starting at position 3708 of SEQ ID NO: 1886125
ggcauuaauuucguugucu

SEQ ID NO: 2388971 - RNA, 19 nt, Artificial Sequence
  Description of Artificial Sequence: Synthetic oligonucleotide
  Antisense strand to SEQ ID NO: 2388970
agacaacgaaauuaaugcc

SEQ ID NO: 2388972 - RNA, 19 nt, Artificial Sequence
  Description of Artificial Sequence: Synthetic oligonucleotide
  Sense strand starting at position 3709 of SEQ ID NO: 1886125
gcauuaauuucguugucug

SEQ ID NO: 2388973 - RNA, 19 nt, Artificial Sequence
  Description of Artificial Sequence: Synthetic oligonucleotide
  Antisense strand to SEQ ID NO: 2388972
cagacaacgaaauuaaugc

SEQ ID NO: 2388974 - RNA, 19 nt, Artificial Sequence
  Description of Artificial Sequence: Synthetic oligonucleotide
  Sense strand starting at position 3712 of SEQ ID NO: 1886125
uuaauuucguugucugcaa

SEQ ID NO: 2388975 - RNA, 19 nt, Artificial Sequence
  Description of Artificial Sequence: Synthetic oligonucleotide
  Antisense strand to SEQ ID NO: 2388974
uugcagacaacgaaauuaa

SEQ ID NO: 2388976 - RNA, 19 nt, Artificial Sequence
  Description of Artificial Sequence: Synthetic oligonucleotide
  Sense strand starting at position 3713 of SEQ ID NO: 1886125
uaauuucguugucugcaaa

SEQ ID NO: 2388977 - RNA, 19 nt, Artificial Sequence
  Description of Artificial Sequence: Synthetic oligonucleotide
  Antisense strand to SEQ ID NO: 2388976
uuugcagacaacgaaauua

SEQ ID NO: 2388978 - RNA, 19 nt, Artificial Sequence
  Description of Artificial Sequence: Synthetic oligonucleotide
  Sense strand starting at position 3885 of SEQ ID NO: 1886125
gccaccuugagauguggau

SEQ ID NO: 2388979 - RNA, 19 nt, Artificial Sequence
  Description of Artificial Sequence: Synthetic oligonucleotide
  Antisense strand to SEQ ID NO: 2388978
auccacaucucaagguggc

SEQ ID NO: 2388980 - RNA, 19 nt, Artificial Sequence
  Description of Artificial Sequence: Synthetic oligonucleotide
  Sense strand starting at position 3 of SEQ ID NO: 1886126
aaguuaguaguauaugagu

SEQ ID NO: 2388981 - RNA, 19 nt, Artificial Sequence
  Description of Artificial Sequence: Synthetic oligonucleotide
  Antisense strand to SEQ ID NO: 2388980
acucauauacuacuaacuu

SEQ ID NO: 2388982 - RNA, 19 nt, Artificial Sequence
  Description of Artificial Sequence: Synthetic oligonucleotide
  Sense strand starting at position 14 of SEQ ID NO: 1886126
auaugagugucuuuccuca

SEQ ID NO: 2388983 - RNA, 19 nt, Artificial Sequence
  Description of Artificial Sequence: Synthetic oligonucleotide
  Antisense strand to SEQ ID NO: 2388982
ugaggaaagacacucauau

SEQ ID NO: 2388984 - RNA, 19 nt, Artificial Sequence
  Description of Artificial Sequence: Synthetic oligonucleotide
  Sense strand starting at position 16 of SEQ ID NO: 1886126
augagugucuuuccucaua

SEQ ID NO: 2388985 - RNA, 19 nt, Artificial Sequence
  Description of Artificial Sequence: Synthetic oligonucleotide
  Antisense strand to SEQ ID NO: 2388984
uaugaggaaagacacucau

SEQ ID NO: 2388986 - RNA, 19 nt, Artificial Sequence
  Description of Artificial Sequence: Synthetic oligonucleotide
  Sense strand starting at position 273 of SEQ ID NO: 1886126
cguggaauugugcagacuu

SEQ ID NO: 2388987 - RNA, 19 nt, Artificial Sequence
  Description of Artificial Sequence: Synthetic oligonucleotide
  Antisense strand to SEQ ID NO: 2388986
aagucugcacaauuccacg

SEQ ID NO: 2388988 - RNA, 19 nt, Artificial Sequence
  Description of Artificial Sequence: Synthetic oligonucleotide
  Sense strand starting at position 275 of SEQ ID NO: 1886126
uggaauugugcagacuuga

SEQ ID NO: 2388989 - RNA, 19 nt, Artificial Sequence
  Description of Artificial Sequence: Synthetic oligonucleotide
  Antisense strand to SEQ ID NO: 2388988
ucaagucugcacaauucca

SEQ ID NO: 2388990 - RNA, 19 nt, Artificial Sequence
  Description of Artificial Sequence: Synthetic oligonucleotide
  Sense strand starting at position 342 of SEQ ID NO: 1886126
ugcucagacucuguauuau

SEQ ID NO: 2388991 - RNA, 19 nt, Artificial Sequence
  Description of Artificial Sequence: Synthetic oligonucleotide
  Antisense strand to SEQ ID NO: 2388990
auaauacagagucugagca

SEQ ID NO: 2388992 - RNA, 19 nt, Artificial Sequence
  Description of Artificial Sequence: Synthetic oligonucleotide
  Sense strand starting at position 416 of SEQ ID NO: 1886126
gcugcuugucaguucuacu

SEQ ID NO: 2388993 - RNA, 19 nt, Artificial Sequence
  Description of Artificial Sequence: Synthetic oligonucleotide
  Antisense strand to SEQ ID NO: 2388992
aguagaacugacaagcagc

SEQ ID NO: 2388994 - RNA, 19 nt, Artificial Sequence
  Description of Artificial Sequence: Synthetic oligonucleotide
  Sense strand starting at position 427 of SEQ ID NO: 1886126
guucuacuucuugguaaga

SEQ ID NO: 2388995 - RNA, 19 nt, Artificial Sequence
  Description of Artificial Sequence: Synthetic oligonucleotide
  Antisense strand to SEQ ID NO: 2388994
ucuuaccaagaaguagaac

SEQ ID NO: 2388996 - RNA, 19 nt, Artificial Sequence
  Description of Artificial Sequence: Synthetic oligonucleotide
  Sense strand starting at position 692 of SEQ ID NO: 1886126
caaccuagucugcauguga

SEQ ID NO: 2388997 - RNA, 19 nt, Artificial Sequence
  Description of Artificial Sequence: Synthetic oligonucleotide
  Antisense strand to SEQ ID NO: 2388996
ucacaugcagacuagguug

SEQ ID NO: 2388998 - RNA, 19 nt, Artificial Sequence
  Description of Artificial Sequence: Synthetic oligonucleotide
  Sense strand starting at position 696 of SEQ ID NO: 1886126
cuagucugcaugugagaau

SEQ ID NO: 2388999 - RNA, 19 nt, Artificial Sequence
  Description of Artificial Sequence: Synthetic oligonucleotide
  Antisense strand to SEQ ID NO: 2388998
auucucacaugcagacuag

SEQ ID NO: 2389000 - RNA, 19 nt, Artificial Sequence
  Description of Artificial Sequence: Synthetic oligonucleotide
  Sense strand starting at position 707 of SEQ ID NO: 1886126
gugagaaucaccggcugga

SEQ ID NO: 2389001 - RNA, 19 nt, Artificial Sequence
  Description of Artificial Sequence: Synthetic oligonucleotide
  Antisense strand to SEQ ID NO: 2389000
uccagccggugauucucac

SEQ ID NO: 2389002 - RNA, 19 nt, Artificial Sequence
  Description of Artificial Sequence: Synthetic oligonucleotide
  Sense strand starting at position 710 of SEQ ID NO: 1886126
agaaucaccggcuggaauu

SEQ ID NO: 2389003 - RNA, 19 nt, Artificial Sequence
  Description of Artificial Sequence: Synthetic oligonucleotide
  Antisense strand to SEQ ID NO: 2389002
aauuccagccggugauucu

SEQ ID NO: 2389004 - RNA, 19 nt, Artificial Sequence
  Description of Artificial Sequence: Synthetic oligonucleotide
  Sense strand starting at position 711 of SEQ ID NO: 1886126
gaaucaccggcuggaauua

SEQ ID NO: 2389005 - RNA, 19 nt, Artificial Sequence
  Description of Artificial Sequence: Synthetic oligonucleotide
  Antisense strand to SEQ ID NO: 2389004
uaauuccagccggugauuc

SEQ ID NO: 2389006 - RNA, 19 nt, Artificial Sequence
  Description of Artificial Sequence: Synthetic oligonucleotide
  Sense strand starting at position 835 of SEQ ID NO: 1886126
gcuucucagugauuccaau

SEQ ID NO: 2389007 - RNA, 19 nt, Artificial Sequence
  Description of Artificial Sequence: Synthetic oligonucleotide
  Antisense strand to SEQ ID NO: 2389006
auuggaaucacugagaagc

SEQ ID NO: 2389008 - RNA, 19 nt, Artificial Sequence
  Description of Artificial Sequence: Synthetic oligonucleotide
  Sense strand starting at position 868 of SEQ ID NO: 1886126
aaguaucacuggucuaggu

SEQ ID NO: 2389009 - RNA, 19 nt, Artificial Sequence
  Description of Artificial Sequence: Synthetic oligonucleotide
  Antisense strand to SEQ ID NO: 2389008
accuagaccagugauacuu

SEQ ID NO: 2389010 - RNA, 19 nt, Artificial Sequence
  Description of Artificial Sequence: Synthetic oligonucleotide
  Sense strand starting at position 870 of SEQ ID NO: 1886126
guaucacuggucuagguaa

SEQ ID NO: 2389011 - RNA, 19 nt, Artificial Sequence
  Description of Artificial Sequence: Synthetic oligonucleotide
  Antisense strand to SEQ ID NO: 2389010
uuaccuagaccagugauac

SEQ ID NO: 2389012 - RNA, 19 nt, Artificial Sequence
  Description of Artificial Sequence: Synthetic oligonucleotide
  Sense strand starting at position 923 of SEQ ID NO: 1886126
acuaguagaagcugggaaa

SEQ ID NO: 2389013 - RNA, 19 nt, Artificial Sequence
  Description of Artificial Sequence: Synthetic oligonucleotide
  Antisense strand to SEQ ID NO: 2389012
uuucccagcuucuacuagu

SEQ ID NO: 2389014 - RNA, 19 nt, Artificial Sequence
  Description of Artificial Sequence: Synthetic oligonucleotide
  Sense strand starting at position 1119 of SEQ ID NO: 1886126
ccugaauuacuaugguaau

SEQ ID NO: 2389015 - RNA, 19 nt, Artificial Sequence
  Description of Artificial Sequence: Synthetic oligonucleotide
  Antisense strand to SEQ ID NO: 2389014
auuaccauaguaauucagg

SEQ ID NO: 2389016 - RNA, 19 nt, Artificial Sequence
  Description of Artificial Sequence: Synthetic oligonucleotide
  Sense strand starting at position 1143 of SEQ ID NO: 1886126
uguugugguauugauagag

SEQ ID NO: 2389017 - RNA, 19 nt, Artificial Sequence
  Description of Artificial Sequence: Synthetic oligonucleotide
  Antisense strand to SEQ ID NO: 2389016
cucuaucaauaccacaaca

SEQ ID NO: 2389018 - RNA, 19 nt, Artificial Sequence
  Description of Artificial Sequence: Synthetic oligonucleotide
  Sense strand starting at position 1164 of SEQ ID NO: 1886126
gcuacauaucaauguguga

SEQ ID NO: 2389019 - RNA, 19 nt, Artificial Sequence
  Description of Artificial Sequence: Synthetic oligonucleotide
  Antisense strand to SEQ ID NO: 2389018
ucacacauugauauguagc

SEQ ID NO: 2389020 - RNA, 19 nt, Artificial Sequence
  Description of Artificial Sequence: Synthetic oligonucleotide
  Sense strand starting at position 1168 of SEQ ID NO: 1886126
cauaucaaugugugacuga

SEQ ID NO: 2389021 - RNA, 19 nt, Artificial Sequence
  Description of Artificial Sequence: Synthetic oligonucleotide
  Antisense strand to SEQ ID NO: 2389020
ucagucacacauugauaug

SEQ ID NO: 2389022 - RNA, 19 nt, Artificial Sequence
  Description of Artificial Sequence: Synthetic oligonucleotide
  Sense strand starting at position 1171 of SEQ ID NO: 1886126
aucaaugugugacugauau

SEQ ID NO: 2389023 - RNA, 19 nt, Artificial Sequence
  Description of Artificial Sequence: Synthetic oligonucleotide
  Antisense strand to SEQ ID NO: 2389022
auaucagucacacauugau

SEQ ID NO: 2389024 - RNA, 19 nt, Artificial Sequence
  Description of Artificial Sequence: Synthetic oligonucleotide
  Sense strand starting at position 1246 of SEQ ID NO: 1886126
ccuaaaugauagccugaaa

SEQ ID NO: 2389025 - RNA, 19 nt, Artificial Sequence
  Description of Artificial Sequence: Synthetic oligonucleotide
  Antisense strand to SEQ ID NO: 2389024
uuucaggcuaucauuuagg

SEQ ID NO: 2389026 - RNA, 19 nt, Artificial Sequence
  Description of Artificial Sequence: Synthetic oligonucleotide
  Sense strand starting at position 1307 of SEQ ID NO: 1886126
aaugcuaccgccuagagaa

SEQ ID NO: 2389027 - RNA, 19 nt, Artificial Sequence
  Description of Artificial Sequence: Synthetic oligonucleotide
  Antisense strand to SEQ ID NO: 2389026
uucucuaggcgguagcauu

SEQ ID NO: 2389028 - RNA, 19 nt, Artificial Sequence
  Description of Artificial Sequence: Synthetic oligonucleotide
  Sense strand starting at position 1442 of SEQ ID NO: 1886126
gaguauuucugaguuggcu

SEQ ID NO: 2389029 - RNA, 19 nt, Artificial Sequence
  Description of Artificial Sequence: Synthetic oligonucleotide
  Antisense strand to SEQ ID NO: 2389028
agccaacucagaaauacuc

SEQ ID NO: 2389030 - RNA, 19 nt, Artificial Sequence
  Description of Artificial Sequence: Synthetic oligonucleotide
  Sense strand starting at position 1444 of SEQ ID NO: 1886126
guauuucugaguuggcuau

SEQ ID NO: 2389031 - RNA, 19 nt, Artificial Sequence
  Description of Artificial Sequence: Synthetic oligonucleotide
  Antisense strand to SEQ ID NO: 2389030
auagccaacucagaaauac

SEQ ID NO: 2389032 - RNA, 19 nt, Artificial Sequence
  Description of Artificial Sequence: Synthetic oligonucleotide
  Sense strand starting at position 1445 of SEQ ID NO: 1886126
uauuucugaguuggcuauu

SEQ ID NO: 2389033 - RNA, 19 nt, Artificial Sequence
  Description of Artificial Sequence: Synthetic oligonucleotide
  Antisense strand to SEQ ID NO: 2389032
aauagccaacucagaaaua

SEQ ID NO: 2389034 - RNA, 19 nt, Artificial Sequence
  Description of Artificial Sequence: Synthetic oligonucleotide
  Sense strand starting at position 1660 of SEQ ID NO: 1886126
cugugcauccuguaacaau

SEQ ID NO: 2389035 - RNA, 19 nt, Artificial Sequence
  Description of Artificial Sequence: Synthetic oligonucleotide
  Antisense strand to SEQ ID NO: 2389034
auuguuacaggaugcacag

SEQ ID NO: 2389036 - RNA, 19 nt, Artificial Sequence
  Description of Artificial Sequence: Synthetic oligonucleotide
  Sense strand starting at position 1741 of SEQ ID NO: 1886126
ugcaaauuacuuggguacu

SEQ ID NO: 2389037 - RNA, 19 nt, Artificial Sequence
  Description of Artificial Sequence: Synthetic oligonucleotide
  Antisense strand to SEQ ID NO: 2389036
aguacccaaguaauuugca

SEQ ID NO: 2389038 - RNA, 19 nt, Artificial Sequence
  Description of Artificial Sequence: Synthetic oligonucleotide
  Sense strand starting at position 1817 of SEQ ID NO: 1886126
aaugaaagaucagagauag

SEQ ID NO: 2389039 - RNA, 19 nt, Artificial Sequence
  Description of Artificial Sequence: Synthetic oligonucleotide
  Antisense strand to SEQ ID NO: 2389038
cuaucucugaucuuucauu

SEQ ID NO: 2389040 - RNA, 19 nt, Artificial Sequence
  Description of Artificial Sequence: Synthetic oligonucleotide
  Sense strand starting at position 1855 of SEQ ID NO: 1886126
guagcagugauaggcauuu

SEQ ID NO: 2389041 - RNA, 19 nt, Artificial Sequence
  Description of Artificial Sequence: Synthetic oligonucleotide
  Antisense strand to SEQ ID NO: 2389040
aaaugccuaucacugcuac

SEQ ID NO: 2389042 - RNA, 19 nt, Artificial Sequence
  Description of Artificial Sequence: Synthetic oligonucleotide
  Sense strand starting at position 2110 of SEQ ID NO: 1886126
guugaagugcuuugaagag

SEQ ID NO: 2389043 - RNA, 19 nt, Artificial Sequence
  Description of Artificial Sequence: Synthetic oligonucleotide
  Antisense strand to SEQ ID NO: 2389042
cucuucaaagcacuucaac

SEQ ID NO: 2389044 - RNA, 19 nt, Artificial Sequence
  Description of Artificial Sequence: Synthetic oligonucleotide
  Sense strand starting at position 2190 of SEQ ID NO: 1886126
ccuggacuuggccagagua

SEQ ID NO: 2389045 - RNA, 19 nt, Artificial Sequence
  Description of Artificial Sequence: Synthetic oligonucleotide
  Antisense strand to SEQ ID NO: 2389044
uacucuggccaaguccagg

SEQ ID NO: 2389046 - RNA, 19 nt, Artificial Sequence
  Description of Artificial Sequence: Synthetic oligonucleotide
  Sense strand starting at position 2192 of SEQ ID NO: 1886126
uggacuuggccagaguauc

SEQ ID NO: 2389047 - RNA, 19 nt, Artificial Sequence
  Description of Artificial Sequence: Synthetic oligonucleotide
  Antisense strand to SEQ ID NO: 2389046
gauacucuggccaagucca

SEQ ID NO: 2389048 - RNA, 19 nt, Artificial Sequence
  Description of Artificial Sequence: Synthetic oligonucleotide
  Sense strand starting at position 2232 of SEQ ID NO: 1886126
uugggaccuucuuuaagaa

SEQ ID NO: 2389049 - RNA, 19 nt, Artificial Sequence
  Description of Artificial Sequence: Synthetic oligonucleotide
  Antisense strand to SEQ ID NO: 2389048
uucuuaaagaaggucccaa

SEQ ID NO: 2389050 - RNA, 19 nt, Artificial Sequence
  Description of Artificial Sequence: Synthetic oligonucleotide
  Sense strand starting at position 2275 of SEQ ID NO: 1886126
caguaucagcuuuaagagu

SEQ ID NO: 2389051 - RNA, 19 nt, Artificial Sequence
  Description of Artificial Sequence: Synthetic oligonucleotide
  Antisense strand to SEQ ID NO: 2389050
acucuuaaagcugauacug

SEQ ID NO: 2389052 - RNA, 19 nt, Artificial Sequence
  Description of Artificial Sequence: Synthetic oligonucleotide
  Sense strand starting at position 2281 of SEQ ID NO: 1886126
cagcuuuaagagugagcua

SEQ ID NO: 2389053 - RNA, 19 nt, Artificial Sequence
  Description of Artificial Sequence: Synthetic oligonucleotide
  Antisense strand to SEQ ID NO: 2389052
uagcucacucuuaaagcug

SEQ ID NO: 2389054 - RNA, 19 nt, Artificial Sequence
  Description of Artificial Sequence: Synthetic oligonucleotide
  Sense strand starting at position 2282 of SEQ ID NO: 1886126
agcuuuaagagugagcuaa

SEQ ID NO: 2389055 - RNA, 19 nt, Artificial Sequence
  Description of Artificial Sequence: Synthetic oligonucleotide
  Antisense strand to SEQ ID NO: 2389054
uuagcucacucuuaaagcu

SEQ ID NO: 2389056 - RNA, 19 nt, Artificial Sequence
  Description of Artificial Sequence: Synthetic oligonucleotide
  Sense strand starting at position 2329 of SEQ ID NO: 1886126
guuagcuaagaaugacuuu

SEQ ID NO: 2389057 - RNA, 19 nt, Artificial Sequence
  Description of Artificial Sequence: Synthetic oligonucleotide
  Antisense strand to SEQ ID NO: 2389056
aaagucauucuuagcuaac

SEQ ID NO: 2389058 - RNA, 19 nt, Artificial Sequence
  Description of Artificial Sequence: Synthetic oligonucleotide
  Sense strand starting at position 2589 of SEQ ID NO: 1886126
acauaauacggguggcuau

SEQ ID NO: 2389059 - RNA, 19 nt, Artificial Sequence
  Description of Artificial Sequence: Synthetic oligonucleotide
  Antisense strand to SEQ ID NO: 2389058
auagccacccguauuaugu

SEQ ID NO: 2389060 - RNA, 19 nt, Artificial Sequence
  Description of Artificial Sequence: Synthetic oligonucleotide
  Sense strand starting at position 34 of SEQ ID NO: 1886127
uccagagauucugcugcuu

SEQ ID NO: 2389061 - RNA, 19 nt, Artificial Sequence
  Description of Artificial Sequence: Synthetic oligonucleotide
  Antisense strand to SEQ ID NO: 2389060
aagcagcagaaucucugga

SEQ ID NO: 2389062 - RNA, 19 nt, Artificial Sequence
  Description of Artificial Sequence: Synthetic oligonucleotide
  Sense strand starting at position 413 of SEQ ID NO: 1886127
cguguuccuccagggagaa

SEQ ID NO: 2389063 - RNA, 19 nt, Artificial Sequence
  Description of Artificial Sequence: Synthetic oligonucleotide
  Antisense strand to SEQ ID NO: 2389062
uucucccuggaggaacacg

SEQ ID NO: 2389064 - RNA, 19 nt, Artificial Sequence
  Description of Artificial Sequence: Synthetic oligonucleotide
  Sense strand starting at position 414 of SEQ ID NO: 1886127
guguuccuccagggagaau

SEQ ID NO: 2389065 - RNA, 19 nt, Artificial Sequence
  Description of Artificial Sequence: Synthetic oligonucleotide
  Antisense strand to SEQ ID NO: 2389064
auucucccuggaggaacac

SEQ ID NO: 2389066 - RNA, 19 nt, Artificial Sequence
  Description of Artificial Sequence: Synthetic oligonucleotide
  Sense strand starting at position 838 of SEQ ID NO: 1886127
ugaccaagcucagagagaa

SEQ ID NO: 2389067 - RNA, 19 nt, Artificial Sequence
  Description of Artificial Sequence: Synthetic oligonucleotide
  Antisense strand to SEQ ID NO: 2389066
uucucucugagcuugguca

SEQ ID NO: 2389068 - RNA, 19 nt, Artificial Sequence
  Description of Artificial Sequence: Synthetic oligonucleotide
  Sense strand starting at position 1047 of SEQ ID NO: 1886127
ucagcaaaugauuguguaa

SEQ ID NO: 2389069 - RNA, 19 nt, Artificial Sequence
  Description of Artificial Sequence: Synthetic oligonucleotide
  Antisense strand to SEQ ID NO: 2389068
uuacacaaucauuugcuga

SEQ ID NO: 2389070 - RNA, 19 nt, Artificial Sequence
  Description of Artificial Sequence: Synthetic oligonucleotide
  Sense strand starting at position 1125 of SEQ ID NO: 1886127
gcugauacucaauggacua

SEQ ID NO: 2389071 - RNA, 19 nt, Artificial Sequence
  Description of Artificial Sequence: Synthetic oligonucleotide
  Antisense strand to SEQ ID NO: 2389070
uaguccauugaguaucagc

SEQ ID NO: 2389072 - RNA, 19 nt, Artificial Sequence
  Description of Artificial Sequence: Synthetic oligonucleotide
  Sense strand starting at position 1150 of SEQ ID NO: 1886127
cucacuugucaauaguguu

SEQ ID NO: 2389073 - RNA, 19 nt, Artificial Sequence
  Description of Artificial Sequence: Synthetic oligonucleotide
  Antisense strand to SEQ ID NO: 2389072
aacacuauugacaagugag

SEQ ID NO: 2389074 - RNA, 19 nt, Artificial Sequence
  Description of Artificial Sequence: Synthetic oligonucleotide
  Sense strand starting at position 1395 of SEQ ID NO: 1886127
gcaguugagcugagaucgu

SEQ ID NO: 2389075 - RNA, 19 nt, Artificial Sequence
  Description of Artificial Sequence: Synthetic oligonucleotide
  Antisense strand to SEQ ID NO: 2389074
acgaucucagcucaacugc

SEQ ID NO: 2389076 - RNA, 19 nt, Artificial Sequence
  Description of Artificial Sequence: Synthetic oligonucleotide
  Sense strand starting at position 1602 of SEQ ID NO: 1886127
ugccauguugccuggacua

SEQ ID NO: 2389077 - RNA, 19 nt, Artificial Sequence
  Description of Artificial Sequence: Synthetic oligonucleotide
  Antisense strand to SEQ ID NO: 2389076
uaguccaggcaacauggca

SEQ ID NO: 2389078 - RNA, 19 nt, Artificial Sequence
  Description of Artificial Sequence: Synthetic oligonucleotide
  Sense strand starting at position 2443 of SEQ ID NO: 1886127
gaggcuuccuaagggagaa

SEQ ID NO: 2389079 - RNA, 19 nt, Artificial Sequence
  Description of Artificial Sequence: Synthetic oligonucleotide
  Antisense strand to SEQ ID NO: 2389078
uucucccuuaggaagccuc

SEQ ID NO: 2389080 - RNA, 19 nt, Artificial Sequence
  Description of Artificial Sequence: Synthetic oligonucleotide
  Sense strand starting at position 2466 of SEQ ID NO: 1886127
cacugaucuggaugggugu

SEQ ID NO: 2389081 - RNA, 19 nt, Artificial Sequence
  Description of Artificial Sequence: Synthetic oligonucleotide
  Antisense strand to SEQ ID NO: 2389080
acacccauccagaucagug

SEQ ID NO: 2389082 - RNA, 19 nt, Artificial Sequence
  Description of Artificial Sequence: Synthetic oligonucleotide
  Sense strand starting at position 2528 of SEQ ID NO: 1886127
ccaggcugauuccugaauu

SEQ ID NO: 2389083 - RNA, 19 nt, Artificial Sequence
  Description of Artificial Sequence: Synthetic oligonucleotide
  Antisense strand to SEQ ID NO: 2389082
aauucaggaaucagccugg

SEQ ID NO: 2389084 - RNA, 19 nt, Artificial Sequence
  Description of Artificial Sequence: Synthetic oligonucleotide
  Sense strand starting at position 2593 of SEQ ID NO: 1886127
guaagcuacuccuaaugua

SEQ ID NO: 2389085 - RNA, 19 nt, Artificial Sequence
  Description of Artificial Sequence: Synthetic oligonucleotide
  Antisense strand to SEQ ID NO: 2389084
uacauuaggaguagcuuac

SEQ ID NO: 2389086 - RNA, 19 nt, Artificial Sequence
  Description of Artificial Sequence: Synthetic oligonucleotide
  Sense strand starting at position 2601 of SEQ ID NO: 1886127
cuccuaauguaauaggcua

SEQ ID NO: 2389087 - RNA, 19 nt, Artificial Sequence
  Description of Artificial Sequence: Synthetic oligonucleotide
  Antisense strand to SEQ ID NO: 2389086
uagccuauuacauuaggag

SEQ ID NO: 2389088 - RNA, 19 nt, Artificial Sequence
  Description of Artificial Sequence: Synthetic oligonucleotide
  Sense strand starting at position 3134 of SEQ ID NO: 1886127
gugggcuuuccucaucacu

SEQ ID NO: 2389089 - RNA, 19 nt, Artificial Sequence
  Description of Artificial Sequence: Synthetic oligonucleotide
  Antisense strand to SEQ ID NO: 2389088
agugaugaggaaagcccac

SEQ ID NO: 2389090 - RNA, 19 nt, Artificial Sequence
  Description of Artificial Sequence: Synthetic oligonucleotide
  Sense strand starting at position 3240 of SEQ ID NO: 1886127
uggagucuuagcugaccau

SEQ ID NO: 2389091 - RNA, 19 nt, Artificial Sequence
  Description of Artificial Sequence: Synthetic oligonucleotide
  Antisense strand to SEQ ID NO: 2389090
auggucagcuaagacucca

SEQ ID NO: 2389092 - RNA, 19 nt, Artificial Sequence
  Description of Artificial Sequence: Synthetic oligonucleotide
  Sense strand starting at position 3569 of SEQ ID NO: 1886127
ggcaccucuuggucugaga

SEQ ID NO: 2389093 - RNA, 19 nt, Artificial Sequence
  Description of Artificial Sequence: Synthetic oligonucleotide
  Antisense strand to SEQ ID NO: 2389092
ucucagaccaagaggugcc

SEQ ID NO: 2389094 - RNA, 19 nt, Artificial Sequence
  Description of Artificial Sequence: Synthetic oligonucleotide
  Sense strand starting at position 3571 of SEQ ID NO: 1886127
caccucuuggucugagaug

SEQ ID NO: 2389095 - RNA, 19 nt, Artificial Sequence
  Description of Artificial Sequence: Synthetic oligonucleotide
  Antisense strand to SEQ ID NO: 2389094
caucucagaccaagaggug

SEQ ID NO: 2389096 - RNA, 19 nt, Artificial Sequence
  Description of Artificial Sequence: Synthetic oligonucleotide
  Sense strand starting at position 3677 of SEQ ID NO: 1886127
aggcucugacucuaucaga

SEQ ID NO: 2389097 - RNA, 19 nt, Artificial Sequence
  Description of Artificial Sequence: Synthetic oligonucleotide
  Antisense strand to SEQ ID NO: 2389096
ucugauagagucagagccu

SEQ ID NO: 2389098 - RNA, 19 nt, Artificial Sequence
  Description of Artificial Sequence: Synthetic oligonucleotide
  Sense strand starting at position 3682 of SEQ ID NO: 1886127
cugacucuaucagaggaca

SEQ ID NO: 2389099 - RNA, 19 nt, Artificial Sequence
  Description of Artificial Sequence: Synthetic oligonucleotide
  Antisense strand to SEQ ID NO: 2389098
uguccucugauagagucag

SEQ ID NO: 2389100 - RNA, 19 nt, Artificial Sequence
  Description of Artificial Sequence: Synthetic oligonucleotide
  Sense strand starting at position 3699 of SEQ ID NO: 1886127
caguuugccucugcaagga

SEQ ID NO: 2389101 - RNA, 19 nt, Artificial Sequence
  Description of Artificial Sequence: Synthetic oligonucleotide
  Antisense strand to SEQ ID NO: 2389100
uccuugcagaggcaaacug

SEQ ID NO: 2389102 - RNA, 19 nt, Artificial Sequence
  Description of Artificial Sequence: Synthetic oligonucleotide
  Sense strand starting at position 77 of SEQ ID NO: 1886128
cuccgcauguuccugugaa

SEQ ID NO: 2389103 - RNA, 19 nt, Artificial Sequence
  Description of Artificial Sequence: Synthetic oligonucleotide
  Antisense strand to SEQ ID NO: 2389102
uucacaggaacaugcggag

SEQ ID NO: 2389104 - RNA, 19 nt, Artificial Sequence
  Description of Artificial Sequence: Synthetic oligonucleotide
  Sense strand starting at position 166 of SEQ ID NO: 1886128
cucccagagcucugagauc

SEQ ID NO: 2389105 - RNA, 19 nt, Artificial Sequence
  Description of Artificial Sequence: Synthetic oligonucleotide
  Antisense strand to SEQ ID NO: 2389104
gaucucagagcucugggag

SEQ ID NO: 2389106 - RNA, 19 nt, Artificial Sequence
  Description of Artificial Sequence: Synthetic oligonucleotide
  Sense strand starting at position 743 of SEQ ID NO: 1886128
cugaguagugcagagggaa

SEQ ID NO: 2389107 - RNA, 19 nt, Artificial Sequence
  Description of Artificial Sequence: Synthetic oligonucleotide
  Antisense strand to SEQ ID NO: 2389106
uucccucugcacuacucag

SEQ ID NO: 2389108 - RNA, 19 nt, Artificial Sequence
  Description of Artificial Sequence: Synthetic oligonucleotide
  Sense strand starting at position 759 of SEQ ID NO: 1886128
gaagccaucccagguaagu

SEQ ID NO: 2389109 - RNA, 19 nt, Artificial Sequence
  Description of Artificial Sequence: Synthetic oligonucleotide
  Antisense strand to SEQ ID NO: 2389108
acuuaccugggauggcuuc

SEQ ID NO: 2389110 - RNA, 19 nt, Artificial Sequence
  Description of Artificial Sequence: Synthetic oligonucleotide
  Sense strand starting at position 770 of SEQ ID NO: 1886128
agguaagugccaugaguuu

SEQ ID NO: 2389111 - RNA, 19 nt, Artificial Sequence
  Description of Artificial Sequence: Synthetic oligonucleotide
  Antisense strand to SEQ ID NO: 2389110
aaacucauggcacuuaccu

SEQ ID NO: 2389112 - RNA, 19 nt, Artificial Sequence
  Description of Artificial Sequence: Synthetic oligonucleotide
  Sense strand starting at position 1255 of SEQ ID NO: 1886128
gcaggcuguucaccagagu

SEQ ID NO: 2389113 - RNA, 19 nt, Artificial Sequence
  Description of Artificial Sequence: Synthetic oligonucleotide
  Antisense strand to SEQ ID NO: 2389112
acucuggugaacagccugc

SEQ ID NO: 2389114 - RNA, 19 nt, Artificial Sequence
  Description of Artificial Sequence: Synthetic oligonucleotide
  Sense strand starting at position 1258 of SEQ ID NO: 1886128
ggcuguucaccagaguuga

SEQ ID NO: 2389115 - RNA, 19 nt, Artificial Sequence
  Description of Artificial Sequence: Synthetic oligonucleotide
  Antisense strand to SEQ ID NO: 2389114
ucaacucuggugaacagcc

SEQ ID NO: 2389116 - RNA, 19 nt, Artificial Sequence
  Description of Artificial Sequence: Synthetic oligonucleotide
  Sense strand starting at position 1433 of SEQ ID NO: 1886128
ugauuuauuucccgaggca

SEQ ID NO: 2389117 - RNA, 19 nt, Artificial Sequence
  Description of Artificial Sequence: Synthetic oligonucleotide
  Antisense strand to SEQ ID NO: 2389116
ugccucgggaaauaaauca

SEQ ID NO: 2389118 - RNA, 19 nt, Artificial Sequence
  Description of Artificial Sequence: Synthetic oligonucleotide
  Sense strand starting at position 1501 of SEQ ID NO: 1886128
ccuggcuccuccuaggaaa

SEQ ID NO: 2389119 - RNA, 19 nt, Artificial Sequence
  Description of Artificial Sequence: Synthetic oligonucleotide
  Antisense strand to SEQ ID NO: 2389118
uuuccuaggaggagccagg

SEQ ID NO: 2389120 - RNA, 19 nt, Artificial Sequence
  Description of Artificial Sequence: Synthetic oligonucleotide
  Sense strand starting at position 1540 of SEQ ID NO: 1886128
agcuaugcuccagugugua

SEQ ID NO: 2389121 - RNA, 19 nt, Artificial Sequence
  Description of Artificial Sequence: Synthetic oligonucleotide
  Antisense strand to SEQ ID NO: 2389120
uacacacuggagcauagcu

SEQ ID NO: 2389122 - RNA, 19 nt, Artificial Sequence
  Description of Artificial Sequence: Synthetic oligonucleotide
  Sense strand starting at position 1597 of SEQ ID NO: 1886128
ucacaacacugugcugaau

SEQ ID NO: 2389123 - RNA, 19 nt, Artificial Sequence
  Description of Artificial Sequence: Synthetic oligonucleotide
  Antisense strand to SEQ ID NO: 2389122
auucagcacaguguuguga

SEQ ID NO: 2389124 - RNA, 19 nt, Artificial Sequence
  Description of Artificial Sequence: Synthetic oligonucleotide
  Sense strand starting at position 1599 of SEQ ID NO: 1886128
acaacacugugcugaauga

SEQ ID NO: 2389125 - RNA, 19 nt, Artificial Sequence
  Description of Artificial Sequence: Synthetic oligonucleotide
  Antisense strand to SEQ ID NO: 2389124
ucauucagcacaguguugu

SEQ ID NO: 2389126 - RNA, 19 nt, Artificial Sequence
  Description of Artificial Sequence: Synthetic oligonucleotide
  Sense strand starting at position 1681 of SEQ ID NO: 1886128
gcagcaggucaauaaguau

SEQ ID NO: 2389127 - RNA, 19 nt, Artificial Sequence
  Description of Artificial Sequence: Synthetic oligonucleotide
  Antisense strand to SEQ ID NO: 2389126
auacuuauugaccugcugc

SEQ ID NO: 2389128 - RNA, 19 nt, Artificial Sequence
  Description of Artificial Sequence: Synthetic oligonucleotide
  Sense strand starting at position 1684 of SEQ ID NO: 1886128
gcaggucaauaaguauaca

SEQ ID NO: 2389129 - RNA, 19 nt, Artificial Sequence
  Description of Artificial Sequence: Synthetic oligonucleotide
  Antisense strand to SEQ ID NO: 2389128
uguauacuuauugaccugc

SEQ ID NO: 2389130 - RNA, 19 nt, Artificial Sequence
  Description of Artificial Sequence: Synthetic oligonucleotide
  Sense strand starting at position 1687 of SEQ ID NO: 1886128
ggucaauaaguauacaugu

SEQ ID NO: 2389131 - RNA, 19 nt, Artificial Sequence
  Description of Artificial Sequence: Synthetic oligonucleotide
  Antisense strand to SEQ ID NO: 2389130
acauguauacuuauugacc

SEQ ID NO: 2389132 - RNA, 19 nt, Artificial Sequence
  Description of Artificial Sequence: Synthetic oligonucleotide
  Sense strand starting at position 1706 of SEQ ID NO: 1886128
gcaugaugccucugugcca

SEQ ID NO: 2389133 - RNA, 19 nt, Artificial Sequence
  Description of Artificial Sequence: Synthetic oligonucleotide
  Antisense strand to SEQ ID NO: 2389132
uggcacagaggcaucaugc

SEQ ID NO: 2389134 - RNA, 19 nt, Artificial Sequence
  Description of Artificial Sequence: Synthetic oligonucleotide
  Sense strand starting at position 1883 of SEQ ID NO: 1886128
augacaucuuguugaaacu

SEQ ID NO: 2389135 - RNA, 19 nt, Artificial Sequence
  Description of Artificial Sequence: Synthetic oligonucleotide
  Antisense strand to SEQ ID NO: 2389134
aguuucaacaagaugucau

SEQ ID NO: 2389136 - RNA, 19 nt, Artificial Sequence
  Description of Artificial Sequence: Synthetic oligonucleotide
  Sense strand starting at position 1994 of SEQ ID NO: 1886128
cgcucaucuccagaaggcu

SEQ ID NO: 2389137 - RNA, 19 nt, Artificial Sequence
  Description of Artificial Sequence: Synthetic oligonucleotide
  Antisense strand to SEQ ID NO: 2389136
agccuucuggagaugagcg

SEQ ID NO: 2389138 - RNA, 19 nt, Artificial Sequence
  Description of Artificial Sequence: Synthetic oligonucleotide
  Sense strand starting at position 2002 of SEQ ID NO: 1886128
uccagaaggcuggagcaau

SEQ ID NO: 2389139 - RNA, 19 nt, Artificial Sequence
  Description of Artificial Sequence: Synthetic oligonucleotide
  Antisense strand to SEQ ID NO: 2389138
auugcuccagccuucugga

SEQ ID NO: 2389140 - RNA, 19 nt, Artificial Sequence
  Description of Artificial Sequence: Synthetic oligonucleotide
  Sense strand starting at position 2102 of SEQ ID NO: 1886128
cuuccugauccaugggauc

SEQ ID NO: 2389141 - RNA, 19 nt, Artificial Sequence
  Description of Artificial Sequence: Synthetic oligonucleotide
  Antisense strand to SEQ ID NO: 2389140
gaucccauggaucaggaag

SEQ ID NO: 2389142 - RNA, 19 nt, Artificial Sequence
  Description of Artificial Sequence: Synthetic oligonucleotide
  Sense strand starting at position 2242 of SEQ ID NO: 1886128
ucuucuuuguaccuacaga

SEQ ID NO: 2389143 - RNA, 19 nt, Artificial Sequence
  Description of Artificial Sequence: Synthetic oligonucleotide
  Antisense strand to SEQ ID NO: 2389142
ucuguagguacaaagaaga

SEQ ID NO: 2389144 - RNA, 19 nt, Artificial Sequence
  Description of Artificial Sequence: Synthetic oligonucleotide
  Sense strand starting at position 2351 of SEQ ID NO: 1886128
ggcuaccucucuccugaga

SEQ ID NO: 2389145 - RNA, 19 nt, Artificial Sequence
  Description of Artificial Sequence: Synthetic oligonucleotide
  Antisense strand to SEQ ID NO: 2389144
ucucaggagagagguagcc

SEQ ID NO: 2389146 - RNA, 19 nt, Artificial Sequence
  Description of Artificial Sequence: Synthetic oligonucleotide
  Sense strand starting at position 2377 of SEQ ID NO: 1886128
gcaggcaucauuggccaga

SEQ ID NO: 2389147 - RNA, 19 nt, Artificial Sequence
  Description of Artificial Sequence: Synthetic oligonucleotide
  Antisense strand to SEQ ID NO: 2389146
ucuggccaaugaugccugc

SEQ ID NO: 2389148 - RNA, 19 nt, Artificial Sequence
  Description of Artificial Sequence: Synthetic oligonucleotide
  Sense strand starting at position 2378 of SEQ ID NO: 1886128
caggcaucauuggccagau

SEQ ID NO: 2389149 - RNA, 19 nt, Artificial Sequence
  Description of Artificial Sequence: Synthetic oligonucleotide
  Antisense strand to SEQ ID NO: 2389148
aucuggccaaugaugccug

SEQ ID NO: 2389150 - RNA, 19 nt, Artificial Sequence
  Description of Artificial Sequence: Synthetic oligonucleotide
  Sense strand starting at position 2421 of SEQ ID NO: 1886128
gcuggagcuccucauaagu

SEQ ID NO: 2389151 - RNA, 19 nt, Artificial Sequence
  Description of Artificial Sequence: Synthetic oligonucleotide
  Antisense strand to SEQ ID NO: 2389150
acuuaugaggagcuccagc

SEQ ID NO: 2389152 - RNA, 19 nt, Artificial Sequence
  Description of Artificial Sequence: Synthetic oligonucleotide
  Sense strand starting at position 2651 of SEQ ID NO: 1886128
aaagucagacggcauuaaa

SEQ ID NO: 2389153 - RNA, 19 nt, Artificial Sequence
  Description of Artificial Sequence: Synthetic oligonucleotide
  Antisense strand to SEQ ID NO: 2389152
uuuaaugccgucugacuuu

SEQ ID NO: 2389154 - RNA, 19 nt, Artificial Sequence
  Description of Artificial Sequence: Synthetic oligonucleotide
  Sense strand starting at position 2683 of SEQ ID NO: 1886128
guuacucaucccuggguaa

SEQ ID NO: 2389155 - RNA, 19 nt, Artificial Sequence
  Description of Artificial Sequence: Synthetic oligonucleotide
  Antisense strand to SEQ ID NO: 2389154
uuacccagggaugaguaac

SEQ ID NO: 2389156 - RNA, 19 nt, Artificial Sequence
  Description of Artificial Sequence: Synthetic oligonucleotide
  Sense strand starting at position 2887 of SEQ ID NO: 1886128
ucacaacuugggugguaaa

SEQ ID NO: 2389157 - RNA, 19 nt, Artificial Sequence
  Description of Artificial Sequence: Synthetic oligonucleotide
  Antisense strand to SEQ ID NO: 2389156
uuuaccacccaaguuguga

SEQ ID NO: 2389158 - RNA, 19 nt, Artificial Sequence
  Description of Artificial Sequence: Synthetic oligonucleotide
  Sense strand starting at position 2928 of SEQ ID NO: 1886128
acaugucuggaucgugcaa

SEQ ID NO: 2389159 - RNA, 19 nt, Artificial Sequence
  Description of Artificial Sequence: Synthetic oligonucleotide
  Antisense strand to SEQ ID NO: 2389158
uugcacgauccagacaugu

SEQ ID NO: 2389160 - RNA, 19 nt, Artificial Sequence
  Description of Artificial Sequence: Synthetic oligonucleotide
  Sense strand starting at position 3014 of SEQ ID NO: 1886128
gccuacucaacgugaagga

SEQ ID NO: 2389161 - RNA, 19 nt, Artificial Sequence
  Description of Artificial Sequence: Synthetic oligonucleotide
  Antisense strand to SEQ ID NO: 2389160
uccuucacguugaguaggc

SEQ ID NO: 2389162 - RNA, 19 nt, Artificial Sequence
  Description of Artificial Sequence: Synthetic oligonucleotide
  Sense strand starting at position 3015 of SEQ ID NO: 1886128
ccuacucaacgugaaggau

SEQ ID NO: 2389163 - RNA, 19 nt, Artificial Sequence
  Description of Artificial Sequence: Synthetic oligonucleotide
  Antisense strand to SEQ ID NO: 2389162
auccuucacguugaguagg

SEQ ID NO: 2389164 - RNA, 19 nt, Artificial Sequence
  Description of Artificial Sequence: Synthetic oligonucleotide
  Sense strand starting at position 3034 of SEQ ID NO: 1886128
agauaucuuuaugaugauc

SEQ ID NO: 2389165 - RNA, 19 nt, Artificial Sequence
  Description of Artificial Sequence: Synthetic oligonucleotide
  Antisense strand to SEQ ID NO: 2389164
gaucaucauaaagauaucu

SEQ ID NO: 2389166 - RNA, 19 nt, Artificial Sequence
  Description of Artificial Sequence: Synthetic oligonucleotide
  Sense strand starting at position 3213 of SEQ ID NO: 1886128
guaguuaagcucugaggga

SEQ ID NO: 2389167 - RNA, 19 nt, Artificial Sequence
  Description of Artificial Sequence: Synthetic oligonucleotide
  Antisense strand to SEQ ID NO: 2389166
ucccucagagcuuaacuac

SEQ ID NO: 2389168 - RNA, 19 nt, Artificial Sequence
  Description of Artificial Sequence: Synthetic oligonucleotide
  Sense strand starting at position 3271 of SEQ ID NO: 1886128
uuuccauaucuuugguaca

SEQ ID NO: 2389169 - RNA, 19 nt, Artificial Sequence
  Description of Artificial Sequence: Synthetic oligonucleotide
  Antisense strand to SEQ ID NO: 2389168
uguaccaaagauauggaaa

SEQ ID NO: 2389170 - RNA, 19 nt, Artificial Sequence
  Description of Artificial Sequence: Synthetic oligonucleotide
  Sense strand starting at position 3362 of SEQ ID NO: 1886128
augugaagcccuuggcuaa

SEQ ID NO: 2389171 - RNA, 19 nt, Artificial Sequence
  Description of Artificial Sequence: Synthetic oligonucleotide
  Antisense strand to SEQ ID NO: 2389170
uuagccaagggcuucacau

SEQ ID NO: 2389172 - RNA, 19 nt, Artificial Sequence
  Description of Artificial Sequence: Synthetic oligonucleotide
  Sense strand starting at position 3467 of SEQ ID NO: 1886128
cugucaaauccagagucca

SEQ ID NO: 2389173 - RNA, 19 nt, Artificial Sequence
  Description of Artificial Sequence: Synthetic oligonucleotide
  Antisense strand to SEQ ID NO: 2389172
uggacucuggauuugacag

SEQ ID NO: 2389174 - RNA, 19 nt, Artificial Sequence
  Description of Artificial Sequence: Synthetic oligonucleotide
  Sense strand starting at position 3508 of SEQ ID NO: 1886128
acagaagggcuccauucuu

SEQ ID NO: 2389175 - RNA, 19 nt, Artificial Sequence
  Description of Artificial Sequence: Synthetic oligonucleotide
  Antisense strand to SEQ ID NO: 2389174
aagaauggagcccuucugu

SEQ ID NO: 2389176 - RNA, 19 nt, Artificial Sequence
  Description of Artificial Sequence: Synthetic oligonucleotide
  Sense strand starting at position 3874 of SEQ ID NO: 1886128
ccuggaaguucucacgaau

SEQ ID NO: 2389177 - RNA, 19 nt, Artificial Sequence
  Description of Artificial Sequence: Synthetic oligonucleotide
  Antisense strand to SEQ ID NO: 2389176
auucgugagaacuuccagg

SEQ ID NO: 2389178 - RNA, 19 nt, Artificial Sequence
  Description of Artificial Sequence: Synthetic oligonucleotide
  Sense strand starting at position 3877 of SEQ ID NO: 1886128
ggaaguucucacgaauguc

SEQ ID NO: 2389179 - RNA, 19 nt, Artificial Sequence
  Description of Artificial Sequence: Synthetic oligonucleotide
  Antisense strand to SEQ ID NO: 2389178
gacauucgugagaacuucc

SEQ ID NO: 2389180 - RNA, 19 nt, Artificial Sequence
  Description of Artificial Sequence: Synthetic oligonucleotide
  Sense strand starting at position 3979 of SEQ ID NO: 1886128
gacuguugacacugcugau

SEQ ID NO: 2389181 - RNA, 19 nt, Artificial Sequence
  Description of Artificial Sequence: Synthetic oligonucleotide
  Antisense strand to SEQ ID NO: 2389180
aucagcagugucaacaguc

SEQ ID NO: 2389182 - RNA, 19 nt, Artificial Sequence
  Description of Artificial Sequence: Synthetic oligonucleotide
  Sense strand starting at position 92 of SEQ ID NO: 1886129
agaagauucuccugucagu

SEQ ID NO: 2389183 - RNA, 19 nt, Artificial Sequence
  Description of Artificial Sequence: Synthetic oligonucleotide
  Antisense strand to SEQ ID NO: 2389182
acugacaggagaaucuucu

SEQ ID NO: 2389184 - RNA, 19 nt, Artificial Sequence
  Description of Artificial Sequence: Synthetic oligonucleotide
  Sense strand starting at position 2443 of SEQ ID NO: 1886129
uggugugugacaggcuaua

SEQ ID NO: 2389185 - RNA, 19 nt, Artificial Sequence
  Description of Artificial Sequence: Synthetic oligonucleotide
  Antisense strand to SEQ ID NO: 2389184
uauagccugucacacacca

SEQ ID NO: 2389186 - RNA, 19 nt, Artificial Sequence
  Description of Artificial Sequence: Synthetic oligonucleotide
  Sense strand starting at position 92 of SEQ ID NO: 1886130
agaagauucuccugucagu

SEQ ID NO: 2389187 - RNA, 19 nt, Artificial Sequence
  Description of Artificial Sequence: Synthetic oligonucleotide
  Antisense strand to SEQ ID NO: 2389186
acugacaggagaaucuucu

SEQ ID NO: 2389188 - RNA, 19 nt, Artificial Sequence
  Description of Artificial Sequence: Synthetic oligonucleotide
  Sense strand starting at position 2443 of SEQ ID NO: 1886130
uggugugugacaggcuaua

SEQ ID NO: 2389189 - RNA, 19 nt, Artificial Sequence
  Description of Artificial Sequence: Synthetic oligonucleotide
  Antisense strand to SEQ ID NO: 2389188
uauagccugucacacacca

SEQ ID NO: 2389190 - RNA, 19 nt, Artificial Sequence
  Description of Artificial Sequence: Synthetic oligonucleotide
  Sense strand starting at position 92 of SEQ ID NO: 1886131
agaagauucuccugucagu

SEQ ID NO: 2389191 - RNA, 19 nt, Artificial Sequence
  Description of Artificial Sequence: Synthetic oligonucleotide
  Antisense strand to SEQ ID NO: 2389190
acugacaggagaaucuucu

SEQ ID NO: 2389192 - RNA, 19 nt, Artificial Sequence
  Description of Artificial Sequence: Synthetic oligonucleotide
  Sense strand starting at position 2443 of SEQ ID NO: 1886131
uggugugugacaggcuaua

SEQ ID NO: 2389193 - RNA, 19 nt, Artificial Sequence
  Description of Artificial Sequence: Synthetic oligonucleotide
  Antisense strand to SEQ ID NO: 2389192
uauagccugucacacacca

SEQ ID NO: 2389194 - RNA, 19 nt, Artificial Sequence
  Description of Artificial Sequence: Synthetic oligonucleotide
  Sense strand starting at position 92 of SEQ ID NO: 1886132
agaagauucuccugucagu

SEQ ID NO: 2389195 - RNA, 19 nt, Artificial Sequence
  Description of Artificial Sequence: Synthetic oligonucleotide
  Antisense strand to SEQ ID NO: 2389194
acugacaggagaaucuucu

SEQ ID NO: 2389196 - RNA, 19 nt, Artificial Sequence
  Description of Artificial Sequence: Synthetic oligonucleotide
  Sense strand starting at position 2443 of SEQ ID NO: 1886132
uggugugugacaggcuaua

SEQ ID NO: 2389197 - RNA, 19 nt, Artificial Sequence
  Description of Artificial Sequence: Synthetic oligonucleotide
  Antisense strand to SEQ ID NO: 2389196
uauagccugucacacacca

SEQ ID NO: 2389198 - RNA, 19 nt, Artificial Sequence
  Description of Artificial Sequence: Synthetic oligonucleotide
  Sense strand starting at position 80 of SEQ ID NO: 1886133
aguuuagccuaaguuauaa

SEQ ID NO: 2389199 - RNA, 19 nt, Artificial Sequence
  Description of Artificial Sequence: Synthetic oligonucleotide
  Antisense strand to SEQ ID NO: 2389198
uuauaacuuaggcuaaacu

SEQ ID NO: 2389200 - RNA, 19 nt, Artificial Sequence
  Description of Artificial Sequence: Synthetic oligonucleotide
  Sense strand starting at position 95 of SEQ ID NO: 1886133
auaacauguccugagcgaa

SEQ ID NO: 2389201 - RNA, 19 nt, Artificial Sequence
  Description of Artificial Sequence: Synthetic oligonucleotide
  Antisense strand to SEQ ID NO: 2389200
uucgcucaggacauguuau

SEQ ID NO: 2389202 - RNA, 19 nt, Artificial Sequence
  Description of Artificial Sequence: Synthetic oligonucleotide
  Sense strand starting at position 250 of SEQ ID NO: 1886133
ccaaaugaacacggugaaa

SEQ ID NO: 2389203 - RNA, 19 nt, Artificial Sequence
  Description of Artificial Sequence: Synthetic oligonucleotide
  Antisense strand to SEQ ID NO: 2389202
uuucaccguguucauuugg

SEQ ID NO: 2389204 - RNA, 19 nt, Artificial Sequence
  Description of Artificial Sequence: Synthetic oligonucleotide
  Sense strand starting at position 252 of SEQ ID NO: 1886133
aaaugaacacggugaaacu

SEQ ID NO: 2389205 - RNA, 19 nt, Artificial Sequence
  Description of Artificial Sequence: Synthetic oligonucleotide
  Antisense strand to SEQ ID NO: 2389204
aguuucaccguguucauuu

SEQ ID NO: 2389206 - RNA, 19 nt, Artificial Sequence
  Description of Artificial Sequence: Synthetic oligonucleotide
  Sense strand starting at position 543 of SEQ ID NO: 1886133
uacagaugcagucggaagu

SEQ ID NO: 2389207 - RNA, 19 nt, Artificial Sequence
  Description of Artificial Sequence: Synthetic oligonucleotide
  Antisense strand to SEQ ID NO: 2389206
acuuccgacugcaucugua

SEQ ID NO: 2389208 - RNA, 19 nt, Artificial Sequence
  Description of Artificial Sequence: Synthetic oligonucleotide
  Sense strand starting at position 553 of SEQ ID NO: 1886133
gucggaaguagcuauacau

SEQ ID NO: 2389209 - RNA, 19 nt, Artificial Sequence
  Description of Artificial Sequence: Synthetic oligonucleotide
  Antisense strand to SEQ ID NO: 2389208
auguauagcuacuuccgac

SEQ ID NO: 2389210 - RNA, 19 nt, Artificial Sequence
  Description of Artificial Sequence: Synthetic oligonucleotide
  Sense strand starting at position 604 of SEQ ID NO: 1886133
ccguccuuccguccggaaa

SEQ ID NO: 2389211 - RNA, 19 nt, Artificial Sequence
  Description of Artificial Sequence: Synthetic oligonucleotide
  Antisense strand to SEQ ID NO: 2389210
uuuccggacggaaggacgg

SEQ ID NO: 2389212 - RNA, 19 nt, Artificial Sequence
  Description of Artificial Sequence: Synthetic oligonucleotide
  Sense strand starting at position 889 of SEQ ID NO: 1886133
cgcugcauuuagucaaguu

SEQ ID NO: 2389213 - RNA, 19 nt, Artificial Sequence
  Description of Artificial Sequence: Synthetic oligonucleotide
  Antisense strand to SEQ ID NO: 2389212
aacuugacuaaaugcagcg

SEQ ID NO: 2389214 - RNA, 19 nt, Artificial Sequence
  Description of Artificial Sequence: Synthetic oligonucleotide
  Sense strand starting at position 935 of SEQ ID NO: 1886133
agauaaagucuugggucau

SEQ ID NO: 2389215 - RNA, 19 nt, Artificial Sequence
  Description of Artificial Sequence: Synthetic oligonucleotide
  Antisense strand to SEQ ID NO: 2389214
augacccaagacuuuaucu

SEQ ID NO: 2389216 - RNA, 19 nt, Artificial Sequence
  Description of Artificial Sequence: Synthetic oligonucleotide
  Sense strand starting at position 939 of SEQ ID NO: 1886133
aaagucuugggucaucgau

SEQ ID NO: 2389217 - RNA, 19 nt, Artificial Sequence
  Description of Artificial Sequence: Synthetic oligonucleotide
  Antisense strand to SEQ ID NO: 2389216
aucgaugacccaagacuuu

SEQ ID NO: 2389218 - RNA, 19 nt, Artificial Sequence
  Description of Artificial Sequence: Synthetic oligonucleotide
  Sense strand starting at position 1056 of SEQ ID NO: 1886133
ggcauccuccacuggguua

SEQ ID NO: 2389219 - RNA, 19 nt, Artificial Sequence
  Description of Artificial Sequence: Synthetic oligonucleotide
  Antisense strand to SEQ ID NO: 2389218
uaacccaguggaggaugcc

SEQ ID NO: 2389220 - RNA, 19 nt, Artificial Sequence
  Description of Artificial Sequence: Synthetic oligonucleotide
  Sense strand starting at position 1119 of SEQ ID NO: 1886133
gccggcucugagugugaga

SEQ ID NO: 2389221 - RNA, 19 nt, Artificial Sequence
  Description of Artificial Sequence: Synthetic oligonucleotide
  Antisense strand to SEQ ID NO: 2389220
ucucacacucagagccggc

SEQ ID NO: 2389222 - RNA, 19 nt, Artificial Sequence
  Description of Artificial Sequence: Synthetic oligonucleotide
  Sense strand starting at position 1126 of SEQ ID NO: 1886133
cugagugugagacguucua

SEQ ID NO: 2389223 - RNA, 19 nt, Artificial Sequence
  Description of Artificial Sequence: Synthetic oligonucleotide
  Antisense strand to SEQ ID NO: 2389222
uagaacgucucacacucag

SEQ ID NO: 2389224 - RNA, 19 nt, Artificial Sequence
  Description of Artificial Sequence: Synthetic oligonucleotide
  Sense strand starting at position 1272 of SEQ ID NO: 1886133
gcaggugcucggccaugau

SEQ ID NO: 2389225 - RNA, 19 nt, Artificial Sequence
  Description of Artificial Sequence: Synthetic oligonucleotide
  Antisense strand to SEQ ID NO: 2389224
aucauggccgagcaccugc

SEQ ID NO: 2389226 - RNA, 19 nt, Artificial Sequence
  Description of Artificial Sequence: Synthetic oligonucleotide
  Sense strand starting at position 1379 of SEQ ID NO: 1886133
gccgugagguucucgauga

SEQ ID NO: 2389227 - RNA, 19 nt, Artificial Sequence
  Description of Artificial Sequence: Synthetic oligonucleotide
  Antisense strand to SEQ ID NO: 2389226
ucaucgagaaccucacggc

SEQ ID NO: 2389228 - RNA, 19 nt, Artificial Sequence
  Description of Artificial Sequence: Synthetic oligonucleotide
  Sense strand starting at position 1383 of SEQ ID NO: 1886133
ugagguucucgaugaacag

SEQ ID NO: 2389229 - RNA, 19 nt, Artificial Sequence
  Description of Artificial Sequence: Synthetic oligonucleotide
  Antisense strand to SEQ ID NO: 2389228
cuguucaucgagaaccuca

SEQ ID NO: 2389230 - RNA, 19 nt, Artificial Sequence
  Description of Artificial Sequence: Synthetic oligonucleotide
  Sense strand starting at position 1500 of SEQ ID NO: 1886133
ucagguaguagcgagaguu

SEQ ID NO: 2389231 - RNA, 19 nt, Artificial Sequence
  Description of Artificial Sequence: Synthetic oligonucleotide
  Antisense strand to SEQ ID NO: 2389230
aacucucgcuacuaccuga

SEQ ID NO: 2389232 - RNA, 19 nt, Artificial Sequence
  Description of Artificial Sequence: Synthetic oligonucleotide
  Sense strand starting at position 1643 of SEQ ID NO: 1886133
aaggcuucugaaugaacgu

SEQ ID NO: 2389233 - RNA, 19 nt, Artificial Sequence
  Description of Artificial Sequence: Synthetic oligonucleotide
  Antisense strand to SEQ ID NO: 2389232
acguucauucagaagccuu

SEQ ID NO: 2389234 - RNA, 19 nt, Artificial Sequence
  Description of Artificial Sequence: Synthetic oligonucleotide
  Sense strand starting at position 1890 of SEQ ID NO: 1886133
guggcucggcuggauuaau

SEQ ID NO: 2389235 - RNA, 19 nt, Artificial Sequence
  Description of Artificial Sequence: Synthetic oligonucleotide
  Antisense strand to SEQ ID NO: 2389234
auuaauccagccgagccac

SEQ ID NO: 2389236 - RNA, 19 nt, Artificial Sequence
  Description of Artificial Sequence: Synthetic oligonucleotide
  Sense strand starting at position 1898 of SEQ ID NO: 1886133
gcuggauuaauggauugca

SEQ ID NO: 2389237 - RNA, 19 nt, Artificial Sequence
  Description of Artificial Sequence: Synthetic oligonucleotide
  Antisense strand to SEQ ID NO: 2389236
ugcaauccauuaauccagc

SEQ ID NO: 2389238 - RNA, 19 nt, Artificial Sequence
  Description of Artificial Sequence: Synthetic oligonucleotide
  Sense strand starting at position 1901 of SEQ ID NO: 1886133
ggauuaauggauugcagca

SEQ ID NO: 2389239 - RNA, 19 nt, Artificial Sequence
  Description of Artificial Sequence: Synthetic oligonucleotide
  Antisense strand to SEQ ID NO: 2389238
ugcugcaauccauuaaucc

SEQ ID NO: 2389240 - RNA, 19 nt, Artificial Sequence
  Description of Artificial Sequence: Synthetic oligonucleotide
  Sense strand starting at position 2122 of SEQ ID NO: 1886133
accguucggagcuguagau

SEQ ID NO: 2389241 - RNA, 19 nt, Artificial Sequence
  Description of Artificial Sequence: Synthetic oligonucleotide
  Antisense strand to SEQ ID NO: 2389240
aucuacagcuccgaacggu

SEQ ID NO: 2389242 - RNA, 19 nt, Artificial Sequence
  Description of Artificial Sequence: Synthetic oligonucleotide
  Sense strand starting at position 2330 of SEQ ID NO: 1886133
ccuaaauguccaggcccua

SEQ ID NO: 2389243 - RNA, 19 nt, Artificial Sequence
  Description of Artificial Sequence: Synthetic oligonucleotide
  Antisense strand to SEQ ID NO: 2389242
uagggccuggacauuuagg

SEQ ID NO: 2389244 - RNA, 19 nt, Artificial Sequence
  Description of Artificial Sequence: Synthetic oligonucleotide
  Sense strand starting at position 2503 of SEQ ID NO: 1886133
gcuggaucuccaugauguu

SEQ ID NO: 2389245 - RNA, 19 nt, Artificial Sequence
  Description of Artificial Sequence: Synthetic oligonucleotide
  Antisense strand to SEQ ID NO: 2389244
aacaucauggagauccagc

SEQ ID NO: 2389246 - RNA, 19 nt, Artificial Sequence
  Description of Artificial Sequence: Synthetic oligonucleotide
  Sense strand starting at position 2726 of SEQ ID NO: 1886133
ggaagaaugugggagccua

SEQ ID NO: 2389247 - RNA, 19 nt, Artificial Sequence
  Description of Artificial Sequence: Synthetic oligonucleotide
  Antisense strand to SEQ ID NO: 2389246
uaggcucccacauucuucc

SEQ ID NO: 2389248 - RNA, 19 nt, Artificial Sequence
  Description of Artificial Sequence: Synthetic oligonucleotide
  Sense strand starting at position 2809 of SEQ ID NO: 1886133
ggauacggccuccaacauu

SEQ ID NO: 2389249 - RNA, 19 nt, Artificial Sequence
  Description of Artificial Sequence: Synthetic oligonucleotide
  Antisense strand to SEQ ID NO: 2389248
aauguuggaggccguaucc

SEQ ID NO: 2389250 - RNA, 19 nt, Artificial Sequence
  Description of Artificial Sequence: Synthetic oligonucleotide
  Sense strand starting at position 3228 of SEQ ID NO: 1886133
cuuacauaaccacgguaua

SEQ ID NO: 2389251 - RNA, 19 nt, Artificial Sequence
  Description of Artificial Sequence: Synthetic oligonucleotide
  Antisense strand to SEQ ID NO: 2389250
uauaccgugguuauguaag

SEQ ID NO: 2389252 - RNA, 19 nt, Artificial Sequence
  Description of Artificial Sequence: Synthetic oligonucleotide
  Sense strand starting at position 3229 of SEQ ID NO: 1886133
uuacauaaccacgguauau

SEQ ID NO: 2389253 - RNA, 19 nt, Artificial Sequence
  Description of Artificial Sequence: Synthetic oligonucleotide
  Antisense strand to SEQ ID NO: 2389252
auauaccgugguuauguaa

SEQ ID NO: 2389254 - RNA, 19 nt, Artificial Sequence
  Description of Artificial Sequence: Synthetic oligonucleotide
  Sense strand starting at position 3240 of SEQ ID NO: 1886133
cgguauauuugucacaacu

SEQ ID NO: 2389255 - RNA, 19 nt, Artificial Sequence
  Description of Artificial Sequence: Synthetic oligonucleotide
  Antisense strand to SEQ ID NO: 2389254
aguugugacaaauauaccg

SEQ ID NO: 2389256 - RNA, 19 nt, Artificial Sequence
  Description of Artificial Sequence: Synthetic oligonucleotide
  Sense strand starting at position 3242 of SEQ ID NO: 1886133
guauauuugucacaacuag

SEQ ID NO: 2389257 - RNA, 19 nt, Artificial Sequence
  Description of Artificial Sequence: Synthetic oligonucleotide
  Antisense strand to SEQ ID NO: 2389256
cuaguugugacaaauauac

SEQ ID NO: 2389258 - RNA, 19 nt, Artificial Sequence
  Description of Artificial Sequence: Synthetic oligonucleotide
  Sense strand starting at position 3265 of SEQ ID NO: 1886133
cugacauuggugcauuacu

SEQ ID NO: 2389259 - RNA, 19 nt, Artificial Sequence
  Description of Artificial Sequence: Synthetic oligonucleotide
  Antisense strand to SEQ ID NO: 2389258
aguaaugcaccaaugucag

SEQ ID NO: 2389260 - RNA, 19 nt, Artificial Sequence
  Description of Artificial Sequence: Synthetic oligonucleotide
  Sense strand starting at position 3445 of SEQ ID NO: 1886133
aagaguucccaaggucuua

SEQ ID NO: 2389261 - RNA, 19 nt, Artificial Sequence
  Description of Artificial Sequence: Synthetic oligonucleotide
  Antisense strand to SEQ ID NO: 2389260
uaagaccuugggaacucuu

SEQ ID NO: 2389262 - RNA, 19 nt, Artificial Sequence
  Description of Artificial Sequence: Synthetic oligonucleotide
  Sense strand starting at position 3486 of SEQ ID NO: 1886133
gaccaaugcucucuccguu

SEQ ID NO: 2389263 - RNA, 19 nt, Artificial Sequence
  Description of Artificial Sequence: Synthetic oligonucleotide
  Antisense strand to SEQ ID NO: 2389262
aacggagagagcauugguc

SEQ ID NO: 2389264 - RNA, 19 nt, Artificial Sequence
  Description of Artificial Sequence: Synthetic oligonucleotide
  Sense strand starting at position 3645 of SEQ ID NO: 1886133
ucagaugauugccugccua

SEQ ID NO: 2389265 - RNA, 19 nt, Artificial Sequence
  Description of Artificial Sequence: Synthetic oligonucleotide
  Antisense strand to SEQ ID NO: 2389264
uaggcaggcaaucaucuga

SEQ ID NO: 2389266 - RNA, 19 nt, Artificial Sequence
  Description of Artificial Sequence: Synthetic oligonucleotide
  Sense strand starting at position 3661 of SEQ ID NO: 1886133
cuaggauguuuccucuaca

SEQ ID NO: 2389267 - RNA, 19 nt, Artificial Sequence
  Description of Artificial Sequence: Synthetic oligonucleotide
  Antisense strand to SEQ ID NO: 2389266
uguagaggaaacauccuag

SEQ ID NO: 2389268 - RNA, 19 nt, Artificial Sequence
  Description of Artificial Sequence: Synthetic oligonucleotide
  Sense strand starting at position 3664 of SEQ ID NO: 1886133
ggauguuuccucuacacau

SEQ ID NO: 2389269 - RNA, 19 nt, Artificial Sequence
  Description of Artificial Sequence: Synthetic oligonucleotide
  Antisense strand to SEQ ID NO: 2389268
auguguagaggaaacaucc

SEQ ID NO: 2389270 - RNA, 19 nt, Artificial Sequence
  Description of Artificial Sequence: Synthetic oligonucleotide
  Sense strand starting at position 3694 of SEQ ID NO: 1886133
aucuguggacucugagaug

SEQ ID NO: 2389271 - RNA, 19 nt, Artificial Sequence
  Description of Artificial Sequence: Synthetic oligonucleotide
  Antisense strand to SEQ ID NO: 2389270
caucucagaguccacagau

SEQ ID NO: 2389272 - RNA, 19 nt, Artificial Sequence
  Description of Artificial Sequence: Synthetic oligonucleotide
  Sense strand starting at position 3722 of SEQ ID NO: 1886133
gcuccuugggccugauaag

SEQ ID NO: 2389273 - RNA, 19 nt, Artificial Sequence
  Description of Artificial Sequence: Synthetic oligonucleotide
  Antisense strand to SEQ ID NO: 2389272
cuuaucaggcccaaggagc

SEQ ID NO: 2389274 - RNA, 19 nt, Artificial Sequence
  Description of Artificial Sequence: Synthetic oligonucleotide
  Sense strand starting at position 3807 of SEQ ID NO: 1886133
acagcauacccuuggcaaa

SEQ ID NO: 2389275 - RNA, 19 nt, Artificial Sequence
  Description of Artificial Sequence: Synthetic oligonucleotide
  Antisense strand to SEQ ID NO: 2389274
uuugccaaggguaugcugu

SEQ ID NO: 2389276 - RNA, 19 nt, Artificial Sequence
  Description of Artificial Sequence: Synthetic oligonucleotide
  Sense strand starting at position 3869 of SEQ ID NO: 1886133
ucccauucucugcagagga

SEQ ID NO: 2389277 - RNA, 19 nt, Artificial Sequence
  Description of Artificial Sequence: Synthetic oligonucleotide
  Antisense strand to SEQ ID NO: 2389276
uccucugcagagaauggga

SEQ ID NO: 2389278 - RNA, 19 nt, Artificial Sequence
  Description of Artificial Sequence: Synthetic oligonucleotide
  Sense strand starting at position 109 of SEQ ID NO: 1886134
cucccuuugcauuguuagu

SEQ ID NO: 2389279 - RNA, 19 nt, Artificial Sequence
  Description of Artificial Sequence: Synthetic oligonucleotide
  Antisense strand to SEQ ID NO: 2389278
acuaacaaugcaaagggag

SEQ ID NO: 2389280 - RNA, 19 nt, Artificial Sequence
  Description of Artificial Sequence: Synthetic oligonucleotide
  Sense strand starting at position 111 of SEQ ID NO: 1886134
cccuuugcauuguuaguga

SEQ ID NO: 2389281 - RNA, 19 nt, Artificial Sequence
  Description of Artificial Sequence: Synthetic oligonucleotide
  Antisense strand to SEQ ID NO: 2389280
ucacuaacaaugcaaaggg

SEQ ID NO: 2389282 - RNA, 19 nt, Artificial Sequence
  Description of Artificial Sequence: Synthetic oligonucleotide
  Sense strand starting at position 124 of SEQ ID NO: 1886134
uagugacugccucaagcua

SEQ ID NO: 2389283 - RNA, 19 nt, Artificial Sequence
  Description of Artificial Sequence: Synthetic oligonucleotide
  Antisense strand to SEQ ID NO: 2389282
uagcuugaggcagucacua

SEQ ID NO: 2389284 - RNA, 19 nt, Artificial Sequence
  Description of Artificial Sequence: Synthetic oligonucleotide
  Sense strand starting at position 244 of SEQ ID NO: 1886134
ccgagaucuccgggccuua

SEQ ID NO: 2389285 - RNA, 19 nt, Artificial Sequence
  Description of Artificial Sequence: Synthetic oligonucleotide
  Antisense strand to SEQ ID NO: 2389284
uaaggcccggagaucucgg

SEQ ID NO: 2389286 - RNA, 19 nt, Artificial Sequence
  Description of Artificial Sequence: Synthetic oligonucleotide
  Sense strand starting at position 444 of SEQ ID NO: 1886134
ucugcuuuaucgccuacaa

SEQ ID NO: 2389287 - RNA, 19 nt, Artificial Sequence
  Description of Artificial Sequence: Synthetic oligonucleotide
  Antisense strand to SEQ ID NO: 2389286
uuguaggcgauaaagcaga

SEQ ID NO: 2389288 - RNA, 19 nt, Artificial Sequence
  Description of Artificial Sequence: Synthetic oligonucleotide
  Sense strand starting at position 576 of SEQ ID NO: 1886134
caaagaaguccagagccuu

SEQ ID NO: 2389289 - RNA, 19 nt, Artificial Sequence
  Description of Artificial Sequence: Synthetic oligonucleotide
  Antisense strand to SEQ ID NO: 2389288
aaggcucuggacuucuuug

SEQ ID NO: 2389290 - RNA, 19 nt, Artificial Sequence
  Description of Artificial Sequence: Synthetic oligonucleotide
  Sense strand starting at position 582 of SEQ ID NO: 1886134
aguccagagccuugcagua

SEQ ID NO: 2389291 - RNA, 19 nt, Artificial Sequence
  Description of Artificial Sequence: Synthetic oligonucleotide
  Antisense strand to SEQ ID NO: 2389290
uacugcaaggcucuggacu

SEQ ID NO: 2389292 - RNA, 19 nt, Artificial Sequence
  Description of Artificial Sequence: Synthetic oligonucleotide
  Sense strand starting at position 757 of SEQ ID NO: 1886134
gucucuguugggugaguca

SEQ ID NO: 2389293 - RNA, 19 nt, Artificial Sequence
  Description of Artificial Sequence: Synthetic oligonucleotide
  Antisense strand to SEQ ID NO: 2389292
ugacucacccaacagagac

SEQ ID NO: 2389294 - RNA, 19 nt, Artificial Sequence
  Description of Artificial Sequence: Synthetic oligonucleotide
  Sense strand starting at position 1134 of SEQ ID NO: 1886134
caggaugggucaggaugau

SEQ ID NO: 2389295 - RNA, 19 nt, Artificial Sequence
  Description of Artificial Sequence: Synthetic oligonucleotide
  Antisense strand to SEQ ID NO: 2389294
aucauccugacccauccug

SEQ ID NO: 2389296 - RNA, 19 nt, Artificial Sequence
  Description of Artificial Sequence: Synthetic oligonucleotide
  Sense strand starting at position 1217 of SEQ ID NO: 1886134
cugagcuagaaucguguuu

SEQ ID NO: 2389297 - RNA, 19 nt, Artificial Sequence
  Description of Artificial Sequence: Synthetic oligonucleotide
  Antisense strand to SEQ ID NO: 2389296
aaacacgauucuagcucag

SEQ ID NO: 2389298 - RNA, 19 nt, Artificial Sequence
  Description of Artificial Sequence: Synthetic oligonucleotide
  Sense strand starting at position 1258 of SEQ ID NO: 1886134
ggacuaugcuccuaggaag

SEQ ID NO: 2389299 - RNA, 19 nt, Artificial Sequence
  Description of Artificial Sequence: Synthetic oligonucleotide
  Antisense strand to SEQ ID NO: 2389298
cuuccuaggagcauagucc

SEQ ID NO: 2389300 - RNA, 19 nt, Artificial Sequence
  Description of Artificial Sequence: Synthetic oligonucleotide
  Sense strand starting at position 1448 of SEQ ID NO: 1886134
aggucagaacgaggucuaa

SEQ ID NO: 2389301 - RNA, 19 nt, Artificial Sequence
  Description of Artificial Sequence: Synthetic oligonucleotide
  Antisense strand to SEQ ID NO: 2389300
uuagaccucguucugaccu

SEQ ID NO: 2389302 - RNA, 19 nt, Artificial Sequence
  Description of Artificial Sequence: Synthetic oligonucleotide
  Sense strand starting at position 1730 of SEQ ID NO: 1886134
agaggccuugccugaggaa

SEQ ID NO: 2389303 - RNA, 19 nt, Artificial Sequence
  Description of Artificial Sequence: Synthetic oligonucleotide
  Antisense strand to SEQ ID NO: 2389302
uuccucaggcaaggccucu

SEQ ID NO: 2389304 - RNA, 19 nt, Artificial Sequence
  Description of Artificial Sequence: Synthetic oligonucleotide
  Sense strand starting at position 1731 of SEQ ID NO: 1886134
gaggccuugccugaggaaa

SEQ ID NO: 2389305 - RNA, 19 nt, Artificial Sequence
  Description of Artificial Sequence: Synthetic oligonucleotide
  Antisense strand to SEQ ID NO: 2389304
uuuccucaggcaaggccuc

SEQ ID NO: 2389306 - RNA, 19 nt, Artificial Sequence
  Description of Artificial Sequence: Synthetic oligonucleotide
  Sense strand starting at position 2064 of SEQ ID NO: 1886134
ucaucauuaggcuggaaca

SEQ ID NO: 2389307 - RNA, 19 nt, Artificial Sequence
  Description of Artificial Sequence: Synthetic oligonucleotide
  Antisense strand to SEQ ID NO: 2389306
uguuccagccuaaugauga

SEQ ID NO: 2389308 - RNA, 19 nt, Artificial Sequence
  Description of Artificial Sequence: Synthetic oligonucleotide
  Sense strand starting at position 2245 of SEQ ID NO: 1886134
agugucaauuauccaaauc

SEQ ID NO: 2389309 - RNA, 19 nt, Artificial Sequence
  Description of Artificial Sequence: Synthetic oligonucleotide
  Antisense strand to SEQ ID NO: 2389308
gauuuggauaauugacacu

SEQ ID NO: 2389310 - RNA, 19 nt, Artificial Sequence
  Description of Artificial Sequence: Synthetic oligonucleotide
  Sense strand starting at position 2256 of SEQ ID NO: 1886134
uccaaaucuuaucaagggu

SEQ ID NO: 2389311 - RNA, 19 nt, Artificial Sequence
  Description of Artificial Sequence: Synthetic oligonucleotide
  Antisense strand to SEQ ID NO: 2389310
acccuugauaagauuugga

SEQ ID NO: 2389312 - RNA, 19 nt, Artificial Sequence
  Description of Artificial Sequence: Synthetic oligonucleotide
  Sense strand starting at position 2303 of SEQ ID NO: 1886134
cuccuauguggccacagau

SEQ ID NO: 2389313 - RNA, 19 nt, Artificial Sequence
  Description of Artificial Sequence: Synthetic oligonucleotide
  Antisense strand to SEQ ID NO: 2389312
aucuguggccacauaggag

SEQ ID NO: 2389314 - RNA, 19 nt, Artificial Sequence
  Description of Artificial Sequence: Synthetic oligonucleotide
  Sense strand starting at position 2385 of SEQ ID NO: 1886134
aucccugaugcuugucaca

SEQ ID NO: 2389315 - RNA, 19 nt, Artificial Sequence
  Description of Artificial Sequence: Synthetic oligonucleotide
  Antisense strand to SEQ ID NO: 2389314
ugugacaagcaucagggau

SEQ ID NO: 2389316 - RNA, 19 nt, Artificial Sequence
  Description of Artificial Sequence: Synthetic oligonucleotide
  Sense strand starting at position 2392 of SEQ ID NO: 1886134
augcuugucacacgcugaa

SEQ ID NO: 2389317 - RNA, 19 nt, Artificial Sequence
  Description of Artificial Sequence: Synthetic oligonucleotide
  Antisense strand to SEQ ID NO: 2389316
uucagcgugugacaagcau

SEQ ID NO: 2389318 - RNA, 19 nt, Artificial Sequence
  Description of Artificial Sequence: Synthetic oligonucleotide
  Sense strand starting at position 2577 of SEQ ID NO: 1886134
gccugucacucuuugagga

SEQ ID NO: 2389319 - RNA, 19 nt, Artificial Sequence
  Description of Artificial Sequence: Synthetic oligonucleotide
  Antisense strand to SEQ ID NO: 2389318
uccucaaagagugacaggc

SEQ ID NO: 2389320 - RNA, 19 nt, Artificial Sequence
  Description of Artificial Sequence: Synthetic oligonucleotide
  Sense strand starting at position 2734 of SEQ ID NO: 1886134
guagaauguucuguggcuu

SEQ ID NO: 2389321 - RNA, 19 nt, Artificial Sequence
  Description of Artificial Sequence: Synthetic oligonucleotide
  Antisense strand to SEQ ID NO: 2389320
aagccacagaacauucuac

SEQ ID NO: 2389322 - RNA, 19 nt, Artificial Sequence
  Description of Artificial Sequence: Synthetic oligonucleotide
  Sense strand starting at position 2749 of SEQ ID NO: 1886134
gcuucagauccaggugaga

SEQ ID NO: 2389323 - RNA, 19 nt, Artificial Sequence
  Description of Artificial Sequence: Synthetic oligonucleotide
  Antisense strand to SEQ ID NO: 2389322
ucucaccuggaucugaagc

SEQ ID NO: 2389324 - RNA, 19 nt, Artificial Sequence
  Description of Artificial Sequence: Synthetic oligonucleotide
  Sense strand starting at position 2754 of SEQ ID NO: 1886134
agauccaggugagagauau

SEQ ID NO: 2389325 - RNA, 19 nt, Artificial Sequence
  Description of Artificial Sequence: Synthetic oligonucleotide
  Antisense strand to SEQ ID NO: 2389324
auaucucucaccuggaucu

SEQ ID NO: 2389326 - RNA, 19 nt, Artificial Sequence
  Description of Artificial Sequence: Synthetic oligonucleotide
  Sense strand starting at position 2950 of SEQ ID NO: 1886134
acaccacuucuaggaguuu

SEQ ID NO: 2389327 - RNA, 19 nt, Artificial Sequence
  Description of Artificial Sequence: Synthetic oligonucleotide
  Antisense strand to SEQ ID NO: 2389326
aaacuccuagaaguggugu

SEQ ID NO: 2389328 - RNA, 19 nt, Artificial Sequence
  Description of Artificial Sequence: Synthetic oligonucleotide
  Sense strand starting at position 3028 of SEQ ID NO: 1886134
cucagaagcuucucuggau

SEQ ID NO: 2389329 - RNA, 19 nt, Artificial Sequence
  Description of Artificial Sequence: Synthetic oligonucleotide
  Antisense strand to SEQ ID NO: 2389328
auccagagaagcuucugag

SEQ ID NO: 2389330 - RNA, 19 nt, Artificial Sequence
  Description of Artificial Sequence: Synthetic oligonucleotide
  Sense strand starting at position 3104 of SEQ ID NO: 1886134
aggacucuggaauguucua

SEQ ID NO: 2389331 - RNA, 19 nt, Artificial Sequence
  Description of Artificial Sequence: Synthetic oligonucleotide
  Antisense strand to SEQ ID NO: 2389330
uagaacauuccagaguccu

SEQ ID NO: 2389332 - RNA, 19 nt, Artificial Sequence
  Description of Artificial Sequence: Synthetic oligonucleotide
  Sense strand starting at position 3216 of SEQ ID NO: 1886134
uugaguguaugagauaaac

SEQ ID NO: 2389333 - RNA, 19 nt, Artificial Sequence
  Description of Artificial Sequence: Synthetic oligonucleotide
  Antisense strand to SEQ ID NO: 2389332
guuuaucucauacacucaa

SEQ ID NO: 2389334 - RNA, 19 nt, Artificial Sequence
  Description of Artificial Sequence: Synthetic oligonucleotide
  Sense strand starting at position 3366 of SEQ ID NO: 1886134
accuaauugcugcaugaag

SEQ ID NO: 2389335 - RNA, 19 nt, Artificial Sequence
  Description of Artificial Sequence: Synthetic oligonucleotide
  Antisense strand to SEQ ID NO: 2389334
cuucaugcagcaauuaggu

SEQ ID NO: 2389336 - RNA, 19 nt, Artificial Sequence
  Description of Artificial Sequence: Synthetic oligonucleotide
  Sense strand starting at position 3368 of SEQ ID NO: 1886134
cuaauugcugcaugaagac

SEQ ID NO: 2389337 - RNA, 19 nt, Artificial Sequence
  Description of Artificial Sequence: Synthetic oligonucleotide
  Antisense strand to SEQ ID NO: 2389336
gucuucaugcagcaauuag

SEQ ID NO: 2389338 - RNA, 19 nt, Artificial Sequence
  Description of Artificial Sequence: Synthetic oligonucleotide
  Sense strand starting at position 3403 of SEQ ID NO: 1886134
ggcagaauccugcggguau

SEQ ID NO: 2389339 - RNA, 19 nt, Artificial Sequence
  Description of Artificial Sequence: Synthetic oligonucleotide
  Antisense strand to SEQ ID NO: 2389338
auacccgcaggauucugcc

SEQ ID NO: 2389340 - RNA, 19 nt, Artificial Sequence
  Description of Artificial Sequence: Synthetic oligonucleotide
  Sense strand starting at position 3407 of SEQ ID NO: 1886134
gaauccugcggguauggau

SEQ ID NO: 2389341 - RNA, 19 nt, Artificial Sequence
  Description of Artificial Sequence: Synthetic oligonucleotide
  Antisense strand to SEQ ID NO: 2389340
auccauacccgcaggauuc

SEQ ID NO: 2389342 - RNA, 19 nt, Artificial Sequence
  Description of Artificial Sequence: Synthetic oligonucleotide
  Sense strand starting at position 3470 of SEQ ID NO: 1886134
agauauugucacuguccca

SEQ ID NO: 2389343 - RNA, 19 nt, Artificial Sequence
  Description of Artificial Sequence: Synthetic oligonucleotide
  Antisense strand to SEQ ID NO: 2389342
ugggacagugacaauaucu

SEQ ID NO: 2389344 - RNA, 19 nt, Artificial Sequence
  Description of Artificial Sequence: Synthetic oligonucleotide
  Sense strand starting at position 3605 of SEQ ID NO: 1886134
gucgaaugcccuugaggau

SEQ ID NO: 2389345 - RNA, 19 nt, Artificial Sequence
  Description of Artificial Sequence: Synthetic oligonucleotide
  Antisense strand to SEQ ID NO: 2389344
auccucaagggcauucgac

SEQ ID NO: 2389346 - RNA, 19 nt, Artificial Sequence
  Description of Artificial Sequence: Synthetic oligonucleotide
  Sense strand starting at position 3622 of SEQ ID NO: 1886134
aucucaaucuccgugagga

SEQ ID NO: 2389347 - RNA, 19 nt, Artificial Sequence
  Description of Artificial Sequence: Synthetic oligonucleotide
  Antisense strand to SEQ ID NO: 2389346
uccucacggagauugagau

SEQ ID NO: 2389348 - RNA, 19 nt, Artificial Sequence
  Description of Artificial Sequence: Synthetic oligonucleotide
  Sense strand starting at position 3623 of SEQ ID NO: 1886134
ucucaaucuccgugaggag

SEQ ID NO: 2389349 - RNA, 19 nt, Artificial Sequence
  Description of Artificial Sequence: Synthetic oligonucleotide
  Antisense strand to SEQ ID NO: 2389348
cuccucacggagauugaga

SEQ ID NO: 2389350 - RNA, 19 nt, Artificial Sequence
  Description of Artificial Sequence: Synthetic oligonucleotide
  Sense strand starting at position 3705 of SEQ ID NO: 1886134
aguguccuucugcgagaca

SEQ ID NO: 2389351 - RNA, 19 nt, Artificial Sequence
  Description of Artificial Sequence: Synthetic oligonucleotide
  Antisense strand to SEQ ID NO: 2389350
ugucucgcagaaggacacu

SEQ ID NO: 2389352 - RNA, 19 nt, Artificial Sequence
  Description of Artificial Sequence: Synthetic oligonucleotide
  Sense strand starting at position 3758 of SEQ ID NO: 1886134
acccuugucugacuggaaa

SEQ ID NO: 2389353 - RNA, 19 nt, Artificial Sequence
  Description of Artificial Sequence: Synthetic oligonucleotide
  Antisense strand to SEQ ID NO: 2389352
uuuccagucagacaagggu

SEQ ID NO: 2389354 - RNA, 19 nt, Artificial Sequence
  Description of Artificial Sequence: Synthetic oligonucleotide
  Sense strand starting at position 3871 of SEQ ID NO: 1886134
gccagugaggaaugcugau

SEQ ID NO: 2389355 - RNA, 19 nt, Artificial Sequence
  Description of Artificial Sequence: Synthetic oligonucleotide
  Antisense strand to SEQ ID NO: 2389354
aucagcauuccucacuggc

SEQ ID NO: 2389356 - RNA, 19 nt, Artificial Sequence
  Description of Artificial Sequence: Synthetic oligonucleotide
  Sense strand starting at position 3877 of SEQ ID NO: 1886134
gaggaaugcugauucugga

SEQ ID NO: 2389357 - RNA, 19 nt, Artificial Sequence
  Description of Artificial Sequence: Synthetic oligonucleotide
  Antisense strand to SEQ ID NO: 2389356
uccagaaucagcauuccuc

SEQ ID NO: 2389358 - RNA, 19 nt, Artificial Sequence
  Description of Artificial Sequence: Synthetic oligonucleotide
  Sense strand starting at position 3 of SEQ ID NO: 1886135
cuugccuacuuaucguaau

SEQ ID NO: 2389359 - RNA, 19 nt, Artificial Sequence
  Description of Artificial Sequence: Synthetic oligonucleotide
  Antisense strand to SEQ ID NO: 2389358
auuacgauaaguaggcaag

SEQ ID NO: 2389360 - RNA, 19 nt, Artificial Sequence
  Description of Artificial Sequence: Synthetic oligonucleotide
  Sense strand starting at position 32 of SEQ ID NO: 1886135
gguagaugugaucaauucu

SEQ ID NO: 2389361 - RNA, 19 nt, Artificial Sequence
  Description of Artificial Sequence: Synthetic oligonucleotide
  Antisense strand to SEQ ID NO: 2389360
agaauugaucacaucuacc

SEQ ID NO: 2389362 - RNA, 19 nt, Artificial Sequence
  Description of Artificial Sequence: Synthetic oligonucleotide
  Sense strand starting at position 78 of SEQ ID NO: 1886135
agagauguuaagugacuga

SEQ ID NO: 2389363 - RNA, 19 nt, Artificial Sequence
  Description of Artificial Sequence: Synthetic oligonucleotide
  Antisense strand to SEQ ID NO: 2389362
ucagucacuuaacaucucu

SEQ ID NO: 2389364 - RNA, 19 nt, Artificial Sequence
  Description of Artificial Sequence: Synthetic oligonucleotide
  Sense strand starting at position 82 of SEQ ID NO: 1886135
auguuaagugacugacuca

SEQ ID NO: 2389365 - RNA, 19 nt, Artificial Sequence
  Description of Artificial Sequence: Synthetic oligonucleotide
  Antisense strand to SEQ ID NO: 2389364
ugagucagucacuuaacau

SEQ ID NO: 2389366 - RNA, 19 nt, Artificial Sequence
  Description of Artificial Sequence: Synthetic oligonucleotide
  Sense strand starting at position 376 of SEQ ID NO: 1886135
gcuucucucccgcugugaa

SEQ ID NO: 2389367 - RNA, 19 nt, Artificial Sequence
  Description of Artificial Sequence: Synthetic oligonucleotide
  Antisense strand to SEQ ID NO: 2389366
uucacagcgggagagaagc

SEQ ID NO: 2389368 - RNA, 19 nt, Artificial Sequence
  Description of Artificial Sequence: Synthetic oligonucleotide
  Sense strand starting at position 436 of SEQ ID NO: 1886135
aaguguaaaugagauuucu

SEQ ID NO: 2389369 - RNA, 19 nt, Artificial Sequence
  Description of Artificial Sequence: Synthetic oligonucleotide
  Antisense strand to SEQ ID NO: 2389368
agaaaucucauuuacacuu

SEQ ID NO: 2389370 - RNA, 19 nt, Artificial Sequence
  Description of Artificial Sequence: Synthetic oligonucleotide
  Sense strand starting at position 445 of SEQ ID NO: 1886135
ugagauuucuaauaggacu

SEQ ID NO: 2389371 - RNA, 19 nt, Artificial Sequence
  Description of Artificial Sequence: Synthetic oligonucleotide
  Antisense strand to SEQ ID NO: 2389370
aguccuauuagaaaucuca

SEQ ID NO: 2389372 - RNA, 19 nt, Artificial Sequence
  Description of Artificial Sequence: Synthetic oligonucleotide
  Sense strand starting at position 570 of SEQ ID NO: 1886135
cagccaaagucucugggua

SEQ ID NO: 2389373 - RNA, 19 nt, Artificial Sequence
  Description of Artificial Sequence: Synthetic oligonucleotide
  Antisense strand to SEQ ID NO: 2389372
uacccagagacuuuggcug

SEQ ID NO: 2389374 - RNA, 19 nt, Artificial Sequence
  Description of Artificial Sequence: Synthetic oligonucleotide
  Sense strand starting at position 596 of SEQ ID NO: 1886135
agggcugacuugguucaga

SEQ ID NO: 2389375 - RNA, 19 nt, Artificial Sequence
  Description of Artificial Sequence: Synthetic oligonucleotide
  Antisense strand to SEQ ID NO: 2389374
ucugaaccaagucagcccu

SEQ ID NO: 2389376 - RNA, 19 nt, Artificial Sequence
  Description of Artificial Sequence: Synthetic oligonucleotide
  Sense strand starting at position 662 of SEQ ID NO: 1886135
guagaaugagcucagcuaa

SEQ ID NO: 2389377 - RNA, 19 nt, Artificial Sequence
  Description of Artificial Sequence: Synthetic oligonucleotide
  Antisense strand to SEQ ID NO: 2389376
uuagcugagcucauucuac

SEQ ID NO: 2389378 - RNA, 19 nt, Artificial Sequence
  Description of Artificial Sequence: Synthetic oligonucleotide
  Sense strand starting at position 726 of SEQ ID NO: 1886135
ccaacuuuaguuuguaaua

SEQ ID NO: 2389379 - RNA, 19 nt, Artificial Sequence
  Description of Artificial Sequence: Synthetic oligonucleotide
  Antisense strand to SEQ ID NO: 2389378
uauuacaaacuaaaguugg

SEQ ID NO: 2389380 - RNA, 19 nt, Artificial Sequence
  Description of Artificial Sequence: Synthetic oligonucleotide
  Sense strand starting at position 736 of SEQ ID NO: 1886135
uuuguaauaugcuuuaguc

SEQ ID NO: 2389381 - RNA, 19 nt, Artificial Sequence
  Description of Artificial Sequence: Synthetic oligonucleotide
  Antisense strand to SEQ ID NO: 2389380
gacuaaagcauauuacaaa

SEQ ID NO: 2389382 - RNA, 19 nt, Artificial Sequence
  Description of Artificial Sequence: Synthetic oligonucleotide
  Sense strand starting at position 772 of SEQ ID NO: 1886135
ggaggagggugggaauaua

SEQ ID NO: 2389383 - RNA, 19 nt, Artificial Sequence
  Description of Artificial Sequence: Synthetic oligonucleotide
  Antisense strand to SEQ ID NO: 2389382
uauauucccacccuccucc

SEQ ID NO: 2389384 - RNA, 19 nt, Artificial Sequence
  Description of Artificial Sequence: Synthetic oligonucleotide
  Sense strand starting at position 783 of SEQ ID NO: 1886135
ggaauauacuuaggaauag

SEQ ID NO: 2389385 - RNA, 19 nt, Artificial Sequence
  Description of Artificial Sequence: Synthetic oligonucleotide
  Antisense strand to SEQ ID NO: 2389384
cuauuccuaaguauauucc

SEQ ID NO: 2389386 - RNA, 19 nt, Artificial Sequence
  Description of Artificial Sequence: Synthetic oligonucleotide
  Sense strand starting at position 847 of SEQ ID NO: 1886135
gugucaucacuguaacuug

SEQ ID NO: 2389387 - RNA, 19 nt, Artificial Sequence
  Description of Artificial Sequence: Synthetic oligonucleotide
  Antisense strand to SEQ ID NO: 2389386
caaguuacagugaugacac

SEQ ID NO: 2389388 - RNA, 19 nt, Artificial Sequence
  Description of Artificial Sequence: Synthetic oligonucleotide
  Sense strand starting at position 1742 of SEQ ID NO: 1886135
accauaguuuguccauguu

SEQ ID NO: 2389389 - RNA, 19 nt, Artificial Sequence
  Description of Artificial Sequence: Synthetic oligonucleotide
  Antisense strand to SEQ ID NO: 2389388
aacauggacaaacuauggu

SEQ ID NO: 2389390 - RNA, 19 nt, Artificial Sequence
  Description of Artificial Sequence: Synthetic oligonucleotide
  Sense strand starting at position 1761 of SEQ ID NO: 1886135
ucuggaagagucugccgau

SEQ ID NO: 2389391 - RNA, 19 nt, Artificial Sequence
  Description of Artificial Sequence: Synthetic oligonucleotide
  Antisense strand to SEQ ID NO: 2389390
aucggcagacucuuccaga

SEQ ID NO: 2389392 - RNA, 19 nt, Artificial Sequence
  Description of Artificial Sequence: Synthetic oligonucleotide
  Sense strand starting at position 1789 of SEQ ID NO: 1886135
ggguggugaccugagaugu

SEQ ID NO: 2389393 - RNA, 19 nt, Artificial Sequence
  Description of Artificial Sequence: Synthetic oligonucleotide
  Antisense strand to SEQ ID NO: 2389392
acaucucaggucaccaccc

SEQ ID NO: 2389394 - RNA, 19 nt, Artificial Sequence
  Description of Artificial Sequence: Synthetic oligonucleotide
  Sense strand starting at position 2082 of SEQ ID NO: 1886135
cguugucuccgcuccuauu

SEQ ID NO: 2389395 - RNA, 19 nt, Artificial Sequence
  Description of Artificial Sequence: Synthetic oligonucleotide
  Antisense strand to SEQ ID NO: 2389394
aauaggagcggagacaacg

SEQ ID NO: 2389396 - RNA, 19 nt, Artificial Sequence
  Description of Artificial Sequence: Synthetic oligonucleotide
  Sense strand starting at position 2083 of SEQ ID NO: 1886135
guugucuccgcuccuauua

SEQ ID NO: 2389397 - RNA, 19 nt, Artificial Sequence
  Description of Artificial Sequence: Synthetic oligonucleotide
  Antisense strand to SEQ ID NO: 2389396
uaauaggagcggagacaac

SEQ ID NO: 2389398 - RNA, 19 nt, Artificial Sequence
  Description of Artificial Sequence: Synthetic oligonucleotide
  Sense strand starting at position 2184 of SEQ ID NO: 1886135
guguucuacuuucuauaau

SEQ ID NO: 2389399 - RNA, 19 nt, Artificial Sequence
  Description of Artificial Sequence: Synthetic oligonucleotide
  Antisense strand to SEQ ID NO: 2389398
auuauagaaaguagaacac

SEQ ID NO: 2389400 - RNA, 19 nt, Artificial Sequence
  Description of Artificial Sequence: Synthetic oligonucleotide
  Sense strand starting at position 2721 of SEQ ID NO: 1886135
uacugagcccuggaagcuu

SEQ ID NO: 2389401 - RNA, 19 nt, Artificial Sequence
  Description of Artificial Sequence: Synthetic oligonucleotide
  Antisense strand to SEQ ID NO: 2389400
aagcuuccagggcucagua

SEQ ID NO: 2389402 - RNA, 19 nt, Artificial Sequence
  Description of Artificial Sequence: Synthetic oligonucleotide
  Sense strand starting at position 2863 of SEQ ID NO: 1886135
ugggcucccugguuaauuu

SEQ ID NO: 2389403 - RNA, 19 nt, Artificial Sequence
  Description of Artificial Sequence: Synthetic oligonucleotide
  Antisense strand to SEQ ID NO: 2389402
aaauuaaccagggagccca

SEQ ID NO: 2389404 - RNA, 19 nt, Artificial Sequence
  Description of Artificial Sequence: Synthetic oligonucleotide
  Sense strand starting at position 2874 of SEQ ID NO: 1886135
guuaauuucccuugcagug

SEQ ID NO: 2389405 - RNA, 19 nt, Artificial Sequence
  Description of Artificial Sequence: Synthetic oligonucleotide
  Antisense strand to SEQ ID NO: 2389404
cacugcaagggaaauuaac

SEQ ID NO: 2389406 - RNA, 19 nt, Artificial Sequence
  Description of Artificial Sequence: Synthetic oligonucleotide
  Sense strand starting at position 3006 of SEQ ID NO: 1886135
agagcauggcccuaauugu

SEQ ID NO: 2389407 - RNA, 19 nt, Artificial Sequence
  Description of Artificial Sequence: Synthetic oligonucleotide
  Antisense strand to SEQ ID NO: 2389406
acaauuagggccaugcucu

SEQ ID NO: 2389408 - RNA, 19 nt, Artificial Sequence
  Description of Artificial Sequence: Synthetic oligonucleotide
  Sense strand starting at position 3031 of SEQ ID NO: 1886135
gcagcaacugaaggauaau

SEQ ID NO: 2389409 - RNA, 19 nt, Artificial Sequence
  Description of Artificial Sequence: Synthetic oligonucleotide
  Antisense strand to SEQ ID NO: 2389408
auuauccuucaguugcugc

SEQ ID NO: 2389410 - RNA, 19 nt, Artificial Sequence
  Description of Artificial Sequence: Synthetic oligonucleotide
  Sense strand starting at position 3130 of SEQ ID NO: 1886135
uuggguuuauucucucuau

SEQ ID NO: 2389411 - RNA, 19 nt, Artificial Sequence
  Description of Artificial Sequence: Synthetic oligonucleotide
  Antisense strand to SEQ ID NO: 2389410
auagagagaauaaacccaa

SEQ ID NO: 2389412 - RNA, 19 nt, Artificial Sequence
  Description of Artificial Sequence: Synthetic oligonucleotide
  Sense strand starting at position 3396 of SEQ ID NO: 1886135
aggugcuggcucugaaauu

SEQ ID NO: 2389413 - RNA, 19 nt, Artificial Sequence
  Description of Artificial Sequence: Synthetic oligonucleotide
  Antisense strand to SEQ ID NO: 2389412
aauuucagagccagcaccu

SEQ ID NO: 2389414 - RNA, 19 nt, Artificial Sequence
  Description of Artificial Sequence: Synthetic oligonucleotide
  Sense strand starting at position 3474 of SEQ ID NO: 1886135
auggauguguggucuuuaa

SEQ ID NO: 2389415 - RNA, 19 nt, Artificial Sequence
  Description of Artificial Sequence: Synthetic oligonucleotide
  Antisense strand to SEQ ID NO: 2389414
uuaaagaccacacauccau

SEQ ID NO: 2389416 - RNA, 19 nt, Artificial Sequence
  Description of Artificial Sequence: Synthetic oligonucleotide
  Sense strand starting at position 3591 of SEQ ID NO: 1886135
accugaggguaccauuaga

SEQ ID NO: 2389417 - RNA, 19 nt, Artificial Sequence
  Description of Artificial Sequence: Synthetic oligonucleotide
  Antisense strand to SEQ ID NO: 2389416
ucuaaugguacccucaggu

SEQ ID NO: 2389418 - RNA, 19 nt, Artificial Sequence
  Description of Artificial Sequence: Synthetic oligonucleotide
  Sense strand starting at position 3607 of SEQ ID NO: 1886135
agagaacaaugcuaacuaa

SEQ ID NO: 2389419 - RNA, 19 nt, Artificial Sequence
  Description of Artificial Sequence: Synthetic oligonucleotide
  Antisense strand to SEQ ID NO: 2389418
uuaguuagcauuguucucu

SEQ ID NO: 2389420 - RNA, 19 nt, Artificial Sequence
  Description of Artificial Sequence: Synthetic oligonucleotide
  Sense strand starting at position 3687 of SEQ ID NO: 1886135
uucuuagggaccuggcaaa

SEQ ID NO: 2389421 - RNA, 19 nt, Artificial Sequence
  Description of Artificial Sequence: Synthetic oligonucleotide
  Antisense strand to SEQ ID NO: 2389420
uuugccaggucccuaagaa

SEQ ID NO: 2389422 - RNA, 19 nt, Artificial Sequence
  Description of Artificial Sequence: Synthetic oligonucleotide
  Sense strand starting at position 3744 of SEQ ID NO: 1886135
caaagagaguuuggagaga

SEQ ID NO: 2389423 - RNA, 19 nt, Artificial Sequence
  Description of Artificial Sequence: Synthetic oligonucleotide
  Antisense strand to SEQ ID NO: 2389422
ucucuccaaacucucuuug

SEQ ID NO: 2389424 - RNA, 19 nt, Artificial Sequence
  Description of Artificial Sequence: Synthetic oligonucleotide
  Sense strand starting at position 3800 of SEQ ID NO: 1886135
acugaucuagcuuacauga

SEQ ID NO: 2389425 - RNA, 19 nt, Artificial Sequence
  Description of Artificial Sequence: Synthetic oligonucleotide
  Antisense strand to SEQ ID NO: 2389424
ucauguaagcuagaucagu

SEQ ID NO: 2389426 - RNA, 19 nt, Artificial Sequence
  Description of Artificial Sequence: Synthetic oligonucleotide
  Sense strand starting at position 3859 of SEQ ID NO: 1886135
gcuagaagcucacuaugag

SEQ ID NO: 2389427 - RNA, 19 nt, Artificial Sequence
  Description of Artificial Sequence: Synthetic oligonucleotide
  Antisense strand to SEQ ID NO: 2389426
cucauagugagcuucuagc

SEQ ID NO: 2389428 - RNA, 19 nt, Artificial Sequence
  Description of Artificial Sequence: Synthetic oligonucleotide
  Sense strand starting at position 3920 of SEQ ID NO: 1886135
cagccuggcccgugauaaa

SEQ ID NO: 2389429 - RNA, 19 nt, Artificial Sequence
  Description of Artificial Sequence: Synthetic oligonucleotide
  Antisense strand to SEQ ID NO: 2389428
uuuaucacgggccaggcug

SEQ ID NO: 2389430 - RNA, 19 nt, Artificial Sequence
  Description of Artificial Sequence: Synthetic oligonucleotide
  Sense strand starting at position 3927 of SEQ ID NO: 1886135
gcccgugauaaaugaaacu

SEQ ID NO: 2389431 - RNA, 19 nt, Artificial Sequence
  Description of Artificial Sequence: Synthetic oligonucleotide
  Antisense strand to SEQ ID NO: 2389430
aguuucauuuaucacgggc

SEQ ID NO: 2389432 - RNA, 19 nt, Artificial Sequence
  Description of Artificial Sequence: Synthetic oligonucleotide
  Sense strand starting at position 3936 of SEQ ID NO: 1886135
aaaugaaacugguuggcaa

SEQ ID NO: 2389433 - RNA, 19 nt, Artificial Sequence
  Description of Artificial Sequence: Synthetic oligonucleotide
  Antisense strand to SEQ ID NO: 2389432
uugccaaccaguuucauuu

SEQ ID NO: 2389434 - RNA, 19 nt, Artificial Sequence
  Description of Artificial Sequence: Synthetic oligonucleotide
  Sense strand starting at position 3937 of SEQ ID NO: 1886135
aaugaaacugguuggcaaa

SEQ ID NO: 2389435 - RNA, 19 nt, Artificial Sequence
  Description of Artificial Sequence: Synthetic oligonucleotide
  Antisense strand to SEQ ID NO: 2389434
uuugccaaccaguuucauu

SEQ ID NO: 2389436 - RNA, 19 nt, Artificial Sequence
  Description of Artificial Sequence: Synthetic oligonucleotide
  Sense strand starting at position 3979 of SEQ ID NO: 1886135
aggauugugaggugugaac

SEQ ID NO: 2389437 - RNA, 19 nt, Artificial Sequence
  Description of Artificial Sequence: Synthetic oligonucleotide
  Antisense strand to SEQ ID NO: 2389436
guucacaccucacaauccu

SEQ ID NO: 2389438 - RNA, 19 nt, Artificial Sequence
  Description of Artificial Sequence: Synthetic oligonucleotide
  Sense strand starting at position 11 of SEQ ID NO: 1886136
gcacucgucacgucauguu

SEQ ID NO: 2389439 - RNA, 19 nt, Artificial Sequence
  Description of Artificial Sequence: Synthetic oligonucleotide
  Antisense strand to SEQ ID NO: 2389438
aacaugacgugacgagugc

SEQ ID NO: 2389440 - RNA, 19 nt, Artificial Sequence
  Description of Artificial Sequence: Synthetic oligonucleotide
  Sense strand starting at position 15 of SEQ ID NO: 1886136
ucgucacgucauguuguaa

SEQ ID NO: 2389441 - RNA, 19 nt, Artificial Sequence
  Description of Artificial Sequence: Synthetic oligonucleotide
  Antisense strand to SEQ ID NO: 2389440
uuacaacaugacgugacga

SEQ ID NO: 2389442 - RNA, 19 nt, Artificial Sequence
  Description of Artificial Sequence: Synthetic oligonucleotide
  Sense strand starting at position 23 of SEQ ID NO: 1886136
ucauguuguaaguaguacu

SEQ ID NO: 2389443 - RNA, 19 nt, Artificial Sequence
  Description of Artificial Sequence: Synthetic oligonucleotide
  Antisense strand to SEQ ID NO: 2389442
aguacuacuuacaacauga

SEQ ID NO: 2389444 - RNA, 19 nt, Artificial Sequence
  Description of Artificial Sequence: Synthetic oligonucleotide
  Sense strand starting at position 30 of SEQ ID NO: 1886136
guaaguaguacuugcuuac

SEQ ID NO: 2389445 - RNA, 19 nt, Artificial Sequence
  Description of Artificial Sequence: Synthetic oligonucleotide
  Antisense strand to SEQ ID NO: 2389444
guaagcaaguacuacuuac

SEQ ID NO: 2389446 - RNA, 19 nt, Artificial Sequence
  Description of Artificial Sequence: Synthetic oligonucleotide
  Sense strand starting at position 33 of SEQ ID NO: 1886136
aguaguacuugcuuacauu

SEQ ID NO: 2389447 - RNA, 19 nt, Artificial Sequence
  Description of Artificial Sequence: Synthetic oligonucleotide
  Antisense strand to SEQ ID NO: 2389446
aauguaagcaaguacuacu

SEQ ID NO: 2389448 - RNA, 19 nt, Artificial Sequence
  Description of Artificial Sequence: Synthetic oligonucleotide
  Sense strand starting at position 34 of SEQ ID NO: 1886136
guaguacuugcuuacauua

SEQ ID NO: 2389449 - RNA, 19 nt, Artificial Sequence
  Description of Artificial Sequence: Synthetic oligonucleotide
  Antisense strand to SEQ ID NO: 2389448
uaauguaagcaaguacuac

SEQ ID NO: 2389450 - RNA, 19 nt, Artificial Sequence
  Description of Artificial Sequence: Synthetic oligonucleotide
  Sense strand starting at position 187 of SEQ ID NO: 1886136
gugcaauggcuguaccuga

SEQ ID NO: 2389451 - RNA, 19 nt, Artificial Sequence
  Description of Artificial Sequence: Synthetic oligonucleotide
  Antisense strand to SEQ ID NO: 2389450
ucagguacagccauugcac

SEQ ID NO: 2389452 - RNA, 19 nt, Artificial Sequence
  Description of Artificial Sequence: Synthetic oligonucleotide
  Sense strand starting at position 315 of SEQ ID NO: 1886136
agaaaucacucugagcaaa

SEQ ID NO: 2389453 - RNA, 19 nt, Artificial Sequence
  Description of Artificial Sequence: Synthetic oligonucleotide
  Antisense strand to SEQ ID NO: 2389452
uuugcucagagugauuucu

SEQ ID NO: 2389454 - RNA, 19 nt, Artificial Sequence
  Description of Artificial Sequence: Synthetic oligonucleotide
  Sense strand starting at position 428 of SEQ ID NO: 1886136
uuugcuccacuaugaauga

SEQ ID NO: 2389455 - RNA, 19 nt, Artificial Sequence
  Description of Artificial Sequence: Synthetic oligonucleotide
  Antisense strand to SEQ ID NO: 2389454
ucauucauaguggagcaaa

SEQ ID NO: 2389456 - RNA, 19 nt, Artificial Sequence
  Description of Artificial Sequence: Synthetic oligonucleotide
  Sense strand starting at position 524 of SEQ ID NO: 1886136
guguaauaugugcacccaa

SEQ ID NO: 2389457 - RNA, 19 nt, Artificial Sequence
  Description of Artificial Sequence: Synthetic oligonucleotide
  Antisense strand to SEQ ID NO: 2389456
uugggugcacauauuacac

SEQ ID NO: 2389458 - RNA, 19 nt, Artificial Sequence
  Description of Artificial Sequence: Synthetic oligonucleotide
  Sense strand starting at position 839 of SEQ ID NO: 1886136
uaaggagugucauuagcaa

SEQ ID NO: 2389459 - RNA, 19 nt, Artificial Sequence
  Description of Artificial Sequence: Synthetic oligonucleotide
  Antisense strand to SEQ ID NO: 2389458
uugcuaaugacacuccuua

SEQ ID NO: 2389460 - RNA, 19 nt, Artificial Sequence
  Description of Artificial Sequence: Synthetic oligonucleotide
  Sense strand starting at position 843 of SEQ ID NO: 1886136
gagugucauuagcaaagaa

SEQ ID NO: 2389461 - RNA, 19 nt, Artificial Sequence
  Description of Artificial Sequence: Synthetic oligonucleotide
  Antisense strand to SEQ ID NO: 2389460
uucuuugcuaaugacacuc

SEQ ID NO: 2389462 - RNA, 19 nt, Artificial Sequence
  Description of Artificial Sequence: Synthetic oligonucleotide
  Sense strand starting at position 895 of SEQ ID NO: 1886136
uugugaauuccgggaucua

SEQ ID NO: 2389463 - RNA, 19 nt, Artificial Sequence
  Description of Artificial Sequence: Synthetic oligonucleotide
  Antisense strand to SEQ ID NO: 2389462
uagaucccggaauucacaa

SEQ ID NO: 2389464 - RNA, 19 nt, Artificial Sequence
  Description of Artificial Sequence: Synthetic oligonucleotide
  Sense strand starting at position 896 of SEQ ID NO: 1886136
ugugaauuccgggaucuag

SEQ ID NO: 2389465 - RNA, 19 nt, Artificial Sequence
  Description of Artificial Sequence: Synthetic oligonucleotide
  Antisense strand to SEQ ID NO: 2389464
cuagaucccggaauucaca

SEQ ID NO: 2389466 - RNA, 19 nt, Artificial Sequence
  Description of Artificial Sequence: Synthetic oligonucleotide
  Sense strand starting at position 931 of SEQ ID NO: 1886136
guaucacucugcuauaaga

SEQ ID NO: 2389467 - RNA, 19 nt, Artificial Sequence
  Description of Artificial Sequence: Synthetic oligonucleotide
  Antisense strand to SEQ ID NO: 2389466
ucuuauagcagagugauac

SEQ ID NO: 2389468 - RNA, 19 nt, Artificial Sequence
  Description of Artificial Sequence: Synthetic oligonucleotide
  Sense strand starting at position 2108 of SEQ ID NO: 1886136
cugggauugcacggcagaa

SEQ ID NO: 2389469 - RNA, 19 nt, Artificial Sequence
  Description of Artificial Sequence: Synthetic oligonucleotide
  Antisense strand to SEQ ID NO: 2389468
uucugccgugcaaucccag

SEQ ID NO: 2389470 - RNA, 19 nt, Artificial Sequence
  Description of Artificial Sequence: Synthetic oligonucleotide
  Sense strand starting at position 2130 of SEQ ID NO: 1886136
cccaucucgcugcaugaga

SEQ ID NO: 2389471 - RNA, 19 nt, Artificial Sequence
  Description of Artificial Sequence: Synthetic oligonucleotide
  Antisense strand to SEQ ID NO: 2389470
ucucaugcagcgagauggg

SEQ ID NO: 2389472 - RNA, 19 nt, Artificial Sequence
  Description of Artificial Sequence: Synthetic oligonucleotide
  Sense strand starting at position 2138 of SEQ ID NO: 1886136
gcugcaugagaccaauagu

SEQ ID NO: 2389473 - RNA, 19 nt, Artificial Sequence
  Description of Artificial Sequence: Synthetic oligonucleotide
  Antisense strand to SEQ ID NO: 2389472
acuauuggucucaugcagc

SEQ ID NO: 2389474 - RNA, 19 nt, Artificial Sequence
  Description of Artificial Sequence: Synthetic oligonucleotide
  Sense strand starting at position 2221 of SEQ ID NO: 1886136
gcggcaaagugaucaaagu

SEQ ID NO: 2389475 - RNA, 19 nt, Artificial Sequence
  Description of Artificial Sequence: Synthetic oligonucleotide
  Antisense strand to SEQ ID NO: 2389474
acuuugaucacuuugccgc

SEQ ID NO: 2389476 - RNA, 19 nt, Artificial Sequence
  Description of Artificial Sequence: Synthetic oligonucleotide
  Sense strand starting at position 2222 of SEQ ID NO: 1886136
cggcaaagugaucaaagua

SEQ ID NO: 2389477 - RNA, 19 nt, Artificial Sequence
  Description of Artificial Sequence: Synthetic oligonucleotide
  Antisense strand to SEQ ID NO: 2389476
uacuuugaucacuuugccg

SEQ ID NO: 2389478 - RNA, 19 nt, Artificial Sequence
  Description of Artificial Sequence: Synthetic oligonucleotide
  Sense strand starting at position 2253 of SEQ ID NO: 1886136
gaggcugcucugggaaaug

SEQ ID NO: 2389479 - RNA, 19 nt, Artificial Sequence
  Description of Artificial Sequence: Synthetic oligonucleotide
  Antisense strand to SEQ ID NO: 2389478
cauuucccagagcagccuc

SEQ ID NO: 2389480 - RNA, 19 nt, Artificial Sequence
  Description of Artificial Sequence: Synthetic oligonucleotide
  Sense strand starting at position 2528 of SEQ ID NO: 1886136
agugcauuccgugaacuuc

SEQ ID NO: 2389481 - RNA, 19 nt, Artificial Sequence
  Description of Artificial Sequence: Synthetic oligonucleotide
  Antisense strand to SEQ ID NO: 2389480
gaaguucacggaaugcacu

SEQ ID NO: 2389482 - RNA, 19 nt, Artificial Sequence
  Description of Artificial Sequence: Synthetic oligonucleotide
  Sense strand starting at position 2565 of SEQ ID NO: 1886136
aaagucauuccguguucga

SEQ ID NO: 2389483 - RNA, 19 nt, Artificial Sequence
  Description of Artificial Sequence: Synthetic oligonucleotide
  Antisense strand to SEQ ID NO: 2389482
ucgaacacggaaugacuuu

SEQ ID NO: 2389484 - RNA, 19 nt, Artificial Sequence
  Description of Artificial Sequence: Synthetic oligonucleotide
  Sense strand starting at position 2572 of SEQ ID NO: 1886136
uuccguguucgagcugcaa

SEQ ID NO: 2389485 - RNA, 19 nt, Artificial Sequence
  Description of Artificial Sequence: Synthetic oligonucleotide
  Antisense strand to SEQ ID NO: 2389484
uugcagcucgaacacggaa

SEQ ID NO: 2389486 - RNA, 19 nt, Artificial Sequence
  Description of Artificial Sequence: Synthetic oligonucleotide
  Sense strand starting at position 2574 of SEQ ID NO: 1886136
ccguguucgagcugcaaag

SEQ ID NO: 2389487 - RNA, 19 nt, Artificial Sequence
  Description of Artificial Sequence: Synthetic oligonucleotide
  Antisense strand to SEQ ID NO: 2389486
cuuugcagcucgaacacgg

SEQ ID NO: 2389488 - RNA, 19 nt, Artificial Sequence
  Description of Artificial Sequence: Synthetic oligonucleotide
  Sense strand starting at position 2706 of SEQ ID NO: 1886136
uauauuaguugguacacga

SEQ ID NO: 2389489 - RNA, 19 nt, Artificial Sequence
  Description of Artificial Sequence: Synthetic oligonucleotide
  Antisense strand to SEQ ID NO: 2389488
ucguguaccaacuaauaua

SEQ ID NO: 2389490 - RNA, 19 nt, Artificial Sequence
  Description of Artificial Sequence: Synthetic oligonucleotide
  Sense strand starting at position 2710 of SEQ ID NO: 1886136
uuaguugguacacgaagaa

SEQ ID NO: 2389491 - RNA, 19 nt, Artificial Sequence
  Description of Artificial Sequence: Synthetic oligonucleotide
  Antisense strand to SEQ ID NO: 2389490
uucuucguguaccaacuaa

SEQ ID NO: 2389492 - RNA, 19 nt, Artificial Sequence
  Description of Artificial Sequence: Synthetic oligonucleotide
  Sense strand starting at position 2761 of SEQ ID NO: 1886136
ugcgcauuaggagggaaau

SEQ ID NO: 2389493 - RNA, 19 nt, Artificial Sequence
  Description of Artificial Sequence: Synthetic oligonucleotide
  Antisense strand to SEQ ID NO: 2389492
auuucccuccuaaugcgca

SEQ ID NO: 2389494 - RNA, 19 nt, Artificial Sequence
  Description of Artificial Sequence: Synthetic oligonucleotide
  Sense strand starting at position 2810 of SEQ ID NO: 1886136
uguuauuucuuaggucaaa

SEQ ID NO: 2389495 - RNA, 19 nt, Artificial Sequence
  Description of Artificial Sequence: Synthetic oligonucleotide
  Antisense strand to SEQ ID NO: 2389494
uuugaccuaagaaauaaca

SEQ ID NO: 2389496 - RNA, 19 nt, Artificial Sequence
  Description of Artificial Sequence: Synthetic oligonucleotide
  Sense strand starting at position 2896 of SEQ ID NO: 1886136
gcaguugaagaacguguaa

SEQ ID NO: 2389497 - RNA, 19 nt, Artificial Sequence
  Description of Artificial Sequence: Synthetic oligonucleotide
  Antisense strand to SEQ ID NO: 2389496
uuacacguucuucaacugc

SEQ ID NO: 2389498 - RNA, 19 nt, Artificial Sequence
  Description of Artificial Sequence: Synthetic oligonucleotide
  Sense strand starting at position 2916 of SEQ ID NO: 1886136
acuaguugauagugauuga

SEQ ID NO: 2389499 - RNA, 19 nt, Artificial Sequence
  Description of Artificial Sequence: Synthetic oligonucleotide
  Antisense strand to SEQ ID NO: 2389498
ucaaucacuaucaacuagu

SEQ ID NO: 2389500 - RNA, 19 nt, Artificial Sequence
  Description of Artificial Sequence: Synthetic oligonucleotide
  Sense strand starting at position 2919 of SEQ ID NO: 1886136
aguugauagugauugaagu

SEQ ID NO: 2389501 - RNA, 19 nt, Artificial Sequence
  Description of Artificial Sequence: Synthetic oligonucleotide
  Antisense strand to SEQ ID NO: 2389500
acuucaaucacuaucaacu

SEQ ID NO: 2389502 - RNA, 19 nt, Artificial Sequence
  Description of Artificial Sequence: Synthetic oligonucleotide
  Sense strand starting at position 2920 of SEQ ID NO: 1886136
guugauagugauugaagua

SEQ ID NO: 2389503 - RNA, 19 nt, Artificial Sequence
  Description of Artificial Sequence: Synthetic oligonucleotide
  Antisense strand to SEQ ID NO: 2389502
uacuucaaucacuaucaac

SEQ ID NO: 2389504 - RNA, 19 nt, Artificial Sequence
  Description of Artificial Sequence: Synthetic oligonucleotide
  Sense strand starting at position 3021 of SEQ ID NO: 1886136
ugaccugggugauagauaa

SEQ ID NO: 2389505 - RNA, 19 nt, Artificial Sequence
  Description of Artificial Sequence: Synthetic oligonucleotide
  Antisense strand to SEQ ID NO: 2389504
uuaucuaucacccagguca

SEQ ID NO: 2389506 - RNA, 19 nt, Artificial Sequence
  Description of Artificial Sequence: Synthetic oligonucleotide
  Sense strand starting at position 3253 of SEQ ID NO: 1886136
uugugaauaccugaugugu

SEQ ID NO: 2389507 - RNA, 19 nt, Artificial Sequence
  Description of Artificial Sequence: Synthetic oligonucleotide
  Antisense strand to SEQ ID NO: 2389506
acacaucagguauucacaa

SEQ ID NO: 2389508 - RNA, 19 nt, Artificial Sequence
  Description of Artificial Sequence: Synthetic oligonucleotide
  Sense strand starting at position 3277 of SEQ ID NO: 1886136
aggaacuuccauuguugaa

SEQ ID NO: 2389509 - RNA, 19 nt, Artificial Sequence
  Description of Artificial Sequence: Synthetic oligonucleotide
  Antisense strand to SEQ ID NO: 2389508
uucaacaauggaaguuccu

SEQ ID NO: 2389510 - RNA, 19 nt, Artificial Sequence
  Description of Artificial Sequence: Synthetic oligonucleotide
  Sense strand starting at position 3287 of SEQ ID NO: 1886136
auuguugaauagcuccaaa

SEQ ID NO: 2389511 - RNA, 19 nt, Artificial Sequence
  Description of Artificial Sequence: Synthetic oligonucleotide
  Antisense strand to SEQ ID NO: 2389510
uuuggagcuauucaacaau

SEQ ID NO: 2389512 - RNA, 19 nt, Artificial Sequence
  Description of Artificial Sequence: Synthetic oligonucleotide
  Sense strand starting at position 3328 of SEQ ID NO: 1886136
gagcucuggugcucacaua

SEQ ID NO: 2389513 - RNA, 19 nt, Artificial Sequence
  Description of Artificial Sequence: Synthetic oligonucleotide
  Antisense strand to SEQ ID NO: 2389512
uaugugagcaccagagcuc

SEQ ID NO: 2389514 - RNA, 19 nt, Artificial Sequence
  Description of Artificial Sequence: Synthetic oligonucleotide
  Sense strand starting at position 3329 of SEQ ID NO: 1886136
agcucuggugcucacauau

SEQ ID NO: 2389515 - RNA, 19 nt, Artificial Sequence
  Description of Artificial Sequence: Synthetic oligonucleotide
  Antisense strand to SEQ ID NO: 2389514
auaugugagcaccagagcu

SEQ ID NO: 2389516 - RNA, 19 nt, Artificial Sequence
  Description of Artificial Sequence: Synthetic oligonucleotide
  Sense strand starting at position 3685 of SEQ ID NO: 1886136
uuaaguaacccucaccgaa

SEQ ID NO: 2389517 - RNA, 19 nt, Artificial Sequence
  Description of Artificial Sequence: Synthetic oligonucleotide
  Antisense strand to SEQ ID NO: 2389516
uucggugaggguuacuuaa

SEQ ID NO: 2389518 - RNA, 19 nt, Artificial Sequence
  Description of Artificial Sequence: Synthetic oligonucleotide
  Sense strand starting at position 64 of SEQ ID NO: 1886137
cucggaagccuugaauucu

SEQ ID NO: 2389519 - RNA, 19 nt, Artificial Sequence
  Description of Artificial Sequence: Synthetic oligonucleotide
  Antisense strand to SEQ ID NO: 2389518
agaauucaaggcuuccgag

SEQ ID NO: 2389520 - RNA, 19 nt, Artificial Sequence
  Description of Artificial Sequence: Synthetic oligonucleotide
  Sense strand starting at position 148 of SEQ ID NO: 1886137
ccguguugucagccacauu

SEQ ID NO: 2389521 - RNA, 19 nt, Artificial Sequence
  Description of Artificial Sequence: Synthetic oligonucleotide
  Antisense strand to SEQ ID NO: 2389520
aauguggcugacaacacgg

SEQ ID NO: 2389522 - RNA, 19 nt, Artificial Sequence
  Description of Artificial Sequence: Synthetic oligonucleotide
  Sense strand starting at position 476 of SEQ ID NO: 1886137
ccauauaacuggguauaca

SEQ ID NO: 2389523 - RNA, 19 nt, Artificial Sequence
  Description of Artificial Sequence: Synthetic oligonucleotide
  Antisense strand to SEQ ID NO: 2389522
uguauacccaguuauaugg

SEQ ID NO: 2389524 - RNA, 19 nt, Artificial Sequence
  Description of Artificial Sequence: Synthetic oligonucleotide
  Sense strand starting at position 494 of SEQ ID NO: 1886137
aacaguaaacugugcagau

SEQ ID NO: 2389525 - RNA, 19 nt, Artificial Sequence
  Description of Artificial Sequence: Synthetic oligonucleotide
  Antisense strand to SEQ ID NO: 2389524
aucugcacaguuuacuguu

SEQ ID NO: 2389526 - RNA, 19 nt, Artificial Sequence
  Description of Artificial Sequence: Synthetic oligonucleotide
  Sense strand starting at position 495 of SEQ ID NO: 1886137
acaguaaacugugcagaua

SEQ ID NO: 2389527 - RNA, 19 nt, Artificial Sequence
  Description of Artificial Sequence: Synthetic oligonucleotide
  Antisense strand to SEQ ID NO: 2389526
uaucugcacaguuuacugu

SEQ ID NO: 2389528 - RNA, 19 nt, Artificial Sequence
  Description of Artificial Sequence: Synthetic oligonucleotide
  Sense strand starting at position 496 of SEQ ID NO: 1886137
caguaaacugugcagauau

SEQ ID NO: 2389529 - RNA, 19 nt, Artificial Sequence
  Description of Artificial Sequence: Synthetic oligonucleotide
  Antisense strand to SEQ ID NO: 2389528
auaucugcacaguuuacug

SEQ ID NO: 2389530 - RNA, 19 nt, Artificial Sequence
  Description of Artificial Sequence: Synthetic oligonucleotide
  Sense strand starting at position 650 of SEQ ID NO: 1886137
aggcugagugggugagaua

SEQ ID NO: 2389531 - RNA, 19 nt, Artificial Sequence
  Description of Artificial Sequence: Synthetic oligonucleotide
  Antisense strand to SEQ ID NO: 2389530
uaucucacccacucagccu

SEQ ID NO: 2389532 - RNA, 19 nt, Artificial Sequence
  Description of Artificial Sequence: Synthetic oligonucleotide
  Sense strand starting at position 651 of SEQ ID NO: 1886137
ggcugagugggugagauau

SEQ ID NO: 2389533 - RNA, 19 nt, Artificial Sequence
  Description of Artificial Sequence: Synthetic oligonucleotide
  Antisense strand to SEQ ID NO: 2389532
auaucucacccacucagcc

SEQ ID NO: 2389534 - RNA, 19 nt, Artificial Sequence
  Description of Artificial Sequence: Synthetic oligonucleotide
  Sense strand starting at position 890 of SEQ ID NO: 1886137
cuuugaaaggccuguugga

SEQ ID NO: 2389535 - RNA, 19 nt, Artificial Sequence
  Description of Artificial Sequence: Synthetic oligonucleotide
  Antisense strand to SEQ ID NO: 2389534
uccaacaggccuuucaaag

SEQ ID NO: 2389536 - RNA, 19 nt, Artificial Sequence
  Description of Artificial Sequence: Synthetic oligonucleotide
  Sense strand starting at position 923 of SEQ ID NO: 1886137
ucucaaggccagugagaua

SEQ ID NO: 2389537 - RNA, 19 nt, Artificial Sequence
  Description of Artificial Sequence: Synthetic oligonucleotide
  Antisense strand to SEQ ID NO: 2389536
uaucucacuggccuugaga

SEQ ID NO: 2389538 - RNA, 19 nt, Artificial Sequence
  Description of Artificial Sequence: Synthetic oligonucleotide
  Sense strand starting at position 1059 of SEQ ID NO: 1886137
uggcuugaaccaggaaaca

SEQ ID NO: 2389539 - RNA, 19 nt, Artificial Sequence
  Description of Artificial Sequence: Synthetic oligonucleotide
  Antisense strand to SEQ ID NO: 2389538
uguuuccugguucaagcca

SEQ ID NO: 2389540 - RNA, 19 nt, Artificial Sequence
  Description of Artificial Sequence: Synthetic oligonucleotide
  Sense strand starting at position 1100 of SEQ ID NO: 1886137
ugaggaauuugagacaucu

SEQ ID NO: 2389541 - RNA, 19 nt, Artificial Sequence
  Description of Artificial Sequence: Synthetic oligonucleotide
  Antisense strand to SEQ ID NO: 2389540
agaugucucaaauuccuca

SEQ ID NO: 2389542 - RNA, 19 nt, Artificial Sequence
  Description of Artificial Sequence: Synthetic oligonucleotide
  Sense strand starting at position 1233 of SEQ ID NO: 1886137
agccauucuccaggaagaa

SEQ ID NO: 2389543 - RNA, 19 nt, Artificial Sequence
  Description of Artificial Sequence: Synthetic oligonucleotide
  Antisense strand to SEQ ID NO: 2389542
uucuuccuggagaauggcu

SEQ ID NO: 2389544 - RNA, 19 nt, Artificial Sequence
  Description of Artificial Sequence: Synthetic oligonucleotide
  Sense strand starting at position 1290 of SEQ ID NO: 1886137
ugcaaugggcuagagagau

SEQ ID NO: 2389545 - RNA, 19 nt, Artificial Sequence
  Description of Artificial Sequence: Synthetic oligonucleotide
  Antisense strand to SEQ ID NO: 2389544
aucucucuagcccauugca

SEQ ID NO: 2389546 - RNA, 19 nt, Artificial Sequence
  Description of Artificial Sequence: Synthetic oligonucleotide
  Sense strand starting at position 1349 of SEQ ID NO: 1886137
cuccgacauggguaggauu

SEQ ID NO: 2389547 - RNA, 19 nt, Artificial Sequence
  Description of Artificial Sequence: Synthetic oligonucleotide
  Antisense strand to SEQ ID NO: 2389546
aauccuacccaugucggag

SEQ ID NO: 2389548 - RNA, 19 nt, Artificial Sequence
  Description of Artificial Sequence: Synthetic oligonucleotide
  Sense strand starting at position 1380 of SEQ ID NO: 1886137
gaggacauuccaggcuaaa

SEQ ID NO: 2389549 - RNA, 19 nt, Artificial Sequence
  Description of Artificial Sequence: Synthetic oligonucleotide
  Antisense strand to SEQ ID NO: 2389548
uuuagccuggaauguccuc

SEQ ID NO: 2389550 - RNA, 19 nt, Artificial Sequence
  Description of Artificial Sequence: Synthetic oligonucleotide
  Sense strand starting at position 1424 of SEQ ID NO: 1886137
gcagaacagugugugauuu

SEQ ID NO: 2389551 - RNA, 19 nt, Artificial Sequence
  Description of Artificial Sequence: Synthetic oligonucleotide
  Antisense strand to SEQ ID NO: 2389550
aaaucacacacuguucugc

SEQ ID NO: 2389552 - RNA, 19 nt, Artificial Sequence
  Description of Artificial Sequence: Synthetic oligonucleotide
  Sense strand starting at position 1428 of SEQ ID NO: 1886137
aacagugugugauuuguuu

SEQ ID NO: 2389553 - RNA, 19 nt, Artificial Sequence
  Description of Artificial Sequence: Synthetic oligonucleotide
  Antisense strand to SEQ ID NO: 2389552
aaacaaaucacacacuguu

SEQ ID NO: 2389554 - RNA, 19 nt, Artificial Sequence
  Description of Artificial Sequence: Synthetic oligonucleotide
  Sense strand starting at position 1430 of SEQ ID NO: 1886137
cagugugugauuuguuuag

SEQ ID NO: 2389555 - RNA, 19 nt, Artificial Sequence
  Description of Artificial Sequence: Synthetic oligonucleotide
  Antisense strand to SEQ ID NO: 2389554
cuaaacaaaucacacacug

SEQ ID NO: 2389556 - RNA, 19 nt, Artificial Sequence
  Description of Artificial Sequence: Synthetic oligonucleotide
  Sense strand starting at position 1434 of SEQ ID NO: 1886137
gugugauuuguuuagcaug

SEQ ID NO: 2389557 - RNA, 19 nt, Artificial Sequence
  Description of Artificial Sequence: Synthetic oligonucleotide
  Antisense strand to SEQ ID NO: 2389556
caugcuaaacaaaucacac

SEQ ID NO: 2389558 - RNA, 19 nt, Artificial Sequence
  Description of Artificial Sequence: Synthetic oligonucleotide
  Sense strand starting at position 1436 of SEQ ID NO: 1886137
gugauuuguuuagcaugau

SEQ ID NO: 2389559 - RNA, 19 nt, Artificial Sequence
  Description of Artificial Sequence: Synthetic oligonucleotide
  Antisense strand to SEQ ID NO: 2389558
aucaugcuaaacaaaucac

SEQ ID NO: 2389560 - RNA, 19 nt, Artificial Sequence
  Description of Artificial Sequence: Synthetic oligonucleotide
  Sense strand starting at position 1618 of SEQ ID NO: 1886137
gggucuguggaccacuaaa

SEQ ID NO: 2389561 - RNA, 19 nt, Artificial Sequence
  Description of Artificial Sequence: Synthetic oligonucleotide
  Antisense strand to SEQ ID NO: 2389560
uuuagugguccacagaccc

SEQ ID NO: 2389562 - RNA, 19 nt, Artificial Sequence
  Description of Artificial Sequence: Synthetic oligonucleotide
  Sense strand starting at position 1667 of SEQ ID NO: 1886137
uggcuuccaccaugauaaa

SEQ ID NO: 2389563 - RNA, 19 nt, Artificial Sequence
  Description of Artificial Sequence: Synthetic oligonucleotide
  Antisense strand to SEQ ID NO: 2389562
uuuaucaugguggaagcca

SEQ ID NO: 2389564 - RNA, 19 nt, Artificial Sequence
  Description of Artificial Sequence: Synthetic oligonucleotide
  Sense strand starting at position 1887 of SEQ ID NO: 1886137
aagacuuagguuuggauau

SEQ ID NO: 2389565 - RNA, 19 nt, Artificial Sequence
  Description of Artificial Sequence: Synthetic oligonucleotide
  Antisense strand to SEQ ID NO: 2389564
auauccaaaccuaagucuu

SEQ ID NO: 2389566 - RNA, 19 nt, Artificial Sequence
  Description of Artificial Sequence: Synthetic oligonucleotide
  Sense strand starting at position 2097 of SEQ ID NO: 1886137
guugaaccuuucuugaauc

SEQ ID NO: 2389567 - RNA, 19 nt, Artificial Sequence
  Description of Artificial Sequence: Synthetic oligonucleotide
  Antisense strand to SEQ ID NO: 2389566
gauucaagaaagguucaac

SEQ ID NO: 2389568 - RNA, 19 nt, Artificial Sequence
  Description of Artificial Sequence: Synthetic oligonucleotide
  Sense strand starting at position 2735 of SEQ ID NO: 1886137
cagguugaaugagucauca

SEQ ID NO: 2389569 - RNA, 19 nt, Artificial Sequence
  Description of Artificial Sequence: Synthetic oligonucleotide
  Antisense strand to SEQ ID NO: 2389568
ugaugacucauucaaccug

SEQ ID NO: 2389570 - RNA, 19 nt, Artificial Sequence
  Description of Artificial Sequence: Synthetic oligonucleotide
  Sense strand starting at position 2743 of SEQ ID NO: 1886137
augagucaucaaggguaaa

SEQ ID NO: 2389571 - RNA, 19 nt, Artificial Sequence
  Description of Artificial Sequence: Synthetic oligonucleotide
  Antisense strand to SEQ ID NO: 2389570
uuuacccuugaugacucau

SEQ ID NO: 2389572 - RNA, 19 nt, Artificial Sequence
  Description of Artificial Sequence: Synthetic oligonucleotide
  Sense strand starting at position 2841 of SEQ ID NO: 1886137
uuuguucuagaaugaugac

SEQ ID NO: 2389573 - RNA, 19 nt, Artificial Sequence
  Description of Artificial Sequence: Synthetic oligonucleotide
  Antisense strand to SEQ ID NO: 2389572
gucaucauucuagaacaaa

SEQ ID NO: 2389574 - RNA, 19 nt, Artificial Sequence
  Description of Artificial Sequence: Synthetic oligonucleotide
  Sense strand starting at position 2857 of SEQ ID NO: 1886137
gacaguaugcaaugacuca

SEQ ID NO: 2389575 - RNA, 19 nt, Artificial Sequence
  Description of Artificial Sequence: Synthetic oligonucleotide
  Antisense strand to SEQ ID NO: 2389574
ugagucauugcauacuguc

SEQ ID NO: 2389576 - RNA, 19 nt, Artificial Sequence
  Description of Artificial Sequence: Synthetic oligonucleotide
  Sense strand starting at position 3135 of SEQ ID NO: 1886137
ccaagucugcuugaguuaa

SEQ ID NO: 2389577 - RNA, 19 nt, Artificial Sequence
  Description of Artificial Sequence: Synthetic oligonucleotide
  Antisense strand to SEQ ID NO: 2389576
uuaacucaagcagacuugg

SEQ ID NO: 2389578 - RNA, 19 nt, Artificial Sequence
  Description of Artificial Sequence: Synthetic oligonucleotide
  Sense strand starting at position 3346 of SEQ ID NO: 1886137
acauguuucuaucuggaga

SEQ ID NO: 2389579 - RNA, 19 nt, Artificial Sequence
  Description of Artificial Sequence: Synthetic oligonucleotide
  Antisense strand to SEQ ID NO: 2389578
ucuccagauagaaacaugu

SEQ ID NO: 2389580 - RNA, 19 nt, Artificial Sequence
  Description of Artificial Sequence: Synthetic oligonucleotide
  Sense strand starting at position 3401 of SEQ ID NO: 1886137
ucugcaaaugugggauaau

SEQ ID NO: 2389581 - RNA, 19 nt, Artificial Sequence
  Description of Artificial Sequence: Synthetic oligonucleotide
  Antisense strand to SEQ ID NO: 2389580
auuaucccacauuugcaga

SEQ ID NO: 2389582 - RNA, 19 nt, Artificial Sequence
  Description of Artificial Sequence: Synthetic oligonucleotide
  Sense strand starting at position 3672 of SEQ ID NO: 1886137
gugcuuguuaauguguuua

SEQ ID NO: 2389583 - RNA, 19 nt, Artificial Sequence
  Description of Artificial Sequence: Synthetic oligonucleotide
  Antisense strand to SEQ ID NO: 2389582
uaaacacauuaacaagcac

SEQ ID NO: 2389584 - RNA, 19 nt, Artificial Sequence
  Description of Artificial Sequence: Synthetic oligonucleotide
  Sense strand starting at position 3687 of SEQ ID NO: 1886137
uuuacauauaugggugagu

SEQ ID NO: 2389585 - RNA, 19 nt, Artificial Sequence
  Description of Artificial Sequence: Synthetic oligonucleotide
  Antisense strand to SEQ ID NO: 2389584
acucacccauauauguaaa

SEQ ID NO: 2389586 - RNA, 19 nt, Artificial Sequence
  Description of Artificial Sequence: Synthetic oligonucleotide
  Sense strand starting at position 3688 of SEQ ID NO: 1886137
uuacauauaugggugaguu

SEQ ID NO: 2389587 - RNA, 19 nt, Artificial Sequence
  Description of Artificial Sequence: Synthetic oligonucleotide
  Antisense strand to SEQ ID NO: 2389586
aacucacccauauauguaa

SEQ ID NO: 2389588 - RNA, 19 nt, Artificial Sequence
  Description of Artificial Sequence: Synthetic oligonucleotide
  Sense strand starting at position 3689 of SEQ ID NO: 1886137
uacauauaugggugaguua

SEQ ID NO: 2389589 - RNA, 19 nt, Artificial Sequence
  Description of Artificial Sequence: Synthetic oligonucleotide
  Antisense strand to SEQ ID NO: 2389588
uaacucacccauauaugua

SEQ ID NO: 2389590 - RNA, 19 nt, Artificial Sequence
  Description of Artificial Sequence: Synthetic oligonucleotide
  Sense strand starting at position 3692 of SEQ ID NO: 1886137
auauaugggugaguuaaca

SEQ ID NO: 2389591 - RNA, 19 nt, Artificial Sequence
  Description of Artificial Sequence: Synthetic oligonucleotide
  Antisense strand to SEQ ID NO: 2389590
uguuaacucacccauauau

SEQ ID NO: 2389592 - RNA, 19 nt, Artificial Sequence
  Description of Artificial Sequence: Synthetic oligonucleotide
  Sense strand starting at position 3702 of SEQ ID NO: 1886137
gaguuaacauagucugaca

SEQ ID NO: 2389593 - RNA, 19 nt, Artificial Sequence
  Description of Artificial Sequence: Synthetic oligonucleotide
  Antisense strand to SEQ ID NO: 2389592
ugucagacuauguuaacuc

SEQ ID NO: 2389594 - RNA, 19 nt, Artificial Sequence
  Description of Artificial Sequence: Synthetic oligonucleotide
  Sense strand starting at position 3704 of SEQ ID NO: 1886137
guuaacauagucugacaga

SEQ ID NO: 2389595 - RNA, 19 nt, Artificial Sequence
  Description of Artificial Sequence: Synthetic oligonucleotide
  Antisense strand to SEQ ID NO: 2389594
ucugucagacuauguuaac

SEQ ID NO: 2389596 - RNA, 19 nt, Artificial Sequence
  Description of Artificial Sequence: Synthetic oligonucleotide
  Sense strand starting at position 3976 of SEQ ID NO: 1886137
agucacuugcaccauuaua

SEQ ID NO: 2389597 - RNA, 19 nt, Artificial Sequence
  Description of Artificial Sequence: Synthetic oligonucleotide
  Antisense strand to SEQ ID NO: 2389596
uauaauggugcaagugacu

SEQ ID NO: 2389598 - RNA, 19 nt, Artificial Sequence
  Description of Artificial Sequence: Synthetic oligonucleotide
  Sense strand starting at position 82 of SEQ ID NO: 1886138
acaggaagcucuguagaaa

SEQ ID NO: 2389599 - RNA, 19 nt, Artificial Sequence
  Description of Artificial Sequence: Synthetic oligonucleotide
  Antisense strand to SEQ ID NO: 2389598
uuucuacagagcuuccugu

SEQ ID NO: 2389600 - RNA, 19 nt, Artificial Sequence
  Description of Artificial Sequence: Synthetic oligonucleotide
  Sense strand starting at position 198 of SEQ ID NO: 1886138
gcguccagucugucagacu

SEQ ID NO: 2389601 - RNA, 19 nt, Artificial Sequence
  Description of Artificial Sequence: Synthetic oligonucleotide
  Antisense strand to SEQ ID NO: 2389600
agucugacagacuggacgc

SEQ ID NO: 2389602 - RNA, 19 nt, Artificial Sequence
  Description of Artificial Sequence: Synthetic oligonucleotide
  Sense strand starting at position 207 of SEQ ID NO: 1886138
cugucagacuauguuaacu

SEQ ID NO: 2389603 - RNA, 19 nt, Artificial Sequence
  Description of Artificial Sequence: Synthetic oligonucleotide
  Antisense strand to SEQ ID NO: 2389602
aguuaacauagucugacag

SEQ ID NO: 2389604 - RNA, 19 nt, Artificial Sequence
  Description of Artificial Sequence: Synthetic oligonucleotide
  Sense strand starting at position 447 of SEQ ID NO: 1886138
aaccaaaguccuggguaau

SEQ ID NO: 2389605 - RNA, 19 nt, Artificial Sequence
  Description of Artificial Sequence: Synthetic oligonucleotide
  Antisense strand to SEQ ID NO: 2389604
auuacccaggacuuugguu

SEQ ID NO: 2389606 - RNA, 19 nt, Artificial Sequence
  Description of Artificial Sequence: Synthetic oligonucleotide
  Sense strand starting at position 448 of SEQ ID NO: 1886138
accaaaguccuggguaaug

SEQ ID NO: 2389607 - RNA, 19 nt, Artificial Sequence
  Description of Artificial Sequence: Synthetic oligonucleotide
  Antisense strand to SEQ ID NO: 2389606
cauuacccaggacuuuggu

SEQ ID NO: 2389608 - RNA, 19 nt, Artificial Sequence
  Description of Artificial Sequence: Synthetic oligonucleotide
  Sense strand starting at position 670 of SEQ ID NO: 1886138
gguguuagacgcagcaagu

SEQ ID NO: 2389609 - RNA, 19 nt, Artificial Sequence
  Description of Artificial Sequence: Synthetic oligonucleotide
  Antisense strand to SEQ ID NO: 2389608
acuugcugcgucuaacacc

SEQ ID NO: 2389610 - RNA, 19 nt, Artificial Sequence
  Description of Artificial Sequence: Synthetic oligonucleotide
  Sense strand starting at position 671 of SEQ ID NO: 1886138
guguuagacgcagcaaguu

SEQ ID NO: 2389611 - RNA, 19 nt, Artificial Sequence
  Description of Artificial Sequence: Synthetic oligonucleotide
  Antisense strand to SEQ ID NO: 2389610
aacuugcugcgucuaacac

SEQ ID NO: 2389612 - RNA, 19 nt, Artificial Sequence
  Description of Artificial Sequence: Synthetic oligonucleotide
  Sense strand starting at position 820 of SEQ ID NO: 1886138
acuguugacuggccuugaa

SEQ ID NO: 2389613 - RNA, 19 nt, Artificial Sequence
  Description of Artificial Sequence: Synthetic oligonucleotide
  Antisense strand to SEQ ID NO: 2389612
uucaaggccagucaacagu

SEQ ID NO: 2389614 - RNA, 19 nt, Artificial Sequence
  Description of Artificial Sequence: Synthetic oligonucleotide
  Sense strand starting at position 1025 of SEQ ID NO: 1886138
aaaguagucucugugagug

SEQ ID NO: 2389615 - RNA, 19 nt, Artificial Sequence
  Description of Artificial Sequence: Synthetic oligonucleotide
  Antisense strand to SEQ ID NO: 2389614
cacucacagagacuacuuu

SEQ ID NO: 2389616 - RNA, 19 nt, Artificial Sequence
  Description of Artificial Sequence: Synthetic oligonucleotide
  Sense strand starting at position 1028 of SEQ ID NO: 1886138
guagucucugugaguguga

SEQ ID NO: 2389617 - RNA, 19 nt, Artificial Sequence
  Description of Artificial Sequence: Synthetic oligonucleotide
  Antisense strand to SEQ ID NO: 2389616
ucacacucacagagacuac

SEQ ID NO: 2389618 - RNA, 19 nt, Artificial Sequence
  Description of Artificial Sequence: Synthetic oligonucleotide
  Sense strand starting at position 1044 of SEQ ID NO: 1886138
ugaugauucugagucauug

SEQ ID NO: 2389619 - RNA, 19 nt, Artificial Sequence
  Description of Artificial Sequence: Synthetic oligonucleotide
  Antisense strand to SEQ ID NO: 2389618
caaugacucagaaucauca

SEQ ID NO: 2389620 - RNA, 19 nt, Artificial Sequence
  Description of Artificial Sequence: Synthetic oligonucleotide
  Sense strand starting at position 1048 of SEQ ID NO: 1886138
gauucugagucauugcaua

SEQ ID NO: 2389621 - RNA, 19 nt, Artificial Sequence
  Description of Artificial Sequence: Synthetic oligonucleotide
  Antisense strand to SEQ ID NO: 2389620
uaugcaaugacucagaauc

SEQ ID NO: 2389622 - RNA, 19 nt, Artificial Sequence
  Description of Artificial Sequence: Synthetic oligonucleotide
  Sense strand starting at position 1062 of SEQ ID NO: 1886138
gcauacugucaucauucua

SEQ ID NO: 2389623 - RNA, 19 nt, Artificial Sequence
  Description of Artificial Sequence: Synthetic oligonucleotide
  Antisense strand to SEQ ID NO: 2389622
uagaaugaugacaguaugc

SEQ ID NO: 2389624 - RNA, 19 nt, Artificial Sequence
  Description of Artificial Sequence: Synthetic oligonucleotide
  Sense strand starting at position 1747 of SEQ ID NO: 1886138
gugcguggucucaguguaa

SEQ ID NO: 2389625 - RNA, 19 nt, Artificial Sequence
  Description of Artificial Sequence: Synthetic oligonucleotide
  Antisense strand to SEQ ID NO: 2389624
uuacacugagaccacgcac

SEQ ID NO: 2389626 - RNA, 19 nt, Artificial Sequence
  Description of Artificial Sequence: Synthetic oligonucleotide
  Sense strand starting at position 1751 of SEQ ID NO: 1886138
guggucucaguguaaauau

SEQ ID NO: 2389627 - RNA, 19 nt, Artificial Sequence
  Description of Artificial Sequence: Synthetic oligonucleotide
  Antisense strand to SEQ ID NO: 2389626
auauuuacacugagaccac

SEQ ID NO: 2389628 - RNA, 19 nt, Artificial Sequence
  Description of Artificial Sequence: Synthetic oligonucleotide
  Sense strand starting at position 1786 of SEQ ID NO: 1886138
gcuuuccuaccuuggaauu

SEQ ID NO: 2389629 - RNA, 19 nt, Artificial Sequence
  Description of Artificial Sequence: Synthetic oligonucleotide
  Antisense strand to SEQ ID NO: 2389628
aauuccaagguaggaaagc

SEQ ID NO: 2389630 - RNA, 19 nt, Artificial Sequence
  Description of Artificial Sequence: Synthetic oligonucleotide
  Sense strand starting at position 2128 of SEQ ID NO: 1886138
ccuagaaguagugaagcaa

SEQ ID NO: 2389631 - RNA, 19 nt, Artificial Sequence
  Description of Artificial Sequence: Synthetic oligonucleotide
  Antisense strand to SEQ ID NO: 2389630
uugcuucacuacuucuagg

SEQ ID NO: 2389632 - RNA, 19 nt, Artificial Sequence
  Description of Artificial Sequence: Synthetic oligonucleotide
  Sense strand starting at position 2188 of SEQ ID NO: 1886138
gcaggaggccuaugagaau

SEQ ID NO: 2389633 - RNA, 19 nt, Artificial Sequence
  Description of Artificial Sequence: Synthetic oligonucleotide
  Antisense strand to SEQ ID NO: 2389632
auucucauaggccuccugc

SEQ ID NO: 2389634 - RNA, 19 nt, Artificial Sequence
  Description of Artificial Sequence: Synthetic oligonucleotide
  Sense strand starting at position 2239 of SEQ ID NO: 1886138
ugccuuuaucaugguggaa

SEQ ID NO: 2389635 - RNA, 19 nt, Artificial Sequence
  Description of Artificial Sequence: Synthetic oligonucleotide
  Antisense strand to SEQ ID NO: 2389634
uuccaccaugauaaaggca

SEQ ID NO: 2389636 - RNA, 19 nt, Artificial Sequence
  Description of Artificial Sequence: Synthetic oligonucleotide
  Sense strand starting at position 2251 of SEQ ID NO: 1886138
gguggaagccaguaucugu

SEQ ID NO: 2389637 - RNA, 19 nt, Artificial Sequence
  Description of Artificial Sequence: Synthetic oligonucleotide
  Antisense strand to SEQ ID NO: 2389636
acagauacuggcuuccacc

SEQ ID NO: 2389638 - RNA, 19 nt, Artificial Sequence
  Description of Artificial Sequence: Synthetic oligonucleotide
  Sense strand starting at position 2358 of SEQ ID NO: 1886138
gccauucugggagagugau

SEQ ID NO: 2389639 - RNA, 19 nt, Artificial Sequence
  Description of Artificial Sequence: Synthetic oligonucleotide
  Antisense strand to SEQ ID NO: 2389638
aucacucucccagaauggc

SEQ ID NO: 2389640 - RNA, 19 nt, Artificial Sequence
  Description of Artificial Sequence: Synthetic oligonucleotide
  Sense strand starting at position 2427 of SEQ ID NO: 1886138
ccuggagaaucaguucuuu

SEQ ID NO: 2389641 - RNA, 19 nt, Artificial Sequence
  Description of Artificial Sequence: Synthetic oligonucleotide
  Antisense strand to SEQ ID NO: 2389640
aaagaacugauucuccagg

SEQ ID NO: 2389642 - RNA, 19 nt, Artificial Sequence
  Description of Artificial Sequence: Synthetic oligonucleotide
  Sense strand starting at position 2431 of SEQ ID NO: 1886138
gagaaucaguucuuuggga

SEQ ID NO: 2389643 - RNA, 19 nt, Artificial Sequence
  Description of Artificial Sequence: Synthetic oligonucleotide
  Antisense strand to SEQ ID NO: 2389642
ucccaaagaacugauucuc

SEQ ID NO: 2389644 - RNA, 19 nt, Artificial Sequence
  Description of Artificial Sequence: Synthetic oligonucleotide
  Sense strand starting at position 2433 of SEQ ID NO: 1886138
gaaucaguucuuugggacu

SEQ ID NO: 2389645 - RNA, 19 nt, Artificial Sequence
  Description of Artificial Sequence: Synthetic oligonucleotide
  Antisense strand to SEQ ID NO: 2389644
agucccaaagaacugauuc

SEQ ID NO: 2389646 - RNA, 19 nt, Artificial Sequence
  Description of Artificial Sequence: Synthetic oligonucleotide
  Sense strand starting at position 2495 of SEQ ID NO: 1886138
acuguucugccuuagaacu

SEQ ID NO: 2389647 - RNA, 19 nt, Artificial Sequence
  Description of Artificial Sequence: Synthetic oligonucleotide
  Antisense strand to SEQ ID NO: 2389646
aguucuaaggcagaacagu

SEQ ID NO: 2389648 - RNA, 19 nt, Artificial Sequence
  Description of Artificial Sequence: Synthetic oligonucleotide
  Sense strand starting at position 2503 of SEQ ID NO: 1886138
gccuuagaacucuaacuug

SEQ ID NO: 2389649 - RNA, 19 nt, Artificial Sequence
  Description of Artificial Sequence: Synthetic oligonucleotide
  Antisense strand to SEQ ID NO: 2389648
caaguuagaguucuaaggc

SEQ ID NO: 2389650 - RNA, 19 nt, Artificial Sequence
  Description of Artificial Sequence: Synthetic oligonucleotide
  Sense strand starting at position 2523 of SEQ ID NO: 1886138
aucauuguuuagccuggaa

SEQ ID NO: 2389651 - RNA, 19 nt, Artificial Sequence
  Description of Artificial Sequence: Synthetic oligonucleotide
  Antisense strand to SEQ ID NO: 2389650
uuccaggcuaaacaaugau

SEQ ID NO: 2389652 - RNA, 19 nt, Artificial Sequence
  Description of Artificial Sequence: Synthetic oligonucleotide
  Sense strand starting at position 2525 of SEQ ID NO: 1886138
cauuguuuagccuggaaug

SEQ ID NO: 2389653 - RNA, 19 nt, Artificial Sequence
  Description of Artificial Sequence: Synthetic oligonucleotide
  Antisense strand to SEQ ID NO: 2389652
cauuccaggcuaaacaaug

SEQ ID NO: 2389654 - RNA, 19 nt, Artificial Sequence
  Description of Artificial Sequence: Synthetic oligonucleotide
  Sense strand starting at position 2535 of SEQ ID NO: 1886138
ccuggaauguccucucuac

SEQ ID NO: 2389655 - RNA, 19 nt, Artificial Sequence
  Description of Artificial Sequence: Synthetic oligonucleotide
  Antisense strand to SEQ ID NO: 2389654
guagagaggacauuccagg

SEQ ID NO: 2389656 - RNA, 19 nt, Artificial Sequence
  Description of Artificial Sequence: Synthetic oligonucleotide
  Sense strand starting at position 2948 of SEQ ID NO: 1886138
agaggacucuaacauacaa

SEQ ID NO: 2389657 - RNA, 19 nt, Artificial Sequence
  Description of Artificial Sequence: Synthetic oligonucleotide
  Antisense strand to SEQ ID NO: 2389656
uuguauguuagaguccucu

SEQ ID NO: 2389658 - RNA, 19 nt, Artificial Sequence
  Description of Artificial Sequence: Synthetic oligonucleotide
  Sense strand starting at position 3212 of SEQ ID NO: 1886138
gcaugcuuagcucacacau

SEQ ID NO: 2389659 - RNA, 19 nt, Artificial Sequence
  Description of Artificial Sequence: Synthetic oligonucleotide
  Antisense strand to SEQ ID NO: 2389658
augugugagcuaagcaugc

SEQ ID NO: 2389660 - RNA, 19 nt, Artificial Sequence
  Description of Artificial Sequence: Synthetic oligonucleotide
  Sense strand starting at position 3242 of SEQ ID NO: 1886138
ggguuuccacuguaaugau

SEQ ID NO: 2389661 - RNA, 19 nt, Artificial Sequence
  Description of Artificial Sequence: Synthetic oligonucleotide
  Antisense strand to SEQ ID NO: 2389660
aucauuacaguggaaaccc

SEQ ID NO: 2389662 - RNA, 19 nt, Artificial Sequence
  Description of Artificial Sequence: Synthetic oligonucleotide
  Sense strand starting at position 3411 of SEQ ID NO: 1886138
accauaucugcacaguuua

SEQ ID NO: 2389663 - RNA, 19 nt, Artificial Sequence
  Description of Artificial Sequence: Synthetic oligonucleotide
  Antisense strand to SEQ ID NO: 2389662
uaaacugugcagauauggu

SEQ ID NO: 2389664 - RNA, 19 nt, Artificial Sequence
  Description of Artificial Sequence: Synthetic oligonucleotide
  Sense strand starting at position 3568 of SEQ ID NO: 1886138
ggcagugacuauuccucau

SEQ ID NO: 2389665 - RNA, 19 nt, Artificial Sequence
  Description of Artificial Sequence: Synthetic oligonucleotide
  Antisense strand to SEQ ID NO: 2389664
augaggaauagucacugcc

SEQ ID NO: 2389666 - RNA, 19 nt, Artificial Sequence
  Description of Artificial Sequence: Synthetic oligonucleotide
  Sense strand starting at position 3571 of SEQ ID NO: 1886138
agugacuauuccucaugcu

SEQ ID NO: 2389667 - RNA, 19 nt, Artificial Sequence
  Description of Artificial Sequence: Synthetic oligonucleotide
  Antisense strand to SEQ ID NO: 2389666
agcaugaggaauagucacu

SEQ ID NO: 2389668 - RNA, 19 nt, Artificial Sequence
  Description of Artificial Sequence: Synthetic oligonucleotide
  Sense strand starting at position 3572 of SEQ ID NO: 1886138
gugacuauuccucaugcuu

SEQ ID NO: 2389669 - RNA, 19 nt, Artificial Sequence
  Description of Artificial Sequence: Synthetic oligonucleotide
  Antisense strand to SEQ ID NO: 2389668
aagcaugaggaauagucac

SEQ ID NO: 2389670 - RNA, 19 nt, Artificial Sequence
  Description of Artificial Sequence: Synthetic oligonucleotide
  Sense strand starting at position 3757 of SEQ ID NO: 1886138
gcaagaauguggcugacaa

SEQ ID NO: 2389671 - RNA, 19 nt, Artificial Sequence
  Description of Artificial Sequence: Synthetic oligonucleotide
  Antisense strand to SEQ ID NO: 2389670
uugucagccacauucuugc

SEQ ID NO: 2389672 - RNA, 19 nt, Artificial Sequence
  Description of Artificial Sequence: Synthetic oligonucleotide
  Sense strand starting at position 3758 of SEQ ID NO: 1886138
caagaauguggcugacaac

SEQ ID NO: 2389673 - RNA, 19 nt, Artificial Sequence
  Description of Artificial Sequence: Synthetic oligonucleotide
  Antisense strand to SEQ ID NO: 2389672
guugucagccacauucuug

SEQ ID NO: 2389674 - RNA, 19 nt, Artificial Sequence
  Description of Artificial Sequence: Synthetic oligonucleotide
  Sense strand starting at position 3854 of SEQ ID NO: 1886138
aggcuuccgagugacaguu

SEQ ID NO: 2389675 - RNA, 19 nt, Artificial Sequence
  Description of Artificial Sequence: Synthetic oligonucleotide
  Antisense strand to SEQ ID NO: 2389674
aacugucacucggaagccu

SEQ ID NO: 2389676 - RNA, 19 nt, Artificial Sequence
  Description of Artificial Sequence: Synthetic oligonucleotide
  Sense strand starting at position 3860 of SEQ ID NO: 1886138
ccgagugacaguuagcaga

SEQ ID NO: 2389677 - RNA, 19 nt, Artificial Sequence
  Description of Artificial Sequence: Synthetic oligonucleotide
  Antisense strand to SEQ ID NO: 2389676
ucugcuaacugucacucgg

SEQ ID NO: 2389678 - RNA, 19 nt, Artificial Sequence
  Description of Artificial Sequence: Synthetic oligonucleotide
  Sense strand starting at position 343 of SEQ ID NO: 1886139
uucuaauaccucgaaggcu

SEQ ID NO: 2389679 - RNA, 19 nt, Artificial Sequence
  Description of Artificial Sequence: Synthetic oligonucleotide
  Antisense strand to SEQ ID NO: 2389678
agccuucgagguauuagaa

SEQ ID NO: 2389680 - RNA, 19 nt, Artificial Sequence
  Description of Artificial Sequence: Synthetic oligonucleotide
  Sense strand starting at position 406 of SEQ ID NO: 1886139
uagagucaaugucuaagaa

SEQ ID NO: 2389681 - RNA, 19 nt, Artificial Sequence
  Description of Artificial Sequence: Synthetic oligonucleotide
  Antisense strand to SEQ ID NO: 2389680
uucuuagacauugacucua

SEQ ID NO: 2389682 - RNA, 19 nt, Artificial Sequence
  Description of Artificial Sequence: Synthetic oligonucleotide
  Sense strand starting at position 418 of SEQ ID NO: 1886139
cuaagaaaugcuuaagcau

SEQ ID NO: 2389683 - RNA, 19 nt, Artificial Sequence
  Description of Artificial Sequence: Synthetic oligonucleotide
  Antisense strand to SEQ ID NO: 2389682
augcuuaagcauuucuuag

SEQ ID NO: 2389684 - RNA, 19 nt, Artificial Sequence
  Description of Artificial Sequence: Synthetic oligonucleotide
  Sense strand starting at position 502 of SEQ ID NO: 1886139
uuagauugccuauaugcca

SEQ ID NO: 2389685 - RNA, 19 nt, Artificial Sequence
  Description of Artificial Sequence: Synthetic oligonucleotide
  Antisense strand to SEQ ID NO: 2389684
uggcauauaggcaaucuaa

SEQ ID NO: 2389686 - RNA, 19 nt, Artificial Sequence
  Description of Artificial Sequence: Synthetic oligonucleotide
  Sense strand starting at position 546 of SEQ ID NO: 1886139
aagcuaaauuuggccguaa

SEQ ID NO: 2389687 - RNA, 19 nt, Artificial Sequence
  Description of Artificial Sequence: Synthetic oligonucleotide
  Antisense strand to SEQ ID NO: 2389686
uuacggccaaauuuagcuu

SEQ ID NO: 2389688 - RNA, 19 nt, Artificial Sequence
  Description of Artificial Sequence: Synthetic oligonucleotide
  Sense strand starting at position 548 of SEQ ID NO: 1886139
gcuaaauuuggccguaaga

SEQ ID NO: 2389689 - RNA, 19 nt, Artificial Sequence
  Description of Artificial Sequence: Synthetic oligonucleotide
  Antisense strand to SEQ ID NO: 2389688
ucuuacggccaaauuuagc

SEQ ID NO: 2389690 - RNA, 19 nt, Artificial Sequence
  Description of Artificial Sequence: Synthetic oligonucleotide
  Sense strand starting at position 561 of SEQ ID NO: 1886139
guaagaaacuggcuuggaa

SEQ ID NO: 2389691 - RNA, 19 nt, Artificial Sequence
  Description of Artificial Sequence: Synthetic oligonucleotide
  Antisense strand to SEQ ID NO: 2389690
uuccaagccaguuucuuac

SEQ ID NO: 2389692 - RNA, 19 nt, Artificial Sequence
  Description of Artificial Sequence: Synthetic oligonucleotide
  Sense strand starting at position 997 of SEQ ID NO: 1886139
agaauauauuuggacagca

SEQ ID NO: 2389693 - RNA, 19 nt, Artificial Sequence
  Description of Artificial Sequence: Synthetic oligonucleotide
  Antisense strand to SEQ ID NO: 2389692
ugcuguccaaauauauucu

SEQ ID NO: 2389694 - RNA, 19 nt, Artificial Sequence
  Description of Artificial Sequence: Synthetic oligonucleotide
  Sense strand starting at position 1393 of SEQ ID NO: 1886139
gcuggugagcauuaacauu

SEQ ID NO: 2389695 - RNA, 19 nt, Artificial Sequence
  Description of Artificial Sequence: Synthetic oligonucleotide
  Antisense strand to SEQ ID NO: 2389694
aauguuaaugcucaccagc

SEQ ID NO: 2389696 - RNA, 19 nt, Artificial Sequence
  Description of Artificial Sequence: Synthetic oligonucleotide
  Sense strand starting at position 1420 of SEQ ID NO: 1886139
uucuguucuccagaaugga

SEQ ID NO: 2389697 - RNA, 19 nt, Artificial Sequence
  Description of Artificial Sequence: Synthetic oligonucleotide
  Antisense strand to SEQ ID NO: 2389696
uccauucuggagaacagaa

SEQ ID NO: 2389698 - RNA, 19 nt, Artificial Sequence
  Description of Artificial Sequence: Synthetic oligonucleotide
  Sense strand starting at position 1441 of SEQ ID NO: 1886139
cagagugaucccugcaaag

SEQ ID NO: 2389699 - RNA, 19 nt, Artificial Sequence
  Description of Artificial Sequence: Synthetic oligonucleotide
  Antisense strand to SEQ ID NO: 2389698
cuuugcagggaucacucug

SEQ ID NO: 2389700 - RNA, 19 nt, Artificial Sequence
  Description of Artificial Sequence: Synthetic oligonucleotide
  Sense strand starting at position 1733 of SEQ ID NO: 1886139
ucaauaguguacucugaua

SEQ ID NO: 2389701 - RNA, 19 nt, Artificial Sequence
  Description of Artificial Sequence: Synthetic oligonucleotide
  Antisense strand to SEQ ID NO: 2389700
uaucagaguacacuauuga

SEQ ID NO: 2389702 - RNA, 19 nt, Artificial Sequence
  Description of Artificial Sequence: Synthetic oligonucleotide
  Sense strand starting at position 1735 of SEQ ID NO: 1886139
aauaguguacucugauaug

SEQ ID NO: 2389703 - RNA, 19 nt, Artificial Sequence
  Description of Artificial Sequence: Synthetic oligonucleotide
  Antisense strand to SEQ ID NO: 2389702
cauaucagaguacacuauu

SEQ ID NO: 2389704 - RNA, 19 nt, Artificial Sequence
  Description of Artificial Sequence: Synthetic oligonucleotide
  Sense strand starting at position 1866 of SEQ ID NO: 1886139
agaggaaucaguugugaca

SEQ ID NO: 2389705 - RNA, 19 nt, Artificial Sequence
  Description of Artificial Sequence: Synthetic oligonucleotide
  Antisense strand to SEQ ID NO: 2389704
ugucacaacugauuccucu

SEQ ID NO: 2389706 - RNA, 19 nt, Artificial Sequence
  Description of Artificial Sequence: Synthetic oligonucleotide
  Sense strand starting at position 1973 of SEQ ID NO: 1886139
gucuacacaucuguugaaa

SEQ ID NO: 2389707 - RNA, 19 nt, Artificial Sequence
  Description of Artificial Sequence: Synthetic oligonucleotide
  Antisense strand to SEQ ID NO: 2389706
uuucaacagauguguagac

SEQ ID NO: 2389708 - RNA, 19 nt, Artificial Sequence
  Description of Artificial Sequence: Synthetic oligonucleotide
  Sense strand starting at position 2026 of SEQ ID NO: 1886139
uuuguaugggcugacugaa

SEQ ID NO: 2389709 - RNA, 19 nt, Artificial Sequence
  Description of Artificial Sequence: Synthetic oligonucleotide
  Antisense strand to SEQ ID NO: 2389708
uucagucagcccauacaaa

SEQ ID NO: 2389710 - RNA, 19 nt, Artificial Sequence
  Description of Artificial Sequence: Synthetic oligonucleotide
  Sense strand starting at position 2106 of SEQ ID NO: 1886139
uuuacuugucgauauacac

SEQ ID NO: 2389711 - RNA, 19 nt, Artificial Sequence
  Description of Artificial Sequence: Synthetic oligonucleotide
  Antisense strand to SEQ ID NO: 2389710
guguauaucgacaaguaaa

SEQ ID NO: 2389712 - RNA, 19 nt, Artificial Sequence
  Description of Artificial Sequence: Synthetic oligonucleotide
  Sense strand starting at position 2228 of SEQ ID NO: 1886139
ggacaauaauaccugcuuu

SEQ ID NO: 2389713 - RNA, 19 nt, Artificial Sequence
  Description of Artificial Sequence: Synthetic oligonucleotide
  Antisense strand to SEQ ID NO: 2389712
aaagcagguauuauugucc

SEQ ID NO: 2389714 - RNA, 19 nt, Artificial Sequence
  Description of Artificial Sequence: Synthetic oligonucleotide
  Sense strand starting at position 2247 of SEQ ID NO: 1886139
acagguauuugggaggauu

SEQ ID NO: 2389715 - RNA, 19 nt, Artificial Sequence
  Description of Artificial Sequence: Synthetic oligonucleotide
  Antisense strand to SEQ ID NO: 2389714
aauccucccaaauaccugu

SEQ ID NO: 2389716 - RNA, 19 nt, Artificial Sequence
  Description of Artificial Sequence: Synthetic oligonucleotide
  Sense strand starting at position 2280 of SEQ ID NO: 1886139
uagaaucaugcuggauaag

SEQ ID NO: 2389717 - RNA, 19 nt, Artificial Sequence
  Description of Artificial Sequence: Synthetic oligonucleotide
  Antisense strand to SEQ ID NO: 2389716
cuuauccagcaugauucua

SEQ ID NO: 2389718 - RNA, 19 nt, Artificial Sequence
  Description of Artificial Sequence: Synthetic oligonucleotide
  Sense strand starting at position 2292 of SEQ ID NO: 1886139
ggauaagcuguagagcauu

SEQ ID NO: 2389719 - RNA, 19 nt, Artificial Sequence
  Description of Artificial Sequence: Synthetic oligonucleotide
  Antisense strand to SEQ ID NO: 2389718
aaugcucuacagcuuaucc

SEQ ID NO: 2389720 - RNA, 19 nt, Artificial Sequence
  Description of Artificial Sequence: Synthetic oligonucleotide
  Sense strand starting at position 2335 of SEQ ID NO: 1886139
uuccacuuagcuugaggau

SEQ ID NO: 2389721 - RNA, 19 nt, Artificial Sequence
  Description of Artificial Sequence: Synthetic oligonucleotide
  Antisense strand to SEQ ID NO: 2389720
auccucaagcuaaguggaa

SEQ ID NO: 2389722 - RNA, 19 nt, Artificial Sequence
  Description of Artificial Sequence: Synthetic oligonucleotide
  Sense strand starting at position 2336 of SEQ ID NO: 1886139
uccacuuagcuugaggauu

SEQ ID NO: 2389723 - RNA, 19 nt, Artificial Sequence
  Description of Artificial Sequence: Synthetic oligonucleotide
  Antisense strand to SEQ ID NO: 2389722
aauccucaagcuaagugga

SEQ ID NO: 2389724 - RNA, 19 nt, Artificial Sequence
  Description of Artificial Sequence: Synthetic oligonucleotide
  Sense strand starting at position 2918 of SEQ ID NO: 1886139
aguauuccacuugaaaugu

SEQ ID NO: 2389725 - RNA, 19 nt, Artificial Sequence
  Description of Artificial Sequence: Synthetic oligonucleotide
  Antisense strand to SEQ ID NO: 2389724
acauuucaaguggaauacu

SEQ ID NO: 2389726 - RNA, 19 nt, Artificial Sequence
  Description of Artificial Sequence: Synthetic oligonucleotide
  Sense strand starting at position 2926 of SEQ ID NO: 1886139
acuugaaauguucgugaga

SEQ ID NO: 2389727 - RNA, 19 nt, Artificial Sequence
  Description of Artificial Sequence: Synthetic oligonucleotide
  Antisense strand to SEQ ID NO: 2389726
ucucacgaacauuucaagu

SEQ ID NO: 2389728 - RNA, 19 nt, Artificial Sequence
  Description of Artificial Sequence: Synthetic oligonucleotide
  Sense strand starting at position 2929 of SEQ ID NO: 1886139
ugaaauguucgugagauau

SEQ ID NO: 2389729 - RNA, 19 nt, Artificial Sequence
  Description of Artificial Sequence: Synthetic oligonucleotide
  Antisense strand to SEQ ID NO: 2389728
auaucucacgaacauuuca

SEQ ID NO: 2389730 - RNA, 19 nt, Artificial Sequence
  Description of Artificial Sequence: Synthetic oligonucleotide
  Sense strand starting at position 2933 of SEQ ID NO: 1886139
auguucgugagauauacaa

SEQ ID NO: 2389731 - RNA, 19 nt, Artificial Sequence
  Description of Artificial Sequence: Synthetic oligonucleotide
  Antisense strand to SEQ ID NO: 2389730
uuguauaucucacgaacau

SEQ ID NO: 2389732 - RNA, 19 nt, Artificial Sequence
  Description of Artificial Sequence: Synthetic oligonucleotide
  Sense strand starting at position 2935 of SEQ ID NO: 1886139
guucgugagauauacaaau

SEQ ID NO: 2389733 - RNA, 19 nt, Artificial Sequence
  Description of Artificial Sequence: Synthetic oligonucleotide
  Antisense strand to SEQ ID NO: 2389732
auuuguauaucucacgaac

SEQ ID NO: 2389734 - RNA, 19 nt, Artificial Sequence
  Description of Artificial Sequence: Synthetic oligonucleotide
  Sense strand starting at position 3100 of SEQ ID NO: 1886139
cuaucaugccuugagagca

SEQ ID NO: 2389735 - RNA, 19 nt, Artificial Sequence
  Description of Artificial Sequence: Synthetic oligonucleotide
  Antisense strand to SEQ ID NO: 2389734
ugcucucaaggcaugauag

SEQ ID NO: 2389736 - RNA, 19 nt, Artificial Sequence
  Description of Artificial Sequence: Synthetic oligonucleotide
  Sense strand starting at position 3175 of SEQ ID NO: 1886139
uagaaauucgaagaguguc

SEQ ID NO: 2389737 - RNA, 19 nt, Artificial Sequence
  Description of Artificial Sequence: Synthetic oligonucleotide
  Antisense strand to SEQ ID NO: 2389736
gacacucuucgaauuucua

SEQ ID NO: 2389738 - RNA, 19 nt, Artificial Sequence
  Description of Artificial Sequence: Synthetic oligonucleotide
  Sense strand starting at position 3183 of SEQ ID NO: 1886139
cgaagagugucaccaaacu

SEQ ID NO: 2389739 - RNA, 19 nt, Artificial Sequence
  Description of Artificial Sequence: Synthetic oligonucleotide
  Antisense strand to SEQ ID NO: 2389738
aguuuggugacacucuucg

SEQ ID NO: 2389740 - RNA, 19 nt, Artificial Sequence
  Description of Artificial Sequence: Synthetic oligonucleotide
  Sense strand starting at position 3272 of SEQ ID NO: 1886139
auucuauaucagggcugau

SEQ ID NO: 2389741 - RNA, 19 nt, Artificial Sequence
  Description of Artificial Sequence: Synthetic oligonucleotide
  Antisense strand to SEQ ID NO: 2389740
aucagcccugauauagaau

SEQ ID NO: 2389742 - RNA, 19 nt, Artificial Sequence
  Description of Artificial Sequence: Synthetic oligonucleotide
  Sense strand starting at position 3275 of SEQ ID NO: 1886139
cuauaucagggcugauauu

SEQ ID NO: 2389743 - RNA, 19 nt, Artificial Sequence
  Description of Artificial Sequence: Synthetic oligonucleotide
  Antisense strand to SEQ ID NO: 2389742
aauaucagcccugauauag

SEQ ID NO: 2389744 - RNA, 19 nt, Artificial Sequence
  Description of Artificial Sequence: Synthetic oligonucleotide
  Sense strand starting at position 3385 of SEQ ID NO: 1886139
cuacauaguucguuuauuu

SEQ ID NO: 2389745 - RNA, 19 nt, Artificial Sequence
  Description of Artificial Sequence: Synthetic oligonucleotide
  Antisense strand to SEQ ID NO: 2389744
aaauaaacgaacuauguag

SEQ ID NO: 2389746 - RNA, 19 nt, Artificial Sequence
  Description of Artificial Sequence: Synthetic oligonucleotide
  Sense strand starting at position 3703 of SEQ ID NO: 1886139
uuauacuuucuggauguuu

SEQ ID NO: 2389747 - RNA, 19 nt, Artificial Sequence
  Description of Artificial Sequence: Synthetic oligonucleotide
  Antisense strand to SEQ ID NO: 2389746
aaacauccagaaaguauaa

SEQ ID NO: 2389748 - RNA, 19 nt, Artificial Sequence
  Description of Artificial Sequence: Synthetic oligonucleotide
  Sense strand starting at position 3705 of SEQ ID NO: 1886139
auacuuucuggauguuuaa

SEQ ID NO: 2389749 - RNA, 19 nt, Artificial Sequence
  Description of Artificial Sequence: Synthetic oligonucleotide
  Antisense strand to SEQ ID NO: 2389748
uuaaacauccagaaaguau

SEQ ID NO: 2389750 - RNA, 19 nt, Artificial Sequence
  Description of Artificial Sequence: Synthetic oligonucleotide
  Sense strand starting at position 3733 of SEQ ID NO: 1886139
uuugacuuacauggguuaa

SEQ ID NO: 2389751 - RNA, 19 nt, Artificial Sequence
  Description of Artificial Sequence: Synthetic oligonucleotide
  Antisense strand to SEQ ID NO: 2389750
uuaacccauguaagucaaa

SEQ ID NO: 2389752 - RNA, 19 nt, Artificial Sequence
  Description of Artificial Sequence: Synthetic oligonucleotide
  Sense strand starting at position 3771 of SEQ ID NO: 1886139
ccaguaucagauggauaug

SEQ ID NO: 2389753 - RNA, 19 nt, Artificial Sequence
  Description of Artificial Sequence: Synthetic oligonucleotide
  Antisense strand to SEQ ID NO: 2389752
cauauccaucugauacugg

SEQ ID NO: 2389754 - RNA, 19 nt, Artificial Sequence
  Description of Artificial Sequence: Synthetic oligonucleotide
  Sense strand starting at position 3937 of SEQ ID NO: 1886139
ucaucagaauuguucuuga

SEQ ID NO: 2389755 - RNA, 19 nt, Artificial Sequence
  Description of Artificial Sequence: Synthetic oligonucleotide
  Antisense strand to SEQ ID NO: 2389754
ucaagaacaauucugauga

SEQ ID NO: 2389756 - RNA, 19 nt, Artificial Sequence
  Description of Artificial Sequence: Synthetic oligonucleotide
  Sense strand starting at position 3940 of SEQ ID NO: 1886139
ucagaauuguucuugaaac

SEQ ID NO: 2389757 - RNA, 19 nt, Artificial Sequence
  Description of Artificial Sequence: Synthetic oligonucleotide
  Antisense strand to SEQ ID NO: 2389756
guuucaagaacaauucuga

SEQ ID NO: 2389758 - RNA, 19 nt, Artificial Sequence
  Description of Artificial Sequence: Synthetic oligonucleotide
  Sense strand starting at position 208 of SEQ ID NO: 1886140
agaauuaaugccuagcaca

SEQ ID NO: 2389759 - RNA, 19 nt, Artificial Sequence
  Description of Artificial Sequence: Synthetic oligonucleotide
  Antisense strand to SEQ ID NO: 2389758
ugugcuaggcauuaauucu

SEQ ID NO: 2389760 - RNA, 19 nt, Artificial Sequence
  Description of Artificial Sequence: Synthetic oligonucleotide
  Sense strand starting at position 262 of SEQ ID NO: 1886140
gaaccugccgcauauuaga

SEQ ID NO: 2389761 - RNA, 19 nt, Artificial Sequence
  Description of Artificial Sequence: Synthetic oligonucleotide
  Antisense strand to SEQ ID NO: 2389760
ucuaauaugcggcagguuc

SEQ ID NO: 2389762 - RNA, 19 nt, Artificial Sequence
  Description of Artificial Sequence: Synthetic oligonucleotide
  Sense strand starting at position 302 of SEQ ID NO: 1886140
gguuguaugacugacccua

SEQ ID NO: 2389763 - RNA, 19 nt, Artificial Sequence
  Description of Artificial Sequence: Synthetic oligonucleotide
  Antisense strand to SEQ ID NO: 2389762
uagggucagucauacaacc

SEQ ID NO: 2389764 - RNA, 19 nt, Artificial Sequence
  Description of Artificial Sequence: Synthetic oligonucleotide
  Sense strand starting at position 304 of SEQ ID NO: 1886140
uuguaugacugacccuaga

SEQ ID NO: 2389765 - RNA, 19 nt, Artificial Sequence
  Description of Artificial Sequence: Synthetic oligonucleotide
  Antisense strand to SEQ ID NO: 2389764
ucuagggucagucauacaa

SEQ ID NO: 2389766 - RNA, 19 nt, Artificial Sequence
  Description of Artificial Sequence: Synthetic oligonucleotide
  Sense strand starting at position 359 of SEQ ID NO: 1886140
ugaggcaacucaguauaaa

SEQ ID NO: 2389767 - RNA, 19 nt, Artificial Sequence
  Description of Artificial Sequence: Synthetic oligonucleotide
  Antisense strand to SEQ ID NO: 2389766
uuuauacugaguugccuca

SEQ ID NO: 2389768 - RNA, 19 nt, Artificial Sequence
  Description of Artificial Sequence: Synthetic oligonucleotide
  Sense strand starting at position 470 of SEQ ID NO: 1886140
uguguuugaagccaucuga

SEQ ID NO: 2389769 - RNA, 19 nt, Artificial Sequence
  Description of Artificial Sequence: Synthetic oligonucleotide
  Antisense strand to SEQ ID NO: 2389768
ucagauggcuucaaacaca

SEQ ID NO: 2389770 - RNA, 19 nt, Artificial Sequence
  Description of Artificial Sequence: Synthetic oligonucleotide
  Sense strand starting at position 600 of SEQ ID NO: 1886140
gcuagaggcuuuguauuuc

SEQ ID NO: 2389771 - RNA, 19 nt, Artificial Sequence
  Description of Artificial Sequence: Synthetic oligonucleotide
  Antisense strand to SEQ ID NO: 2389770
gaaauacaaagccucuagc

SEQ ID NO: 2389772 - RNA, 19 nt, Artificial Sequence
  Description of Artificial Sequence: Synthetic oligonucleotide
  Sense strand starting at position 639 of SEQ ID NO: 1886140
gaugcaaugcucuggaaca

SEQ ID NO: 2389773 - RNA, 19 nt, Artificial Sequence
  Description of Artificial Sequence: Synthetic oligonucleotide
  Antisense strand to SEQ ID NO: 2389772
uguuccagagcauugcauc

SEQ ID NO: 2389774 - RNA, 19 nt, Artificial Sequence
  Description of Artificial Sequence: Synthetic oligonucleotide
  Sense strand starting at position 886 of SEQ ID NO: 1886140
ugaugauggaagugaaguu

SEQ ID NO: 2389775 - RNA, 19 nt, Artificial Sequence
  Description of Artificial Sequence: Synthetic oligonucleotide
  Antisense strand to SEQ ID NO: 2389774
aacuucacuuccaucauca

SEQ ID NO: 2389776 - RNA, 19 nt, Artificial Sequence
  Description of Artificial Sequence: Synthetic oligonucleotide
  Sense strand starting at position 895 of SEQ ID NO: 1886140
aagugaaguuuagcuagga

SEQ ID NO: 2389777 - RNA, 19 nt, Artificial Sequence
  Description of Artificial Sequence: Synthetic oligonucleotide
  Antisense strand to SEQ ID NO: 2389776
uccuagcuaaacuucacuu

SEQ ID NO: 2389778 - RNA, 19 nt, Artificial Sequence
  Description of Artificial Sequence: Synthetic oligonucleotide
  Sense strand starting at position 896 of SEQ ID NO: 1886140
agugaaguuuagcuaggau

SEQ ID NO: 2389779 - RNA, 19 nt, Artificial Sequence
  Description of Artificial Sequence: Synthetic oligonucleotide
  Antisense strand to SEQ ID NO: 2389778
auccuagcuaaacuucacu

SEQ ID NO: 2389780 - RNA, 19 nt, Artificial Sequence
  Description of Artificial Sequence: Synthetic oligonucleotide
  Sense strand starting at position 1087 of SEQ ID NO: 1886140
cuugcaacaguuuaggaaa

SEQ ID NO: 2389781 - RNA, 19 nt, Artificial Sequence
  Description of Artificial Sequence: Synthetic oligonucleotide
  Antisense strand to SEQ ID NO: 2389780
uuuccuaaacuguugcaag

SEQ ID NO: 2389782 - RNA, 19 nt, Artificial Sequence
  Description of Artificial Sequence: Synthetic oligonucleotide
  Sense strand starting at position 1204 of SEQ ID NO: 1886140
ggcauaaagcacuacuuua

SEQ ID NO: 2389783 - RNA, 19 nt, Artificial Sequence
  Description of Artificial Sequence: Synthetic oligonucleotide
  Antisense strand to SEQ ID NO: 2389782
uaaaguagugcuuuaugcc

SEQ ID NO: 2389784 - RNA, 19 nt, Artificial Sequence
  Description of Artificial Sequence: Synthetic oligonucleotide
  Sense strand starting at position 1220 of SEQ ID NO: 1886140
uuagauaccgcauauaaga

SEQ ID NO: 2389785 - RNA, 19 nt, Artificial Sequence
  Description of Artificial Sequence: Synthetic oligonucleotide
  Antisense strand to SEQ ID NO: 2389784
ucuuauaugcgguaucuaa

SEQ ID NO: 2389786 - RNA, 19 nt, Artificial Sequence
  Description of Artificial Sequence: Synthetic oligonucleotide
  Sense strand starting at position 1406 of SEQ ID NO: 1886140
aaugaauaucuggguugcu

SEQ ID NO: 2389787 - RNA, 19 nt, Artificial Sequence
  Description of Artificial Sequence: Synthetic oligonucleotide
  Antisense strand to SEQ ID NO: 2389786
agcaacccagauauucauu

SEQ ID NO: 2389788 - RNA, 19 nt, Artificial Sequence
  Description of Artificial Sequence: Synthetic oligonucleotide
  Sense strand starting at position 1524 of SEQ ID NO: 1886140
gugagauugcuugaucaca

SEQ ID NO: 2389789 - RNA, 19 nt, Artificial Sequence
  Description of Artificial Sequence: Synthetic oligonucleotide
  Antisense strand to SEQ ID NO: 2389788
ugugaucaagcaaucucac

SEQ ID NO: 2389790 - RNA, 19 nt, Artificial Sequence
  Description of Artificial Sequence: Synthetic oligonucleotide
  Sense strand starting at position 1526 of SEQ ID NO: 1886140
gagauugcuugaucacaug

SEQ ID NO: 2389791 - RNA, 19 nt, Artificial Sequence
  Description of Artificial Sequence: Synthetic oligonucleotide
  Antisense strand to SEQ ID NO: 2389790
caugugaucaagcaaucuc

SEQ ID NO: 2389792 - RNA, 19 nt, Artificial Sequence
  Description of Artificial Sequence: Synthetic oligonucleotide
  Sense strand starting at position 1601 of SEQ ID NO: 1886140
gaacaauguucuguggaua

SEQ ID NO: 2389793 - RNA, 19 nt, Artificial Sequence
  Description of Artificial Sequence: Synthetic oligonucleotide
  Antisense strand to SEQ ID NO: 2389792
uauccacagaacauuguuc

SEQ ID NO: 2389794 - RNA, 19 nt, Artificial Sequence
  Description of Artificial Sequence: Synthetic oligonucleotide
  Sense strand starting at position 1602 of SEQ ID NO: 1886140
aacaauguucuguggauau

SEQ ID NO: 2389795 - RNA, 19 nt, Artificial Sequence
  Description of Artificial Sequence: Synthetic oligonucleotide
  Antisense strand to SEQ ID NO: 2389794
auauccacagaacauuguu

SEQ ID NO: 2389796 - RNA, 19 nt, Artificial Sequence
  Description of Artificial Sequence: Synthetic oligonucleotide
  Sense strand starting at position 1604 of SEQ ID NO: 1886140
caauguucuguggauauac

SEQ ID NO: 2389797 - RNA, 19 nt, Artificial Sequence
  Description of Artificial Sequence: Synthetic oligonucleotide
  Antisense strand to SEQ ID NO: 2389796
guauauccacagaacauug

SEQ ID NO: 2389798 - RNA, 19 nt, Artificial Sequence
  Description of Artificial Sequence: Synthetic oligonucleotide
  Sense strand starting at position 1727 of SEQ ID NO: 1886140
guggacauaugucuuuaug

SEQ ID NO: 2389799 - RNA, 19 nt, Artificial Sequence
  Description of Artificial Sequence: Synthetic oligonucleotide
  Antisense strand to SEQ ID NO: 2389798
cauaaagacauauguccac

SEQ ID NO: 2389800 - RNA, 19 nt, Artificial Sequence
  Description of Artificial Sequence: Synthetic oligonucleotide
  Sense strand starting at position 1742 of SEQ ID NO: 1886140
uaugucuccuggguagaua

SEQ ID NO: 2389801 - RNA, 19 nt, Artificial Sequence
  Description of Artificial Sequence: Synthetic oligonucleotide
  Antisense strand to SEQ ID NO: 2389800
uaucuacccaggagacaua

SEQ ID NO: 2389802 - RNA, 19 nt, Artificial Sequence
  Description of Artificial Sequence: Synthetic oligonucleotide
  Sense strand starting at position 1753 of SEQ ID NO: 1886140
gguagauacgaguggaauu

SEQ ID NO: 2389803 - RNA, 19 nt, Artificial Sequence
  Description of Artificial Sequence: Synthetic oligonucleotide
  Antisense strand to SEQ ID NO: 2389802
aauuccacucguaucuacc

SEQ ID NO: 2389804 - RNA, 19 nt, Artificial Sequence
  Description of Artificial Sequence: Synthetic oligonucleotide
  Sense strand starting at position 1771 of SEQ ID NO: 1886140
uucugaguuguaugauaaa

SEQ ID NO: 2389805 - RNA, 19 nt, Artificial Sequence
  Description of Artificial Sequence: Synthetic oligonucleotide
  Antisense strand to SEQ ID NO: 2389804
uuuaucauacaacucagaa

SEQ ID NO: 2389806 - RNA, 19 nt, Artificial Sequence
  Description of Artificial Sequence: Synthetic oligonucleotide
  Sense strand starting at position 1916 of SEQ ID NO: 1886140
ucauuacuggcugaaaguc

SEQ ID NO: 2389807 - RNA, 19 nt, Artificial Sequence
  Description of Artificial Sequence: Synthetic oligonucleotide
  Antisense strand to SEQ ID NO: 2389806
gacuuucagccaguaauga

SEQ ID NO: 2389808 - RNA, 19 nt, Artificial Sequence
  Description of Artificial Sequence: Synthetic oligonucleotide
  Sense strand starting at position 1953 of SEQ ID NO: 1886140
ucaggaucaucuuuaugac

SEQ ID NO: 2389809 - RNA, 19 nt, Artificial Sequence
  Description of Artificial Sequence: Synthetic oligonucleotide
  Antisense strand to SEQ ID NO: 2389808
gucauaaagaugauccuga

SEQ ID NO: 2389810 - RNA, 19 nt, Artificial Sequence
  Description of Artificial Sequence: Synthetic oligonucleotide
  Sense strand starting at position 2064 of SEQ ID NO: 1886140
uuccauaauguguaagaca

SEQ ID NO: 2389811 - RNA, 19 nt, Artificial Sequence
  Description of Artificial Sequence: Synthetic oligonucleotide
  Antisense strand to SEQ ID NO: 2389810
ugucuuacacauuauggaa

SEQ ID NO: 2389812 - RNA, 19 nt, Artificial Sequence
  Description of Artificial Sequence: Synthetic oligonucleotide
  Sense strand starting at position 2073 of SEQ ID NO: 1886140
guguaagacaauugaagca

SEQ ID NO: 2389813 - RNA, 19 nt, Artificial Sequence
  Description of Artificial Sequence: Synthetic oligonucleotide
  Antisense strand to SEQ ID NO: 2389812
ugcuucaauugucuuacac

SEQ ID NO: 2389814 - RNA, 19 nt, Artificial Sequence
  Description of Artificial Sequence: Synthetic oligonucleotide
  Sense strand starting at position 2482 of SEQ ID NO: 1886140
ugaaccaaugcaugaguuu

SEQ ID NO: 2389815 - RNA, 19 nt, Artificial Sequence
  Description of Artificial Sequence: Synthetic oligonucleotide
  Antisense strand to SEQ ID NO: 2389814
aaacucaugcauugguuca

SEQ ID NO: 2389816 - RNA, 19 nt, Artificial Sequence
  Description of Artificial Sequence: Synthetic oligonucleotide
  Sense strand starting at position 2608 of SEQ ID NO: 1886140
guuggaaauaugcauguuu

SEQ ID NO: 2389817 - RNA, 19 nt, Artificial Sequence
  Description of Artificial Sequence: Synthetic oligonucleotide
  Antisense strand to SEQ ID NO: 2389816
aaacaugcauauuuccaac

SEQ ID NO: 2389818 - RNA, 19 nt, Artificial Sequence
  Description of Artificial Sequence: Synthetic oligonucleotide
  Sense strand starting at position 2610 of SEQ ID NO: 1886140
uggaaauaugcauguuuau

SEQ ID NO: 2389819 - RNA, 19 nt, Artificial Sequence
  Description of Artificial Sequence: Synthetic oligonucleotide
  Antisense strand to SEQ ID NO: 2389818
auaaacaugcauauuucca

SEQ ID NO: 2389820 - RNA, 19 nt, Artificial Sequence
  Description of Artificial Sequence: Synthetic oligonucleotide
  Sense strand starting at position 2717 of SEQ ID NO: 1886140
uauccugcugggcagaaau

SEQ ID NO: 2389821 - RNA, 19 nt, Artificial Sequence
  Description of Artificial Sequence: Synthetic oligonucleotide
  Antisense strand to SEQ ID NO: 2389820
auuucugcccagcaggaua

SEQ ID NO: 2389822 - RNA, 19 nt, Artificial Sequence
  Description of Artificial Sequence: Synthetic oligonucleotide
  Sense strand starting at position 2862 of SEQ ID NO: 1886140
ugaugugaccacugauccu

SEQ ID NO: 2389823 - RNA, 19 nt, Artificial Sequence
  Description of Artificial Sequence: Synthetic oligonucleotide
  Antisense strand to SEQ ID NO: 2389822
aggaucaguggucacauca

SEQ ID NO: 2389824 - RNA, 19 nt, Artificial Sequence
  Description of Artificial Sequence: Synthetic oligonucleotide
  Sense strand starting at position 2989 of SEQ ID NO: 1886140
cauaaugcagcguucuagu

SEQ ID NO: 2389825 - RNA, 19 nt, Artificial Sequence
  Description of Artificial Sequence: Synthetic oligonucleotide
  Antisense strand to SEQ ID NO: 2389824
acuagaacgcugcauuaug

SEQ ID NO: 2389826 - RNA, 19 nt, Artificial Sequence
  Description of Artificial Sequence: Synthetic oligonucleotide
  Sense strand starting at position 3020 of SEQ ID NO: 1886140
aggugaaauuuccauauuc

SEQ ID NO: 2389827 - RNA, 19 nt, Artificial Sequence
  Description of Artificial Sequence: Synthetic oligonucleotide
  Antisense strand to SEQ ID NO: 2389826
gaauauggaaauuucaccu

SEQ ID NO: 2389828 - RNA, 19 nt, Artificial Sequence
  Description of Artificial Sequence: Synthetic oligonucleotide
  Sense strand starting at position 3121 of SEQ ID NO: 1886140
ccuccaugagacgggaauu

SEQ ID NO: 2389829 - RNA, 19 nt, Artificial Sequence
  Description of Artificial Sequence: Synthetic oligonucleotide
  Antisense strand to SEQ ID NO: 2389828
aauucccgucucauggagg

SEQ ID NO: 2389830 - RNA, 19 nt, Artificial Sequence
  Description of Artificial Sequence: Synthetic oligonucleotide
  Sense strand starting at position 3471 of SEQ ID NO: 1886140
gcauauguacuguacacaa

SEQ ID NO: 2389831 - RNA, 19 nt, Artificial Sequence
  Description of Artificial Sequence: Synthetic oligonucleotide
  Antisense strand to SEQ ID NO: 2389830
uuguguacaguacauaugc

SEQ ID NO: 2389832 - RNA, 19 nt, Artificial Sequence
  Description of Artificial Sequence: Synthetic oligonucleotide
  Sense strand starting at position 3635 of SEQ ID NO: 1886140
ucugaagauaucugaaggu

SEQ ID NO: 2389833 - RNA, 19 nt, Artificial Sequence
  Description of Artificial Sequence: Synthetic oligonucleotide
  Antisense strand to SEQ ID NO: 2389832
accuucagauaucuucaga

SEQ ID NO: 2389834 - RNA, 19 nt, Artificial Sequence
  Description of Artificial Sequence: Synthetic oligonucleotide
  Sense strand starting at position 3759 of SEQ ID NO: 1886140
ucuuucgacucagugagaa

SEQ ID NO: 2389835 - RNA, 19 nt, Artificial Sequence
  Description of Artificial Sequence: Synthetic oligonucleotide
  Antisense strand to SEQ ID NO: 2389834
uucucacugagucgaaaga

SEQ ID NO: 2389836 - RNA, 19 nt, Artificial Sequence
  Description of Artificial Sequence: Synthetic oligonucleotide
  Sense strand starting at position 3761 of SEQ ID NO: 1886140
uuucgacucagugagaaau

SEQ ID NO: 2389837 - RNA, 19 nt, Artificial Sequence
  Description of Artificial Sequence: Synthetic oligonucleotide
  Antisense strand to SEQ ID NO: 2389836
auuucucacugagucgaaa

SEQ ID NO: 2389838 - RNA, 19 nt, Artificial Sequence
  Description of Artificial Sequence: Synthetic oligonucleotide
  Sense strand starting at position 26 of SEQ ID NO: 1886141
ugcccaugauuaucucuga

SEQ ID NO: 2389839 - RNA, 19 nt, Artificial Sequence
  Description of Artificial Sequence: Synthetic oligonucleotide
  Antisense strand to SEQ ID NO: 2389838
ucagagauaaucaugggca

SEQ ID NO: 2389840 - RNA, 19 nt, Artificial Sequence
  Description of Artificial Sequence: Synthetic oligonucleotide
  Sense strand starting at position 29 of SEQ ID NO: 1886141
ccaugauuaucucugagga

SEQ ID NO: 2389841 - RNA, 19 nt, Artificial Sequence
  Description of Artificial Sequence: Synthetic oligonucleotide
  Antisense strand to SEQ ID NO: 2389840
uccucagagauaaucaugg

SEQ ID NO: 2389842 - RNA, 19 nt, Artificial Sequence
  Description of Artificial Sequence: Synthetic oligonucleotide
  Sense strand starting at position 31 of SEQ ID NO: 1886141
augauuaucucugaggaga

SEQ ID NO: 2389843 - RNA, 19 nt, Artificial Sequence
  Description of Artificial Sequence: Synthetic oligonucleotide
  Antisense strand to SEQ ID NO: 2389842
ucuccucagagauaaucau

SEQ ID NO: 2389844 - RNA, 19 nt, Artificial Sequence
  Description of Artificial Sequence: Synthetic oligonucleotide
  Sense strand starting at position 33 of SEQ ID NO: 1886141
gauuaucucugaggagaac

SEQ ID NO: 2389845 - RNA, 19 nt, Artificial Sequence
  Description of Artificial Sequence: Synthetic oligonucleotide
  Antisense strand to SEQ ID NO: 2389844
guucuccucagagauaauc

SEQ ID NO: 2389846 - RNA, 19 nt, Artificial Sequence
  Description of Artificial Sequence: Synthetic oligonucleotide
  Sense strand starting at position 314 of SEQ ID NO: 1886141
aaagguuugcaggagugaa

SEQ ID NO: 2389847 - RNA, 19 nt, Artificial Sequence
  Description of Artificial Sequence: Synthetic oligonucleotide
  Antisense strand to SEQ ID NO: 2389846
uucacuccugcaaaccuuu

SEQ ID NO: 2389848 - RNA, 19 nt, Artificial Sequence
  Description of Artificial Sequence: Synthetic oligonucleotide
  Sense strand starting at position 435 of SEQ ID NO: 1886141
ccaagauguacguaaggug

SEQ ID NO: 2389849 - RNA, 19 nt, Artificial Sequence
  Description of Artificial Sequence: Synthetic oligonucleotide
  Antisense strand to SEQ ID NO: 2389848
caccuuacguacaucuugg

SEQ ID NO: 2389850 - RNA, 19 nt, Artificial Sequence
  Description of Artificial Sequence: Synthetic oligonucleotide
  Sense strand starting at position 470 of SEQ ID NO: 1886141
ugccuucugagcuguguga

SEQ ID NO: 2389851 - RNA, 19 nt, Artificial Sequence
  Description of Artificial Sequence: Synthetic oligonucleotide
  Antisense strand to SEQ ID NO: 2389850
ucacacagcucagaaggca

SEQ ID NO: 2389852 - RNA, 19 nt, Artificial Sequence
  Description of Artificial Sequence: Synthetic oligonucleotide
  Sense strand starting at position 588 of SEQ ID NO: 1886141
gccugucuaucauagcacu

SEQ ID NO: 2389853 - RNA, 19 nt, Artificial Sequence
  Description of Artificial Sequence: Synthetic oligonucleotide
  Antisense strand to SEQ ID NO: 2389852
agugcuaugauagacaggc

SEQ ID NO: 2389854 - RNA, 19 nt, Artificial Sequence
  Description of Artificial Sequence: Synthetic oligonucleotide
  Sense strand starting at position 984 of SEQ ID NO: 1886141
uuugcuagacauuguaaua

SEQ ID NO: 2389855 - RNA, 19 nt, Artificial Sequence
  Description of Artificial Sequence: Synthetic oligonucleotide
  Antisense strand to SEQ ID NO: 2389854
uauuacaaugucuagcaaa

SEQ ID NO: 2389856 - RNA, 19 nt, Artificial Sequence
  Description of Artificial Sequence: Synthetic oligonucleotide
  Sense strand starting at position 1004 of SEQ ID NO: 1886141
aucuuaugucgugacuucu

SEQ ID NO: 2389857 - RNA, 19 nt, Artificial Sequence
  Description of Artificial Sequence: Synthetic oligonucleotide
  Antisense strand to SEQ ID NO: 2389856
agaagucacgacauaagau

SEQ ID NO: 2389858 - RNA, 19 nt, Artificial Sequence
  Description of Artificial Sequence: Synthetic oligonucleotide
  Sense strand starting at position 1409 of SEQ ID NO: 1886141
ggcugacucgucgaauaau

SEQ ID NO: 2389859 - RNA, 19 nt, Artificial Sequence
  Description of Artificial Sequence: Synthetic oligonucleotide
  Antisense strand to SEQ ID NO: 2389858
auuauucgacgagucagcc

SEQ ID NO: 2389860 - RNA, 19 nt, Artificial Sequence
  Description of Artificial Sequence: Synthetic oligonucleotide
  Sense strand starting at position 1415 of SEQ ID NO: 1886141
cucgucgaauaauucgaua

SEQ ID NO: 2389861 - RNA, 19 nt, Artificial Sequence
  Description of Artificial Sequence: Synthetic oligonucleotide
  Antisense strand to SEQ ID NO: 2389860
uaucgaauuauucgacgag

SEQ ID NO: 2389862 - RNA, 19 nt, Artificial Sequence
  Description of Artificial Sequence: Synthetic oligonucleotide
  Sense strand starting at position 1417 of SEQ ID NO: 1886141
cgucgaauaauucgauaaa

SEQ ID NO: 2389863 - RNA, 19 nt, Artificial Sequence
  Description of Artificial Sequence: Synthetic oligonucleotide
  Antisense strand to SEQ ID NO: 2389862
uuuaucgaauuauucgacg

SEQ ID NO: 2389864 - RNA, 19 nt, Artificial Sequence
  Description of Artificial Sequence: Synthetic oligonucleotide
  Sense strand starting at position 1418 of SEQ ID NO: 1886141
gucgaauaauucgauaaag

SEQ ID NO: 2389865 - RNA, 19 nt, Artificial Sequence
  Description of Artificial Sequence: Synthetic oligonucleotide
  Antisense strand to SEQ ID NO: 2389864
cuuuaucgaauuauucgac

SEQ ID NO: 2389866 - RNA, 19 nt, Artificial Sequence
  Description of Artificial Sequence: Synthetic oligonucleotide
  Sense strand starting at position 1420 of SEQ ID NO: 1886141
cgaauaauucgauaaaggc

SEQ ID NO: 2389867 - RNA, 19 nt, Artificial Sequence
  Description of Artificial Sequence: Synthetic oligonucleotide
  Antisense strand to SEQ ID NO: 2389866
gccuuuaucgaauuauucg

SEQ ID NO: 2389868 - RNA, 19 nt, Artificial Sequence
  Description of Artificial Sequence: Synthetic oligonucleotide
  Sense strand starting at position 1429 of SEQ ID NO: 1886141
cgauaaaggccgcauuguu

SEQ ID NO: 2389869 - RNA, 19 nt, Artificial Sequence
  Description of Artificial Sequence: Synthetic oligonucleotide
  Antisense strand to SEQ ID NO: 2389868
aacaaugcggccuuuaucg

SEQ ID NO: 2389870 - RNA, 19 nt, Artificial Sequence
  Description of Artificial Sequence: Synthetic oligonucleotide
  Sense strand starting at position 1566 of SEQ ID NO: 1886141
auuguuccagccugauuua

SEQ ID NO: 2389871 - RNA, 19 nt, Artificial Sequence
  Description of Artificial Sequence: Synthetic oligonucleotide
  Antisense strand to SEQ ID NO: 2389870
uaaaucaggcuggaacaau

SEQ ID NO: 2389872 - RNA, 19 nt, Artificial Sequence
  Description of Artificial Sequence: Synthetic oligonucleotide
  Sense strand starting at position 1898 of SEQ ID NO: 1886141
gcacgcagaaguugugaga

SEQ ID NO: 2389873 - RNA, 19 nt, Artificial Sequence
  Description of Artificial Sequence: Synthetic oligonucleotide
  Antisense strand to SEQ ID NO: 2389872
ucucacaacuucugcgugc

SEQ ID NO: 2389874 - RNA, 19 nt, Artificial Sequence
  Description of Artificial Sequence: Synthetic oligonucleotide
  Sense strand starting at position 1901 of SEQ ID NO: 1886141
cgcagaaguugugagaauc

SEQ ID NO: 2389875 - RNA, 19 nt, Artificial Sequence
  Description of Artificial Sequence: Synthetic oligonucleotide
  Antisense strand to SEQ ID NO: 2389874
gauucucacaacuucugcg

SEQ ID NO: 2389876 - RNA, 19 nt, Artificial Sequence
  Description of Artificial Sequence: Synthetic oligonucleotide
  Sense strand starting at position 2622 of SEQ ID NO: 1886141
aucagaguuugggagacaa

SEQ ID NO: 2389877 - RNA, 19 nt, Artificial Sequence
  Description of Artificial Sequence: Synthetic oligonucleotide
  Antisense strand to SEQ ID NO: 2389876
uugucucccaaacucugau

SEQ ID NO: 2389878 - RNA, 19 nt, Artificial Sequence
  Description of Artificial Sequence: Synthetic oligonucleotide
  Sense strand starting at position 2637 of SEQ ID NO: 1886141
acaagaaugcucgagugac

SEQ ID NO: 2389879 - RNA, 19 nt, Artificial Sequence
  Description of Artificial Sequence: Synthetic oligonucleotide
  Antisense strand to SEQ ID NO: 2389878
gucacucgagcauucuugu

SEQ ID NO: 2389880 - RNA, 19 nt, Artificial Sequence
  Description of Artificial Sequence: Synthetic oligonucleotide
  Sense strand starting at position 2660 of SEQ ID NO: 1886141
uuuagggacgcgugugaua

SEQ ID NO: 2389881 - RNA, 19 nt, Artificial Sequence
  Description of Artificial Sequence: Synthetic oligonucleotide
  Antisense strand to SEQ ID NO: 2389880
uaucacacgcgucccuaaa

SEQ ID NO: 2389882 - RNA, 19 nt, Artificial Sequence
  Description of Artificial Sequence: Synthetic oligonucleotide
  Sense strand starting at position 2882 of SEQ ID NO: 1886141
cucagagguuccucagcua

SEQ ID NO: 2389883 - RNA, 19 nt, Artificial Sequence
  Description of Artificial Sequence: Synthetic oligonucleotide
  Antisense strand to SEQ ID NO: 2389882
uagcugaggaaccucugag

SEQ ID NO: 2389884 - RNA, 19 nt, Artificial Sequence
  Description of Artificial Sequence: Synthetic oligonucleotide
  Sense strand starting at position 3036 of SEQ ID NO: 1886141
cuuggcuccugguuaaauu

SEQ ID NO: 2389885 - RNA, 19 nt, Artificial Sequence
  Description of Artificial Sequence: Synthetic oligonucleotide
  Antisense strand to SEQ ID NO: 2389884
aauuuaaccaggagccaag

SEQ ID NO: 2389886 - RNA, 19 nt, Artificial Sequence
  Description of Artificial Sequence: Synthetic oligonucleotide
  Sense strand starting at position 3207 of SEQ ID NO: 1886141
agcugaauuggugguacca

SEQ ID NO: 2389887 - RNA, 19 nt, Artificial Sequence
  Description of Artificial Sequence: Synthetic oligonucleotide
  Antisense strand to SEQ ID NO: 2389886
ugguaccaccaauucagcu

SEQ ID NO: 2389888 - RNA, 19 nt, Artificial Sequence
  Description of Artificial Sequence: Synthetic oligonucleotide
  Sense strand starting at position 3209 of SEQ ID NO: 1886141
cugaauuggugguaccauu

SEQ ID NO: 2389889 - RNA, 19 nt, Artificial Sequence
  Description of Artificial Sequence: Synthetic oligonucleotide
  Antisense strand to SEQ ID NO: 2389888
aaugguaccaccaauucag

SEQ ID NO: 2389890 - RNA, 19 nt, Artificial Sequence
  Description of Artificial Sequence: Synthetic oligonucleotide
  Sense strand starting at position 3227 of SEQ ID NO: 1886141
ugcagccuuccagauguga

SEQ ID NO: 2389891 - RNA, 19 nt, Artificial Sequence
  Description of Artificial Sequence: Synthetic oligonucleotide
  Antisense strand to SEQ ID NO: 2389890
ucacaucuggaaggcugca

SEQ ID NO: 2389892 - RNA, 19 nt, Artificial Sequence
  Description of Artificial Sequence: Synthetic oligonucleotide
  Sense strand starting at position 3235 of SEQ ID NO: 1886141
uccagaugugaguggccua

SEQ ID NO: 2389893 - RNA, 19 nt, Artificial Sequence
  Description of Artificial Sequence: Synthetic oligonucleotide
  Antisense strand to SEQ ID NO: 2389892
uaggccacucacaucugga

SEQ ID NO: 2389894 - RNA, 19 nt, Artificial Sequence
  Description of Artificial Sequence: Synthetic oligonucleotide
  Sense strand starting at position 3319 of SEQ ID NO: 1886141
agccuugagcccuaugauu

SEQ ID NO: 2389895 - RNA, 19 nt, Artificial Sequence
  Description of Artificial Sequence: Synthetic oligonucleotide
  Antisense strand to SEQ ID NO: 2389894
aaucauagggcucaaggcu

SEQ ID NO: 2389896 - RNA, 19 nt, Artificial Sequence
  Description of Artificial Sequence: Synthetic oligonucleotide
  Sense strand starting at position 3466 of SEQ ID NO: 1886141
gcaaguggauucccagauu

SEQ ID NO: 2389897 - RNA, 19 nt, Artificial Sequence
  Description of Artificial Sequence: Synthetic oligonucleotide
  Antisense strand to SEQ ID NO: 2389896
aaucugggaauccacuugc

SEQ ID NO: 2389898 - RNA, 19 nt, Artificial Sequence
  Description of Artificial Sequence: Synthetic oligonucleotide
  Sense strand starting at position 3477 of SEQ ID NO: 1886141
cccagauuccagcagucaa

SEQ ID NO: 2389899 - RNA, 19 nt, Artificial Sequence
  Description of Artificial Sequence: Synthetic oligonucleotide
  Antisense strand to SEQ ID NO: 2389898
uugacugcuggaaucuggg

SEQ ID NO: 2389900 - RNA, 19 nt, Artificial Sequence
  Description of Artificial Sequence: Synthetic oligonucleotide
  Sense strand starting at position 3628 of SEQ ID NO: 1886141
gcaggauggguuggaaaga

SEQ ID NO: 2389901 - RNA, 19 nt, Artificial Sequence
  Description of Artificial Sequence: Synthetic oligonucleotide
  Antisense strand to SEQ ID NO: 2389900
ucuuuccaacccauccugc

SEQ ID NO: 2389902 - RNA, 19 nt, Artificial Sequence
  Description of Artificial Sequence: Synthetic oligonucleotide
  Sense strand starting at position 3629 of SEQ ID NO: 1886141
caggauggguuggaaagaa

SEQ ID NO: 2389903 - RNA, 19 nt, Artificial Sequence
  Description of Artificial Sequence: Synthetic oligonucleotide
  Antisense strand to SEQ ID NO: 2389902
uucuuuccaacccauccug

SEQ ID NO: 2389904 - RNA, 19 nt, Artificial Sequence
  Description of Artificial Sequence: Synthetic oligonucleotide
  Sense strand starting at position 3784 of SEQ ID NO: 1886141
uugucugugguuuguucua

SEQ ID NO: 2389905 - RNA, 19 nt, Artificial Sequence
  Description of Artificial Sequence: Synthetic oligonucleotide
  Antisense strand to SEQ ID NO: 2389904
uagaacaaaccacagacaa

SEQ ID NO: 2389906 - RNA, 19 nt, Artificial Sequence
  Description of Artificial Sequence: Synthetic oligonucleotide
  Sense strand starting at position 3786 of SEQ ID NO: 1886141
gucugugguuuguucuaau

SEQ ID NO: 2389907 - RNA, 19 nt, Artificial Sequence
  Description of Artificial Sequence: Synthetic oligonucleotide
  Antisense strand to SEQ ID NO: 2389906
auuagaacaaaccacagac

SEQ ID NO: 2389908 - RNA, 19 nt, Artificial Sequence
  Description of Artificial Sequence: Synthetic oligonucleotide
  Sense strand starting at position 3789 of SEQ ID NO: 1886141
ugugguuuguucuaauuuc

SEQ ID NO: 2389909 - RNA, 19 nt, Artificial Sequence
  Description of Artificial Sequence: Synthetic oligonucleotide
  Antisense strand to SEQ ID NO: 2389908
gaaauuagaacaaaccaca

SEQ ID NO: 2389910 - RNA, 19 nt, Artificial Sequence
  Description of Artificial Sequence: Synthetic oligonucleotide
  Sense strand starting at position 3832 of SEQ ID NO: 1886141
gugacauccugcucucauc

SEQ ID NO: 2389911 - RNA, 19 nt, Artificial Sequence
  Description of Artificial Sequence: Synthetic oligonucleotide
  Antisense strand to SEQ ID NO: 2389910
gaugagagcaggaugucac

SEQ ID NO: 2389912 - RNA, 19 nt, Artificial Sequence
  Description of Artificial Sequence: Synthetic oligonucleotide
  Sense strand starting at position 3882 of SEQ ID NO: 1886141
uguacauguuucccucgaa

SEQ ID NO: 2389913 - RNA, 19 nt, Artificial Sequence
  Description of Artificial Sequence: Synthetic oligonucleotide
  Antisense strand to SEQ ID NO: 2389912
uucgagggaaacauguaca

SEQ ID NO: 2389914 - RNA, 19 nt, Artificial Sequence
  Description of Artificial Sequence: Synthetic oligonucleotide
  Sense strand starting at position 3883 of SEQ ID NO: 1886141
guacauguuucccucgaaa

SEQ ID NO: 2389915 - RNA, 19 nt, Artificial Sequence
  Description of Artificial Sequence: Synthetic oligonucleotide
  Antisense strand to SEQ ID NO: 2389914
uuucgagggaaacauguac

SEQ ID NO: 2389916 - RNA, 19 nt, Artificial Sequence
  Description of Artificial Sequence: Synthetic oligonucleotide
  Sense strand starting at position 3885 of SEQ ID NO: 1886141
acauguuucccucgaaauc

SEQ ID NO: 2389917 - RNA, 19 nt, Artificial Sequence
  Description of Artificial Sequence: Synthetic oligonucleotide
  Antisense strand to SEQ ID NO: 2389916
gauuucgagggaaacaugu

SEQ ID NO: 2389918 - RNA, 19 nt, Artificial Sequence
  Description of Artificial Sequence: Synthetic oligonucleotide
  Sense strand starting at position 457 of SEQ ID NO: 1886142
gccagauauuccuuuagag

SEQ ID NO: 2389919 - RNA, 19 nt, Artificial Sequence
  Description of Artificial Sequence: Synthetic oligonucleotide
  Antisense strand to SEQ ID NO: 2389918
cucuaaaggaauaucuggc

SEQ ID NO: 2389920 - RNA, 19 nt, Artificial Sequence
  Description of Artificial Sequence: Synthetic oligonucleotide
  Sense strand starting at position 479 of SEQ ID NO: 1886142
ugcaaaguggacugauaca

SEQ ID NO: 2389921 - RNA, 19 nt, Artificial Sequence
  Description of Artificial Sequence: Synthetic oligonucleotide
  Antisense strand to SEQ ID NO: 2389920
uguaucaguccacuuugca

SEQ ID NO: 2389922 - RNA, 19 nt, Artificial Sequence
  Description of Artificial Sequence: Synthetic oligonucleotide
  Sense strand starting at position 559 of SEQ ID NO: 1886142
ggagcuaaauguguacaca

SEQ ID NO: 2389923 - RNA, 19 nt, Artificial Sequence
  Description of Artificial Sequence: Synthetic oligonucleotide
  Antisense strand to SEQ ID NO: 2389922
uguguacacauuuagcucc

SEQ ID NO: 2389924 - RNA, 19 nt, Artificial Sequence
  Description of Artificial Sequence: Synthetic oligonucleotide
  Sense strand starting at position 560 of SEQ ID NO: 1886142
gagcuaaauguguacacau

SEQ ID NO: 2389925 - RNA, 19 nt, Artificial Sequence
  Description of Artificial Sequence: Synthetic oligonucleotide
  Antisense strand to SEQ ID NO: 2389924
auguguacacauuuagcuc

SEQ ID NO: 2389926 - RNA, 19 nt, Artificial Sequence
  Description of Artificial Sequence: Synthetic oligonucleotide
  Sense strand starting at position 562 of SEQ ID NO: 1886142
gcuaaauguguacacauga

SEQ ID NO: 2389927 - RNA, 19 nt, Artificial Sequence
  Description of Artificial Sequence: Synthetic oligonucleotide
  Antisense strand to SEQ ID NO: 2389926
ucauguguacacauuuagc

SEQ ID NO: 2389928 - RNA, 19 nt, Artificial Sequence
  Description of Artificial Sequence: Synthetic oligonucleotide
  Sense strand starting at position 669 of SEQ ID NO: 1886142
gugcauuauuuagaugaug

SEQ ID NO: 2389929 - RNA, 19 nt, Artificial Sequence
  Description of Artificial Sequence: Synthetic oligonucleotide
  Antisense strand to SEQ ID NO: 2389928
caucaucuaaauaaugcac

SEQ ID NO: 2389930 - RNA, 19 nt, Artificial Sequence
  Description of Artificial Sequence: Synthetic oligonucleotide
  Sense strand starting at position 677 of SEQ ID NO: 1886142
uuuagaugaugguuacacu

SEQ ID NO: 2389931 - RNA, 19 nt, Artificial Sequence
  Description of Artificial Sequence: Synthetic oligonucleotide
  Antisense strand to SEQ ID NO: 2389930
aguguaaccaucaucuaaa

SEQ ID NO: 2389932 - RNA, 19 nt, Artificial Sequence
  Description of Artificial Sequence: Synthetic oligonucleotide
  Sense strand starting at position 1017 of SEQ ID NO: 1886142
acaagacuagcgcaagauu

SEQ ID NO: 2389933 - RNA, 19 nt, Artificial Sequence
  Description of Artificial Sequence: Synthetic oligonucleotide
  Antisense strand to SEQ ID NO: 2389932
aaucuugcgcuagucuugu

SEQ ID NO: 2389934 - RNA, 19 nt, Artificial Sequence
  Description of Artificial Sequence: Synthetic oligonucleotide
  Sense strand starting at position 1477 of SEQ ID NO: 1886142
uucugacaucugugcuaau

SEQ ID NO: 2389935 - RNA, 19 nt, Artificial Sequence
  Description of Artificial Sequence: Synthetic oligonucleotide
  Antisense strand to SEQ ID NO: 2389934
auuagcacagaugucagaa

SEQ ID NO: 2389936 - RNA, 19 nt, Artificial Sequence
  Description of Artificial Sequence: Synthetic oligonucleotide
  Sense strand starting at position 1478 of SEQ ID NO: 1886142
ucugacaucugugcuaaug

SEQ ID NO: 2389937 - RNA, 19 nt, Artificial Sequence
  Description of Artificial Sequence: Synthetic oligonucleotide
  Antisense strand to SEQ ID NO: 2389936
cauuagcacagaugucaga

SEQ ID NO: 2389938 - RNA, 19 nt, Artificial Sequence
  Description of Artificial Sequence: Synthetic oligonucleotide
  Sense strand starting at position 1513 of SEQ ID NO: 1886142
ccguacuuagcauaaagaa

SEQ ID NO: 2389939 - RNA, 19 nt, Artificial Sequence
  Description of Artificial Sequence: Synthetic oligonucleotide
  Antisense strand to SEQ ID NO: 2389938
uucuuuaugcuaaguacgg

SEQ ID NO: 2389940 - RNA, 19 nt, Artificial Sequence
  Description of Artificial Sequence: Synthetic oligonucleotide
  Sense strand starting at position 1680 of SEQ ID NO: 1886142
auagaaggaugguaacaua

SEQ ID NO: 2389941 - RNA, 19 nt, Artificial Sequence
  Description of Artificial Sequence: Synthetic oligonucleotide
  Antisense strand to SEQ ID NO: 2389940
uauguuaccauccuucuau

SEQ ID NO: 2389942 - RNA, 19 nt, Artificial Sequence
  Description of Artificial Sequence: Synthetic oligonucleotide
  Sense strand starting at position 1706 of SEQ ID NO: 1886142
ccuggcaucaggugucaaa

SEQ ID NO: 2389943 - RNA, 19 nt, Artificial Sequence
  Description of Artificial Sequence: Synthetic oligonucleotide
  Antisense strand to SEQ ID NO: 2389942
uuugacaccugaugccagg

SEQ ID NO: 2389944 - RNA, 19 nt, Artificial Sequence
  Description of Artificial Sequence: Synthetic oligonucleotide
  Sense strand starting at position 1758 of SEQ ID NO: 1886142
aaagaagaguacguagauu

SEQ ID NO: 2389945 - RNA, 19 nt, Artificial Sequence
  Description of Artificial Sequence: Synthetic oligonucleotide
  Antisense strand to SEQ ID NO: 2389944
aaucuacguacucuucuuu

SEQ ID NO: 2389946 - RNA, 19 nt, Artificial Sequence
  Description of Artificial Sequence: Synthetic oligonucleotide
  Sense strand starting at position 1770 of SEQ ID NO: 1886142
guagauuuaugacaaacau

SEQ ID NO: 2389947 - RNA, 19 nt, Artificial Sequence
  Description of Artificial Sequence: Synthetic oligonucleotide
  Antisense strand to SEQ ID NO: 2389946
auguuugucauaaaucuac

SEQ ID NO: 2389948 - RNA, 19 nt, Artificial Sequence
  Description of Artificial Sequence: Synthetic oligonucleotide
  Sense strand starting at position 1821 of SEQ ID NO: 1886142
ccagauaguucucuuugau

SEQ ID NO: 2389949 - RNA, 19 nt, Artificial Sequence
  Description of Artificial Sequence: Synthetic oligonucleotide
  Antisense strand to SEQ ID NO: 2389948
aucaaagagaacuaucugg

SEQ ID NO: 2389950 - RNA, 19 nt, Artificial Sequence
  Description of Artificial Sequence: Synthetic oligonucleotide
  Sense strand starting at position 1872 of SEQ ID NO: 1886142
gcaagacacuuaucaggua

SEQ ID NO: 2389951 - RNA, 19 nt, Artificial Sequence
  Description of Artificial Sequence: Synthetic oligonucleotide
  Antisense strand to SEQ ID NO: 2389950
uaccugauaagugucuugc

SEQ ID NO: 2389952 - RNA, 19 nt, Artificial Sequence
  Description of Artificial Sequence: Synthetic oligonucleotide
  Sense strand starting at position 1920 of SEQ ID NO: 1886142
ugcuucugggcacauuaau

SEQ ID NO: 2389953 - RNA, 19 nt, Artificial Sequence
  Description of Artificial Sequence: Synthetic oligonucleotide
  Antisense strand to SEQ ID NO: 2389952
auuaaugugcccagaagca

SEQ ID NO: 2389954 - RNA, 19 nt, Artificial Sequence
  Description of Artificial Sequence: Synthetic oligonucleotide
  Sense strand starting at position 2023 of SEQ ID NO: 1886142
aguuguaaucauggacaaa

SEQ ID NO: 2389955 - RNA, 19 nt, Artificial Sequence
  Description of Artificial Sequence: Synthetic oligonucleotide
  Antisense strand to SEQ ID NO: 2389954
uuuguccaugauuacaacu

SEQ ID NO: 2389956 - RNA, 19 nt, Artificial Sequence
  Description of Artificial Sequence: Synthetic oligonucleotide
  Sense strand starting at position 2037 of SEQ ID NO: 1886142
acaaauuuguagucugcuu

SEQ ID NO: 2389957 - RNA, 19 nt, Artificial Sequence
  Description of Artificial Sequence: Synthetic oligonucleotide
  Antisense strand to SEQ ID NO: 2389956
aagcagacuacaaauuugu

SEQ ID NO: 2389958 - RNA, 19 nt, Artificial Sequence
  Description of Artificial Sequence: Synthetic oligonucleotide
  Sense strand starting at position 2073 of SEQ ID NO: 1886142
guuauaaacuguuccauac

SEQ ID NO: 2389959 - RNA, 19 nt, Artificial Sequence
  Description of Artificial Sequence: Synthetic oligonucleotide
  Antisense strand to SEQ ID NO: 2389958
guauggaacaguuuauaac

SEQ ID NO: 2389960 - RNA, 19 nt, Artificial Sequence
  Description of Artificial Sequence: Synthetic oligonucleotide
  Sense strand starting at position 2489 of SEQ ID NO: 1886142
ccuguugguggacauguaa

SEQ ID NO: 2389961 - RNA, 19 nt, Artificial Sequence
  Description of Artificial Sequence: Synthetic oligonucleotide
  Antisense strand to SEQ ID NO: 2389960
uuacauguccaccaacagg

SEQ ID NO: 2389962 - RNA, 19 nt, Artificial Sequence
  Description of Artificial Sequence: Synthetic oligonucleotide
  Sense strand starting at position 2573 of SEQ ID NO: 1886142
ggcauuaucuuguuugacc

SEQ ID NO: 2389963 - RNA, 19 nt, Artificial Sequence
  Description of Artificial Sequence: Synthetic oligonucleotide
  Antisense strand to SEQ ID NO: 2389962
ggucaaacaagauaaugcc

SEQ ID NO: 2389964 - RNA, 19 nt, Artificial Sequence
  Description of Artificial Sequence: Synthetic oligonucleotide
  Sense strand starting at position 2582 of SEQ ID NO: 1886142
uuguuugacccucaugauc

SEQ ID NO: 2389965 - RNA, 19 nt, Artificial Sequence
  Description of Artificial Sequence: Synthetic oligonucleotide
  Antisense strand to SEQ ID NO: 2389964
gaucaugagggucaaacaa

SEQ ID NO: 2389966 - RNA, 19 nt, Artificial Sequence
  Description of Artificial Sequence: Synthetic oligonucleotide
  Sense strand starting at position 2619 of SEQ ID NO: 1886142
uguucuagucuugggaaca

SEQ ID NO: 2389967 - RNA, 19 nt, Artificial Sequence
  Description of Artificial Sequence: Synthetic oligonucleotide
  Antisense strand to SEQ ID NO: 2389966
uguucccaagacuagaaca

SEQ ID NO: 2389968 - RNA, 19 nt, Artificial Sequence
  Description of Artificial Sequence: Synthetic oligonucleotide
  Sense strand starting at position 2735 of SEQ ID NO: 1886142
uuaaauguugaaggaguuu

SEQ ID NO: 2389969 - RNA, 19 nt, Artificial Sequence
  Description of Artificial Sequence: Synthetic oligonucleotide
  Antisense strand to SEQ ID NO: 2389968
aaacuccuucaacauuuaa

SEQ ID NO: 2389970 - RNA, 19 nt, Artificial Sequence
  Description of Artificial Sequence: Synthetic oligonucleotide
  Sense strand starting at position 2759 of SEQ ID NO: 1886142
uugaaaguguuugcuauac

SEQ ID NO: 2389971 - RNA, 19 nt, Artificial Sequence
  Description of Artificial Sequence: Synthetic oligonucleotide
  Antisense strand to SEQ ID NO: 2389970
guauagcaaacacuuucaa

SEQ ID NO: 2389972 - RNA, 19 nt, Artificial Sequence
  Description of Artificial Sequence: Synthetic oligonucleotide
  Sense strand starting at position 3276 of SEQ ID NO: 1886142
ccgagaacauuugagcaaa

SEQ ID NO: 2389973 - RNA, 19 nt, Artificial Sequence
  Description of Artificial Sequence: Synthetic oligonucleotide
  Antisense strand to SEQ ID NO: 2389972
uuugcucaaauguucucgg

SEQ ID NO: 2389974 - RNA, 19 nt, Artificial Sequence
  Description of Artificial Sequence: Synthetic oligonucleotide
  Sense strand starting at position 3362 of SEQ ID NO: 1886142
ucucgcuaugccguuagaa

SEQ ID NO: 2389975 - RNA, 19 nt, Artificial Sequence
  Description of Artificial Sequence: Synthetic oligonucleotide
  Antisense strand to SEQ ID NO: 2389974
uucuaacggcauagcgaga

SEQ ID NO: 2389976 - RNA, 19 nt, Artificial Sequence
  Description of Artificial Sequence: Synthetic oligonucleotide
  Sense strand starting at position 3363 of SEQ ID NO: 1886142
cucgcuaugccguuagaaa

SEQ ID NO: 2389977 - RNA, 19 nt, Artificial Sequence
  Description of Artificial Sequence: Synthetic oligonucleotide
  Antisense strand to SEQ ID NO: 2389976
uuucuaacggcauagcgag

SEQ ID NO: 2389978 - RNA, 19 nt, Artificial Sequence
  Description of Artificial Sequence: Synthetic oligonucleotide
  Sense strand starting at position 3415 of SEQ ID NO: 1886142
gcuggugaaacuuguauau

SEQ ID NO: 2389979 - RNA, 19 nt, Artificial Sequence
  Description of Artificial Sequence: Synthetic oligonucleotide
  Antisense strand to SEQ ID NO: 2389978
auauacaaguuucaccagc

SEQ ID NO: 2389980 - RNA, 19 nt, Artificial Sequence
  Description of Artificial Sequence: Synthetic oligonucleotide
  Sense strand starting at position 3595 of SEQ ID NO: 1886142
uggaaagaucacugcagca

SEQ ID NO: 2389981 - RNA, 19 nt, Artificial Sequence
  Description of Artificial Sequence: Synthetic oligonucleotide
  Antisense strand to SEQ ID NO: 2389980
ugcugcagugaucuuucca

SEQ ID NO: 2389982 - RNA, 19 nt, Artificial Sequence
  Description of Artificial Sequence: Synthetic oligonucleotide
  Sense strand starting at position 3597 of SEQ ID NO: 1886142
gaaagaucacugcagcagu

SEQ ID NO: 2389983 - RNA, 19 nt, Artificial Sequence
  Description of Artificial Sequence: Synthetic oligonucleotide
  Antisense strand to SEQ ID NO: 2389982
acugcugcagugaucuuuc

SEQ ID NO: 2389984 - RNA, 19 nt, Artificial Sequence
  Description of Artificial Sequence: Synthetic oligonucleotide
  Sense strand starting at position 3613 of SEQ ID NO: 1886142
aguauccauuugucuuagu

SEQ ID NO: 2389985 - RNA, 19 nt, Artificial Sequence
  Description of Artificial Sequence: Synthetic oligonucleotide
  Antisense strand to SEQ ID NO: 2389984
acuaagacaaauggauacu

SEQ ID NO: 2389986 - RNA, 19 nt, Artificial Sequence
  Description of Artificial Sequence: Synthetic oligonucleotide
  Sense strand starting at position 3618 of SEQ ID NO: 1886142
ccauuugucuuagucaggu

SEQ ID NO: 2389987 - RNA, 19 nt, Artificial Sequence
  Description of Artificial Sequence: Synthetic oligonucleotide
  Antisense strand to SEQ ID NO: 2389986
accugacuaagacaaaugg

SEQ ID NO: 2389988 - RNA, 19 nt, Artificial Sequence
  Description of Artificial Sequence: Synthetic oligonucleotide
  Sense strand starting at position 3626 of SEQ ID NO: 1886142
cuuagucaggucuaaccuu

SEQ ID NO: 2389989 - RNA, 19 nt, Artificial Sequence
  Description of Artificial Sequence: Synthetic oligonucleotide
  Antisense strand to SEQ ID NO: 2389988
aagguuagaccugacuaag

SEQ ID NO: 2389990 - RNA, 19 nt, Artificial Sequence
  Description of Artificial Sequence: Synthetic oligonucleotide
  Sense strand starting at position 3634 of SEQ ID NO: 1886142
ggucuaaccuuagucaggu

SEQ ID NO: 2389991 - RNA, 19 nt, Artificial Sequence
  Description of Artificial Sequence: Synthetic oligonucleotide
  Antisense strand to SEQ ID NO: 2389990
accugacuaagguuagacc

SEQ ID NO: 2389992 - RNA, 19 nt, Artificial Sequence
  Description of Artificial Sequence: Synthetic oligonucleotide
  Sense strand starting at position 3670 of SEQ ID NO: 1886142
gagguuggagucugagaau

SEQ ID NO: 2389993 - RNA, 19 nt, Artificial Sequence
  Description of Artificial Sequence: Synthetic oligonucleotide
  Antisense strand to SEQ ID NO: 2389992
auucucagacuccaaccuc

SEQ ID NO: 2389994 - RNA, 19 nt, Artificial Sequence
  Description of Artificial Sequence: Synthetic oligonucleotide
  Sense strand starting at position 3702 of SEQ ID NO: 1886142
gguccaguucugggagaaa

SEQ ID NO: 2389995 - RNA, 19 nt, Artificial Sequence
  Description of Artificial Sequence: Synthetic oligonucleotide
  Antisense strand to SEQ ID NO: 2389994
uuucucccagaacuggacc

SEQ ID NO: 2389996 - RNA, 19 nt, Artificial Sequence
  Description of Artificial Sequence: Synthetic oligonucleotide
  Sense strand starting at position 3732 of SEQ ID NO: 1886142
ggucuccagcuguauuaau

SEQ ID NO: 2389997 - RNA, 19 nt, Artificial Sequence
  Description of Artificial Sequence: Synthetic oligonucleotide
  Antisense strand to SEQ ID NO: 2389996
auuaauacagcuggagacc

SEQ ID NO: 2389998 - RNA, 19 nt, Artificial Sequence
  Description of Artificial Sequence: Synthetic oligonucleotide
  Sense strand starting at position 24 of SEQ ID NO: 1886143
uagguaaagcucugaauac

SEQ ID NO: 2389999 - RNA, 19 nt, Artificial Sequence
  Description of Artificial Sequence: Synthetic oligonucleotide
  Antisense strand to SEQ ID NO: 2389998
guauucagagcuuuaccua

SEQ ID NO: 2390000 - RNA, 19 nt, Artificial Sequence
  Description of Artificial Sequence: Synthetic oligonucleotide
  Sense strand starting at position 76 of SEQ ID NO: 1886143
gaccuacaagagugauauu

SEQ ID NO: 2390001 - RNA, 19 nt, Artificial Sequence
  Description of Artificial Sequence: Synthetic oligonucleotide
  Antisense strand to SEQ ID NO: 2390000
aauaucacucuuguagguc

SEQ ID NO: 2390002 - RNA, 19 nt, Artificial Sequence
  Description of Artificial Sequence: Synthetic oligonucleotide
  Sense strand starting at position 138 of SEQ ID NO: 1886143
agaccuguccaaggauaua

SEQ ID NO: 2390003 - RNA, 19 nt, Artificial Sequence
  Description of Artificial Sequence: Synthetic oligonucleotide
  Antisense strand to SEQ ID NO: 2390002
uauauccuuggacaggucu

SEQ ID NO: 2390004 - RNA, 19 nt, Artificial Sequence
  Description of Artificial Sequence: Synthetic oligonucleotide
  Sense strand starting at position 384 of SEQ ID NO: 1886143
gguguuuaccuuuaucaua

SEQ ID NO: 2390005 - RNA, 19 nt, Artificial Sequence
  Description of Artificial Sequence: Synthetic oligonucleotide
  Antisense strand to SEQ ID NO: 2390004
uaugauaaagguaaacacc

SEQ ID NO: 2390006 - RNA, 19 nt, Artificial Sequence
  Description of Artificial Sequence: Synthetic oligonucleotide
  Sense strand starting at position 458 of SEQ ID NO: 1886143
gcuccuuuagagcaacaau

SEQ ID NO: 2390007 - RNA, 19 nt, Artificial Sequence
  Description of Artificial Sequence: Synthetic oligonucleotide
  Antisense strand to SEQ ID NO: 2390006
auuguugcucuaaaggagc

SEQ ID NO: 2390008 - RNA, 19 nt, Artificial Sequence
  Description of Artificial Sequence: Synthetic oligonucleotide
  Sense strand starting at position 500 of SEQ ID NO: 1886143
ccaguauauagccaagugu

SEQ ID NO: 2390009 - RNA, 19 nt, Artificial Sequence
  Description of Artificial Sequence: Synthetic oligonucleotide
  Antisense strand to SEQ ID NO: 2390008
acacuuggcuauauacugg

SEQ ID NO: 2390010 - RNA, 19 nt, Artificial Sequence
  Description of Artificial Sequence: Synthetic oligonucleotide
  Sense strand starting at position 543 of SEQ ID NO: 1886143
gugaaugaauuagcuaaau

SEQ ID NO: 2390011 - RNA, 19 nt, Artificial Sequence
  Description of Artificial Sequence: Synthetic oligonucleotide
  Antisense strand to SEQ ID NO: 2390010
auuuagcuaauucauucac

SEQ ID NO: 2390012 - RNA, 19 nt, Artificial Sequence
  Description of Artificial Sequence: Synthetic oligonucleotide
  Sense strand starting at position 651 of SEQ ID NO: 1886143
uucuguuugaacgaacgaa

SEQ ID NO: 2390013 - RNA, 19 nt, Artificial Sequence
  Description of Artificial Sequence: Synthetic oligonucleotide
  Antisense strand to SEQ ID NO: 2390012
uucguucguucaaacagaa

SEQ ID NO: 2390014 - RNA, 19 nt, Artificial Sequence
  Description of Artificial Sequence: Synthetic oligonucleotide
  Sense strand starting at position 655 of SEQ ID NO: 1886143
guuugaacgaacgaauuaa

SEQ ID NO: 2390015 - RNA, 19 nt, Artificial Sequence
  Description of Artificial Sequence: Synthetic oligonucleotide
  Antisense strand to SEQ ID NO: 2390014
uuaauucguucguucaaac

SEQ ID NO: 2390016 - RNA, 19 nt, Artificial Sequence
  Description of Artificial Sequence: Synthetic oligonucleotide
  Sense strand starting at position 677 of SEQ ID NO: 1886143
cuguauagauucccucaua

SEQ ID NO: 2390017 - RNA, 19 nt, Artificial Sequence
  Description of Artificial Sequence: Synthetic oligonucleotide
  Antisense strand to SEQ ID NO: 2390016
uaugagggaaucuauacag

SEQ ID NO: 2390018 - RNA, 19 nt, Artificial Sequence
  Description of Artificial Sequence: Synthetic oligonucleotide
  Sense strand starting at position 678 of SEQ ID NO: 1886143
uguauagauucccucauac

SEQ ID NO: 2390019 - RNA, 19 nt, Artificial Sequence
  Description of Artificial Sequence: Synthetic oligonucleotide
  Antisense strand to SEQ ID NO: 2390018
guaugagggaaucuauaca

SEQ ID NO: 2390020 - RNA, 19 nt, Artificial Sequence
  Description of Artificial Sequence: Synthetic oligonucleotide
  Sense strand starting at position 772 of SEQ ID NO: 1886143
ugaguaaauaacggauaau

SEQ ID NO: 2390021 - RNA, 19 nt, Artificial Sequence
  Description of Artificial Sequence: Synthetic oligonucleotide
  Antisense strand to SEQ ID NO: 2390020
auuauccguuauuuacuca

SEQ ID NO: 2390022 - RNA, 19 nt, Artificial Sequence
  Description of Artificial Sequence: Synthetic oligonucleotide
  Sense strand starting at position 857 of SEQ ID NO: 1886143
aauaucuggugucucugaa

SEQ ID NO: 2390023 - RNA, 19 nt, Artificial Sequence
  Description of Artificial Sequence: Synthetic oligonucleotide
  Antisense strand to SEQ ID NO: 2390022
uucagagacaccagauauu

SEQ ID NO: 2390024 - RNA, 19 nt, Artificial Sequence
  Description of Artificial Sequence: Synthetic oligonucleotide
  Sense strand starting at position 874 of SEQ ID NO: 1886143
aagcaugaugcugggaaga

SEQ ID NO: 2390025 - RNA, 19 nt, Artificial Sequence
  Description of Artificial Sequence: Synthetic oligonucleotide
  Antisense strand to SEQ ID NO: 2390024
ucuucccagcaucaugcuu

SEQ ID NO: 2390026 - RNA, 19 nt, Artificial Sequence
  Description of Artificial Sequence: Synthetic oligonucleotide
  Sense strand starting at position 888 of SEQ ID NO: 1886143
gaagacagaucaucaguuu

SEQ ID NO: 2390027 - RNA, 19 nt, Artificial Sequence
  Description of Artificial Sequence: Synthetic oligonucleotide
  Antisense strand to SEQ ID NO: 2390026
aaacugaugaucugucuuc

SEQ ID NO: 2390028 - RNA, 19 nt, Artificial Sequence
  Description of Artificial Sequence: Synthetic oligonucleotide
  Sense strand starting at position 891 of SEQ ID NO: 1886143
gacagaucaucaguuugac

SEQ ID NO: 2390029 - RNA, 19 nt, Artificial Sequence
  Description of Artificial Sequence: Synthetic oligonucleotide
  Antisense strand to SEQ ID NO: 2390028
gucaaacugaugaucuguc

SEQ ID NO: 2390030 - RNA, 19 nt, Artificial Sequence
  Description of Artificial Sequence: Synthetic oligonucleotide
  Sense strand starting at position 894 of SEQ ID NO: 1886143
agaucaucaguuugacuua

SEQ ID NO: 2390031 - RNA, 19 nt, Artificial Sequence
  Description of Artificial Sequence: Synthetic oligonucleotide
  Antisense strand to SEQ ID NO: 2390030
uaagucaaacugaugaucu

SEQ ID NO: 2390032 - RNA, 19 nt, Artificial Sequence
  Description of Artificial Sequence: Synthetic oligonucleotide
  Sense strand starting at position 960 of SEQ ID NO: 1886143
uuccucuggugucuaacaa

SEQ ID NO: 2390033 - RNA, 19 nt, Artificial Sequence
  Description of Artificial Sequence: Synthetic oligonucleotide
  Antisense strand to SEQ ID NO: 2390032
uuguuagacaccagaggaa

SEQ ID NO: 2390034 - RNA, 19 nt, Artificial Sequence
  Description of Artificial Sequence: Synthetic oligonucleotide
  Sense strand starting at position 961 of SEQ ID NO: 1886143
uccucuggugucuaacaaa

SEQ ID NO: 2390035 - RNA, 19 nt, Artificial Sequence
  Description of Artificial Sequence: Synthetic oligonucleotide
  Antisense strand to SEQ ID NO: 2390034
uuuguuagacaccagagga

SEQ ID NO: 2390036 - RNA, 19 nt, Artificial Sequence
  Description of Artificial Sequence: Synthetic oligonucleotide
  Sense strand starting at position 1018 of SEQ ID NO: 1886143
acaggauaugacugccauu

SEQ ID NO: 2390037 - RNA, 19 nt, Artificial Sequence
  Description of Artificial Sequence: Synthetic oligonucleotide
  Antisense strand to SEQ ID NO: 2390036
aauggcagucauauccugu

SEQ ID NO: 2390038 - RNA, 19 nt, Artificial Sequence
  Description of Artificial Sequence: Synthetic oligonucleotide
  Sense strand starting at position 1082 of SEQ ID NO: 1886143
agugcaguuggugaaagua

SEQ ID NO: 2390039 - RNA, 19 nt, Artificial Sequence
  Description of Artificial Sequence: Synthetic oligonucleotide
  Antisense strand to SEQ ID NO: 2390038
uacuuucaccaacugcacu

SEQ ID NO: 2390040 - RNA, 19 nt, Artificial Sequence
  Description of Artificial Sequence: Synthetic oligonucleotide
  Sense strand starting at position 1103 of SEQ ID NO: 1886143
gaaacagaggucugcuaac

SEQ ID NO: 2390041 - RNA, 19 nt, Artificial Sequence
  Description of Artificial Sequence: Synthetic oligonucleotide
  Antisense strand to SEQ ID NO: 2390040
guuagcagaccucuguuuc

SEQ ID NO: 2390042 - RNA, 19 nt, Artificial Sequence
  Description of Artificial Sequence: Synthetic oligonucleotide
  Sense strand starting at position 1190 of SEQ ID NO: 1886143
ggauaugauagccaagucu

SEQ ID NO: 2390043 - RNA, 19 nt, Artificial Sequence
  Description of Artificial Sequence: Synthetic oligonucleotide
  Antisense strand to SEQ ID NO: 2390042
agacuuggcuaucauaucc

SEQ ID NO: 2390044 - RNA, 19 nt, Artificial Sequence
  Description of Artificial Sequence: Synthetic oligonucleotide
  Sense strand starting at position 1302 of SEQ ID NO: 1886143
ccuccauaugcuuagugaa

SEQ ID NO: 2390045 - RNA, 19 nt, Artificial Sequence
  Description of Artificial Sequence: Synthetic oligonucleotide
  Antisense strand to SEQ ID NO: 2390044
uucacuaagcauauggagg

SEQ ID NO: 2390046 - RNA, 19 nt, Artificial Sequence
  Description of Artificial Sequence: Synthetic oligonucleotide
  Sense strand starting at position 1312 of SEQ ID NO: 1886143
cuuagugaaguccagucaa

SEQ ID NO: 2390047 - RNA, 19 nt, Artificial Sequence
  Description of Artificial Sequence: Synthetic oligonucleotide
  Antisense strand to SEQ ID NO: 2390046
uugacuggacuucacuaag

SEQ ID NO: 2390048 - RNA, 19 nt, Artificial Sequence
  Description of Artificial Sequence: Synthetic oligonucleotide
  Sense strand starting at position 1416 of SEQ ID NO: 1886143
cuaauauaaccggagucuu

SEQ ID NO: 2390049 - RNA, 19 nt, Artificial Sequence
  Description of Artificial Sequence: Synthetic oligonucleotide
  Antisense strand to SEQ ID NO: 2390048
aagacuccgguuauauuag

SEQ ID NO: 2390050 - RNA, 19 nt, Artificial Sequence
  Description of Artificial Sequence: Synthetic oligonucleotide
  Sense strand starting at position 2481 of SEQ ID NO: 1886143
ccgauuuccuucuugugca

SEQ ID NO: 2390051 - RNA, 19 nt, Artificial Sequence
  Description of Artificial Sequence: Synthetic oligonucleotide
  Antisense strand to SEQ ID NO: 2390050
ugcacaagaaggaaaucgg

SEQ ID NO: 2390052 - RNA, 19 nt, Artificial Sequence
  Description of Artificial Sequence: Synthetic oligonucleotide
  Sense strand starting at position 2498 of SEQ ID NO: 1886143
caaacaucagaguguaguu

SEQ ID NO: 2390053 - RNA, 19 nt, Artificial Sequence
  Description of Artificial Sequence: Synthetic oligonucleotide
  Antisense strand to SEQ ID NO: 2390052
aacuacacucugauguuug

SEQ ID NO: 2390054 - RNA, 19 nt, Artificial Sequence
  Description of Artificial Sequence: Synthetic oligonucleotide
  Sense strand starting at position 2508 of SEQ ID NO: 1886143
aguguaguuacacaaaguu

SEQ ID NO: 2390055 - RNA, 19 nt, Artificial Sequence
  Description of Artificial Sequence: Synthetic oligonucleotide
  Antisense strand to SEQ ID NO: 2390054
aacuuuguguaacuacacu

SEQ ID NO: 2390056 - RNA, 19 nt, Artificial Sequence
  Description of Artificial Sequence: Synthetic oligonucleotide
  Sense strand starting at position 2642 of SEQ ID NO: 1886143
cuaccacaucaguagguau

SEQ ID NO: 2390057 - RNA, 19 nt, Artificial Sequence
  Description of Artificial Sequence: Synthetic oligonucleotide
  Antisense strand to SEQ ID NO: 2390056
auaccuacugaugugguag

SEQ ID NO: 2390058 - RNA, 19 nt, Artificial Sequence
  Description of Artificial Sequence: Synthetic oligonucleotide
  Sense strand starting at position 2644 of SEQ ID NO: 1886143
accacaucaguagguauua

SEQ ID NO: 2390059 - RNA, 19 nt, Artificial Sequence
  Description of Artificial Sequence: Synthetic oligonucleotide
  Antisense strand to SEQ ID NO: 2390058
uaauaccuacugauguggu

SEQ ID NO: 2390060 - RNA, 19 nt, Artificial Sequence
  Description of Artificial Sequence: Synthetic oligonucleotide
  Sense strand starting at position 2717 of SEQ ID NO: 1886143
uccuuaugugaugaaugua

SEQ ID NO: 2390061 - RNA, 19 nt, Artificial Sequence
  Description of Artificial Sequence: Synthetic oligonucleotide
  Antisense strand to SEQ ID NO: 2390060
uacauucaucacauaagga

SEQ ID NO: 2390062 - RNA, 19 nt, Artificial Sequence
  Description of Artificial Sequence: Synthetic oligonucleotide
  Sense strand starting at position 2720 of SEQ ID NO: 1886143
uuaugugaugaauguauag

SEQ ID NO: 2390063 - RNA, 19 nt, Artificial Sequence
  Description of Artificial Sequence: Synthetic oligonucleotide
  Antisense strand to SEQ ID NO: 2390062
cuauacauucaucacauaa

SEQ ID NO: 2390064 - RNA, 19 nt, Artificial Sequence
  Description of Artificial Sequence: Synthetic oligonucleotide
  Sense strand starting at position 2765 of SEQ ID NO: 1886143
aagcaauaacuguagugua

SEQ ID NO: 2390065 - RNA, 19 nt, Artificial Sequence
  Description of Artificial Sequence: Synthetic oligonucleotide
  Antisense strand to SEQ ID NO: 2390064
uacacuacaguuauugcuu

SEQ ID NO: 2390066 - RNA, 19 nt, Artificial Sequence
  Description of Artificial Sequence: Synthetic oligonucleotide
  Sense strand starting at position 2823 of SEQ ID NO: 1886143
agguaauagugcccacaua

SEQ ID NO: 2390067 - RNA, 19 nt, Artificial Sequence
  Description of Artificial Sequence: Synthetic oligonucleotide
  Antisense strand to SEQ ID NO: 2390066
uaugugggcacuauuaccu

SEQ ID NO: 2390068 - RNA, 19 nt, Artificial Sequence
  Description of Artificial Sequence: Synthetic oligonucleotide
  Sense strand starting at position 2824 of SEQ ID NO: 1886143
gguaauagugcccacauag

SEQ ID NO: 2390069 - RNA, 19 nt, Artificial Sequence
  Description of Artificial Sequence: Synthetic oligonucleotide
  Antisense strand to SEQ ID NO: 2390068
cuaugugggcacuauuacc

SEQ ID NO: 2390070 - RNA, 19 nt, Artificial Sequence
  Description of Artificial Sequence: Synthetic oligonucleotide
  Sense strand starting at position 2851 of SEQ ID NO: 1886143
uguuauaaccaucagugac

SEQ ID NO: 2390071 - RNA, 19 nt, Artificial Sequence
  Description of Artificial Sequence: Synthetic oligonucleotide
  Antisense strand to SEQ ID NO: 2390070
gucacugaugguuauaaca

SEQ ID NO: 2390072 - RNA, 19 nt, Artificial Sequence
  Description of Artificial Sequence: Synthetic oligonucleotide
  Sense strand starting at position 2967 of SEQ ID NO: 1886143
agaaacuguuaagucuuaa

SEQ ID NO: 2390073 - RNA, 19 nt, Artificial Sequence
  Description of Artificial Sequence: Synthetic oligonucleotide
  Antisense strand to SEQ ID NO: 2390072
uuaagacuuaacaguuucu

SEQ ID NO: 2390074 - RNA, 19 nt, Artificial Sequence
  Description of Artificial Sequence: Synthetic oligonucleotide
  Sense strand starting at position 3035 of SEQ ID NO: 1886143
agaugugacuuccuaagaa

SEQ ID NO: 2390075 - RNA, 19 nt, Artificial Sequence
  Description of Artificial Sequence: Synthetic oligonucleotide
  Antisense strand to SEQ ID NO: 2390074
uucuuaggaagucacaucu

SEQ ID NO: 2390076 - RNA, 19 nt, Artificial Sequence
  Description of Artificial Sequence: Synthetic oligonucleotide
  Sense strand starting at position 3328 of SEQ ID NO: 1886143
guuagaacacgaggucuaa

SEQ ID NO: 2390077 - RNA, 19 nt, Artificial Sequence
  Description of Artificial Sequence: Synthetic oligonucleotide
  Antisense strand to SEQ ID NO: 2390076
uuagaccucguguucuaac

SEQ ID NO: 2390078 - RNA, 19 nt, Artificial Sequence
  Description of Artificial Sequence: Synthetic oligonucleotide
  Sense strand starting at position 18 of SEQ ID NO: 1886144
ggcgaauuauaagcaauau

SEQ ID NO: 2390079 - RNA, 19 nt, Artificial Sequence
  Description of Artificial Sequence: Synthetic oligonucleotide
  Antisense strand to SEQ ID NO: 2390078
auauugcuuauaauucgcc

SEQ ID NO: 2390080 - RNA, 19 nt, Artificial Sequence
  Description of Artificial Sequence: Synthetic oligonucleotide
  Sense strand starting at position 303 of SEQ ID NO: 1886144
gcauguauacucguguuua

SEQ ID NO: 2390081 - RNA, 19 nt, Artificial Sequence
  Description of Artificial Sequence: Synthetic oligonucleotide
  Antisense strand to SEQ ID NO: 2390080
uaaacacgaguauacaugc

SEQ ID NO: 2390082 - RNA, 19 nt, Artificial Sequence
  Description of Artificial Sequence: Synthetic oligonucleotide
  Sense strand starting at position 308 of SEQ ID NO: 1886144
uauacucguguuuagauau

SEQ ID NO: 2390083 - RNA, 19 nt, Artificial Sequence
  Description of Artificial Sequence: Synthetic oligonucleotide
  Antisense strand to SEQ ID NO: 2390082
auaucuaaacacgaguaua

SEQ ID NO: 2390084 - RNA, 19 nt, Artificial Sequence
  Description of Artificial Sequence: Synthetic oligonucleotide
  Sense strand starting at position 314 of SEQ ID NO: 1886144
cguguuuagauaugaauag

SEQ ID NO: 2390085 - RNA, 19 nt, Artificial Sequence
  Description of Artificial Sequence: Synthetic oligonucleotide
  Antisense strand to SEQ ID NO: 2390084
cuauucauaucuaaacacg

SEQ ID NO: 2390086 - RNA, 19 nt, Artificial Sequence
  Description of Artificial Sequence: Synthetic oligonucleotide
  Sense strand starting at position 685 of SEQ ID NO: 1886144
agaccuuucccuugucuau

SEQ ID NO: 2390087 - RNA, 19 nt, Artificial Sequence
  Description of Artificial Sequence: Synthetic oligonucleotide
  Antisense strand to SEQ ID NO: 2390086
auagacaagggaaaggucu

SEQ ID NO: 2390088 - RNA, 19 nt, Artificial Sequence
  Description of Artificial Sequence: Synthetic oligonucleotide
  Sense strand starting at position 733 of SEQ ID NO: 1886144
ugcucugaggcauaacaga

SEQ ID NO: 2390089 - RNA, 19 nt, Artificial Sequence
  Description of Artificial Sequence: Synthetic oligonucleotide
  Antisense strand to SEQ ID NO: 2390088
ucuguuaugccucagagca

SEQ ID NO: 2390090 - RNA, 19 nt, Artificial Sequence
  Description of Artificial Sequence: Synthetic oligonucleotide
  Sense strand starting at position 808 of SEQ ID NO: 1886144
gagguaggcauaugaaagu

SEQ ID NO: 2390091 - RNA, 19 nt, Artificial Sequence
  Description of Artificial Sequence: Synthetic oligonucleotide
  Antisense strand to SEQ ID NO: 2390090
acuuucauaugccuaccuc

SEQ ID NO: 2390092 - RNA, 19 nt, Artificial Sequence
  Description of Artificial Sequence: Synthetic oligonucleotide
  Sense strand starting at position 1175 of SEQ ID NO: 1886144
acuuccucucgguauaaau

SEQ ID NO: 2390093 - RNA, 19 nt, Artificial Sequence
  Description of Artificial Sequence: Synthetic oligonucleotide
  Antisense strand to SEQ ID NO: 2390092
auuuauaccgagaggaagu

SEQ ID NO: 2390094 - RNA, 19 nt, Artificial Sequence
  Description of Artificial Sequence: Synthetic oligonucleotide
  Sense strand starting at position 1177 of SEQ ID NO: 1886144
uuccucucgguauaaauca

SEQ ID NO: 2390095 - RNA, 19 nt, Artificial Sequence
  Description of Artificial Sequence: Synthetic oligonucleotide
  Antisense strand to SEQ ID NO: 2390094
ugauuuauaccgagaggaa

SEQ ID NO: 2390096 - RNA, 19 nt, Artificial Sequence
  Description of Artificial Sequence: Synthetic oligonucleotide
  Sense strand starting at position 1184 of SEQ ID NO: 1886144
cgguauaaaucaguuuaaa

SEQ ID NO: 2390097 - RNA, 19 nt, Artificial Sequence
  Description of Artificial Sequence: Synthetic oligonucleotide
  Antisense strand to SEQ ID NO: 2390096
uuuaaacugauuuauaccg

SEQ ID NO: 2390098 - RNA, 19 nt, Artificial Sequence
  Description of Artificial Sequence: Synthetic oligonucleotide
  Sense strand starting at position 1298 of SEQ ID NO: 1886144
agaggaaauguccgaugau

SEQ ID NO: 2390099 - RNA, 19 nt, Artificial Sequence
  Description of Artificial Sequence: Synthetic oligonucleotide
  Antisense strand to SEQ ID NO: 2390098
aucaucggacauuuccucu

SEQ ID NO: 2390100 - RNA, 19 nt, Artificial Sequence
  Description of Artificial Sequence: Synthetic oligonucleotide
  Sense strand starting at position 1301 of SEQ ID NO: 1886144
ggaaauguccgaugauguc

SEQ ID NO: 2390101 - RNA, 19 nt, Artificial Sequence
  Description of Artificial Sequence: Synthetic oligonucleotide
  Antisense strand to SEQ ID NO: 2390100
gacaucaucggacauuucc

SEQ ID NO: 2390102 - RNA, 19 nt, Artificial Sequence
  Description of Artificial Sequence: Synthetic oligonucleotide
  Sense strand starting at position 1313 of SEQ ID NO: 1886144
ugaugucaucccuagauac

SEQ ID NO: 2390103 - RNA, 19 nt, Artificial Sequence
  Description of Artificial Sequence: Synthetic oligonucleotide
  Antisense strand to SEQ ID NO: 2390102
guaucuagggaugacauca

SEQ ID NO: 2390104 - RNA, 19 nt, Artificial Sequence
  Description of Artificial Sequence: Synthetic oligonucleotide
  Sense strand starting at position 1315 of SEQ ID NO: 1886144
augucaucccuagauacuc

SEQ ID NO: 2390105 - RNA, 19 nt, Artificial Sequence
  Description of Artificial Sequence: Synthetic oligonucleotide
  Antisense strand to SEQ ID NO: 2390104
gaguaucuagggaugacau

SEQ ID NO: 2390106 - RNA, 19 nt, Artificial Sequence
  Description of Artificial Sequence: Synthetic oligonucleotide
  Sense strand starting at position 1323 of SEQ ID NO: 1886144
ccuagauacucccuaguga

SEQ ID NO: 2390107 - RNA, 19 nt, Artificial Sequence
  Description of Artificial Sequence: Synthetic oligonucleotide
  Antisense strand to SEQ ID NO: 2390106
ucacuagggaguaucuagg

SEQ ID NO: 2390108 - RNA, 19 nt, Artificial Sequence
  Description of Artificial Sequence: Synthetic oligonucleotide
  Sense strand starting at position 1324 of SEQ ID NO: 1886144
cuagauacucccuagugau

SEQ ID NO: 2390109 - RNA, 19 nt, Artificial Sequence
  Description of Artificial Sequence: Synthetic oligonucleotide
  Antisense strand to SEQ ID NO: 2390108
aucacuagggaguaucuag

SEQ ID NO: 2390110 - RNA, 19 nt, Artificial Sequence
  Description of Artificial Sequence: Synthetic oligonucleotide
  Sense strand starting at position 1400 of SEQ ID NO: 1886144
cugagcuuugcucaaagau

SEQ ID NO: 2390111 - RNA, 19 nt, Artificial Sequence
  Description of Artificial Sequence: Synthetic oligonucleotide
  Antisense strand to SEQ ID NO: 2390110
aucuuugagcaaagcucag

SEQ ID NO: 2390112 - RNA, 19 nt, Artificial Sequence
  Description of Artificial Sequence: Synthetic oligonucleotide
  Sense strand starting at position 2227 of SEQ ID NO: 1886144
cuugcaaagcgggauuaga

SEQ ID NO: 2390113 - RNA, 19 nt, Artificial Sequence
  Description of Artificial Sequence: Synthetic oligonucleotide
  Antisense strand to SEQ ID NO: 2390112
ucuaaucccgcuuugcaag

SEQ ID NO: 2390114 - RNA, 19 nt, Artificial Sequence
  Description of Artificial Sequence: Synthetic oligonucleotide
  Sense strand starting at position 2320 of SEQ ID NO: 1886144
uuuaaagacuucuugcaag

SEQ ID NO: 2390115 - RNA, 19 nt, Artificial Sequence
  Description of Artificial Sequence: Synthetic oligonucleotide
  Antisense strand to SEQ ID NO: 2390114
cuugcaagaagucuuuaaa

SEQ ID NO: 2390116 - RNA, 19 nt, Artificial Sequence
  Description of Artificial Sequence: Synthetic oligonucleotide
  Sense strand starting at position 2339 of SEQ ID NO: 1886144
uccucagacugccuuuaga

SEQ ID NO: 2390117 - RNA, 19 nt, Artificial Sequence
  Description of Artificial Sequence: Synthetic oligonucleotide
  Antisense strand to SEQ ID NO: 2390116
ucuaaaggcagucugagga

SEQ ID NO: 2390118 - RNA, 19 nt, Artificial Sequence
  Description of Artificial Sequence: Synthetic oligonucleotide
  Sense strand starting at position 2342 of SEQ ID NO: 1886144
ucagacugccuuuagaaau

SEQ ID NO: 2390119 - RNA, 19 nt, Artificial Sequence
  Description of Artificial Sequence: Synthetic oligonucleotide
  Antisense strand to SEQ ID NO: 2390118
auuucuaaaggcagucuga

SEQ ID NO: 2390120 - RNA, 19 nt, Artificial Sequence
  Description of Artificial Sequence: Synthetic oligonucleotide
  Sense strand starting at position 2435 of SEQ ID NO: 1886144
auugaugacugauugcaau

SEQ ID NO: 2390121 - RNA, 19 nt, Artificial Sequence
  Description of Artificial Sequence: Synthetic oligonucleotide
  Antisense strand to SEQ ID NO: 2390120
auugcaaucagucaucaau

SEQ ID NO: 2390122 - RNA, 19 nt, Artificial Sequence
  Description of Artificial Sequence: Synthetic oligonucleotide
  Sense strand starting at position 2608 of SEQ ID NO: 1886144
ucuacuagaugggcuaaua

SEQ ID NO: 2390123 - RNA, 19 nt, Artificial Sequence
  Description of Artificial Sequence: Synthetic oligonucleotide
  Antisense strand to SEQ ID NO: 2390122
uauuagcccaucuaguaga

SEQ ID NO: 2390124 - RNA, 19 nt, Artificial Sequence
  Description of Artificial Sequence: Synthetic oligonucleotide
  Sense strand starting at position 2651 of SEQ ID NO: 1886144
guguuuauuguauacugau

SEQ ID NO: 2390125 - RNA, 19 nt, Artificial Sequence
  Description of Artificial Sequence: Synthetic oligonucleotide
  Antisense strand to SEQ ID NO: 2390124
aucaguauacaauaaacac

SEQ ID NO: 2390126 - RNA, 19 nt, Artificial Sequence
  Description of Artificial Sequence: Synthetic oligonucleotide
  Sense strand starting at position 2658 of SEQ ID NO: 1886144
uuguauacugauggaaauu

SEQ ID NO: 2390127 - RNA, 19 nt, Artificial Sequence
  Description of Artificial Sequence: Synthetic oligonucleotide
  Antisense strand to SEQ ID NO: 2390126
aauuuccaucaguauacaa

SEQ ID NO: 2390128 - RNA, 19 nt, Artificial Sequence
  Description of Artificial Sequence: Synthetic oligonucleotide
  Sense strand starting at position 2793 of SEQ ID NO: 1886144
cuaauucucgaguacuaua

SEQ ID NO: 2390129 - RNA, 19 nt, Artificial Sequence
  Description of Artificial Sequence: Synthetic oligonucleotide
  Antisense strand to SEQ ID NO: 2390128
uauaguacucgagaauuag

SEQ ID NO: 2390130 - RNA, 19 nt, Artificial Sequence
  Description of Artificial Sequence: Synthetic oligonucleotide
  Sense strand starting at position 2798 of SEQ ID NO: 1886144
ucucgaguacuauaaucuu

SEQ ID NO: 2390131 - RNA, 19 nt, Artificial Sequence
  Description of Artificial Sequence: Synthetic oligonucleotide
  Antisense strand to SEQ ID NO: 2390130
aagauuauaguacucgaga

SEQ ID NO: 2390132 - RNA, 19 nt, Artificial Sequence
  Description of Artificial Sequence: Synthetic oligonucleotide
  Sense strand starting at position 2902 of SEQ ID NO: 1886144
agucacuuugcagaauauc

SEQ ID NO: 2390133 - RNA, 19 nt, Artificial Sequence
  Description of Artificial Sequence: Synthetic oligonucleotide
  Antisense strand to SEQ ID NO: 2390132
gauauucugcaaagugacu

SEQ ID NO: 2390134 - RNA, 19 nt, Artificial Sequence
  Description of Artificial Sequence: Synthetic oligonucleotide
  Sense strand starting at position 3124 of SEQ ID NO: 1886144
guaguugcuguauaaauug

SEQ ID NO: 2390135 - RNA, 19 nt, Artificial Sequence
  Description of Artificial Sequence: Synthetic oligonucleotide
  Antisense strand to SEQ ID NO: 2390134
caauuuauacagcaacuac

SEQ ID NO: 2390136 - RNA, 19 nt, Artificial Sequence
  Description of Artificial Sequence: Synthetic oligonucleotide
  Sense strand starting at position 3131 of SEQ ID NO: 1886144
cuguauaaauuguuucuca

SEQ ID NO: 2390137 - RNA, 19 nt, Artificial Sequence
  Description of Artificial Sequence: Synthetic oligonucleotide
  Antisense strand to SEQ ID NO: 2390136
ugagaaacaauuuauacag

SEQ ID NO: 2390138 - RNA, 19 nt, Artificial Sequence
  Description of Artificial Sequence: Synthetic oligonucleotide
  Sense strand starting at position 3168 of SEQ ID NO: 1886144
gauuuauaaucgcagaaag

SEQ ID NO: 2390139 - RNA, 19 nt, Artificial Sequence
  Description of Artificial Sequence: Synthetic oligonucleotide
  Antisense strand to SEQ ID NO: 2390138
cuuucugcgauuauaaauc

SEQ ID NO: 2390140 - RNA, 19 nt, Artificial Sequence
  Description of Artificial Sequence: Synthetic oligonucleotide
  Sense strand starting at position 3244 of SEQ ID NO: 1886144
cccauaacucccugggcaa

SEQ ID NO: 2390141 - RNA, 19 nt, Artificial Sequence
  Description of Artificial Sequence: Synthetic oligonucleotide
  Antisense strand to SEQ ID NO: 2390140
uugcccagggaguuauggg

SEQ ID NO: 2390142 - RNA, 19 nt, Artificial Sequence
  Description of Artificial Sequence: Synthetic oligonucleotide
  Sense strand starting at position 3364 of SEQ ID NO: 1886144
gugcuauaugaacauaaug

SEQ ID NO: 2390143 - RNA, 19 nt, Artificial Sequence
  Description of Artificial Sequence: Synthetic oligonucleotide
  Antisense strand to SEQ ID NO: 2390142
cauuauguucauauagcac

SEQ ID NO: 2390144 - RNA, 19 nt, Artificial Sequence
  Description of Artificial Sequence: Synthetic oligonucleotide
  Sense strand starting at position 3602 of SEQ ID NO: 1886144
uuaagaggccuuuaugcuu

SEQ ID NO: 2390145 - RNA, 19 nt, Artificial Sequence
  Description of Artificial Sequence: Synthetic oligonucleotide
  Antisense strand to SEQ ID NO: 2390144
aagcauaaaggccucuuaa

SEQ ID NO: 2390146 - RNA, 19 nt, Artificial Sequence
  Description of Artificial Sequence: Synthetic oligonucleotide
  Sense strand starting at position 3623 of SEQ ID NO: 1886144
aacagaguaguagguacau

SEQ ID NO: 2390147 - RNA, 19 nt, Artificial Sequence
  Description of Artificial Sequence: Synthetic oligonucleotide
  Antisense strand to SEQ ID NO: 2390146
auguaccuacuacucuguu

SEQ ID NO: 2390148 - RNA, 19 nt, Artificial Sequence
  Description of Artificial Sequence: Synthetic oligonucleotide
  Sense strand starting at position 3625 of SEQ ID NO: 1886144
cagaguaguagguacauga

SEQ ID NO: 2390149 - RNA, 19 nt, Artificial Sequence
  Description of Artificial Sequence: Synthetic oligonucleotide
  Antisense strand to SEQ ID NO: 2390148
ucauguaccuacuacucug

SEQ ID NO: 2390150 - RNA, 19 nt, Artificial Sequence
  Description of Artificial Sequence: Synthetic oligonucleotide
  Sense strand starting at position 3629 of SEQ ID NO: 1886144
guaguagguacaugaggaa

SEQ ID NO: 2390151 - RNA, 19 nt, Artificial Sequence
  Description of Artificial Sequence: Synthetic oligonucleotide
  Antisense strand to SEQ ID NO: 2390150
uuccucauguaccuacuac

SEQ ID NO: 2390152 - RNA, 19 nt, Artificial Sequence
  Description of Artificial Sequence: Synthetic oligonucleotide
  Sense strand starting at position 3873 of SEQ ID NO: 1886144
gguucuaguccugauaaag

SEQ ID NO: 2390153 - RNA, 19 nt, Artificial Sequence
  Description of Artificial Sequence: Synthetic oligonucleotide
  Antisense strand to SEQ ID NO: 2390152
cuuuaucaggacuagaacc

SEQ ID NO: 2390154 - RNA, 19 nt, Artificial Sequence
  Description of Artificial Sequence: Synthetic oligonucleotide
  Sense strand starting at position 3895 of SEQ ID NO: 1886144
agagguuaauuccuacuga

SEQ ID NO: 2390155 - RNA, 19 nt, Artificial Sequence
  Description of Artificial Sequence: Synthetic oligonucleotide
  Antisense strand to SEQ ID NO: 2390154
ucaguaggaauuaaccucu

SEQ ID NO: 2390156 - RNA, 19 nt, Artificial Sequence
  Description of Artificial Sequence: Synthetic oligonucleotide
  Sense strand starting at position 3914 of SEQ ID NO: 1886144
gagauuggugagggccuua

SEQ ID NO: 2390157 - RNA, 19 nt, Artificial Sequence
  Description of Artificial Sequence: Synthetic oligonucleotide
  Antisense strand to SEQ ID NO: 2390156
uaaggcccucaccaaucuc

SEQ ID NO: 2390158 - RNA, 19 nt, Artificial Sequence
  Description of Artificial Sequence: Synthetic oligonucleotide
  Sense strand starting at position 2962 of SEQ ID NO: 1886145
auuccugcaucuguuguaa

SEQ ID NO: 2390159 - RNA, 19 nt, Artificial Sequence
  Description of Artificial Sequence: Synthetic oligonucleotide
  Antisense strand to SEQ ID NO: 2390158
uuacaacagaugcaggaau

SEQ ID NO: 2390160 - RNA, 19 nt, Artificial Sequence
  Description of Artificial Sequence: Synthetic oligonucleotide
  Sense strand starting at position 2964 of SEQ ID NO: 1886145
uccugcaucuguuguaaag

SEQ ID NO: 2390161 - RNA, 19 nt, Artificial Sequence
  Description of Artificial Sequence: Synthetic oligonucleotide
  Antisense strand to SEQ ID NO: 2390160
cuuuacaacagaugcagga

SEQ ID NO: 2390162 - RNA, 19 nt, Artificial Sequence
  Description of Artificial Sequence: Synthetic oligonucleotide
  Sense strand starting at position 2966 of SEQ ID NO: 1886145
cugcaucuguuguaaaguu

SEQ ID NO: 2390163 - RNA, 19 nt, Artificial Sequence
  Description of Artificial Sequence: Synthetic oligonucleotide
  Antisense strand to SEQ ID NO: 2390162
aacuuuacaacagaugcag

SEQ ID NO: 2390164 - RNA, 19 nt, Artificial Sequence
  Description of Artificial Sequence: Synthetic oligonucleotide
  Sense strand starting at position 3744 of SEQ ID NO: 1886145
agugucucaugcuggaaau

SEQ ID NO: 2390165 - RNA, 19 nt, Artificial Sequence
  Description of Artificial Sequence: Synthetic oligonucleotide
  Antisense strand to SEQ ID NO: 2390164
auuuccagcaugagacacu

SEQ ID NO: 2390166 - RNA, 19 nt, Artificial Sequence
  Description of Artificial Sequence: Synthetic oligonucleotide
  Sense strand starting at position 3965 of SEQ ID NO: 1886145
cccugauugugacugcacu

SEQ ID NO: 2390167 - RNA, 19 nt, Artificial Sequence
  Description of Artificial Sequence: Synthetic oligonucleotide
  Antisense strand to SEQ ID NO: 2390166
agugcagucacaaucaggg

SEQ ID NO: 2390168 - RNA, 19 nt, Artificial Sequence
  Description of Artificial Sequence: Synthetic oligonucleotide
  Sense strand starting at position 31 of SEQ ID NO: 1886146
gccacugcaccugaugaau

SEQ ID NO: 2390169 - RNA, 19 nt, Artificial Sequence
  Description of Artificial Sequence: Synthetic oligonucleotide
  Antisense strand to SEQ ID NO: 2390168
auucaucaggugcaguggc

SEQ ID NO: 2390170 - RNA, 19 nt, Artificial Sequence
  Description of Artificial Sequence: Synthetic oligonucleotide
  Sense strand starting at position 454 of SEQ ID NO: 1886146
auacguauuuccuuucugu

SEQ ID NO: 2390171 - RNA, 19 nt, Artificial Sequence
  Description of Artificial Sequence: Synthetic oligonucleotide
  Antisense strand to SEQ ID NO: 2390170
acagaaaggaaauacguau

SEQ ID NO: 2390172 - RNA, 19 nt, Artificial Sequence
  Description of Artificial Sequence: Synthetic oligonucleotide
  Sense strand starting at position 458 of SEQ ID NO: 1886146
guauuuccuuucuguagga

SEQ ID NO: 2390173 - RNA, 19 nt, Artificial Sequence
  Description of Artificial Sequence: Synthetic oligonucleotide
  Antisense strand to SEQ ID NO: 2390172
uccuacagaaaggaaauac

SEQ ID NO: 2390174 - RNA, 19 nt, Artificial Sequence
  Description of Artificial Sequence: Synthetic oligonucleotide
  Sense strand starting at position 462 of SEQ ID NO: 1886146
uuccuuucuguaggauaca

SEQ ID NO: 2390175 - RNA, 19 nt, Artificial Sequence
  Description of Artificial Sequence: Synthetic oligonucleotide
  Antisense strand to SEQ ID NO: 2390174
uguauccuacagaaaggaa

SEQ ID NO: 2390176 - RNA, 19 nt, Artificial Sequence
  Description of Artificial Sequence: Synthetic oligonucleotide
  Sense strand starting at position 703 of SEQ ID NO: 1886146
ccacuauguuggccagagu

SEQ ID NO: 2390177 - RNA, 19 nt, Artificial Sequence
  Description of Artificial Sequence: Synthetic oligonucleotide
  Antisense strand to SEQ ID NO: 2390176
acucuggccaacauagugg

SEQ ID NO: 2390178 - RNA, 19 nt, Artificial Sequence
  Description of Artificial Sequence: Synthetic oligonucleotide
  Sense strand starting at position 932 of SEQ ID NO: 1886146
ucccgaguggcugaaauua

SEQ ID NO: 2390179 - RNA, 19 nt, Artificial Sequence
  Description of Artificial Sequence: Synthetic oligonucleotide
  Antisense strand to SEQ ID NO: 2390178
uaauuucagccacucggga

SEQ ID NO: 2390180 - RNA, 19 nt, Artificial Sequence
  Description of Artificial Sequence: Synthetic oligonucleotide
  Sense strand starting at position 1086 of SEQ ID NO: 1886146
ugccucagucacugggauu

SEQ ID NO: 2390181 - RNA, 19 nt, Artificial Sequence
  Description of Artificial Sequence: Synthetic oligonucleotide
  Antisense strand to SEQ ID NO: 2390180
aaucccagugacugaggca

SEQ ID NO: 2390182 - RNA, 19 nt, Artificial Sequence
  Description of Artificial Sequence: Synthetic oligonucleotide
  Sense strand starting at position 1087 of SEQ ID NO: 1886146
gccucagucacugggauua

SEQ ID NO: 2390183 - RNA, 19 nt, Artificial Sequence
  Description of Artificial Sequence: Synthetic oligonucleotide
  Antisense strand to SEQ ID NO: 2390182
uaaucccagugacugaggc

SEQ ID NO: 2390184 - RNA, 19 nt, Artificial Sequence
  Description of Artificial Sequence: Synthetic oligonucleotide
  Sense strand starting at position 1265 of SEQ ID NO: 1886146
cgacauuaucaauaagguu

SEQ ID NO: 2390185 - RNA, 19 nt, Artificial Sequence
  Description of Artificial Sequence: Synthetic oligonucleotide
  Antisense strand to SEQ ID NO: 2390184
aaccuuauugauaaugucg

SEQ ID NO: 2390186 - RNA, 19 nt, Artificial Sequence
  Description of Artificial Sequence: Synthetic oligonucleotide
  Sense strand starting at position 1272 of SEQ ID NO: 1886146
aucaauaagguuuguugau

SEQ ID NO: 2390187 - RNA, 19 nt, Artificial Sequence
  Description of Artificial Sequence: Synthetic oligonucleotide
  Antisense strand to SEQ ID NO: 2390186
aucaacaaaccuuauugau

SEQ ID NO: 2390188 - RNA, 19 nt, Artificial Sequence
  Description of Artificial Sequence: Synthetic oligonucleotide
  Sense strand starting at position 1273 of SEQ ID NO: 1886146
ucaauaagguuuguugaua

SEQ ID NO: 2390189 - RNA, 19 nt, Artificial Sequence
  Description of Artificial Sequence: Synthetic oligonucleotide
  Antisense strand to SEQ ID NO: 2390188
uaucaacaaaccuuauuga

SEQ ID NO: 2390190 - RNA, 19 nt, Artificial Sequence
  Description of Artificial Sequence: Synthetic oligonucleotide
  Sense strand starting at position 1274 of SEQ ID NO: 1886146
caauaagguuuguugauaa

SEQ ID NO: 2390191 - RNA, 19 nt, Artificial Sequence
  Description of Artificial Sequence: Synthetic oligonucleotide
  Antisense strand to SEQ ID NO: 2390190
uuaucaacaaaccuuauug

SEQ ID NO: 2390192 - RNA, 19 nt, Artificial Sequence
  Description of Artificial Sequence: Synthetic oligonucleotide
  Sense strand starting at position 1278 of SEQ ID NO: 1886146
aagguuuguugauaaauca

SEQ ID NO: 2390193 - RNA, 19 nt, Artificial Sequence
  Description of Artificial Sequence: Synthetic oligonucleotide
  Antisense strand to SEQ ID NO: 2390192
ugauuuaucaacaaaccuu

SEQ ID NO: 2390194 - RNA, 19 nt, Artificial Sequence
  Description of Artificial Sequence: Synthetic oligonucleotide
  Sense strand starting at position 1300 of SEQ ID NO: 1886146
ccauguaaacaguauguuu

SEQ ID NO: 2390195 - RNA, 19 nt, Artificial Sequence
  Description of Artificial Sequence: Synthetic oligonucleotide
  Antisense strand to SEQ ID NO: 2390194
aaacauacuguuuacaugg

SEQ ID NO: 2390196 - RNA, 19 nt, Artificial Sequence
  Description of Artificial Sequence: Synthetic oligonucleotide
  Sense strand starting at position 1366 of SEQ ID NO: 1886146
aucugaggucccggaauua

SEQ ID NO: 2390197 - RNA, 19 nt, Artificial Sequence
  Description of Artificial Sequence: Synthetic oligonucleotide
  Antisense strand to SEQ ID NO: 2390196
uaauuccgggaccucagau

SEQ ID NO: 2390198 - RNA, 19 nt, Artificial Sequence
  Description of Artificial Sequence: Synthetic oligonucleotide
  Sense strand starting at position 1409 of SEQ ID NO: 1886146
gccgguugcacuuaaauga

SEQ ID NO: 2390199 - RNA, 19 nt, Artificial Sequence
  Description of Artificial Sequence: Synthetic oligonucleotide
  Antisense strand to SEQ ID NO: 2390198
ucauuuaagugcaaccggc

SEQ ID NO: 2390200 - RNA, 19 nt, Artificial Sequence
  Description of Artificial Sequence: Synthetic oligonucleotide
  Sense strand starting at position 1444 of SEQ ID NO: 1886146
accgaaauuugagaaacaa

SEQ ID NO: 2390201 - RNA, 19 nt, Artificial Sequence
  Description of Artificial Sequence: Synthetic oligonucleotide
  Antisense strand to SEQ ID NO: 2390200
uuguuucucaaauuucggu

SEQ ID NO: 2390202 - RNA, 19 nt, Artificial Sequence
  Description of Artificial Sequence: Synthetic oligonucleotide
  Sense strand starting at position 1643 of SEQ ID NO: 1886146
gcuagaagugaguagaauu

SEQ ID NO: 2390203 - RNA, 19 nt, Artificial Sequence
  Description of Artificial Sequence: Synthetic oligonucleotide
  Antisense strand to SEQ ID NO: 2390202
aauucuacucacuucuagc

SEQ ID NO: 2390204 - RNA, 19 nt, Artificial Sequence
  Description of Artificial Sequence: Synthetic oligonucleotide
  Sense strand starting at position 1689 of SEQ ID NO: 1886146
gccagaaacugcucuaagu

SEQ ID NO: 2390205 - RNA, 19 nt, Artificial Sequence
  Description of Artificial Sequence: Synthetic oligonucleotide
  Antisense strand to SEQ ID NO: 2390204
acuuagagcaguuucuggc

SEQ ID NO: 2390206 - RNA, 19 nt, Artificial Sequence
  Description of Artificial Sequence: Synthetic oligonucleotide
  Sense strand starting at position 1691 of SEQ ID NO: 1886146
cagaaacugcucuaagugu

SEQ ID NO: 2390207 - RNA, 19 nt, Artificial Sequence
  Description of Artificial Sequence: Synthetic oligonucleotide
  Antisense strand to SEQ ID NO: 2390206
acacuuagagcaguuucug

SEQ ID NO: 2390208 - RNA, 19 nt, Artificial Sequence
  Description of Artificial Sequence: Synthetic oligonucleotide
  Sense strand starting at position 1722 of SEQ ID NO: 1886146
ucacaacaauccugagaga

SEQ ID NO: 2390209 - RNA, 19 nt, Artificial Sequence
  Description of Artificial Sequence: Synthetic oligonucleotide
  Antisense strand to SEQ ID NO: 2390208
ucucucaggauuguuguga

SEQ ID NO: 2390210 - RNA, 19 nt, Artificial Sequence
  Description of Artificial Sequence: Synthetic oligonucleotide
  Sense strand starting at position 1725 of SEQ ID NO: 1886146
caacaauccugagagaggu

SEQ ID NO: 2390211 - RNA, 19 nt, Artificial Sequence
  Description of Artificial Sequence: Synthetic oligonucleotide
  Antisense strand to SEQ ID NO: 2390210
accucucucaggauuguug

SEQ ID NO: 2390212 - RNA, 19 nt, Artificial Sequence
  Description of Artificial Sequence: Synthetic oligonucleotide
  Sense strand starting at position 1789 of SEQ ID NO: 1886146
ggcuaauuuacccgagguc

SEQ ID NO: 2390213 - RNA, 19 nt, Artificial Sequence
  Description of Artificial Sequence: Synthetic oligonucleotide
  Antisense strand to SEQ ID NO: 2390212
gaccucggguaaauuagcc

SEQ ID NO: 2390214 - RNA, 19 nt, Artificial Sequence
  Description of Artificial Sequence: Synthetic oligonucleotide
  Sense strand starting at position 1810 of SEQ ID NO: 1886146
acagguagugaguggcaaa

SEQ ID NO: 2390215 - RNA, 19 nt, Artificial Sequence
  Description of Artificial Sequence: Synthetic oligonucleotide
  Antisense strand to SEQ ID NO: 2390214
uuugccacucacuaccugu

SEQ ID NO: 2390216 - RNA, 19 nt, Artificial Sequence
  Description of Artificial Sequence: Synthetic oligonucleotide
  Sense strand starting at position 2022 of SEQ ID NO: 1886146
ccacuuuacccguauaggu

SEQ ID NO: 2390217 - RNA, 19 nt, Artificial Sequence
  Description of Artificial Sequence: Synthetic oligonucleotide
  Antisense strand to SEQ ID NO: 2390216
accuauacggguaaagugg

SEQ ID NO: 2390218 - RNA, 19 nt, Artificial Sequence
  Description of Artificial Sequence: Synthetic oligonucleotide
  Sense strand starting at position 2073 of SEQ ID NO: 1886146
gcgucagaacaccaaaguu

SEQ ID NO: 2390219 - RNA, 19 nt, Artificial Sequence
  Description of Artificial Sequence: Synthetic oligonucleotide
  Antisense strand to SEQ ID NO: 2390218
aacuuugguguucugacgc

SEQ ID NO: 2390220 - RNA, 19 nt, Artificial Sequence
  Description of Artificial Sequence: Synthetic oligonucleotide
  Sense strand starting at position 3115 of SEQ ID NO: 1886146
gcacuuaaacauuguuugu

SEQ ID NO: 2390221 - RNA, 19 nt, Artificial Sequence
  Description of Artificial Sequence: Synthetic oligonucleotide
  Antisense strand to SEQ ID NO: 2390220
acaaacaauguuuaagugc

SEQ ID NO: 2390222 - RNA, 19 nt, Artificial Sequence
  Description of Artificial Sequence: Synthetic oligonucleotide
  Sense strand starting at position 3146 of SEQ ID NO: 1886146
uucuuacugccagggaaga

SEQ ID NO: 2390223 - RNA, 19 nt, Artificial Sequence
  Description of Artificial Sequence: Synthetic oligonucleotide
  Antisense strand to SEQ ID NO: 2390222
ucuucccuggcaguaagaa

SEQ ID NO: 2390224 - RNA, 19 nt, Artificial Sequence
  Description of Artificial Sequence: Synthetic oligonucleotide
  Sense strand starting at position 3215 of SEQ ID NO: 1886146
gugagcuuucuugggucca

SEQ ID NO: 2390225 - RNA, 19 nt, Artificial Sequence
  Description of Artificial Sequence: Synthetic oligonucleotide
  Antisense strand to SEQ ID NO: 2390224
uggacccaagaaagcucac

SEQ ID NO: 2390226 - RNA, 19 nt, Artificial Sequence
  Description of Artificial Sequence: Synthetic oligonucleotide
  Sense strand starting at position 3217 of SEQ ID NO: 1886146
gagcuuucuuggguccaga

SEQ ID NO: 2390227 - RNA, 19 nt, Artificial Sequence
  Description of Artificial Sequence: Synthetic oligonucleotide
  Antisense strand to SEQ ID NO: 2390226
ucuggacccaagaaagcuc

SEQ ID NO: 2390228 - RNA, 19 nt, Artificial Sequence
  Description of Artificial Sequence: Synthetic oligonucleotide
  Sense strand starting at position 3263 of SEQ ID NO: 1886146
guaccauagcggcgggaau

SEQ ID NO: 2390229 - RNA, 19 nt, Artificial Sequence
  Description of Artificial Sequence: Synthetic oligonucleotide
  Antisense strand to SEQ ID NO: 2390228
auucccgccgcuaugguac

SEQ ID NO: 2390230 - RNA, 19 nt, Artificial Sequence
  Description of Artificial Sequence: Synthetic oligonucleotide
  Sense strand starting at position 3277 of SEQ ID NO: 1886146
ggaauuuagugcuuagugu

SEQ ID NO: 2390231 - RNA, 19 nt, Artificial Sequence
  Description of Artificial Sequence: Synthetic oligonucleotide
  Antisense strand to SEQ ID NO: 2390230
acacuaagcacuaaauucc

SEQ ID NO: 2390232 - RNA, 19 nt, Artificial Sequence
  Description of Artificial Sequence: Synthetic oligonucleotide
  Sense strand starting at position 3283 of SEQ ID NO: 1886146
uagugcuuagugugaauuu

SEQ ID NO: 2390233 - RNA, 19 nt, Artificial Sequence
  Description of Artificial Sequence: Synthetic oligonucleotide
  Antisense strand to SEQ ID NO: 2390232
aaauucacacuaagcacua

SEQ ID NO: 2390234 - RNA, 19 nt, Artificial Sequence
  Description of Artificial Sequence: Synthetic oligonucleotide
  Sense strand starting at position 3292 of SEQ ID NO: 1886146
gugugaauuugagagcaua

SEQ ID NO: 2390235 - RNA, 19 nt, Artificial Sequence
  Description of Artificial Sequence: Synthetic oligonucleotide
  Antisense strand to SEQ ID NO: 2390234
uaugcucucaaauucacac

SEQ ID NO: 2390236 - RNA, 19 nt, Artificial Sequence
  Description of Artificial Sequence: Synthetic oligonucleotide
  Sense strand starting at position 3302 of SEQ ID NO: 1886146
gagagcauauaguuccgua

SEQ ID NO: 2390237 - RNA, 19 nt, Artificial Sequence
  Description of Artificial Sequence: Synthetic oligonucleotide
  Antisense strand to SEQ ID NO: 2390236
uacggaacuauaugcucuc

SEQ ID NO: 2390238 - RNA, 19 nt, Artificial Sequence
  Description of Artificial Sequence: Synthetic oligonucleotide
  Sense strand starting at position 3306 of SEQ ID NO: 1886146
gcauauaguuccguaacac

SEQ ID NO: 2390239 - RNA, 19 nt, Artificial Sequence
  Description of Artificial Sequence: Synthetic oligonucleotide
  Antisense strand to SEQ ID NO: 2390238
guguuacggaacuauaugc

SEQ ID NO: 2390240 - RNA, 19 nt, Artificial Sequence
  Description of Artificial Sequence: Synthetic oligonucleotide
  Sense strand starting at position 3318 of SEQ ID NO: 1886146
guaacaccuuuguucucua

SEQ ID NO: 2390241 - RNA, 19 nt, Artificial Sequence
  Description of Artificial Sequence: Synthetic oligonucleotide
  Antisense strand to SEQ ID NO: 2390240
uagagaacaaagguguuac

SEQ ID NO: 2390242 - RNA, 19 nt, Artificial Sequence
  Description of Artificial Sequence: Synthetic oligonucleotide
  Sense strand starting at position 3323 of SEQ ID NO: 1886146
accuuuguucucuaagguu

SEQ ID NO: 2390243 - RNA, 19 nt, Artificial Sequence
  Description of Artificial Sequence: Synthetic oligonucleotide
  Antisense strand to SEQ ID NO: 2390242
aaccuuagagaacaaaggu

SEQ ID NO: 2390244 - RNA, 19 nt, Artificial Sequence
  Description of Artificial Sequence: Synthetic oligonucleotide
  Sense strand starting at position 3341 of SEQ ID NO: 1886146
uccgaaggagcucacuaaa

SEQ ID NO: 2390245 - RNA, 19 nt, Artificial Sequence
  Description of Artificial Sequence: Synthetic oligonucleotide
  Antisense strand to SEQ ID NO: 2390244
uuuagugagcuccuucgga

SEQ ID NO: 2390246 - RNA, 19 nt, Artificial Sequence
  Description of Artificial Sequence: Synthetic oligonucleotide
  Sense strand starting at position 3428 of SEQ ID NO: 1886146
uuggcuucucuagacucua

SEQ ID NO: 2390247 - RNA, 19 nt, Artificial Sequence
  Description of Artificial Sequence: Synthetic oligonucleotide
  Antisense strand to SEQ ID NO: 2390246
uagagucuagagaagccaa

SEQ ID NO: 2390248 - RNA, 19 nt, Artificial Sequence
  Description of Artificial Sequence: Synthetic oligonucleotide
  Sense strand starting at position 2025 of SEQ ID NO: 1886147
agucguuguuaccuuaauu

SEQ ID NO: 2390249 - RNA, 19 nt, Artificial Sequence
  Description of Artificial Sequence: Synthetic oligonucleotide
  Antisense strand to SEQ ID NO: 2390248
aauuaagguaacaacgacu

SEQ ID NO: 2390250 - RNA, 19 nt, Artificial Sequence
  Description of Artificial Sequence: Synthetic oligonucleotide
  Sense strand starting at position 2054 of SEQ ID NO: 1886147
ggcuguaaaggucaguuua

SEQ ID NO: 2390251 - RNA, 19 nt, Artificial Sequence
  Description of Artificial Sequence: Synthetic oligonucleotide
  Antisense strand to SEQ ID NO: 2390250
uaaacugaccuuuacagcc

SEQ ID NO: 2390252 - RNA, 19 nt, Artificial Sequence
  Description of Artificial Sequence: Synthetic oligonucleotide
  Sense strand starting at position 2056 of SEQ ID NO: 1886147
cuguaaaggucaguuuaca

SEQ ID NO: 2390253 - RNA, 19 nt, Artificial Sequence
  Description of Artificial Sequence: Synthetic oligonucleotide
  Antisense strand to SEQ ID NO: 2390252
uguaaacugaccuuuacag

SEQ ID NO: 2390254 - RNA, 19 nt, Artificial Sequence
  Description of Artificial Sequence: Synthetic oligonucleotide
  Sense strand starting at position 2068 of SEQ ID NO: 1886147
guuuacaacucguugaaca

SEQ ID NO: 2390255 - RNA, 19 nt, Artificial Sequence
  Description of Artificial Sequence: Synthetic oligonucleotide
  Antisense strand to SEQ ID NO: 2390254
uguucaacgaguuguaaac

SEQ ID NO: 2390256 - RNA, 19 nt, Artificial Sequence
  Description of Artificial Sequence: Synthetic oligonucleotide
  Sense strand starting at position 2069 of SEQ ID NO: 1886147
uuuacaacucguugaacaa

SEQ ID NO: 2390257 - RNA, 19 nt, Artificial Sequence
  Description of Artificial Sequence: Synthetic oligonucleotide
  Antisense strand to SEQ ID NO: 2390256
uuguucaacgaguuguaaa

SEQ ID NO: 2390258 - RNA, 19 nt, Artificial Sequence
  Description of Artificial Sequence: Synthetic oligonucleotide
  Sense strand starting at position 2084 of SEQ ID NO: 1886147
acaacugaguaagauuuaa

SEQ ID NO: 2390259 - RNA, 19 nt, Artificial Sequence
  Description of Artificial Sequence: Synthetic oligonucleotide
  Antisense strand to SEQ ID NO: 2390258
uuaaaucuuacucaguugu

SEQ ID NO: 2390260 - RNA, 19 nt, Artificial Sequence
  Description of Artificial Sequence: Synthetic oligonucleotide
  Sense strand starting at position 2113 of SEQ ID NO: 1886147
cugauagcugcauaccuaa

SEQ ID NO: 2390261 - RNA, 19 nt, Artificial Sequence
  Description of Artificial Sequence: Synthetic oligonucleotide
  Antisense strand to SEQ ID NO: 2390260
uuagguaugcagcuaucag

SEQ ID NO: 2390262 - RNA, 19 nt, Artificial Sequence
  Description of Artificial Sequence: Synthetic oligonucleotide
  Sense strand starting at position 2209 of SEQ ID NO: 1886147
cuccaaguaucuuaggaac

SEQ ID NO: 2390263 - RNA, 19 nt, Artificial Sequence
  Description of Artificial Sequence: Synthetic oligonucleotide
  Antisense strand to SEQ ID NO: 2390262
guuccuaagauacuuggag

SEQ ID NO: 2390264 - RNA, 19 nt, Artificial Sequence
  Description of Artificial Sequence: Synthetic oligonucleotide
  Sense strand starting at position 2211 of SEQ ID NO: 1886147
ccaaguaucuuaggaacac

SEQ ID NO: 2390265 - RNA, 19 nt, Artificial Sequence
  Description of Artificial Sequence: Synthetic oligonucleotide
  Antisense strand to SEQ ID NO: 2390264
guguuccuaagauacuugg

SEQ ID NO: 2390266 - RNA, 19 nt, Artificial Sequence
  Description of Artificial Sequence: Synthetic oligonucleotide
  Sense strand starting at position 2233 of SEQ ID NO: 1886147
ccgcaaugugugggcuaaa

SEQ ID NO: 2390267 - RNA, 19 nt, Artificial Sequence
  Description of Artificial Sequence: Synthetic oligonucleotide
  Antisense strand to SEQ ID NO: 2390266
uuuagcccacacauugcgg

SEQ ID NO: 2390268 - RNA, 19 nt, Artificial Sequence
  Description of Artificial Sequence: Synthetic oligonucleotide
  Sense strand starting at position 2234 of SEQ ID NO: 1886147
cgcaaugugugggcuaaau

SEQ ID NO: 2390269 - RNA, 19 nt, Artificial Sequence
  Description of Artificial Sequence: Synthetic oligonucleotide
  Antisense strand to SEQ ID NO: 2390268
auuuagcccacacauugcg

SEQ ID NO: 2390270 - RNA, 19 nt, Artificial Sequence
  Description of Artificial Sequence: Synthetic oligonucleotide
  Sense strand starting at position 2259 of SEQ ID NO: 1886147
guacaaugauagcagaaau

SEQ ID NO: 2390271 - RNA, 19 nt, Artificial Sequence
  Description of Artificial Sequence: Synthetic oligonucleotide
  Antisense strand to SEQ ID NO: 2390270
auuucugcuaucauuguac

SEQ ID NO: 2390272 - RNA, 19 nt, Artificial Sequence
  Description of Artificial Sequence: Synthetic oligonucleotide
  Sense strand starting at position 2559 of SEQ ID NO: 1886147
agucguagcgaaucagcua

SEQ ID NO: 2390273 - RNA, 19 nt, Artificial Sequence
  Description of Artificial Sequence: Synthetic oligonucleotide
  Antisense strand to SEQ ID NO: 2390272
uagcugauucgcuacgacu

SEQ ID NO: 2390274 - RNA, 19 nt, Artificial Sequence
  Description of Artificial Sequence: Synthetic oligonucleotide
  Sense strand starting at position 2571 of SEQ ID NO: 1886147
ucagcuacaagucgagaua

SEQ ID NO: 2390275 - RNA, 19 nt, Artificial Sequence
  Description of Artificial Sequence: Synthetic oligonucleotide
  Antisense strand to SEQ ID NO: 2390274
uaucucgacuuguagcuga

SEQ ID NO: 2390276 - RNA, 19 nt, Artificial Sequence
  Description of Artificial Sequence: Synthetic oligonucleotide
  Sense strand starting at position 2572 of SEQ ID NO: 1886147
cagcuacaagucgagauaa

SEQ ID NO: 2390277 - RNA, 19 nt, Artificial Sequence
  Description of Artificial Sequence: Synthetic oligonucleotide
  Antisense strand to SEQ ID NO: 2390276
uuaucucgacuuguagcug

SEQ ID NO: 2390278 - RNA, 19 nt, Artificial Sequence
  Description of Artificial Sequence: Synthetic oligonucleotide
  Sense strand starting at position 2574 of SEQ ID NO: 1886147
gcuacaagucgagauaauu

SEQ ID NO: 2390279 - RNA, 19 nt, Artificial Sequence
  Description of Artificial Sequence: Synthetic oligonucleotide
  Antisense strand to SEQ ID NO: 2390278
aauuaucucgacuuguagc

SEQ ID NO: 2390280 - RNA, 19 nt, Artificial Sequence
  Description of Artificial Sequence: Synthetic oligonucleotide
  Sense strand starting at position 2603 of SEQ ID NO: 1886147
ggaaacagcuccucuaaga

SEQ ID NO: 2390281 - RNA, 19 nt, Artificial Sequence
  Description of Artificial Sequence: Synthetic oligonucleotide
  Antisense strand to SEQ ID NO: 2390280
ucuuagaggagcuguuucc

SEQ ID NO: 2390282 - RNA, 19 nt, Artificial Sequence
  Description of Artificial Sequence: Synthetic oligonucleotide
  Sense strand starting at position 2679 of SEQ ID NO: 1886147
ggaggagguugucuccaau

SEQ ID NO: 2390283 - RNA, 19 nt, Artificial Sequence
  Description of Artificial Sequence: Synthetic oligonucleotide
  Antisense strand to SEQ ID NO: 2390282
auuggagacaaccuccucc

SEQ ID NO: 2390284 - RNA, 19 nt, Artificial Sequence
  Description of Artificial Sequence: Synthetic oligonucleotide
  Sense strand starting at position 2713 of SEQ ID NO: 1886147
cggccaagaugucugacau

SEQ ID NO: 2390285 - RNA, 19 nt, Artificial Sequence
  Description of Artificial Sequence: Synthetic oligonucleotide
  Antisense strand to SEQ ID NO: 2390284
augucagacaucuuggccg

SEQ ID NO: 2390286 - RNA, 19 nt, Artificial Sequence
  Description of Artificial Sequence: Synthetic oligonucleotide
  Sense strand starting at position 2714 of SEQ ID NO: 1886147
ggccaagaugucugacaug

SEQ ID NO: 2390287 - RNA, 19 nt, Artificial Sequence
  Description of Artificial Sequence: Synthetic oligonucleotide
  Antisense strand to SEQ ID NO: 2390286
caugucagacaucuuggcc

SEQ ID NO: 2390288 - RNA, 19 nt, Artificial Sequence
  Description of Artificial Sequence: Synthetic oligonucleotide
  Sense strand starting at position 2717 of SEQ ID NO: 1886147
caagaugucugacauggag

SEQ ID NO: 2390289 - RNA, 19 nt, Artificial Sequence
  Description of Artificial Sequence: Synthetic oligonucleotide
  Antisense strand to SEQ ID NO: 2390288
cuccaugucagacaucuug

SEQ ID NO: 2390290 - RNA, 19 nt, Artificial Sequence
  Description of Artificial Sequence: Synthetic oligonucleotide
  Sense strand starting at position 2720 of SEQ ID NO: 1886147
gaugucugacauggaggau

SEQ ID NO: 2390291 - RNA, 19 nt, Artificial Sequence
  Description of Artificial Sequence: Synthetic oligonucleotide
  Antisense strand to SEQ ID NO: 2390290
auccuccaugucagacauc

SEQ ID NO: 2390292 - RNA, 19 nt, Artificial Sequence
  Description of Artificial Sequence: Synthetic oligonucleotide
  Sense strand starting at position 2723 of SEQ ID NO: 1886147
gucugacauggaggaugau

SEQ ID NO: 2390293 - RNA, 19 nt, Artificial Sequence
  Description of Artificial Sequence: Synthetic oligonucleotide
  Antisense strand to SEQ ID NO: 2390292
aucauccuccaugucagac

SEQ ID NO: 2390294 - RNA, 19 nt, Artificial Sequence
  Description of Artificial Sequence: Synthetic oligonucleotide
  Sense strand starting at position 2738 of SEQ ID NO: 1886147
ugauuucaugugcgaugau

SEQ ID NO: 2390295 - RNA, 19 nt, Artificial Sequence
  Description of Artificial Sequence: Synthetic oligonucleotide
  Antisense strand to SEQ ID NO: 2390294
aucaucgcacaugaaauca

SEQ ID NO: 2390296 - RNA, 19 nt, Artificial Sequence
  Description of Artificial Sequence: Synthetic oligonucleotide
  Sense strand starting at position 2741 of SEQ ID NO: 1886147
uuucaugugcgaugaugag

SEQ ID NO: 2390297 - RNA, 19 nt, Artificial Sequence
  Description of Artificial Sequence: Synthetic oligonucleotide
  Antisense strand to SEQ ID NO: 2390296
cucaucaucgcacaugaaa

SEQ ID NO: 2390298 - RNA, 19 nt, Artificial Sequence
  Description of Artificial Sequence: Synthetic oligonucleotide
  Sense strand starting at position 2892 of SEQ ID NO: 1886147
cggugacaggacugguuua

SEQ ID NO: 2390299 - RNA, 19 nt, Artificial Sequence
  Description of Artificial Sequence: Synthetic oligonucleotide
  Antisense strand to SEQ ID NO: 2390298
uaaaccaguccugucaccg

SEQ ID NO: 2390300 - RNA, 19 nt, Artificial Sequence
  Description of Artificial Sequence: Synthetic oligonucleotide
  Sense strand starting at position 3190 of SEQ ID NO: 1886147
ugcgaaaugcuaggagaag

SEQ ID NO: 2390301 - RNA, 19 nt, Artificial Sequence
  Description of Artificial Sequence: Synthetic oligonucleotide
  Antisense strand to SEQ ID NO: 2390300
cuucuccuagcauuucgca

SEQ ID NO: 2390302 - RNA, 19 nt, Artificial Sequence
  Description of Artificial Sequence: Synthetic oligonucleotide
  Sense strand starting at position 3191 of SEQ ID NO: 1886147
gcgaaaugcuaggagaagu

SEQ ID NO: 2390303 - RNA, 19 nt, Artificial Sequence
  Description of Artificial Sequence: Synthetic oligonucleotide
  Antisense strand to SEQ ID NO: 2390302
acuucuccuagcauuucgc

SEQ ID NO: 2390304 - RNA, 19 nt, Artificial Sequence
  Description of Artificial Sequence: Synthetic oligonucleotide
  Sense strand starting at position 3263 of SEQ ID NO: 1886147
gugagucuccuggagacau

SEQ ID NO: 2390305 - RNA, 19 nt, Artificial Sequence
  Description of Artificial Sequence: Synthetic oligonucleotide
  Antisense strand to SEQ ID NO: 2390304
augucuccaggagacucac

SEQ ID NO: 2390306 - RNA, 19 nt, Artificial Sequence
  Description of Artificial Sequence: Synthetic oligonucleotide
  Sense strand starting at position 3594 of SEQ ID NO: 1886147
uugaauaacguuugcuauu

SEQ ID NO: 2390307 - RNA, 19 nt, Artificial Sequence
  Description of Artificial Sequence: Synthetic oligonucleotide
  Antisense strand to SEQ ID NO: 2390306
aauagcaaacguuauucaa

SEQ ID NO: 2390308 - RNA, 19 nt, Artificial Sequence
  Description of Artificial Sequence: Synthetic oligonucleotide
  Sense strand starting at position 3668 of SEQ ID NO: 1886147
uuugcuguguuucuuuauu

SEQ ID NO: 2390309 - RNA, 19 nt, Artificial Sequence
  Description of Artificial Sequence: Synthetic oligonucleotide
  Antisense strand to SEQ ID NO: 2390308
aauaaagaaacacagcaaa

SEQ ID NO: 2390310 - RNA, 19 nt, Artificial Sequence
  Description of Artificial Sequence: Synthetic oligonucleotide
  Sense strand starting at position 3721 of SEQ ID NO: 1886147
gcugcauuaucauaaaguu

SEQ ID NO: 2390311 - RNA, 19 nt, Artificial Sequence
  Description of Artificial Sequence: Synthetic oligonucleotide
  Antisense strand to SEQ ID NO: 2390310
aacuuuaugauaaugcagc

SEQ ID NO: 2390312 - RNA, 19 nt, Artificial Sequence
  Description of Artificial Sequence: Synthetic oligonucleotide
  Sense strand starting at position 3776 of SEQ ID NO: 1886147
agugccagagauugucaaa

SEQ ID NO: 2390313 - RNA, 19 nt, Artificial Sequence
  Description of Artificial Sequence: Synthetic oligonucleotide
  Antisense strand to SEQ ID NO: 2390312
uuugacaaucucuggcacu

SEQ ID NO: 2390314 - RNA, 19 nt, Artificial Sequence
  Description of Artificial Sequence: Synthetic oligonucleotide
  Sense strand starting at position 3891 of SEQ ID NO: 1886147
aggaaauucucgcuauuau

SEQ ID NO: 2390315 - RNA, 19 nt, Artificial Sequence
  Description of Artificial Sequence: Synthetic oligonucleotide
  Antisense strand to SEQ ID NO: 2390314
auaauagcgagaauuuccu

SEQ ID NO: 2390316 - RNA, 19 nt, Artificial Sequence
  Description of Artificial Sequence: Synthetic oligonucleotide
  Sense strand starting at position 3892 of SEQ ID NO: 1886147
ggaaauucucgcuauuauu

SEQ ID NO: 2390317 - RNA, 19 nt, Artificial Sequence
  Description of Artificial Sequence: Synthetic oligonucleotide
  Antisense strand to SEQ ID NO: 2390316
aauaauagcgagaauuucc

SEQ ID NO: 2390318 - RNA, 19 nt, Artificial Sequence
  Description of Artificial Sequence: Synthetic oligonucleotide
  Sense strand starting at position 3900 of SEQ ID NO: 1886147
ucgcuauuauuugaaaguc

SEQ ID NO: 2390319 - RNA, 19 nt, Artificial Sequence
  Description of Artificial Sequence: Synthetic oligonucleotide
  Antisense strand to SEQ ID NO: 2390318
gacuuucaaauaauagcga

SEQ ID NO: 2390320 - RNA, 19 nt, Artificial Sequence
  Description of Artificial Sequence: Synthetic oligonucleotide
  Sense strand starting at position 3908 of SEQ ID NO: 1886147
auuugaaagucauaguaga

SEQ ID NO: 2390321 - RNA, 19 nt, Artificial Sequence
  Description of Artificial Sequence: Synthetic oligonucleotide
  Antisense strand to SEQ ID NO: 2390320
ucuacuaugacuuucaaau

SEQ ID NO: 2390322 - RNA, 19 nt, Artificial Sequence
  Description of Artificial Sequence: Synthetic oligonucleotide
  Sense strand starting at position 3949 of SEQ ID NO: 1886147
aaauguaguuucgcuaaua

SEQ ID NO: 2390323 - RNA, 19 nt, Artificial Sequence
  Description of Artificial Sequence: Synthetic oligonucleotide
  Antisense strand to SEQ ID NO: 2390322
uauuagcgaaacuacauuu

SEQ ID NO: 2390324 - RNA, 19 nt, Artificial Sequence
  Description of Artificial Sequence: Synthetic oligonucleotide
  Sense strand starting at position 3950 of SEQ ID NO: 1886147
aauguaguuucgcuaauag

SEQ ID NO: 2390325 - RNA, 19 nt, Artificial Sequence
  Description of Artificial Sequence: Synthetic oligonucleotide
  Antisense strand to SEQ ID NO: 2390324
cuauuagcgaaacuacauu

SEQ ID NO: 2390326 - RNA, 19 nt, Artificial Sequence
  Description of Artificial Sequence: Synthetic oligonucleotide
  Sense strand starting at position 3967 of SEQ ID NO: 1886147
aguuaugguuucuaccuua

SEQ ID NO: 2390327 - RNA, 19 nt, Artificial Sequence
  Description of Artificial Sequence: Synthetic oligonucleotide
  Antisense strand to SEQ ID NO: 2390326
uaagguagaaaccauaacu

SEQ ID NO: 2390328 - RNA, 19 nt, Artificial Sequence
  Description of Artificial Sequence: Synthetic oligonucleotide
  Sense strand starting at position 143 of SEQ ID NO: 1886148
ggaaacuuaccuugcaaga

SEQ ID NO: 2390329 - RNA, 19 nt, Artificial Sequence
  Description of Artificial Sequence: Synthetic oligonucleotide
  Antisense strand to SEQ ID NO: 2390328
ucuugcaagguaaguuucc

SEQ ID NO: 2390330 - RNA, 19 nt, Artificial Sequence
  Description of Artificial Sequence: Synthetic oligonucleotide
  Sense strand starting at position 178 of SEQ ID NO: 1886148
gugcaaucucuguugcugu

SEQ ID NO: 2390331 - RNA, 19 nt, Artificial Sequence
  Description of Artificial Sequence: Synthetic oligonucleotide
  Antisense strand to SEQ ID NO: 2390330
acagcaacagagauugcac

SEQ ID NO: 2390332 - RNA, 19 nt, Artificial Sequence
  Description of Artificial Sequence: Synthetic oligonucleotide
  Sense strand starting at position 231 of SEQ ID NO: 1886148
agaugcaaacuuuaugagu

SEQ ID NO: 2390333 - RNA, 19 nt, Artificial Sequence
  Description of Artificial Sequence: Synthetic oligonucleotide
  Antisense strand to SEQ ID NO: 2390332
acucauaaaguuugcaucu

SEQ ID NO: 2390334 - RNA, 19 nt, Artificial Sequence
  Description of Artificial Sequence: Synthetic oligonucleotide
  Sense strand starting at position 240 of SEQ ID NO: 1886148
cuuuaugaguaacugagau

SEQ ID NO: 2390335 - RNA, 19 nt, Artificial Sequence
  Description of Artificial Sequence: Synthetic oligonucleotide
  Antisense strand to SEQ ID NO: 2390334
aucucaguuacucauaaag

SEQ ID NO: 2390336 - RNA, 19 nt, Artificial Sequence
  Description of Artificial Sequence: Synthetic oligonucleotide
  Sense strand starting at position 298 of SEQ ID NO: 1886148
caggaaauauuuggauaag

SEQ ID NO: 2390337 - RNA, 19 nt, Artificial Sequence
  Description of Artificial Sequence: Synthetic oligonucleotide
  Antisense strand to SEQ ID NO: 2390336
cuuauccaaauauuuccug

SEQ ID NO: 2390338 - RNA, 19 nt, Artificial Sequence
  Description of Artificial Sequence: Synthetic oligonucleotide
  Sense strand starting at position 326 of SEQ ID NO: 1886148
augaaauacuucuucguaa

SEQ ID NO: 2390339 - RNA, 19 nt, Artificial Sequence
  Description of Artificial Sequence: Synthetic oligonucleotide
  Antisense strand to SEQ ID NO: 2390338
uuacgaagaaguauuucau

SEQ ID NO: 2390340 - RNA, 19 nt, Artificial Sequence
  Description of Artificial Sequence: Synthetic oligonucleotide
  Sense strand starting at position 327 of SEQ ID NO: 1886148
ugaaauacuucuucguaaa

SEQ ID NO: 2390341 - RNA, 19 nt, Artificial Sequence
  Description of Artificial Sequence: Synthetic oligonucleotide
  Antisense strand to SEQ ID NO: 2390340
uuuacgaagaaguauuuca

SEQ ID NO: 2390342 - RNA, 19 nt, Artificial Sequence
  Description of Artificial Sequence: Synthetic oligonucleotide
  Sense strand starting at position 558 of SEQ ID NO: 1886148
ggugaaaugcacugaaaca

SEQ ID NO: 2390343 - RNA, 19 nt, Artificial Sequence
  Description of Artificial Sequence: Synthetic oligonucleotide
  Antisense strand to SEQ ID NO: 2390342
uguuucagugcauuucacc

SEQ ID NO: 2390344 - RNA, 19 nt, Artificial Sequence
  Description of Artificial Sequence: Synthetic oligonucleotide
  Sense strand starting at position 611 of SEQ ID NO: 1886148
ucugucugggaguauuauu

SEQ ID NO: 2390345 - RNA, 19 nt, Artificial Sequence
  Description of Artificial Sequence: Synthetic oligonucleotide
  Antisense strand to SEQ ID NO: 2390344
aauaauacucccagacaga

SEQ ID NO: 2390346 - RNA, 19 nt, Artificial Sequence
  Description of Artificial Sequence: Synthetic oligonucleotide
  Sense strand starting at position 616 of SEQ ID NO: 1886148
cugggaguauuauucgaaa

SEQ ID NO: 2390347 - RNA, 19 nt, Artificial Sequence
  Description of Artificial Sequence: Synthetic oligonucleotide
  Antisense strand to SEQ ID NO: 2390346
uuucgaauaauacucccag

SEQ ID NO: 2390348 - RNA, 19 nt, Artificial Sequence
  Description of Artificial Sequence: Synthetic oligonucleotide
  Sense strand starting at position 618 of SEQ ID NO: 1886148
gggaguauuauucgaaaga

SEQ ID NO: 2390349 - RNA, 19 nt, Artificial Sequence
  Description of Artificial Sequence: Synthetic oligonucleotide
  Antisense strand to SEQ ID NO: 2390348
ucuuucgaauaauacuccc

SEQ ID NO: 2390350 - RNA, 19 nt, Artificial Sequence
  Description of Artificial Sequence: Synthetic oligonucleotide
  Sense strand starting at position 674 of SEQ ID NO: 1886148
gccguaugucucuuacuuc

SEQ ID NO: 2390351 - RNA, 19 nt, Artificial Sequence
  Description of Artificial Sequence: Synthetic oligonucleotide
  Antisense strand to SEQ ID NO: 2390350
gaaguaagagacauacggc

SEQ ID NO: 2390352 - RNA, 19 nt, Artificial Sequence
  Description of Artificial Sequence: Synthetic oligonucleotide
  Sense strand starting at position 813 of SEQ ID NO: 1886148
ugaaguuugauaggauccu

SEQ ID NO: 2390353 - RNA, 19 nt, Artificial Sequence
  Description of Artificial Sequence: Synthetic oligonucleotide
  Antisense strand to SEQ ID NO: 2390352
aggauccuaucaaacuuca

SEQ ID NO: 2390354 - RNA, 19 nt, Artificial Sequence
  Description of Artificial Sequence: Synthetic oligonucleotide
  Sense strand starting at position 822 of SEQ ID NO: 1886148
auaggauccuuugcucaga

SEQ ID NO: 2390355 - RNA, 19 nt, Artificial Sequence
  Description of Artificial Sequence: Synthetic oligonucleotide
  Antisense strand to SEQ ID NO: 2390354
ucugagcaaaggauccuau

SEQ ID NO: 2390356 - RNA, 19 nt, Artificial Sequence
  Description of Artificial Sequence: Synthetic oligonucleotide
  Sense strand starting at position 845 of SEQ ID NO: 1886148
uacacagacuuguuggaga

SEQ ID NO: 2390357 - RNA, 19 nt, Artificial Sequence
  Description of Artificial Sequence: Synthetic oligonucleotide
  Antisense strand to SEQ ID NO: 2390356
ucuccaacaagucugugua

SEQ ID NO: 2390358 - RNA, 19 nt, Artificial Sequence
  Description of Artificial Sequence: Synthetic oligonucleotide
  Sense strand starting at position 977 of SEQ ID NO: 1886148
ccaagucauccuggacaaa

SEQ ID NO: 2390359 - RNA, 19 nt, Artificial Sequence
  Description of Artificial Sequence: Synthetic oligonucleotide
  Antisense strand to SEQ ID NO: 2390358
uuuguccaggaugacuugg

SEQ ID NO: 2390360 - RNA, 19 nt, Artificial Sequence
  Description of Artificial Sequence: Synthetic oligonucleotide
  Sense strand starting at position 1078 of SEQ ID NO: 1886148
gaagguaaguuuccaccca

SEQ ID NO: 2390361 - RNA, 19 nt, Artificial Sequence
  Description of Artificial Sequence: Synthetic oligonucleotide
  Antisense strand to SEQ ID NO: 2390360
uggguggaaacuuaccuuc

SEQ ID NO: 2390362 - RNA, 19 nt, Artificial Sequence
  Description of Artificial Sequence: Synthetic oligonucleotide
  Sense strand starting at position 1103 of SEQ ID NO: 1886148
uaucaucacuugguggaaa

SEQ ID NO: 2390363 - RNA, 19 nt, Artificial Sequence
  Description of Artificial Sequence: Synthetic oligonucleotide
  Antisense strand to SEQ ID NO: 2390362
uuuccaccaagugaugaua

SEQ ID NO: 2390364 - RNA, 19 nt, Artificial Sequence
  Description of Artificial Sequence: Synthetic oligonucleotide
  Sense strand starting at position 1129 of SEQ ID NO: 1886148
cuacuacugucacugauga

SEQ ID NO: 2390365 - RNA, 19 nt, Artificial Sequence
  Description of Artificial Sequence: Synthetic oligonucleotide
  Antisense strand to SEQ ID NO: 2390364
ucaucagugacaguaguag

SEQ ID NO: 2390366 - RNA, 19 nt, Artificial Sequence
  Description of Artificial Sequence: Synthetic oligonucleotide
  Sense strand starting at position 1220 of SEQ ID NO: 1886148
acccauuaucacugguuga

SEQ ID NO: 2390367 - RNA, 19 nt, Artificial Sequence
  Description of Artificial Sequence: Synthetic oligonucleotide
  Antisense strand to SEQ ID NO: 2390366
ucaaccagugauaaugggu

SEQ ID NO: 2390368 - RNA, 19 nt, Artificial Sequence
  Description of Artificial Sequence: Synthetic oligonucleotide
  Sense strand starting at position 1396 of SEQ ID NO: 1886148
gacugaagauauccacugu

SEQ ID NO: 2390369 - RNA, 19 nt, Artificial Sequence
  Description of Artificial Sequence: Synthetic oligonucleotide
  Antisense strand to SEQ ID NO: 2390368
acaguggauaucuucaguc

SEQ ID NO: 2390370 - RNA, 19 nt, Artificial Sequence
  Description of Artificial Sequence: Synthetic oligonucleotide
  Sense strand starting at position 1430 of SEQ ID NO: 1886148
gugaaaucuguagacagcu

SEQ ID NO: 2390371 - RNA, 19 nt, Artificial Sequence
  Description of Artificial Sequence: Synthetic oligonucleotide
  Antisense strand to SEQ ID NO: 2390370
agcugucuacagauuucac

SEQ ID NO: 2390372 - RNA, 19 nt, Artificial Sequence
  Description of Artificial Sequence: Synthetic oligonucleotide
  Sense strand starting at position 1482 of SEQ ID NO: 1886148
agaugaucuuucuugagac

SEQ ID NO: 2390373 - RNA, 19 nt, Artificial Sequence
  Description of Artificial Sequence: Synthetic oligonucleotide
  Antisense strand to SEQ ID NO: 2390372
gucucaagaaagaucaucu

SEQ ID NO: 2390374 - RNA, 19 nt, Artificial Sequence
  Description of Artificial Sequence: Synthetic oligonucleotide
  Sense strand starting at position 1490 of SEQ ID NO: 1886148
uuucuugagacugaacguu

SEQ ID NO: 2390375 - RNA, 19 nt, Artificial Sequence
  Description of Artificial Sequence: Synthetic oligonucleotide
  Antisense strand to SEQ ID NO: 2390374
aacguucagucucaagaaa

SEQ ID NO: 2390376 - RNA, 19 nt, Artificial Sequence
  Description of Artificial Sequence: Synthetic oligonucleotide
  Sense strand starting at position 1604 of SEQ ID NO: 1886148
ugugaacauggcuauccaa

SEQ ID NO: 2390377 - RNA, 19 nt, Artificial Sequence
  Description of Artificial Sequence: Synthetic oligonucleotide
  Antisense strand to SEQ ID NO: 2390376
uuggauagccauguucaca

SEQ ID NO: 2390378 - RNA, 19 nt, Artificial Sequence
  Description of Artificial Sequence: Synthetic oligonucleotide
  Sense strand starting at position 1961 of SEQ ID NO: 1886148
cuugauuuccagcgaccuu

SEQ ID NO: 2390379 - RNA, 19 nt, Artificial Sequence
  Description of Artificial Sequence: Synthetic oligonucleotide
  Antisense strand to SEQ ID NO: 2390378
aaggucgcuggaaaucaag

SEQ ID NO: 2390380 - RNA, 19 nt, Artificial Sequence
  Description of Artificial Sequence: Synthetic oligonucleotide
  Sense strand starting at position 2294 of SEQ ID NO: 1886148
cuaggaaucuagucaaguu

SEQ ID NO: 2390381 - RNA, 19 nt, Artificial Sequence
  Description of Artificial Sequence: Synthetic oligonucleotide
  Antisense strand to SEQ ID NO: 2390380
aacuugacuagauuccuag

SEQ ID NO: 2390382 - RNA, 19 nt, Artificial Sequence
  Description of Artificial Sequence: Synthetic oligonucleotide
  Sense strand starting at position 2316 of SEQ ID NO: 1886148
uaauauagggacuguuaau

SEQ ID NO: 2390383 - RNA, 19 nt, Artificial Sequence
  Description of Artificial Sequence: Synthetic oligonucleotide
  Antisense strand to SEQ ID NO: 2390382
auuaacagucccuauauua

SEQ ID NO: 2390384 - RNA, 19 nt, Artificial Sequence
  Description of Artificial Sequence: Synthetic oligonucleotide
  Sense strand starting at position 2357 of SEQ ID NO: 1886148
ucaaacaguuagguaaauu

SEQ ID NO: 2390385 - RNA, 19 nt, Artificial Sequence
  Description of Artificial Sequence: Synthetic oligonucleotide
  Antisense strand to SEQ ID NO: 2390384
aauuuaccuaacuguuuga

SEQ ID NO: 2390386 - RNA, 19 nt, Artificial Sequence
  Description of Artificial Sequence: Synthetic oligonucleotide
  Sense strand starting at position 2553 of SEQ ID NO: 1886148
agaagcugucacuaagcau

SEQ ID NO: 2390387 - RNA, 19 nt, Artificial Sequence
  Description of Artificial Sequence: Synthetic oligonucleotide
  Antisense strand to SEQ ID NO: 2390386
augcuuagugacagcuucu

SEQ ID NO: 2390388 - RNA, 19 nt, Artificial Sequence
  Description of Artificial Sequence: Synthetic oligonucleotide
  Sense strand starting at position 2606 of SEQ ID NO: 1886148
guagaacagucuuuaaaug

SEQ ID NO: 2390389 - RNA, 19 nt, Artificial Sequence
  Description of Artificial Sequence: Synthetic oligonucleotide
  Antisense strand to SEQ ID NO: 2390388
cauuuaaagacuguucuac

SEQ ID NO: 2390390 - RNA, 19 nt, Artificial Sequence
  Description of Artificial Sequence: Synthetic oligonucleotide
  Sense strand starting at position 2787 of SEQ ID NO: 1886148
uguugugguaaguaaagaa

SEQ ID NO: 2390391 - RNA, 19 nt, Artificial Sequence
  Description of Artificial Sequence: Synthetic oligonucleotide
  Antisense strand to SEQ ID NO: 2390390
uucuuuacuuaccacaaca

SEQ ID NO: 2390392 - RNA, 19 nt, Artificial Sequence
  Description of Artificial Sequence: Synthetic oligonucleotide
  Sense strand starting at position 2911 of SEQ ID NO: 1886148
ccauuuagcuguuugauau

SEQ ID NO: 2390393 - RNA, 19 nt, Artificial Sequence
  Description of Artificial Sequence: Synthetic oligonucleotide
  Antisense strand to SEQ ID NO: 2390392
auaucaaacagcuaaaugg

SEQ ID NO: 2390394 - RNA, 19 nt, Artificial Sequence
  Description of Artificial Sequence: Synthetic oligonucleotide
  Sense strand starting at position 3010 of SEQ ID NO: 1886148
cuacccuagagguggaauu

SEQ ID NO: 2390395 - RNA, 19 nt, Artificial Sequence
  Description of Artificial Sequence: Synthetic oligonucleotide
  Antisense strand to SEQ ID NO: 2390394
aauuccaccucuaggguag

SEQ ID NO: 2390396 - RNA, 19 nt, Artificial Sequence
  Description of Artificial Sequence: Synthetic oligonucleotide
  Sense strand starting at position 3011 of SEQ ID NO: 1886148
uacccuagagguggaauua

SEQ ID NO: 2390397 - RNA, 19 nt, Artificial Sequence
  Description of Artificial Sequence: Synthetic oligonucleotide
  Antisense strand to SEQ ID NO: 2390396
uaauuccaccucuagggua

SEQ ID NO: 2390398 - RNA, 19 nt, Artificial Sequence
  Description of Artificial Sequence: Synthetic oligonucleotide
  Sense strand starting at position 3020 of SEQ ID NO: 1886148
gguggaauuacucaccagu

SEQ ID NO: 2390399 - RNA, 19 nt, Artificial Sequence
  Description of Artificial Sequence: Synthetic oligonucleotide
  Antisense strand to SEQ ID NO: 2390398
acuggugaguaauuccacc

SEQ ID NO: 2390400 - RNA, 19 nt, Artificial Sequence
  Description of Artificial Sequence: Synthetic oligonucleotide
  Sense strand starting at position 3023 of SEQ ID NO: 1886148
ggaauuacucaccagugcu

SEQ ID NO: 2390401 - RNA, 19 nt, Artificial Sequence
  Description of Artificial Sequence: Synthetic oligonucleotide
  Antisense strand to SEQ ID NO: 2390400
agcacuggugaguaauucc

SEQ ID NO: 2390402 - RNA, 19 nt, Artificial Sequence
  Description of Artificial Sequence: Synthetic oligonucleotide
  Sense strand starting at position 3209 of SEQ ID NO: 1886148
gguauucuauuugaaagaa

SEQ ID NO: 2390403 - RNA, 19 nt, Artificial Sequence
  Description of Artificial Sequence: Synthetic oligonucleotide
  Antisense strand to SEQ ID NO: 2390402
uucuuucaaauagaauacc

SEQ ID NO: 2390404 - RNA, 19 nt, Artificial Sequence
  Description of Artificial Sequence: Synthetic oligonucleotide
  Sense strand starting at position 3763 of SEQ ID NO: 1886148
ucuuucugggauuaagugu

SEQ ID NO: 2390405 - RNA, 19 nt, Artificial Sequence
  Description of Artificial Sequence: Synthetic oligonucleotide
  Antisense strand to SEQ ID NO: 2390404
acacuuaaucccagaaaga

SEQ ID NO: 2390406 - RNA, 19 nt, Artificial Sequence
  Description of Artificial Sequence: Synthetic oligonucleotide
  Sense strand starting at position 3813 of SEQ ID NO: 1886148
cuaauaggcuaaucaauga

SEQ ID NO: 2390407 - RNA, 19 nt, Artificial Sequence
  Description of Artificial Sequence: Synthetic oligonucleotide
  Antisense strand to SEQ ID NO: 2390406
ucauugauuagccuauuag

SEQ ID NO: 2390408 - RNA, 19 nt, Artificial Sequence
  Description of Artificial Sequence: Synthetic oligonucleotide
  Sense strand starting at position 140 of SEQ ID NO: 1886149
cagguauacugucuugauc

SEQ ID NO: 2390409 - RNA, 19 nt, Artificial Sequence
  Description of Artificial Sequence: Synthetic oligonucleotide
  Antisense strand to SEQ ID NO: 2390408
gaucaagacaguauaccug

SEQ ID NO: 2390410 - RNA, 19 nt, Artificial Sequence
  Description of Artificial Sequence: Synthetic oligonucleotide
  Sense strand starting at position 148 of SEQ ID NO: 1886149
cugucuugaucugcagaug

SEQ ID NO: 2390411 - RNA, 19 nt, Artificial Sequence
  Description of Artificial Sequence: Synthetic oligonucleotide
  Antisense strand to SEQ ID NO: 2390410
caucugcagaucaagacag

SEQ ID NO: 2390412 - RNA, 19 nt, Artificial Sequence
  Description of Artificial Sequence: Synthetic oligonucleotide
  Sense strand starting at position 149 of SEQ ID NO: 1886149
ugucuugaucugcagauga

SEQ ID NO: 2390413 - RNA, 19 nt, Artificial Sequence
  Description of Artificial Sequence: Synthetic oligonucleotide
  Antisense strand to SEQ ID NO: 2390412
ucaucugcagaucaagaca

SEQ ID NO: 2390414 - RNA, 19 nt, Artificial Sequence
  Description of Artificial Sequence: Synthetic oligonucleotide
  Sense strand starting at position 153 of SEQ ID NO: 1886149
uugaucugcagaugagaga

SEQ ID NO: 2390415 - RNA, 19 nt, Artificial Sequence
  Description of Artificial Sequence: Synthetic oligonucleotide
  Antisense strand to SEQ ID NO: 2390414
ucucucaucugcagaucaa

SEQ ID NO: 2390416 - RNA, 19 nt, Artificial Sequence
  Description of Artificial Sequence: Synthetic oligonucleotide
  Sense strand starting at position 1200 of SEQ ID NO: 1886149
cugaaagggucuuaggauc

SEQ ID NO: 2390417 - RNA, 19 nt, Artificial Sequence
  Description of Artificial Sequence: Synthetic oligonucleotide
  Antisense strand to SEQ ID NO: 2390416
gauccuaagacccuuucag

SEQ ID NO: 2390418 - RNA, 19 nt, Artificial Sequence
  Description of Artificial Sequence: Synthetic oligonucleotide
  Sense strand starting at position 2658 of SEQ ID NO: 1886149
uccuguguggcuggaguau

SEQ ID NO: 2390419 - RNA, 19 nt, Artificial Sequence
  Description of Artificial Sequence: Synthetic oligonucleotide
  Antisense strand to SEQ ID NO: 2390418
auacuccagccacacagga

SEQ ID NO: 2390420 - RNA, 19 nt, Artificial Sequence
  Description of Artificial Sequence: Synthetic oligonucleotide
  Sense strand starting at position 2670 of SEQ ID NO: 1886149
ggaguauagcugcggguua

SEQ ID NO: 2390421 - RNA, 19 nt, Artificial Sequence
  Description of Artificial Sequence: Synthetic oligonucleotide
  Antisense strand to SEQ ID NO: 2390420
uaacccgcagcuauacucc

SEQ ID NO: 2390422 - RNA, 19 nt, Artificial Sequence
  Description of Artificial Sequence: Synthetic oligonucleotide
  Sense strand starting at position 2685 of SEQ ID NO: 1886149
guuagugcuggcaggugaa

SEQ ID NO: 2390423 - RNA, 19 nt, Artificial Sequence
  Description of Artificial Sequence: Synthetic oligonucleotide
  Antisense strand to SEQ ID NO: 2390422
uucaccugccagcacuaac

SEQ ID NO: 2390424 - RNA, 19 nt, Artificial Sequence
  Description of Artificial Sequence: Synthetic oligonucleotide
  Sense strand starting at position 2773 of SEQ ID NO: 1886149
auucuaaguguauaccuaa

SEQ ID NO: 2390425 - RNA, 19 nt, Artificial Sequence
  Description of Artificial Sequence: Synthetic oligonucleotide
  Antisense strand to SEQ ID NO: 2390424
uuagguauacacuuagaau

SEQ ID NO: 2390426 - RNA, 19 nt, Artificial Sequence
  Description of Artificial Sequence: Synthetic oligonucleotide
  Sense strand starting at position 2825 of SEQ ID NO: 1886149
ccugcuacgucuccuuauu

SEQ ID NO: 2390427 - RNA, 19 nt, Artificial Sequence
  Description of Artificial Sequence: Synthetic oligonucleotide
  Antisense strand to SEQ ID NO: 2390426
aauaaggagacguagcagg

SEQ ID NO: 2390428 - RNA, 19 nt, Artificial Sequence
  Description of Artificial Sequence: Synthetic oligonucleotide
  Sense strand starting at position 2834 of SEQ ID NO: 1886149
ucuccuuauuaggcguaau

SEQ ID NO: 2390429 - RNA, 19 nt, Artificial Sequence
  Description of Artificial Sequence: Synthetic oligonucleotide
  Antisense strand to SEQ ID NO: 2390428
auuacgccuaauaaggaga

SEQ ID NO: 2390430 - RNA, 19 nt, Artificial Sequence
  Description of Artificial Sequence: Synthetic oligonucleotide
  Sense strand starting at position 2837 of SEQ ID NO: 1886149
ccuuauuaggcguaauaaa

SEQ ID NO: 2390431 - RNA, 19 nt, Artificial Sequence
  Description of Artificial Sequence: Synthetic oligonucleotide
  Antisense strand to SEQ ID NO: 2390430
uuuauuacgccuaauaagg

SEQ ID NO: 2390432 - RNA, 19 nt, Artificial Sequence
  Description of Artificial Sequence: Synthetic oligonucleotide
  Sense strand starting at position 2857 of SEQ ID NO: 1886149
uuauguggcuuuguaagaa

SEQ ID NO: 2390433 - RNA, 19 nt, Artificial Sequence
  Description of Artificial Sequence: Synthetic oligonucleotide
  Antisense strand to SEQ ID NO: 2390432
uucuuacaaagccacauaa

SEQ ID NO: 2390434 - RNA, 19 nt, Artificial Sequence
  Description of Artificial Sequence: Synthetic oligonucleotide
  Sense strand starting at position 2861 of SEQ ID NO: 1886149
guggcuuuguaagaaauug

SEQ ID NO: 2390435 - RNA, 19 nt, Artificial Sequence
  Description of Artificial Sequence: Synthetic oligonucleotide
  Antisense strand to SEQ ID NO: 2390434
caauuucuuacaaagccac

SEQ ID NO: 2390436 - RNA, 19 nt, Artificial Sequence
  Description of Artificial Sequence: Synthetic oligonucleotide
  Sense strand starting at position 2883 of SEQ ID NO: 1886149
uuuagagaugcauguuaaa

SEQ ID NO: 2390437 - RNA, 19 nt, Artificial Sequence
  Description of Artificial Sequence: Synthetic oligonucleotide
  Antisense strand to SEQ ID NO: 2390436
uuuaacaugcaucucuaaa

SEQ ID NO: 2390438 - RNA, 19 nt, Artificial Sequence
  Description of Artificial Sequence: Synthetic oligonucleotide
  Sense strand starting at position 2886 of SEQ ID NO: 1886149
agagaugcauguuaaagua

SEQ ID NO: 2390439 - RNA, 19 nt, Artificial Sequence
  Description of Artificial Sequence: Synthetic oligonucleotide
  Antisense strand to SEQ ID NO: 2390438
uacuuuaacaugcaucucu

SEQ ID NO: 2390440 - RNA, 19 nt, Artificial Sequence
  Description of Artificial Sequence: Synthetic oligonucleotide
  Sense strand starting at position 2896 of SEQ ID NO: 1886149
guuaaaguauuggguauga

SEQ ID NO: 2390441 - RNA, 19 nt, Artificial Sequence
  Description of Artificial Sequence: Synthetic oligonucleotide
  Antisense strand to SEQ ID NO: 2390440
ucauacccaauacuuuaac

SEQ ID NO: 2390442 - RNA, 19 nt, Artificial Sequence
  Description of Artificial Sequence: Synthetic oligonucleotide
  Sense strand starting at position 2900 of SEQ ID NO: 1886149
aaguauuggguaugaaaug

SEQ ID NO: 2390443 - RNA, 19 nt, Artificial Sequence
  Description of Artificial Sequence: Synthetic oligonucleotide
  Antisense strand to SEQ ID NO: 2390442
cauuucauacccaauacuu

SEQ ID NO: 2390444 - RNA, 19 nt, Artificial Sequence
  Description of Artificial Sequence: Synthetic oligonucleotide
  Sense strand starting at position 2901 of SEQ ID NO: 1886149
aguauuggguaugaaaugu

SEQ ID NO: 2390445 - RNA, 19 nt, Artificial Sequence
  Description of Artificial Sequence: Synthetic oligonucleotide
  Antisense strand to SEQ ID NO: 2390444
acauuucauacccaauacu

SEQ ID NO: 2390446 - RNA, 19 nt, Artificial Sequence
  Description of Artificial Sequence: Synthetic oligonucleotide
  Sense strand starting at position 2905 of SEQ ID NO: 1886149
uuggguaugaaaugucaug

SEQ ID NO: 2390447 - RNA, 19 nt, Artificial Sequence
  Description of Artificial Sequence: Synthetic oligonucleotide
  Antisense strand to SEQ ID NO: 2390446
caugacauuucauacccaa

SEQ ID NO: 2390448 - RNA, 19 nt, Artificial Sequence
  Description of Artificial Sequence: Synthetic oligonucleotide
  Sense strand starting at position 2910 of SEQ ID NO: 1886149
uaugaaaugucaugauuug

SEQ ID NO: 2390449 - RNA, 19 nt, Artificial Sequence
  Description of Artificial Sequence: Synthetic oligonucleotide
  Antisense strand to SEQ ID NO: 2390448
caaaucaugacauuucaua

SEQ ID NO: 2390450 - RNA, 19 nt, Artificial Sequence
  Description of Artificial Sequence: Synthetic oligonucleotide
  Sense strand starting at position 2979 of SEQ ID NO: 1886149
acuugauauuaguugacaa

SEQ ID NO: 2390451 - RNA, 19 nt, Artificial Sequence
  Description of Artificial Sequence: Synthetic oligonucleotide
  Antisense strand to SEQ ID NO: 2390450
uugucaacuaauaucaagu

SEQ ID NO: 2390452 - RNA, 19 nt, Artificial Sequence
  Description of Artificial Sequence: Synthetic oligonucleotide
  Sense strand starting at position 3670 of SEQ ID NO: 1886149
cgcgccuggcuggauuaua

SEQ ID NO: 2390453 - RNA, 19 nt, Artificial Sequence
  Description of Artificial Sequence: Synthetic oligonucleotide
  Antisense strand to SEQ ID NO: 2390452
uauaauccagccaggcgcg

SEQ ID NO: 2390454 - RNA, 19 nt, Artificial Sequence
  Description of Artificial Sequence: Synthetic oligonucleotide
  Sense strand starting at position 3763 of SEQ ID NO: 1886149
augauaccuuucugaagag

SEQ ID NO: 2390455 - RNA, 19 nt, Artificial Sequence
  Description of Artificial Sequence: Synthetic oligonucleotide
  Antisense strand to SEQ ID NO: 2390454
cucuucagaaagguaucau

SEQ ID NO: 2390456 - RNA, 19 nt, Artificial Sequence
  Description of Artificial Sequence: Synthetic oligonucleotide
  Sense strand starting at position 3764 of SEQ ID NO: 1886149
ugauaccuuucugaagagu

SEQ ID NO: 2390457 - RNA, 19 nt, Artificial Sequence
  Description of Artificial Sequence: Synthetic oligonucleotide
  Antisense strand to SEQ ID NO: 2390456
acucuucagaaagguauca

SEQ ID NO: 2390458 - RNA, 19 nt, Artificial Sequence
  Description of Artificial Sequence: Synthetic oligonucleotide
  Sense strand starting at position 3775 of SEQ ID NO: 1886149
ugaagagucucagccaguu

SEQ ID NO: 2390459 - RNA, 19 nt, Artificial Sequence
  Description of Artificial Sequence: Synthetic oligonucleotide
  Antisense strand to SEQ ID NO: 2390458
aacuggcugagacucuuca

SEQ ID NO: 2390460 - RNA, 19 nt, Artificial Sequence
  Description of Artificial Sequence: Synthetic oligonucleotide
  Sense strand starting at position 3781 of SEQ ID NO: 1886149
gucucagccaguuguuguu

SEQ ID NO: 2390461 - RNA, 19 nt, Artificial Sequence
  Description of Artificial Sequence: Synthetic oligonucleotide
  Antisense strand to SEQ ID NO: 2390460
aacaacaacuggcugagac

SEQ ID NO: 2390462 - RNA, 19 nt, Artificial Sequence
  Description of Artificial Sequence: Synthetic oligonucleotide
  Sense strand starting at position 3787 of SEQ ID NO: 1886149
gccaguuguuguuugagau

SEQ ID NO: 2390463 - RNA, 19 nt, Artificial Sequence
  Description of Artificial Sequence: Synthetic oligonucleotide
  Antisense strand to SEQ ID NO: 2390462
aucucaaacaacaacuggc

SEQ ID NO: 2390464 - RNA, 19 nt, Artificial Sequence
  Description of Artificial Sequence: Synthetic oligonucleotide
  Sense strand starting at position 3788 of SEQ ID NO: 1886149
ccaguuguuguuugagaua

SEQ ID NO: 2390465 - RNA, 19 nt, Artificial Sequence
  Description of Artificial Sequence: Synthetic oligonucleotide
  Antisense strand to SEQ ID NO: 2390464
uaucucaaacaacaacugg

SEQ ID NO: 2390466 - RNA, 19 nt, Artificial Sequence
  Description of Artificial Sequence: Synthetic oligonucleotide
  Sense strand starting at position 3791 of SEQ ID NO: 1886149
guuguuguuugagauagau

SEQ ID NO: 2390467 - RNA, 19 nt, Artificial Sequence
  Description of Artificial Sequence: Synthetic oligonucleotide
  Antisense strand to SEQ ID NO: 2390466
aucuaucucaaacaacaac

SEQ ID NO: 2390468 - RNA, 19 nt, Artificial Sequence
  Description of Artificial Sequence: Synthetic oligonucleotide
  Sense strand starting at position 3800 of SEQ ID NO: 1886149
ugagauagaugcugcauca

SEQ ID NO: 2390469 - RNA, 19 nt, Artificial Sequence
  Description of Artificial Sequence: Synthetic oligonucleotide
  Antisense strand to SEQ ID NO: 2390468
ugaugcagcaucuaucuca

SEQ ID NO: 2390470 - RNA, 19 nt, Artificial Sequence
  Description of Artificial Sequence: Synthetic oligonucleotide
  Sense strand starting at position 3823 of SEQ ID NO: 1886149
cucaauuugucugaaugua

SEQ ID NO: 2390471 - RNA, 19 nt, Artificial Sequence
  Description of Artificial Sequence: Synthetic oligonucleotide
  Antisense strand to SEQ ID NO: 2390470
uacauucagacaaauugag

SEQ ID NO: 2390472 - RNA, 19 nt, Artificial Sequence
  Description of Artificial Sequence: Synthetic oligonucleotide
  Sense strand starting at position 3833 of SEQ ID NO: 1886149
cugaauguauccucagggu

SEQ ID NO: 2390473 - RNA, 19 nt, Artificial Sequence
  Description of Artificial Sequence: Synthetic oligonucleotide
  Antisense strand to SEQ ID NO: 2390472
acccugaggauacauucag

SEQ ID NO: 2390474 - RNA, 19 nt, Artificial Sequence
  Description of Artificial Sequence: Synthetic oligonucleotide
  Sense strand starting at position 3846 of SEQ ID NO: 1886149
cagggugucacugauauug

SEQ ID NO: 2390475 - RNA, 19 nt, Artificial Sequence
  Description of Artificial Sequence: Synthetic oligonucleotide
  Antisense strand to SEQ ID NO: 2390474
caauaucagugacacccug

SEQ ID NO: 2390476 - RNA, 19 nt, Artificial Sequence
  Description of Artificial Sequence: Synthetic oligonucleotide
  Sense strand starting at position 3848 of SEQ ID NO: 1886149
gggugucacugauauuguc

SEQ ID NO: 2390477 - RNA, 19 nt, Artificial Sequence
  Description of Artificial Sequence: Synthetic oligonucleotide
  Antisense strand to SEQ ID NO: 2390476
gacaauaucagugacaccc

SEQ ID NO: 2390478 - RNA, 19 nt, Artificial Sequence
  Description of Artificial Sequence: Synthetic oligonucleotide
  Sense strand starting at position 3854 of SEQ ID NO: 1886149
cacugauauugucacagag

SEQ ID NO: 2390479 - RNA, 19 nt, Artificial Sequence
  Description of Artificial Sequence: Synthetic oligonucleotide
  Antisense strand to SEQ ID NO: 2390478
cucugugacaauaucagug

SEQ ID NO: 2390480 - RNA, 19 nt, Artificial Sequence
  Description of Artificial Sequence: Synthetic oligonucleotide
  Sense strand starting at position 3856 of SEQ ID NO: 1886149
cugauauugucacagagau

SEQ ID NO: 2390481 - RNA, 19 nt, Artificial Sequence
  Description of Artificial Sequence: Synthetic oligonucleotide
  Antisense strand to SEQ ID NO: 2390480
aucucugugacaauaucag

SEQ ID NO: 2390482 - RNA, 19 nt, Artificial Sequence
  Description of Artificial Sequence: Synthetic oligonucleotide
  Sense strand starting at position 3866 of SEQ ID NO: 1886149
cacagagauugguccucua

SEQ ID NO: 2390483 - RNA, 19 nt, Artificial Sequence
  Description of Artificial Sequence: Synthetic oligonucleotide
  Antisense strand to SEQ ID NO: 2390482
uagaggaccaaucucugug

SEQ ID NO: 2390484 - RNA, 19 nt, Artificial Sequence
  Description of Artificial Sequence: Synthetic oligonucleotide
  Sense strand starting at position 3869 of SEQ ID NO: 1886149
agagauugguccucuaucu

SEQ ID NO: 2390485 - RNA, 19 nt, Artificial Sequence
  Description of Artificial Sequence: Synthetic oligonucleotide
  Antisense strand to SEQ ID NO: 2390484
agauagaggaccaaucucu

SEQ ID NO: 2390486 - RNA, 19 nt, Artificial Sequence
  Description of Artificial Sequence: Synthetic oligonucleotide
  Sense strand starting at position 3896 of SEQ ID NO: 1886149
uccugcaugcugggaauua

SEQ ID NO: 2390487 - RNA, 19 nt, Artificial Sequence
  Description of Artificial Sequence: Synthetic oligonucleotide
  Antisense strand to SEQ ID NO: 2390486
uaauucccagcaugcagga

SEQ ID NO: 2390488 - RNA, 19 nt, Artificial Sequence
  Description of Artificial Sequence: Synthetic oligonucleotide
  Sense strand starting at position 1259 of SEQ ID NO: 1886150
ugcaacaacugacugaaau

SEQ ID NO: 2390489 - RNA, 19 nt, Artificial Sequence
  Description of Artificial Sequence: Synthetic oligonucleotide
  Antisense strand to SEQ ID NO: 2390488
auuucagucaguuguugca

SEQ ID NO: 2390490 - RNA, 19 nt, Artificial Sequence
  Description of Artificial Sequence: Synthetic oligonucleotide
  Sense strand starting at position 1260 of SEQ ID NO: 1886150
gcaacaacugacugaaauu

SEQ ID NO: 2390491 - RNA, 19 nt, Artificial Sequence
  Description of Artificial Sequence: Synthetic oligonucleotide
  Antisense strand to SEQ ID NO: 2390490
aauuucagucaguuguugc

SEQ ID NO: 2390492 - RNA, 19 nt, Artificial Sequence
  Description of Artificial Sequence: Synthetic oligonucleotide
  Sense strand starting at position 1925 of SEQ ID NO: 1886150
cuaugcuggcacuaaguaa

SEQ ID NO: 2390493 - RNA, 19 nt, Artificial Sequence
  Description of Artificial Sequence: Synthetic oligonucleotide
  Antisense strand to SEQ ID NO: 2390492
uuacuuagugccagcauag

SEQ ID NO: 2390494 - RNA, 19 nt, Artificial Sequence
  Description of Artificial Sequence: Synthetic oligonucleotide
  Sense strand starting at position 1938 of SEQ ID NO: 1886150
aaguaaguuugacauugca

SEQ ID NO: 2390495 - RNA, 19 nt, Artificial Sequence
  Description of Artificial Sequence: Synthetic oligonucleotide
  Antisense strand to SEQ ID NO: 2390494
ugcaaugucaaacuuacuu

SEQ ID NO: 2390496 - RNA, 19 nt, Artificial Sequence
  Description of Artificial Sequence: Synthetic oligonucleotide
  Sense strand starting at position 3147 of SEQ ID NO: 1886150
cuuuguuguuauucccuaa

SEQ ID NO: 2390497 - RNA, 19 nt, Artificial Sequence
  Description of Artificial Sequence: Synthetic oligonucleotide
  Antisense strand to SEQ ID NO: 2390496
uuagggaauaacaacaaag

SEQ ID NO: 2390498 - RNA, 19 nt, Artificial Sequence
  Description of Artificial Sequence: Synthetic oligonucleotide
  Sense strand starting at position 511 of SEQ ID NO: 1886151
ggcuguugcuaaucaauca

SEQ ID NO: 2390499 - RNA, 19 nt, Artificial Sequence
  Description of Artificial Sequence: Synthetic oligonucleotide
  Antisense strand to SEQ ID NO: 2390498
ugauugauuagcaacagcc

SEQ ID NO: 2390500 - RNA, 19 nt, Artificial Sequence
  Description of Artificial Sequence: Synthetic oligonucleotide
  Sense strand starting at position 3050 of SEQ ID NO: 1886152
cgaguucuguauccacaga

SEQ ID NO: 2390501 - RNA, 19 nt, Artificial Sequence
  Description of Artificial Sequence: Synthetic oligonucleotide
  Antisense strand to SEQ ID NO: 2390500
ucuguggauacagaacucg

SEQ ID NO: 2390502 - RNA, 19 nt, Artificial Sequence
  Description of Artificial Sequence: Synthetic oligonucleotide
  Sense strand starting at position 3381 of SEQ ID NO: 1886152
gacagauacugagagauga

SEQ ID NO: 2390503 - RNA, 19 nt, Artificial Sequence
  Description of Artificial Sequence: Synthetic oligonucleotide
  Antisense strand to SEQ ID NO: 2390502
ucaucucucaguaucuguc

SEQ ID NO: 2390504 - RNA, 19 nt, Artificial Sequence
  Description of Artificial Sequence: Synthetic oligonucleotide
  Sense strand starting at position 3394 of SEQ ID NO: 1886152
agaugaccauauuauaaag

SEQ ID NO: 2390505 - RNA, 19 nt, Artificial Sequence
  Description of Artificial Sequence: Synthetic oligonucleotide
  Antisense strand to SEQ ID NO: 2390504
cuuuauaauauggucaucu

SEQ ID NO: 2390506 - RNA, 19 nt, Artificial Sequence
  Description of Artificial Sequence: Synthetic oligonucleotide
  Sense strand starting at position 3408 of SEQ ID NO: 1886152
uaaagcuagguuuggucaa

SEQ ID NO: 2390507 - RNA, 19 nt, Artificial Sequence
  Description of Artificial Sequence: Synthetic oligonucleotide
  Antisense strand to SEQ ID NO: 2390506
uugaccaaaccuagcuuua

SEQ ID NO: 2390508 - RNA, 19 nt, Artificial Sequence
  Description of Artificial Sequence: Synthetic oligonucleotide
  Sense strand starting at position 3409 of SEQ ID NO: 1886152
aaagcuagguuuggucaaa

SEQ ID NO: 2390509 - RNA, 19 nt, Artificial Sequence
  Description of Artificial Sequence: Synthetic oligonucleotide
  Antisense strand to SEQ ID NO: 2390508
uuugaccaaaccuagcuuu

SEQ ID NO: 2390510 - RNA, 19 nt, Artificial Sequence
  Description of Artificial Sequence: Synthetic oligonucleotide
  Sense strand starting at position 195 of SEQ ID NO: 1886153
gucauauacugccucauau

SEQ ID NO: 2390511 - RNA, 19 nt, Artificial Sequence
  Description of Artificial Sequence: Synthetic oligonucleotide
  Antisense strand to SEQ ID NO: 2390510
auaugaggcaguauaugac

SEQ ID NO: 2390512 - RNA, 19 nt, Artificial Sequence
  Description of Artificial Sequence: Synthetic oligonucleotide
  Sense strand starting at position 395 of SEQ ID NO: 1886153
gcuugagcccugggaauug

SEQ ID NO: 2390513 - RNA, 19 nt, Artificial Sequence
  Description of Artificial Sequence: Synthetic oligonucleotide
  Antisense strand to SEQ ID NO: 2390512
caauucccagggcucaagc

SEQ ID NO: 2390514 - RNA, 19 nt, Artificial Sequence
  Description of Artificial Sequence: Synthetic oligonucleotide
  Sense strand starting at position 433 of SEQ ID NO: 1886153
ugaugaggcuaucucuaca

SEQ ID NO: 2390515 - RNA, 19 nt, Artificial Sequence
  Description of Artificial Sequence: Synthetic oligonucleotide
  Antisense strand to SEQ ID NO: 2390514
uguagagauagccucauca

SEQ ID NO: 2390516 - RNA, 19 nt, Artificial Sequence
  Description of Artificial Sequence: Synthetic oligonucleotide
  Sense strand starting at position 562 of SEQ ID NO: 1886153
cggugaucacaucauugua

SEQ ID NO: 2390517 - RNA, 19 nt, Artificial Sequence
  Description of Artificial Sequence: Synthetic oligonucleotide
  Antisense strand to SEQ ID NO: 2390516
uacaaugaugugaucaccg

SEQ ID NO: 2390518 - RNA, 19 nt, Artificial Sequence
  Description of Artificial Sequence: Synthetic oligonucleotide
  Sense strand starting at position 564 of SEQ ID NO: 1886153
gugaucacaucauuguacu

SEQ ID NO: 2390519 - RNA, 19 nt, Artificial Sequence
  Description of Artificial Sequence: Synthetic oligonucleotide
  Antisense strand to SEQ ID NO: 2390518
aguacaaugaugugaucac

SEQ ID NO: 2390520 - RNA, 19 nt, Artificial Sequence
  Description of Artificial Sequence: Synthetic oligonucleotide
  Sense strand starting at position 672 of SEQ ID NO: 1886153
auguguauaccauguuaua

SEQ ID NO: 2390521 - RNA, 19 nt, Artificial Sequence
  Description of Artificial Sequence: Synthetic oligonucleotide
  Antisense strand to SEQ ID NO: 2390520
uauaacaugguauacacau

SEQ ID NO: 2390522 - RNA, 19 nt, Artificial Sequence
  Description of Artificial Sequence: Synthetic oligonucleotide
  Sense strand starting at position 697 of SEQ ID NO: 1886153
gguugagccauauguaaua

SEQ ID NO: 2390523 - RNA, 19 nt, Artificial Sequence
  Description of Artificial Sequence: Synthetic oligonucleotide
  Antisense strand to SEQ ID NO: 2390522
uauuacauauggcucaacc

SEQ ID NO: 2390524 - RNA, 19 nt, Artificial Sequence
  Description of Artificial Sequence: Synthetic oligonucleotide
  Sense strand starting at position 812 of SEQ ID NO: 1886153
ccagcaucccuguaccuua

SEQ ID NO: 2390525 - RNA, 19 nt, Artificial Sequence
  Description of Artificial Sequence: Synthetic oligonucleotide
  Antisense strand to SEQ ID NO: 2390524
uaagguacagggaugcugg

SEQ ID NO: 2390526 - RNA, 19 nt, Artificial Sequence
  Description of Artificial Sequence: Synthetic oligonucleotide
  Sense strand starting at position 869 of SEQ ID NO: 1886153
uugugaugucugcgauuua

SEQ ID NO: 2390527 - RNA, 19 nt, Artificial Sequence
  Description of Artificial Sequence: Synthetic oligonucleotide
  Antisense strand to SEQ ID NO: 2390526
uaaaucgcagacaucacaa

SEQ ID NO: 2390528 - RNA, 19 nt, Artificial Sequence
  Description of Artificial Sequence: Synthetic oligonucleotide
  Sense strand starting at position 1102 of SEQ ID NO: 1886153
uagggaaguucguuauauu

SEQ ID NO: 2390529 - RNA, 19 nt, Artificial Sequence
  Description of Artificial Sequence: Synthetic oligonucleotide
  Antisense strand to SEQ ID NO: 2390528
aauauaacgaacuucccua

SEQ ID NO: 2390530 - RNA, 19 nt, Artificial Sequence
  Description of Artificial Sequence: Synthetic oligonucleotide
  Sense strand starting at position 1103 of SEQ ID NO: 1886153
agggaaguucguuauauua

SEQ ID NO: 2390531 - RNA, 19 nt, Artificial Sequence
  Description of Artificial Sequence: Synthetic oligonucleotide
  Antisense strand to SEQ ID NO: 2390530
uaauauaacgaacuucccu

SEQ ID NO: 2390532 - RNA, 19 nt, Artificial Sequence
  Description of Artificial Sequence: Synthetic oligonucleotide
  Sense strand starting at position 1111 of SEQ ID NO: 1886153
ucguuauauuacucuacuu

SEQ ID NO: 2390533 - RNA, 19 nt, Artificial Sequence
  Description of Artificial Sequence: Synthetic oligonucleotide
  Antisense strand to SEQ ID NO: 2390532
aaguagaguaauauaacga

SEQ ID NO: 2390534 - RNA, 19 nt, Artificial Sequence
  Description of Artificial Sequence: Synthetic oligonucleotide
  Sense strand starting at position 1242 of SEQ ID NO: 1886153
caaacaagguauccugagu

SEQ ID NO: 2390535 - RNA, 19 nt, Artificial Sequence
  Description of Artificial Sequence: Synthetic oligonucleotide
  Antisense strand to SEQ ID NO: 2390534
acucaggauaccuuguuug

SEQ ID NO: 2390536 - RNA, 19 nt, Artificial Sequence
  Description of Artificial Sequence: Synthetic oligonucleotide
  Sense strand starting at position 1995 of SEQ ID NO: 1886153
cggaaguagccggguaaga

SEQ ID NO: 2390537 - RNA, 19 nt, Artificial Sequence
  Description of Artificial Sequence: Synthetic oligonucleotide
  Antisense strand to SEQ ID NO: 2390536
ucuuacccggcuacuuccg

SEQ ID NO: 2390538 - RNA, 19 nt, Artificial Sequence
  Description of Artificial Sequence: Synthetic oligonucleotide
  Sense strand starting at position 2137 of SEQ ID NO: 1886153
gagggcuucccugaaacgu

SEQ ID NO: 2390539 - RNA, 19 nt, Artificial Sequence
  Description of Artificial Sequence: Synthetic oligonucleotide
  Antisense strand to SEQ ID NO: 2390538
acguuucagggaagcccuc

SEQ ID NO: 2390540 - RNA, 19 nt, Artificial Sequence
  Description of Artificial Sequence: Synthetic oligonucleotide
  Sense strand starting at position 2362 of SEQ ID NO: 1886153
ggcucauugucuccuggau

SEQ ID NO: 2390541 - RNA, 19 nt, Artificial Sequence
  Description of Artificial Sequence: Synthetic oligonucleotide
  Antisense strand to SEQ ID NO: 2390540
auccaggagacaaugagcc

SEQ ID NO: 2390542 - RNA, 19 nt, Artificial Sequence
  Description of Artificial Sequence: Synthetic oligonucleotide
  Sense strand starting at position 2442 of SEQ ID NO: 1886153
aaggcuugaugagcagaaa

SEQ ID NO: 2390543 - RNA, 19 nt, Artificial Sequence
  Description of Artificial Sequence: Synthetic oligonucleotide
  Antisense strand to SEQ ID NO: 2390542
uuucugcucaucaagccuu

SEQ ID NO: 2390544 - RNA, 19 nt, Artificial Sequence
  Description of Artificial Sequence: Synthetic oligonucleotide
  Sense strand starting at position 2491 of SEQ ID NO: 1886153
aucuucuagucuuuaccga

SEQ ID NO: 2390545 - RNA, 19 nt, Artificial Sequence
  Description of Artificial Sequence: Synthetic oligonucleotide
  Antisense strand to SEQ ID NO: 2390544
ucgguaaagacuagaagau

SEQ ID NO: 2390546 - RNA, 19 nt, Artificial Sequence
  Description of Artificial Sequence: Synthetic oligonucleotide
  Sense strand starting at position 2532 of SEQ ID NO: 1886153
ugaggaauucuuggugucu

SEQ ID NO: 2390547 - RNA, 19 nt, Artificial Sequence
  Description of Artificial Sequence: Synthetic oligonucleotide
  Antisense strand to SEQ ID NO: 2390546
agacaccaagaauuccuca

SEQ ID NO: 2390548 - RNA, 19 nt, Artificial Sequence
  Description of Artificial Sequence: Synthetic oligonucleotide
  Sense strand starting at position 2533 of SEQ ID NO: 1886153
gaggaauucuuggugucuu

SEQ ID NO: 2390549 - RNA, 19 nt, Artificial Sequence
  Description of Artificial Sequence: Synthetic oligonucleotide
  Antisense strand to SEQ ID NO: 2390548
aagacaccaagaauuccuc

SEQ ID NO: 2390550 - RNA, 19 nt, Artificial Sequence
  Description of Artificial Sequence: Synthetic oligonucleotide
  Sense strand starting at position 2699 of SEQ ID NO: 1886153
accugaacugauugauguu

SEQ ID NO: 2390551 - RNA, 19 nt, Artificial Sequence
  Description of Artificial Sequence: Synthetic oligonucleotide
  Antisense strand to SEQ ID NO: 2390550
aacaucaaucaguucaggu

SEQ ID NO: 2390552 - RNA, 19 nt, Artificial Sequence
  Description of Artificial Sequence: Synthetic oligonucleotide
  Sense strand starting at position 2706 of SEQ ID NO: 1886153
cugauugauguugaggagu

SEQ ID NO: 2390553 - RNA, 19 nt, Artificial Sequence
  Description of Artificial Sequence: Synthetic oligonucleotide
  Antisense strand to SEQ ID NO: 2390552
acuccucaacaucaaucag

SEQ ID NO: 2390554 - RNA, 19 nt, Artificial Sequence
  Description of Artificial Sequence: Synthetic oligonucleotide
  Sense strand starting at position 2939 of SEQ ID NO: 1886153
guccuucugcaguggaaac

SEQ ID NO: 2390555 - RNA, 19 nt, Artificial Sequence
  Description of Artificial Sequence: Synthetic oligonucleotide
  Antisense strand to SEQ ID NO: 2390554
guuuccacugcagaaggac

SEQ ID NO: 2390556 - RNA, 19 nt, Artificial Sequence
  Description of Artificial Sequence: Synthetic oligonucleotide
  Sense strand starting at position 2957 of SEQ ID NO: 1886153
cauggaugucccugaguug

SEQ ID NO: 2390557 - RNA, 19 nt, Artificial Sequence
  Description of Artificial Sequence: Synthetic oligonucleotide
  Antisense strand to SEQ ID NO: 2390556
caacucagggacauccaug

SEQ ID NO: 2390558 - RNA, 19 nt, Artificial Sequence
  Description of Artificial Sequence: Synthetic oligonucleotide
  Sense strand starting at position 3062 of SEQ ID NO: 1886153
cugucuuucccacacugua

SEQ ID NO: 2390559 - RNA, 19 nt, Artificial Sequence
  Description of Artificial Sequence: Synthetic oligonucleotide
  Antisense strand to SEQ ID NO: 2390558
uacagugugggaaagacag

SEQ ID NO: 2390560 - RNA, 19 nt, Artificial Sequence
  Description of Artificial Sequence: Synthetic oligonucleotide
  Sense strand starting at position 3075 of SEQ ID NO: 1886153
acuguauuguaauugguau

SEQ ID NO: 2390561 - RNA, 19 nt, Artificial Sequence
  Description of Artificial Sequence: Synthetic oligonucleotide
  Antisense strand to SEQ ID NO: 2390560
auaccaauuacaauacagu

SEQ ID NO: 2390562 - RNA, 19 nt, Artificial Sequence
  Description of Artificial Sequence: Synthetic oligonucleotide
  Sense strand starting at position 3076 of SEQ ID NO: 1886153
cuguauuguaauugguaug

SEQ ID NO: 2390563 - RNA, 19 nt, Artificial Sequence
  Description of Artificial Sequence: Synthetic oligonucleotide
  Antisense strand to SEQ ID NO: 2390562
cauaccaauuacaauacag

SEQ ID NO: 2390564 - RNA, 19 nt, Artificial Sequence
  Description of Artificial Sequence: Synthetic oligonucleotide
  Sense strand starting at position 3081 of SEQ ID NO: 1886153
uuguaauugguaugguaug

SEQ ID NO: 2390565 - RNA, 19 nt, Artificial Sequence
  Description of Artificial Sequence: Synthetic oligonucleotide
  Antisense strand to SEQ ID NO: 2390564
cauaccauaccaauuacaa

SEQ ID NO: 2390566 - RNA, 19 nt, Artificial Sequence
  Description of Artificial Sequence: Synthetic oligonucleotide
  Sense strand starting at position 3129 of SEQ ID NO: 1886153
gagugcugggacuguauuu

SEQ ID NO: 2390567 - RNA, 19 nt, Artificial Sequence
  Description of Artificial Sequence: Synthetic oligonucleotide
  Antisense strand to SEQ ID NO: 2390566
aaauacagucccagcacuc

SEQ ID NO: 2390568 - RNA, 19 nt, Artificial Sequence
  Description of Artificial Sequence: Synthetic oligonucleotide
  Sense strand starting at position 3140 of SEQ ID NO: 1886153
cuguauuucugccauuucu

SEQ ID NO: 2390569 - RNA, 19 nt, Artificial Sequence
  Description of Artificial Sequence: Synthetic oligonucleotide
  Antisense strand to SEQ ID NO: 2390568
agaaauggcagaaauacag

SEQ ID NO: 2390570 - RNA, 19 nt, Artificial Sequence
  Description of Artificial Sequence: Synthetic oligonucleotide
  Sense strand starting at position 3164 of SEQ ID NO: 1886153
cagggucuaguguacagaa

SEQ ID NO: 2390571 - RNA, 19 nt, Artificial Sequence
  Description of Artificial Sequence: Synthetic oligonucleotide
  Antisense strand to SEQ ID NO: 2390570
uucuguacacuagacccug

SEQ ID NO: 2390572 - RNA, 19 nt, Artificial Sequence
  Description of Artificial Sequence: Synthetic oligonucleotide
  Sense strand starting at position 3386 of SEQ ID NO: 1886153
uggaguuugcagugaagug

SEQ ID NO: 2390573 - RNA, 19 nt, Artificial Sequence
  Description of Artificial Sequence: Synthetic oligonucleotide
  Antisense strand to SEQ ID NO: 2390572
cacuucacugcaaacucca

SEQ ID NO: 2390574 - RNA, 19 nt, Artificial Sequence
  Description of Artificial Sequence: Synthetic oligonucleotide
  Sense strand starting at position 3402 of SEQ ID NO: 1886153
gugagaucaagccauugua

SEQ ID NO: 2390575 - RNA, 19 nt, Artificial Sequence
  Description of Artificial Sequence: Synthetic oligonucleotide
  Antisense strand to SEQ ID NO: 2390574
uacaauggcuugaucucac

SEQ ID NO: 2390576 - RNA, 19 nt, Artificial Sequence
  Description of Artificial Sequence: Synthetic oligonucleotide
  Sense strand starting at position 3405 of SEQ ID NO: 1886153
agaucaagccauuguacuu

SEQ ID NO: 2390577 - RNA, 19 nt, Artificial Sequence
  Description of Artificial Sequence: Synthetic oligonucleotide
  Antisense strand to SEQ ID NO: 2390576
aaguacaauggcuugaucu

SEQ ID NO: 2390578 - RNA, 19 nt, Artificial Sequence
  Description of Artificial Sequence: Synthetic oligonucleotide
  Sense strand starting at position 3507 of SEQ ID NO: 1886153
guggaagugccauauuaua

SEQ ID NO: 2390579 - RNA, 19 nt, Artificial Sequence
  Description of Artificial Sequence: Synthetic oligonucleotide
  Antisense strand to SEQ ID NO: 2390578
uauaauauggcacuuccac

SEQ ID NO: 2390580 - RNA, 19 nt, Artificial Sequence
  Description of Artificial Sequence: Synthetic oligonucleotide
  Sense strand starting at position 3534 of SEQ ID NO: 1886153
gcauccaagcucuaugcuu

SEQ ID NO: 2390581 - RNA, 19 nt, Artificial Sequence
  Description of Artificial Sequence: Synthetic oligonucleotide
  Antisense strand to SEQ ID NO: 2390580
aagcauagagcuuggaugc

SEQ ID NO: 2390582 - RNA, 19 nt, Artificial Sequence
  Description of Artificial Sequence: Synthetic oligonucleotide
  Sense strand starting at position 3707 of SEQ ID NO: 1886153
aaguucuugggcugcagau

SEQ ID NO: 2390583 - RNA, 19 nt, Artificial Sequence
  Description of Artificial Sequence: Synthetic oligonucleotide
  Antisense strand to SEQ ID NO: 2390582
aucugcagcccaagaacuu

SEQ ID NO: 2390584 - RNA, 19 nt, Artificial Sequence
  Description of Artificial Sequence: Synthetic oligonucleotide
  Sense strand starting at position 3741 of SEQ ID NO: 1886153
gugggauugcagcauucau

SEQ ID NO: 2390585 - RNA, 19 nt, Artificial Sequence
  Description of Artificial Sequence: Synthetic oligonucleotide
  Antisense strand to SEQ ID NO: 2390584
augaaugcugcaaucccac

SEQ ID NO: 2390586 - RNA, 19 nt, Artificial Sequence
  Description of Artificial Sequence: Synthetic oligonucleotide
  Sense strand starting at position 3867 of SEQ ID NO: 1886153
ggaccagacucauagauuu

SEQ ID NO: 2390587 - RNA, 19 nt, Artificial Sequence
  Description of Artificial Sequence: Synthetic oligonucleotide
  Antisense strand to SEQ ID NO: 2390586
aaaucuaugagucuggucc

SEQ ID NO: 2390588 - RNA, 19 nt, Artificial Sequence
  Description of Artificial Sequence: Synthetic oligonucleotide
  Sense strand starting at position 3969 of SEQ ID NO: 1886153
ggauggagcguuggaagaa

SEQ ID NO: 2390589 - RNA, 19 nt, Artificial Sequence
  Description of Artificial Sequence: Synthetic oligonucleotide
  Antisense strand to SEQ ID NO: 2390588
uucuuccaacgcuccaucc

SEQ ID NO: 2390590 - RNA, 19 nt, Artificial Sequence
  Description of Artificial Sequence: Synthetic oligonucleotide
  Sense strand starting at position 55 of SEQ ID NO: 1886154
ugcacucuagucugagcua

SEQ ID NO: 2390591 - RNA, 19 nt, Artificial Sequence
  Description of Artificial Sequence: Synthetic oligonucleotide
  Antisense strand to SEQ ID NO: 2390590
uagcucagacuagagugca

SEQ ID NO: 2390592 - RNA, 19 nt, Artificial Sequence
  Description of Artificial Sequence: Synthetic oligonucleotide
  Sense strand starting at position 139 of SEQ ID NO: 1886154
aaauuaugguguuaggcaa

SEQ ID NO: 2390593 - RNA, 19 nt, Artificial Sequence
  Description of Artificial Sequence: Synthetic oligonucleotide
  Antisense strand to SEQ ID NO: 2390592
uugccuaacaccauaauuu

SEQ ID NO: 2390594 - RNA, 19 nt, Artificial Sequence
  Description of Artificial Sequence: Synthetic oligonucleotide
  Sense strand starting at position 143 of SEQ ID NO: 1886154
uaugguguuaggcaagaga

SEQ ID NO: 2390595 - RNA, 19 nt, Artificial Sequence
  Description of Artificial Sequence: Synthetic oligonucleotide
  Antisense strand to SEQ ID NO: 2390594
ucucuugccuaacaccaua

SEQ ID NO: 2390596 - RNA, 19 nt, Artificial Sequence
  Description of Artificial Sequence: Synthetic oligonucleotide
  Sense strand starting at position 156 of SEQ ID NO: 1886154
aagagacugcacugaguua

SEQ ID NO: 2390597 - RNA, 19 nt, Artificial Sequence
  Description of Artificial Sequence: Synthetic oligonucleotide
  Antisense strand to SEQ ID NO: 2390596
uaacucagugcagucucuu

SEQ ID NO: 2390598 - RNA, 19 nt, Artificial Sequence
  Description of Artificial Sequence: Synthetic oligonucleotide
  Sense strand starting at position 208 of SEQ ID NO: 1886154
cagaguguacugugugaca

SEQ ID NO: 2390599 - RNA, 19 nt, Artificial Sequence
  Description of Artificial Sequence: Synthetic oligonucleotide
  Antisense strand to SEQ ID NO: 2390598
ugucacacaguacacucug

SEQ ID NO: 2390600 - RNA, 19 nt, Artificial Sequence
  Description of Artificial Sequence: Synthetic oligonucleotide
  Sense strand starting at position 210 of SEQ ID NO: 1886154
gaguguacugugugacagu

SEQ ID NO: 2390601 - RNA, 19 nt, Artificial Sequence
  Description of Artificial Sequence: Synthetic oligonucleotide
  Antisense strand to SEQ ID NO: 2390600
acugucacacaguacacuc

SEQ ID NO: 2390602 - RNA, 19 nt, Artificial Sequence
  Description of Artificial Sequence: Synthetic oligonucleotide
  Sense strand starting at position 254 of SEQ ID NO: 1886154
ccauauauguuagucacuu

SEQ ID NO: 2390603 - RNA, 19 nt, Artificial Sequence
  Description of Artificial Sequence: Synthetic oligonucleotide
  Antisense strand to SEQ ID NO: 2390602
aagugacuaacauauaugg

SEQ ID NO: 2390604 - RNA, 19 nt, Artificial Sequence
  Description of Artificial Sequence: Synthetic oligonucleotide
  Sense strand starting at position 258 of SEQ ID NO: 1886154
auauguuagucacuuguga

SEQ ID NO: 2390605 - RNA, 19 nt, Artificial Sequence
  Description of Artificial Sequence: Synthetic oligonucleotide
  Antisense strand to SEQ ID NO: 2390604
ucacaagugacuaacauau

SEQ ID NO: 2390606 - RNA, 19 nt, Artificial Sequence
  Description of Artificial Sequence: Synthetic oligonucleotide
  Sense strand starting at position 260 of SEQ ID NO: 1886154
auguuagucacuugugacu

SEQ ID NO: 2390607 - RNA, 19 nt, Artificial Sequence
  Description of Artificial Sequence: Synthetic oligonucleotide
  Antisense strand to SEQ ID NO: 2390606
agucacaagugacuaacau

SEQ ID NO: 2390608 - RNA, 19 nt, Artificial Sequence
  Description of Artificial Sequence: Synthetic oligonucleotide
  Sense strand starting at position 273 of SEQ ID NO: 1886154
gugacuugcugaucuacaa

SEQ ID NO: 2390609 - RNA, 19 nt, Artificial Sequence
  Description of Artificial Sequence: Synthetic oligonucleotide
  Antisense strand to SEQ ID NO: 2390608
uuguagaucagcaagucac

SEQ ID NO: 2390610 - RNA, 19 nt, Artificial Sequence
  Description of Artificial Sequence: Synthetic oligonucleotide
  Sense strand starting at position 304 of SEQ ID NO: 1886154
aauaacugguguuaguaau

SEQ ID NO: 2390611 - RNA, 19 nt, Artificial Sequence
  Description of Artificial Sequence: Synthetic oligonucleotide
  Antisense strand to SEQ ID NO: 2390610
auuacuaacaccaguuauu

SEQ ID NO: 2390612 - RNA, 19 nt, Artificial Sequence
  Description of Artificial Sequence: Synthetic oligonucleotide
  Sense strand starting at position 310 of SEQ ID NO: 1886154
ugguguuaguaauaaugau

SEQ ID NO: 2390613 - RNA, 19 nt, Artificial Sequence
  Description of Artificial Sequence: Synthetic oligonucleotide
  Antisense strand to SEQ ID NO: 2390612
aucauuauuacuaacacca

SEQ ID NO: 2390614 - RNA, 19 nt, Artificial Sequence
  Description of Artificial Sequence: Synthetic oligonucleotide
  Sense strand starting at position 372 of SEQ ID NO: 1886154
gguccucuaugucaaggaa

SEQ ID NO: 2390615 - RNA, 19 nt, Artificial Sequence
  Description of Artificial Sequence: Synthetic oligonucleotide
  Antisense strand to SEQ ID NO: 2390614
uuccuugacauagaggacc

SEQ ID NO: 2390616 - RNA, 19 nt, Artificial Sequence
  Description of Artificial Sequence: Synthetic oligonucleotide
  Sense strand starting at position 375 of SEQ ID NO: 1886154
ccucuaugucaaggaagaa

SEQ ID NO: 2390617 - RNA, 19 nt, Artificial Sequence
  Description of Artificial Sequence: Synthetic oligonucleotide
  Antisense strand to SEQ ID NO: 2390616
uucuuccuugacauagagg

SEQ ID NO: 2390618 - RNA, 19 nt, Artificial Sequence
  Description of Artificial Sequence: Synthetic oligonucleotide
  Sense strand starting at position 549 of SEQ ID NO: 1886154
uaacuaagaucguuuagca

SEQ ID NO: 2390619 - RNA, 19 nt, Artificial Sequence
  Description of Artificial Sequence: Synthetic oligonucleotide
  Antisense strand to SEQ ID NO: 2390618
ugcuaaacgaucuuaguua

SEQ ID NO: 2390620 - RNA, 19 nt, Artificial Sequence
  Description of Artificial Sequence: Synthetic oligonucleotide
  Sense strand starting at position 1024 of SEQ ID NO: 1886154
ucagucuuugcagaccaga

SEQ ID NO: 2390621 - RNA, 19 nt, Artificial Sequence
  Description of Artificial Sequence: Synthetic oligonucleotide
  Antisense strand to SEQ ID NO: 2390620
ucuggucugcaaagacuga

SEQ ID NO: 2390622 - RNA, 19 nt, Artificial Sequence
  Description of Artificial Sequence: Synthetic oligonucleotide
  Sense strand starting at position 1066 of SEQ ID NO: 1886154
guuguucuaacgugggaaa

SEQ ID NO: 2390623 - RNA, 19 nt, Artificial Sequence
  Description of Artificial Sequence: Synthetic oligonucleotide
  Antisense strand to SEQ ID NO: 2390622
uuucccacguuagaacaac

SEQ ID NO: 2390624 - RNA, 19 nt, Artificial Sequence
  Description of Artificial Sequence: Synthetic oligonucleotide
  Sense strand starting at position 1150 of SEQ ID NO: 1886154
aaugaaaugugagcgucau

SEQ ID NO: 2390625 - RNA, 19 nt, Artificial Sequence
  Description of Artificial Sequence: Synthetic oligonucleotide
  Antisense strand to SEQ ID NO: 2390624
augacgcucacauuucauu

SEQ ID NO: 2390626 - RNA, 19 nt, Artificial Sequence
  Description of Artificial Sequence: Synthetic oligonucleotide
  Sense strand starting at position 1151 of SEQ ID NO: 1886154
augaaaugugagcgucaug

SEQ ID NO: 2390627 - RNA, 19 nt, Artificial Sequence
  Description of Artificial Sequence: Synthetic oligonucleotide
  Antisense strand to SEQ ID NO: 2390626
caugacgcucacauuucau

SEQ ID NO: 2390628 - RNA, 19 nt, Artificial Sequence
  Description of Artificial Sequence: Synthetic oligonucleotide
  Sense strand starting at position 1154 of SEQ ID NO: 1886154
aaaugugagcgucaugcuu

SEQ ID NO: 2390629 - RNA, 19 nt, Artificial Sequence
  Description of Artificial Sequence: Synthetic oligonucleotide
  Antisense strand to SEQ ID NO: 2390628
aagcaugacgcucacauuu

SEQ ID NO: 2390630 - RNA, 19 nt, Artificial Sequence
  Description of Artificial Sequence: Synthetic oligonucleotide
  Sense strand starting at position 1173 of SEQ ID NO: 1886154
uuccacaagucaugaaaga

SEQ ID NO: 2390631 - RNA, 19 nt, Artificial Sequence
  Description of Artificial Sequence: Synthetic oligonucleotide
  Antisense strand to SEQ ID NO: 2390630
ucuuucaugacuuguggaa

SEQ ID NO: 2390632 - RNA, 19 nt, Artificial Sequence
  Description of Artificial Sequence: Synthetic oligonucleotide
  Sense strand starting at position 1306 of SEQ ID NO: 1886154
acaaguuaugggugcagca

SEQ ID NO: 2390633 - RNA, 19 nt, Artificial Sequence
  Description of Artificial Sequence: Synthetic oligonucleotide
  Antisense strand to SEQ ID NO: 2390632
ugcugcacccauaacuugu

SEQ ID NO: 2390634 - RNA, 19 nt, Artificial Sequence
  Description of Artificial Sequence: Synthetic oligonucleotide
  Sense strand starting at position 1773 of SEQ ID NO: 1886154
ccgucacucacucggauaa

SEQ ID NO: 2390635 - RNA, 19 nt, Artificial Sequence
  Description of Artificial Sequence: Synthetic oligonucleotide
  Antisense strand to SEQ ID NO: 2390634
uuauccgagugagugacgg

SEQ ID NO: 2390636 - RNA, 19 nt, Artificial Sequence
  Description of Artificial Sequence: Synthetic oligonucleotide
  Sense strand starting at position 2226 of SEQ ID NO: 1886154
gggauaccgccgugguuua

SEQ ID NO: 2390637 - RNA, 19 nt, Artificial Sequence
  Description of Artificial Sequence: Synthetic oligonucleotide
  Antisense strand to SEQ ID NO: 2390636
uaaaccacggcgguauccc

SEQ ID NO: 2390638 - RNA, 19 nt, Artificial Sequence
  Description of Artificial Sequence: Synthetic oligonucleotide
  Sense strand starting at position 2246 of SEQ ID NO: 1886154
acgcggucccugugaggaa

SEQ ID NO: 2390639 - RNA, 19 nt, Artificial Sequence
  Description of Artificial Sequence: Synthetic oligonucleotide
  Antisense strand to SEQ ID NO: 2390638
uuccucacagggaccgcgu

SEQ ID NO: 2390640 - RNA, 19 nt, Artificial Sequence
  Description of Artificial Sequence: Synthetic oligonucleotide
  Sense strand starting at position 2282 of SEQ ID NO: 1886154
ggcagauaaccuggcaauu

SEQ ID NO: 2390641 - RNA, 19 nt, Artificial Sequence
  Description of Artificial Sequence: Synthetic oligonucleotide
  Antisense strand to SEQ ID NO: 2390640
aauugccagguuaucugcc

SEQ ID NO: 2390642 - RNA, 19 nt, Artificial Sequence
  Description of Artificial Sequence: Synthetic oligonucleotide
  Sense strand starting at position 2296 of SEQ ID NO: 1886154
caauuaccacagcgugaaa

SEQ ID NO: 2390643 - RNA, 19 nt, Artificial Sequence
  Description of Artificial Sequence: Synthetic oligonucleotide
  Antisense strand to SEQ ID NO: 2390642
uuucacgcugugguaauug

SEQ ID NO: 2390644 - RNA, 19 nt, Artificial Sequence
  Description of Artificial Sequence: Synthetic oligonucleotide
  Sense strand starting at position 2419 of SEQ ID NO: 1886154
ccaagaacugagcauaguu

SEQ ID NO: 2390645 - RNA, 19 nt, Artificial Sequence
  Description of Artificial Sequence: Synthetic oligonucleotide
  Antisense strand to SEQ ID NO: 2390644
aacuaugcucaguucuugg

SEQ ID NO: 2390646 - RNA, 19 nt, Artificial Sequence
  Description of Artificial Sequence: Synthetic oligonucleotide
  Sense strand starting at position 2429 of SEQ ID NO: 1886154
agcauaguuccggcgaguu

SEQ ID NO: 2390647 - RNA, 19 nt, Artificial Sequence
  Description of Artificial Sequence: Synthetic oligonucleotide
  Antisense strand to SEQ ID NO: 2390646
aacucgccggaacuaugcu

SEQ ID NO: 2390648 - RNA, 19 nt, Artificial Sequence
  Description of Artificial Sequence: Synthetic oligonucleotide
  Sense strand starting at position 2430 of SEQ ID NO: 1886154
gcauaguuccggcgaguug

SEQ ID NO: 2390649 - RNA, 19 nt, Artificial Sequence
  Description of Artificial Sequence: Synthetic oligonucleotide
  Antisense strand to SEQ ID NO: 2390648
caacucgccggaacuaugc

SEQ ID NO: 2390650 - RNA, 19 nt, Artificial Sequence
  Description of Artificial Sequence: Synthetic oligonucleotide
  Sense strand starting at position 2642 of SEQ ID NO: 1886154
gggacuaauagauggcagu

SEQ ID NO: 2390651 - RNA, 19 nt, Artificial Sequence
  Description of Artificial Sequence: Synthetic oligonucleotide
  Antisense strand to SEQ ID NO: 2390650
acugccaucuauuaguccc

SEQ ID NO: 2390652 - RNA, 19 nt, Artificial Sequence
  Description of Artificial Sequence: Synthetic oligonucleotide
  Sense strand starting at position 2798 of SEQ ID NO: 1886154
uagugaaacuucguggcua

SEQ ID NO: 2390653 - RNA, 19 nt, Artificial Sequence
  Description of Artificial Sequence: Synthetic oligonucleotide
  Antisense strand to SEQ ID NO: 2390652
uagccacgaaguuucacua

SEQ ID NO: 2390654 - RNA, 19 nt, Artificial Sequence
  Description of Artificial Sequence: Synthetic oligonucleotide
  Sense strand starting at position 2800 of SEQ ID NO: 1886154
gugaaacuucguggcuacu

SEQ ID NO: 2390655 - RNA, 19 nt, Artificial Sequence
  Description of Artificial Sequence: Synthetic oligonucleotide
  Antisense strand to SEQ ID NO: 2390654
aguagccacgaaguuucac

SEQ ID NO: 2390656 - RNA, 19 nt, Artificial Sequence
  Description of Artificial Sequence: Synthetic oligonucleotide
  Sense strand starting at position 2802 of SEQ ID NO: 1886154
gaaacuucguggcuacuaa

SEQ ID NO: 2390657 - RNA, 19 nt, Artificial Sequence
  Description of Artificial Sequence: Synthetic oligonucleotide
  Antisense strand to SEQ ID NO: 2390656
uuaguagccacgaaguuuc

SEQ ID NO: 2390658 - RNA, 19 nt, Artificial Sequence
  Description of Artificial Sequence: Synthetic oligonucleotide
  Sense strand starting at position 2803 of SEQ ID NO: 1886154
aaacuucguggcuacuaaa

SEQ ID NO: 2390659 - RNA, 19 nt, Artificial Sequence
  Description of Artificial Sequence: Synthetic oligonucleotide
  Antisense strand to SEQ ID NO: 2390658
uuuaguagccacgaaguuu

SEQ ID NO: 2390660 - RNA, 19 nt, Artificial Sequence
  Description of Artificial Sequence: Synthetic oligonucleotide
  Sense strand starting at position 3149 of SEQ ID NO: 1886154
gcugggaacgguugugauu

SEQ ID NO: 2390661 - RNA, 19 nt, Artificial Sequence
  Description of Artificial Sequence: Synthetic oligonucleotide
  Antisense strand to SEQ ID NO: 2390660
aaucacaaccguucccagc

SEQ ID NO: 2390662 - RNA, 19 nt, Artificial Sequence
  Description of Artificial Sequence: Synthetic oligonucleotide
  Sense strand starting at position 3152 of SEQ ID NO: 1886154
gggaacgguugugauuaga

SEQ ID NO: 2390663 - RNA, 19 nt, Artificial Sequence
  Description of Artificial Sequence: Synthetic oligonucleotide
  Antisense strand to SEQ ID NO: 2390662
ucuaaucacaaccguuccc

SEQ ID NO: 2390664 - RNA, 19 nt, Artificial Sequence
  Description of Artificial Sequence: Synthetic oligonucleotide
  Sense strand starting at position 3163 of SEQ ID NO: 1886154
ugauuagauuuguauucca

SEQ ID NO: 2390665 - RNA, 19 nt, Artificial Sequence
  Description of Artificial Sequence: Synthetic oligonucleotide
  Antisense strand to SEQ ID NO: 2390664
uggaauacaaaucuaauca

SEQ ID NO: 2390666 - RNA, 19 nt, Artificial Sequence
  Description of Artificial Sequence: Synthetic oligonucleotide
  Sense strand starting at position 3193 of SEQ ID NO: 1886154
cuuccuguagcaugaagaa

SEQ ID NO: 2390667 - RNA, 19 nt, Artificial Sequence
  Description of Artificial Sequence: Synthetic oligonucleotide
  Antisense strand to SEQ ID NO: 2390666
uucuucaugcuacaggaag

SEQ ID NO: 2390668 - RNA, 19 nt, Artificial Sequence
  Description of Artificial Sequence: Synthetic oligonucleotide
  Sense strand starting at position 3913 of SEQ ID NO: 1886154
guaguaacccuauggaguc

SEQ ID NO: 2390669 - RNA, 19 nt, Artificial Sequence
  Description of Artificial Sequence: Synthetic oligonucleotide
  Antisense strand to SEQ ID NO: 2390668
gacuccauaggguuacuac

SEQ ID NO: 2390670 - RNA, 19 nt, Artificial Sequence
  Description of Artificial Sequence: Synthetic oligonucleotide
  Sense strand starting at position 144 of SEQ ID NO: 1886155
gauggaguuugagagaaag

SEQ ID NO: 2390671 - RNA, 19 nt, Artificial Sequence
  Description of Artificial Sequence: Synthetic oligonucleotide
  Antisense strand to SEQ ID NO: 2390670
cuuucucucaaacuccauc

SEQ ID NO: 2390672 - RNA, 19 nt, Artificial Sequence
  Description of Artificial Sequence: Synthetic oligonucleotide
  Sense strand starting at position 467 of SEQ ID NO: 1886155
guacuuucccucuaggaag

SEQ ID NO: 2390673 - RNA, 19 nt, Artificial Sequence
  Description of Artificial Sequence: Synthetic oligonucleotide
  Antisense strand to SEQ ID NO: 2390672
cuuccuagagggaaaguac

SEQ ID NO: 2390674 - RNA, 19 nt, Artificial Sequence
  Description of Artificial Sequence: Synthetic oligonucleotide
  Sense strand starting at position 848 of SEQ ID NO: 1886155
ggcugaggaaggugguauu

SEQ ID NO: 2390675 - RNA, 19 nt, Artificial Sequence
  Description of Artificial Sequence: Synthetic oligonucleotide
  Antisense strand to SEQ ID NO: 2390674
aauaccaccuuccucagcc

SEQ ID NO: 2390676 - RNA, 19 nt, Artificial Sequence
  Description of Artificial Sequence: Synthetic oligonucleotide
  Sense strand starting at position 916 of SEQ ID NO: 1886155
aggcauaacugaucccaca

SEQ ID NO: 2390677 - RNA, 19 nt, Artificial Sequence
  Description of Artificial Sequence: Synthetic oligonucleotide
  Antisense strand to SEQ ID NO: 2390676
ugugggaucaguuaugccu

SEQ ID NO: 2390678 - RNA, 19 nt, Artificial Sequence
  Description of Artificial Sequence: Synthetic oligonucleotide
  Sense strand starting at position 1003 of SEQ ID NO: 1886155
gcacucuugccuugggagu

SEQ ID NO: 2390679 - RNA, 19 nt, Artificial Sequence
  Description of Artificial Sequence: Synthetic oligonucleotide
  Antisense strand to SEQ ID NO: 2390678
acucccaaggcaagagugc

SEQ ID NO: 2390680 - RNA, 19 nt, Artificial Sequence
  Description of Artificial Sequence: Synthetic oligonucleotide
  Sense strand starting at position 1024 of SEQ ID NO: 1886155
uaauauguagcaggaaaga

SEQ ID NO: 2390681 - RNA, 19 nt, Artificial Sequence
  Description of Artificial Sequence: Synthetic oligonucleotide
  Antisense strand to SEQ ID NO: 2390680
ucuuuccugcuacauauua

SEQ ID NO: 2390682 - RNA, 19 nt, Artificial Sequence
  Description of Artificial Sequence: Synthetic oligonucleotide
  Sense strand starting at position 1250 of SEQ ID NO: 1886155
agauauugucagugucauc

SEQ ID NO: 2390683 - RNA, 19 nt, Artificial Sequence
  Description of Artificial Sequence: Synthetic oligonucleotide
  Antisense strand to SEQ ID NO: 2390682
gaugacacugacaauaucu

SEQ ID NO: 2390684 - RNA, 19 nt, Artificial Sequence
  Description of Artificial Sequence: Synthetic oligonucleotide
  Sense strand starting at position 1255 of SEQ ID NO: 1886155
uugucagugucaucaacaa

SEQ ID NO: 2390685 - RNA, 19 nt, Artificial Sequence
  Description of Artificial Sequence: Synthetic oligonucleotide
  Antisense strand to SEQ ID NO: 2390684
uuguugaugacacugacaa

SEQ ID NO: 2390686 - RNA, 19 nt, Artificial Sequence
  Description of Artificial Sequence: Synthetic oligonucleotide
  Sense strand starting at position 1317 of SEQ ID NO: 1886155
auuuauaacugcugagaag

SEQ ID NO: 2390687 - RNA, 19 nt, Artificial Sequence
  Description of Artificial Sequence: Synthetic oligonucleotide
  Antisense strand to SEQ ID NO: 2390686
cuucucagcaguuauaaau

SEQ ID NO: 2390688 - RNA, 19 nt, Artificial Sequence
  Description of Artificial Sequence: Synthetic oligonucleotide
  Sense strand starting at position 1440 of SEQ ID NO: 1886155
agaugucacuuuguauucu

SEQ ID NO: 2390689 - RNA, 19 nt, Artificial Sequence
  Description of Artificial Sequence: Synthetic oligonucleotide
  Antisense strand to SEQ ID NO: 2390688
agaauacaaagugacaucu

SEQ ID NO: 2390690 - RNA, 19 nt, Artificial Sequence
  Description of Artificial Sequence: Synthetic oligonucleotide
  Sense strand starting at position 1448 of SEQ ID NO: 1886155
cuuuguauucuccacugga

SEQ ID NO: 2390691 - RNA, 19 nt, Artificial Sequence
  Description of Artificial Sequence: Synthetic oligonucleotide
  Antisense strand to SEQ ID NO: 2390690
uccaguggagaauacaaag

SEQ ID NO: 2390692 - RNA, 19 nt, Artificial Sequence
  Description of Artificial Sequence: Synthetic oligonucleotide
  Sense strand starting at position 1616 of SEQ ID NO: 1886155
cagacuaguggugguaaca

SEQ ID NO: 2390693 - RNA, 19 nt, Artificial Sequence
  Description of Artificial Sequence: Synthetic oligonucleotide
  Antisense strand to SEQ ID NO: 2390692
uguuaccaccacuagucug

SEQ ID NO: 2390694 - RNA, 19 nt, Artificial Sequence
  Description of Artificial Sequence: Synthetic oligonucleotide
  Sense strand starting at position 1626 of SEQ ID NO: 1886155
gugguaacagucggccaau

SEQ ID NO: 2390695 - RNA, 19 nt, Artificial Sequence
  Description of Artificial Sequence: Synthetic oligonucleotide
  Antisense strand to SEQ ID NO: 2390694
auuggccgacuguuaccac

SEQ ID NO: 2390696 - RNA, 19 nt, Artificial Sequence
  Description of Artificial Sequence: Synthetic oligonucleotide
  Sense strand starting at position 1627 of SEQ ID NO: 1886155
ugguaacagucggccaauu

SEQ ID NO: 2390697 - RNA, 19 nt, Artificial Sequence
  Description of Artificial Sequence: Synthetic oligonucleotide
  Antisense strand to SEQ ID NO: 2390696
aauuggccgacuguuacca

SEQ ID NO: 2390698 - RNA, 19 nt, Artificial Sequence
  Description of Artificial Sequence: Synthetic oligonucleotide
  Sense strand starting at position 1629 of SEQ ID NO: 1886155
guaacagucggccaauuaa

SEQ ID NO: 2390699 - RNA, 19 nt, Artificial Sequence
  Description of Artificial Sequence: Synthetic oligonucleotide
  Antisense strand to SEQ ID NO: 2390698
uuaauuggccgacuguuac

SEQ ID NO: 2390700 - RNA, 19 nt, Artificial Sequence
  Description of Artificial Sequence: Synthetic oligonucleotide
  Sense strand starting at position 1785 of SEQ ID NO: 1886155
ugacucuaggcauauccaa

SEQ ID NO: 2390701 - RNA, 19 nt, Artificial Sequence
  Description of Artificial Sequence: Synthetic oligonucleotide
  Antisense strand to SEQ ID NO: 2390700
uuggauaugccuagaguca

SEQ ID NO: 2390702 - RNA, 19 nt, Artificial Sequence
  Description of Artificial Sequence: Synthetic oligonucleotide
  Sense strand starting at position 1940 of SEQ ID NO: 1886155
cuuugcuaucucugucuua

SEQ ID NO: 2390703 - RNA, 19 nt, Artificial Sequence
  Description of Artificial Sequence: Synthetic oligonucleotide
  Antisense strand to SEQ ID NO: 2390702
uaagacagagauagcaaag

SEQ ID NO: 2390704 - RNA, 19 nt, Artificial Sequence
  Description of Artificial Sequence: Synthetic oligonucleotide
  Sense strand starting at position 1983 of SEQ ID NO: 1886155
cucuccuuugucugugaga

SEQ ID NO: 2390705 - RNA, 19 nt, Artificial Sequence
  Description of Artificial Sequence: Synthetic oligonucleotide
  Antisense strand to SEQ ID NO: 2390704
ucucacagacaaaggagag

SEQ ID NO: 2390706 - RNA, 19 nt, Artificial Sequence
  Description of Artificial Sequence: Synthetic oligonucleotide
  Sense strand starting at position 1985 of SEQ ID NO: 1886155
cuccuuugucugugagaca

SEQ ID NO: 2390707 - RNA, 19 nt, Artificial Sequence
  Description of Artificial Sequence: Synthetic oligonucleotide
  Antisense strand to SEQ ID NO: 2390706
ugucucacagacaaaggag

SEQ ID NO: 2390708 - RNA, 19 nt, Artificial Sequence
  Description of Artificial Sequence: Synthetic oligonucleotide
  Sense strand starting at position 1990 of SEQ ID NO: 1886155
uugucugugagacacagau

SEQ ID NO: 2390709 - RNA, 19 nt, Artificial Sequence
  Description of Artificial Sequence: Synthetic oligonucleotide
  Antisense strand to SEQ ID NO: 2390708
aucugugucucacagacaa

SEQ ID NO: 2390710 - RNA, 19 nt, Artificial Sequence
  Description of Artificial Sequence: Synthetic oligonucleotide
  Sense strand starting at position 2067 of SEQ ID NO: 1886155
aaagcuggcuuguuccaau

SEQ ID NO: 2390711 - RNA, 19 nt, Artificial Sequence
  Description of Artificial Sequence: Synthetic oligonucleotide
  Antisense strand to SEQ ID NO: 2390710
auuggaacaagccagcuuu

SEQ ID NO: 2390712 - RNA, 19 nt, Artificial Sequence
  Description of Artificial Sequence: Synthetic oligonucleotide
  Sense strand starting at position 2170 of SEQ ID NO: 1886155
ccuuaaaucugccugaaag

SEQ ID NO: 2390713 - RNA, 19 nt, Artificial Sequence
  Description of Artificial Sequence: Synthetic oligonucleotide
  Antisense strand to SEQ ID NO: 2390712
cuuucaggcagauuuaagg

SEQ ID NO: 2390714 - RNA, 19 nt, Artificial Sequence
  Description of Artificial Sequence: Synthetic oligonucleotide
  Sense strand starting at position 2171 of SEQ ID NO: 1886155
cuuaaaucugccugaaagg

SEQ ID NO: 2390715 - RNA, 19 nt, Artificial Sequence
  Description of Artificial Sequence: Synthetic oligonucleotide
  Antisense strand to SEQ ID NO: 2390714
ccuuucaggcagauuuaag

SEQ ID NO: 2390716 - RNA, 19 nt, Artificial Sequence
  Description of Artificial Sequence: Synthetic oligonucleotide
  Sense strand starting at position 2226 of SEQ ID NO: 1886155
ugacuuggauucuccucaa

SEQ ID NO: 2390717 - RNA, 19 nt, Artificial Sequence
  Description of Artificial Sequence: Synthetic oligonucleotide
  Antisense strand to SEQ ID NO: 2390716
uugaggagaauccaaguca

SEQ ID NO: 2390718 - RNA, 19 nt, Artificial Sequence
  Description of Artificial Sequence: Synthetic oligonucleotide
  Sense strand starting at position 2229 of SEQ ID NO: 1886155
cuuggauucuccucaagcu

SEQ ID NO: 2390719 - RNA, 19 nt, Artificial Sequence
  Description of Artificial Sequence: Synthetic oligonucleotide
  Antisense strand to SEQ ID NO: 2390718
agcuugaggagaauccaag

SEQ ID NO: 2390720 - RNA, 19 nt, Artificial Sequence
  Description of Artificial Sequence: Synthetic oligonucleotide
  Sense strand starting at position 2244 of SEQ ID NO: 1886155
agcucaaucugccugauga

SEQ ID NO: 2390721 - RNA, 19 nt, Artificial Sequence
  Description of Artificial Sequence: Synthetic oligonucleotide
  Antisense strand to SEQ ID NO: 2390720
ucaucaggcagauugagcu

SEQ ID NO: 2390722 - RNA, 19 nt, Artificial Sequence
  Description of Artificial Sequence: Synthetic oligonucleotide
  Sense strand starting at position 2245 of SEQ ID NO: 1886155
gcucaaucugccugaugau

SEQ ID NO: 2390723 - RNA, 19 nt, Artificial Sequence
  Description of Artificial Sequence: Synthetic oligonucleotide
  Antisense strand to SEQ ID NO: 2390722
aucaucaggcagauugagc

SEQ ID NO: 2390724 - RNA, 19 nt, Artificial Sequence
  Description of Artificial Sequence: Synthetic oligonucleotide
  Sense strand starting at position 2246 of SEQ ID NO: 1886155
cucaaucugccugaugauc

SEQ ID NO: 2390725 - RNA, 19 nt, Artificial Sequence
  Description of Artificial Sequence: Synthetic oligonucleotide
  Antisense strand to SEQ ID NO: 2390724
gaucaucaggcagauugag

SEQ ID NO: 2390726 - RNA, 19 nt, Artificial Sequence
  Description of Artificial Sequence: Synthetic oligonucleotide
  Sense strand starting at position 2254 of SEQ ID NO: 1886155
gccugaugaucuguauuga

SEQ ID NO: 2390727 - RNA, 19 nt, Artificial Sequence
  Description of Artificial Sequence: Synthetic oligonucleotide
  Antisense strand to SEQ ID NO: 2390726
ucaauacagaucaucaggc

SEQ ID NO: 2390728 - RNA, 19 nt, Artificial Sequence
  Description of Artificial Sequence: Synthetic oligonucleotide
  Sense strand starting at position 2389 of SEQ ID NO: 1886155
gcucuagauggcuaaugca

SEQ ID NO: 2390729 - RNA, 19 nt, Artificial Sequence
  Description of Artificial Sequence: Synthetic oligonucleotide
  Antisense strand to SEQ ID NO: 2390728
ugcauuagccaucuagagc

SEQ ID NO: 2390730 - RNA, 19 nt, Artificial Sequence
  Description of Artificial Sequence: Synthetic oligonucleotide
  Sense strand starting at position 2466 of SEQ ID NO: 1886155
ggguuaggaacugguauaa

SEQ ID NO: 2390731 - RNA, 19 nt, Artificial Sequence
  Description of Artificial Sequence: Synthetic oligonucleotide
  Antisense strand to SEQ ID NO: 2390730
uuauaccaguuccuaaccc

SEQ ID NO: 2390732 - RNA, 19 nt, Artificial Sequence
  Description of Artificial Sequence: Synthetic oligonucleotide
  Sense strand starting at position 2492 of SEQ ID NO: 1886155
ccuucuuuccuuuagggau

SEQ ID NO: 2390733 - RNA, 19 nt, Artificial Sequence
  Description of Artificial Sequence: Synthetic oligonucleotide
  Antisense strand to SEQ ID NO: 2390732
aucccuaaaggaaagaagg

SEQ ID NO: 2390734 - RNA, 19 nt, Artificial Sequence
  Description of Artificial Sequence: Synthetic oligonucleotide
  Sense strand starting at position 2506 of SEQ ID NO: 1886155
gggauugaaucccaacauc

SEQ ID NO: 2390735 - RNA, 19 nt, Artificial Sequence
  Description of Artificial Sequence: Synthetic oligonucleotide
  Antisense strand to SEQ ID NO: 2390734
gauguugggauucaauccc

SEQ ID NO: 2390736 - RNA, 19 nt, Artificial Sequence
  Description of Artificial Sequence: Synthetic oligonucleotide
  Sense strand starting at position 2534 of SEQ ID NO: 1886155
cucuuuggguacuuggaaa

SEQ ID NO: 2390737 - RNA, 19 nt, Artificial Sequence
  Description of Artificial Sequence: Synthetic oligonucleotide
  Antisense strand to SEQ ID NO: 2390736
uuuccaaguacccaaagag

SEQ ID NO: 2390738 - RNA, 19 nt, Artificial Sequence
  Description of Artificial Sequence: Synthetic oligonucleotide
  Sense strand starting at position 2913 of SEQ ID NO: 1886155
gugaguaacugagcuaaug

SEQ ID NO: 2390739 - RNA, 19 nt, Artificial Sequence
  Description of Artificial Sequence: Synthetic oligonucleotide
  Antisense strand to SEQ ID NO: 2390738
cauuagcucaguuacucac

SEQ ID NO: 2390740 - RNA, 19 nt, Artificial Sequence
  Description of Artificial Sequence: Synthetic oligonucleotide
  Sense strand starting at position 3299 of SEQ ID NO: 1886155
cacacuuggugaguucuga

SEQ ID NO: 2390741 - RNA, 19 nt, Artificial Sequence
  Description of Artificial Sequence: Synthetic oligonucleotide
  Antisense strand to SEQ ID NO: 2390740
ucagaacucaccaagugug

SEQ ID NO: 2390742 - RNA, 19 nt, Artificial Sequence
  Description of Artificial Sequence: Synthetic oligonucleotide
  Sense strand starting at position 3307 of SEQ ID NO: 1886155
gugaguucugaggaagucu

SEQ ID NO: 2390743 - RNA, 19 nt, Artificial Sequence
  Description of Artificial Sequence: Synthetic oligonucleotide
  Antisense strand to SEQ ID NO: 2390742
agacuuccucagaacucac

SEQ ID NO: 2390744 - RNA, 19 nt, Artificial Sequence
  Description of Artificial Sequence: Synthetic oligonucleotide
  Sense strand starting at position 3316 of SEQ ID NO: 1886155
gaggaagucuccuuaaacu

SEQ ID NO: 2390745 - RNA, 19 nt, Artificial Sequence
  Description of Artificial Sequence: Synthetic oligonucleotide
  Antisense strand to SEQ ID NO: 2390744
aguuuaaggagacuuccuc

SEQ ID NO: 2390746 - RNA, 19 nt, Artificial Sequence
  Description of Artificial Sequence: Synthetic oligonucleotide
  Sense strand starting at position 3357 of SEQ ID NO: 1886155
acucacuccuagucagacu

SEQ ID NO: 2390747 - RNA, 19 nt, Artificial Sequence
  Description of Artificial Sequence: Synthetic oligonucleotide
  Antisense strand to SEQ ID NO: 2390746
agucugacuaggagugagu

SEQ ID NO: 2390748 - RNA, 19 nt, Artificial Sequence
  Description of Artificial Sequence: Synthetic oligonucleotide
  Sense strand starting at position 3843 of SEQ ID NO: 1886155
uaaggagcuuggccucaaa

SEQ ID NO: 2390749 - RNA, 19 nt, Artificial Sequence
  Description of Artificial Sequence: Synthetic oligonucleotide
  Antisense strand to SEQ ID NO: 2390748
uuugaggccaagcuccuua

SEQ ID NO: 2390750 - RNA, 19 nt, Artificial Sequence
  Description of Artificial Sequence: Synthetic oligonucleotide
  Sense strand starting at position 65 of SEQ ID NO: 1886157
uuuccuccucaggaaaguu

SEQ ID NO: 2390751 - RNA, 19 nt, Artificial Sequence
  Description of Artificial Sequence: Synthetic oligonucleotide
  Antisense strand to SEQ ID NO: 2390750
aacuuuccugaggaggaaa

SEQ ID NO: 2390752 - RNA, 19 nt, Artificial Sequence
  Description of Artificial Sequence: Synthetic oligonucleotide
  Sense strand starting at position 171 of SEQ ID NO: 1886157
aaaugaggauuccaaagga

SEQ ID NO: 2390753 - RNA, 19 nt, Artificial Sequence
  Description of Artificial Sequence: Synthetic oligonucleotide
  Antisense strand to SEQ ID NO: 2390752
uccuuuggaauccucauuu

SEQ ID NO: 2390754 - RNA, 19 nt, Artificial Sequence
  Description of Artificial Sequence: Synthetic oligonucleotide
  Sense strand starting at position 223 of SEQ ID NO: 1886157
uucuaucuuugauccagga

SEQ ID NO: 2390755 - RNA, 19 nt, Artificial Sequence
  Description of Artificial Sequence: Synthetic oligonucleotide
  Antisense strand to SEQ ID NO: 2390754
uccuggaucaaagauagaa

SEQ ID NO: 2390756 - RNA, 19 nt, Artificial Sequence
  Description of Artificial Sequence: Synthetic oligonucleotide
  Sense strand starting at position 311 of SEQ ID NO: 1886157
cccaacuugcuuuaggauu

SEQ ID NO: 2390757 - RNA, 19 nt, Artificial Sequence
  Description of Artificial Sequence: Synthetic oligonucleotide
  Antisense strand to SEQ ID NO: 2390756
aauccuaaagcaaguuggg

SEQ ID NO: 2390758 - RNA, 19 nt, Artificial Sequence
  Description of Artificial Sequence: Synthetic oligonucleotide
  Sense strand starting at position 357 of SEQ ID NO: 1886157
guggaauuuggcugugccu

SEQ ID NO: 2390759 - RNA, 19 nt, Artificial Sequence
  Description of Artificial Sequence: Synthetic oligonucleotide
  Antisense strand to SEQ ID NO: 2390758
aggcacagccaaauuccac

SEQ ID NO: 2390760 - RNA, 19 nt, Artificial Sequence
  Description of Artificial Sequence: Synthetic oligonucleotide
  Sense strand starting at position 378 of SEQ ID NO: 1886157
ggucgucuugcuuugcaau

SEQ ID NO: 2390761 - RNA, 19 nt, Artificial Sequence
  Description of Artificial Sequence: Synthetic oligonucleotide
  Antisense strand to SEQ ID NO: 2390760
auugcaaagcaagacgacc

SEQ ID NO: 2390762 - RNA, 19 nt, Artificial Sequence
  Description of Artificial Sequence: Synthetic oligonucleotide
  Sense strand starting at position 453 of SEQ ID NO: 1886157
cgacuaaacucauuaaguu

SEQ ID NO: 2390763 - RNA, 19 nt, Artificial Sequence
  Description of Artificial Sequence: Synthetic oligonucleotide
  Antisense strand to SEQ ID NO: 2390762
aacuuaaugaguuuagucg

SEQ ID NO: 2390764 - RNA, 19 nt, Artificial Sequence
  Description of Artificial Sequence: Synthetic oligonucleotide
  Sense strand starting at position 460 of SEQ ID NO: 1886157
acucauuaaguugggagau

SEQ ID NO: 2390765 - RNA, 19 nt, Artificial Sequence
  Description of Artificial Sequence: Synthetic oligonucleotide
  Antisense strand to SEQ ID NO: 2390764
aucucccaacuuaaugagu

SEQ ID NO: 2390766 - RNA, 19 nt, Artificial Sequence
  Description of Artificial Sequence: Synthetic oligonucleotide
  Sense strand starting at position 462 of SEQ ID NO: 1886157
ucauuaaguugggagauuu

SEQ ID NO: 2390767 - RNA, 19 nt, Artificial Sequence
  Description of Artificial Sequence: Synthetic oligonucleotide
  Antisense strand to SEQ ID NO: 2390766
aaaucucccaacuuaauga

SEQ ID NO: 2390768 - RNA, 19 nt, Artificial Sequence
  Description of Artificial Sequence: Synthetic oligonucleotide
  Sense strand starting at position 1094 of SEQ ID NO: 1886157
uuugcuaacguguaugaaa

SEQ ID NO: 2390769 - RNA, 19 nt, Artificial Sequence
  Description of Artificial Sequence: Synthetic oligonucleotide
  Antisense strand to SEQ ID NO: 2390768
uuucauacacguuagcaaa

SEQ ID NO: 2390770 - RNA, 19 nt, Artificial Sequence
  Description of Artificial Sequence: Synthetic oligonucleotide
  Sense strand starting at position 1105 of SEQ ID NO: 1886157
guaugaaaugccgaggacu

SEQ ID NO: 2390771 - RNA, 19 nt, Artificial Sequence
  Description of Artificial Sequence: Synthetic oligonucleotide
  Antisense strand to SEQ ID NO: 2390770
aguccucggcauuucauac

SEQ ID NO: 2390772 - RNA, 19 nt, Artificial Sequence
  Description of Artificial Sequence: Synthetic oligonucleotide
  Sense strand starting at position 1107 of SEQ ID NO: 1886157
augaaaugccgaggacugu

SEQ ID NO: 2390773 - RNA, 19 nt, Artificial Sequence
  Description of Artificial Sequence: Synthetic oligonucleotide
  Antisense strand to SEQ ID NO: 2390772
acaguccucggcauuucau

SEQ ID NO: 2390774 - RNA, 19 nt, Artificial Sequence
  Description of Artificial Sequence: Synthetic oligonucleotide
  Sense strand starting at position 1427 of SEQ ID NO: 1886157
agaauuuacuguucgcuuu

SEQ ID NO: 2390775 - RNA, 19 nt, Artificial Sequence
  Description of Artificial Sequence: Synthetic oligonucleotide
  Antisense strand to SEQ ID NO: 2390774
aaagcgaacaguaaauucu

SEQ ID NO: 2390776 - RNA, 19 nt, Artificial Sequence
  Description of Artificial Sequence: Synthetic oligonucleotide
  Sense strand starting at position 1567 of SEQ ID NO: 1886157
ggagaaucgcgacgagaag

SEQ ID NO: 2390777 - RNA, 19 nt, Artificial Sequence
  Description of Artificial Sequence: Synthetic oligonucleotide
  Antisense strand to SEQ ID NO: 2390776
cuucucgucgcgauucucc

SEQ ID NO: 2390778 - RNA, 19 nt, Artificial Sequence
  Description of Artificial Sequence: Synthetic oligonucleotide
  Sense strand starting at position 1579 of SEQ ID NO: 1886157
cgagaaggguacucaccau

SEQ ID NO: 2390779 - RNA, 19 nt, Artificial Sequence
  Description of Artificial Sequence: Synthetic oligonucleotide
  Antisense strand to SEQ ID NO: 2390778
auggugaguacccuucucg

SEQ ID NO: 2390780 - RNA, 19 nt, Artificial Sequence
  Description of Artificial Sequence: Synthetic oligonucleotide
  Sense strand starting at position 1972 of SEQ ID NO: 1886157
acgugaguccaaagucguu

SEQ ID NO: 2390781 - RNA, 19 nt, Artificial Sequence
  Description of Artificial Sequence: Synthetic oligonucleotide
  Antisense strand to SEQ ID NO: 2390780
aacgacuuuggacucacgu

SEQ ID NO: 2390782 - RNA, 19 nt, Artificial Sequence
  Description of Artificial Sequence: Synthetic oligonucleotide
  Sense strand starting at position 2179 of SEQ ID NO: 1886157
accacaagccagugguuaa

SEQ ID NO: 2390783 - RNA, 19 nt, Artificial Sequence
  Description of Artificial Sequence: Synthetic oligonucleotide
  Antisense strand to SEQ ID NO: 2390782
uuaaccacuggcuuguggu

SEQ ID NO: 2390784 - RNA, 19 nt, Artificial Sequence
  Description of Artificial Sequence: Synthetic oligonucleotide
  Sense strand starting at position 2200 of SEQ ID NO: 1886157
auugcauugacuuggaagu

SEQ ID NO: 2390785 - RNA, 19 nt, Artificial Sequence
  Description of Artificial Sequence: Synthetic oligonucleotide
  Antisense strand to SEQ ID NO: 2390784
acuuccaagucaaugcaau

SEQ ID NO: 2390786 - RNA, 19 nt, Artificial Sequence
  Description of Artificial Sequence: Synthetic oligonucleotide
  Sense strand starting at position 2430 of SEQ ID NO: 1886157
aggccacuuucugcaagaa

SEQ ID NO: 2390787 - RNA, 19 nt, Artificial Sequence
  Description of Artificial Sequence: Synthetic oligonucleotide
  Antisense strand to SEQ ID NO: 2390786
uucuugcagaaaguggccu

SEQ ID NO: 2390788 - RNA, 19 nt, Artificial Sequence
  Description of Artificial Sequence: Synthetic oligonucleotide
  Sense strand starting at position 2431 of SEQ ID NO: 1886157
ggccacuuucugcaagaaa

SEQ ID NO: 2390789 - RNA, 19 nt, Artificial Sequence
  Description of Artificial Sequence: Synthetic oligonucleotide
  Antisense strand to SEQ ID NO: 2390788
uuucuugcagaaaguggcc

SEQ ID NO: 2390790 - RNA, 19 nt, Artificial Sequence
  Description of Artificial Sequence: Synthetic oligonucleotide
  Sense strand starting at position 2449 of SEQ ID NO: 1886157
aauuauauuccuggguguu

SEQ ID NO: 2390791 - RNA, 19 nt, Artificial Sequence
  Description of Artificial Sequence: Synthetic oligonucleotide
  Antisense strand to SEQ ID NO: 2390790
aacacccaggaauauaauu

SEQ ID NO: 2390792 - RNA, 19 nt, Artificial Sequence
  Description of Artificial Sequence: Synthetic oligonucleotide
  Sense strand starting at position 2487 of SEQ ID NO: 1886157
uuuagauuagggcaaaugu

SEQ ID NO: 2390793 - RNA, 19 nt, Artificial Sequence
  Description of Artificial Sequence: Synthetic oligonucleotide
  Antisense strand to SEQ ID NO: 2390792
acauuugcccuaaucuaaa

SEQ ID NO: 2390794 - RNA, 19 nt, Artificial Sequence
  Description of Artificial Sequence: Synthetic oligonucleotide
  Sense strand starting at position 2658 of SEQ ID NO: 1886157
aagugagcaucucuggaga

SEQ ID NO: 2390795 - RNA, 19 nt, Artificial Sequence
  Description of Artificial Sequence: Synthetic oligonucleotide
  Antisense strand to SEQ ID NO: 2390794
ucuccagagaugcucacuu

SEQ ID NO: 2390796 - RNA, 19 nt, Artificial Sequence
  Description of Artificial Sequence: Synthetic oligonucleotide
  Sense strand starting at position 2855 of SEQ ID NO: 1886157
ugugaucauuugccuagca

SEQ ID NO: 2390797 - RNA, 19 nt, Artificial Sequence
  Description of Artificial Sequence: Synthetic oligonucleotide
  Antisense strand to SEQ ID NO: 2390796
ugcuaggcaaaugaucaca

SEQ ID NO: 2390798 - RNA, 19 nt, Artificial Sequence
  Description of Artificial Sequence: Synthetic oligonucleotide
  Sense strand starting at position 3031 of SEQ ID NO: 1886157
agucucauucaggagguga

SEQ ID NO: 2390799 - RNA, 19 nt, Artificial Sequence
  Description of Artificial Sequence: Synthetic oligonucleotide
  Antisense strand to SEQ ID NO: 2390798
ucaccuccugaaugagacu

SEQ ID NO: 2390800 - RNA, 19 nt, Artificial Sequence
  Description of Artificial Sequence: Synthetic oligonucleotide
  Sense strand starting at position 3033 of SEQ ID NO: 1886157
ucucauucaggaggugaga

SEQ ID NO: 2390801 - RNA, 19 nt, Artificial Sequence
  Description of Artificial Sequence: Synthetic oligonucleotide
  Antisense strand to SEQ ID NO: 2390800
ucucaccuccugaaugaga

SEQ ID NO: 2390802 - RNA, 19 nt, Artificial Sequence
  Description of Artificial Sequence: Synthetic oligonucleotide
  Sense strand starting at position 3238 of SEQ ID NO: 1886157
ccuucuccuguguaaugau

SEQ ID NO: 2390803 - RNA, 19 nt, Artificial Sequence
  Description of Artificial Sequence: Synthetic oligonucleotide
  Antisense strand to SEQ ID NO: 2390802
aucauuacacaggagaagg

SEQ ID NO: 2390804 - RNA, 19 nt, Artificial Sequence
  Description of Artificial Sequence: Synthetic oligonucleotide
  Sense strand starting at position 3270 of SEQ ID NO: 1886157
uucuuauccucuuuaggag

SEQ ID NO: 2390805 - RNA, 19 nt, Artificial Sequence
  Description of Artificial Sequence: Synthetic oligonucleotide
  Antisense strand to SEQ ID NO: 2390804
cuccuaaagaggauaagaa

SEQ ID NO: 2390806 - RNA, 19 nt, Artificial Sequence
  Description of Artificial Sequence: Synthetic oligonucleotide
  Sense strand starting at position 3342 of SEQ ID NO: 1886157
guggcaaucuuauuacaca

SEQ ID NO: 2390807 - RNA, 19 nt, Artificial Sequence
  Description of Artificial Sequence: Synthetic oligonucleotide
  Antisense strand to SEQ ID NO: 2390806
uguguaauaagauugccac

SEQ ID NO: 2390808 - RNA, 19 nt, Artificial Sequence
  Description of Artificial Sequence: Synthetic oligonucleotide
  Sense strand starting at position 3450 of SEQ ID NO: 1886157
gcuuuagugaaauacguga

SEQ ID NO: 2390809 - RNA, 19 nt, Artificial Sequence
  Description of Artificial Sequence: Synthetic oligonucleotide
  Antisense strand to SEQ ID NO: 2390808
ucacguauuucacuaaagc

SEQ ID NO: 2390810 - RNA, 19 nt, Artificial Sequence
  Description of Artificial Sequence: Synthetic oligonucleotide
  Sense strand starting at position 3452 of SEQ ID NO: 1886157
uuuagugaaauacgugauu

SEQ ID NO: 2390811 - RNA, 19 nt, Artificial Sequence
  Description of Artificial Sequence: Synthetic oligonucleotide
  Antisense strand to SEQ ID NO: 2390810
aaucacguauuucacuaaa

SEQ ID NO: 2390812 - RNA, 19 nt, Artificial Sequence
  Description of Artificial Sequence: Synthetic oligonucleotide
  Sense strand starting at position 3465 of SEQ ID NO: 1886157
gugauuucaucggagaaag

SEQ ID NO: 2390813 - RNA, 19 nt, Artificial Sequence
  Description of Artificial Sequence: Synthetic oligonucleotide
  Antisense strand to SEQ ID NO: 2390812
cuuucuccgaugaaaucac

SEQ ID NO: 2390814 - RNA, 19 nt, Artificial Sequence
  Description of Artificial Sequence: Synthetic oligonucleotide
  Sense strand starting at position 3555 of SEQ ID NO: 1886157
cccagaucuuuaguccuua

SEQ ID NO: 2390815 - RNA, 19 nt, Artificial Sequence
  Description of Artificial Sequence: Synthetic oligonucleotide
  Antisense strand to SEQ ID NO: 2390814
uaaggacuaaagaucuggg

SEQ ID NO: 2390816 - RNA, 19 nt, Artificial Sequence
  Description of Artificial Sequence: Synthetic oligonucleotide
  Sense strand starting at position 3584 of SEQ ID NO: 1886157
ugccuauguguguaaagag

SEQ ID NO: 2390817 - RNA, 19 nt, Artificial Sequence
  Description of Artificial Sequence: Synthetic oligonucleotide
  Antisense strand to SEQ ID NO: 2390816
cucuuuacacacauaggca

SEQ ID NO: 2390818 - RNA, 19 nt, Artificial Sequence
  Description of Artificial Sequence: Synthetic oligonucleotide
  Sense strand starting at position 3594 of SEQ ID NO: 1886157
uguaaagagaauugaaugu

SEQ ID NO: 2390819 - RNA, 19 nt, Artificial Sequence
  Description of Artificial Sequence: Synthetic oligonucleotide
  Antisense strand to SEQ ID NO: 2390818
acauucaauucucuuuaca

SEQ ID NO: 2390820 - RNA, 19 nt, Artificial Sequence
  Description of Artificial Sequence: Synthetic oligonucleotide
  Sense strand starting at position 3631 of SEQ ID NO: 1886157
gucaauuauauguaugguu

SEQ ID NO: 2390821 - RNA, 19 nt, Artificial Sequence
  Description of Artificial Sequence: Synthetic oligonucleotide
  Antisense strand to SEQ ID NO: 2390820
aaccauacauauaauugac

SEQ ID NO: 2390822 - RNA, 19 nt, Artificial Sequence
  Description of Artificial Sequence: Synthetic oligonucleotide
  Sense strand starting at position 3923 of SEQ ID NO: 1886157
ggaauauaguguguucuga

SEQ ID NO: 2390823 - RNA, 19 nt, Artificial Sequence
  Description of Artificial Sequence: Synthetic oligonucleotide
  Antisense strand to SEQ ID NO: 2390822
ucagaacacacuauauucc

SEQ ID NO: 2390824 - RNA, 19 nt, Artificial Sequence
  Description of Artificial Sequence: Synthetic oligonucleotide
  Sense strand starting at position 3925 of SEQ ID NO: 1886157
aauauaguguguucugaga

SEQ ID NO: 2390825 - RNA, 19 nt, Artificial Sequence
  Description of Artificial Sequence: Synthetic oligonucleotide
  Antisense strand to SEQ ID NO: 2390824
ucucagaacacacuauauu

SEQ ID NO: 2390826 - RNA, 19 nt, Artificial Sequence
  Description of Artificial Sequence: Synthetic oligonucleotide
  Sense strand starting at position 3933 of SEQ ID NO: 1886157
guguucugagagcaauucu

SEQ ID NO: 2390827 - RNA, 19 nt, Artificial Sequence
  Description of Artificial Sequence: Synthetic oligonucleotide
  Antisense strand to SEQ ID NO: 2390826
agaauugcucucagaacac

SEQ ID NO: 2390828 - RNA, 19 nt, Artificial Sequence
  Description of Artificial Sequence: Synthetic oligonucleotide
  Sense strand starting at position 3941 of SEQ ID NO: 1886157
agagcaauucuacauguuu

SEQ ID NO: 2390829 - RNA, 19 nt, Artificial Sequence
  Description of Artificial Sequence: Synthetic oligonucleotide
  Antisense strand to SEQ ID NO: 2390828
aaacauguagaauugcucu

SEQ ID NO: 2390830 - RNA, 19 nt, Artificial Sequence
  Description of Artificial Sequence: Synthetic oligonucleotide
  Sense strand starting at position 20 of SEQ ID NO: 1886156
guuaguuccauuugucaag

SEQ ID NO: 2390831 - RNA, 19 nt, Artificial Sequence
  Description of Artificial Sequence: Synthetic oligonucleotide
  Antisense strand to SEQ ID NO: 2390830
cuugacaaauggaacuaac

SEQ ID NO: 2390832 - RNA, 19 nt, Artificial Sequence
  Description of Artificial Sequence: Synthetic oligonucleotide
  Sense strand starting at position 143 of SEQ ID NO: 1886156
aguauuaaacugugagagg

SEQ ID NO: 2390833 - RNA, 19 nt, Artificial Sequence
  Description of Artificial Sequence: Synthetic oligonucleotide
  Antisense strand to SEQ ID NO: 2390832
ccucucacaguuuaauacu

SEQ ID NO: 2390834 - RNA, 19 nt, Artificial Sequence
  Description of Artificial Sequence: Synthetic oligonucleotide
  Sense strand starting at position 308 of SEQ ID NO: 1886156
uuuccuccucaggaaaguu

SEQ ID NO: 2390835 - RNA, 19 nt, Artificial Sequence
  Description of Artificial Sequence: Synthetic oligonucleotide
  Antisense strand to SEQ ID NO: 2390834
aacuuuccugaggaggaaa

SEQ ID NO: 2390836 - RNA, 19 nt, Artificial Sequence
  Description of Artificial Sequence: Synthetic oligonucleotide
  Sense strand starting at position 414 of SEQ ID NO: 1886156
aaaugaggauuccaaagga

SEQ ID NO: 2390837 - RNA, 19 nt, Artificial Sequence
  Description of Artificial Sequence: Synthetic oligonucleotide
  Antisense strand to SEQ ID NO: 2390836
uccuuuggaauccucauuu

SEQ ID NO: 2390838 - RNA, 19 nt, Artificial Sequence
  Description of Artificial Sequence: Synthetic oligonucleotide
  Sense strand starting at position 466 of SEQ ID NO: 1886156
uucuaucuuugauccagga

SEQ ID NO: 2390839 - RNA, 19 nt, Artificial Sequence
  Description of Artificial Sequence: Synthetic oligonucleotide
  Antisense strand to SEQ ID NO: 2390838
uccuggaucaaagauagaa

SEQ ID NO: 2390840 - RNA, 19 nt, Artificial Sequence
  Description of Artificial Sequence: Synthetic oligonucleotide
  Sense strand starting at position 554 of SEQ ID NO: 1886156
cccaacuugcuuuaggauu

SEQ ID NO: 2390841 - RNA, 19 nt, Artificial Sequence
  Description of Artificial Sequence: Synthetic oligonucleotide
  Antisense strand to SEQ ID NO: 2390840
aauccuaaagcaaguuggg

SEQ ID NO: 2390842 - RNA, 19 nt, Artificial Sequence
  Description of Artificial Sequence: Synthetic oligonucleotide
  Sense strand starting at position 600 of SEQ ID NO: 1886156
guggaauuuggcugugccu

SEQ ID NO: 2390843 - RNA, 19 nt, Artificial Sequence
  Description of Artificial Sequence: Synthetic oligonucleotide
  Antisense strand to SEQ ID NO: 2390842
aggcacagccaaauuccac

SEQ ID NO: 2390844 - RNA, 19 nt, Artificial Sequence
  Description of Artificial Sequence: Synthetic oligonucleotide
  Sense strand starting at position 621 of SEQ ID NO: 1886156
ggucgucuugcuuugcaau

SEQ ID NO: 2390845 - RNA, 19 nt, Artificial Sequence
  Description of Artificial Sequence: Synthetic oligonucleotide
  Antisense strand to SEQ ID NO: 2390844
auugcaaagcaagacgacc

SEQ ID NO: 2390846 - RNA, 19 nt, Artificial Sequence
  Description of Artificial Sequence: Synthetic oligonucleotide
  Sense strand starting at position 696 of SEQ ID NO: 1886156
cgacuaaacucauuaaguu

SEQ ID NO: 2390847 - RNA, 19 nt, Artificial Sequence
  Description of Artificial Sequence: Synthetic oligonucleotide
  Antisense strand to SEQ ID NO: 2390846
aacuuaaugaguuuagucg

SEQ ID NO: 2390848 - RNA, 19 nt, Artificial Sequence
  Description of Artificial Sequence: Synthetic oligonucleotide
  Sense strand starting at position 703 of SEQ ID NO: 1886156
acucauuaaguugggagau

SEQ ID NO: 2390849 - RNA, 19 nt, Artificial Sequence
  Description of Artificial Sequence: Synthetic oligonucleotide
  Antisense strand to SEQ ID NO: 2390848
aucucccaacuuaaugagu

SEQ ID NO: 2390850 - RNA, 19 nt, Artificial Sequence
  Description of Artificial Sequence: Synthetic oligonucleotide
  Sense strand starting at position 705 of SEQ ID NO: 1886156
ucauuaaguugggagauuu

SEQ ID NO: 2390851 - RNA, 19 nt, Artificial Sequence
  Description of Artificial Sequence: Synthetic oligonucleotide
  Antisense strand to SEQ ID NO: 2390850
aaaucucccaacuuaauga

SEQ ID NO: 2390852 - RNA, 19 nt, Artificial Sequence
  Description of Artificial Sequence: Synthetic oligonucleotide
  Sense strand starting at position 1337 of SEQ ID NO: 1886156
uuugcuaacguguaugaaa

SEQ ID NO: 2390853 - RNA, 19 nt, Artificial Sequence
  Description of Artificial Sequence: Synthetic oligonucleotide
  Antisense strand to SEQ ID NO: 2390852
uuucauacacguuagcaaa

SEQ ID NO: 2390854 - RNA, 19 nt, Artificial Sequence
  Description of Artificial Sequence: Synthetic oligonucleotide
  Sense strand starting at position 1348 of SEQ ID NO: 1886156
guaugaaaugccgaggacu

SEQ ID NO: 2390855 - RNA, 19 nt, Artificial Sequence
  Description of Artificial Sequence: Synthetic oligonucleotide
  Antisense strand to SEQ ID NO: 2390854
aguccucggcauuucauac

SEQ ID NO: 2390856 - RNA, 19 nt, Artificial Sequence
  Description of Artificial Sequence: Synthetic oligonucleotide
  Sense strand starting at position 1350 of SEQ ID NO: 1886156
augaaaugccgaggacugu

SEQ ID NO: 2390857 - RNA, 19 nt, Artificial Sequence
  Description of Artificial Sequence: Synthetic oligonucleotide
  Antisense strand to SEQ ID NO: 2390856
acaguccucggcauuucau

SEQ ID NO: 2390858 - RNA, 19 nt, Artificial Sequence
  Description of Artificial Sequence: Synthetic oligonucleotide
  Sense strand starting at position 1670 of SEQ ID NO: 1886156
agaauuuacuguucgcuuu

SEQ ID NO: 2390859 - RNA, 19 nt, Artificial Sequence
  Description of Artificial Sequence: Synthetic oligonucleotide
  Antisense strand to SEQ ID NO: 2390858
aaagcgaacaguaaauucu

SEQ ID NO: 2390860 - RNA, 19 nt, Artificial Sequence
  Description of Artificial Sequence: Synthetic oligonucleotide
  Sense strand starting at position 1810 of SEQ ID NO: 1886156
ggagaaucgcgacgagaag

SEQ ID NO: 2390861 - RNA, 19 nt, Artificial Sequence
  Description of Artificial Sequence: Synthetic oligonucleotide
  Antisense strand to SEQ ID NO: 2390860
cuucucgucgcgauucucc

SEQ ID NO: 2390862 - RNA, 19 nt, Artificial Sequence
  Description of Artificial Sequence: Synthetic oligonucleotide
  Sense strand starting at position 1822 of SEQ ID NO: 1886156
cgagaaggguacucaccau

SEQ ID NO: 2390863 - RNA, 19 nt, Artificial Sequence
  Description of Artificial Sequence: Synthetic oligonucleotide
  Antisense strand to SEQ ID NO: 2390862
auggugaguacccuucucg

SEQ ID NO: 2390864 - RNA, 19 nt, Artificial Sequence
  Description of Artificial Sequence: Synthetic oligonucleotide
  Sense strand starting at position 1936 of SEQ ID NO: 1886156
cugugcucuguccagaaca

SEQ ID NO: 2390865 - RNA, 19 nt, Artificial Sequence
  Description of Artificial Sequence: Synthetic oligonucleotide
  Antisense strand to SEQ ID NO: 2390864
uguucuggacagagcacag

SEQ ID NO: 2390866 - RNA, 19 nt, Artificial Sequence
  Description of Artificial Sequence: Synthetic oligonucleotide
  Sense strand starting at position 1938 of SEQ ID NO: 1886156
gugcucuguccagaacauu

SEQ ID NO: 2390867 - RNA, 19 nt, Artificial Sequence
  Description of Artificial Sequence: Synthetic oligonucleotide
  Antisense strand to SEQ ID NO: 2390866
aauguucuggacagagcac

SEQ ID NO: 2390868 - RNA, 19 nt, Artificial Sequence
  Description of Artificial Sequence: Synthetic oligonucleotide
  Sense strand starting at position 2215 of SEQ ID NO: 1886156
acgugaguccaaagucguu

SEQ ID NO: 2390869 - RNA, 19 nt, Artificial Sequence
  Description of Artificial Sequence: Synthetic oligonucleotide
  Antisense strand to SEQ ID NO: 2390868
aacgacuuuggacucacgu

SEQ ID NO: 2390870 - RNA, 19 nt, Artificial Sequence
  Description of Artificial Sequence: Synthetic oligonucleotide
  Sense strand starting at position 2422 of SEQ ID NO: 1886156
accacaagccagugguuaa

SEQ ID NO: 2390871 - RNA, 19 nt, Artificial Sequence
  Description of Artificial Sequence: Synthetic oligonucleotide
  Antisense strand to SEQ ID NO: 2390870
uuaaccacuggcuuguggu

SEQ ID NO: 2390872 - RNA, 19 nt, Artificial Sequence
  Description of Artificial Sequence: Synthetic oligonucleotide
  Sense strand starting at position 2443 of SEQ ID NO: 1886156
auugcauugacuuggaagu

SEQ ID NO: 2390873 - RNA, 19 nt, Artificial Sequence
  Description of Artificial Sequence: Synthetic oligonucleotide
  Antisense strand to SEQ ID NO: 2390872
acuuccaagucaaugcaau

SEQ ID NO: 2390874 - RNA, 19 nt, Artificial Sequence
  Description of Artificial Sequence: Synthetic oligonucleotide
  Sense strand starting at position 2673 of SEQ ID NO: 1886156
aggccacuuucugcaagaa

SEQ ID NO: 2390875 - RNA, 19 nt, Artificial Sequence
  Description of Artificial Sequence: Synthetic oligonucleotide
  Antisense strand to SEQ ID NO: 2390874
uucuugcagaaaguggccu

SEQ ID NO: 2390876 - RNA, 19 nt, Artificial Sequence
  Description of Artificial Sequence: Synthetic oligonucleotide
  Sense strand starting at position 2674 of SEQ ID NO: 1886156
ggccacuuucugcaagaaa

SEQ ID NO: 2390877 - RNA, 19 nt, Artificial Sequence
  Description of Artificial Sequence: Synthetic oligonucleotide
  Antisense strand to SEQ ID NO: 2390876
uuucuugcagaaaguggcc

SEQ ID NO: 2390878 - RNA, 19 nt, Artificial Sequence
  Description of Artificial Sequence: Synthetic oligonucleotide
  Sense strand starting at position 2692 of SEQ ID NO: 1886156
aauuauauuccuggguguu

SEQ ID NO: 2390879 - RNA, 19 nt, Artificial Sequence
  Description of Artificial Sequence: Synthetic oligonucleotide
  Antisense strand to SEQ ID NO: 2390878
aacacccaggaauauaauu

SEQ ID NO: 2390880 - RNA, 19 nt, Artificial Sequence
  Description of Artificial Sequence: Synthetic oligonucleotide
  Sense strand starting at position 2730 of SEQ ID NO: 1886156
uuuagauuagggcaaaugu

SEQ ID NO: 2390881 - RNA, 19 nt, Artificial Sequence
  Description of Artificial Sequence: Synthetic oligonucleotide
  Antisense strand to SEQ ID NO: 2390880
acauuugcccuaaucuaaa

SEQ ID NO: 2390882 - RNA, 19 nt, Artificial Sequence
  Description of Artificial Sequence: Synthetic oligonucleotide
  Sense strand starting at position 2901 of SEQ ID NO: 1886156
aagugagcaucucuggaga

SEQ ID NO: 2390883 - RNA, 19 nt, Artificial Sequence
  Description of Artificial Sequence: Synthetic oligonucleotide
  Antisense strand to SEQ ID NO: 2390882
ucuccagagaugcucacuu

SEQ ID NO: 2390884 - RNA, 19 nt, Artificial Sequence
  Description of Artificial Sequence: Synthetic oligonucleotide
  Sense strand starting at position 3098 of SEQ ID NO: 1886156
ugugaucauuugccuagca

SEQ ID NO: 2390885 - RNA, 19 nt, Artificial Sequence
  Description of Artificial Sequence: Synthetic oligonucleotide
  Antisense strand to SEQ ID NO: 2390884
ugcuaggcaaaugaucaca

SEQ ID NO: 2390886 - RNA, 19 nt, Artificial Sequence
  Description of Artificial Sequence: Synthetic oligonucleotide
  Sense strand starting at position 3274 of SEQ ID NO: 1886156
agucucauucaggagguga

SEQ ID NO: 2390887 - RNA, 19 nt, Artificial Sequence
  Description of Artificial Sequence: Synthetic oligonucleotide
  Antisense strand to SEQ ID NO: 2390886
ucaccuccugaaugagacu

SEQ ID NO: 2390888 - RNA, 19 nt, Artificial Sequence
  Description of Artificial Sequence: Synthetic oligonucleotide
  Sense strand starting at position 3276 of SEQ ID NO: 1886156
ucucauucaggaggugaga

SEQ ID NO: 2390889 - RNA, 19 nt, Artificial Sequence
  Description of Artificial Sequence: Synthetic oligonucleotide
  Antisense strand to SEQ ID NO: 2390888
ucucaccuccugaaugaga

SEQ ID NO: 2390890 - RNA, 19 nt, Artificial Sequence
  Description of Artificial Sequence: Synthetic oligonucleotide
  Sense strand starting at position 3481 of SEQ ID NO: 1886156
ccuucuccuguguaaugau

SEQ ID NO: 2390891 - RNA, 19 nt, Artificial Sequence
  Description of Artificial Sequence: Synthetic oligonucleotide
  Antisense strand to SEQ ID NO: 2390890
aucauuacacaggagaagg

SEQ ID NO: 2390892 - RNA, 19 nt, Artificial Sequence
  Description of Artificial Sequence: Synthetic oligonucleotide
  Sense strand starting at position 3513 of SEQ ID NO: 1886156
uucuuauccucuuuaggag

SEQ ID NO: 2390893 - RNA, 19 nt, Artificial Sequence
  Description of Artificial Sequence: Synthetic oligonucleotide
  Antisense strand to SEQ ID NO: 2390892
cuccuaaagaggauaagaa

SEQ ID NO: 2390894 - RNA, 19 nt, Artificial Sequence
  Description of Artificial Sequence: Synthetic oligonucleotide
  Sense strand starting at position 3585 of SEQ ID NO: 1886156
guggcaaucuuauuacaca

SEQ ID NO: 2390895 - RNA, 19 nt, Artificial Sequence
  Description of Artificial Sequence: Synthetic oligonucleotide
  Antisense strand to SEQ ID NO: 2390894
uguguaauaagauugccac

SEQ ID NO: 2390896 - RNA, 19 nt, Artificial Sequence
  Description of Artificial Sequence: Synthetic oligonucleotide
  Sense strand starting at position 3693 of SEQ ID NO: 1886156
gcuuuagugaaauacguga

SEQ ID NO: 2390897 - RNA, 19 nt, Artificial Sequence
  Description of Artificial Sequence: Synthetic oligonucleotide
  Antisense strand to SEQ ID NO: 2390896
ucacguauuucacuaaagc

SEQ ID NO: 2390898 - RNA, 19 nt, Artificial Sequence
  Description of Artificial Sequence: Synthetic oligonucleotide
  Sense strand starting at position 3695 of SEQ ID NO: 1886156
uuuagugaaauacgugauu

SEQ ID NO: 2390899 - RNA, 19 nt, Artificial Sequence
  Description of Artificial Sequence: Synthetic oligonucleotide
  Antisense strand to SEQ ID NO: 2390898
aaucacguauuucacuaaa

SEQ ID NO: 2390900 - RNA, 19 nt, Artificial Sequence
  Description of Artificial Sequence: Synthetic oligonucleotide
  Sense strand starting at position 3708 of SEQ ID NO: 1886156
gugauuucaucggagaaag

SEQ ID NO: 2390901 - RNA, 19 nt, Artificial Sequence
  Description of Artificial Sequence: Synthetic oligonucleotide
  Antisense strand to SEQ ID NO: 2390900
cuuucuccgaugaaaucac

SEQ ID NO: 2390902 - RNA, 19 nt, Artificial Sequence
  Description of Artificial Sequence: Synthetic oligonucleotide
  Sense strand starting at position 3798 of SEQ ID NO: 1886156
cccagaucuuuaguccuua

SEQ ID NO: 2390903 - RNA, 19 nt, Artificial Sequence
  Description of Artificial Sequence: Synthetic oligonucleotide
  Antisense strand to SEQ ID NO: 2390902
uaaggacuaaagaucuggg

SEQ ID NO: 2390904 - RNA, 19 nt, Artificial Sequence
  Description of Artificial Sequence: Synthetic oligonucleotide
  Sense strand starting at position 3827 of SEQ ID NO: 1886156
ugccuauguguguaaagag

SEQ ID NO: 2390905 - RNA, 19 nt, Artificial Sequence
  Description of Artificial Sequence: Synthetic oligonucleotide
  Antisense strand to SEQ ID NO: 2390904
cucuuuacacacauaggca

SEQ ID NO: 2390906 - RNA, 19 nt, Artificial Sequence
  Description of Artificial Sequence: Synthetic oligonucleotide
  Sense strand starting at position 3837 of SEQ ID NO: 1886156
uguaaagagaauugaaugu

SEQ ID NO: 2390907 - RNA, 19 nt, Artificial Sequence
  Description of Artificial Sequence: Synthetic oligonucleotide
  Antisense strand to SEQ ID NO: 2390906
acauucaauucucuuuaca

SEQ ID NO: 2390908 - RNA, 19 nt, Artificial Sequence
  Description of Artificial Sequence: Synthetic oligonucleotide
  Sense strand starting at position 3874 of SEQ ID NO: 1886156
gucaauuauauguaugguu

SEQ ID NO: 2390909 - RNA, 19 nt, Artificial Sequence
  Description of Artificial Sequence: Synthetic oligonucleotide
  Antisense strand to SEQ ID NO: 2390908
aaccauacauauaauugac

SEQ ID NO: 2390910 - RNA, 19 nt, Artificial Sequence
  Description of Artificial Sequence: Synthetic oligonucleotide
  Sense strand starting at position 113 of SEQ ID NO: 1886158
cugcaaagccuggaggaau

SEQ ID NO: 2390911 - RNA, 19 nt, Artificial Sequence
  Description of Artificial Sequence: Synthetic oligonucleotide
  Antisense strand to SEQ ID NO: 2390910
auuccuccaggcuuugcag

SEQ ID NO: 2390912 - RNA, 19 nt, Artificial Sequence
  Description of Artificial Sequence: Synthetic oligonucleotide
  Sense strand starting at position 134 of SEQ ID NO: 1886158
caguccugcucuuuggaaa

SEQ ID NO: 2390913 - RNA, 19 nt, Artificial Sequence
  Description of Artificial Sequence: Synthetic oligonucleotide
  Antisense strand to SEQ ID NO: 2390912
uuuccaaagagcaggacug

SEQ ID NO: 2390914 - RNA, 19 nt, Artificial Sequence
  Description of Artificial Sequence: Synthetic oligonucleotide
  Sense strand starting at position 158 of SEQ ID NO: 1886158
ccagcccucucggcuuaau

SEQ ID NO: 2390915 - RNA, 19 nt, Artificial Sequence
  Description of Artificial Sequence: Synthetic oligonucleotide
  Antisense strand to SEQ ID NO: 2390914
auuaagccgagagggcugg

SEQ ID NO: 2390916 - RNA, 19 nt, Artificial Sequence
  Description of Artificial Sequence: Synthetic oligonucleotide
  Sense strand starting at position 161 of SEQ ID NO: 1886158
gcccucucggcuuaaugga

SEQ ID NO: 2390917 - RNA, 19 nt, Artificial Sequence
  Description of Artificial Sequence: Synthetic oligonucleotide
  Antisense strand to SEQ ID NO: 2390916
uccauuaagccgagagggc

SEQ ID NO: 2390918 - RNA, 19 nt, Artificial Sequence
  Description of Artificial Sequence: Synthetic oligonucleotide
  Sense strand starting at position 258 of SEQ ID NO: 1886158
agacaagcuugacccauau

SEQ ID NO: 2390919 - RNA, 19 nt, Artificial Sequence
  Description of Artificial Sequence: Synthetic oligonucleotide
  Antisense strand to SEQ ID NO: 2390918
auaugggucaagcuugucu

SEQ ID NO: 2390920 - RNA, 19 nt, Artificial Sequence
  Description of Artificial Sequence: Synthetic oligonucleotide
  Sense strand starting at position 456 of SEQ ID NO: 1886158
gagugagacuguuagggaa

SEQ ID NO: 2390921 - RNA, 19 nt, Artificial Sequence
  Description of Artificial Sequence: Synthetic oligonucleotide
  Antisense strand to SEQ ID NO: 2390920
uucccuaacagucucacuc

SEQ ID NO: 2390922 - RNA, 19 nt, Artificial Sequence
  Description of Artificial Sequence: Synthetic oligonucleotide
  Sense strand starting at position 696 of SEQ ID NO: 1886158
caaggaugugucugucugu

SEQ ID NO: 2390923 - RNA, 19 nt, Artificial Sequence
  Description of Artificial Sequence: Synthetic oligonucleotide
  Antisense strand to SEQ ID NO: 2390922
acagacagacacauccuug

SEQ ID NO: 2390924 - RNA, 19 nt, Artificial Sequence
  Description of Artificial Sequence: Synthetic oligonucleotide
  Sense strand starting at position 697 of SEQ ID NO: 1886158
aaggaugugucugucugua

SEQ ID NO: 2390925 - RNA, 19 nt, Artificial Sequence
  Description of Artificial Sequence: Synthetic oligonucleotide
  Antisense strand to SEQ ID NO: 2390924
uacagacagacacauccuu

SEQ ID NO: 2390926 - RNA, 19 nt, Artificial Sequence
  Description of Artificial Sequence: Synthetic oligonucleotide
  Sense strand starting at position 699 of SEQ ID NO: 1886158
ggaugugucugucuguaga

SEQ ID NO: 2390927 - RNA, 19 nt, Artificial Sequence
  Description of Artificial Sequence: Synthetic oligonucleotide
  Antisense strand to SEQ ID NO: 2390926
ucuacagacagacacaucc

SEQ ID NO: 2390928 - RNA, 19 nt, Artificial Sequence
  Description of Artificial Sequence: Synthetic oligonucleotide
  Sense strand starting at position 701 of SEQ ID NO: 1886158
augugucugucuguagaaa

SEQ ID NO: 2390929 - RNA, 19 nt, Artificial Sequence
  Description of Artificial Sequence: Synthetic oligonucleotide
  Antisense strand to SEQ ID NO: 2390928
uuucuacagacagacacau

SEQ ID NO: 2390930 - RNA, 19 nt, Artificial Sequence
  Description of Artificial Sequence: Synthetic oligonucleotide
  Sense strand starting at position 702 of SEQ ID NO: 1886158
ugugucugucuguagaaag

SEQ ID NO: 2390931 - RNA, 19 nt, Artificial Sequence
  Description of Artificial Sequence: Synthetic oligonucleotide
  Antisense strand to SEQ ID NO: 2390930
cuuucuacagacagacaca

SEQ ID NO: 2390932 - RNA, 19 nt, Artificial Sequence
  Description of Artificial Sequence: Synthetic oligonucleotide
  Sense strand starting at position 754 of SEQ ID NO: 1886158
ggcucuuuauagccacaca

SEQ ID NO: 2390933 - RNA, 19 nt, Artificial Sequence
  Description of Artificial Sequence: Synthetic oligonucleotide
  Antisense strand to SEQ ID NO: 2390932
uguguggcuauaaagagcc

SEQ ID NO: 2390934 - RNA, 19 nt, Artificial Sequence
  Description of Artificial Sequence: Synthetic oligonucleotide
  Sense strand starting at position 774 of SEQ ID NO: 1886158
agguguugcuccucugaaa

SEQ ID NO: 2390935 - RNA, 19 nt, Artificial Sequence
  Description of Artificial Sequence: Synthetic oligonucleotide
  Antisense strand to SEQ ID NO: 2390934
uuucagaggagcaacaccu

SEQ ID NO: 2390936 - RNA, 19 nt, Artificial Sequence
  Description of Artificial Sequence: Synthetic oligonucleotide
  Sense strand starting at position 810 of SEQ ID NO: 1886158
aguuucauagggcagaguu

SEQ ID NO: 2390937 - RNA, 19 nt, Artificial Sequence
  Description of Artificial Sequence: Synthetic oligonucleotide
  Antisense strand to SEQ ID NO: 2390936
aacucugcccuaugaaacu

SEQ ID NO: 2390938 - RNA, 19 nt, Artificial Sequence
  Description of Artificial Sequence: Synthetic oligonucleotide
  Sense strand starting at position 848 of SEQ ID NO: 1886158
gccagaaaggucugugaug

SEQ ID NO: 2390939 - RNA, 19 nt, Artificial Sequence
  Description of Artificial Sequence: Synthetic oligonucleotide
  Antisense strand to SEQ ID NO: 2390938
caucacagaccuuucuggc

SEQ ID NO: 2390940 - RNA, 19 nt, Artificial Sequence
  Description of Artificial Sequence: Synthetic oligonucleotide
  Sense strand starting at position 1101 of SEQ ID NO: 1886158
gucagaggucaugggucaa

SEQ ID NO: 2390941 - RNA, 19 nt, Artificial Sequence
  Description of Artificial Sequence: Synthetic oligonucleotide
  Antisense strand to SEQ ID NO: 2390940
uugacccaugaccucugac

SEQ ID NO: 2390942 - RNA, 19 nt, Artificial Sequence
  Description of Artificial Sequence: Synthetic oligonucleotide
  Sense strand starting at position 1159 of SEQ ID NO: 1886158
uauaucuauggcugguauu

SEQ ID NO: 2390943 - RNA, 19 nt, Artificial Sequence
  Description of Artificial Sequence: Synthetic oligonucleotide
  Antisense strand to SEQ ID NO: 2390942
aauaccagccauagauaua

SEQ ID NO: 2390944 - RNA, 19 nt, Artificial Sequence
  Description of Artificial Sequence: Synthetic oligonucleotide
  Sense strand starting at position 1984 of SEQ ID NO: 1886158
gccuuugcagcuguugaua

SEQ ID NO: 2390945 - RNA, 19 nt, Artificial Sequence
  Description of Artificial Sequence: Synthetic oligonucleotide
  Antisense strand to SEQ ID NO: 2390944
uaucaacagcugcaaaggc

SEQ ID NO: 2390946 - RNA, 19 nt, Artificial Sequence
  Description of Artificial Sequence: Synthetic oligonucleotide
  Sense strand starting at position 2140 of SEQ ID NO: 1886158
guuggagugguauggucuu

SEQ ID NO: 2390947 - RNA, 19 nt, Artificial Sequence
  Description of Artificial Sequence: Synthetic oligonucleotide
  Antisense strand to SEQ ID NO: 2390946
aagaccauaccacuccaac

SEQ ID NO: 2390948 - RNA, 19 nt, Artificial Sequence
  Description of Artificial Sequence: Synthetic oligonucleotide
  Sense strand starting at position 2146 of SEQ ID NO: 1886158
gugguauggucuuuagcug

SEQ ID NO: 2390949 - RNA, 19 nt, Artificial Sequence
  Description of Artificial Sequence: Synthetic oligonucleotide
  Antisense strand to SEQ ID NO: 2390948
cagcuaaagaccauaccac

SEQ ID NO: 2390950 - RNA, 19 nt, Artificial Sequence
  Description of Artificial Sequence: Synthetic oligonucleotide
  Sense strand starting at position 2151 of SEQ ID NO: 1886158
auggucuuuagcuguuaga

SEQ ID NO: 2390951 - RNA, 19 nt, Artificial Sequence
  Description of Artificial Sequence: Synthetic oligonucleotide
  Antisense strand to SEQ ID NO: 2390950
ucuaacagcuaaagaccau

SEQ ID NO: 2390952 - RNA, 19 nt, Artificial Sequence
  Description of Artificial Sequence: Synthetic oligonucleotide
  Sense strand starting at position 2413 of SEQ ID NO: 1886158
uccugagucucauucuuuc

SEQ ID NO: 2390953 - RNA, 19 nt, Artificial Sequence
  Description of Artificial Sequence: Synthetic oligonucleotide
  Antisense strand to SEQ ID NO: 2390952
gaaagaaugagacucagga

SEQ ID NO: 2390954 - RNA, 19 nt, Artificial Sequence
  Description of Artificial Sequence: Synthetic oligonucleotide
  Sense strand starting at position 2419 of SEQ ID NO: 1886158
gucucauucuuucuaagga

SEQ ID NO: 2390955 - RNA, 19 nt, Artificial Sequence
  Description of Artificial Sequence: Synthetic oligonucleotide
  Antisense strand to SEQ ID NO: 2390954
uccuuagaaagaaugagac

SEQ ID NO: 2390956 - RNA, 19 nt, Artificial Sequence
  Description of Artificial Sequence: Synthetic oligonucleotide
  Sense strand starting at position 2522 of SEQ ID NO: 1886158
acaguuuggugcucagaac

SEQ ID NO: 2390957 - RNA, 19 nt, Artificial Sequence
  Description of Artificial Sequence: Synthetic oligonucleotide
  Antisense strand to SEQ ID NO: 2390956
guucugagcaccaaacugu

SEQ ID NO: 2390958 - RNA, 19 nt, Artificial Sequence
  Description of Artificial Sequence: Synthetic oligonucleotide
  Sense strand starting at position 2635 of SEQ ID NO: 1886158
aagguacuuccaggaucaa

SEQ ID NO: 2390959 - RNA, 19 nt, Artificial Sequence
  Description of Artificial Sequence: Synthetic oligonucleotide
  Antisense strand to SEQ ID NO: 2390958
uugauccuggaaguaccuu

SEQ ID NO: 2390960 - RNA, 19 nt, Artificial Sequence
  Description of Artificial Sequence: Synthetic oligonucleotide
  Sense strand starting at position 2703 of SEQ ID NO: 1886158
ggcuauugguggcuccaga

SEQ ID NO: 2390961 - RNA, 19 nt, Artificial Sequence
  Description of Artificial Sequence: Synthetic oligonucleotide
  Antisense strand to SEQ ID NO: 2390960
ucuggagccaccaauagcc

SEQ ID NO: 2390962 - RNA, 19 nt, Artificial Sequence
  Description of Artificial Sequence: Synthetic oligonucleotide
  Sense strand starting at position 2753 of SEQ ID NO: 1886158
ggucaagcuucugucauac

SEQ ID NO: 2390963 - RNA, 19 nt, Artificial Sequence
  Description of Artificial Sequence: Synthetic oligonucleotide
  Antisense strand to SEQ ID NO: 2390962
guaugacagaagcuugacc

SEQ ID NO: 2390964 - RNA, 19 nt, Artificial Sequence
  Description of Artificial Sequence: Synthetic oligonucleotide
  Sense strand starting at position 2819 of SEQ ID NO: 1886158
ccaugacagcuuugggcaa

SEQ ID NO: 2390965 - RNA, 19 nt, Artificial Sequence
  Description of Artificial Sequence: Synthetic oligonucleotide
  Antisense strand to SEQ ID NO: 2390964
uugcccaaagcugucaugg

SEQ ID NO: 2390966 - RNA, 19 nt, Artificial Sequence
  Description of Artificial Sequence: Synthetic oligonucleotide
  Sense strand starting at position 2850 of SEQ ID NO: 1886158
ccuggccacugcuuugaaa

SEQ ID NO: 2390967 - RNA, 19 nt, Artificial Sequence
  Description of Artificial Sequence: Synthetic oligonucleotide
  Antisense strand to SEQ ID NO: 2390966
uuucaaagcaguggccagg

SEQ ID NO: 2390968 - RNA, 19 nt, Artificial Sequence
  Description of Artificial Sequence: Synthetic oligonucleotide
  Sense strand starting at position 2852 of SEQ ID NO: 1886158
uggccacugcuuugaaagu

SEQ ID NO: 2390969 - RNA, 19 nt, Artificial Sequence
  Description of Artificial Sequence: Synthetic oligonucleotide
  Antisense strand to SEQ ID NO: 2390968
acuuucaaagcaguggcca

SEQ ID NO: 2390970 - RNA, 19 nt, Artificial Sequence
  Description of Artificial Sequence: Synthetic oligonucleotide
  Sense strand starting at position 3029 of SEQ ID NO: 1886158
ucuguccaacucuguagaa

SEQ ID NO: 2390971 - RNA, 19 nt, Artificial Sequence
  Description of Artificial Sequence: Synthetic oligonucleotide
  Antisense strand to SEQ ID NO: 2390970
uucuacagaguuggacaga

SEQ ID NO: 2390972 - RNA, 19 nt, Artificial Sequence
  Description of Artificial Sequence: Synthetic oligonucleotide
  Sense strand starting at position 3108 of SEQ ID NO: 1886158
ugguauggcccuugccaau

SEQ ID NO: 2390973 - RNA, 19 nt, Artificial Sequence
  Description of Artificial Sequence: Synthetic oligonucleotide
  Antisense strand to SEQ ID NO: 2390972
auuggcaagggccauacca

SEQ ID NO: 2390974 - RNA, 19 nt, Artificial Sequence
  Description of Artificial Sequence: Synthetic oligonucleotide
  Sense strand starting at position 3120 of SEQ ID NO: 1886158
ugccaauaucacggcauuu

SEQ ID NO: 2390975 - RNA, 19 nt, Artificial Sequence
  Description of Artificial Sequence: Synthetic oligonucleotide
  Antisense strand to SEQ ID NO: 2390974
aaaugccgugauauuggca

SEQ ID NO: 2390976 - RNA, 19 nt, Artificial Sequence
  Description of Artificial Sequence: Synthetic oligonucleotide
  Sense strand starting at position 3178 of SEQ ID NO: 1886158
guggcuugcacagaaguca

SEQ ID NO: 2390977 - RNA, 19 nt, Artificial Sequence
  Description of Artificial Sequence: Synthetic oligonucleotide
  Antisense strand to SEQ ID NO: 2390976
ugacuucugugcaagccac

SEQ ID NO: 2390978 - RNA, 19 nt, Artificial Sequence
  Description of Artificial Sequence: Synthetic oligonucleotide
  Sense strand starting at position 3251 of SEQ ID NO: 1886158
agggauggaucaugugaau

SEQ ID NO: 2390979 - RNA, 19 nt, Artificial Sequence
  Description of Artificial Sequence: Synthetic oligonucleotide
  Antisense strand to SEQ ID NO: 2390978
auucacaugauccaucccu

SEQ ID NO: 2390980 - RNA, 19 nt, Artificial Sequence
  Description of Artificial Sequence: Synthetic oligonucleotide
  Sense strand starting at position 3364 of SEQ ID NO: 1886158
ggcagaguguuucuuccaa

SEQ ID NO: 2390981 - RNA, 19 nt, Artificial Sequence
  Description of Artificial Sequence: Synthetic oligonucleotide
  Antisense strand to SEQ ID NO: 2390980
uuggaagaaacacucugcc

SEQ ID NO: 2390982 - RNA, 19 nt, Artificial Sequence
  Description of Artificial Sequence: Synthetic oligonucleotide
  Sense strand starting at position 3386 of SEQ ID NO: 1886158
ggacauaugucaucucagg

SEQ ID NO: 2390983 - RNA, 19 nt, Artificial Sequence
  Description of Artificial Sequence: Synthetic oligonucleotide
  Antisense strand to SEQ ID NO: 2390982
ccugagaugacauaugucc

SEQ ID NO: 2390984 - RNA, 19 nt, Artificial Sequence
  Description of Artificial Sequence: Synthetic oligonucleotide
  Sense strand starting at position 3466 of SEQ ID NO: 1886158
ggcagugauccuugugaug

SEQ ID NO: 2390985 - RNA, 19 nt, Artificial Sequence
  Description of Artificial Sequence: Synthetic oligonucleotide
  Antisense strand to SEQ ID NO: 2390984
caucacaaggaucacugcc

SEQ ID NO: 2390986 - RNA, 19 nt, Artificial Sequence
  Description of Artificial Sequence: Synthetic oligonucleotide
  Sense strand starting at position 3603 of SEQ ID NO: 1886158
ugacacuauuuagagucaa

SEQ ID NO: 2390987 - RNA, 19 nt, Artificial Sequence
  Description of Artificial Sequence: Synthetic oligonucleotide
  Antisense strand to SEQ ID NO: 2390986
uugacucuaaauaguguca

SEQ ID NO: 2390988 - RNA, 19 nt, Artificial Sequence
  Description of Artificial Sequence: Synthetic oligonucleotide
  Sense strand starting at position 3636 of SEQ ID NO: 1886158
uggcauauuuaacaagaau

SEQ ID NO: 2390989 - RNA, 19 nt, Artificial Sequence
  Description of Artificial Sequence: Synthetic oligonucleotide
  Antisense strand to SEQ ID NO: 2390988
auucuuguuaaauaugcca

SEQ ID NO: 2390990 - RNA, 19 nt, Artificial Sequence
  Description of Artificial Sequence: Synthetic oligonucleotide
  Sense strand starting at position 204 of SEQ ID NO: 1886159
augaaacaguguccucuuu

SEQ ID NO: 2390991 - RNA, 19 nt, Artificial Sequence
  Description of Artificial Sequence: Synthetic oligonucleotide
  Antisense strand to SEQ ID NO: 2390990
aaagaggacacuguuucau

SEQ ID NO: 2390992 - RNA, 19 nt, Artificial Sequence
  Description of Artificial Sequence: Synthetic oligonucleotide
  Sense strand starting at position 206 of SEQ ID NO: 1886159
gaaacaguguccucuuuga

SEQ ID NO: 2390993 - RNA, 19 nt, Artificial Sequence
  Description of Artificial Sequence: Synthetic oligonucleotide
  Antisense strand to SEQ ID NO: 2390992
ucaaagaggacacuguuuc

SEQ ID NO: 2390994 - RNA, 19 nt, Artificial Sequence
  Description of Artificial Sequence: Synthetic oligonucleotide
  Sense strand starting at position 210 of SEQ ID NO: 1886159
caguguccucuuugagaau

SEQ ID NO: 2390995 - RNA, 19 nt, Artificial Sequence
  Description of Artificial Sequence: Synthetic oligonucleotide
  Antisense strand to SEQ ID NO: 2390994
auucucaaagaggacacug

SEQ ID NO: 2390996 - RNA, 19 nt, Artificial Sequence
  Description of Artificial Sequence: Synthetic oligonucleotide
  Sense strand starting at position 219 of SEQ ID NO: 1886159
cuuugagaaucugauacua

SEQ ID NO: 2390997 - RNA, 19 nt, Artificial Sequence
  Description of Artificial Sequence: Synthetic oligonucleotide
  Antisense strand to SEQ ID NO: 2390996
uaguaucagauucucaaag

SEQ ID NO: 2390998 - RNA, 19 nt, Artificial Sequence
  Description of Artificial Sequence: Synthetic oligonucleotide
  Sense strand starting at position 221 of SEQ ID NO: 1886159
uugagaaucugauacuaug

SEQ ID NO: 2390999 - RNA, 19 nt, Artificial Sequence
  Description of Artificial Sequence: Synthetic oligonucleotide
  Antisense strand to SEQ ID NO: 2390998
cauaguaucagauucucaa

SEQ ID NO: 2391000 - RNA, 19 nt, Artificial Sequence
  Description of Artificial Sequence: Synthetic oligonucleotide
  Sense strand starting at position 304 of SEQ ID NO: 1886159
acuuaagaccuuuguguca

SEQ ID NO: 2391001 - RNA, 19 nt, Artificial Sequence
  Description of Artificial Sequence: Synthetic oligonucleotide
  Antisense strand to SEQ ID NO: 2391000
ugacacaaaggucuuaagu

SEQ ID NO: 2391002 - RNA, 19 nt, Artificial Sequence
  Description of Artificial Sequence: Synthetic oligonucleotide
  Sense strand starting at position 345 of SEQ ID NO: 1886159
cguauauauccagaugguc

SEQ ID NO: 2391003 - RNA, 19 nt, Artificial Sequence
  Description of Artificial Sequence: Synthetic oligonucleotide
  Antisense strand to SEQ ID NO: 2391002
gaccaucuggauauauacg

SEQ ID NO: 2391004 - RNA, 19 nt, Artificial Sequence
  Description of Artificial Sequence: Synthetic oligonucleotide
  Sense strand starting at position 773 of SEQ ID NO: 1886159
ucuucuccuggaugagaca

SEQ ID NO: 2391005 - RNA, 19 nt, Artificial Sequence
  Description of Artificial Sequence: Synthetic oligonucleotide
  Antisense strand to SEQ ID NO: 2391004
ugucucauccaggagaaga

SEQ ID NO: 2391006 - RNA, 19 nt, Artificial Sequence
  Description of Artificial Sequence: Synthetic oligonucleotide
  Sense strand starting at position 923 of SEQ ID NO: 1886159
aaugguguguccguuggaa

SEQ ID NO: 2391007 - RNA, 19 nt, Artificial Sequence
  Description of Artificial Sequence: Synthetic oligonucleotide
  Antisense strand to SEQ ID NO: 2391006
uuccaacggacacaccauu

SEQ ID NO: 2391008 - RNA, 19 nt, Artificial Sequence
  Description of Artificial Sequence: Synthetic oligonucleotide
  Sense strand starting at position 935 of SEQ ID NO: 1886159
guuggaacuuaacuaaugu

SEQ ID NO: 2391009 - RNA, 19 nt, Artificial Sequence
  Description of Artificial Sequence: Synthetic oligonucleotide
  Antisense strand to SEQ ID NO: 2391008
acauuaguuaaguuccaac

SEQ ID NO: 2391010 - RNA, 19 nt, Artificial Sequence
  Description of Artificial Sequence: Synthetic oligonucleotide
  Sense strand starting at position 1033 of SEQ ID NO: 1886159
aggguaagguuacaacaau

SEQ ID NO: 2391011 - RNA, 19 nt, Artificial Sequence
  Description of Artificial Sequence: Synthetic oligonucleotide
  Antisense strand to SEQ ID NO: 2391010
auuguuguaaccuuacccu

SEQ ID NO: 2391012 - RNA, 19 nt, Artificial Sequence
  Description of Artificial Sequence: Synthetic oligonucleotide
  Sense strand starting at position 1100 of SEQ ID NO: 1886159
ccaaaugccucaguguuga

SEQ ID NO: 2391013 - RNA, 19 nt, Artificial Sequence
  Description of Artificial Sequence: Synthetic oligonucleotide
  Antisense strand to SEQ ID NO: 2391012
ucaacacugaggcauuugg

SEQ ID NO: 2391014 - RNA, 19 nt, Artificial Sequence
  Description of Artificial Sequence: Synthetic oligonucleotide
  Sense strand starting at position 1110 of SEQ ID NO: 1886159
caguguugacacugugcaa

SEQ ID NO: 2391015 - RNA, 19 nt, Artificial Sequence
  Description of Artificial Sequence: Synthetic oligonucleotide
  Antisense strand to SEQ ID NO: 2391014
uugcacagugucaacacug

SEQ ID NO: 2391016 - RNA, 19 nt, Artificial Sequence
  Description of Artificial Sequence: Synthetic oligonucleotide
  Sense strand starting at position 1212 of SEQ ID NO: 1886159
cuguacuucugggucggaa

SEQ ID NO: 2391017 - RNA, 19 nt, Artificial Sequence
  Description of Artificial Sequence: Synthetic oligonucleotide
  Antisense strand to SEQ ID NO: 2391016
uuccgacccagaaguacag

SEQ ID NO: 2391018 - RNA, 19 nt, Artificial Sequence
  Description of Artificial Sequence: Synthetic oligonucleotide
  Sense strand starting at position 1214 of SEQ ID NO: 1886159
guacuucugggucggaaac

SEQ ID NO: 2391019 - RNA, 19 nt, Artificial Sequence
  Description of Artificial Sequence: Synthetic oligonucleotide
  Antisense strand to SEQ ID NO: 2391018
guuuccgacccagaaguac

SEQ ID NO: 2391020 - RNA, 19 nt, Artificial Sequence
  Description of Artificial Sequence: Synthetic oligonucleotide
  Sense strand starting at position 1291 of SEQ ID NO: 1886159
acguuaucaggacaucagu

SEQ ID NO: 2391021 - RNA, 19 nt, Artificial Sequence
  Description of Artificial Sequence: Synthetic oligonucleotide
  Antisense strand to SEQ ID NO: 2391020
acugauguccugauaacgu

SEQ ID NO: 2391022 - RNA, 19 nt, Artificial Sequence
  Description of Artificial Sequence: Synthetic oligonucleotide
  Sense strand starting at position 1358 of SEQ ID NO: 1886159
agcggacggcuuuaguaaa

SEQ ID NO: 2391023 - RNA, 19 nt, Artificial Sequence
  Description of Artificial Sequence: Synthetic oligonucleotide
  Antisense strand to SEQ ID NO: 2391022
uuuacuaaagccguccgcu

SEQ ID NO: 2391024 - RNA, 19 nt, Artificial Sequence
  Description of Artificial Sequence: Synthetic oligonucleotide
  Sense strand starting at position 1385 of SEQ ID NO: 1886159
caggguguccgcgauaaac

SEQ ID NO: 2391025 - RNA, 19 nt, Artificial Sequence
  Description of Artificial Sequence: Synthetic oligonucleotide
  Antisense strand to SEQ ID NO: 2391024
guuuaucgcggacacccug

SEQ ID NO: 2391026 - RNA, 19 nt, Artificial Sequence
  Description of Artificial Sequence: Synthetic oligonucleotide
  Sense strand starting at position 1387 of SEQ ID NO: 1886159
ggguguccgcgauaaacac

SEQ ID NO: 2391027 - RNA, 19 nt, Artificial Sequence
  Description of Artificial Sequence: Synthetic oligonucleotide
  Antisense strand to SEQ ID NO: 2391026
guguuuaucgcggacaccc

SEQ ID NO: 2391028 - RNA, 19 nt, Artificial Sequence
  Description of Artificial Sequence: Synthetic oligonucleotide
  Sense strand starting at position 1410 of SEQ ID NO: 1886159
gaaugcaauucccaaggga

SEQ ID NO: 2391029 - RNA, 19 nt, Artificial Sequence
  Description of Artificial Sequence: Synthetic oligonucleotide
  Antisense strand to SEQ ID NO: 2391028
ucccuugggaauugcauuc

SEQ ID NO: 2391030 - RNA, 19 nt, Artificial Sequence
  Description of Artificial Sequence: Synthetic oligonucleotide
  Sense strand starting at position 1583 of SEQ ID NO: 1886159
aaauaaaucgauggcagaa

SEQ ID NO: 2391031 - RNA, 19 nt, Artificial Sequence
  Description of Artificial Sequence: Synthetic oligonucleotide
  Antisense strand to SEQ ID NO: 2391030
uucugccaucgauuuauuu

SEQ ID NO: 2391032 - RNA, 19 nt, Artificial Sequence
  Description of Artificial Sequence: Synthetic oligonucleotide
  Sense strand starting at position 2102 of SEQ ID NO: 1886159
gucguagguugguuggaau

SEQ ID NO: 2391033 - RNA, 19 nt, Artificial Sequence
  Description of Artificial Sequence: Synthetic oligonucleotide
  Antisense strand to SEQ ID NO: 2391032
auuccaaccaaccuacgac

SEQ ID NO: 2391034 - RNA, 19 nt, Artificial Sequence
  Description of Artificial Sequence: Synthetic oligonucleotide
  Sense strand starting at position 2115 of SEQ ID NO: 1886159
uggaaugcacgucaaucaa

SEQ ID NO: 2391035 - RNA, 19 nt, Artificial Sequence
  Description of Artificial Sequence: Synthetic oligonucleotide
  Antisense strand to SEQ ID NO: 2391034
uugauugacgugcauucca

SEQ ID NO: 2391036 - RNA, 19 nt, Artificial Sequence
  Description of Artificial Sequence: Synthetic oligonucleotide
  Sense strand starting at position 2299 of SEQ ID NO: 1886159
uagguuaaacuguaguacu

SEQ ID NO: 2391037 - RNA, 19 nt, Artificial Sequence
  Description of Artificial Sequence: Synthetic oligonucleotide
  Antisense strand to SEQ ID NO: 2391036
aguacuacaguuuaaccua

SEQ ID NO: 2391038 - RNA, 19 nt, Artificial Sequence
  Description of Artificial Sequence: Synthetic oligonucleotide
  Sense strand starting at position 2731 of SEQ ID NO: 1886159
aacguuguccggcuguuua

SEQ ID NO: 2391039 - RNA, 19 nt, Artificial Sequence
  Description of Artificial Sequence: Synthetic oligonucleotide
  Antisense strand to SEQ ID NO: 2391038
uaaacagccggacaacguu

SEQ ID NO: 2391040 - RNA, 19 nt, Artificial Sequence
  Description of Artificial Sequence: Synthetic oligonucleotide
  Sense strand starting at position 2744 of SEQ ID NO: 1886159
uguuuacagcuuuggucaa

SEQ ID NO: 2391041 - RNA, 19 nt, Artificial Sequence
  Description of Artificial Sequence: Synthetic oligonucleotide
  Antisense strand to SEQ ID NO: 2391040
uugaccaaagcuguaaaca

SEQ ID NO: 2391042 - RNA, 19 nt, Artificial Sequence
  Description of Artificial Sequence: Synthetic oligonucleotide
  Sense strand starting at position 2746 of SEQ ID NO: 1886159
uuuacagcuuuggucaaua

SEQ ID NO: 2391043 - RNA, 19 nt, Artificial Sequence
  Description of Artificial Sequence: Synthetic oligonucleotide
  Antisense strand to SEQ ID NO: 2391042
uauugaccaaagcuguaaa

SEQ ID NO: 2391044 - RNA, 19 nt, Artificial Sequence
  Description of Artificial Sequence: Synthetic oligonucleotide
  Sense strand starting at position 2751 of SEQ ID NO: 1886159
agcuuuggucaauacagga

SEQ ID NO: 2391045 - RNA, 19 nt, Artificial Sequence
  Description of Artificial Sequence: Synthetic oligonucleotide
  Antisense strand to SEQ ID NO: 2391044
uccuguauugaccaaagcu

SEQ ID NO: 2391046 - RNA, 19 nt, Artificial Sequence
  Description of Artificial Sequence: Synthetic oligonucleotide
  Sense strand starting at position 2768 of SEQ ID NO: 1886159
gagagaaggauucgucacu

SEQ ID NO: 2391047 - RNA, 19 nt, Artificial Sequence
  Description of Artificial Sequence: Synthetic oligonucleotide
  Antisense strand to SEQ ID NO: 2391046
agugacgaauccuucucuc

SEQ ID NO: 2391048 - RNA, 19 nt, Artificial Sequence
  Description of Artificial Sequence: Synthetic oligonucleotide
  Sense strand starting at position 2769 of SEQ ID NO: 1886159
agagaaggauucgucacuu

SEQ ID NO: 2391049 - RNA, 19 nt, Artificial Sequence
  Description of Artificial Sequence: Synthetic oligonucleotide
  Antisense strand to SEQ ID NO: 2391048
aagugacgaauccuucucu

SEQ ID NO: 2391050 - RNA, 19 nt, Artificial Sequence
  Description of Artificial Sequence: Synthetic oligonucleotide
  Sense strand starting at position 2836 of SEQ ID NO: 1886159
uguuguuugcuacacccaa

SEQ ID NO: 2391051 - RNA, 19 nt, Artificial Sequence
  Description of Artificial Sequence: Synthetic oligonucleotide
  Antisense strand to SEQ ID NO: 2391050
uuggguguagcaaacaaca

SEQ ID NO: 2391052 - RNA, 19 nt, Artificial Sequence
  Description of Artificial Sequence: Synthetic oligonucleotide
  Sense strand starting at position 3426 of SEQ ID NO: 1886159
ggcugucaucuggguggau

SEQ ID NO: 2391053 - RNA, 19 nt, Artificial Sequence
  Description of Artificial Sequence: Synthetic oligonucleotide
  Antisense strand to SEQ ID NO: 2391052
auccacccagaugacagcc

SEQ ID NO: 2391054 - RNA, 19 nt, Artificial Sequence
  Description of Artificial Sequence: Synthetic oligonucleotide
  Sense strand starting at position 3427 of SEQ ID NO: 1886159
gcugucaucuggguggauu

SEQ ID NO: 2391055 - RNA, 19 nt, Artificial Sequence
  Description of Artificial Sequence: Synthetic oligonucleotide
  Antisense strand to SEQ ID NO: 2391054
aauccacccagaugacagc

SEQ ID NO: 2391056 - RNA, 19 nt, Artificial Sequence
  Description of Artificial Sequence: Synthetic oligonucleotide
  Sense strand starting at position 3435 of SEQ ID NO: 1886159
cuggguggauucuuagaaa

SEQ ID NO: 2391057 - RNA, 19 nt, Artificial Sequence
  Description of Artificial Sequence: Synthetic oligonucleotide
  Antisense strand to SEQ ID NO: 2391056
uuucuaagaauccacccag

SEQ ID NO: 2391058 - RNA, 19 nt, Artificial Sequence
  Description of Artificial Sequence: Synthetic oligonucleotide
  Sense strand starting at position 3455 of SEQ ID NO: 1886159
gcagauuccuggccuggca

SEQ ID NO: 2391059 - RNA, 19 nt, Artificial Sequence
  Description of Artificial Sequence: Synthetic oligonucleotide
  Antisense strand to SEQ ID NO: 2391058
ugccaggccaggaaucugc

SEQ ID NO: 2391060 - RNA, 19 nt, Artificial Sequence
  Description of Artificial Sequence: Synthetic oligonucleotide
  Sense strand starting at position 3773 of SEQ ID NO: 1886159
cagaguaugucaccgcuga

SEQ ID NO: 2391061 - RNA, 19 nt, Artificial Sequence
  Description of Artificial Sequence: Synthetic oligonucleotide
  Antisense strand to SEQ ID NO: 2391060
ucagcggugacauacucug

SEQ ID NO: 2391062 - RNA, 19 nt, Artificial Sequence
  Description of Artificial Sequence: Synthetic oligonucleotide
  Sense strand starting at position 3789 of SEQ ID NO: 1886159
ugaggcugcacaugaauga

SEQ ID NO: 2391063 - RNA, 19 nt, Artificial Sequence
  Description of Artificial Sequence: Synthetic oligonucleotide
  Antisense strand to SEQ ID NO: 2391062
ucauucaugugcagccuca

SEQ ID NO: 2391064 - RNA, 19 nt, Artificial Sequence
  Description of Artificial Sequence: Synthetic oligonucleotide
  Sense strand starting at position 3885 of SEQ ID NO: 1886159
aauagaaauugcgucuuag

SEQ ID NO: 2391065 - RNA, 19 nt, Artificial Sequence
  Description of Artificial Sequence: Synthetic oligonucleotide
  Antisense strand to SEQ ID NO: 2391064
cuaagacgcaauuucuauu

SEQ ID NO: 2391066 - RNA, 19 nt, Artificial Sequence
  Description of Artificial Sequence: Synthetic oligonucleotide
  Sense strand starting at position 3895 of SEQ ID NO: 1886159
gcgucuuagcuggaaugaa

SEQ ID NO: 2391067 - RNA, 19 nt, Artificial Sequence
  Description of Artificial Sequence: Synthetic oligonucleotide
  Antisense strand to SEQ ID NO: 2391066
uucauuccagcuaagacgc

SEQ ID NO: 2391068 - RNA, 19 nt, Artificial Sequence
  Description of Artificial Sequence: Synthetic oligonucleotide
  Sense strand starting at position 3968 of SEQ ID NO: 1886159
cgaugaauguuuccacuuc

SEQ ID NO: 2391069 - RNA, 19 nt, Artificial Sequence
  Description of Artificial Sequence: Synthetic oligonucleotide
  Antisense strand to SEQ ID NO: 2391068
gaaguggaaacauucaucg

SEQ ID NO: 2391070 - RNA, 19 nt, Artificial Sequence
  Description of Artificial Sequence: Synthetic oligonucleotide
  Sense strand starting at position 573 of SEQ ID NO: 1886160
guuauaaagacgggugaua

SEQ ID NO: 2391071 - RNA, 19 nt, Artificial Sequence
  Description of Artificial Sequence: Synthetic oligonucleotide
  Antisense strand to SEQ ID NO: 2391070
uaucacccgucuuuauaac

SEQ ID NO: 2391072 - RNA, 19 nt, Artificial Sequence
  Description of Artificial Sequence: Synthetic oligonucleotide
  Sense strand starting at position 575 of SEQ ID NO: 1886160
uauaaagacgggugauauu

SEQ ID NO: 2391073 - RNA, 19 nt, Artificial Sequence
  Description of Artificial Sequence: Synthetic oligonucleotide
  Antisense strand to SEQ ID NO: 2391072
aauaucacccgucuuuaua

SEQ ID NO: 2391074 - RNA, 19 nt, Artificial Sequence
  Description of Artificial Sequence: Synthetic oligonucleotide
  Sense strand starting at position 584 of SEQ ID NO: 1886160
gggugauauuauucgaugg

SEQ ID NO: 2391075 - RNA, 19 nt, Artificial Sequence
  Description of Artificial Sequence: Synthetic oligonucleotide
  Antisense strand to SEQ ID NO: 2391074
ccaucgaauaauaucaccc

SEQ ID NO: 2391076 - RNA, 19 nt, Artificial Sequence
  Description of Artificial Sequence: Synthetic oligonucleotide
  Sense strand starting at position 588 of SEQ ID NO: 1886160
gauauuauucgaugggaua

SEQ ID NO: 2391077 - RNA, 19 nt, Artificial Sequence
  Description of Artificial Sequence: Synthetic oligonucleotide
  Antisense strand to SEQ ID NO: 2391076
uaucccaucgaauaauauc

SEQ ID NO: 2391078 - RNA, 19 nt, Artificial Sequence
  Description of Artificial Sequence: Synthetic oligonucleotide
  Sense strand starting at position 589 of SEQ ID NO: 1886160
auauuauucgaugggauaa

SEQ ID NO: 2391079 - RNA, 19 nt, Artificial Sequence
  Description of Artificial Sequence: Synthetic oligonucleotide
  Antisense strand to SEQ ID NO: 2391078
uuaucccaucgaauaauau

SEQ ID NO: 2391080 - RNA, 19 nt, Artificial Sequence
  Description of Artificial Sequence: Synthetic oligonucleotide
  Sense strand starting at position 999 of SEQ ID NO: 1886160
gguauauaagucuagggca

SEQ ID NO: 2391081 - RNA, 19 nt, Artificial Sequence
  Description of Artificial Sequence: Synthetic oligonucleotide
  Antisense strand to SEQ ID NO: 2391080
ugcccuagacuuauauacc

SEQ ID NO: 2391082 - RNA, 19 nt, Artificial Sequence
  Description of Artificial Sequence: Synthetic oligonucleotide
  Sense strand starting at position 1001 of SEQ ID NO: 1886160
uauauaagucuagggcaga

SEQ ID NO: 2391083 - RNA, 19 nt, Artificial Sequence
  Description of Artificial Sequence: Synthetic oligonucleotide
  Antisense strand to SEQ ID NO: 2391082
ucugcccuagacuuauaua

SEQ ID NO: 2391084 - RNA, 19 nt, Artificial Sequence
  Description of Artificial Sequence: Synthetic oligonucleotide
  Sense strand starting at position 1034 of SEQ ID NO: 1886160
uccaucagacaguaaaugu

SEQ ID NO: 2391085 - RNA, 19 nt, Artificial Sequence
  Description of Artificial Sequence: Synthetic oligonucleotide
  Antisense strand to SEQ ID NO: 2391084
acauuuacugucugaugga

SEQ ID NO: 2391086 - RNA, 19 nt, Artificial Sequence
  Description of Artificial Sequence: Synthetic oligonucleotide
  Sense strand starting at position 1318 of SEQ ID NO: 1886160
ucaggagcuguuuauuacu

SEQ ID NO: 2391087 - RNA, 19 nt, Artificial Sequence
  Description of Artificial Sequence: Synthetic oligonucleotide
  Antisense strand to SEQ ID NO: 2391086
aguaauaaacagcuccuga

SEQ ID NO: 2391088 - RNA, 19 nt, Artificial Sequence
  Description of Artificial Sequence: Synthetic oligonucleotide
  Sense strand starting at position 1496 of SEQ ID NO: 1886160
cccagcucacuggauuaau

SEQ ID NO: 2391089 - RNA, 19 nt, Artificial Sequence
  Description of Artificial Sequence: Synthetic oligonucleotide
  Antisense strand to SEQ ID NO: 2391088
auuaauccagugagcuggg

SEQ ID NO: 2391090 - RNA, 19 nt, Artificial Sequence
  Description of Artificial Sequence: Synthetic oligonucleotide
  Sense strand starting at position 1614 of SEQ ID NO: 1886160
cuuugucuagcauaaguaa

SEQ ID NO: 2391091 - RNA, 19 nt, Artificial Sequence
  Description of Artificial Sequence: Synthetic oligonucleotide
  Antisense strand to SEQ ID NO: 2391090
uuacuuaugcuagacaaag

SEQ ID NO: 2391092 - RNA, 19 nt, Artificial Sequence
  Description of Artificial Sequence: Synthetic oligonucleotide
  Sense strand starting at position 1700 of SEQ ID NO: 1886160
agauuaaauugccuuaaug

SEQ ID NO: 2391093 - RNA, 19 nt, Artificial Sequence
  Description of Artificial Sequence: Synthetic oligonucleotide
  Antisense strand to SEQ ID NO: 2391092
cauuaaggcaauuuaaucu

SEQ ID NO: 2391094 - RNA, 19 nt, Artificial Sequence
  Description of Artificial Sequence: Synthetic oligonucleotide
  Sense strand starting at position 1771 of SEQ ID NO: 1886160
cgcacuucagucgcagaau

SEQ ID NO: 2391095 - RNA, 19 nt, Artificial Sequence
  Description of Artificial Sequence: Synthetic oligonucleotide
  Antisense strand to SEQ ID NO: 2391094
auucugcgacugaagugcg

SEQ ID NO: 2391096 - RNA, 19 nt, Artificial Sequence
  Description of Artificial Sequence: Synthetic oligonucleotide
  Sense strand starting at position 1900 of SEQ ID NO: 1886160
guuuauugcguuccuucga

SEQ ID NO: 2391097 - RNA, 19 nt, Artificial Sequence
  Description of Artificial Sequence: Synthetic oligonucleotide
  Antisense strand to SEQ ID NO: 2391096
ucgaaggaacgcaauaaac

SEQ ID NO: 2391098 - RNA, 19 nt, Artificial Sequence
  Description of Artificial Sequence: Synthetic oligonucleotide
  Sense strand starting at position 2008 of SEQ ID NO: 1886160
ggcauaugcaaaggaagau

SEQ ID NO: 2391099 - RNA, 19 nt, Artificial Sequence
  Description of Artificial Sequence: Synthetic oligonucleotide
  Antisense strand to SEQ ID NO: 2391098
aucuuccuuugcauaugcc

SEQ ID NO: 2391100 - RNA, 19 nt, Artificial Sequence
  Description of Artificial Sequence: Synthetic oligonucleotide
  Sense strand starting at position 2160 of SEQ ID NO: 1886160
acaggcaaucuuugaaaua

SEQ ID NO: 2391101 - RNA, 19 nt, Artificial Sequence
  Description of Artificial Sequence: Synthetic oligonucleotide
  Antisense strand to SEQ ID NO: 2391100
uauuucaaagauugccugu

SEQ ID NO: 2391102 - RNA, 19 nt, Artificial Sequence
  Description of Artificial Sequence: Synthetic oligonucleotide
  Sense strand starting at position 2198 of SEQ ID NO: 1886160
ggagccaagaaguguaauu

SEQ ID NO: 2391103 - RNA, 19 nt, Artificial Sequence
  Description of Artificial Sequence: Synthetic oligonucleotide
  Antisense strand to SEQ ID NO: 2391102
aauuacacuucuuggcucc

SEQ ID NO: 2391104 - RNA, 19 nt, Artificial Sequence
  Description of Artificial Sequence: Synthetic oligonucleotide
  Sense strand starting at position 2238 of SEQ ID NO: 1886160
augccaaugccugaaggua

SEQ ID NO: 2391105 - RNA, 19 nt, Artificial Sequence
  Description of Artificial Sequence: Synthetic oligonucleotide
  Antisense strand to SEQ ID NO: 2391104
uaccuucaggcauuggcau

SEQ ID NO: 2391106 - RNA, 19 nt, Artificial Sequence
  Description of Artificial Sequence: Synthetic oligonucleotide
  Sense strand starting at position 2337 of SEQ ID NO: 1886160
auaggucuuguccaucaau

SEQ ID NO: 2391107 - RNA, 19 nt, Artificial Sequence
  Description of Artificial Sequence: Synthetic oligonucleotide
  Antisense strand to SEQ ID NO: 2391106
auugauggacaagaccuau

SEQ ID NO: 2391108 - RNA, 19 nt, Artificial Sequence
  Description of Artificial Sequence: Synthetic oligonucleotide
  Sense strand starting at position 2340 of SEQ ID NO: 1886160
ggucuuguccaucaauaau

SEQ ID NO: 2391109 - RNA, 19 nt, Artificial Sequence
  Description of Artificial Sequence: Synthetic oligonucleotide
  Antisense strand to SEQ ID NO: 2391108
auuauugauggacaagacc

SEQ ID NO: 2391110 - RNA, 19 nt, Artificial Sequence
  Description of Artificial Sequence: Synthetic oligonucleotide
  Sense strand starting at position 2464 of SEQ ID NO: 1886160
uuuacaagucuugaguaua

SEQ ID NO: 2391111 - RNA, 19 nt, Artificial Sequence
  Description of Artificial Sequence: Synthetic oligonucleotide
  Antisense strand to SEQ ID NO: 2391110
uauacucaagacuuguaaa

SEQ ID NO: 2391112 - RNA, 19 nt, Artificial Sequence
  Description of Artificial Sequence: Synthetic oligonucleotide
  Sense strand starting at position 2556 of SEQ ID NO: 1886160
gcuuauuauguagagacuu

SEQ ID NO: 2391113 - RNA, 19 nt, Artificial Sequence
  Description of Artificial Sequence: Synthetic oligonucleotide
  Antisense strand to SEQ ID NO: 2391112
aagucucuacauaauaagc

SEQ ID NO: 2391114 - RNA, 19 nt, Artificial Sequence
  Description of Artificial Sequence: Synthetic oligonucleotide
  Sense strand starting at position 2662 of SEQ ID NO: 1886160
ugggcuuuggacugggaaa

SEQ ID NO: 2391115 - RNA, 19 nt, Artificial Sequence
  Description of Artificial Sequence: Synthetic oligonucleotide
  Antisense strand to SEQ ID NO: 2391114
uuucccaguccaaagccca

SEQ ID NO: 2391116 - RNA, 19 nt, Artificial Sequence
  Description of Artificial Sequence: Synthetic oligonucleotide
  Sense strand starting at position 2845 of SEQ ID NO: 1886160
gcccaugucacguccugua

SEQ ID NO: 2391117 - RNA, 19 nt, Artificial Sequence
  Description of Artificial Sequence: Synthetic oligonucleotide
  Antisense strand to SEQ ID NO: 2391116
uacaggacgugacaugggc

SEQ ID NO: 2391118 - RNA, 19 nt, Artificial Sequence
  Description of Artificial Sequence: Synthetic oligonucleotide
  Sense strand starting at position 2909 of SEQ ID NO: 1886160
uuuaaaggucucuaaguga

SEQ ID NO: 2391119 - RNA, 19 nt, Artificial Sequence
  Description of Artificial Sequence: Synthetic oligonucleotide
  Antisense strand to SEQ ID NO: 2391118
ucacuuagagaccuuuaaa

SEQ ID NO: 2391120 - RNA, 19 nt, Artificial Sequence
  Description of Artificial Sequence: Synthetic oligonucleotide
  Sense strand starting at position 2912 of SEQ ID NO: 1886160
aaaggucucuaagugauuc

SEQ ID NO: 2391121 - RNA, 19 nt, Artificial Sequence
  Description of Artificial Sequence: Synthetic oligonucleotide
  Antisense strand to SEQ ID NO: 2391120
gaaucacuuagagaccuuu

SEQ ID NO: 2391122 - RNA, 19 nt, Artificial Sequence
  Description of Artificial Sequence: Synthetic oligonucleotide
  Sense strand starting at position 2922 of SEQ ID NO: 1886160
aagugauuccaauguauag

SEQ ID NO: 2391123 - RNA, 19 nt, Artificial Sequence
  Description of Artificial Sequence: Synthetic oligonucleotide
  Antisense strand to SEQ ID NO: 2391122
cuauacauuggaaucacuu

SEQ ID NO: 2391124 - RNA, 19 nt, Artificial Sequence
  Description of Artificial Sequence: Synthetic oligonucleotide
  Sense strand starting at position 2959 of SEQ ID NO: 1886160
gguauaaauguugagucuu

SEQ ID NO: 2391125 - RNA, 19 nt, Artificial Sequence
  Description of Artificial Sequence: Synthetic oligonucleotide
  Antisense strand to SEQ ID NO: 2391124
aagacucaacauuuauacc

SEQ ID NO: 2391126 - RNA, 19 nt, Artificial Sequence
  Description of Artificial Sequence: Synthetic oligonucleotide
  Sense strand starting at position 2982 of SEQ ID NO: 1886160
gagaacaucuauguuccga

SEQ ID NO: 2391127 - RNA, 19 nt, Artificial Sequence
  Description of Artificial Sequence: Synthetic oligonucleotide
  Antisense strand to SEQ ID NO: 2391126
ucggaacauagauguucuc

SEQ ID NO: 2391128 - RNA, 19 nt, Artificial Sequence
  Description of Artificial Sequence: Synthetic oligonucleotide
  Sense strand starting at position 3064 of SEQ ID NO: 1886160
gacaaaugagauugguugu

SEQ ID NO: 2391129 - RNA, 19 nt, Artificial Sequence
  Description of Artificial Sequence: Synthetic oligonucleotide
  Antisense strand to SEQ ID NO: 2391128
acaaccaaucucauuuguc

SEQ ID NO: 2391130 - RNA, 19 nt, Artificial Sequence
  Description of Artificial Sequence: Synthetic oligonucleotide
  Sense strand starting at position 3067 of SEQ ID NO: 1886160
aaaugagauugguuguacu

SEQ ID NO: 2391131 - RNA, 19 nt, Artificial Sequence
  Description of Artificial Sequence: Synthetic oligonucleotide
  Antisense strand to SEQ ID NO: 2391130
aguacaaccaaucucauuu

SEQ ID NO: 2391132 - RNA, 19 nt, Artificial Sequence
  Description of Artificial Sequence: Synthetic oligonucleotide
  Sense strand starting at position 3341 of SEQ ID NO: 1886160
accguaacaucucuuggaa

SEQ ID NO: 2391133 - RNA, 19 nt, Artificial Sequence
  Description of Artificial Sequence: Synthetic oligonucleotide
  Antisense strand to SEQ ID NO: 2391132
uuccaagagauguuacggu

SEQ ID NO: 2391134 - RNA, 19 nt, Artificial Sequence
  Description of Artificial Sequence: Synthetic oligonucleotide
  Sense strand starting at position 3344 of SEQ ID NO: 1886160
guaacaucucuuggaagag

SEQ ID NO: 2391135 - RNA, 19 nt, Artificial Sequence
  Description of Artificial Sequence: Synthetic oligonucleotide
  Antisense strand to SEQ ID NO: 2391134
cucuuccaagagauguuac

SEQ ID NO: 2391136 - RNA, 19 nt, Artificial Sequence
  Description of Artificial Sequence: Synthetic oligonucleotide
  Sense strand starting at position 3360 of SEQ ID NO: 1886160
gagacauauguggaugcuu

SEQ ID NO: 2391137 - RNA, 19 nt, Artificial Sequence
  Description of Artificial Sequence: Synthetic oligonucleotide
  Antisense strand to SEQ ID NO: 2391136
aagcauccacauaugucuc

SEQ ID NO: 2391138 - RNA, 19 nt, Artificial Sequence
  Description of Artificial Sequence: Synthetic oligonucleotide
  Sense strand starting at position 3381 of SEQ ID NO: 1886160
auagcaagacccugugaua

SEQ ID NO: 2391139 - RNA, 19 nt, Artificial Sequence
  Description of Artificial Sequence: Synthetic oligonucleotide
  Antisense strand to SEQ ID NO: 2391138
uaucacagggucuugcuau

SEQ ID NO: 2391140 - RNA, 19 nt, Artificial Sequence
  Description of Artificial Sequence: Synthetic oligonucleotide
  Sense strand starting at position 3425 of SEQ ID NO: 1886160
uaaucagauugucuuguga

SEQ ID NO: 2391141 - RNA, 19 nt, Artificial Sequence
  Description of Artificial Sequence: Synthetic oligonucleotide
  Antisense strand to SEQ ID NO: 2391140
ucacaagacaaucugauua

SEQ ID NO: 2391142 - RNA, 19 nt, Artificial Sequence
  Description of Artificial Sequence: Synthetic oligonucleotide
  Sense strand starting at position 3545 of SEQ ID NO: 1886160
gauagaagguaggaauuua

SEQ ID NO: 2391143 - RNA, 19 nt, Artificial Sequence
  Description of Artificial Sequence: Synthetic oligonucleotide
  Antisense strand to SEQ ID NO: 2391142
uaaauuccuaccuucuauc

SEQ ID NO: 2391144 - RNA, 19 nt, Artificial Sequence
  Description of Artificial Sequence: Synthetic oligonucleotide
  Sense strand starting at position 3614 of SEQ ID NO: 1886160
acucuaugagacugacauu

SEQ ID NO: 2391145 - RNA, 19 nt, Artificial Sequence
  Description of Artificial Sequence: Synthetic oligonucleotide
  Antisense strand to SEQ ID NO: 2391144
aaugucagucucauagagu

SEQ ID NO: 2391146 - RNA, 19 nt, Artificial Sequence
  Description of Artificial Sequence: Synthetic oligonucleotide
  Sense strand starting at position 3831 of SEQ ID NO: 1886160
uuaccaagaguguggaaau

SEQ ID NO: 2391147 - RNA, 19 nt, Artificial Sequence
  Description of Artificial Sequence: Synthetic oligonucleotide
  Antisense strand to SEQ ID NO: 2391146
auuuccacacucuugguaa

SEQ ID NO: 2391148 - RNA, 19 nt, Artificial Sequence
  Description of Artificial Sequence: Synthetic oligonucleotide
  Sense strand starting at position 3979 of SEQ ID NO: 1886160
agcaaugucacuugaggaa

SEQ ID NO: 2391149 - RNA, 19 nt, Artificial Sequence
  Description of Artificial Sequence: Synthetic oligonucleotide
  Antisense strand to SEQ ID NO: 2391148
uuccucaagugacauugcu

SEQ ID NO: 2391150 - RNA, 19 nt, Artificial Sequence
  Description of Artificial Sequence: Synthetic oligonucleotide
  Sense strand starting at position 64 of SEQ ID NO: 1886161
ggccauuccugugcuuuau

SEQ ID NO: 2391151 - RNA, 19 nt, Artificial Sequence
  Description of Artificial Sequence: Synthetic oligonucleotide
  Antisense strand to SEQ ID NO: 2391150
auaaagcacaggaauggcc

SEQ ID NO: 2391152 - RNA, 19 nt, Artificial Sequence
  Description of Artificial Sequence: Synthetic oligonucleotide
  Sense strand starting at position 66 of SEQ ID NO: 1886161
ccauuccugugcuuuauca

SEQ ID NO: 2391153 - RNA, 19 nt, Artificial Sequence
  Description of Artificial Sequence: Synthetic oligonucleotide
  Antisense strand to SEQ ID NO: 2391152
ugauaaagcacaggaaugg

SEQ ID NO: 2391154 - RNA, 19 nt, Artificial Sequence
  Description of Artificial Sequence: Synthetic oligonucleotide
  Sense strand starting at position 68 of SEQ ID NO: 1886161
auuccugugcuuuaucauu

SEQ ID NO: 2391155 - RNA, 19 nt, Artificial Sequence
  Description of Artificial Sequence: Synthetic oligonucleotide
  Antisense strand to SEQ ID NO: 2391154
aaugauaaagcacaggaau

SEQ ID NO: 2391156 - RNA, 19 nt, Artificial Sequence
  Description of Artificial Sequence: Synthetic oligonucleotide
  Sense strand starting at position 483 of SEQ ID NO: 1886161
ugauauuaaguguguagua

SEQ ID NO: 2391157 - RNA, 19 nt, Artificial Sequence
  Description of Artificial Sequence: Synthetic oligonucleotide
  Antisense strand to SEQ ID NO: 2391156
uacuacacacuuaauauca

SEQ ID NO: 2391158 - RNA, 19 nt, Artificial Sequence
  Description of Artificial Sequence: Synthetic oligonucleotide
  Sense strand starting at position 484 of SEQ ID NO: 1886161
gauauuaaguguguaguaa

SEQ ID NO: 2391159 - RNA, 19 nt, Artificial Sequence
  Description of Artificial Sequence: Synthetic oligonucleotide
  Antisense strand to SEQ ID NO: 2391158
uuacuacacacuuaauauc

SEQ ID NO: 2391160 - RNA, 19 nt, Artificial Sequence
  Description of Artificial Sequence: Synthetic oligonucleotide
  Sense strand starting at position 485 of SEQ ID NO: 1886161
auauuaaguguguaguaag

SEQ ID NO: 2391161 - RNA, 19 nt, Artificial Sequence
  Description of Artificial Sequence: Synthetic oligonucleotide
  Antisense strand to SEQ ID NO: 2391160
cuuacuacacacuuaauau

SEQ ID NO: 2391162 - RNA, 19 nt, Artificial Sequence
  Description of Artificial Sequence: Synthetic oligonucleotide
  Sense strand starting at position 539 of SEQ ID NO: 1886161
caguuuaccggucaauucu

SEQ ID NO: 2391163 - RNA, 19 nt, Artificial Sequence
  Description of Artificial Sequence: Synthetic oligonucleotide
  Antisense strand to SEQ ID NO: 2391162
agaauugaccgguaaacug

SEQ ID NO: 2391164 - RNA, 19 nt, Artificial Sequence
  Description of Artificial Sequence: Synthetic oligonucleotide
  Sense strand starting at position 850 of SEQ ID NO: 1886161
uguggauacccaugauaca

SEQ ID NO: 2391165 - RNA, 19 nt, Artificial Sequence
  Description of Artificial Sequence: Synthetic oligonucleotide
  Antisense strand to SEQ ID NO: 2391164
uguaucauggguauccaca

SEQ ID NO: 2391166 - RNA, 19 nt, Artificial Sequence
  Description of Artificial Sequence: Synthetic oligonucleotide
  Sense strand starting at position 853 of SEQ ID NO: 1886161
ggauacccaugauacauuu

SEQ ID NO: 2391167 - RNA, 19 nt, Artificial Sequence
  Description of Artificial Sequence: Synthetic oligonucleotide
  Antisense strand to SEQ ID NO: 2391166
aaauguaucauggguaucc

SEQ ID NO: 2391168 - RNA, 19 nt, Artificial Sequence
  Description of Artificial Sequence: Synthetic oligonucleotide
  Sense strand starting at position 894 of SEQ ID NO: 1886161
gucaguuauuugccuuucu

SEQ ID NO: 2391169 - RNA, 19 nt, Artificial Sequence
  Description of Artificial Sequence: Synthetic oligonucleotide
  Antisense strand to SEQ ID NO: 2391168
agaaaggcaaauaacugac

SEQ ID NO: 2391170 - RNA, 19 nt, Artificial Sequence
  Description of Artificial Sequence: Synthetic oligonucleotide
  Sense strand starting at position 895 of SEQ ID NO: 1886161
ucaguuauuugccuuucuu

SEQ ID NO: 2391171 - RNA, 19 nt, Artificial Sequence
  Description of Artificial Sequence: Synthetic oligonucleotide
  Antisense strand to SEQ ID NO: 2391170
aagaaaggcaaauaacuga

SEQ ID NO: 2391172 - RNA, 19 nt, Artificial Sequence
  Description of Artificial Sequence: Synthetic oligonucleotide
  Sense strand starting at position 930 of SEQ ID NO: 1886161
uuauguaugcccuaaugug

SEQ ID NO: 2391173 - RNA, 19 nt, Artificial Sequence
  Description of Artificial Sequence: Synthetic oligonucleotide
  Antisense strand to SEQ ID NO: 2391172
cacauuagggcauacauaa

SEQ ID NO: 2391174 - RNA, 19 nt, Artificial Sequence
  Description of Artificial Sequence: Synthetic oligonucleotide
  Sense strand starting at position 938 of SEQ ID NO: 1886161
gcccuaaugugaucuguuc

SEQ ID NO: 2391175 - RNA, 19 nt, Artificial Sequence
  Description of Artificial Sequence: Synthetic oligonucleotide
  Antisense strand to SEQ ID NO: 2391174
gaacagaucacauuagggc

SEQ ID NO: 2391176 - RNA, 19 nt, Artificial Sequence
  Description of Artificial Sequence: Synthetic oligonucleotide
  Sense strand starting at position 954 of SEQ ID NO: 1886161
uuccuucuucccuacguua

SEQ ID NO: 2391177 - RNA, 19 nt, Artificial Sequence
  Description of Artificial Sequence: Synthetic oligonucleotide
  Antisense strand to SEQ ID NO: 2391176
uaacguagggaagaaggaa

SEQ ID NO: 2391178 - RNA, 19 nt, Artificial Sequence
  Description of Artificial Sequence: Synthetic oligonucleotide
  Sense strand starting at position 956 of SEQ ID NO: 1886161
ccuucuucccuacguuaua

SEQ ID NO: 2391179 - RNA, 19 nt, Artificial Sequence
  Description of Artificial Sequence: Synthetic oligonucleotide
  Antisense strand to SEQ ID NO: 2391178
uauaacguagggaagaagg

SEQ ID NO: 2391180 - RNA, 19 nt, Artificial Sequence
  Description of Artificial Sequence: Synthetic oligonucleotide
  Sense strand starting at position 1084 of SEQ ID NO: 1886161
cuguuaucuugacuuucca

SEQ ID NO: 2391181 - RNA, 19 nt, Artificial Sequence
  Description of Artificial Sequence: Synthetic oligonucleotide
  Antisense strand to SEQ ID NO: 2391180
uggaaagucaagauaacag

SEQ ID NO: 2391182 - RNA, 19 nt, Artificial Sequence
  Description of Artificial Sequence: Synthetic oligonucleotide
  Sense strand starting at position 1108 of SEQ ID NO: 1886161
ccacuuaccuguucccaga

SEQ ID NO: 2391183 - RNA, 19 nt, Artificial Sequence
  Description of Artificial Sequence: Synthetic oligonucleotide
  Antisense strand to SEQ ID NO: 2391182
ucugggaacagguaagugg

SEQ ID NO: 2391184 - RNA, 19 nt, Artificial Sequence
  Description of Artificial Sequence: Synthetic oligonucleotide
  Sense strand starting at position 1299 of SEQ ID NO: 1886161
gggaauugucccuggaacc

SEQ ID NO: 2391185 - RNA, 19 nt, Artificial Sequence
  Description of Artificial Sequence: Synthetic oligonucleotide
  Antisense strand to SEQ ID NO: 2391184
gguuccagggacaauuccc

SEQ ID NO: 2391186 - RNA, 19 nt, Artificial Sequence
  Description of Artificial Sequence: Synthetic oligonucleotide
  Sense strand starting at position 1300 of SEQ ID NO: 1886161
ggaauugucccuggaaccu

SEQ ID NO: 2391187 - RNA, 19 nt, Artificial Sequence
  Description of Artificial Sequence: Synthetic oligonucleotide
  Antisense strand to SEQ ID NO: 2391186
agguuccagggacaauucc

SEQ ID NO: 2391188 - RNA, 19 nt, Artificial Sequence
  Description of Artificial Sequence: Synthetic oligonucleotide
  Sense strand starting at position 1315 of SEQ ID NO: 1886161
accugauuggcuugguaag

SEQ ID NO: 2391189 - RNA, 19 nt, Artificial Sequence
  Description of Artificial Sequence: Synthetic oligonucleotide
  Antisense strand to SEQ ID NO: 2391188
cuuaccaagccaaucaggu

SEQ ID NO: 2391190 - RNA, 19 nt, Artificial Sequence
  Description of Artificial Sequence: Synthetic oligonucleotide
  Sense strand starting at position 1316 of SEQ ID NO: 1886161
ccugauuggcuugguaaga

SEQ ID NO: 2391191 - RNA, 19 nt, Artificial Sequence
  Description of Artificial Sequence: Synthetic oligonucleotide
  Antisense strand to SEQ ID NO: 2391190
ucuuaccaagccaaucagg

SEQ ID NO: 2391192 - RNA, 19 nt, Artificial Sequence
  Description of Artificial Sequence: Synthetic oligonucleotide
  Sense strand starting at position 1317 of SEQ ID NO: 1886161
cugauuggcuugguaagaa

SEQ ID NO: 2391193 - RNA, 19 nt, Artificial Sequence
  Description of Artificial Sequence: Synthetic oligonucleotide
  Antisense strand to SEQ ID NO: 2391192
uucuuaccaagccaaucag

SEQ ID NO: 2391194 - RNA, 19 nt, Artificial Sequence
  Description of Artificial Sequence: Synthetic oligonucleotide
  Sense strand starting at position 1401 of SEQ ID NO: 1886161
gacccucacccuuggagau

SEQ ID NO: 2391195 - RNA, 19 nt, Artificial Sequence
  Description of Artificial Sequence: Synthetic oligonucleotide
  Antisense strand to SEQ ID NO: 2391194
aucuccaagggugaggguc

SEQ ID NO: 2391196 - RNA, 19 nt, Artificial Sequence
  Description of Artificial Sequence: Synthetic oligonucleotide
  Sense strand starting at position 1439 of SEQ ID NO: 1886161
uugcucauuggugguuuaa

SEQ ID NO: 2391197 - RNA, 19 nt, Artificial Sequence
  Description of Artificial Sequence: Synthetic oligonucleotide
  Antisense strand to SEQ ID NO: 2391196
uuaaaccaccaaugagcaa

SEQ ID NO: 2391198 - RNA, 19 nt, Artificial Sequence
  Description of Artificial Sequence: Synthetic oligonucleotide
  Sense strand starting at position 1776 of SEQ ID NO: 1886161
ugaggcuuugcauggaacu

SEQ ID NO: 2391199 - RNA, 19 nt, Artificial Sequence
  Description of Artificial Sequence: Synthetic oligonucleotide
  Antisense strand to SEQ ID NO: 2391198
aguuccaugcaaagccuca

SEQ ID NO: 2391200 - RNA, 19 nt, Artificial Sequence
  Description of Artificial Sequence: Synthetic oligonucleotide
  Sense strand starting at position 1851 of SEQ ID NO: 1886161
cacggagggugcguuuaaa

SEQ ID NO: 2391201 - RNA, 19 nt, Artificial Sequence
  Description of Artificial Sequence: Synthetic oligonucleotide
  Antisense strand to SEQ ID NO: 2391200
uuuaaacgcacccuccgug

SEQ ID NO: 2391202 - RNA, 19 nt, Artificial Sequence
  Description of Artificial Sequence: Synthetic oligonucleotide
  Sense strand starting at position 2275 of SEQ ID NO: 1886161
gcacgugaccuuugagaca

SEQ ID NO: 2391203 - RNA, 19 nt, Artificial Sequence
  Description of Artificial Sequence: Synthetic oligonucleotide
  Antisense strand to SEQ ID NO: 2391202
ugucucaaaggucacgugc

SEQ ID NO: 2391204 - RNA, 19 nt, Artificial Sequence
  Description of Artificial Sequence: Synthetic oligonucleotide
  Sense strand starting at position 2382 of SEQ ID NO: 1886161
uauguuugaugagaggaga

SEQ ID NO: 2391205 - RNA, 19 nt, Artificial Sequence
  Description of Artificial Sequence: Synthetic oligonucleotide
  Antisense strand to SEQ ID NO: 2391204
ucuccucucaucaaacaua

SEQ ID NO: 2391206 - RNA, 19 nt, Artificial Sequence
  Description of Artificial Sequence: Synthetic oligonucleotide
  Sense strand starting at position 2474 of SEQ ID NO: 1886161
gcgucaucuggcccuaacu

SEQ ID NO: 2391207 - RNA, 19 nt, Artificial Sequence
  Description of Artificial Sequence: Synthetic oligonucleotide
  Antisense strand to SEQ ID NO: 2391206
aguuagggccagaugacgc

SEQ ID NO: 2391208 - RNA, 19 nt, Artificial Sequence
  Description of Artificial Sequence: Synthetic oligonucleotide
  Sense strand starting at position 2617 of SEQ ID NO: 1886161
cagccauauccagguagua

SEQ ID NO: 2391209 - RNA, 19 nt, Artificial Sequence
  Description of Artificial Sequence: Synthetic oligonucleotide
  Antisense strand to SEQ ID NO: 2391208
uacuaccuggauauggcug

SEQ ID NO: 2391210 - RNA, 19 nt, Artificial Sequence
  Description of Artificial Sequence: Synthetic oligonucleotide
  Sense strand starting at position 2619 of SEQ ID NO: 1886161
gccauauccagguaguaug

SEQ ID NO: 2391211 - RNA, 19 nt, Artificial Sequence
  Description of Artificial Sequence: Synthetic oligonucleotide
  Antisense strand to SEQ ID NO: 2391210
cauacuaccuggauauggc

SEQ ID NO: 2391212 - RNA, 19 nt, Artificial Sequence
  Description of Artificial Sequence: Synthetic oligonucleotide
  Sense strand starting at position 2855 of SEQ ID NO: 1886161
gauggcauuuccggacuua

SEQ ID NO: 2391213 - RNA, 19 nt, Artificial Sequence
  Description of Artificial Sequence: Synthetic oligonucleotide
  Antisense strand to SEQ ID NO: 2391212
uaaguccggaaaugccauc

SEQ ID NO: 2391214 - RNA, 19 nt, Artificial Sequence
  Description of Artificial Sequence: Synthetic oligonucleotide
  Sense strand starting at position 2867 of SEQ ID NO: 1886161
ggacuuacucugggccaga

SEQ ID NO: 2391215 - RNA, 19 nt, Artificial Sequence
  Description of Artificial Sequence: Synthetic oligonucleotide
  Antisense strand to SEQ ID NO: 2391214
ucuggcccagaguaagucc

SEQ ID NO: 2391216 - RNA, 19 nt, Artificial Sequence
  Description of Artificial Sequence: Synthetic oligonucleotide
  Sense strand starting at position 2991 of SEQ ID NO: 1886161
uauagcagaccuugaguga

SEQ ID NO: 2391217 - RNA, 19 nt, Artificial Sequence
  Description of Artificial Sequence: Synthetic oligonucleotide
  Antisense strand to SEQ ID NO: 2391216
ucacucaaggucugcuaua

SEQ ID NO: 2391218 - RNA, 19 nt, Artificial Sequence
  Description of Artificial Sequence: Synthetic oligonucleotide
  Sense strand starting at position 3307 of SEQ ID NO: 1886161
ugagaccugucccacaaga

SEQ ID NO: 2391219 - RNA, 19 nt, Artificial Sequence
  Description of Artificial Sequence: Synthetic oligonucleotide
  Antisense strand to SEQ ID NO: 2391218
ucuugugggacaggucuca

SEQ ID NO: 2391220 - RNA, 19 nt, Artificial Sequence
  Description of Artificial Sequence: Synthetic oligonucleotide
  Sense strand starting at position 3338 of SEQ ID NO: 1886161
agcacucaaucagaaagaa

SEQ ID NO: 2391221 - RNA, 19 nt, Artificial Sequence
  Description of Artificial Sequence: Synthetic oligonucleotide
  Antisense strand to SEQ ID NO: 2391220
uucuuucugauugagugcu

SEQ ID NO: 2391222 - RNA, 19 nt, Artificial Sequence
  Description of Artificial Sequence: Synthetic oligonucleotide
  Sense strand starting at position 3463 of SEQ ID NO: 1886161
cacuauguaguguguaaac

SEQ ID NO: 2391223 - RNA, 19 nt, Artificial Sequence
  Description of Artificial Sequence: Synthetic oligonucleotide
  Antisense strand to SEQ ID NO: 2391222
guuuacacacuacauagug

SEQ ID NO: 2391224 - RNA, 19 nt, Artificial Sequence
  Description of Artificial Sequence: Synthetic oligonucleotide
  Sense strand starting at position 3465 of SEQ ID NO: 1886161
cuauguaguguguaaacua

SEQ ID NO: 2391225 - RNA, 19 nt, Artificial Sequence
  Description of Artificial Sequence: Synthetic oligonucleotide
  Antisense strand to SEQ ID NO: 2391224
uaguuuacacacuacauag

SEQ ID NO: 2391226 - RNA, 19 nt, Artificial Sequence
  Description of Artificial Sequence: Synthetic oligonucleotide
  Sense strand starting at position 3625 of SEQ ID NO: 1886161
ggucaaagcagauggauca

SEQ ID NO: 2391227 - RNA, 19 nt, Artificial Sequence
  Description of Artificial Sequence: Synthetic oligonucleotide
  Antisense strand to SEQ ID NO: 2391226
ugauccaucugcuuugacc

SEQ ID NO: 2391228 - RNA, 19 nt, Artificial Sequence
  Description of Artificial Sequence: Synthetic oligonucleotide
  Sense strand starting at position 3866 of SEQ ID NO: 1886161
ggguuuacugucugaugga

SEQ ID NO: 2391229 - RNA, 19 nt, Artificial Sequence
  Description of Artificial Sequence: Synthetic oligonucleotide
  Antisense strand to SEQ ID NO: 2391228
uccaucagacaguaaaccc

SEQ ID NO: 2391230 - RNA, 19 nt, Artificial Sequence
  Description of Artificial Sequence: Synthetic oligonucleotide
  Sense strand starting at position 270 of SEQ ID NO: 1886162
gccacucucugcuuacgua

SEQ ID NO: 2391231 - RNA, 19 nt, Artificial Sequence
  Description of Artificial Sequence: Synthetic oligonucleotide
  Antisense strand to SEQ ID NO: 2391230
uacguaagcagagaguggc

SEQ ID NO: 2391232 - RNA, 19 nt, Artificial Sequence
  Description of Artificial Sequence: Synthetic oligonucleotide
  Sense strand starting at position 271 of SEQ ID NO: 1886162
ccacucucugcuuacguau

SEQ ID NO: 2391233 - RNA, 19 nt, Artificial Sequence
  Description of Artificial Sequence: Synthetic oligonucleotide
  Antisense strand to SEQ ID NO: 2391232
auacguaagcagagagugg

SEQ ID NO: 2391234 - RNA, 19 nt, Artificial Sequence
  Description of Artificial Sequence: Synthetic oligonucleotide
  Sense strand starting at position 277 of SEQ ID NO: 1886162
ucugcuuacguauguaaga

SEQ ID NO: 2391235 - RNA, 19 nt, Artificial Sequence
  Description of Artificial Sequence: Synthetic oligonucleotide
  Antisense strand to SEQ ID NO: 2391234
ucuuacauacguaagcaga

SEQ ID NO: 2391236 - RNA, 19 nt, Artificial Sequence
  Description of Artificial Sequence: Synthetic oligonucleotide
  Sense strand starting at position 278 of SEQ ID NO: 1886162
cugcuuacguauguaagaa

SEQ ID NO: 2391237 - RNA, 19 nt, Artificial Sequence
  Description of Artificial Sequence: Synthetic oligonucleotide
  Antisense strand to SEQ ID NO: 2391236
uucuuacauacguaagcag

SEQ ID NO: 2391238 - RNA, 19 nt, Artificial Sequence
  Description of Artificial Sequence: Synthetic oligonucleotide
  Sense strand starting at position 279 of SEQ ID NO: 1886162
ugcuuacguauguaagaaa

SEQ ID NO: 2391239 - RNA, 19 nt, Artificial Sequence
  Description of Artificial Sequence: Synthetic oligonucleotide
  Antisense strand to SEQ ID NO: 2391238
uuucuuacauacguaagca

SEQ ID NO: 2391240 - RNA, 19 nt, Artificial Sequence
  Description of Artificial Sequence: Synthetic oligonucleotide
  Sense strand starting at position 2146 of SEQ ID NO: 1886162
gggaaacuccguuaccuua

SEQ ID NO: 2391241 - RNA, 19 nt, Artificial Sequence
  Description of Artificial Sequence: Synthetic oligonucleotide
  Antisense strand to SEQ ID NO: 2391240
uaagguaacggaguuuccc

SEQ ID NO: 2391242 - RNA, 19 nt, Artificial Sequence
  Description of Artificial Sequence: Synthetic oligonucleotide
  Sense strand starting at position 2467 of SEQ ID NO: 1886162
ucccucaguuccuguguaa

SEQ ID NO: 2391243 - RNA, 19 nt, Artificial Sequence
  Description of Artificial Sequence: Synthetic oligonucleotide
  Antisense strand to SEQ ID NO: 2391242
uuacacaggaacugaggga

SEQ ID NO: 2391244 - RNA, 19 nt, Artificial Sequence
  Description of Artificial Sequence: Synthetic oligonucleotide
  Sense strand starting at position 2470 of SEQ ID NO: 1886162
cucaguuccuguguaauuc

SEQ ID NO: 2391245 - RNA, 19 nt, Artificial Sequence
  Description of Artificial Sequence: Synthetic oligonucleotide
  Antisense strand to SEQ ID NO: 2391244
gaauuacacaggaacugag

SEQ ID NO: 2391246 - RNA, 19 nt, Artificial Sequence
  Description of Artificial Sequence: Synthetic oligonucleotide
  Sense strand starting at position 3432 of SEQ ID NO: 1886162
gcauacauuuaagguuaca

SEQ ID NO: 2391247 - RNA, 19 nt, Artificial Sequence
  Description of Artificial Sequence: Synthetic oligonucleotide
  Antisense strand to SEQ ID NO: 2391246
uguaaccuuaaauguaugc

SEQ ID NO: 2391248 - RNA, 19 nt, Artificial Sequence
  Description of Artificial Sequence: Synthetic oligonucleotide
  Sense strand starting at position 211 of SEQ ID NO: 1886163
gagugucuucucggaggga

SEQ ID NO: 2391249 - RNA, 19 nt, Artificial Sequence
  Description of Artificial Sequence: Synthetic oligonucleotide
  Antisense strand to SEQ ID NO: 2391248
ucccuccgagaagacacuc

SEQ ID NO: 2391250 - RNA, 19 nt, Artificial Sequence
  Description of Artificial Sequence: Synthetic oligonucleotide
  Sense strand starting at position 469 of SEQ ID NO: 1886163
ccagacaagccauggaaua

SEQ ID NO: 2391251 - RNA, 19 nt, Artificial Sequence
  Description of Artificial Sequence: Synthetic oligonucleotide
  Antisense strand to SEQ ID NO: 2391250
uauuccauggcuugucugg

SEQ ID NO: 2391252 - RNA, 19 nt, Artificial Sequence
  Description of Artificial Sequence: Synthetic oligonucleotide
  Sense strand starting at position 768 of SEQ ID NO: 1886163
uuggaaaucaaguguuaug

SEQ ID NO: 2391253 - RNA, 19 nt, Artificial Sequence
  Description of Artificial Sequence: Synthetic oligonucleotide
  Antisense strand to SEQ ID NO: 2391252
cauaacacuugauuuccaa

SEQ ID NO: 2391254 - RNA, 19 nt, Artificial Sequence
  Description of Artificial Sequence: Synthetic oligonucleotide
  Sense strand starting at position 859 of SEQ ID NO: 1886163
cuacaugugguugaguauu

SEQ ID NO: 2391255 - RNA, 19 nt, Artificial Sequence
  Description of Artificial Sequence: Synthetic oligonucleotide
  Antisense strand to SEQ ID NO: 2391254
aauacucaaccacauguag

SEQ ID NO: 2391256 - RNA, 19 nt, Artificial Sequence
  Description of Artificial Sequence: Synthetic oligonucleotide
  Sense strand starting at position 915 of SEQ ID NO: 1886163
cagacauguuagccaaugu

SEQ ID NO: 2391257 - RNA, 19 nt, Artificial Sequence
  Description of Artificial Sequence: Synthetic oligonucleotide
  Antisense strand to SEQ ID NO: 2391256
acauuggcuaacaugucug

SEQ ID NO: 2391258 - RNA, 19 nt, Artificial Sequence
  Description of Artificial Sequence: Synthetic oligonucleotide
  Sense strand starting at position 1075 of SEQ ID NO: 1886163
uuggcuagccauugaccaa

SEQ ID NO: 2391259 - RNA, 19 nt, Artificial Sequence
  Description of Artificial Sequence: Synthetic oligonucleotide
  Antisense strand to SEQ ID NO: 2391258
uuggucaauggcuagccaa

SEQ ID NO: 2391260 - RNA, 19 nt, Artificial Sequence
  Description of Artificial Sequence: Synthetic oligonucleotide
  Sense strand starting at position 1118 of SEQ ID NO: 1886163
ggacuuagauucuugguau

SEQ ID NO: 2391261 - RNA, 19 nt, Artificial Sequence
  Description of Artificial Sequence: Synthetic oligonucleotide
  Antisense strand to SEQ ID NO: 2391260
auaccaagaaucuaagucc

SEQ ID NO: 2391262 - RNA, 19 nt, Artificial Sequence
  Description of Artificial Sequence: Synthetic oligonucleotide
  Sense strand starting at position 1138 of SEQ ID NO: 1886163
gggcccauaaccugagaga

SEQ ID NO: 2391263 - RNA, 19 nt, Artificial Sequence
  Description of Artificial Sequence: Synthetic oligonucleotide
  Antisense strand to SEQ ID NO: 2391262
ucucucagguuaugggccc

SEQ ID NO: 2391264 - RNA, 19 nt, Artificial Sequence
  Description of Artificial Sequence: Synthetic oligonucleotide
  Sense strand starting at position 1151 of SEQ ID NO: 1886163
gagagaucauguccaaguu

SEQ ID NO: 2391265 - RNA, 19 nt, Artificial Sequence
  Description of Artificial Sequence: Synthetic oligonucleotide
  Antisense strand to SEQ ID NO: 2391264
aacuuggacaugaucucuc

SEQ ID NO: 2391266 - RNA, 19 nt, Artificial Sequence
  Description of Artificial Sequence: Synthetic oligonucleotide
  Sense strand starting at position 1152 of SEQ ID NO: 1886163
agagaucauguccaaguuu

SEQ ID NO: 2391267 - RNA, 19 nt, Artificial Sequence
  Description of Artificial Sequence: Synthetic oligonucleotide
  Antisense strand to SEQ ID NO: 2391266
aaacuuggacaugaucucu

SEQ ID NO: 2391268 - RNA, 19 nt, Artificial Sequence
  Description of Artificial Sequence: Synthetic oligonucleotide
  Sense strand starting at position 1161 of SEQ ID NO: 1886163
guccaaguuuaagugaaca

SEQ ID NO: 2391269 - RNA, 19 nt, Artificial Sequence
  Description of Artificial Sequence: Synthetic oligonucleotide
  Antisense strand to SEQ ID NO: 2391268
uguucacuuaaacuuggac

SEQ ID NO: 2391270 - RNA, 19 nt, Artificial Sequence
  Description of Artificial Sequence: Synthetic oligonucleotide
  Sense strand starting at position 1166 of SEQ ID NO: 1886163
aguuuaagugaacaaguua

SEQ ID NO: 2391271 - RNA, 19 nt, Artificial Sequence
  Description of Artificial Sequence: Synthetic oligonucleotide
  Antisense strand to SEQ ID NO: 2391270
uaacuuguucacuuaaacu

SEQ ID NO: 2391272 - RNA, 19 nt, Artificial Sequence
  Description of Artificial Sequence: Synthetic oligonucleotide
  Sense strand starting at position 1674 of SEQ ID NO: 1886163
uaggaaagucucugagccu

SEQ ID NO: 2391273 - RNA, 19 nt, Artificial Sequence
  Description of Artificial Sequence: Synthetic oligonucleotide
  Antisense strand to SEQ ID NO: 2391272
aggcucagagacuuuccua

SEQ ID NO: 2391274 - RNA, 19 nt, Artificial Sequence
  Description of Artificial Sequence: Synthetic oligonucleotide
  Sense strand starting at position 1719 of SEQ ID NO: 1886163
ccuugaagucggugagauu

SEQ ID NO: 2391275 - RNA, 19 nt, Artificial Sequence
  Description of Artificial Sequence: Synthetic oligonucleotide
  Antisense strand to SEQ ID NO: 2391274
aaucucaccgacuucaagg

SEQ ID NO: 2391276 - RNA, 19 nt, Artificial Sequence
  Description of Artificial Sequence: Synthetic oligonucleotide
  Sense strand starting at position 1720 of SEQ ID NO: 1886163
cuugaagucggugagauuc

SEQ ID NO: 2391277 - RNA, 19 nt, Artificial Sequence
  Description of Artificial Sequence: Synthetic oligonucleotide
  Antisense strand to SEQ ID NO: 2391276
gaaucucaccgacuucaag

SEQ ID NO: 2391278 - RNA, 19 nt, Artificial Sequence
  Description of Artificial Sequence: Synthetic oligonucleotide
  Sense strand starting at position 1753 of SEQ ID NO: 1886163
acgaaaucauuguuauuac

SEQ ID NO: 2391279 - RNA, 19 nt, Artificial Sequence
  Description of Artificial Sequence: Synthetic oligonucleotide
  Antisense strand to SEQ ID NO: 2391278
guaauaacaaugauuucgu

SEQ ID NO: 2391280 - RNA, 19 nt, Artificial Sequence
  Description of Artificial Sequence: Synthetic oligonucleotide
  Sense strand starting at position 2015 of SEQ ID NO: 1886163
cagugauuagcagaugagu

SEQ ID NO: 2391281 - RNA, 19 nt, Artificial Sequence
  Description of Artificial Sequence: Synthetic oligonucleotide
  Antisense strand to SEQ ID NO: 2391280
acucaucugcuaaucacug

SEQ ID NO: 2391282 - RNA, 19 nt, Artificial Sequence
  Description of Artificial Sequence: Synthetic oligonucleotide
  Sense strand starting at position 2017 of SEQ ID NO: 1886163
gugauuagcagaugaguga

SEQ ID NO: 2391283 - RNA, 19 nt, Artificial Sequence
  Description of Artificial Sequence: Synthetic oligonucleotide
  Antisense strand to SEQ ID NO: 2391282
ucacucaucugcuaaucac

SEQ ID NO: 2391284 - RNA, 19 nt, Artificial Sequence
  Description of Artificial Sequence: Synthetic oligonucleotide
  Sense strand starting at position 2026 of SEQ ID NO: 1886163
agaugagugagcuguguaa

SEQ ID NO: 2391285 - RNA, 19 nt, Artificial Sequence
  Description of Artificial Sequence: Synthetic oligonucleotide
  Antisense strand to SEQ ID NO: 2391284
uuacacagcucacucaucu

SEQ ID NO: 2391286 - RNA, 19 nt, Artificial Sequence
  Description of Artificial Sequence: Synthetic oligonucleotide
  Sense strand starting at position 2030 of SEQ ID NO: 1886163
gagugagcuguguaaccua

SEQ ID NO: 2391287 - RNA, 19 nt, Artificial Sequence
  Description of Artificial Sequence: Synthetic oligonucleotide
  Antisense strand to SEQ ID NO: 2391286
uagguuacacagcucacuc

SEQ ID NO: 2391288 - RNA, 19 nt, Artificial Sequence
  Description of Artificial Sequence: Synthetic oligonucleotide
  Sense strand starting at position 2095 of SEQ ID NO: 1886163
ggaggcuguuagccuauaa

SEQ ID NO: 2391289 - RNA, 19 nt, Artificial Sequence
  Description of Artificial Sequence: Synthetic oligonucleotide
  Antisense strand to SEQ ID NO: 2391288
uuauaggcuaacagccucc

SEQ ID NO: 2391290 - RNA, 19 nt, Artificial Sequence
  Description of Artificial Sequence: Synthetic oligonucleotide
  Sense strand starting at position 2102 of SEQ ID NO: 1886163
guuagccuauaagucaaua

SEQ ID NO: 2391291 - RNA, 19 nt, Artificial Sequence
  Description of Artificial Sequence: Synthetic oligonucleotide
  Antisense strand to SEQ ID NO: 2391290
uauugacuuauaggcuaac

SEQ ID NO: 2391292 - RNA, 19 nt, Artificial Sequence
  Description of Artificial Sequence: Synthetic oligonucleotide
  Sense strand starting at position 2163 of SEQ ID NO: 1886163
cagcaaagauauguugaaa

SEQ ID NO: 2391293 - RNA, 19 nt, Artificial Sequence
  Description of Artificial Sequence: Synthetic oligonucleotide
  Antisense strand to SEQ ID NO: 2391292
uuucaacauaucuuugcug

SEQ ID NO: 2391294 - RNA, 19 nt, Artificial Sequence
  Description of Artificial Sequence: Synthetic oligonucleotide
  Sense strand starting at position 2215 of SEQ ID NO: 1886163
cuuuauauaugguugacuu

SEQ ID NO: 2391295 - RNA, 19 nt, Artificial Sequence
  Description of Artificial Sequence: Synthetic oligonucleotide
  Antisense strand to SEQ ID NO: 2391294
aagucaaccauauauaaag

SEQ ID NO: 2391296 - RNA, 19 nt, Artificial Sequence
  Description of Artificial Sequence: Synthetic oligonucleotide
  Sense strand starting at position 2391 of SEQ ID NO: 1886163
cuaauuguugcccauuaag

SEQ ID NO: 2391297 - RNA, 19 nt, Artificial Sequence
  Description of Artificial Sequence: Synthetic oligonucleotide
  Antisense strand to SEQ ID NO: 2391296
cuuaaugggcaacaauuag

SEQ ID NO: 2391298 - RNA, 19 nt, Artificial Sequence
  Description of Artificial Sequence: Synthetic oligonucleotide
  Sense strand starting at position 2394 of SEQ ID NO: 1886163
auuguugcccauuaagaga

SEQ ID NO: 2391299 - RNA, 19 nt, Artificial Sequence
  Description of Artificial Sequence: Synthetic oligonucleotide
  Antisense strand to SEQ ID NO: 2391298
ucucuuaaugggcaacaau

SEQ ID NO: 2391300 - RNA, 19 nt, Artificial Sequence
  Description of Artificial Sequence: Synthetic oligonucleotide
  Sense strand starting at position 2453 of SEQ ID NO: 1886163
ggagcugaaucaccuguaa

SEQ ID NO: 2391301 - RNA, 19 nt, Artificial Sequence
  Description of Artificial Sequence: Synthetic oligonucleotide
  Antisense strand to SEQ ID NO: 2391300
uuacaggugauucagcucc

SEQ ID NO: 2391302 - RNA, 19 nt, Artificial Sequence
  Description of Artificial Sequence: Synthetic oligonucleotide
  Sense strand starting at position 3207 of SEQ ID NO: 1886163
uacugauguuuccucagag

SEQ ID NO: 2391303 - RNA, 19 nt, Artificial Sequence
  Description of Artificial Sequence: Synthetic oligonucleotide
  Antisense strand to SEQ ID NO: 2391302
cucugaggaaacaucagua

SEQ ID NO: 2391304 - RNA, 19 nt, Artificial Sequence
  Description of Artificial Sequence: Synthetic oligonucleotide
  Sense strand starting at position 3208 of SEQ ID NO: 1886163
acugauguuuccucagagu

SEQ ID NO: 2391305 - RNA, 19 nt, Artificial Sequence
  Description of Artificial Sequence: Synthetic oligonucleotide
  Antisense strand to SEQ ID NO: 2391304
acucugaggaaacaucagu

SEQ ID NO: 2391306 - RNA, 19 nt, Artificial Sequence
  Description of Artificial Sequence: Synthetic oligonucleotide
  Sense strand starting at position 3348 of SEQ ID NO: 1886163
aaacuaaugcuuuguggau

SEQ ID NO: 2391307 - RNA, 19 nt, Artificial Sequence
  Description of Artificial Sequence: Synthetic oligonucleotide
  Antisense strand to SEQ ID NO: 2391306
auccacaaagcauuaguuu

SEQ ID NO: 2391308 - RNA, 19 nt, Artificial Sequence
  Description of Artificial Sequence: Synthetic oligonucleotide
  Sense strand starting at position 3354 of SEQ ID NO: 1886163
augcuuuguggauggacaa

SEQ ID NO: 2391309 - RNA, 19 nt, Artificial Sequence
  Description of Artificial Sequence: Synthetic oligonucleotide
  Antisense strand to SEQ ID NO: 2391308
uuguccauccacaaagcau

SEQ ID NO: 2391310 - RNA, 19 nt, Artificial Sequence
  Description of Artificial Sequence: Synthetic oligonucleotide
  Sense strand starting at position 3355 of SEQ ID NO: 1886163
ugcuuuguggauggacaaa

SEQ ID NO: 2391311 - RNA, 19 nt, Artificial Sequence
  Description of Artificial Sequence: Synthetic oligonucleotide
  Antisense strand to SEQ ID NO: 2391310
uuuguccauccacaaagca

SEQ ID NO: 2391312 - RNA, 19 nt, Artificial Sequence
  Description of Artificial Sequence: Synthetic oligonucleotide
  Sense strand starting at position 3454 of SEQ ID NO: 1886163
auaugcuuugaggacucau

SEQ ID NO: 2391313 - RNA, 19 nt, Artificial Sequence
  Description of Artificial Sequence: Synthetic oligonucleotide
  Antisense strand to SEQ ID NO: 2391312
augaguccucaaagcauau

SEQ ID NO: 2391314 - RNA, 19 nt, Artificial Sequence
  Description of Artificial Sequence: Synthetic oligonucleotide
  Sense strand starting at position 3538 of SEQ ID NO: 1886163
ggaguugguucaguuuaug

SEQ ID NO: 2391315 - RNA, 19 nt, Artificial Sequence
  Description of Artificial Sequence: Synthetic oligonucleotide
  Antisense strand to SEQ ID NO: 2391314
cauaaacugaaccaacucc

SEQ ID NO: 2391316 - RNA, 19 nt, Artificial Sequence
  Description of Artificial Sequence: Synthetic oligonucleotide
  Sense strand starting at position 3552 of SEQ ID NO: 1886163
uuauguugucuugaaucag

SEQ ID NO: 2391317 - RNA, 19 nt, Artificial Sequence
  Description of Artificial Sequence: Synthetic oligonucleotide
  Antisense strand to SEQ ID NO: 2391316
cugauucaagacaacauaa

SEQ ID NO: 2391318 - RNA, 19 nt, Artificial Sequence
  Description of Artificial Sequence: Synthetic oligonucleotide
  Sense strand starting at position 3757 of SEQ ID NO: 1886163
gaaucacuguccucaagga

SEQ ID NO: 2391319 - RNA, 19 nt, Artificial Sequence
  Description of Artificial Sequence: Synthetic oligonucleotide
  Antisense strand to SEQ ID NO: 2391318
uccuugaggacagugauuc

SEQ ID NO: 2391320 - RNA, 19 nt, Artificial Sequence
  Description of Artificial Sequence: Synthetic oligonucleotide
  Sense strand starting at position 3805 of SEQ ID NO: 1886163
aaauaagugcaguaauaug

SEQ ID NO: 2391321 - RNA, 19 nt, Artificial Sequence
  Description of Artificial Sequence: Synthetic oligonucleotide
  Antisense strand to SEQ ID NO: 2391320
cauauuacugcacuuauuu

SEQ ID NO: 2391322 - RNA, 19 nt, Artificial Sequence
  Description of Artificial Sequence: Synthetic oligonucleotide
  Sense strand starting at position 3813 of SEQ ID NO: 1886163
gcaguaauaugaucuuacg

SEQ ID NO: 2391323 - RNA, 19 nt, Artificial Sequence
  Description of Artificial Sequence: Synthetic oligonucleotide
  Antisense strand to SEQ ID NO: 2391322
cguaagaucauauuacugc

SEQ ID NO: 2391324 - RNA, 19 nt, Artificial Sequence
  Description of Artificial Sequence: Synthetic oligonucleotide
  Sense strand starting at position 3879 of SEQ ID NO: 1886163
agcugugcacgaguaguuu

SEQ ID NO: 2391325 - RNA, 19 nt, Artificial Sequence
  Description of Artificial Sequence: Synthetic oligonucleotide
  Antisense strand to SEQ ID NO: 2391324
aaacuacucgugcacagcu

SEQ ID NO: 2391326 - RNA, 19 nt, Artificial Sequence
  Description of Artificial Sequence: Synthetic oligonucleotide
  Sense strand starting at position 3963 of SEQ ID NO: 1886163
gucccuuuggguuaagcau

SEQ ID NO: 2391327 - RNA, 19 nt, Artificial Sequence
  Description of Artificial Sequence: Synthetic oligonucleotide
  Antisense strand to SEQ ID NO: 2391326
augcuuaacccaaagggac

SEQ ID NO: 2391328 - RNA, 19 nt, Artificial Sequence
  Description of Artificial Sequence: Synthetic oligonucleotide
  Sense strand starting at position 199 of SEQ ID NO: 1886164
gaaauuguaugacccaguu

SEQ ID NO: 2391329 - RNA, 19 nt, Artificial Sequence
  Description of Artificial Sequence: Synthetic oligonucleotide
  Antisense strand to SEQ ID NO: 2391328
aacugggucauacaauuuc

SEQ ID NO: 2391330 - RNA, 19 nt, Artificial Sequence
  Description of Artificial Sequence: Synthetic oligonucleotide
  Sense strand starting at position 337 of SEQ ID NO: 1886164
gccggaaucugaggauaaa

SEQ ID NO: 2391331 - RNA, 19 nt, Artificial Sequence
  Description of Artificial Sequence: Synthetic oligonucleotide
  Antisense strand to SEQ ID NO: 2391330
uuuauccucagauuccggc

SEQ ID NO: 2391332 - RNA, 19 nt, Artificial Sequence
  Description of Artificial Sequence: Synthetic oligonucleotide
  Sense strand starting at position 908 of SEQ ID NO: 1886164
acgcauauuuacucgauau

SEQ ID NO: 2391333 - RNA, 19 nt, Artificial Sequence
  Description of Artificial Sequence: Synthetic oligonucleotide
  Antisense strand to SEQ ID NO: 2391332
auaucgaguaaauaugcgu

SEQ ID NO: 2391334 - RNA, 19 nt, Artificial Sequence
  Description of Artificial Sequence: Synthetic oligonucleotide
  Sense strand starting at position 1357 of SEQ ID NO: 1886164
agacuuuaaucugggacgu

SEQ ID NO: 2391335 - RNA, 19 nt, Artificial Sequence
  Description of Artificial Sequence: Synthetic oligonucleotide
  Antisense strand to SEQ ID NO: 2391334
acgucccagauuaaagucu

SEQ ID NO: 2391336 - RNA, 19 nt, Artificial Sequence
  Description of Artificial Sequence: Synthetic oligonucleotide
  Sense strand starting at position 1724 of SEQ ID NO: 1886164
gcgagaaucucauccucag

SEQ ID NO: 2391337 - RNA, 19 nt, Artificial Sequence
  Description of Artificial Sequence: Synthetic oligonucleotide
  Antisense strand to SEQ ID NO: 2391336
cugaggaugagauucucgc

SEQ ID NO: 2391338 - RNA, 19 nt, Artificial Sequence
  Description of Artificial Sequence: Synthetic oligonucleotide
  Sense strand starting at position 1776 of SEQ ID NO: 1886164
ugagucacucccugaaaca

SEQ ID NO: 2391339 - RNA, 19 nt, Artificial Sequence
  Description of Artificial Sequence: Synthetic oligonucleotide
  Antisense strand to SEQ ID NO: 2391338
uguuucagggagugacuca

SEQ ID NO: 2391340 - RNA, 19 nt, Artificial Sequence
  Description of Artificial Sequence: Synthetic oligonucleotide
  Sense strand starting at position 208 of SEQ ID NO: 1886165
ggcuuuaagaggcaggaau

SEQ ID NO: 2391341 - RNA, 19 nt, Artificial Sequence
  Description of Artificial Sequence: Synthetic oligonucleotide
  Antisense strand to SEQ ID NO: 2391340
auuccugccucuuaaagcc

SEQ ID NO: 2391342 - RNA, 19 nt, Artificial Sequence
  Description of Artificial Sequence: Synthetic oligonucleotide
  Sense strand starting at position 444 of SEQ ID NO: 1886165
acagcaucuugagcuuaua

SEQ ID NO: 2391343 - RNA, 19 nt, Artificial Sequence
  Description of Artificial Sequence: Synthetic oligonucleotide
  Antisense strand to SEQ ID NO: 2391342
uauaagcucaagaugcugu

SEQ ID NO: 2391344 - RNA, 19 nt, Artificial Sequence
  Description of Artificial Sequence: Synthetic oligonucleotide
  Sense strand starting at position 455 of SEQ ID NO: 1886165
agcuuauaaggucaauauu

SEQ ID NO: 2391345 - RNA, 19 nt, Artificial Sequence
  Description of Artificial Sequence: Synthetic oligonucleotide
  Antisense strand to SEQ ID NO: 2391344
aauauugaccuuauaagcu

SEQ ID NO: 2391346 - RNA, 19 nt, Artificial Sequence
  Description of Artificial Sequence: Synthetic oligonucleotide
  Sense strand starting at position 520 of SEQ ID NO: 1886165
cuguucugacuuuguggaa

SEQ ID NO: 2391347 - RNA, 19 nt, Artificial Sequence
  Description of Artificial Sequence: Synthetic oligonucleotide
  Antisense strand to SEQ ID NO: 2391346
uuccacaaagucagaacag

SEQ ID NO: 2391348 - RNA, 19 nt, Artificial Sequence
  Description of Artificial Sequence: Synthetic oligonucleotide
  Sense strand starting at position 521 of SEQ ID NO: 1886165
uguucugacuuuguggaau

SEQ ID NO: 2391349 - RNA, 19 nt, Artificial Sequence
  Description of Artificial Sequence: Synthetic oligonucleotide
  Antisense strand to SEQ ID NO: 2391348
auuccacaaagucagaaca

SEQ ID NO: 2391350 - RNA, 19 nt, Artificial Sequence
  Description of Artificial Sequence: Synthetic oligonucleotide
  Sense strand starting at position 622 of SEQ ID NO: 1886165
ggagcugggucuagaauag

SEQ ID NO: 2391351 - RNA, 19 nt, Artificial Sequence
  Description of Artificial Sequence: Synthetic oligonucleotide
  Antisense strand to SEQ ID NO: 2391350
cuauucuagacccagcucc

SEQ ID NO: 2391352 - RNA, 19 nt, Artificial Sequence
  Description of Artificial Sequence: Synthetic oligonucleotide
  Sense strand starting at position 629 of SEQ ID NO: 1886165
ggucuagaauaggcugaaa

SEQ ID NO: 2391353 - RNA, 19 nt, Artificial Sequence
  Description of Artificial Sequence: Synthetic oligonucleotide
  Antisense strand to SEQ ID NO: 2391352
uuucagccuauucuagacc

SEQ ID NO: 2391354 - RNA, 19 nt, Artificial Sequence
  Description of Artificial Sequence: Synthetic oligonucleotide
  Sense strand starting at position 709 of SEQ ID NO: 1886165
guggauuucucuuacauuu

SEQ ID NO: 2391355 - RNA, 19 nt, Artificial Sequence
  Description of Artificial Sequence: Synthetic oligonucleotide
  Antisense strand to SEQ ID NO: 2391354
aaauguaagagaaauccac

SEQ ID NO: 2391356 - RNA, 19 nt, Artificial Sequence
  Description of Artificial Sequence: Synthetic oligonucleotide
  Sense strand starting at position 938 of SEQ ID NO: 1886165
aggcucaaugucugcauuu

SEQ ID NO: 2391357 - RNA, 19 nt, Artificial Sequence
  Description of Artificial Sequence: Synthetic oligonucleotide
  Antisense strand to SEQ ID NO: 2391356
aaaugcagacauugagccu

SEQ ID NO: 2391358 - RNA, 19 nt, Artificial Sequence
  Description of Artificial Sequence: Synthetic oligonucleotide
  Sense strand starting at position 1001 of SEQ ID NO: 1886165
cuuugugaccuaugacaag

SEQ ID NO: 2391359 - RNA, 19 nt, Artificial Sequence
  Description of Artificial Sequence: Synthetic oligonucleotide
  Antisense strand to SEQ ID NO: 2391358
cuugucauaggucacaaag

SEQ ID NO: 2391360 - RNA, 19 nt, Artificial Sequence
  Description of Artificial Sequence: Synthetic oligonucleotide
  Sense strand starting at position 1034 of SEQ ID NO: 1886165
uucuguugcccugaaauag

SEQ ID NO: 2391361 - RNA, 19 nt, Artificial Sequence
  Description of Artificial Sequence: Synthetic oligonucleotide
  Antisense strand to SEQ ID NO: 2391360
cuauuucagggcaacagaa

SEQ ID NO: 2391362 - RNA, 19 nt, Artificial Sequence
  Description of Artificial Sequence: Synthetic oligonucleotide
  Sense strand starting at position 1044 of SEQ ID NO: 1886165
cugaaauagucccugacaa

SEQ ID NO: 2391363 - RNA, 19 nt, Artificial Sequence
  Description of Artificial Sequence: Synthetic oligonucleotide
  Antisense strand to SEQ ID NO: 2391362
uugucagggacuauuucag

SEQ ID NO: 2391364 - RNA, 19 nt, Artificial Sequence
  Description of Artificial Sequence: Synthetic oligonucleotide
  Sense strand starting at position 1045 of SEQ ID NO: 1886165
ugaaauagucccugacaau

SEQ ID NO: 2391365 - RNA, 19 nt, Artificial Sequence
  Description of Artificial Sequence: Synthetic oligonucleotide
  Antisense strand to SEQ ID NO: 2391364
auugucagggacuauuuca

SEQ ID NO: 2391366 - RNA, 19 nt, Artificial Sequence
  Description of Artificial Sequence: Synthetic oligonucleotide
  Sense strand starting at position 1077 of SEQ ID NO: 1886165
agauucccagcucaguaaa

SEQ ID NO: 2391367 - RNA, 19 nt, Artificial Sequence
  Description of Artificial Sequence: Synthetic oligonucleotide
  Antisense strand to SEQ ID NO: 2391366
uuuacugagcugggaaucu

SEQ ID NO: 2391368 - RNA, 19 nt, Artificial Sequence
  Description of Artificial Sequence: Synthetic oligonucleotide
  Sense strand starting at position 1197 of SEQ ID NO: 1886165
guccaaaggucucucuuaa

SEQ ID NO: 2391369 - RNA, 19 nt, Artificial Sequence
  Description of Artificial Sequence: Synthetic oligonucleotide
  Antisense strand to SEQ ID NO: 2391368
uuaagagagaccuuuggac

SEQ ID NO: 2391370 - RNA, 19 nt, Artificial Sequence
  Description of Artificial Sequence: Synthetic oligonucleotide
  Sense strand starting at position 1356 of SEQ ID NO: 1886165
aggaaugagcccuggaauc

SEQ ID NO: 2391371 - RNA, 19 nt, Artificial Sequence
  Description of Artificial Sequence: Synthetic oligonucleotide
  Antisense strand to SEQ ID NO: 2391370
gauuccagggcucauuccu

SEQ ID NO: 2391372 - RNA, 19 nt, Artificial Sequence
  Description of Artificial Sequence: Synthetic oligonucleotide
  Sense strand starting at position 1366 of SEQ ID NO: 1886165
ccuggaaucuggguuauga

SEQ ID NO: 2391373 - RNA, 19 nt, Artificial Sequence
  Description of Artificial Sequence: Synthetic oligonucleotide
  Antisense strand to SEQ ID NO: 2391372
ucauaacccagauuccagg

SEQ ID NO: 2391374 - RNA, 19 nt, Artificial Sequence
  Description of Artificial Sequence: Synthetic oligonucleotide
  Sense strand starting at position 1374 of SEQ ID NO: 1886165
cuggguuaugaaugaguag

SEQ ID NO: 2391375 - RNA, 19 nt, Artificial Sequence
  Description of Artificial Sequence: Synthetic oligonucleotide
  Antisense strand to SEQ ID NO: 2391374
cuacucauucauaacccag

SEQ ID NO: 2391376 - RNA, 19 nt, Artificial Sequence
  Description of Artificial Sequence: Synthetic oligonucleotide
  Sense strand starting at position 1454 of SEQ ID NO: 1886165
uugcgucacggcucauaua

SEQ ID NO: 2391377 - RNA, 19 nt, Artificial Sequence
  Description of Artificial Sequence: Synthetic oligonucleotide
  Antisense strand to SEQ ID NO: 2391376
uauaugagccgugacgcaa

SEQ ID NO: 2391378 - RNA, 19 nt, Artificial Sequence
  Description of Artificial Sequence: Synthetic oligonucleotide
  Sense strand starting at position 1600 of SEQ ID NO: 1886165
ucaguaacuccacaaggua

SEQ ID NO: 2391379 - RNA, 19 nt, Artificial Sequence
  Description of Artificial Sequence: Synthetic oligonucleotide
  Antisense strand to SEQ ID NO: 2391378
uaccuuguggaguuacuga

SEQ ID NO: 2391380 - RNA, 19 nt, Artificial Sequence
  Description of Artificial Sequence: Synthetic oligonucleotide
  Sense strand starting at position 1625 of SEQ ID NO: 1886165
gcaagagguuaucugaagu

SEQ ID NO: 2391381 - RNA, 19 nt, Artificial Sequence
  Description of Artificial Sequence: Synthetic oligonucleotide
  Antisense strand to SEQ ID NO: 2391380
acuucagauaaccucuugc

SEQ ID NO: 2391382 - RNA, 19 nt, Artificial Sequence
  Description of Artificial Sequence: Synthetic oligonucleotide
  Sense strand starting at position 1721 of SEQ ID NO: 1886165
cuauuaaguccucauguug

SEQ ID NO: 2391383 - RNA, 19 nt, Artificial Sequence
  Description of Artificial Sequence: Synthetic oligonucleotide
  Antisense strand to SEQ ID NO: 2391382
caacaugaggacuuaauag

SEQ ID NO: 2391384 - RNA, 19 nt, Artificial Sequence
  Description of Artificial Sequence: Synthetic oligonucleotide
  Sense strand starting at position 1739 of SEQ ID NO: 1886165
gucaacagguuccuggaaa

SEQ ID NO: 2391385 - RNA, 19 nt, Artificial Sequence
  Description of Artificial Sequence: Synthetic oligonucleotide
  Antisense strand to SEQ ID NO: 2391384
uuuccaggaaccuguugac

SEQ ID NO: 2391386 - RNA, 19 nt, Artificial Sequence
  Description of Artificial Sequence: Synthetic oligonucleotide
  Sense strand starting at position 2145 of SEQ ID NO: 1886165
ccugucaacgcuguuaagu

SEQ ID NO: 2391387 - RNA, 19 nt, Artificial Sequence
  Description of Artificial Sequence: Synthetic oligonucleotide
  Antisense strand to SEQ ID NO: 2391386
acuuaacagcguugacagg

SEQ ID NO: 2391388 - RNA, 19 nt, Artificial Sequence
  Description of Artificial Sequence: Synthetic oligonucleotide
  Sense strand starting at position 2155 of SEQ ID NO: 1886165
cuguuaagugaugacuuaa

SEQ ID NO: 2391389 - RNA, 19 nt, Artificial Sequence
  Description of Artificial Sequence: Synthetic oligonucleotide
  Antisense strand to SEQ ID NO: 2391388
uuaagucaucacuuaacag

SEQ ID NO: 2391390 - RNA, 19 nt, Artificial Sequence
  Description of Artificial Sequence: Synthetic oligonucleotide
  Sense strand starting at position 2252 of SEQ ID NO: 1886165
ucuuaauugcucgagaaac

SEQ ID NO: 2391391 - RNA, 19 nt, Artificial Sequence
  Description of Artificial Sequence: Synthetic oligonucleotide
  Antisense strand to SEQ ID NO: 2391390
guuucucgagcaauuaaga

SEQ ID NO: 2391392 - RNA, 19 nt, Artificial Sequence
  Description of Artificial Sequence: Synthetic oligonucleotide
  Sense strand starting at position 2254 of SEQ ID NO: 1886165
uuaauugcucgagaaacug

SEQ ID NO: 2391393 - RNA, 19 nt, Artificial Sequence
  Description of Artificial Sequence: Synthetic oligonucleotide
  Antisense strand to SEQ ID NO: 2391392
caguuucucgagcaauuaa

SEQ ID NO: 2391394 - RNA, 19 nt, Artificial Sequence
  Description of Artificial Sequence: Synthetic oligonucleotide
  Sense strand starting at position 2391 of SEQ ID NO: 1886165
gaauauguaccuugggaca

SEQ ID NO: 2391395 - RNA, 19 nt, Artificial Sequence
  Description of Artificial Sequence: Synthetic oligonucleotide
  Antisense strand to SEQ ID NO: 2391394
ugucccaagguacauauuc

SEQ ID NO: 2391396 - RNA, 19 nt, Artificial Sequence
  Description of Artificial Sequence: Synthetic oligonucleotide
  Sense strand starting at position 2408 of SEQ ID NO: 1886165
cagguuaugggucacugau

SEQ ID NO: 2391397 - RNA, 19 nt, Artificial Sequence
  Description of Artificial Sequence: Synthetic oligonucleotide
  Antisense strand to SEQ ID NO: 2391396
aucagugacccauaaccug

SEQ ID NO: 2391398 - RNA, 19 nt, Artificial Sequence
  Description of Artificial Sequence: Synthetic oligonucleotide
  Sense strand starting at position 2410 of SEQ ID NO: 1886165
gguuaugggucacugauaa

SEQ ID NO: 2391399 - RNA, 19 nt, Artificial Sequence
  Description of Artificial Sequence: Synthetic oligonucleotide
  Antisense strand to SEQ ID NO: 2391398
uuaucagugacccauaacc

SEQ ID NO: 2391400 - RNA, 19 nt, Artificial Sequence
  Description of Artificial Sequence: Synthetic oligonucleotide
  Sense strand starting at position 2698 of SEQ ID NO: 1886165
gcuguuggugcucucauua

SEQ ID NO: 2391401 - RNA, 19 nt, Artificial Sequence
  Description of Artificial Sequence: Synthetic oligonucleotide
  Antisense strand to SEQ ID NO: 2391400
uaaugagagcaccaacagc

SEQ ID NO: 2391402 - RNA, 19 nt, Artificial Sequence
  Description of Artificial Sequence: Synthetic oligonucleotide
  Sense strand starting at position 2703 of SEQ ID NO: 1886165
uggugcucucauuaaacaa

SEQ ID NO: 2391403 - RNA, 19 nt, Artificial Sequence
  Description of Artificial Sequence: Synthetic oligonucleotide
  Antisense strand to SEQ ID NO: 2391402
uuguuuaaugagagcacca

SEQ ID NO: 2391404 - RNA, 19 nt, Artificial Sequence
  Description of Artificial Sequence: Synthetic oligonucleotide
  Sense strand starting at position 3078 of SEQ ID NO: 1886165
cuaguagaaugccugacaa

SEQ ID NO: 2391405 - RNA, 19 nt, Artificial Sequence
  Description of Artificial Sequence: Synthetic oligonucleotide
  Antisense strand to SEQ ID NO: 2391404
uugucaggcauucuacuag

SEQ ID NO: 2391406 - RNA, 19 nt, Artificial Sequence
  Description of Artificial Sequence: Synthetic oligonucleotide
  Sense strand starting at position 3169 of SEQ ID NO: 1886165
acaucagguuaguccuaua

SEQ ID NO: 2391407 - RNA, 19 nt, Artificial Sequence
  Description of Artificial Sequence: Synthetic oligonucleotide
  Antisense strand to SEQ ID NO: 2391406
uauaggacuaaccugaugu

SEQ ID NO: 2391408 - RNA, 19 nt, Artificial Sequence
  Description of Artificial Sequence: Synthetic oligonucleotide
  Sense strand starting at position 3174 of SEQ ID NO: 1886165
agguuaguccuauauuaga

SEQ ID NO: 2391409 - RNA, 19 nt, Artificial Sequence
  Description of Artificial Sequence: Synthetic oligonucleotide
  Antisense strand to SEQ ID NO: 2391408
ucuaauauaggacuaaccu

SEQ ID NO: 2391410 - RNA, 19 nt, Artificial Sequence
  Description of Artificial Sequence: Synthetic oligonucleotide
  Sense strand starting at position 3277 of SEQ ID NO: 1886165
ugggaaggaucugcgcuaa

SEQ ID NO: 2391411 - RNA, 19 nt, Artificial Sequence
  Description of Artificial Sequence: Synthetic oligonucleotide
  Antisense strand to SEQ ID NO: 2391410
uuagcgcagauccuuccca

SEQ ID NO: 2391412 - RNA, 19 nt, Artificial Sequence
  Description of Artificial Sequence: Synthetic oligonucleotide
  Sense strand starting at position 3329 of SEQ ID NO: 1886165
uuggaaaugcuccagcuga

SEQ ID NO: 2391413 - RNA, 19 nt, Artificial Sequence
  Description of Artificial Sequence: Synthetic oligonucleotide
  Antisense strand to SEQ ID NO: 2391412
ucagcuggagcauuuccaa

SEQ ID NO: 2391414 - RNA, 19 nt, Artificial Sequence
  Description of Artificial Sequence: Synthetic oligonucleotide
  Sense strand starting at position 3472 of SEQ ID NO: 1886165
ugugaaucuuaaucagacu

SEQ ID NO: 2391415 - RNA, 19 nt, Artificial Sequence
  Description of Artificial Sequence: Synthetic oligonucleotide
  Antisense strand to SEQ ID NO: 2391414
agucugauuaagauucaca

SEQ ID NO: 2391416 - RNA, 19 nt, Artificial Sequence
  Description of Artificial Sequence: Synthetic oligonucleotide
  Sense strand starting at position 3755 of SEQ ID NO: 1886165
uggauuuagucagaagcac

SEQ ID NO: 2391417 - RNA, 19 nt, Artificial Sequence
  Description of Artificial Sequence: Synthetic oligonucleotide
  Antisense strand to SEQ ID NO: 2391416
gugcuucugacuaaaucca

SEQ ID NO: 2391418 - RNA, 19 nt, Artificial Sequence
  Description of Artificial Sequence: Synthetic oligonucleotide
  Sense strand starting at position 3815 of SEQ ID NO: 1886165
uucccugaggccuggauaa

SEQ ID NO: 2391419 - RNA, 19 nt, Artificial Sequence
  Description of Artificial Sequence: Synthetic oligonucleotide
  Antisense strand to SEQ ID NO: 2391418
uuauccaggccucagggaa

SEQ ID NO: 2391420 - RNA, 19 nt, Artificial Sequence
  Description of Artificial Sequence: Synthetic oligonucleotide
  Sense strand starting at position 64 of SEQ ID NO: 1886166
uuuagugcugaauaagauu

SEQ ID NO: 2391421 - RNA, 19 nt, Artificial Sequence
  Description of Artificial Sequence: Synthetic oligonucleotide
  Antisense strand to SEQ ID NO: 2391420
aaucuuauucagcacuaaa

SEQ ID NO: 2391422 - RNA, 19 nt, Artificial Sequence
  Description of Artificial Sequence: Synthetic oligonucleotide
  Sense strand starting at position 268 of SEQ ID NO: 1886166
uguauuuauauccguuugu

SEQ ID NO: 2391423 - RNA, 19 nt, Artificial Sequence
  Description of Artificial Sequence: Synthetic oligonucleotide
  Antisense strand to SEQ ID NO: 2391422
acaaacggauauaaauaca

SEQ ID NO: 2391424 - RNA, 19 nt, Artificial Sequence
  Description of Artificial Sequence: Synthetic oligonucleotide
  Sense strand starting at position 269 of SEQ ID NO: 1886166
guauuuauauccguuuguu

SEQ ID NO: 2391425 - RNA, 19 nt, Artificial Sequence
  Description of Artificial Sequence: Synthetic oligonucleotide
  Antisense strand to SEQ ID NO: 2391424
aacaaacggauauaaauac

SEQ ID NO: 2391426 - RNA, 19 nt, Artificial Sequence
  Description of Artificial Sequence: Synthetic oligonucleotide
  Sense strand starting at position 366 of SEQ ID NO: 1886166
uccuuaauguugguuagaa

SEQ ID NO: 2391427 - RNA, 19 nt, Artificial Sequence
  Description of Artificial Sequence: Synthetic oligonucleotide
  Antisense strand to SEQ ID NO: 2391426
uucuaaccaacauuaagga

SEQ ID NO: 2391428 - RNA, 19 nt, Artificial Sequence
  Description of Artificial Sequence: Synthetic oligonucleotide
  Sense strand starting at position 367 of SEQ ID NO: 1886166
ccuuaauguugguuagaaa

SEQ ID NO: 2391429 - RNA, 19 nt, Artificial Sequence
  Description of Artificial Sequence: Synthetic oligonucleotide
  Antisense strand to SEQ ID NO: 2391428
uuucuaaccaacauuaagg

SEQ ID NO: 2391430 - RNA, 19 nt, Artificial Sequence
  Description of Artificial Sequence: Synthetic oligonucleotide
  Sense strand starting at position 397 of SEQ ID NO: 1886166
cgccaaauuguauaaaucu

SEQ ID NO: 2391431 - RNA, 19 nt, Artificial Sequence
  Description of Artificial Sequence: Synthetic oligonucleotide
  Antisense strand to SEQ ID NO: 2391430
agauuuauacaauuuggcg

SEQ ID NO: 2391432 - RNA, 19 nt, Artificial Sequence
  Description of Artificial Sequence: Synthetic oligonucleotide
  Sense strand starting at position 487 of SEQ ID NO: 1886166
caaggcagaugucuaacuu

SEQ ID NO: 2391433 - RNA, 19 nt, Artificial Sequence
  Description of Artificial Sequence: Synthetic oligonucleotide
  Antisense strand to SEQ ID NO: 2391432
aaguuagacaucugccuug

SEQ ID NO: 2391434 - RNA, 19 nt, Artificial Sequence
  Description of Artificial Sequence: Synthetic oligonucleotide
  Sense strand starting at position 488 of SEQ ID NO: 1886166
aaggcagaugucuaacuuu

SEQ ID NO: 2391435 - RNA, 19 nt, Artificial Sequence
  Description of Artificial Sequence: Synthetic oligonucleotide
  Antisense strand to SEQ ID NO: 2391434
aaaguuagacaucugccuu

SEQ ID NO: 2391436 - RNA, 19 nt, Artificial Sequence
  Description of Artificial Sequence: Synthetic oligonucleotide
  Sense strand starting at position 622 of SEQ ID NO: 1886166
agagguaacucaucacauu

SEQ ID NO: 2391437 - RNA, 19 nt, Artificial Sequence
  Description of Artificial Sequence: Synthetic oligonucleotide
  Antisense strand to SEQ ID NO: 2391436
aaugugaugaguuaccucu

SEQ ID NO: 2391438 - RNA, 19 nt, Artificial Sequence
  Description of Artificial Sequence: Synthetic oligonucleotide
  Sense strand starting at position 720 of SEQ ID NO: 1886166
ccaaguaugguccagggau

SEQ ID NO: 2391439 - RNA, 19 nt, Artificial Sequence
  Description of Artificial Sequence: Synthetic oligonucleotide
  Antisense strand to SEQ ID NO: 2391438
aucccuggaccauacuugg

SEQ ID NO: 2391440 - RNA, 19 nt, Artificial Sequence
  Description of Artificial Sequence: Synthetic oligonucleotide
  Sense strand starting at position 763 of SEQ ID NO: 1886166
gccuguuagaaauguagag

SEQ ID NO: 2391441 - RNA, 19 nt, Artificial Sequence
  Description of Artificial Sequence: Synthetic oligonucleotide
  Antisense strand to SEQ ID NO: 2391440
cucuacauuucuaacaggc

SEQ ID NO: 2391442 - RNA, 19 nt, Artificial Sequence
  Description of Artificial Sequence: Synthetic oligonucleotide
  Sense strand starting at position 767 of SEQ ID NO: 1886166
guuagaaauguagagucau

SEQ ID NO: 2391443 - RNA, 19 nt, Artificial Sequence
  Description of Artificial Sequence: Synthetic oligonucleotide
  Antisense strand to SEQ ID NO: 2391442
augacucuacauuucuaac

SEQ ID NO: 2391444 - RNA, 19 nt, Artificial Sequence
  Description of Artificial Sequence: Synthetic oligonucleotide
  Sense strand starting at position 1104 of SEQ ID NO: 1886166
caacuuagauaagugagua

SEQ ID NO: 2391445 - RNA, 19 nt, Artificial Sequence
  Description of Artificial Sequence: Synthetic oligonucleotide
  Antisense strand to SEQ ID NO: 2391444
uacucacuuaucuaaguug

SEQ ID NO: 2391446 - RNA, 19 nt, Artificial Sequence
  Description of Artificial Sequence: Synthetic oligonucleotide
  Sense strand starting at position 1109 of SEQ ID NO: 1886166
uagauaagugaguauccuu

SEQ ID NO: 2391447 - RNA, 19 nt, Artificial Sequence
  Description of Artificial Sequence: Synthetic oligonucleotide
  Antisense strand to SEQ ID NO: 2391446
aaggauacucacuuaucua

SEQ ID NO: 2391448 - RNA, 19 nt, Artificial Sequence
  Description of Artificial Sequence: Synthetic oligonucleotide
  Sense strand starting at position 1477 of SEQ ID NO: 1886166
acaugucaauauguggaaa

SEQ ID NO: 2391449 - RNA, 19 nt, Artificial Sequence
  Description of Artificial Sequence: Synthetic oligonucleotide
  Antisense strand to SEQ ID NO: 2391448
uuuccacauauugacaugu

SEQ ID NO: 2391450 - RNA, 19 nt, Artificial Sequence
  Description of Artificial Sequence: Synthetic oligonucleotide
  Sense strand starting at position 1637 of SEQ ID NO: 1886166
agaaacggcuacucaaaua

SEQ ID NO: 2391451 - RNA, 19 nt, Artificial Sequence
  Description of Artificial Sequence: Synthetic oligonucleotide
  Antisense strand to SEQ ID NO: 2391450
uauuugaguagccguuucu

SEQ ID NO: 2391452 - RNA, 19 nt, Artificial Sequence
  Description of Artificial Sequence: Synthetic oligonucleotide
  Sense strand starting at position 1673 of SEQ ID NO: 1886166
ccucaagauugugucaauu

SEQ ID NO: 2391453 - RNA, 19 nt, Artificial Sequence
  Description of Artificial Sequence: Synthetic oligonucleotide
  Antisense strand to SEQ ID NO: 2391452
aauugacacaaucuugagg

SEQ ID NO: 2391454 - RNA, 19 nt, Artificial Sequence
  Description of Artificial Sequence: Synthetic oligonucleotide
  Sense strand starting at position 1995 of SEQ ID NO: 1886166
cuagaaugacuccgucauc

SEQ ID NO: 2391455 - RNA, 19 nt, Artificial Sequence
  Description of Artificial Sequence: Synthetic oligonucleotide
  Antisense strand to SEQ ID NO: 2391454
gaugacggagucauucuag

SEQ ID NO: 2391456 - RNA, 19 nt, Artificial Sequence
  Description of Artificial Sequence: Synthetic oligonucleotide
  Sense strand starting at position 1996 of SEQ ID NO: 1886166
uagaaugacuccgucauca

SEQ ID NO: 2391457 - RNA, 19 nt, Artificial Sequence
  Description of Artificial Sequence: Synthetic oligonucleotide
  Antisense strand to SEQ ID NO: 2391456
ugaugacggagucauucua

SEQ ID NO: 2391458 - RNA, 19 nt, Artificial Sequence
  Description of Artificial Sequence: Synthetic oligonucleotide
  Sense strand starting at position 1998 of SEQ ID NO: 1886166
gaaugacuccgucaucaau

SEQ ID NO: 2391459 - RNA, 19 nt, Artificial Sequence
  Description of Artificial Sequence: Synthetic oligonucleotide
  Antisense strand to SEQ ID NO: 2391458
auugaugacggagucauuc

SEQ ID NO: 2391460 - RNA, 19 nt, Artificial Sequence
  Description of Artificial Sequence: Synthetic oligonucleotide
  Sense strand starting at position 2000 of SEQ ID NO: 1886166
augacuccgucaucaauaa

SEQ ID NO: 2391461 - RNA, 19 nt, Artificial Sequence
  Description of Artificial Sequence: Synthetic oligonucleotide
  Antisense strand to SEQ ID NO: 2391460
uuauugaugacggagucau

SEQ ID NO: 2391462 - RNA, 19 nt, Artificial Sequence
  Description of Artificial Sequence: Synthetic oligonucleotide
  Sense strand starting at position 2001 of SEQ ID NO: 1886166
ugacuccgucaucaauaau

SEQ ID NO: 2391463 - RNA, 19 nt, Artificial Sequence
  Description of Artificial Sequence: Synthetic oligonucleotide
  Antisense strand to SEQ ID NO: 2391462
auuauugaugacggaguca

SEQ ID NO: 2391464 - RNA, 19 nt, Artificial Sequence
  Description of Artificial Sequence: Synthetic oligonucleotide
  Sense strand starting at position 2838 of SEQ ID NO: 1886166
gaugccuagggauggaaau

SEQ ID NO: 2391465 - RNA, 19 nt, Artificial Sequence
  Description of Artificial Sequence: Synthetic oligonucleotide
  Antisense strand to SEQ ID NO: 2391464
auuuccaucccuaggcauc

SEQ ID NO: 2391466 - RNA, 19 nt, Artificial Sequence
  Description of Artificial Sequence: Synthetic oligonucleotide
  Sense strand starting at position 2871 of SEQ ID NO: 1886166
aggguauccgaaugggaca

SEQ ID NO: 2391467 - RNA, 19 nt, Artificial Sequence
  Description of Artificial Sequence: Synthetic oligonucleotide
  Antisense strand to SEQ ID NO: 2391466
ugucccauucggauacccu

SEQ ID NO: 2391468 - RNA, 19 nt, Artificial Sequence
  Description of Artificial Sequence: Synthetic oligonucleotide
  Sense strand starting at position 2900 of SEQ ID NO: 1886166
uggagaguuuguuuaacua

SEQ ID NO: 2391469 - RNA, 19 nt, Artificial Sequence
  Description of Artificial Sequence: Synthetic oligonucleotide
  Antisense strand to SEQ ID NO: 2391468
uaguuaaacaaacucucca

SEQ ID NO: 2391470 - RNA, 19 nt, Artificial Sequence
  Description of Artificial Sequence: Synthetic oligonucleotide
  Sense strand starting at position 3183 of SEQ ID NO: 1886166
ucgcuuacccuugacaacu

SEQ ID NO: 2391471 - RNA, 19 nt, Artificial Sequence
  Description of Artificial Sequence: Synthetic oligonucleotide
  Antisense strand to SEQ ID NO: 2391470
aguugucaaggguaagcga

SEQ ID NO: 2391472 - RNA, 19 nt, Artificial Sequence
  Description of Artificial Sequence: Synthetic oligonucleotide
  Sense strand starting at position 3318 of SEQ ID NO: 1886166
gaaacagauugcuuuguug

SEQ ID NO: 2391473 - RNA, 19 nt, Artificial Sequence
  Description of Artificial Sequence: Synthetic oligonucleotide
  Antisense strand to SEQ ID NO: 2391472
caacaaagcaaucuguuuc

SEQ ID NO: 2391474 - RNA, 19 nt, Artificial Sequence
  Description of Artificial Sequence: Synthetic oligonucleotide
  Sense strand starting at position 3419 of SEQ ID NO: 1886166
cguguaucaguugaaacaa

SEQ ID NO: 2391475 - RNA, 19 nt, Artificial Sequence
  Description of Artificial Sequence: Synthetic oligonucleotide
  Antisense strand to SEQ ID NO: 2391474
uuguuucaacugauacacg

SEQ ID NO: 2391476 - RNA, 19 nt, Artificial Sequence
  Description of Artificial Sequence: Synthetic oligonucleotide
  Sense strand starting at position 3603 of SEQ ID NO: 1886166
cuacaaauagaguagcuau

SEQ ID NO: 2391477 - RNA, 19 nt, Artificial Sequence
  Description of Artificial Sequence: Synthetic oligonucleotide
  Antisense strand to SEQ ID NO: 2391476
auagcuacucuauuuguag

SEQ ID NO: 2391478 - RNA, 19 nt, Artificial Sequence
  Description of Artificial Sequence: Synthetic oligonucleotide
  Sense strand starting at position 3613 of SEQ ID NO: 1886166
aguagcuaucacuacagga

SEQ ID NO: 2391479 - RNA, 19 nt, Artificial Sequence
  Description of Artificial Sequence: Synthetic oligonucleotide
  Antisense strand to SEQ ID NO: 2391478
uccuguagugauagcuacu

SEQ ID NO: 2391480 - RNA, 19 nt, Artificial Sequence
  Description of Artificial Sequence: Synthetic oligonucleotide
  Sense strand starting at position 3652 of SEQ ID NO: 1886166
ccagauacacugcgaauga

SEQ ID NO: 2391481 - RNA, 19 nt, Artificial Sequence
  Description of Artificial Sequence: Synthetic oligonucleotide
  Antisense strand to SEQ ID NO: 2391480
ucauucgcaguguaucugg

SEQ ID NO: 2391482 - RNA, 19 nt, Artificial Sequence
  Description of Artificial Sequence: Synthetic oligonucleotide
  Sense strand starting at position 3681 of SEQ ID NO: 1886166
acaaauauacuguguauug

SEQ ID NO: 2391483 - RNA, 19 nt, Artificial Sequence
  Description of Artificial Sequence: Synthetic oligonucleotide
  Antisense strand to SEQ ID NO: 2391482
caauacacaguauauuugu

SEQ ID NO: 2391484 - RNA, 19 nt, Artificial Sequence
  Description of Artificial Sequence: Synthetic oligonucleotide
  Sense strand starting at position 3696 of SEQ ID NO: 1886166
auugaaaugucguucuaga

SEQ ID NO: 2391485 - RNA, 19 nt, Artificial Sequence
  Description of Artificial Sequence: Synthetic oligonucleotide
  Antisense strand to SEQ ID NO: 2391484
ucuagaacgacauuucaau

SEQ ID NO: 2391486 - RNA, 19 nt, Artificial Sequence
  Description of Artificial Sequence: Synthetic oligonucleotide
  Sense strand starting at position 3701 of SEQ ID NO: 1886166
aaugucguucuagauaaua

SEQ ID NO: 2391487 - RNA, 19 nt, Artificial Sequence
  Description of Artificial Sequence: Synthetic oligonucleotide
  Antisense strand to SEQ ID NO: 2391486
uauuaucuagaacgacauu

SEQ ID NO: 2391488 - RNA, 19 nt, Artificial Sequence
  Description of Artificial Sequence: Synthetic oligonucleotide
  Sense strand starting at position 3715 of SEQ ID NO: 1886166
uaauaaauugagugugaag

SEQ ID NO: 2391489 - RNA, 19 nt, Artificial Sequence
  Description of Artificial Sequence: Synthetic oligonucleotide
  Antisense strand to SEQ ID NO: 2391488
cuucacacucaauuuauua

SEQ ID NO: 2391490 - RNA, 19 nt, Artificial Sequence
  Description of Artificial Sequence: Synthetic oligonucleotide
  Sense strand starting at position 3749 of SEQ ID NO: 1886166
uugcuuuauuuggugcuua

SEQ ID NO: 2391491 - RNA, 19 nt, Artificial Sequence
  Description of Artificial Sequence: Synthetic oligonucleotide
  Antisense strand to SEQ ID NO: 2391490
uaagcaccaaauaaagcaa

SEQ ID NO: 2391492 - RNA, 19 nt, Artificial Sequence
  Description of Artificial Sequence: Synthetic oligonucleotide
  Sense strand starting at position 3914 of SEQ ID NO: 1886166
gggauaauaaaguguuaug

SEQ ID NO: 2391493 - RNA, 19 nt, Artificial Sequence
  Description of Artificial Sequence: Synthetic oligonucleotide
  Antisense strand to SEQ ID NO: 2391492
cauaacacuuuauuauccc

SEQ ID NO: 2391494 - RNA, 19 nt, Artificial Sequence
  Description of Artificial Sequence: Synthetic oligonucleotide
  Sense strand starting at position 3925 of SEQ ID NO: 1886166
guguuauggccaaguggua

SEQ ID NO: 2391495 - RNA, 19 nt, Artificial Sequence
  Description of Artificial Sequence: Synthetic oligonucleotide
  Antisense strand to SEQ ID NO: 2391494
uaccacuuggccauaacac

SEQ ID NO: 2391496 - RNA, 19 nt, Artificial Sequence
  Description of Artificial Sequence: Synthetic oligonucleotide
  Sense strand starting at position 3932 of SEQ ID NO: 1886166
ggccaagugguacaagagu

SEQ ID NO: 2391497 - RNA, 19 nt, Artificial Sequence
  Description of Artificial Sequence: Synthetic oligonucleotide
  Antisense strand to SEQ ID NO: 2391496
acucuuguaccacuuggcc

SEQ ID NO: 2391498 - RNA, 19 nt, Artificial Sequence
  Description of Artificial Sequence: Synthetic oligonucleotide
  Sense strand starting at position 3955 of SEQ ID NO: 1886166
agcgguacuguugaaacau

SEQ ID NO: 2391499 - RNA, 19 nt, Artificial Sequence
  Description of Artificial Sequence: Synthetic oligonucleotide
  Antisense strand to SEQ ID NO: 2391498
auguuucaacaguaccgcu

SEQ ID NO: 2391500 - RNA, 19 nt, Artificial Sequence
  Description of Artificial Sequence: Synthetic oligonucleotide
  Sense strand starting at position 41 of SEQ ID NO: 1886167
gaaagaucccauggcagca

SEQ ID NO: 2391501 - RNA, 19 nt, Artificial Sequence
  Description of Artificial Sequence: Synthetic oligonucleotide
  Antisense strand to SEQ ID NO: 2391500
ugcugccaugggaucuuuc

SEQ ID NO: 2391502 - RNA, 19 nt, Artificial Sequence
  Description of Artificial Sequence: Synthetic oligonucleotide
  Sense strand starting at position 708 of SEQ ID NO: 1886167
cacagaugccuacacguau

SEQ ID NO: 2391503 - RNA, 19 nt, Artificial Sequence
  Description of Artificial Sequence: Synthetic oligonucleotide
  Antisense strand to SEQ ID NO: 2391502
auacguguaggcaucugug

SEQ ID NO: 2391504 - RNA, 19 nt, Artificial Sequence
  Description of Artificial Sequence: Synthetic oligonucleotide
  Sense strand starting at position 760 of SEQ ID NO: 1886167
uguacucacccauguauac

SEQ ID NO: 2391505 - RNA, 19 nt, Artificial Sequence
  Description of Artificial Sequence: Synthetic oligonucleotide
  Antisense strand to SEQ ID NO: 2391504
guauacaugggugaguaca

SEQ ID NO: 2391506 - RNA, 19 nt, Artificial Sequence
  Description of Artificial Sequence: Synthetic oligonucleotide
  Sense strand starting at position 925 of SEQ ID NO: 1886167
gucauaguauggguagguu

SEQ ID NO: 2391507 - RNA, 19 nt, Artificial Sequence
  Description of Artificial Sequence: Synthetic oligonucleotide
  Antisense strand to SEQ ID NO: 2391506
aaccuacccauacuaugac

SEQ ID NO: 2391508 - RNA, 19 nt, Artificial Sequence
  Description of Artificial Sequence: Synthetic oligonucleotide
  Sense strand starting at position 937 of SEQ ID NO: 1886167
guagguuucccgcugcaau

SEQ ID NO: 2391509 - RNA, 19 nt, Artificial Sequence
  Description of Artificial Sequence: Synthetic oligonucleotide
  Antisense strand to SEQ ID NO: 2391508
auugcagcgggaaaccuac

SEQ ID NO: 2391510 - RNA, 19 nt, Artificial Sequence
  Description of Artificial Sequence: Synthetic oligonucleotide
  Sense strand starting at position 1267 of SEQ ID NO: 1886167
cugugagagcugugcuaau

SEQ ID NO: 2391511 - RNA, 19 nt, Artificial Sequence
  Description of Artificial Sequence: Synthetic oligonucleotide
  Antisense strand to SEQ ID NO: 2391510
auuagcacagcucucacag

SEQ ID NO: 2391512 - RNA, 19 nt, Artificial Sequence
  Description of Artificial Sequence: Synthetic oligonucleotide
  Sense strand starting at position 1282 of SEQ ID NO: 1886167
uaauguugugcuugagaag

SEQ ID NO: 2391513 - RNA, 19 nt, Artificial Sequence
  Description of Artificial Sequence: Synthetic oligonucleotide
  Antisense strand to SEQ ID NO: 2391512
cuucucaagcacaacauua

SEQ ID NO: 2391514 - RNA, 19 nt, Artificial Sequence
  Description of Artificial Sequence: Synthetic oligonucleotide
  Sense strand starting at position 1283 of SEQ ID NO: 1886167
aauguugugcuugagaaga

SEQ ID NO: 2391515 - RNA, 19 nt, Artificial Sequence
  Description of Artificial Sequence: Synthetic oligonucleotide
  Antisense strand to SEQ ID NO: 2391514
ucuucucaagcacaacauu

SEQ ID NO: 2391516 - RNA, 19 nt, Artificial Sequence
  Description of Artificial Sequence: Synthetic oligonucleotide
  Sense strand starting at position 1339 of SEQ ID NO: 1886167
uugcuugcucccugacaga

SEQ ID NO: 2391517 - RNA, 19 nt, Artificial Sequence
  Description of Artificial Sequence: Synthetic oligonucleotide
  Antisense strand to SEQ ID NO: 2391516
ucugucagggagcaagcaa

SEQ ID NO: 2391518 - RNA, 19 nt, Artificial Sequence
  Description of Artificial Sequence: Synthetic oligonucleotide
  Sense strand starting at position 1431 of SEQ ID NO: 1886167
ugacgagucaccgagcaga

SEQ ID NO: 2391519 - RNA, 19 nt, Artificial Sequence
  Description of Artificial Sequence: Synthetic oligonucleotide
  Antisense strand to SEQ ID NO: 2391518
ucugcucggugacucguca

SEQ ID NO: 2391520 - RNA, 19 nt, Artificial Sequence
  Description of Artificial Sequence: Synthetic oligonucleotide
  Sense strand starting at position 1660 of SEQ ID NO: 1886167
ucugccaggucaucuagaa

SEQ ID NO: 2391521 - RNA, 19 nt, Artificial Sequence
  Description of Artificial Sequence: Synthetic oligonucleotide
  Antisense strand to SEQ ID NO: 2391520
uucuagaugaccuggcaga

SEQ ID NO: 2391522 - RNA, 19 nt, Artificial Sequence
  Description of Artificial Sequence: Synthetic oligonucleotide
  Sense strand starting at position 1766 of SEQ ID NO: 1886167
ccggguuucccagguaauc

SEQ ID NO: 2391523 - RNA, 19 nt, Artificial Sequence
  Description of Artificial Sequence: Synthetic oligonucleotide
  Antisense strand to SEQ ID NO: 2391522
gauuaccugggaaacccgg

SEQ ID NO: 2391524 - RNA, 19 nt, Artificial Sequence
  Description of Artificial Sequence: Synthetic oligonucleotide
  Sense strand starting at position 1768 of SEQ ID NO: 1886167
ggguuucccagguaaucuc

SEQ ID NO: 2391525 - RNA, 19 nt, Artificial Sequence
  Description of Artificial Sequence: Synthetic oligonucleotide
  Antisense strand to SEQ ID NO: 2391524
gagauuaccugggaaaccc

SEQ ID NO: 2391526 - RNA, 19 nt, Artificial Sequence
  Description of Artificial Sequence: Synthetic oligonucleotide
  Sense strand starting at position 1778 of SEQ ID NO: 1886167
gguaaucucagguacguua

SEQ ID NO: 2391527 - RNA, 19 nt, Artificial Sequence
  Description of Artificial Sequence: Synthetic oligonucleotide
  Antisense strand to SEQ ID NO: 2391526
uaacguaccugagauuacc

SEQ ID NO: 2391528 - RNA, 19 nt, Artificial Sequence
  Description of Artificial Sequence: Synthetic oligonucleotide
  Sense strand starting at position 1866 of SEQ ID NO: 1886167
gcaucuugucugccagcca

SEQ ID NO: 2391529 - RNA, 19 nt, Artificial Sequence
  Description of Artificial Sequence: Synthetic oligonucleotide
  Antisense strand to SEQ ID NO: 2391528
uggcuggcagacaagaugc

SEQ ID NO: 2391530 - RNA, 19 nt, Artificial Sequence
  Description of Artificial Sequence: Synthetic oligonucleotide
  Sense strand starting at position 2013 of SEQ ID NO: 1886167
cugccugcucugcagagaa

SEQ ID NO: 2391531 - RNA, 19 nt, Artificial Sequence
  Description of Artificial Sequence: Synthetic oligonucleotide
  Antisense strand to SEQ ID NO: 2391530
uucucugcagagcaggcag

SEQ ID NO: 2391532 - RNA, 19 nt, Artificial Sequence
  Description of Artificial Sequence: Synthetic oligonucleotide
  Sense strand starting at position 2015 of SEQ ID NO: 1886167
gccugcucugcagagaacu

SEQ ID NO: 2391533 - RNA, 19 nt, Artificial Sequence
  Description of Artificial Sequence: Synthetic oligonucleotide
  Antisense strand to SEQ ID NO: 2391532
aguucucugcagagcaggc

SEQ ID NO: 2391534 - RNA, 19 nt, Artificial Sequence
  Description of Artificial Sequence: Synthetic oligonucleotide
  Sense strand starting at position 2057 of SEQ ID NO: 1886167
uggaguuugacaugcucca

SEQ ID NO: 2391535 - RNA, 19 nt, Artificial Sequence
  Description of Artificial Sequence: Synthetic oligonucleotide
  Antisense strand to SEQ ID NO: 2391534
uggagcaugucaaacucca

SEQ ID NO: 2391536 - RNA, 19 nt, Artificial Sequence
  Description of Artificial Sequence: Synthetic oligonucleotide
  Sense strand starting at position 2181 of SEQ ID NO: 1886167
ugguuaucacugggcuguu

SEQ ID NO: 2391537 - RNA, 19 nt, Artificial Sequence
  Description of Artificial Sequence: Synthetic oligonucleotide
  Antisense strand to SEQ ID NO: 2391536
aacagcccagugauaacca

SEQ ID NO: 2391538 - RNA, 19 nt, Artificial Sequence
  Description of Artificial Sequence: Synthetic oligonucleotide
  Sense strand starting at position 2182 of SEQ ID NO: 1886167
gguuaucacugggcuguuu

SEQ ID NO: 2391539 - RNA, 19 nt, Artificial Sequence
  Description of Artificial Sequence: Synthetic oligonucleotide
  Antisense strand to SEQ ID NO: 2391538
aaacagcccagugauaacc

SEQ ID NO: 2391540 - RNA, 19 nt, Artificial Sequence
  Description of Artificial Sequence: Synthetic oligonucleotide
  Sense strand starting at position 2292 of SEQ ID NO: 1886167
ggaagagucuccuccagcu

SEQ ID NO: 2391541 - RNA, 19 nt, Artificial Sequence
  Description of Artificial Sequence: Synthetic oligonucleotide
  Antisense strand to SEQ ID NO: 2391540
agcuggaggagacucuucc

SEQ ID NO: 2391542 - RNA, 19 nt, Artificial Sequence
  Description of Artificial Sequence: Synthetic oligonucleotide
  Sense strand starting at position 2298 of SEQ ID NO: 1886167
gucuccuccagcuguggaa

SEQ ID NO: 2391543 - RNA, 19 nt, Artificial Sequence
  Description of Artificial Sequence: Synthetic oligonucleotide
  Antisense strand to SEQ ID NO: 2391542
uuccacagcuggaggagac

SEQ ID NO: 2391544 - RNA, 19 nt, Artificial Sequence
  Description of Artificial Sequence: Synthetic oligonucleotide
  Sense strand starting at position 2367 of SEQ ID NO: 1886167
agcugaagccuagaaaucu

SEQ ID NO: 2391545 - RNA, 19 nt, Artificial Sequence
  Description of Artificial Sequence: Synthetic oligonucleotide
  Antisense strand to SEQ ID NO: 2391544
agauuucuaggcuucagcu

SEQ ID NO: 2391546 - RNA, 19 nt, Artificial Sequence
  Description of Artificial Sequence: Synthetic oligonucleotide
  Sense strand starting at position 2413 of SEQ ID NO: 1886167
agauguuucucucuuuaua

SEQ ID NO: 2391547 - RNA, 19 nt, Artificial Sequence
  Description of Artificial Sequence: Synthetic oligonucleotide
  Antisense strand to SEQ ID NO: 2391546
uauaaagagagaaacaucu

SEQ ID NO: 2391548 - RNA, 19 nt, Artificial Sequence
  Description of Artificial Sequence: Synthetic oligonucleotide
  Sense strand starting at position 3057 of SEQ ID NO: 1886167
uuagcauucucuuuggcca

SEQ ID NO: 2391549 - RNA, 19 nt, Artificial Sequence
  Description of Artificial Sequence: Synthetic oligonucleotide
  Antisense strand to SEQ ID NO: 2391548
uggccaaagagaaugcuaa

SEQ ID NO: 2391550 - RNA, 19 nt, Artificial Sequence
  Description of Artificial Sequence: Synthetic oligonucleotide
  Sense strand starting at position 3091 of SEQ ID NO: 1886167
ugcagauggaugugauguu

SEQ ID NO: 2391551 - RNA, 19 nt, Artificial Sequence
  Description of Artificial Sequence: Synthetic oligonucleotide
  Antisense strand to SEQ ID NO: 2391550
aacaucacauccaucugca

SEQ ID NO: 2391552 - RNA, 19 nt, Artificial Sequence
  Description of Artificial Sequence: Synthetic oligonucleotide
  Sense strand starting at position 3395 of SEQ ID NO: 1886167
gccuguuucugcuuuauuu

SEQ ID NO: 2391553 - RNA, 19 nt, Artificial Sequence
  Description of Artificial Sequence: Synthetic oligonucleotide
  Antisense strand to SEQ ID NO: 2391552
aaauaaagcagaaacaggc

SEQ ID NO: 2391554 - RNA, 19 nt, Artificial Sequence
  Description of Artificial Sequence: Synthetic oligonucleotide
  Sense strand starting at position 3399 of SEQ ID NO: 1886167
guuucugcuuuauuuggau

SEQ ID NO: 2391555 - RNA, 19 nt, Artificial Sequence
  Description of Artificial Sequence: Synthetic oligonucleotide
  Antisense strand to SEQ ID NO: 2391554
auccaaauaaagcagaaac

SEQ ID NO: 2391556 - RNA, 19 nt, Artificial Sequence
  Description of Artificial Sequence: Synthetic oligonucleotide
  Sense strand starting at position 3433 of SEQ ID NO: 1886167
uggccugggcucuaagaaa

SEQ ID NO: 2391557 - RNA, 19 nt, Artificial Sequence
  Description of Artificial Sequence: Synthetic oligonucleotide
  Antisense strand to SEQ ID NO: 2391556
uuucuuagagcccaggcca

SEQ ID NO: 2391558 - RNA, 19 nt, Artificial Sequence
  Description of Artificial Sequence: Synthetic oligonucleotide
  Sense strand starting at position 3440 of SEQ ID NO: 1886167
ggcucuaagaaaugagagu

SEQ ID NO: 2391559 - RNA, 19 nt, Artificial Sequence
  Description of Artificial Sequence: Synthetic oligonucleotide
  Antisense strand to SEQ ID NO: 2391558
acucucauuucuuagagcc

SEQ ID NO: 2391560 - RNA, 19 nt, Artificial Sequence
  Description of Artificial Sequence: Synthetic oligonucleotide
  Sense strand starting at position 3465 of SEQ ID NO: 1886167
guuggugauagcugugaau

SEQ ID NO: 2391561 - RNA, 19 nt, Artificial Sequence
  Description of Artificial Sequence: Synthetic oligonucleotide
  Antisense strand to SEQ ID NO: 2391560
auucacagcuaucaccaac

SEQ ID NO: 2391562 - RNA, 19 nt, Artificial Sequence
  Description of Artificial Sequence: Synthetic oligonucleotide
  Sense strand starting at position 3467 of SEQ ID NO: 1886167
uggugauagcugugaaugu

SEQ ID NO: 2391563 - RNA, 19 nt, Artificial Sequence
  Description of Artificial Sequence: Synthetic oligonucleotide
  Antisense strand to SEQ ID NO: 2391562
acauucacagcuaucacca

SEQ ID NO: 2391564 - RNA, 19 nt, Artificial Sequence
  Description of Artificial Sequence: Synthetic oligonucleotide
  Sense strand starting at position 3556 of SEQ ID NO: 1886167
gcucuagcuccugacugau

SEQ ID NO: 2391565 - RNA, 19 nt, Artificial Sequence
  Description of Artificial Sequence: Synthetic oligonucleotide
  Antisense strand to SEQ ID NO: 2391564
aucagucaggagcuagagc

SEQ ID NO: 2391566 - RNA, 19 nt, Artificial Sequence
  Description of Artificial Sequence: Synthetic oligonucleotide
  Sense strand starting at position 3832 of SEQ ID NO: 1886167
cagugugucccgcagaauu

SEQ ID NO: 2391567 - RNA, 19 nt, Artificial Sequence
  Description of Artificial Sequence: Synthetic oligonucleotide
  Antisense strand to SEQ ID NO: 2391566
aauucugcgggacacacug

SEQ ID NO: 2391568 - RNA, 19 nt, Artificial Sequence
  Description of Artificial Sequence: Synthetic oligonucleotide
  Sense strand starting at position 3842 of SEQ ID NO: 1886167
cgcagaauucuguaaugau

SEQ ID NO: 2391569 - RNA, 19 nt, Artificial Sequence
  Description of Artificial Sequence: Synthetic oligonucleotide
  Antisense strand to SEQ ID NO: 2391568
aucauuacagaauucugcg

SEQ ID NO: 2391570 - RNA, 19 nt, Artificial Sequence
  Description of Artificial Sequence: Synthetic oligonucleotide
  Sense strand starting at position 3850 of SEQ ID NO: 1886167
ucuguaaugauggaugugu

SEQ ID NO: 2391571 - RNA, 19 nt, Artificial Sequence
  Description of Artificial Sequence: Synthetic oligonucleotide
  Antisense strand to SEQ ID NO: 2391570
acacauccaucauuacaga

SEQ ID NO: 2391572 - RNA, 19 nt, Artificial Sequence
  Description of Artificial Sequence: Synthetic oligonucleotide
  Sense strand starting at position 3861 of SEQ ID NO: 1886167
ggauguguuccguaucugu

SEQ ID NO: 2391573 - RNA, 19 nt, Artificial Sequence
  Description of Artificial Sequence: Synthetic oligonucleotide
  Antisense strand to SEQ ID NO: 2391572
acagauacggaacacaucc

SEQ ID NO: 2391574 - RNA, 19 nt, Artificial Sequence
  Description of Artificial Sequence: Synthetic oligonucleotide
  Sense strand starting at position 3916 of SEQ ID NO: 1886167
ccacguggcauuuguaaug

SEQ ID NO: 2391575 - RNA, 19 nt, Artificial Sequence
  Description of Artificial Sequence: Synthetic oligonucleotide
  Antisense strand to SEQ ID NO: 2391574
cauuacaaaugccacgugg

SEQ ID NO: 2391576 - RNA, 19 nt, Artificial Sequence
  Description of Artificial Sequence: Synthetic oligonucleotide
  Sense strand starting at position 3959 of SEQ ID NO: 1886167
ggucacuaauuggcuuauu

SEQ ID NO: 2391577 - RNA, 19 nt, Artificial Sequence
  Description of Artificial Sequence: Synthetic oligonucleotide
  Antisense strand to SEQ ID NO: 2391576
aauaagccaauuagugacc

SEQ ID NO: 2391578 - RNA, 19 nt, Artificial Sequence
  Description of Artificial Sequence: Synthetic oligonucleotide
  Sense strand starting at position 3968 of SEQ ID NO: 1886167
uuggcuuauucuucuaagu

SEQ ID NO: 2391579 - RNA, 19 nt, Artificial Sequence
  Description of Artificial Sequence: Synthetic oligonucleotide
  Antisense strand to SEQ ID NO: 2391578
acuuagaagaauaagccaa

SEQ ID NO: 2391580 - RNA, 19 nt, Artificial Sequence
  Description of Artificial Sequence: Synthetic oligonucleotide
  Sense strand starting at position 785 of SEQ ID NO: 1886169
uuacauauauguggguauu

SEQ ID NO: 2391581 - RNA, 19 nt, Artificial Sequence
  Description of Artificial Sequence: Synthetic oligonucleotide
  Antisense strand to SEQ ID NO: 2391580
aauacccacauauauguaa

SEQ ID NO: 2391582 - RNA, 19 nt, Artificial Sequence
  Description of Artificial Sequence: Synthetic oligonucleotide
  Sense strand starting at position 795 of SEQ ID NO: 1886169
guggguauuucuggauuuc

SEQ ID NO: 2391583 - RNA, 19 nt, Artificial Sequence
  Description of Artificial Sequence: Synthetic oligonucleotide
  Antisense strand to SEQ ID NO: 2391582
gaaauccagaaauacccac

SEQ ID NO: 2391584 - RNA, 19 nt, Artificial Sequence
  Description of Artificial Sequence: Synthetic oligonucleotide
  Sense strand starting at position 785 of SEQ ID NO: 1886171
uuacauauauguggguauu

SEQ ID NO: 2391585 - RNA, 19 nt, Artificial Sequence
  Description of Artificial Sequence: Synthetic oligonucleotide
  Antisense strand to SEQ ID NO: 2391584
aauacccacauauauguaa

SEQ ID NO: 2391586 - RNA, 19 nt, Artificial Sequence
  Description of Artificial Sequence: Synthetic oligonucleotide
  Sense strand starting at position 795 of SEQ ID NO: 1886171
guggguauuucuggauuuc

SEQ ID NO: 2391587 - RNA, 19 nt, Artificial Sequence
  Description of Artificial Sequence: Synthetic oligonucleotide
  Antisense strand to SEQ ID NO: 2391586
gaaauccagaaauacccac

SEQ ID NO: 2391588 - RNA, 19 nt, Artificial Sequence
  Description of Artificial Sequence: Synthetic oligonucleotide
  Sense strand starting at position 3548 of SEQ ID NO: 1886172
ucaugaaacugguaauuua

SEQ ID NO: 2391589 - RNA, 19 nt, Artificial Sequence
  Description of Artificial Sequence: Synthetic oligonucleotide
  Antisense strand to SEQ ID NO: 2391588
uaaauuaccaguuucauga

SEQ ID NO: 2391590 - RNA, 19 nt, Artificial Sequence
  Description of Artificial Sequence: Synthetic oligonucleotide
  Sense strand starting at position 3555 of SEQ ID NO: 1886172
acugguaauuuaugacauc

SEQ ID NO: 2391591 - RNA, 19 nt, Artificial Sequence
  Description of Artificial Sequence: Synthetic oligonucleotide
  Antisense strand to SEQ ID NO: 2391590
gaugucauaaauuaccagu

SEQ ID NO: 2391592 - RNA, 19 nt, Artificial Sequence
  Description of Artificial Sequence: Synthetic oligonucleotide
  Sense strand starting at position 39 of SEQ ID NO: 1886173
gcuugugauguuuaagucu

SEQ ID NO: 2391593 - RNA, 19 nt, Artificial Sequence
  Description of Artificial Sequence: Synthetic oligonucleotide
  Antisense strand to SEQ ID NO: 2391592
agacuuaaacaucacaagc

SEQ ID NO: 2391594 - RNA, 19 nt, Artificial Sequence
  Description of Artificial Sequence: Synthetic oligonucleotide
  Sense strand starting at position 46 of SEQ ID NO: 1886173
auguuuaagucuccucuga

SEQ ID NO: 2391595 - RNA, 19 nt, Artificial Sequence
  Description of Artificial Sequence: Synthetic oligonucleotide
  Antisense strand to SEQ ID NO: 2391594
ucagaggagacuuaaacau

SEQ ID NO: 2391596 - RNA, 19 nt, Artificial Sequence
  Description of Artificial Sequence: Synthetic oligonucleotide
  Sense strand starting at position 48 of SEQ ID NO: 1886173
guuuaagucuccucugaug

SEQ ID NO: 2391597 - RNA, 19 nt, Artificial Sequence
  Description of Artificial Sequence: Synthetic oligonucleotide
  Antisense strand to SEQ ID NO: 2391596
caucagaggagacuuaaac

SEQ ID NO: 2391598 - RNA, 19 nt, Artificial Sequence
  Description of Artificial Sequence: Synthetic oligonucleotide
  Sense strand starting at position 50 of SEQ ID NO: 1886173
uuaagucuccucugaugag

SEQ ID NO: 2391599 - RNA, 19 nt, Artificial Sequence
  Description of Artificial Sequence: Synthetic oligonucleotide
  Antisense strand to SEQ ID NO: 2391598
cucaucagaggagacuuaa

SEQ ID NO: 2391600 - RNA, 19 nt, Artificial Sequence
  Description of Artificial Sequence: Synthetic oligonucleotide
  Sense strand starting at position 54 of SEQ ID NO: 1886173
gucuccucugaugaguuua

SEQ ID NO: 2391601 - RNA, 19 nt, Artificial Sequence
  Description of Artificial Sequence: Synthetic oligonucleotide
  Antisense strand to SEQ ID NO: 2391600
uaaacucaucagaggagac

SEQ ID NO: 2391602 - RNA, 19 nt, Artificial Sequence
  Description of Artificial Sequence: Synthetic oligonucleotide
  Sense strand starting at position 56 of SEQ ID NO: 1886173
cuccucugaugaguuuaau

SEQ ID NO: 2391603 - RNA, 19 nt, Artificial Sequence
  Description of Artificial Sequence: Synthetic oligonucleotide
  Antisense strand to SEQ ID NO: 2391602
auuaaacucaucagaggag

SEQ ID NO: 2391604 - RNA, 19 nt, Artificial Sequence
  Description of Artificial Sequence: Synthetic oligonucleotide
  Sense strand starting at position 67 of SEQ ID NO: 1886173
aguuuaauucagggcagag

SEQ ID NO: 2391605 - RNA, 19 nt, Artificial Sequence
  Description of Artificial Sequence: Synthetic oligonucleotide
  Antisense strand to SEQ ID NO: 2391604
cucugcccugaauuaaacu

SEQ ID NO: 2391606 - RNA, 19 nt, Artificial Sequence
  Description of Artificial Sequence: Synthetic oligonucleotide
  Sense strand starting at position 295 of SEQ ID NO: 1886173
gccugaauccuuuagccua

SEQ ID NO: 2391607 - RNA, 19 nt, Artificial Sequence
  Description of Artificial Sequence: Synthetic oligonucleotide
  Antisense strand to SEQ ID NO: 2391606
uaggcuaaaggauucaggc

SEQ ID NO: 2391608 - RNA, 19 nt, Artificial Sequence
  Description of Artificial Sequence: Synthetic oligonucleotide
  Sense strand starting at position 343 of SEQ ID NO: 1886173
aggcuucugcuccagcuua

SEQ ID NO: 2391609 - RNA, 19 nt, Artificial Sequence
  Description of Artificial Sequence: Synthetic oligonucleotide
  Antisense strand to SEQ ID NO: 2391608
uaagcuggagcagaagccu

SEQ ID NO: 2391610 - RNA, 19 nt, Artificial Sequence
  Description of Artificial Sequence: Synthetic oligonucleotide
  Sense strand starting at position 646 of SEQ ID NO: 1886173
guguguagcuauuuacaua

SEQ ID NO: 2391611 - RNA, 19 nt, Artificial Sequence
  Description of Artificial Sequence: Synthetic oligonucleotide
  Antisense strand to SEQ ID NO: 2391610
uauguaaauagcuacacac

SEQ ID NO: 2391612 - RNA, 19 nt, Artificial Sequence
  Description of Artificial Sequence: Synthetic oligonucleotide
  Sense strand starting at position 1219 of SEQ ID NO: 1886173
gcggauacugagggauaaa

SEQ ID NO: 2391613 - RNA, 19 nt, Artificial Sequence
  Description of Artificial Sequence: Synthetic oligonucleotide
  Antisense strand to SEQ ID NO: 2391612
uuuaucccucaguauccgc

SEQ ID NO: 2391614 - RNA, 19 nt, Artificial Sequence
  Description of Artificial Sequence: Synthetic oligonucleotide
  Sense strand starting at position 1309 of SEQ ID NO: 1886173
cacugugagagauguggaa

SEQ ID NO: 2391615 - RNA, 19 nt, Artificial Sequence
  Description of Artificial Sequence: Synthetic oligonucleotide
  Antisense strand to SEQ ID NO: 2391614
uuccacaucucucacagug

SEQ ID NO: 2391616 - RNA, 19 nt, Artificial Sequence
  Description of Artificial Sequence: Synthetic oligonucleotide
  Sense strand starting at position 1311 of SEQ ID NO: 1886173
cugugagagauguggaaac

SEQ ID NO: 2391617 - RNA, 19 nt, Artificial Sequence
  Description of Artificial Sequence: Synthetic oligonucleotide
  Antisense strand to SEQ ID NO: 2391616
guuuccacaucucucacag

SEQ ID NO: 2391618 - RNA, 19 nt, Artificial Sequence
  Description of Artificial Sequence: Synthetic oligonucleotide
  Sense strand starting at position 1432 of SEQ ID NO: 1886173
cugacaagauuuggccuaa

SEQ ID NO: 2391619 - RNA, 19 nt, Artificial Sequence
  Description of Artificial Sequence: Synthetic oligonucleotide
  Antisense strand to SEQ ID NO: 2391618
uuaggccaaaucuugucag

SEQ ID NO: 2391620 - RNA, 19 nt, Artificial Sequence
  Description of Artificial Sequence: Synthetic oligonucleotide
  Sense strand starting at position 1564 of SEQ ID NO: 1886173
ccggguaagcguucagugu

SEQ ID NO: 2391621 - RNA, 19 nt, Artificial Sequence
  Description of Artificial Sequence: Synthetic oligonucleotide
  Antisense strand to SEQ ID NO: 2391620
acacugaacgcuuacccgg

SEQ ID NO: 2391622 - RNA, 19 nt, Artificial Sequence
  Description of Artificial Sequence: Synthetic oligonucleotide
  Sense strand starting at position 1628 of SEQ ID NO: 1886173
gacaaauaaucgcagagca

SEQ ID NO: 2391623 - RNA, 19 nt, Artificial Sequence
  Description of Artificial Sequence: Synthetic oligonucleotide
  Antisense strand to SEQ ID NO: 2391622
ugcucugcgauuauuuguc

SEQ ID NO: 2391624 - RNA, 19 nt, Artificial Sequence
  Description of Artificial Sequence: Synthetic oligonucleotide
  Sense strand starting at position 2119 of SEQ ID NO: 1886173
uggcccuguucuuuguauu

SEQ ID NO: 2391625 - RNA, 19 nt, Artificial Sequence
  Description of Artificial Sequence: Synthetic oligonucleotide
  Antisense strand to SEQ ID NO: 2391624
aauacaaagaacagggcca

SEQ ID NO: 2391626 - RNA, 19 nt, Artificial Sequence
  Description of Artificial Sequence: Synthetic oligonucleotide
  Sense strand starting at position 2130 of SEQ ID NO: 1886173
uuuguauugcugggacucu

SEQ ID NO: 2391627 - RNA, 19 nt, Artificial Sequence
  Description of Artificial Sequence: Synthetic oligonucleotide
  Antisense strand to SEQ ID NO: 2391626
agagucccagcaauacaaa

SEQ ID NO: 2391628 - RNA, 19 nt, Artificial Sequence
  Description of Artificial Sequence: Synthetic oligonucleotide
  Sense strand starting at position 2333 of SEQ ID NO: 1886173
cccacuguuggcugaguga

SEQ ID NO: 2391629 - RNA, 19 nt, Artificial Sequence
  Description of Artificial Sequence: Synthetic oligonucleotide
  Antisense strand to SEQ ID NO: 2391628
ucacucagccaacaguggg

SEQ ID NO: 2391630 - RNA, 19 nt, Artificial Sequence
  Description of Artificial Sequence: Synthetic oligonucleotide
  Sense strand starting at position 2394 of SEQ ID NO: 1886173
uuuccuuaaugucaggaua

SEQ ID NO: 2391631 - RNA, 19 nt, Artificial Sequence
  Description of Artificial Sequence: Synthetic oligonucleotide
  Antisense strand to SEQ ID NO: 2391630
uauccugacauuaaggaaa

SEQ ID NO: 2391632 - RNA, 19 nt, Artificial Sequence
  Description of Artificial Sequence: Synthetic oligonucleotide
  Sense strand starting at position 2397 of SEQ ID NO: 1886173
ccuuaaugucaggauaugu

SEQ ID NO: 2391633 - RNA, 19 nt, Artificial Sequence
  Description of Artificial Sequence: Synthetic oligonucleotide
  Antisense strand to SEQ ID NO: 2391632
acauauccugacauuaagg

SEQ ID NO: 2391634 - RNA, 19 nt, Artificial Sequence
  Description of Artificial Sequence: Synthetic oligonucleotide
  Sense strand starting at position 2402 of SEQ ID NO: 1886173
augucaggauauguuaaua

SEQ ID NO: 2391635 - RNA, 19 nt, Artificial Sequence
  Description of Artificial Sequence: Synthetic oligonucleotide
  Antisense strand to SEQ ID NO: 2391634
uauuaacauauccugacau

SEQ ID NO: 2391636 - RNA, 19 nt, Artificial Sequence
  Description of Artificial Sequence: Synthetic oligonucleotide
  Sense strand starting at position 2537 of SEQ ID NO: 1886173
ucaucacaugcauguugua

SEQ ID NO: 2391637 - RNA, 19 nt, Artificial Sequence
  Description of Artificial Sequence: Synthetic oligonucleotide
  Antisense strand to SEQ ID NO: 2391636
uacaacaugcaugugauga

SEQ ID NO: 2391638 - RNA, 19 nt, Artificial Sequence
  Description of Artificial Sequence: Synthetic oligonucleotide
  Sense strand starting at position 2546 of SEQ ID NO: 1886173
gcauguuguagccugcuau

SEQ ID NO: 2391639 - RNA, 19 nt, Artificial Sequence
  Description of Artificial Sequence: Synthetic oligonucleotide
  Antisense strand to SEQ ID NO: 2391638
auagcaggcuacaacaugc

SEQ ID NO: 2391640 - RNA, 19 nt, Artificial Sequence
  Description of Artificial Sequence: Synthetic oligonucleotide
  Sense strand starting at position 2549 of SEQ ID NO: 1886173
uguuguagccugcuaucuu

SEQ ID NO: 2391641 - RNA, 19 nt, Artificial Sequence
  Description of Artificial Sequence: Synthetic oligonucleotide
  Antisense strand to SEQ ID NO: 2391640
aagauagcaggcuacaaca

SEQ ID NO: 2391642 - RNA, 19 nt, Artificial Sequence
  Description of Artificial Sequence: Synthetic oligonucleotide
  Sense strand starting at position 2704 of SEQ ID NO: 1886173
uaucucagccuauggagua

SEQ ID NO: 2391643 - RNA, 19 nt, Artificial Sequence
  Description of Artificial Sequence: Synthetic oligonucleotide
  Antisense strand to SEQ ID NO: 2391642
uacuccauaggcugagaua

SEQ ID NO: 2391644 - RNA, 19 nt, Artificial Sequence
  Description of Artificial Sequence: Synthetic oligonucleotide
  Sense strand starting at position 2907 of SEQ ID NO: 1886173
gcuggaaauaauggugauc

SEQ ID NO: 2391645 - RNA, 19 nt, Artificial Sequence
  Description of Artificial Sequence: Synthetic oligonucleotide
  Antisense strand to SEQ ID NO: 2391644
gaucaccauuauuuccagc

SEQ ID NO: 2391646 - RNA, 19 nt, Artificial Sequence
  Description of Artificial Sequence: Synthetic oligonucleotide
  Sense strand starting at position 2909 of SEQ ID NO: 1886173
uggaaauaauggugaucuc

SEQ ID NO: 2391647 - RNA, 19 nt, Artificial Sequence
  Description of Artificial Sequence: Synthetic oligonucleotide
  Antisense strand to SEQ ID NO: 2391646
gagaucaccauuauuucca

SEQ ID NO: 2391648 - RNA, 19 nt, Artificial Sequence
  Description of Artificial Sequence: Synthetic oligonucleotide
  Sense strand starting at position 2937 of SEQ ID NO: 1886173
guguuguuuguguggaagu

SEQ ID NO: 2391649 - RNA, 19 nt, Artificial Sequence
  Description of Artificial Sequence: Synthetic oligonucleotide
  Antisense strand to SEQ ID NO: 2391648
acuuccacacaaacaacac

SEQ ID NO: 2391650 - RNA, 19 nt, Artificial Sequence
  Description of Artificial Sequence: Synthetic oligonucleotide
  Sense strand starting at position 3040 of SEQ ID NO: 1886173
guuggcagguccuuaguaa

SEQ ID NO: 2391651 - RNA, 19 nt, Artificial Sequence
  Description of Artificial Sequence: Synthetic oligonucleotide
  Antisense strand to SEQ ID NO: 2391650
uuacuaaggaccugccaac

SEQ ID NO: 2391652 - RNA, 19 nt, Artificial Sequence
  Description of Artificial Sequence: Synthetic oligonucleotide
  Sense strand starting at position 3041 of SEQ ID NO: 1886173
uuggcagguccuuaguaaa

SEQ ID NO: 2391653 - RNA, 19 nt, Artificial Sequence
  Description of Artificial Sequence: Synthetic oligonucleotide
  Antisense strand to SEQ ID NO: 2391652
uuuacuaaggaccugccaa

SEQ ID NO: 2391654 - RNA, 19 nt, Artificial Sequence
  Description of Artificial Sequence: Synthetic oligonucleotide
  Sense strand starting at position 3065 of SEQ ID NO: 1886173
gcucguggcacuuaauauu

SEQ ID NO: 2391655 - RNA, 19 nt, Artificial Sequence
  Description of Artificial Sequence: Synthetic oligonucleotide
  Antisense strand to SEQ ID NO: 2391654
aauauuaagugccacgagc

SEQ ID NO: 2391656 - RNA, 19 nt, Artificial Sequence
  Description of Artificial Sequence: Synthetic oligonucleotide
  Sense strand starting at position 3119 of SEQ ID NO: 1886173
agagauaaaucagaugcgu

SEQ ID NO: 2391657 - RNA, 19 nt, Artificial Sequence
  Description of Artificial Sequence: Synthetic oligonucleotide
  Antisense strand to SEQ ID NO: 2391656
acgcaucugauuuaucucu

SEQ ID NO: 2391658 - RNA, 19 nt, Artificial Sequence
  Description of Artificial Sequence: Synthetic oligonucleotide
  Sense strand starting at position 3136 of SEQ ID NO: 1886173
gucccuguucuugagacaa

SEQ ID NO: 2391659 - RNA, 19 nt, Artificial Sequence
  Description of Artificial Sequence: Synthetic oligonucleotide
  Antisense strand to SEQ ID NO: 2391658
uugucucaagaacagggac

SEQ ID NO: 2391660 - RNA, 19 nt, Artificial Sequence
  Description of Artificial Sequence: Synthetic oligonucleotide
  Sense strand starting at position 3138 of SEQ ID NO: 1886173
cccuguucuugagacaaac

SEQ ID NO: 2391661 - RNA, 19 nt, Artificial Sequence
  Description of Artificial Sequence: Synthetic oligonucleotide
  Antisense strand to SEQ ID NO: 2391660
guuugucucaagaacaggg

SEQ ID NO: 2391662 - RNA, 19 nt, Artificial Sequence
  Description of Artificial Sequence: Synthetic oligonucleotide
  Sense strand starting at position 3175 of SEQ ID NO: 1886173
aggguaagauccuccauga

SEQ ID NO: 2391663 - RNA, 19 nt, Artificial Sequence
  Description of Artificial Sequence: Synthetic oligonucleotide
  Antisense strand to SEQ ID NO: 2391662
ucauggaggaucuuacccu

SEQ ID NO: 2391664 - RNA, 19 nt, Artificial Sequence
  Description of Artificial Sequence: Synthetic oligonucleotide
  Sense strand starting at position 3218 of SEQ ID NO: 1886173
agccuucuugaaggaguga

SEQ ID NO: 2391665 - RNA, 19 nt, Artificial Sequence
  Description of Artificial Sequence: Synthetic oligonucleotide
  Antisense strand to SEQ ID NO: 2391664
ucacuccuucaagaaggcu

SEQ ID NO: 2391666 - RNA, 19 nt, Artificial Sequence
  Description of Artificial Sequence: Synthetic oligonucleotide
  Sense strand starting at position 3239 of SEQ ID NO: 1886173
ugaaaugaaucuugaagga

SEQ ID NO: 2391667 - RNA, 19 nt, Artificial Sequence
  Description of Artificial Sequence: Synthetic oligonucleotide
  Antisense strand to SEQ ID NO: 2391666
uccuucaagauucauuuca

SEQ ID NO: 2391668 - RNA, 19 nt, Artificial Sequence
  Description of Artificial Sequence: Synthetic oligonucleotide
  Sense strand starting at position 3521 of SEQ ID NO: 1886173
gggauccagccgugucuuu

SEQ ID NO: 2391669 - RNA, 19 nt, Artificial Sequence
  Description of Artificial Sequence: Synthetic oligonucleotide
  Antisense strand to SEQ ID NO: 2391668
aaagacacggcuggauccc

SEQ ID NO: 2391670 - RNA, 19 nt, Artificial Sequence
  Description of Artificial Sequence: Synthetic oligonucleotide
  Sense strand starting at position 3928 of SEQ ID NO: 1886173
gucguauagcucuaggucu

SEQ ID NO: 2391671 - RNA, 19 nt, Artificial Sequence
  Description of Artificial Sequence: Synthetic oligonucleotide
  Antisense strand to SEQ ID NO: 2391670
agaccuagagcuauacgac

SEQ ID NO: 2391672 - RNA, 19 nt, Artificial Sequence
  Description of Artificial Sequence: Synthetic oligonucleotide
  Sense strand starting at position 99 of SEQ ID NO: 1886174
uggugcuucuaccuuuaaa

SEQ ID NO: 2391673 - RNA, 19 nt, Artificial Sequence
  Description of Artificial Sequence: Synthetic oligonucleotide
  Antisense strand to SEQ ID NO: 2391672
uuuaaagguagaagcacca

SEQ ID NO: 2391674 - RNA, 19 nt, Artificial Sequence
  Description of Artificial Sequence: Synthetic oligonucleotide
  Sense strand starting at position 137 of SEQ ID NO: 1886174
ggcugauugcuggacagag

SEQ ID NO: 2391675 - RNA, 19 nt, Artificial Sequence
  Description of Artificial Sequence: Synthetic oligonucleotide
  Antisense strand to SEQ ID NO: 2391674
cucuguccagcaaucagcc

SEQ ID NO: 2391676 - RNA, 19 nt, Artificial Sequence
  Description of Artificial Sequence: Synthetic oligonucleotide
  Sense strand starting at position 197 of SEQ ID NO: 1886174
uuaucugaggcuuaaaugu

SEQ ID NO: 2391677 - RNA, 19 nt, Artificial Sequence
  Description of Artificial Sequence: Synthetic oligonucleotide
  Antisense strand to SEQ ID NO: 2391676
acauuuaagccucagauaa

SEQ ID NO: 2391678 - RNA, 19 nt, Artificial Sequence
  Description of Artificial Sequence: Synthetic oligonucleotide
  Sense strand starting at position 263 of SEQ ID NO: 1886174
guugcuauggcugauagac

SEQ ID NO: 2391679 - RNA, 19 nt, Artificial Sequence
  Description of Artificial Sequence: Synthetic oligonucleotide
  Antisense strand to SEQ ID NO: 2391678
gucuaucagccauagcaac

SEQ ID NO: 2391680 - RNA, 19 nt, Artificial Sequence
  Description of Artificial Sequence: Synthetic oligonucleotide
  Sense strand starting at position 513 of SEQ ID NO: 1886174
aaaguagcucugugaagua

SEQ ID NO: 2391681 - RNA, 19 nt, Artificial Sequence
  Description of Artificial Sequence: Synthetic oligonucleotide
  Antisense strand to SEQ ID NO: 2391680
uacuucacagagcuacuuu

SEQ ID NO: 2391682 - RNA, 19 nt, Artificial Sequence
  Description of Artificial Sequence: Synthetic oligonucleotide
  Sense strand starting at position 735 of SEQ ID NO: 1886174
caggcuauuccugggauac

SEQ ID NO: 2391683 - RNA, 19 nt, Artificial Sequence
  Description of Artificial Sequence: Synthetic oligonucleotide
  Antisense strand to SEQ ID NO: 2391682
guaucccaggaauagccug

SEQ ID NO: 2391684 - RNA, 19 nt, Artificial Sequence
  Description of Artificial Sequence: Synthetic oligonucleotide
  Sense strand starting at position 736 of SEQ ID NO: 1886174
aggcuauuccugggauacu

SEQ ID NO: 2391685 - RNA, 19 nt, Artificial Sequence
  Description of Artificial Sequence: Synthetic oligonucleotide
  Antisense strand to SEQ ID NO: 2391684
aguaucccaggaauagccu

SEQ ID NO: 2391686 - RNA, 19 nt, Artificial Sequence
  Description of Artificial Sequence: Synthetic oligonucleotide
  Sense strand starting at position 739 of SEQ ID NO: 1886174
cuauuccugggauacugua

SEQ ID NO: 2391687 - RNA, 19 nt, Artificial Sequence
  Description of Artificial Sequence: Synthetic oligonucleotide
  Antisense strand to SEQ ID NO: 2391686
uacaguaucccaggaauag

SEQ ID NO: 2391688 - RNA, 19 nt, Artificial Sequence
  Description of Artificial Sequence: Synthetic oligonucleotide
  Sense strand starting at position 849 of SEQ ID NO: 1886174
guauguggccugucguuaa

SEQ ID NO: 2391689 - RNA, 19 nt, Artificial Sequence
  Description of Artificial Sequence: Synthetic oligonucleotide
  Antisense strand to SEQ ID NO: 2391688
uuaacgacaggccacauac

SEQ ID NO: 2391690 - RNA, 19 nt, Artificial Sequence
  Description of Artificial Sequence: Synthetic oligonucleotide
  Sense strand starting at position 910 of SEQ ID NO: 1886174
ucuucugugagguguaaca

SEQ ID NO: 2391691 - RNA, 19 nt, Artificial Sequence
  Description of Artificial Sequence: Synthetic oligonucleotide
  Antisense strand to SEQ ID NO: 2391690
uguuacaccucacagaaga

SEQ ID NO: 2391692 - RNA, 19 nt, Artificial Sequence
  Description of Artificial Sequence: Synthetic oligonucleotide
  Sense strand starting at position 912 of SEQ ID NO: 1886174
uucugugagguguaacaga

SEQ ID NO: 2391693 - RNA, 19 nt, Artificial Sequence
  Description of Artificial Sequence: Synthetic oligonucleotide
  Antisense strand to SEQ ID NO: 2391692
ucuguuacaccucacagaa

SEQ ID NO: 2391694 - RNA, 19 nt, Artificial Sequence
  Description of Artificial Sequence: Synthetic oligonucleotide
  Sense strand starting at position 978 of SEQ ID NO: 1886174
cucugucugugacuaauag

SEQ ID NO: 2391695 - RNA, 19 nt, Artificial Sequence
  Description of Artificial Sequence: Synthetic oligonucleotide
  Antisense strand to SEQ ID NO: 2391694
cuauuagucacagacagag

SEQ ID NO: 2391696 - RNA, 19 nt, Artificial Sequence
  Description of Artificial Sequence: Synthetic oligonucleotide
  Sense strand starting at position 979 of SEQ ID NO: 1886174
ucugucugugacuaauaga

SEQ ID NO: 2391697 - RNA, 19 nt, Artificial Sequence
  Description of Artificial Sequence: Synthetic oligonucleotide
  Antisense strand to SEQ ID NO: 2391696
ucuauuagucacagacaga

SEQ ID NO: 2391698 - RNA, 19 nt, Artificial Sequence
  Description of Artificial Sequence: Synthetic oligonucleotide
  Sense strand starting at position 993 of SEQ ID NO: 1886174
auagaauggugcucagagu

SEQ ID NO: 2391699 - RNA, 19 nt, Artificial Sequence
  Description of Artificial Sequence: Synthetic oligonucleotide
  Antisense strand to SEQ ID NO: 2391698
acucugagcaccauucuau

SEQ ID NO: 2391700 - RNA, 19 nt, Artificial Sequence
  Description of Artificial Sequence: Synthetic oligonucleotide
  Sense strand starting at position 994 of SEQ ID NO: 1886174
uagaauggugcucagaguu

SEQ ID NO: 2391701 - RNA, 19 nt, Artificial Sequence
  Description of Artificial Sequence: Synthetic oligonucleotide
  Antisense strand to SEQ ID NO: 2391700
aacucugagcaccauucua

SEQ ID NO: 2391702 - RNA, 19 nt, Artificial Sequence
  Description of Artificial Sequence: Synthetic oligonucleotide
  Sense strand starting at position 1004 of SEQ ID NO: 1886174
cucagaguuccucaccuuu

SEQ ID NO: 2391703 - RNA, 19 nt, Artificial Sequence
  Description of Artificial Sequence: Synthetic oligonucleotide
  Antisense strand to SEQ ID NO: 2391702
aaaggugaggaacucugag

SEQ ID NO: 2391704 - RNA, 19 nt, Artificial Sequence
  Description of Artificial Sequence: Synthetic oligonucleotide
  Sense strand starting at position 1108 of SEQ ID NO: 1886174
aagggugggccauguguaa

SEQ ID NO: 2391705 - RNA, 19 nt, Artificial Sequence
  Description of Artificial Sequence: Synthetic oligonucleotide
  Antisense strand to SEQ ID NO: 2391704
uuacacauggcccacccuu

SEQ ID NO: 2391706 - RNA, 19 nt, Artificial Sequence
  Description of Artificial Sequence: Synthetic oligonucleotide
  Sense strand starting at position 1236 of SEQ ID NO: 1886174
cugagaagcccugaucagu

SEQ ID NO: 2391707 - RNA, 19 nt, Artificial Sequence
  Description of Artificial Sequence: Synthetic oligonucleotide
  Antisense strand to SEQ ID NO: 2391706
acugaucagggcuucucag

SEQ ID NO: 2391708 - RNA, 19 nt, Artificial Sequence
  Description of Artificial Sequence: Synthetic oligonucleotide
  Sense strand starting at position 1321 of SEQ ID NO: 1886174
cagcuuaggcgugcuugaa

SEQ ID NO: 2391709 - RNA, 19 nt, Artificial Sequence
  Description of Artificial Sequence: Synthetic oligonucleotide
  Antisense strand to SEQ ID NO: 2391708
uucaagcacgccuaagcug

SEQ ID NO: 2391710 - RNA, 19 nt, Artificial Sequence
  Description of Artificial Sequence: Synthetic oligonucleotide
  Sense strand starting at position 1357 of SEQ ID NO: 1886174
ugaccaugggccuaacuua

SEQ ID NO: 2391711 - RNA, 19 nt, Artificial Sequence
  Description of Artificial Sequence: Synthetic oligonucleotide
  Antisense strand to SEQ ID NO: 2391710
uaaguuaggcccaugguca

SEQ ID NO: 2391712 - RNA, 19 nt, Artificial Sequence
  Description of Artificial Sequence: Synthetic oligonucleotide
  Sense strand starting at position 1374 of SEQ ID NO: 1886174
uaaagaugugaaugagugu

SEQ ID NO: 2391713 - RNA, 19 nt, Artificial Sequence
  Description of Artificial Sequence: Synthetic oligonucleotide
  Antisense strand to SEQ ID NO: 2391712
acacucauucacaucuuua

SEQ ID NO: 2391714 - RNA, 19 nt, Artificial Sequence
  Description of Artificial Sequence: Synthetic oligonucleotide
  Sense strand starting at position 1375 of SEQ ID NO: 1886174
aaagaugugaaugaguguu

SEQ ID NO: 2391715 - RNA, 19 nt, Artificial Sequence
  Description of Artificial Sequence: Synthetic oligonucleotide
  Antisense strand to SEQ ID NO: 2391714
aacacucauucacaucuuu

SEQ ID NO: 2391716 - RNA, 19 nt, Artificial Sequence
  Description of Artificial Sequence: Synthetic oligonucleotide
  Sense strand starting at position 1494 of SEQ ID NO: 1886174
gggccugacuucucuacca

SEQ ID NO: 2391717 - RNA, 19 nt, Artificial Sequence
  Description of Artificial Sequence: Synthetic oligonucleotide
  Antisense strand to SEQ ID NO: 2391716
ugguagagaagucaggccc

SEQ ID NO: 2391718 - RNA, 19 nt, Artificial Sequence
  Description of Artificial Sequence: Synthetic oligonucleotide
  Sense strand starting at position 1517 of SEQ ID NO: 1886174
auucuacuugcugaagcau

SEQ ID NO: 2391719 - RNA, 19 nt, Artificial Sequence
  Description of Artificial Sequence: Synthetic oligonucleotide
  Antisense strand to SEQ ID NO: 2391718
augcuucagcaaguagaau

SEQ ID NO: 2391720 - RNA, 19 nt, Artificial Sequence
  Description of Artificial Sequence: Synthetic oligonucleotide
  Sense strand starting at position 1523 of SEQ ID NO: 1886174
cuugcugaagcaugaucaa

SEQ ID NO: 2391721 - RNA, 19 nt, Artificial Sequence
  Description of Artificial Sequence: Synthetic oligonucleotide
  Antisense strand to SEQ ID NO: 2391720
uugaucaugcuucagcaag

SEQ ID NO: 2391722 - RNA, 19 nt, Artificial Sequence
  Description of Artificial Sequence: Synthetic oligonucleotide
  Sense strand starting at position 1610 of SEQ ID NO: 1886174
guauaccuguaacuaguaa

SEQ ID NO: 2391723 - RNA, 19 nt, Artificial Sequence
  Description of Artificial Sequence: Synthetic oligonucleotide
  Antisense strand to SEQ ID NO: 2391722
uuacuaguuacagguauac

SEQ ID NO: 2391724 - RNA, 19 nt, Artificial Sequence
  Description of Artificial Sequence: Synthetic oligonucleotide
  Sense strand starting at position 2017 of SEQ ID NO: 1886174
gcugucuuugucguggaga

SEQ ID NO: 2391725 - RNA, 19 nt, Artificial Sequence
  Description of Artificial Sequence: Synthetic oligonucleotide
  Antisense strand to SEQ ID NO: 2391724
ucuccacgacaaagacagc

SEQ ID NO: 2391726 - RNA, 19 nt, Artificial Sequence
  Description of Artificial Sequence: Synthetic oligonucleotide
  Sense strand starting at position 2190 of SEQ ID NO: 1886174
uaguguaaaugguucucaa

SEQ ID NO: 2391727 - RNA, 19 nt, Artificial Sequence
  Description of Artificial Sequence: Synthetic oligonucleotide
  Antisense strand to SEQ ID NO: 2391726
uugagaaccauuuacacua

SEQ ID NO: 2391728 - RNA, 19 nt, Artificial Sequence
  Description of Artificial Sequence: Synthetic oligonucleotide
  Sense strand starting at position 2230 of SEQ ID NO: 1886174
guguuagccacgcuguuua

SEQ ID NO: 2391729 - RNA, 19 nt, Artificial Sequence
  Description of Artificial Sequence: Synthetic oligonucleotide
  Antisense strand to SEQ ID NO: 2391728
uaaacagcguggcuaacac

SEQ ID NO: 2391730 - RNA, 19 nt, Artificial Sequence
  Description of Artificial Sequence: Synthetic oligonucleotide
  Sense strand starting at position 2328 of SEQ ID NO: 1886174
aaagauauagugugguguu

SEQ ID NO: 2391731 - RNA, 19 nt, Artificial Sequence
  Description of Artificial Sequence: Synthetic oligonucleotide
  Antisense strand to SEQ ID NO: 2391730
aacaccacacuauaucuuu

SEQ ID NO: 2391732 - RNA, 19 nt, Artificial Sequence
  Description of Artificial Sequence: Synthetic oligonucleotide
  Sense strand starting at position 2432 of SEQ ID NO: 1886174
uuuagucaggagugugauu

SEQ ID NO: 2391733 - RNA, 19 nt, Artificial Sequence
  Description of Artificial Sequence: Synthetic oligonucleotide
  Antisense strand to SEQ ID NO: 2391732
aaucacacuccugacuaaa

SEQ ID NO: 2391734 - RNA, 19 nt, Artificial Sequence
  Description of Artificial Sequence: Synthetic oligonucleotide
  Sense strand starting at position 2819 of SEQ ID NO: 1886174
cccugauguguagagagca

SEQ ID NO: 2391735 - RNA, 19 nt, Artificial Sequence
  Description of Artificial Sequence: Synthetic oligonucleotide
  Antisense strand to SEQ ID NO: 2391734
ugcucucuacacaucaggg

SEQ ID NO: 2391736 - RNA, 19 nt, Artificial Sequence
  Description of Artificial Sequence: Synthetic oligonucleotide
  Sense strand starting at position 2940 of SEQ ID NO: 1886174
acacaugugaagcguaaga

SEQ ID NO: 2391737 - RNA, 19 nt, Artificial Sequence
  Description of Artificial Sequence: Synthetic oligonucleotide
  Antisense strand to SEQ ID NO: 2391736
ucuuacgcuucacaugugu

SEQ ID NO: 2391738 - RNA, 19 nt, Artificial Sequence
  Description of Artificial Sequence: Synthetic oligonucleotide
  Sense strand starting at position 2942 of SEQ ID NO: 1886174
acaugugaagcguaagaga

SEQ ID NO: 2391739 - RNA, 19 nt, Artificial Sequence
  Description of Artificial Sequence: Synthetic oligonucleotide
  Antisense strand to SEQ ID NO: 2391738
ucucuuacgcuucacaugu

SEQ ID NO: 2391740 - RNA, 19 nt, Artificial Sequence
  Description of Artificial Sequence: Synthetic oligonucleotide
  Sense strand starting at position 3416 of SEQ ID NO: 1886174
guucgauguaaguagaauc

SEQ ID NO: 2391741 - RNA, 19 nt, Artificial Sequence
  Description of Artificial Sequence: Synthetic oligonucleotide
  Antisense strand to SEQ ID NO: 2391740
gauucuacuuacaucgaac

SEQ ID NO: 2391742 - RNA, 19 nt, Artificial Sequence
  Description of Artificial Sequence: Synthetic oligonucleotide
  Sense strand starting at position 3577 of SEQ ID NO: 1886174
guuuauucgccuguuaggu

SEQ ID NO: 2391743 - RNA, 19 nt, Artificial Sequence
  Description of Artificial Sequence: Synthetic oligonucleotide
  Antisense strand to SEQ ID NO: 2391742
accuaacaggcgaauaaac

SEQ ID NO: 2391744 - RNA, 19 nt, Artificial Sequence
  Description of Artificial Sequence: Synthetic oligonucleotide
  Sense strand starting at position 3578 of SEQ ID NO: 1886174
uuuauucgccuguuagguu

SEQ ID NO: 2391745 - RNA, 19 nt, Artificial Sequence
  Description of Artificial Sequence: Synthetic oligonucleotide
  Antisense strand to SEQ ID NO: 2391744
aaccuaacaggcgaauaaa

SEQ ID NO: 2391746 - RNA, 19 nt, Artificial Sequence
  Description of Artificial Sequence: Synthetic oligonucleotide
  Sense strand starting at position 3724 of SEQ ID NO: 1886174
ggaucacaucuaugguaug

SEQ ID NO: 2391747 - RNA, 19 nt, Artificial Sequence
  Description of Artificial Sequence: Synthetic oligonucleotide
  Antisense strand to SEQ ID NO: 2391746
cauaccauagaugugaucc

SEQ ID NO: 2391748 - RNA, 19 nt, Artificial Sequence
  Description of Artificial Sequence: Synthetic oligonucleotide
  Sense strand starting at position 3730 of SEQ ID NO: 1886174
caucuaugguauguguaca

SEQ ID NO: 2391749 - RNA, 19 nt, Artificial Sequence
  Description of Artificial Sequence: Synthetic oligonucleotide
  Antisense strand to SEQ ID NO: 2391748
uguacacauaccauagaug

SEQ ID NO: 2391750 - RNA, 19 nt, Artificial Sequence
  Description of Artificial Sequence: Synthetic oligonucleotide
  Sense strand starting at position 3735 of SEQ ID NO: 1886174
augguauguguacacuuaa

SEQ ID NO: 2391751 - RNA, 19 nt, Artificial Sequence
  Description of Artificial Sequence: Synthetic oligonucleotide
  Antisense strand to SEQ ID NO: 2391750
uuaaguguacacauaccau

SEQ ID NO: 2391752 - RNA, 19 nt, Artificial Sequence
  Description of Artificial Sequence: Synthetic oligonucleotide
  Sense strand starting at position 398 of SEQ ID NO: 1886175
gcggaugauuccuucagga

SEQ ID NO: 2391753 - RNA, 19 nt, Artificial Sequence
  Description of Artificial Sequence: Synthetic oligonucleotide
  Antisense strand to SEQ ID NO: 2391752
uccugaaggaaucauccgc

SEQ ID NO: 2391754 - RNA, 19 nt, Artificial Sequence
  Description of Artificial Sequence: Synthetic oligonucleotide
  Sense strand starting at position 576 of SEQ ID NO: 1886175
guggaugauuccuucagga

SEQ ID NO: 2391755 - RNA, 19 nt, Artificial Sequence
  Description of Artificial Sequence: Synthetic oligonucleotide
  Antisense strand to SEQ ID NO: 2391754
uccugaaggaaucauccac

SEQ ID NO: 2391756 - RNA, 19 nt, Artificial Sequence
  Description of Artificial Sequence: Synthetic oligonucleotide
  Sense strand starting at position 1011 of SEQ ID NO: 1886175
ugacuuccuuccggacaca

SEQ ID NO: 2391757 - RNA, 19 nt, Artificial Sequence
  Description of Artificial Sequence: Synthetic oligonucleotide
  Antisense strand to SEQ ID NO: 2391756
uguguccggaaggaaguca

SEQ ID NO: 2391758 - RNA, 19 nt, Artificial Sequence
  Description of Artificial Sequence: Synthetic oligonucleotide
  Sense strand starting at position 1078 of SEQ ID NO: 1886175
gcggaugauuccuucggga

SEQ ID NO: 2391759 - RNA, 19 nt, Artificial Sequence
  Description of Artificial Sequence: Synthetic oligonucleotide
  Antisense strand to SEQ ID NO: 2391758
ucccgaaggaaucauccgc

SEQ ID NO: 2391760 - RNA, 19 nt, Artificial Sequence
  Description of Artificial Sequence: Synthetic oligonucleotide
  Sense strand starting at position 1080 of SEQ ID NO: 1886175
ggaugauuccuucgggacg

SEQ ID NO: 2391761 - RNA, 19 nt, Artificial Sequence
  Description of Artificial Sequence: Synthetic oligonucleotide
  Antisense strand to SEQ ID NO: 2391760
cgucccgaaggaaucaucc

SEQ ID NO: 2391762 - RNA, 19 nt, Artificial Sequence
  Description of Artificial Sequence: Synthetic oligonucleotide
  Sense strand starting at position 1357 of SEQ ID NO: 1886175
gcggaugauuccuuccgga

SEQ ID NO: 2391763 - RNA, 19 nt, Artificial Sequence
  Description of Artificial Sequence: Synthetic oligonucleotide
  Antisense strand to SEQ ID NO: 2391762
uccggaaggaaucauccgc

SEQ ID NO: 2391764 - RNA, 19 nt, Artificial Sequence
  Description of Artificial Sequence: Synthetic oligonucleotide
  Sense strand starting at position 1360 of SEQ ID NO: 1886175
gaugauuccuuccggacac

SEQ ID NO: 2391765 - RNA, 19 nt, Artificial Sequence
  Description of Artificial Sequence: Synthetic oligonucleotide
  Antisense strand to SEQ ID NO: 2391764
guguccggaaggaaucauc

SEQ ID NO: 2391766 - RNA, 19 nt, Artificial Sequence
  Description of Artificial Sequence: Synthetic oligonucleotide
  Sense strand starting at position 1361 of SEQ ID NO: 1886175
augauuccuuccggacaca

SEQ ID NO: 2391767 - RNA, 19 nt, Artificial Sequence
  Description of Artificial Sequence: Synthetic oligonucleotide
  Antisense strand to SEQ ID NO: 2391766
uguguccggaaggaaucau

SEQ ID NO: 2391768 - RNA, 19 nt, Artificial Sequence
  Description of Artificial Sequence: Synthetic oligonucleotide
  Sense strand starting at position 1446 of SEQ ID NO: 1886175
cgaagaaaugcuuggcggu

SEQ ID NO: 2391769 - RNA, 19 nt, Artificial Sequence
  Description of Artificial Sequence: Synthetic oligonucleotide
  Antisense strand to SEQ ID NO: 2391768
accgccaagcauuucuucg

SEQ ID NO: 2391770 - RNA, 19 nt, Artificial Sequence
  Description of Artificial Sequence: Synthetic oligonucleotide
  Sense strand starting at position 2086 of SEQ ID NO: 1886175
cccagcaucgucuguucua

SEQ ID NO: 2391771 - RNA, 19 nt, Artificial Sequence
  Description of Artificial Sequence: Synthetic oligonucleotide
  Antisense strand to SEQ ID NO: 2391770
uagaacagacgaugcuggg

SEQ ID NO: 2391772 - RNA, 19 nt, Artificial Sequence
  Description of Artificial Sequence: Synthetic oligonucleotide
  Sense strand starting at position 2089 of SEQ ID NO: 1886175
agcaucgucuguucuacau

SEQ ID NO: 2391773 - RNA, 19 nt, Artificial Sequence
  Description of Artificial Sequence: Synthetic oligonucleotide
  Antisense strand to SEQ ID NO: 2391772
auguagaacagacgaugcu

SEQ ID NO: 2391774 - RNA, 19 nt, Artificial Sequence
  Description of Artificial Sequence: Synthetic oligonucleotide
  Sense strand starting at position 2093 of SEQ ID NO: 1886175
ucgucuguucuacauauca

SEQ ID NO: 2391775 - RNA, 19 nt, Artificial Sequence
  Description of Artificial Sequence: Synthetic oligonucleotide
  Antisense strand to SEQ ID NO: 2391774
ugauauguagaacagacga

SEQ ID NO: 2391776 - RNA, 19 nt, Artificial Sequence
  Description of Artificial Sequence: Synthetic oligonucleotide
  Sense strand starting at position 2127 of SEQ ID NO: 1886175
ugcugcuguguuugugaau

SEQ ID NO: 2391777 - RNA, 19 nt, Artificial Sequence
  Description of Artificial Sequence: Synthetic oligonucleotide
  Antisense strand to SEQ ID NO: 2391776
auucacaaacacagcagca

SEQ ID NO: 2391778 - RNA, 19 nt, Artificial Sequence
  Description of Artificial Sequence: Synthetic oligonucleotide
  Sense strand starting at position 2128 of SEQ ID NO: 1886175
gcugcuguguuugugaauc

SEQ ID NO: 2391779 - RNA, 19 nt, Artificial Sequence
  Description of Artificial Sequence: Synthetic oligonucleotide
  Antisense strand to SEQ ID NO: 2391778
gauucacaaacacagcagc

SEQ ID NO: 2391780 - RNA, 19 nt, Artificial Sequence
  Description of Artificial Sequence: Synthetic oligonucleotide
  Sense strand starting at position 2163 of SEQ ID NO: 1886175
guaugucaccauuggccua

SEQ ID NO: 2391781 - RNA, 19 nt, Artificial Sequence
  Description of Artificial Sequence: Synthetic oligonucleotide
  Antisense strand to SEQ ID NO: 2391780
uaggccaauggugacauac

SEQ ID NO: 2391782 - RNA, 19 nt, Artificial Sequence
  Description of Artificial Sequence: Synthetic oligonucleotide
  Sense strand starting at position 2233 of SEQ ID NO: 1886175
acagcagacuauugaguaa

SEQ ID NO: 2391783 - RNA, 19 nt, Artificial Sequence
  Description of Artificial Sequence: Synthetic oligonucleotide
  Antisense strand to SEQ ID NO: 2391782
uuacucaauagucugcugu

SEQ ID NO: 2391784 - RNA, 19 nt, Artificial Sequence
  Description of Artificial Sequence: Synthetic oligonucleotide
  Sense strand starting at position 2236 of SEQ ID NO: 1886175
gcagacuauugaguaacaa

SEQ ID NO: 2391785 - RNA, 19 nt, Artificial Sequence
  Description of Artificial Sequence: Synthetic oligonucleotide
  Antisense strand to SEQ ID NO: 2391784
uuguuacucaauagucugc

SEQ ID NO: 2391786 - RNA, 19 nt, Artificial Sequence
  Description of Artificial Sequence: Synthetic oligonucleotide
  Sense strand starting at position 2309 of SEQ ID NO: 1886175
ugaugaaauccugguggcu

SEQ ID NO: 2391787 - RNA, 19 nt, Artificial Sequence
  Description of Artificial Sequence: Synthetic oligonucleotide
  Antisense strand to SEQ ID NO: 2391786
agccaccaggauuucauca

SEQ ID NO: 2391788 - RNA, 19 nt, Artificial Sequence
  Description of Artificial Sequence: Synthetic oligonucleotide
  Sense strand starting at position 2324 of SEQ ID NO: 1886175
ggcuucuucucuguucuua

SEQ ID NO: 2391789 - RNA, 19 nt, Artificial Sequence
  Description of Artificial Sequence: Synthetic oligonucleotide
  Antisense strand to SEQ ID NO: 2391788
uaagaacagagaagaagcc

SEQ ID NO: 2391790 - RNA, 19 nt, Artificial Sequence
  Description of Artificial Sequence: Synthetic oligonucleotide
  Sense strand starting at position 2340 of SEQ ID NO: 1886175
uuaccaauccaggaagugu

SEQ ID NO: 2391791 - RNA, 19 nt, Artificial Sequence
  Description of Artificial Sequence: Synthetic oligonucleotide
  Antisense strand to SEQ ID NO: 2391790
acacuuccuggauugguaa

SEQ ID NO: 2391792 - RNA, 19 nt, Artificial Sequence
  Description of Artificial Sequence: Synthetic oligonucleotide
  Sense strand starting at position 2465 of SEQ ID NO: 1886175
auguuacccugauucuauu

SEQ ID NO: 2391793 - RNA, 19 nt, Artificial Sequence
  Description of Artificial Sequence: Synthetic oligonucleotide
  Antisense strand to SEQ ID NO: 2391792
aauagaaucaggguaacau

SEQ ID NO: 2391794 - RNA, 19 nt, Artificial Sequence
  Description of Artificial Sequence: Synthetic oligonucleotide
  Sense strand starting at position 2502 of SEQ ID NO: 1886175
ucacuuguaugguggaaag

SEQ ID NO: 2391795 - RNA, 19 nt, Artificial Sequence
  Description of Artificial Sequence: Synthetic oligonucleotide
  Antisense strand to SEQ ID NO: 2391794
cuuuccaccauacaaguga

SEQ ID NO: 2391796 - RNA, 19 nt, Artificial Sequence
  Description of Artificial Sequence: Synthetic oligonucleotide
  Sense strand starting at position 2563 of SEQ ID NO: 1886175
ccauguaaucgucaaauug

SEQ ID NO: 2391797 - RNA, 19 nt, Artificial Sequence
  Description of Artificial Sequence: Synthetic oligonucleotide
  Antisense strand to SEQ ID NO: 2391796
caauuugacgauuacaugg

SEQ ID NO: 2391798 - RNA, 19 nt, Artificial Sequence
  Description of Artificial Sequence: Synthetic oligonucleotide
  Sense strand starting at position 2571 of SEQ ID NO: 1886175
ucgucaaauuguuuauugu

SEQ ID NO: 2391799 - RNA, 19 nt, Artificial Sequence
  Description of Artificial Sequence: Synthetic oligonucleotide
  Antisense strand to SEQ ID NO: 2391798
acaauaaacaauuugacga

SEQ ID NO: 2391800 - RNA, 19 nt, Artificial Sequence
  Description of Artificial Sequence: Synthetic oligonucleotide
  Sense strand starting at position 2572 of SEQ ID NO: 1886175
cgucaaauuguuuauugua

SEQ ID NO: 2391801 - RNA, 19 nt, Artificial Sequence
  Description of Artificial Sequence: Synthetic oligonucleotide
  Antisense strand to SEQ ID NO: 2391800
uacaauaaacaauuugacg

SEQ ID NO: 2391802 - RNA, 19 nt, Artificial Sequence
  Description of Artificial Sequence: Synthetic oligonucleotide
  Sense strand starting at position 2636 of SEQ ID NO: 1886175
agcaaagaaugcuauguga

SEQ ID NO: 2391803 - RNA, 19 nt, Artificial Sequence
  Description of Artificial Sequence: Synthetic oligonucleotide
  Antisense strand to SEQ ID NO: 2391802
ucacauagcauucuuugcu

SEQ ID NO: 2391804 - RNA, 19 nt, Artificial Sequence
  Description of Artificial Sequence: Synthetic oligonucleotide
  Sense strand starting at position 2974 of SEQ ID NO: 1886175
ugauguacuugucaauagu

SEQ ID NO: 2391805 - RNA, 19 nt, Artificial Sequence
  Description of Artificial Sequence: Synthetic oligonucleotide
  Antisense strand to SEQ ID NO: 2391804
acuauugacaaguacauca

SEQ ID NO: 2391806 - RNA, 19 nt, Artificial Sequence
  Description of Artificial Sequence: Synthetic oligonucleotide
  Sense strand starting at position 2977 of SEQ ID NO: 1886175
uguacuugucaauagucca

SEQ ID NO: 2391807 - RNA, 19 nt, Artificial Sequence
  Description of Artificial Sequence: Synthetic oligonucleotide
  Antisense strand to SEQ ID NO: 2391806
uggacuauugacaaguaca

SEQ ID NO: 2391808 - RNA, 19 nt, Artificial Sequence
  Description of Artificial Sequence: Synthetic oligonucleotide
  Sense strand starting at position 3005 of SEQ ID NO: 1886175
gggaacccuuucucuuuau

SEQ ID NO: 2391809 - RNA, 19 nt, Artificial Sequence
  Description of Artificial Sequence: Synthetic oligonucleotide
  Antisense strand to SEQ ID NO: 2391808
auaaagagaaaggguuccc

SEQ ID NO: 2391810 - RNA, 19 nt, Artificial Sequence
  Description of Artificial Sequence: Synthetic oligonucleotide
  Sense strand starting at position 3014 of SEQ ID NO: 1886175
uucucuuuauuguggagaa

SEQ ID NO: 2391811 - RNA, 19 nt, Artificial Sequence
  Description of Artificial Sequence: Synthetic oligonucleotide
  Antisense strand to SEQ ID NO: 2391810
uucuccacaauaaagagaa

SEQ ID NO: 2391812 - RNA, 19 nt, Artificial Sequence
  Description of Artificial Sequence: Synthetic oligonucleotide
  Sense strand starting at position 3015 of SEQ ID NO: 1886175
ucucuuuauuguggagaaa

SEQ ID NO: 2391813 - RNA, 19 nt, Artificial Sequence
  Description of Artificial Sequence: Synthetic oligonucleotide
  Antisense strand to SEQ ID NO: 2391812
uuucuccacaauaaagaga

SEQ ID NO: 2391814 - RNA, 19 nt, Artificial Sequence
  Description of Artificial Sequence: Synthetic oligonucleotide
  Sense strand starting at position 3138 of SEQ ID NO: 1886175
acaaauaucuguugauuug

SEQ ID NO: 2391815 - RNA, 19 nt, Artificial Sequence
  Description of Artificial Sequence: Synthetic oligonucleotide
  Antisense strand to SEQ ID NO: 2391814
caaaucaacagauauuugu

SEQ ID NO: 2391816 - RNA, 19 nt, Artificial Sequence
  Description of Artificial Sequence: Synthetic oligonucleotide
  Sense strand starting at position 3144 of SEQ ID NO: 1886175
aucuguugauuuggagaug

SEQ ID NO: 2391817 - RNA, 19 nt, Artificial Sequence
  Description of Artificial Sequence: Synthetic oligonucleotide
  Antisense strand to SEQ ID NO: 2391816
caucuccaaaucaacagau

SEQ ID NO: 2391818 - RNA, 19 nt, Artificial Sequence
  Description of Artificial Sequence: Synthetic oligonucleotide
  Sense strand starting at position 3167 of SEQ ID NO: 1886175
auauaugguccuuagcaaa

SEQ ID NO: 2391819 - RNA, 19 nt, Artificial Sequence
  Description of Artificial Sequence: Synthetic oligonucleotide
  Antisense strand to SEQ ID NO: 2391818
uuugcuaaggaccauauau

SEQ ID NO: 2391820 - RNA, 19 nt, Artificial Sequence
  Description of Artificial Sequence: Synthetic oligonucleotide
  Sense strand starting at position 3247 of SEQ ID NO: 1886175
agaugucaucagcaauuau

SEQ ID NO: 2391821 - RNA, 19 nt, Artificial Sequence
  Description of Artificial Sequence: Synthetic oligonucleotide
  Antisense strand to SEQ ID NO: 2391820
auaauugcugaugacaucu

SEQ ID NO: 2391822 - RNA, 19 nt, Artificial Sequence
  Description of Artificial Sequence: Synthetic oligonucleotide
  Sense strand starting at position 3307 of SEQ ID NO: 1886175
agaaaugagucugacagga

SEQ ID NO: 2391823 - RNA, 19 nt, Artificial Sequence
  Description of Artificial Sequence: Synthetic oligonucleotide
  Antisense strand to SEQ ID NO: 2391822
uccugucagacucauuucu

SEQ ID NO: 2391824 - RNA, 19 nt, Artificial Sequence
  Description of Artificial Sequence: Synthetic oligonucleotide
  Sense strand starting at position 3323 of SEQ ID NO: 1886175
ggaggcuugaggcacuuaa

SEQ ID NO: 2391825 - RNA, 19 nt, Artificial Sequence
  Description of Artificial Sequence: Synthetic oligonucleotide
  Antisense strand to SEQ ID NO: 2391824
uuaagugccucaagccucc

SEQ ID NO: 2391826 - RNA, 19 nt, Artificial Sequence
  Description of Artificial Sequence: Synthetic oligonucleotide
  Sense strand starting at position 3747 of SEQ ID NO: 1886175
uguggugagccaggauagu

SEQ ID NO: 2391827 - RNA, 19 nt, Artificial Sequence
  Description of Artificial Sequence: Synthetic oligonucleotide
  Antisense strand to SEQ ID NO: 2391826
acuauccuggcucaccaca

SEQ ID NO: 2391828 - RNA, 19 nt, Artificial Sequence
  Description of Artificial Sequence: Synthetic oligonucleotide
  Sense strand starting at position 3820 of SEQ ID NO: 1886175
uuggguaggcucuaccaaa

SEQ ID NO: 2391829 - RNA, 19 nt, Artificial Sequence
  Description of Artificial Sequence: Synthetic oligonucleotide
  Antisense strand to SEQ ID NO: 2391828
uuugguagagccuacccaa

SEQ ID NO: 2391830 - RNA, 19 nt, Artificial Sequence
  Description of Artificial Sequence: Synthetic oligonucleotide
  Sense strand starting at position 3905 of SEQ ID NO: 1886175
gcuucuaaauaucagagaa

SEQ ID NO: 2391831 - RNA, 19 nt, Artificial Sequence
  Description of Artificial Sequence: Synthetic oligonucleotide
  Antisense strand to SEQ ID NO: 2391830
uucucugauauuuagaagc

SEQ ID NO: 2391832 - RNA, 19 nt, Artificial Sequence
  Description of Artificial Sequence: Synthetic oligonucleotide
  Sense strand starting at position 1986 of SEQ ID NO: 1886176
ugaacauagccuuguggau

SEQ ID NO: 2391833 - RNA, 19 nt, Artificial Sequence
  Description of Artificial Sequence: Synthetic oligonucleotide
  Antisense strand to SEQ ID NO: 2391832
auccacaaggcuauguuca

SEQ ID NO: 2391834 - RNA, 19 nt, Artificial Sequence
  Description of Artificial Sequence: Synthetic oligonucleotide
  Sense strand starting at position 1998 of SEQ ID NO: 1886176
uguggauaucauggccuga

SEQ ID NO: 2391835 - RNA, 19 nt, Artificial Sequence
  Description of Artificial Sequence: Synthetic oligonucleotide
  Antisense strand to SEQ ID NO: 2391834
ucaggccaugauauccaca

SEQ ID NO: 2391836 - RNA, 19 nt, Artificial Sequence
  Description of Artificial Sequence: Synthetic oligonucleotide
  Sense strand starting at position 2000 of SEQ ID NO: 1886176
uggauaucauggccugaag

SEQ ID NO: 2391837 - RNA, 19 nt, Artificial Sequence
  Description of Artificial Sequence: Synthetic oligonucleotide
  Antisense strand to SEQ ID NO: 2391836
cuucaggccaugauaucca

SEQ ID NO: 2391838 - RNA, 19 nt, Artificial Sequence
  Description of Artificial Sequence: Synthetic oligonucleotide
  Sense strand starting at position 2002 of SEQ ID NO: 1886176
gauaucauggccugaaguc

SEQ ID NO: 2391839 - RNA, 19 nt, Artificial Sequence
  Description of Artificial Sequence: Synthetic oligonucleotide
  Antisense strand to SEQ ID NO: 2391838
gacuucaggccaugauauc

SEQ ID NO: 2391840 - RNA, 19 nt, Artificial Sequence
  Description of Artificial Sequence: Synthetic oligonucleotide
  Sense strand starting at position 2003 of SEQ ID NO: 1886176
auaucauggccugaagucu

SEQ ID NO: 2391841 - RNA, 19 nt, Artificial Sequence
  Description of Artificial Sequence: Synthetic oligonucleotide
  Antisense strand to SEQ ID NO: 2391840
agacuucaggccaugauau

SEQ ID NO: 2391842 - RNA, 19 nt, Artificial Sequence
  Description of Artificial Sequence: Synthetic oligonucleotide
  Sense strand starting at position 2043 of SEQ ID NO: 1886176
uaaugauguauaugggugu

SEQ ID NO: 2391843 - RNA, 19 nt, Artificial Sequence
  Description of Artificial Sequence: Synthetic oligonucleotide
  Antisense strand to SEQ ID NO: 2391842
acacccauauacaucauua

SEQ ID NO: 2391844 - RNA, 19 nt, Artificial Sequence
  Description of Artificial Sequence: Synthetic oligonucleotide
  Sense strand starting at position 2060 of SEQ ID NO: 1886176
gugggcagcuauucaugau

SEQ ID NO: 2391845 - RNA, 19 nt, Artificial Sequence
  Description of Artificial Sequence: Synthetic oligonucleotide
  Antisense strand to SEQ ID NO: 2391844
aucaugaauagcugcccac

SEQ ID NO: 2391846 - RNA, 19 nt, Artificial Sequence
  Description of Artificial Sequence: Synthetic oligonucleotide
  Sense strand starting at position 2412 of SEQ ID NO: 1886176
gucauaacuuagguacauu

SEQ ID NO: 2391847 - RNA, 19 nt, Artificial Sequence
  Description of Artificial Sequence: Synthetic oligonucleotide
  Antisense strand to SEQ ID NO: 2391846
aauguaccuaaguuaugac

SEQ ID NO: 2391848 - RNA, 19 nt, Artificial Sequence
  Description of Artificial Sequence: Synthetic oligonucleotide
  Sense strand starting at position 2434 of SEQ ID NO: 1886176
uagaaauggugccugauaa

SEQ ID NO: 2391849 - RNA, 19 nt, Artificial Sequence
  Description of Artificial Sequence: Synthetic oligonucleotide
  Antisense strand to SEQ ID NO: 2391848
uuaucaggcaccauuucua

SEQ ID NO: 2391850 - RNA, 19 nt, Artificial Sequence
  Description of Artificial Sequence: Synthetic oligonucleotide
  Sense strand starting at position 2435 of SEQ ID NO: 1886176
agaaauggugccugauaau

SEQ ID NO: 2391851 - RNA, 19 nt, Artificial Sequence
  Description of Artificial Sequence: Synthetic oligonucleotide
  Antisense strand to SEQ ID NO: 2391850
auuaucaggcaccauuucu

SEQ ID NO: 2391852 - RNA, 19 nt, Artificial Sequence
  Description of Artificial Sequence: Synthetic oligonucleotide
  Sense strand starting at position 2508 of SEQ ID NO: 1886176
aaaggaauuguguaugcag

SEQ ID NO: 2391853 - RNA, 19 nt, Artificial Sequence
  Description of Artificial Sequence: Synthetic oligonucleotide
  Antisense strand to SEQ ID NO: 2391852
cugcauacacaauuccuuu

SEQ ID NO: 2391854 - RNA, 19 nt, Artificial Sequence
  Description of Artificial Sequence: Synthetic oligonucleotide
  Sense strand starting at position 2510 of SEQ ID NO: 1886176
aggaauuguguaugcagau

SEQ ID NO: 2391855 - RNA, 19 nt, Artificial Sequence
  Description of Artificial Sequence: Synthetic oligonucleotide
  Antisense strand to SEQ ID NO: 2391854
aucugcauacacaauuccu

SEQ ID NO: 2391856 - RNA, 19 nt, Artificial Sequence
  Description of Artificial Sequence: Synthetic oligonucleotide
  Sense strand starting at position 2511 of SEQ ID NO: 1886176
ggaauuguguaugcagauu

SEQ ID NO: 2391857 - RNA, 19 nt, Artificial Sequence
  Description of Artificial Sequence: Synthetic oligonucleotide
  Antisense strand to SEQ ID NO: 2391856
aaucugcauacacaauucc

SEQ ID NO: 2391858 - RNA, 19 nt, Artificial Sequence
  Description of Artificial Sequence: Synthetic oligonucleotide
  Sense strand starting at position 2763 of SEQ ID NO: 1886176
gguacgugggauuguuuga

SEQ ID NO: 2391859 - RNA, 19 nt, Artificial Sequence
  Description of Artificial Sequence: Synthetic oligonucleotide
  Antisense strand to SEQ ID NO: 2391858
ucaaacaaucccacguacc

SEQ ID NO: 2391860 - RNA, 19 nt, Artificial Sequence
  Description of Artificial Sequence: Synthetic oligonucleotide
  Sense strand starting at position 2811 of SEQ ID NO: 1886176
ucacaucuaugggaauaaa

SEQ ID NO: 2391861 - RNA, 19 nt, Artificial Sequence
  Description of Artificial Sequence: Synthetic oligonucleotide
  Antisense strand to SEQ ID NO: 2391860
uuuauucccauagauguga

SEQ ID NO: 2391862 - RNA, 19 nt, Artificial Sequence
  Description of Artificial Sequence: Synthetic oligonucleotide
  Sense strand starting at position 2888 of SEQ ID NO: 1886176
aguguacuuuacuuugaca

SEQ ID NO: 2391863 - RNA, 19 nt, Artificial Sequence
  Description of Artificial Sequence: Synthetic oligonucleotide
  Antisense strand to SEQ ID NO: 2391862
ugucaaaguaaaguacacu

SEQ ID NO: 2391864 - RNA, 19 nt, Artificial Sequence
  Description of Artificial Sequence: Synthetic oligonucleotide
  Sense strand starting at position 2890 of SEQ ID NO: 1886176
uguacuuuacuuugacacu

SEQ ID NO: 2391865 - RNA, 19 nt, Artificial Sequence
  Description of Artificial Sequence: Synthetic oligonucleotide
  Antisense strand to SEQ ID NO: 2391864
agugucaaaguaaaguaca

SEQ ID NO: 2391866 - RNA, 19 nt, Artificial Sequence
  Description of Artificial Sequence: Synthetic oligonucleotide
  Sense strand starting at position 2916 of SEQ ID NO: 1886176
aagugucuggccuggacau

SEQ ID NO: 2391867 - RNA, 19 nt, Artificial Sequence
  Description of Artificial Sequence: Synthetic oligonucleotide
  Antisense strand to SEQ ID NO: 2391866
auguccaggccagacacuu

SEQ ID NO: 2391868 - RNA, 19 nt, Artificial Sequence
  Description of Artificial Sequence: Synthetic oligonucleotide
  Sense strand starting at position 2926 of SEQ ID NO: 1886176
ccuggacauguuugcaaca

SEQ ID NO: 2391869 - RNA, 19 nt, Artificial Sequence
  Description of Artificial Sequence: Synthetic oligonucleotide
  Antisense strand to SEQ ID NO: 2391868
uguugcaaacauguccagg

SEQ ID NO: 2391870 - RNA, 19 nt, Artificial Sequence
  Description of Artificial Sequence: Synthetic oligonucleotide
  Sense strand starting at position 2927 of SEQ ID NO: 1886176
cuggacauguuugcaacaa

SEQ ID NO: 2391871 - RNA, 19 nt, Artificial Sequence
  Description of Artificial Sequence: Synthetic oligonucleotide
  Antisense strand to SEQ ID NO: 2391870
uuguugcaaacauguccag

SEQ ID NO: 2391872 - RNA, 19 nt, Artificial Sequence
  Description of Artificial Sequence: Synthetic oligonucleotide
  Sense strand starting at position 2955 of SEQ ID NO: 1886176
cccugacucccacggaaua

SEQ ID NO: 2391873 - RNA, 19 nt, Artificial Sequence
  Description of Artificial Sequence: Synthetic oligonucleotide
  Antisense strand to SEQ ID NO: 2391872
uauuccgugggagucaggg

SEQ ID NO: 2391874 - RNA, 19 nt, Artificial Sequence
  Description of Artificial Sequence: Synthetic oligonucleotide
  Sense strand starting at position 3000 of SEQ ID NO: 1886176
gggagcugguaaucauagu

SEQ ID NO: 2391875 - RNA, 19 nt, Artificial Sequence
  Description of Artificial Sequence: Synthetic oligonucleotide
  Antisense strand to SEQ ID NO: 2391874
acuaugauuaccagcuccc

SEQ ID NO: 2391876 - RNA, 19 nt, Artificial Sequence
  Description of Artificial Sequence: Synthetic oligonucleotide
  Sense strand starting at position 3139 of SEQ ID NO: 1886176
gcuauagcugcacagauaa

SEQ ID NO: 2391877 - RNA, 19 nt, Artificial Sequence
  Description of Artificial Sequence: Synthetic oligonucleotide
  Antisense strand to SEQ ID NO: 2391876
uuaucugugcagcuauagc

SEQ ID NO: 2391878 - RNA, 19 nt, Artificial Sequence
  Description of Artificial Sequence: Synthetic oligonucleotide
  Sense strand starting at position 3189 of SEQ ID NO: 1886176
auggaagcccuuuauucuu

SEQ ID NO: 2391879 - RNA, 19 nt, Artificial Sequence
  Description of Artificial Sequence: Synthetic oligonucleotide
  Antisense strand to SEQ ID NO: 2391878
aagaauaaagggcuuccau

SEQ ID NO: 2391880 - RNA, 19 nt, Artificial Sequence
  Description of Artificial Sequence: Synthetic oligonucleotide
  Sense strand starting at position 3194 of SEQ ID NO: 1886176
agcccuuuauucuuuguau

SEQ ID NO: 2391881 - RNA, 19 nt, Artificial Sequence
  Description of Artificial Sequence: Synthetic oligonucleotide
  Antisense strand to SEQ ID NO: 2391880
auacaaagaauaaagggcu

SEQ ID NO: 2391882 - RNA, 19 nt, Artificial Sequence
  Description of Artificial Sequence: Synthetic oligonucleotide
  Sense strand starting at position 3195 of SEQ ID NO: 1886176
gcccuuuauucuuuguaug

SEQ ID NO: 2391883 - RNA, 19 nt, Artificial Sequence
  Description of Artificial Sequence: Synthetic oligonucleotide
  Antisense strand to SEQ ID NO: 2391882
cauacaaagaauaaagggc

SEQ ID NO: 2391884 - RNA, 19 nt, Artificial Sequence
  Description of Artificial Sequence: Synthetic oligonucleotide
  Sense strand starting at position 3196 of SEQ ID NO: 1886176
cccuuuauucuuuguauga

SEQ ID NO: 2391885 - RNA, 19 nt, Artificial Sequence
  Description of Artificial Sequence: Synthetic oligonucleotide
  Antisense strand to SEQ ID NO: 2391884
ucauacaaagaauaaaggg

SEQ ID NO: 2391886 - RNA, 19 nt, Artificial Sequence
  Description of Artificial Sequence: Synthetic oligonucleotide
  Sense strand starting at position 3197 of SEQ ID NO: 1886176
ccuuuauucuuuguaugau

SEQ ID NO: 2391887 - RNA, 19 nt, Artificial Sequence
  Description of Artificial Sequence: Synthetic oligonucleotide
  Antisense strand to SEQ ID NO: 2391886
aucauacaaagaauaaagg

SEQ ID NO: 2391888 - RNA, 19 nt, Artificial Sequence
  Description of Artificial Sequence: Synthetic oligonucleotide
  Sense strand starting at position 3399 of SEQ ID NO: 1886176
uacagacagcuuugcugau

SEQ ID NO: 2391889 - RNA, 19 nt, Artificial Sequence
  Description of Artificial Sequence: Synthetic oligonucleotide
  Antisense strand to SEQ ID NO: 2391888
aucagcaaagcugucugua

SEQ ID NO: 2391890 - RNA, 19 nt, Artificial Sequence
  Description of Artificial Sequence: Synthetic oligonucleotide
  Sense strand starting at position 3400 of SEQ ID NO: 1886176
acagacagcuuugcugaua

SEQ ID NO: 2391891 - RNA, 19 nt, Artificial Sequence
  Description of Artificial Sequence: Synthetic oligonucleotide
  Antisense strand to SEQ ID NO: 2391890
uaucagcaaagcugucugu

SEQ ID NO: 2391892 - RNA, 19 nt, Artificial Sequence
  Description of Artificial Sequence: Synthetic oligonucleotide
  Sense strand starting at position 3403 of SEQ ID NO: 1886176
gacagcuuugcugauaaga

SEQ ID NO: 2391893 - RNA, 19 nt, Artificial Sequence
  Description of Artificial Sequence: Synthetic oligonucleotide
  Antisense strand to SEQ ID NO: 2391892
ucuuaucagcaaagcuguc

SEQ ID NO: 2391894 - RNA, 19 nt, Artificial Sequence
  Description of Artificial Sequence: Synthetic oligonucleotide
  Sense strand starting at position 3706 of SEQ ID NO: 1886176
gaguuauucccaggucagu

SEQ ID NO: 2391895 - RNA, 19 nt, Artificial Sequence
  Description of Artificial Sequence: Synthetic oligonucleotide
  Antisense strand to SEQ ID NO: 2391894
acugaccugggaauaacuc

SEQ ID NO: 2391896 - RNA, 19 nt, Artificial Sequence
  Description of Artificial Sequence: Synthetic oligonucleotide
  Sense strand starting at position 3716 of SEQ ID NO: 1886176
caggucagugaaugucuua

SEQ ID NO: 2391897 - RNA, 19 nt, Artificial Sequence
  Description of Artificial Sequence: Synthetic oligonucleotide
  Antisense strand to SEQ ID NO: 2391896
uaagacauucacugaccug

SEQ ID NO: 2391898 - RNA, 19 nt, Artificial Sequence
  Description of Artificial Sequence: Synthetic oligonucleotide
  Sense strand starting at position 3723 of SEQ ID NO: 1886176
gugaaugucuuagugacuc

SEQ ID NO: 2391899 - RNA, 19 nt, Artificial Sequence
  Description of Artificial Sequence: Synthetic oligonucleotide
  Antisense strand to SEQ ID NO: 2391898
gagucacuaagacauucac

SEQ ID NO: 2391900 - RNA, 19 nt, Artificial Sequence
  Description of Artificial Sequence: Synthetic oligonucleotide
  Sense strand starting at position 3736 of SEQ ID NO: 1886176
ugacucaagccuuguccau

SEQ ID NO: 2391901 - RNA, 19 nt, Artificial Sequence
  Description of Artificial Sequence: Synthetic oligonucleotide
  Antisense strand to SEQ ID NO: 2391900
auggacaaggcuugaguca

SEQ ID NO: 2391902 - RNA, 19 nt, Artificial Sequence
  Description of Artificial Sequence: Synthetic oligonucleotide
  Sense strand starting at position 3815 of SEQ ID NO: 1886176
gauugcaaggcagguaaua

SEQ ID NO: 2391903 - RNA, 19 nt, Artificial Sequence
  Description of Artificial Sequence: Synthetic oligonucleotide
  Antisense strand to SEQ ID NO: 2391902
uauuaccugccuugcaauc

SEQ ID NO: 2391904 - RNA, 19 nt, Artificial Sequence
  Description of Artificial Sequence: Synthetic oligonucleotide
  Sense strand starting at position 3817 of SEQ ID NO: 1886176
uugcaaggcagguaauaau

SEQ ID NO: 2391905 - RNA, 19 nt, Artificial Sequence
  Description of Artificial Sequence: Synthetic oligonucleotide
  Antisense strand to SEQ ID NO: 2391904
auuauuaccugccuugcaa

SEQ ID NO: 2391906 - RNA, 19 nt, Artificial Sequence
  Description of Artificial Sequence: Synthetic oligonucleotide
  Sense strand starting at position 3934 of SEQ ID NO: 1886176
ggagcaaacggucauaugu

SEQ ID NO: 2391907 - RNA, 19 nt, Artificial Sequence
  Description of Artificial Sequence: Synthetic oligonucleotide
  Antisense strand to SEQ ID NO: 2391906
acauaugaccguuugcucc

SEQ ID NO: 2391908 - RNA, 19 nt, Artificial Sequence
  Description of Artificial Sequence: Synthetic oligonucleotide
  Sense strand starting at position 3941 of SEQ ID NO: 1886176
acggucauaugugucuuua

SEQ ID NO: 2391909 - RNA, 19 nt, Artificial Sequence
  Description of Artificial Sequence: Synthetic oligonucleotide
  Antisense strand to SEQ ID NO: 2391908
uaaagacacauaugaccgu

SEQ ID NO: 2391910 - RNA, 19 nt, Artificial Sequence
  Description of Artificial Sequence: Synthetic oligonucleotide
  Sense strand starting at position 3943 of SEQ ID NO: 1886176
ggucauaugugucuuuaaa

SEQ ID NO: 2391911 - RNA, 19 nt, Artificial Sequence
  Description of Artificial Sequence: Synthetic oligonucleotide
  Antisense strand to SEQ ID NO: 2391910
uuuaaagacacauaugacc

SEQ ID NO: 2391912 - RNA, 19 nt, Artificial Sequence
  Description of Artificial Sequence: Synthetic oligonucleotide
  Sense strand starting at position 22 of SEQ ID NO: 1886177
auauaagguucucgacacu

SEQ ID NO: 2391913 - RNA, 19 nt, Artificial Sequence
  Description of Artificial Sequence: Synthetic oligonucleotide
  Antisense strand to SEQ ID NO: 2391912
agugucgagaaccuuauau

SEQ ID NO: 2391914 - RNA, 19 nt, Artificial Sequence
  Description of Artificial Sequence: Synthetic oligonucleotide
  Sense strand starting at position 79 of SEQ ID NO: 1886177
ccagcaggaccaugauaua

SEQ ID NO: 2391915 - RNA, 19 nt, Artificial Sequence
  Description of Artificial Sequence: Synthetic oligonucleotide
  Antisense strand to SEQ ID NO: 2391914
uauaucaugguccugcugg

SEQ ID NO: 2391916 - RNA, 19 nt, Artificial Sequence
  Description of Artificial Sequence: Synthetic oligonucleotide
  Sense strand starting at position 307 of SEQ ID NO: 1886177
auggguucuauguggaaca

SEQ ID NO: 2391917 - RNA, 19 nt, Artificial Sequence
  Description of Artificial Sequence: Synthetic oligonucleotide
  Antisense strand to SEQ ID NO: 2391916
uguuccacauagaacccau

SEQ ID NO: 2391918 - RNA, 19 nt, Artificial Sequence
  Description of Artificial Sequence: Synthetic oligonucleotide
  Sense strand starting at position 473 of SEQ ID NO: 1886177
ccugcaugaucccaggguu

SEQ ID NO: 2391919 - RNA, 19 nt, Artificial Sequence
  Description of Artificial Sequence: Synthetic oligonucleotide
  Antisense strand to SEQ ID NO: 2391918
aacccugggaucaugcagg

SEQ ID NO: 2391920 - RNA, 19 nt, Artificial Sequence
  Description of Artificial Sequence: Synthetic oligonucleotide
  Sense strand starting at position 764 of SEQ ID NO: 1886177
gguaucuucucguuuccuu

SEQ ID NO: 2391921 - RNA, 19 nt, Artificial Sequence
  Description of Artificial Sequence: Synthetic oligonucleotide
  Antisense strand to SEQ ID NO: 2391920
aaggaaacgagaagauacc

SEQ ID NO: 2391922 - RNA, 19 nt, Artificial Sequence
  Description of Artificial Sequence: Synthetic oligonucleotide
  Sense strand starting at position 834 of SEQ ID NO: 1886177
guggcaaauucccgguaca

SEQ ID NO: 2391923 - RNA, 19 nt, Artificial Sequence
  Description of Artificial Sequence: Synthetic oligonucleotide
  Antisense strand to SEQ ID NO: 2391922
uguaccgggaauuugccac

SEQ ID NO: 2391924 - RNA, 19 nt, Artificial Sequence
  Description of Artificial Sequence: Synthetic oligonucleotide
  Sense strand starting at position 835 of SEQ ID NO: 1886177
uggcaaauucccgguacaa

SEQ ID NO: 2391925 - RNA, 19 nt, Artificial Sequence
  Description of Artificial Sequence: Synthetic oligonucleotide
  Antisense strand to SEQ ID NO: 2391924
uuguaccgggaauuugcca

SEQ ID NO: 2391926 - RNA, 19 nt, Artificial Sequence
  Description of Artificial Sequence: Synthetic oligonucleotide
  Sense strand starting at position 837 of SEQ ID NO: 1886177
gcaaauucccgguacaaca

SEQ ID NO: 2391927 - RNA, 19 nt, Artificial Sequence
  Description of Artificial Sequence: Synthetic oligonucleotide
  Antisense strand to SEQ ID NO: 2391926
uguuguaccgggaauuugc

SEQ ID NO: 2391928 - RNA, 19 nt, Artificial Sequence
  Description of Artificial Sequence: Synthetic oligonucleotide
  Sense strand starting at position 880 of SEQ ID NO: 1886177
ucagaaugccacuguuacu

SEQ ID NO: 2391929 - RNA, 19 nt, Artificial Sequence
  Description of Artificial Sequence: Synthetic oligonucleotide
  Antisense strand to SEQ ID NO: 2391928
aguaacaguggcauucuga

SEQ ID NO: 2391930 - RNA, 19 nt, Artificial Sequence
  Description of Artificial Sequence: Synthetic oligonucleotide
  Sense strand starting at position 1323 of SEQ ID NO: 1886177
cuuugcuaucuggaccauu

SEQ ID NO: 2391931 - RNA, 19 nt, Artificial Sequence
  Description of Artificial Sequence: Synthetic oligonucleotide
  Antisense strand to SEQ ID NO: 2391930
aaugguccagauagcaaag

SEQ ID NO: 2391932 - RNA, 19 nt, Artificial Sequence
  Description of Artificial Sequence: Synthetic oligonucleotide
  Sense strand starting at position 1340 of SEQ ID NO: 1886177
uugucauuccugcagaucu

SEQ ID NO: 2391933 - RNA, 19 nt, Artificial Sequence
  Description of Artificial Sequence: Synthetic oligonucleotide
  Antisense strand to SEQ ID NO: 2391932
agaucugcaggaaugacaa

SEQ ID NO: 2391934 - RNA, 19 nt, Artificial Sequence
  Description of Artificial Sequence: Synthetic oligonucleotide
  Sense strand starting at position 1365 of SEQ ID NO: 1886177
aaggcauccuccucaggua

SEQ ID NO: 2391935 - RNA, 19 nt, Artificial Sequence
  Description of Artificial Sequence: Synthetic oligonucleotide
  Antisense strand to SEQ ID NO: 2391934
uaccugaggaggaugccuu

SEQ ID NO: 2391936 - RNA, 19 nt, Artificial Sequence
  Description of Artificial Sequence: Synthetic oligonucleotide
  Sense strand starting at position 1366 of SEQ ID NO: 1886177
aggcauccuccucagguaa

SEQ ID NO: 2391937 - RNA, 19 nt, Artificial Sequence
  Description of Artificial Sequence: Synthetic oligonucleotide
  Antisense strand to SEQ ID NO: 2391936
uuaccugaggaggaugccu

SEQ ID NO: 2391938 - RNA, 19 nt, Artificial Sequence
  Description of Artificial Sequence: Synthetic oligonucleotide
  Sense strand starting at position 1368 of SEQ ID NO: 1886177
gcauccuccucagguaaga

SEQ ID NO: 2391939 - RNA, 19 nt, Artificial Sequence
  Description of Artificial Sequence: Synthetic oligonucleotide
  Antisense strand to SEQ ID NO: 2391938
ucuuaccugaggaggaugc

SEQ ID NO: 2391940 - RNA, 19 nt, Artificial Sequence
  Description of Artificial Sequence: Synthetic oligonucleotide
  Sense strand starting at position 1379 of SEQ ID NO: 1886177
agguaagauucccaaggaa

SEQ ID NO: 2391941 - RNA, 19 nt, Artificial Sequence
  Description of Artificial Sequence: Synthetic oligonucleotide
  Antisense strand to SEQ ID NO: 2391940
uuccuugggaaucuuaccu

SEQ ID NO: 2391942 - RNA, 19 nt, Artificial Sequence
  Description of Artificial Sequence: Synthetic oligonucleotide
  Sense strand starting at position 1472 of SEQ ID NO: 1886177
aagucugacccucagugaa

SEQ ID NO: 2391943 - RNA, 19 nt, Artificial Sequence
  Description of Artificial Sequence: Synthetic oligonucleotide
  Antisense strand to SEQ ID NO: 2391942
uucacugagggucagacuu

SEQ ID NO: 2391944 - RNA, 19 nt, Artificial Sequence
  Description of Artificial Sequence: Synthetic oligonucleotide
  Sense strand starting at position 2046 of SEQ ID NO: 1886177
guccauugguccugaugca

SEQ ID NO: 2391945 - RNA, 19 nt, Artificial Sequence
  Description of Artificial Sequence: Synthetic oligonucleotide
  Antisense strand to SEQ ID NO: 2391944
ugcaucaggaccaauggac

SEQ ID NO: 2391946 - RNA, 19 nt, Artificial Sequence
  Description of Artificial Sequence: Synthetic oligonucleotide
  Sense strand starting at position 2047 of SEQ ID NO: 1886177
uccauugguccugaugcaa

SEQ ID NO: 2391947 - RNA, 19 nt, Artificial Sequence
  Description of Artificial Sequence: Synthetic oligonucleotide
  Antisense strand to SEQ ID NO: 2391946
uugcaucaggaccaaugga

SEQ ID NO: 2391948 - RNA, 19 nt, Artificial Sequence
  Description of Artificial Sequence: Synthetic oligonucleotide
  Sense strand starting at position 2187 of SEQ ID NO: 1886177
cugaccugucacggauaca

SEQ ID NO: 2391949 - RNA, 19 nt, Artificial Sequence
  Description of Artificial Sequence: Synthetic oligonucleotide
  Antisense strand to SEQ ID NO: 2391948
uguauccgugacaggucag

SEQ ID NO: 2391950 - RNA, 19 nt, Artificial Sequence
  Description of Artificial Sequence: Synthetic oligonucleotide
  Sense strand starting at position 2518 of SEQ ID NO: 1886177
gaaaucacagccuggagua

SEQ ID NO: 2391951 - RNA, 19 nt, Artificial Sequence
  Description of Artificial Sequence: Synthetic oligonucleotide
  Antisense strand to SEQ ID NO: 2391950
uacuccaggcugugauuuc

SEQ ID NO: 2391952 - RNA, 19 nt, Artificial Sequence
  Description of Artificial Sequence: Synthetic oligonucleotide
  Sense strand starting at position 2703 of SEQ ID NO: 1886177
ggcagcaaauucucaggau

SEQ ID NO: 2391953 - RNA, 19 nt, Artificial Sequence
  Description of Artificial Sequence: Synthetic oligonucleotide
  Antisense strand to SEQ ID NO: 2391952
auccugagaauuugcugcc

SEQ ID NO: 2391954 - RNA, 19 nt, Artificial Sequence
  Description of Artificial Sequence: Synthetic oligonucleotide
  Sense strand starting at position 2814 of SEQ ID NO: 1886177
gucgacuuggccuaaagcu

SEQ ID NO: 2391955 - RNA, 19 nt, Artificial Sequence
  Description of Artificial Sequence: Synthetic oligonucleotide
  Antisense strand to SEQ ID NO: 2391954
agcuuuaggccaagucgac

SEQ ID NO: 2391956 - RNA, 19 nt, Artificial Sequence
  Description of Artificial Sequence: Synthetic oligonucleotide
  Sense strand starting at position 2942 of SEQ ID NO: 1886177
ugggaugguccauagcuca

SEQ ID NO: 2391957 - RNA, 19 nt, Artificial Sequence
  Description of Artificial Sequence: Synthetic oligonucleotide
  Antisense strand to SEQ ID NO: 2391956
ugagcuauggaccauccca

SEQ ID NO: 2391958 - RNA, 19 nt, Artificial Sequence
  Description of Artificial Sequence: Synthetic oligonucleotide
  Sense strand starting at position 2980 of SEQ ID NO: 1886177
gggacauaguuggguacaa

SEQ ID NO: 2391959 - RNA, 19 nt, Artificial Sequence
  Description of Artificial Sequence: Synthetic oligonucleotide
  Antisense strand to SEQ ID NO: 2391958
uuguacccaacuauguccc

SEQ ID NO: 2391960 - RNA, 19 nt, Artificial Sequence
  Description of Artificial Sequence: Synthetic oligonucleotide
  Sense strand starting at position 2981 of SEQ ID NO: 1886177
ggacauaguuggguacaau

SEQ ID NO: 2391961 - RNA, 19 nt, Artificial Sequence
  Description of Artificial Sequence: Synthetic oligonucleotide
  Antisense strand to SEQ ID NO: 2391960
auuguacccaacuaugucc

SEQ ID NO: 2391962 - RNA, 19 nt, Artificial Sequence
  Description of Artificial Sequence: Synthetic oligonucleotide
  Sense strand starting at position 2990 of SEQ ID NO: 1886177
uggguacaauccuugaauc

SEQ ID NO: 2391963 - RNA, 19 nt, Artificial Sequence
  Description of Artificial Sequence: Synthetic oligonucleotide
  Antisense strand to SEQ ID NO: 2391962
gauucaaggauuguaccca

SEQ ID NO: 2391964 - RNA, 19 nt, Artificial Sequence
  Description of Artificial Sequence: Synthetic oligonucleotide
  Sense strand starting at position 2991 of SEQ ID NO: 1886177
ggguacaauccuugaaucu

SEQ ID NO: 2391965 - RNA, 19 nt, Artificial Sequence
  Description of Artificial Sequence: Synthetic oligonucleotide
  Antisense strand to SEQ ID NO: 2391964
agauucaaggauuguaccc

SEQ ID NO: 2391966 - RNA, 19 nt, Artificial Sequence
  Description of Artificial Sequence: Synthetic oligonucleotide
  Sense strand starting at position 2992 of SEQ ID NO: 1886177
gguacaauccuugaaucuc

SEQ ID NO: 2391967 - RNA, 19 nt, Artificial Sequence
  Description of Artificial Sequence: Synthetic oligonucleotide
  Antisense strand to SEQ ID NO: 2391966
gagauucaaggauuguacc

SEQ ID NO: 2391968 - RNA, 19 nt, Artificial Sequence
  Description of Artificial Sequence: Synthetic oligonucleotide
  Sense strand starting at position 3235 of SEQ ID NO: 1886177
gcaacaucuuggguccagu

SEQ ID NO: 2391969 - RNA, 19 nt, Artificial Sequence
  Description of Artificial Sequence: Synthetic oligonucleotide
  Antisense strand to SEQ ID NO: 2391968
acuggacccaagauguugc

SEQ ID NO: 2391970 - RNA, 19 nt, Artificial Sequence
  Description of Artificial Sequence: Synthetic oligonucleotide
  Sense strand starting at position 3319 of SEQ ID NO: 1886177
aggaaacccuccuguccua

SEQ ID NO: 2391971 - RNA, 19 nt, Artificial Sequence
  Description of Artificial Sequence: Synthetic oligonucleotide
  Antisense strand to SEQ ID NO: 2391970
uaggacaggaggguuuccu

SEQ ID NO: 2391972 - RNA, 19 nt, Artificial Sequence
  Description of Artificial Sequence: Synthetic oligonucleotide
  Sense strand starting at position 3368 of SEQ ID NO: 1886177
ugacucauggcccaugaca

SEQ ID NO: 2391973 - RNA, 19 nt, Artificial Sequence
  Description of Artificial Sequence: Synthetic oligonucleotide
  Antisense strand to SEQ ID NO: 2391972
ugucaugggccaugaguca

SEQ ID NO: 2391974 - RNA, 19 nt, Artificial Sequence
  Description of Artificial Sequence: Synthetic oligonucleotide
  Sense strand starting at position 3427 of SEQ ID NO: 1886177
gcccuucugagcugaagag

SEQ ID NO: 2391975 - RNA, 19 nt, Artificial Sequence
  Description of Artificial Sequence: Synthetic oligonucleotide
  Antisense strand to SEQ ID NO: 2391974
cucuucagcucagaagggc

SEQ ID NO: 2391976 - RNA, 19 nt, Artificial Sequence
  Description of Artificial Sequence: Synthetic oligonucleotide
  Sense strand starting at position 3436 of SEQ ID NO: 1886177
agcugaagagcucacugaa

SEQ ID NO: 2391977 - RNA, 19 nt, Artificial Sequence
  Description of Artificial Sequence: Synthetic oligonucleotide
  Antisense strand to SEQ ID NO: 2391976
uucagugagcucuucagcu

SEQ ID NO: 2391978 - RNA, 19 nt, Artificial Sequence
  Description of Artificial Sequence: Synthetic oligonucleotide
  Sense strand starting at position 3549 of SEQ ID NO: 1886177
cugugcuucacggaggagu

SEQ ID NO: 2391979 - RNA, 19 nt, Artificial Sequence
  Description of Artificial Sequence: Synthetic oligonucleotide
  Antisense strand to SEQ ID NO: 2391978
acuccuccgugaagcacag

SEQ ID NO: 2391980 - RNA, 19 nt, Artificial Sequence
  Description of Artificial Sequence: Synthetic oligonucleotide
  Sense strand starting at position 3577 of SEQ ID NO: 1886177
ggguugggucccugugaga

SEQ ID NO: 2391981 - RNA, 19 nt, Artificial Sequence
  Description of Artificial Sequence: Synthetic oligonucleotide
  Antisense strand to SEQ ID NO: 2391980
ucucacagggacccaaccc

SEQ ID NO: 2391982 - RNA, 19 nt, Artificial Sequence
  Description of Artificial Sequence: Synthetic oligonucleotide
  Sense strand starting at position 3640 of SEQ ID NO: 1886177
cugccaggguccuugugau

SEQ ID NO: 2391983 - RNA, 19 nt, Artificial Sequence
  Description of Artificial Sequence: Synthetic oligonucleotide
  Antisense strand to SEQ ID NO: 2391982
aucacaaggacccuggcag

SEQ ID NO: 2391984 - RNA, 19 nt, Artificial Sequence
  Description of Artificial Sequence: Synthetic oligonucleotide
  Sense strand starting at position 2098 of SEQ ID NO: 1886178
ucgggucucacagagcuaa

SEQ ID NO: 2391985 - RNA, 19 nt, Artificial Sequence
  Description of Artificial Sequence: Synthetic oligonucleotide
  Antisense strand to SEQ ID NO: 2391984
uuagcucugugagacccga

SEQ ID NO: 2391986 - RNA, 19 nt, Artificial Sequence
  Description of Artificial Sequence: Synthetic oligonucleotide
  Sense strand starting at position 2135 of SEQ ID NO: 1886178
cuagcaaacuguccaaaga

SEQ ID NO: 2391987 - RNA, 19 nt, Artificial Sequence
  Description of Artificial Sequence: Synthetic oligonucleotide
  Antisense strand to SEQ ID NO: 2391986
ucuuuggacaguuugcuag

SEQ ID NO: 2391988 - RNA, 19 nt, Artificial Sequence
  Description of Artificial Sequence: Synthetic oligonucleotide
  Sense strand starting at position 2287 of SEQ ID NO: 1886178
guaaacaaaugguauagaa

SEQ ID NO: 2391989 - RNA, 19 nt, Artificial Sequence
  Description of Artificial Sequence: Synthetic oligonucleotide
  Antisense strand to SEQ ID NO: 2391988
uucuauaccauuuguuuac

SEQ ID NO: 2391990 - RNA, 19 nt, Artificial Sequence
  Description of Artificial Sequence: Synthetic oligonucleotide
  Sense strand starting at position 2470 of SEQ ID NO: 1886178
ccugauacauaucuccgaa

SEQ ID NO: 2391991 - RNA, 19 nt, Artificial Sequence
  Description of Artificial Sequence: Synthetic oligonucleotide
  Antisense strand to SEQ ID NO: 2391990
uucggagauauguaucagg

SEQ ID NO: 2391992 - RNA, 19 nt, Artificial Sequence
  Description of Artificial Sequence: Synthetic oligonucleotide
  Sense strand starting at position 2472 of SEQ ID NO: 1886178
ugauacauaucuccgaaac

SEQ ID NO: 2391993 - RNA, 19 nt, Artificial Sequence
  Description of Artificial Sequence: Synthetic oligonucleotide
  Antisense strand to SEQ ID NO: 2391992
guuucggagauauguauca

SEQ ID NO: 2391994 - RNA, 19 nt, Artificial Sequence
  Description of Artificial Sequence: Synthetic oligonucleotide
  Sense strand starting at position 2639 of SEQ ID NO: 1886178
cccucaaggucacuguauu

SEQ ID NO: 2391995 - RNA, 19 nt, Artificial Sequence
  Description of Artificial Sequence: Synthetic oligonucleotide
  Antisense strand to SEQ ID NO: 2391994
aauacagugaccuugaggg

SEQ ID NO: 2391996 - RNA, 19 nt, Artificial Sequence
  Description of Artificial Sequence: Synthetic oligonucleotide
  Sense strand starting at position 2645 of SEQ ID NO: 1886178
aggucacuguauucucauu

SEQ ID NO: 2391997 - RNA, 19 nt, Artificial Sequence
  Description of Artificial Sequence: Synthetic oligonucleotide
  Antisense strand to SEQ ID NO: 2391996
aaugagaauacagugaccu

SEQ ID NO: 2391998 - RNA, 19 nt, Artificial Sequence
  Description of Artificial Sequence: Synthetic oligonucleotide
  Sense strand starting at position 2650 of SEQ ID NO: 1886178
acuguauucucauuaguuc

SEQ ID NO: 2391999 - RNA, 19 nt, Artificial Sequence
  Description of Artificial Sequence: Synthetic oligonucleotide
  Antisense strand to SEQ ID NO: 2391998
gaacuaaugagaauacagu

SEQ ID NO: 2392000 - RNA, 19 nt, Artificial Sequence
  Description of Artificial Sequence: Synthetic oligonucleotide
  Sense strand starting at position 2708 of SEQ ID NO: 1886178
augugagccuccuucuuga

SEQ ID NO: 2392001 - RNA, 19 nt, Artificial Sequence
  Description of Artificial Sequence: Synthetic oligonucleotide
  Antisense strand to SEQ ID NO: 2392000
ucaagaaggaggcucacau

SEQ ID NO: 2392002 - RNA, 19 nt, Artificial Sequence
  Description of Artificial Sequence: Synthetic oligonucleotide
  Sense strand starting at position 2721 of SEQ ID NO: 1886178
ucuugauucuugggcacuu

SEQ ID NO: 2392003 - RNA, 19 nt, Artificial Sequence
  Description of Artificial Sequence: Synthetic oligonucleotide
  Antisense strand to SEQ ID NO: 2392002
aagugcccaagaaucaaga

SEQ ID NO: 2392004 - RNA, 19 nt, Artificial Sequence
  Description of Artificial Sequence: Synthetic oligonucleotide
  Sense strand starting at position 2722 of SEQ ID NO: 1886178
cuugauucuugggcacuua

SEQ ID NO: 2392005 - RNA, 19 nt, Artificial Sequence
  Description of Artificial Sequence: Synthetic oligonucleotide
  Antisense strand to SEQ ID NO: 2392004
uaagugcccaagaaucaag

SEQ ID NO: 2392006 - RNA, 19 nt, Artificial Sequence
  Description of Artificial Sequence: Synthetic oligonucleotide
  Sense strand starting at position 2761 of SEQ ID NO: 1886178
guugaaucggcucagcaaa

SEQ ID NO: 2392007 - RNA, 19 nt, Artificial Sequence
  Description of Artificial Sequence: Synthetic oligonucleotide
  Antisense strand to SEQ ID NO: 2392006
uuugcugagccgauucaac

SEQ ID NO: 2392008 - RNA, 19 nt, Artificial Sequence
  Description of Artificial Sequence: Synthetic oligonucleotide
  Sense strand starting at position 2848 of SEQ ID NO: 1886178
gcaagcaggcauugugaaa

SEQ ID NO: 2392009 - RNA, 19 nt, Artificial Sequence
  Description of Artificial Sequence: Synthetic oligonucleotide
  Antisense strand to SEQ ID NO: 2392008
uuucacaaugccugcuugc

SEQ ID NO: 2392010 - RNA, 19 nt, Artificial Sequence
  Description of Artificial Sequence: Synthetic oligonucleotide
  Sense strand starting at position 2866 of SEQ ID NO: 1886178
aaaggauuccagugaccca

SEQ ID NO: 2392011 - RNA, 19 nt, Artificial Sequence
  Description of Artificial Sequence: Synthetic oligonucleotide
  Antisense strand to SEQ ID NO: 2392010
ugggucacuggaauccuuu

SEQ ID NO: 2392012 - RNA, 19 nt, Artificial Sequence
  Description of Artificial Sequence: Synthetic oligonucleotide
  Sense strand starting at position 2914 of SEQ ID NO: 1886178
gaagaacuguuucuccaug

SEQ ID NO: 2392013 - RNA, 19 nt, Artificial Sequence
  Description of Artificial Sequence: Synthetic oligonucleotide
  Antisense strand to SEQ ID NO: 2392012
cauggagaaacaguucuuc

SEQ ID NO: 2392014 - RNA, 19 nt, Artificial Sequence
  Description of Artificial Sequence: Synthetic oligonucleotide
  Sense strand starting at position 48 of SEQ ID NO: 1886179
gaagaacuguuucuccaug

SEQ ID NO: 2392015 - RNA, 19 nt, Artificial Sequence
  Description of Artificial Sequence: Synthetic oligonucleotide
  Antisense strand to SEQ ID NO: 2392014
cauggagaaacaguucuuc

SEQ ID NO: 2392016 - RNA, 19 nt, Artificial Sequence
  Description of Artificial Sequence: Synthetic oligonucleotide
  Sense strand starting at position 1985 of SEQ ID NO: 1886179
cugugucaucaugaaccua

SEQ ID NO: 2392017 - RNA, 19 nt, Artificial Sequence
  Description of Artificial Sequence: Synthetic oligonucleotide
  Antisense strand to SEQ ID NO: 2392016
uagguucaugaugacacag

SEQ ID NO: 2392018 - RNA, 19 nt, Artificial Sequence
  Description of Artificial Sequence: Synthetic oligonucleotide
  Sense strand starting at position 2003 of SEQ ID NO: 1886179
agccaaggccucugcaaua

SEQ ID NO: 2392019 - RNA, 19 nt, Artificial Sequence
  Description of Artificial Sequence: Synthetic oligonucleotide
  Antisense strand to SEQ ID NO: 2392018
uauugcagaggccuuggcu

SEQ ID NO: 2392020 - RNA, 19 nt, Artificial Sequence
  Description of Artificial Sequence: Synthetic oligonucleotide
  Sense strand starting at position 2061 of SEQ ID NO: 1886179
guuuacguuucuguccuaa

SEQ ID NO: 2392021 - RNA, 19 nt, Artificial Sequence
  Description of Artificial Sequence: Synthetic oligonucleotide
  Antisense strand to SEQ ID NO: 2392020
uuaggacagaaacguaaac

SEQ ID NO: 2392022 - RNA, 19 nt, Artificial Sequence
  Description of Artificial Sequence: Synthetic oligonucleotide
  Sense strand starting at position 2110 of SEQ ID NO: 1886179
ugacacuacugaguaggau

SEQ ID NO: 2392023 - RNA, 19 nt, Artificial Sequence
  Description of Artificial Sequence: Synthetic oligonucleotide
  Antisense strand to SEQ ID NO: 2392022
auccuacucaguaguguca

SEQ ID NO: 2392024 - RNA, 19 nt, Artificial Sequence
  Description of Artificial Sequence: Synthetic oligonucleotide
  Sense strand starting at position 2204 of SEQ ID NO: 1886179
aaugguaucguaugacacu

SEQ ID NO: 2392025 - RNA, 19 nt, Artificial Sequence
  Description of Artificial Sequence: Synthetic oligonucleotide
  Antisense strand to SEQ ID NO: 2392024
agugucauacgauaccauu

SEQ ID NO: 2392026 - RNA, 19 nt, Artificial Sequence
  Description of Artificial Sequence: Synthetic oligonucleotide
  Sense strand starting at position 2259 of SEQ ID NO: 1886179
agaugucauucucccacua

SEQ ID NO: 2392027 - RNA, 19 nt, Artificial Sequence
  Description of Artificial Sequence: Synthetic oligonucleotide
  Antisense strand to SEQ ID NO: 2392026
uagugggagaaugacaucu

SEQ ID NO: 2392028 - RNA, 19 nt, Artificial Sequence
  Description of Artificial Sequence: Synthetic oligonucleotide
  Sense strand starting at position 2320 of SEQ ID NO: 1886179
gcauuauuauguguaugga

SEQ ID NO: 2392029 - RNA, 19 nt, Artificial Sequence
  Description of Artificial Sequence: Synthetic oligonucleotide
  Antisense strand to SEQ ID NO: 2392028
uccauacacauaauaaugc

SEQ ID NO: 2392030 - RNA, 19 nt, Artificial Sequence
  Description of Artificial Sequence: Synthetic oligonucleotide
  Sense strand starting at position 2323 of SEQ ID NO: 1886179
uuauuauguguauggacaa

SEQ ID NO: 2392031 - RNA, 19 nt, Artificial Sequence
  Description of Artificial Sequence: Synthetic oligonucleotide
  Antisense strand to SEQ ID NO: 2392030
uuguccauacacauaauaa

SEQ ID NO: 2392032 - RNA, 19 nt, Artificial Sequence
  Description of Artificial Sequence: Synthetic oligonucleotide
  Sense strand starting at position 2358 of SEQ ID NO: 1886179
augcaauuauaagacagaa

SEQ ID NO: 2392033 - RNA, 19 nt, Artificial Sequence
  Description of Artificial Sequence: Synthetic oligonucleotide
  Antisense strand to SEQ ID NO: 2392032
uucugucuuauaauugcau

SEQ ID NO: 2392034 - RNA, 19 nt, Artificial Sequence
  Description of Artificial Sequence: Synthetic oligonucleotide
  Sense strand starting at position 2373 of SEQ ID NO: 1886179
agaaucaagcaauguauua

SEQ ID NO: 2392035 - RNA, 19 nt, Artificial Sequence
  Description of Artificial Sequence: Synthetic oligonucleotide
  Antisense strand to SEQ ID NO: 2392034
uaauacauugcuugauucu

SEQ ID NO: 2392036 - RNA, 19 nt, Artificial Sequence
  Description of Artificial Sequence: Synthetic oligonucleotide
  Sense strand starting at position 2757 of SEQ ID NO: 1886179
ugacuaccugcugaaauca

SEQ ID NO: 2392037 - RNA, 19 nt, Artificial Sequence
  Description of Artificial Sequence: Synthetic oligonucleotide
  Antisense strand to SEQ ID NO: 2392036
ugauuucagcagguaguca

SEQ ID NO: 2392038 - RNA, 19 nt, Artificial Sequence
  Description of Artificial Sequence: Synthetic oligonucleotide
  Sense strand starting at position 2765 of SEQ ID NO: 1886179
ugcugaaaucagugaaggu

SEQ ID NO: 2392039 - RNA, 19 nt, Artificial Sequence
  Description of Artificial Sequence: Synthetic oligonucleotide
  Antisense strand to SEQ ID NO: 2392038
accuucacugauuucagca

SEQ ID NO: 2392040 - RNA, 19 nt, Artificial Sequence
  Description of Artificial Sequence: Synthetic oligonucleotide
  Sense strand starting at position 2766 of SEQ ID NO: 1886179
gcugaaaucagugaaggua

SEQ ID NO: 2392041 - RNA, 19 nt, Artificial Sequence
  Description of Artificial Sequence: Synthetic oligonucleotide
  Antisense strand to SEQ ID NO: 2392040
uaccuucacugauuucagc

SEQ ID NO: 2392042 - RNA, 19 nt, Artificial Sequence
  Description of Artificial Sequence: Synthetic oligonucleotide
  Sense strand starting at position 2769 of SEQ ID NO: 1886179
gaaaucagugaagguagua

SEQ ID NO: 2392043 - RNA, 19 nt, Artificial Sequence
  Description of Artificial Sequence: Synthetic oligonucleotide
  Antisense strand to SEQ ID NO: 2392042
uacuaccuucacugauuuc

SEQ ID NO: 2392044 - RNA, 19 nt, Artificial Sequence
  Description of Artificial Sequence: Synthetic oligonucleotide
  Sense strand starting at position 2774 of SEQ ID NO: 1886179
cagugaagguaguaucaga

SEQ ID NO: 2392045 - RNA, 19 nt, Artificial Sequence
  Description of Artificial Sequence: Synthetic oligonucleotide
  Antisense strand to SEQ ID NO: 2392044
ucugauacuaccuucacug

SEQ ID NO: 2392046 - RNA, 19 nt, Artificial Sequence
  Description of Artificial Sequence: Synthetic oligonucleotide
  Sense strand starting at position 2779 of SEQ ID NO: 1886179
aagguaguaucagagguaa

SEQ ID NO: 2392047 - RNA, 19 nt, Artificial Sequence
  Description of Artificial Sequence: Synthetic oligonucleotide
  Antisense strand to SEQ ID NO: 2392046
uuaccucugauacuaccuu

SEQ ID NO: 2392048 - RNA, 19 nt, Artificial Sequence
  Description of Artificial Sequence: Synthetic oligonucleotide
  Sense strand starting at position 2781 of SEQ ID NO: 1886179
gguaguaucagagguaaac

SEQ ID NO: 2392049 - RNA, 19 nt, Artificial Sequence
  Description of Artificial Sequence: Synthetic oligonucleotide
  Antisense strand to SEQ ID NO: 2392048
guuuaccucugauacuacc

SEQ ID NO: 2392050 - RNA, 19 nt, Artificial Sequence
  Description of Artificial Sequence: Synthetic oligonucleotide
  Sense strand starting at position 2819 of SEQ ID NO: 1886179
uuugcuaaucuuugaaaug

SEQ ID NO: 2392051 - RNA, 19 nt, Artificial Sequence
  Description of Artificial Sequence: Synthetic oligonucleotide
  Antisense strand to SEQ ID NO: 2392050
cauuucaaagauuagcaaa

SEQ ID NO: 2392052 - RNA, 19 nt, Artificial Sequence
  Description of Artificial Sequence: Synthetic oligonucleotide
  Sense strand starting at position 2820 of SEQ ID NO: 1886179
uugcuaaucuuugaaauga

SEQ ID NO: 2392053 - RNA, 19 nt, Artificial Sequence
  Description of Artificial Sequence: Synthetic oligonucleotide
  Antisense strand to SEQ ID NO: 2392052
ucauuucaaagauuagcaa

SEQ ID NO: 2392054 - RNA, 19 nt, Artificial Sequence
  Description of Artificial Sequence: Synthetic oligonucleotide
  Sense strand starting at position 2883 of SEQ ID NO: 1886179
cuauguaaaucaguuucua

SEQ ID NO: 2392055 - RNA, 19 nt, Artificial Sequence
  Description of Artificial Sequence: Synthetic oligonucleotide
  Antisense strand to SEQ ID NO: 2392054
uagaaacugauuuacauag

SEQ ID NO: 2392056 - RNA, 19 nt, Artificial Sequence
  Description of Artificial Sequence: Synthetic oligonucleotide
  Sense strand starting at position 2891 of SEQ ID NO: 1886179
aucaguuucuacuuguaau

SEQ ID NO: 2392057 - RNA, 19 nt, Artificial Sequence
  Description of Artificial Sequence: Synthetic oligonucleotide
  Antisense strand to SEQ ID NO: 2392056
auuacaaguagaaacugau

SEQ ID NO: 2392058 - RNA, 19 nt, Artificial Sequence
  Description of Artificial Sequence: Synthetic oligonucleotide
  Sense strand starting at position 2938 of SEQ ID NO: 1886179
aaauaccgguauguuaaua

SEQ ID NO: 2392059 - RNA, 19 nt, Artificial Sequence
  Description of Artificial Sequence: Synthetic oligonucleotide
  Antisense strand to SEQ ID NO: 2392058
uauuaacauaccgguauuu

SEQ ID NO: 2392060 - RNA, 19 nt, Artificial Sequence
  Description of Artificial Sequence: Synthetic oligonucleotide
  Sense strand starting at position 2943 of SEQ ID NO: 1886179
ccgguauguuaauaacaaa

SEQ ID NO: 2392061 - RNA, 19 nt, Artificial Sequence
  Description of Artificial Sequence: Synthetic oligonucleotide
  Antisense strand to SEQ ID NO: 2392060
uuuguuauuaacauaccgg

SEQ ID NO: 2392062 - RNA, 19 nt, Artificial Sequence
  Description of Artificial Sequence: Synthetic oligonucleotide
  Sense strand starting at position 3009 of SEQ ID NO: 1886179
cagggagcucccuaagcaa

SEQ ID NO: 2392063 - RNA, 19 nt, Artificial Sequence
  Description of Artificial Sequence: Synthetic oligonucleotide
  Antisense strand to SEQ ID NO: 2392062
uugcuuagggagcucccug

SEQ ID NO: 2392064 - RNA, 19 nt, Artificial Sequence
  Description of Artificial Sequence: Synthetic oligonucleotide
  Sense strand starting at position 3164 of SEQ ID NO: 1886179
augaaagcaugucaaacau

SEQ ID NO: 2392065 - RNA, 19 nt, Artificial Sequence
  Description of Artificial Sequence: Synthetic oligonucleotide
  Antisense strand to SEQ ID NO: 2392064
auguuugacaugcuuucau

SEQ ID NO: 2392066 - RNA, 19 nt, Artificial Sequence
  Description of Artificial Sequence: Synthetic oligonucleotide
  Sense strand starting at position 3173 of SEQ ID NO: 1886179
ugucaaacaugauaugcaa

SEQ ID NO: 2392067 - RNA, 19 nt, Artificial Sequence
  Description of Artificial Sequence: Synthetic oligonucleotide
  Antisense strand to SEQ ID NO: 2392066
uugcauaucauguuugaca

SEQ ID NO: 2392068 - RNA, 19 nt, Artificial Sequence
  Description of Artificial Sequence: Synthetic oligonucleotide
  Sense strand starting at position 3204 of SEQ ID NO: 1886179
uaaggagccgguuaauaaa

SEQ ID NO: 2392069 - RNA, 19 nt, Artificial Sequence
  Description of Artificial Sequence: Synthetic oligonucleotide
  Antisense strand to SEQ ID NO: 2392068
uuuauuaaccggcuccuua

SEQ ID NO: 2392070 - RNA, 19 nt, Artificial Sequence
  Description of Artificial Sequence: Synthetic oligonucleotide
  Sense strand starting at position 3221 of SEQ ID NO: 1886179
aaauguguaucaggaaauc

SEQ ID NO: 2392071 - RNA, 19 nt, Artificial Sequence
  Description of Artificial Sequence: Synthetic oligonucleotide
  Antisense strand to SEQ ID NO: 2392070
gauuuccugauacacauuu

SEQ ID NO: 2392072 - RNA, 19 nt, Artificial Sequence
  Description of Artificial Sequence: Synthetic oligonucleotide
  Sense strand starting at position 3237 of SEQ ID NO: 1886179
aucagaaaguuguugacca

SEQ ID NO: 2392073 - RNA, 19 nt, Artificial Sequence
  Description of Artificial Sequence: Synthetic oligonucleotide
  Antisense strand to SEQ ID NO: 2392072
uggucaacaacuuucugau

SEQ ID NO: 2392074 - RNA, 19 nt, Artificial Sequence
  Description of Artificial Sequence: Synthetic oligonucleotide
  Sense strand starting at position 3238 of SEQ ID NO: 1886179
ucagaaaguuguugaccaa

SEQ ID NO: 2392075 - RNA, 19 nt, Artificial Sequence
  Description of Artificial Sequence: Synthetic oligonucleotide
  Antisense strand to SEQ ID NO: 2392074
uuggucaacaacuuucuga

SEQ ID NO: 2392076 - RNA, 19 nt, Artificial Sequence
  Description of Artificial Sequence: Synthetic oligonucleotide
  Sense strand starting at position 3241 of SEQ ID NO: 1886179
gaaaguuguugaccaacca

SEQ ID NO: 2392077 - RNA, 19 nt, Artificial Sequence
  Description of Artificial Sequence: Synthetic oligonucleotide
  Antisense strand to SEQ ID NO: 2392076
ugguuggucaacaacuuuc

SEQ ID NO: 2392078 - RNA, 19 nt, Artificial Sequence
  Description of Artificial Sequence: Synthetic oligonucleotide
  Sense strand starting at position 3264 of SEQ ID NO: 1886179
uuagaugagacauguaugu

SEQ ID NO: 2392079 - RNA, 19 nt, Artificial Sequence
  Description of Artificial Sequence: Synthetic oligonucleotide
  Antisense strand to SEQ ID NO: 2392078
acauacaugucucaucuaa

SEQ ID NO: 2392080 - RNA, 19 nt, Artificial Sequence
  Description of Artificial Sequence: Synthetic oligonucleotide
  Sense strand starting at position 3592 of SEQ ID NO: 1886179
acguguauguaguuuaaug

SEQ ID NO: 2392081 - RNA, 19 nt, Artificial Sequence
  Description of Artificial Sequence: Synthetic oligonucleotide
  Antisense strand to SEQ ID NO: 2392080
cauuaaacuacauacacgu

SEQ ID NO: 2392082 - RNA, 19 nt, Artificial Sequence
  Description of Artificial Sequence: Synthetic oligonucleotide
  Sense strand starting at position 3594 of SEQ ID NO: 1886179
guguauguaguuuaaugca

SEQ ID NO: 2392083 - RNA, 19 nt, Artificial Sequence
  Description of Artificial Sequence: Synthetic oligonucleotide
  Antisense strand to SEQ ID NO: 2392082
ugcauuaaacuacauacac

SEQ ID NO: 2392084 - RNA, 19 nt, Artificial Sequence
  Description of Artificial Sequence: Synthetic oligonucleotide
  Sense strand starting at position 3602 of SEQ ID NO: 1886179
aguuuaaugcaagaaugua

SEQ ID NO: 2392085 - RNA, 19 nt, Artificial Sequence
  Description of Artificial Sequence: Synthetic oligonucleotide
  Antisense strand to SEQ ID NO: 2392084
uacauucuugcauuaaacu

SEQ ID NO: 2392086 - RNA, 19 nt, Artificial Sequence
  Description of Artificial Sequence: Synthetic oligonucleotide
  Sense strand starting at position 3610 of SEQ ID NO: 1886179
gcaagaauguaggaugauu

SEQ ID NO: 2392087 - RNA, 19 nt, Artificial Sequence
  Description of Artificial Sequence: Synthetic oligonucleotide
  Antisense strand to SEQ ID NO: 2392086
aaucauccuacauucuugc

SEQ ID NO: 2392088 - RNA, 19 nt, Artificial Sequence
  Description of Artificial Sequence: Synthetic oligonucleotide
  Sense strand starting at position 3669 of SEQ ID NO: 1886179
gacugauauguugaugugu

SEQ ID NO: 2392089 - RNA, 19 nt, Artificial Sequence
  Description of Artificial Sequence: Synthetic oligonucleotide
  Antisense strand to SEQ ID NO: 2392088
acacaucaacauaucaguc

SEQ ID NO: 2392090 - RNA, 19 nt, Artificial Sequence
  Description of Artificial Sequence: Synthetic oligonucleotide
  Sense strand starting at position 3678 of SEQ ID NO: 1886179
guugaugugugucccuagu

SEQ ID NO: 2392091 - RNA, 19 nt, Artificial Sequence
  Description of Artificial Sequence: Synthetic oligonucleotide
  Antisense strand to SEQ ID NO: 2392090
acuagggacacacaucaac

SEQ ID NO: 2392092 - RNA, 19 nt, Artificial Sequence
  Description of Artificial Sequence: Synthetic oligonucleotide
  Sense strand starting at position 3707 of SEQ ID NO: 1886179
agaagcuuagacuagcauu

SEQ ID NO: 2392093 - RNA, 19 nt, Artificial Sequence
  Description of Artificial Sequence: Synthetic oligonucleotide
  Antisense strand to SEQ ID NO: 2392092
aaugcuagucuaagcuucu

SEQ ID NO: 2392094 - RNA, 19 nt, Artificial Sequence
  Description of Artificial Sequence: Synthetic oligonucleotide
  Sense strand starting at position 222 of SEQ ID NO: 1886180
uugugaaguggcucgugua

SEQ ID NO: 2392095 - RNA, 19 nt, Artificial Sequence
  Description of Artificial Sequence: Synthetic oligonucleotide
  Antisense strand to SEQ ID NO: 2392094
uacacgagccacuucacaa

SEQ ID NO: 2392096 - RNA, 19 nt, Artificial Sequence
  Description of Artificial Sequence: Synthetic oligonucleotide
  Sense strand starting at position 438 of SEQ ID NO: 1886180
agguaagaauauuccuguu

SEQ ID NO: 2392097 - RNA, 19 nt, Artificial Sequence
  Description of Artificial Sequence: Synthetic oligonucleotide
  Antisense strand to SEQ ID NO: 2392096
aacaggaauauucuuaccu

SEQ ID NO: 2392098 - RNA, 19 nt, Artificial Sequence
  Description of Artificial Sequence: Synthetic oligonucleotide
  Sense strand starting at position 531 of SEQ ID NO: 1886180
agugccaaaguucgguaua

SEQ ID NO: 2392099 - RNA, 19 nt, Artificial Sequence
  Description of Artificial Sequence: Synthetic oligonucleotide
  Antisense strand to SEQ ID NO: 2392098
uauaccgaacuuuggcacu

SEQ ID NO: 2392100 - RNA, 19 nt, Artificial Sequence
  Description of Artificial Sequence: Synthetic oligonucleotide
  Sense strand starting at position 533 of SEQ ID NO: 1886180
ugccaaaguucgguauaaa

SEQ ID NO: 2392101 - RNA, 19 nt, Artificial Sequence
  Description of Artificial Sequence: Synthetic oligonucleotide
  Antisense strand to SEQ ID NO: 2392100
uuuauaccgaacuuuggca

SEQ ID NO: 2392102 - RNA, 19 nt, Artificial Sequence
  Description of Artificial Sequence: Synthetic oligonucleotide
  Sense strand starting at position 581 of SEQ ID NO: 1886180
uuaauagaagguggguaua

SEQ ID NO: 2392103 - RNA, 19 nt, Artificial Sequence
  Description of Artificial Sequence: Synthetic oligonucleotide
  Antisense strand to SEQ ID NO: 2392102
uauacccaccuucuauuaa

SEQ ID NO: 2392104 - RNA, 19 nt, Artificial Sequence
  Description of Artificial Sequence: Synthetic oligonucleotide
  Sense strand starting at position 594 of SEQ ID NO: 1886180
gguauauacugacuauguc

SEQ ID NO: 2392105 - RNA, 19 nt, Artificial Sequence
  Description of Artificial Sequence: Synthetic oligonucleotide
  Antisense strand to SEQ ID NO: 2392104
gacauagucaguauauacc

SEQ ID NO: 2392106 - RNA, 19 nt, Artificial Sequence
  Description of Artificial Sequence: Synthetic oligonucleotide
  Sense strand starting at position 595 of SEQ ID NO: 1886180
guauauacugacuauguca

SEQ ID NO: 2392107 - RNA, 19 nt, Artificial Sequence
  Description of Artificial Sequence: Synthetic oligonucleotide
  Antisense strand to SEQ ID NO: 2392106
ugacauagucaguauauac

SEQ ID NO: 2392108 - RNA, 19 nt, Artificial Sequence
  Description of Artificial Sequence: Synthetic oligonucleotide
  Sense strand starting at position 628 of SEQ ID NO: 1886180
acaaauaguugccagcaga

SEQ ID NO: 2392109 - RNA, 19 nt, Artificial Sequence
  Description of Artificial Sequence: Synthetic oligonucleotide
  Antisense strand to SEQ ID NO: 2392108
ucugcuggcaacuauuugu

SEQ ID NO: 2392110 - RNA, 19 nt, Artificial Sequence
  Description of Artificial Sequence: Synthetic oligonucleotide
  Sense strand starting at position 942 of SEQ ID NO: 1886180
auuacauucucugaugguu

SEQ ID NO: 2392111 - RNA, 19 nt, Artificial Sequence
  Description of Artificial Sequence: Synthetic oligonucleotide
  Antisense strand to SEQ ID NO: 2392110
aaccaucagagaauguaau

SEQ ID NO: 2392112 - RNA, 19 nt, Artificial Sequence
  Description of Artificial Sequence: Synthetic oligonucleotide
  Sense strand starting at position 1064 of SEQ ID NO: 1886180
gucacucauuacuagagca

SEQ ID NO: 2392113 - RNA, 19 nt, Artificial Sequence
  Description of Artificial Sequence: Synthetic oligonucleotide
  Antisense strand to SEQ ID NO: 2392112
ugcucuaguaaugagugac

SEQ ID NO: 2392114 - RNA, 19 nt, Artificial Sequence
  Description of Artificial Sequence: Synthetic oligonucleotide
  Sense strand starting at position 1072 of SEQ ID NO: 1886180
uuacuagagcaaugcaaau

SEQ ID NO: 2392115 - RNA, 19 nt, Artificial Sequence
  Description of Artificial Sequence: Synthetic oligonucleotide
  Antisense strand to SEQ ID NO: 2392114
auuugcauugcucuaguaa

SEQ ID NO: 2392116 - RNA, 19 nt, Artificial Sequence
  Description of Artificial Sequence: Synthetic oligonucleotide
  Sense strand starting at position 1120 of SEQ ID NO: 1886180
ccgccagaauggcuauauu

SEQ ID NO: 2392117 - RNA, 19 nt, Artificial Sequence
  Description of Artificial Sequence: Synthetic oligonucleotide
  Antisense strand to SEQ ID NO: 2392116
aauauagccauucuggcgg

SEQ ID NO: 2392118 - RNA, 19 nt, Artificial Sequence
  Description of Artificial Sequence: Synthetic oligonucleotide
  Sense strand starting at position 1179 of SEQ ID NO: 1886180
aacagagacuggcaagauu

SEQ ID NO: 2392119 - RNA, 19 nt, Artificial Sequence
  Description of Artificial Sequence: Synthetic oligonucleotide
  Antisense strand to SEQ ID NO: 2392118
aaucuugccagucucuguu

SEQ ID NO: 2392120 - RNA, 19 nt, Artificial Sequence
  Description of Artificial Sequence: Synthetic oligonucleotide
  Sense strand starting at position 1511 of SEQ ID NO: 1886180
accagaugaugucuuugca

SEQ ID NO: 2392121 - RNA, 19 nt, Artificial Sequence
  Description of Artificial Sequence: Synthetic oligonucleotide
  Antisense strand to SEQ ID NO: 2392120
ugcaaagacaucaucuggu

SEQ ID NO: 2392122 - RNA, 19 nt, Artificial Sequence
  Description of Artificial Sequence: Synthetic oligonucleotide
  Sense strand starting at position 1515 of SEQ ID NO: 1886180
gaugaugucuuugcaggga

SEQ ID NO: 2392123 - RNA, 19 nt, Artificial Sequence
  Description of Artificial Sequence: Synthetic oligonucleotide
  Antisense strand to SEQ ID NO: 2392122
ucccugcaaagacaucauc

SEQ ID NO: 2392124 - RNA, 19 nt, Artificial Sequence
  Description of Artificial Sequence: Synthetic oligonucleotide
  Sense strand starting at position 1793 of SEQ ID NO: 1886180
acuagcugaucccaugaua

SEQ ID NO: 2392125 - RNA, 19 nt, Artificial Sequence
  Description of Artificial Sequence: Synthetic oligonucleotide
  Antisense strand to SEQ ID NO: 2392124
uaucaugggaucagcuagu

SEQ ID NO: 2392126 - RNA, 19 nt, Artificial Sequence
  Description of Artificial Sequence: Synthetic oligonucleotide
  Sense strand starting at position 2014 of SEQ ID NO: 1886180
gagcucugcucuguuuaga

SEQ ID NO: 2392127 - RNA, 19 nt, Artificial Sequence
  Description of Artificial Sequence: Synthetic oligonucleotide
  Antisense strand to SEQ ID NO: 2392126
ucuaaacagagcagagcuc

SEQ ID NO: 2392128 - RNA, 19 nt, Artificial Sequence
  Description of Artificial Sequence: Synthetic oligonucleotide
  Sense strand starting at position 2031 of SEQ ID NO: 1886180
gauacagcugauugugaca

SEQ ID NO: 2392129 - RNA, 19 nt, Artificial Sequence
  Description of Artificial Sequence: Synthetic oligonucleotide
  Antisense strand to SEQ ID NO: 2392128
ugucacaaucagcuguauc

SEQ ID NO: 2392130 - RNA, 19 nt, Artificial Sequence
  Description of Artificial Sequence: Synthetic oligonucleotide
  Sense strand starting at position 2046 of SEQ ID NO: 1886180
gacaucaucugggcgugua

SEQ ID NO: 2392131 - RNA, 19 nt, Artificial Sequence
  Description of Artificial Sequence: Synthetic oligonucleotide
  Antisense strand to SEQ ID NO: 2392130
uacacgcccagaugauguc

SEQ ID NO: 2392132 - RNA, 19 nt, Artificial Sequence
  Description of Artificial Sequence: Synthetic oligonucleotide
  Sense strand starting at position 2047 of SEQ ID NO: 1886180
acaucaucugggcguguau

SEQ ID NO: 2392133 - RNA, 19 nt, Artificial Sequence
  Description of Artificial Sequence: Synthetic oligonucleotide
  Antisense strand to SEQ ID NO: 2392132
auacacgcccagaugaugu

SEQ ID NO: 2392134 - RNA, 19 nt, Artificial Sequence
  Description of Artificial Sequence: Synthetic oligonucleotide
  Sense strand starting at position 2058 of SEQ ID NO: 1886180
gcguguauguuaucuguau

SEQ ID NO: 2392135 - RNA, 19 nt, Artificial Sequence
  Description of Artificial Sequence: Synthetic oligonucleotide
  Antisense strand to SEQ ID NO: 2392134
auacagauaacauacacgc

SEQ ID NO: 2392136 - RNA, 19 nt, Artificial Sequence
  Description of Artificial Sequence: Synthetic oligonucleotide
  Sense strand starting at position 2059 of SEQ ID NO: 1886180
cguguauguuaucuguauc

SEQ ID NO: 2392137 - RNA, 19 nt, Artificial Sequence
  Description of Artificial Sequence: Synthetic oligonucleotide
  Antisense strand to SEQ ID NO: 2392136
gauacagauaacauacacg

SEQ ID NO: 2392138 - RNA, 19 nt, Artificial Sequence
  Description of Artificial Sequence: Synthetic oligonucleotide
  Sense strand starting at position 2060 of SEQ ID NO: 1886180
guguauguuaucuguaucu

SEQ ID NO: 2392139 - RNA, 19 nt, Artificial Sequence
  Description of Artificial Sequence: Synthetic oligonucleotide
  Antisense strand to SEQ ID NO: 2392138
agauacagauaacauacac

SEQ ID NO: 2392140 - RNA, 19 nt, Artificial Sequence
  Description of Artificial Sequence: Synthetic oligonucleotide
  Sense strand starting at position 2062 of SEQ ID NO: 1886180
guauguuaucuguaucuau

SEQ ID NO: 2392141 - RNA, 19 nt, Artificial Sequence
  Description of Artificial Sequence: Synthetic oligonucleotide
  Antisense strand to SEQ ID NO: 2392140
auagauacagauaacauac

SEQ ID NO: 2392142 - RNA, 19 nt, Artificial Sequence
  Description of Artificial Sequence: Synthetic oligonucleotide
  Sense strand starting at position 2381 of SEQ ID NO: 1886180
uggagcacuucucacaaca

SEQ ID NO: 2392143 - RNA, 19 nt, Artificial Sequence
  Description of Artificial Sequence: Synthetic oligonucleotide
  Antisense strand to SEQ ID NO: 2392142
uguugugagaagugcucca

SEQ ID NO: 2392144 - RNA, 19 nt, Artificial Sequence
  Description of Artificial Sequence: Synthetic oligonucleotide
  Sense strand starting at position 2430 of SEQ ID NO: 1886180
cgaacuauuccauagguua

SEQ ID NO: 2392145 - RNA, 19 nt, Artificial Sequence
  Description of Artificial Sequence: Synthetic oligonucleotide
  Antisense strand to SEQ ID NO: 2392144
uaaccuauggaauaguucg

SEQ ID NO: 2392146 - RNA, 19 nt, Artificial Sequence
  Description of Artificial Sequence: Synthetic oligonucleotide
  Sense strand starting at position 2556 of SEQ ID NO: 1886180
gcccucuuugugugccuaa

SEQ ID NO: 2392147 - RNA, 19 nt, Artificial Sequence
  Description of Artificial Sequence: Synthetic oligonucleotide
  Antisense strand to SEQ ID NO: 2392146
uuaggcacacaaagagggc

SEQ ID NO: 2392148 - RNA, 19 nt, Artificial Sequence
  Description of Artificial Sequence: Synthetic oligonucleotide
  Sense strand starting at position 2557 of SEQ ID NO: 1886180
cccucuuugugugccuaau

SEQ ID NO: 2392149 - RNA, 19 nt, Artificial Sequence
  Description of Artificial Sequence: Synthetic oligonucleotide
  Antisense strand to SEQ ID NO: 2392148
auuaggcacacaaagaggg

SEQ ID NO: 2392150 - RNA, 19 nt, Artificial Sequence
  Description of Artificial Sequence: Synthetic oligonucleotide
  Sense strand starting at position 2559 of SEQ ID NO: 1886180
cucuuugugugccuaauuu

SEQ ID NO: 2392151 - RNA, 19 nt, Artificial Sequence
  Description of Artificial Sequence: Synthetic oligonucleotide
  Antisense strand to SEQ ID NO: 2392150
aaauuaggcacacaaagag

SEQ ID NO: 2392152 - RNA, 19 nt, Artificial Sequence
  Description of Artificial Sequence: Synthetic oligonucleotide
  Sense strand starting at position 2563 of SEQ ID NO: 1886180
uugugugccuaauuuacca

SEQ ID NO: 2392153 - RNA, 19 nt, Artificial Sequence
  Description of Artificial Sequence: Synthetic oligonucleotide
  Antisense strand to SEQ ID NO: 2392152
ugguaaauuaggcacacaa

SEQ ID NO: 2392154 - RNA, 19 nt, Artificial Sequence
  Description of Artificial Sequence: Synthetic oligonucleotide
  Sense strand starting at position 2737 of SEQ ID NO: 1886180
caaggaguuuauucucuga

SEQ ID NO: 2392155 - RNA, 19 nt, Artificial Sequence
  Description of Artificial Sequence: Synthetic oligonucleotide
  Antisense strand to SEQ ID NO: 2392154
ucagagaauaaacuccuug

SEQ ID NO: 2392156 - RNA, 19 nt, Artificial Sequence
  Description of Artificial Sequence: Synthetic oligonucleotide
  Sense strand starting at position 2739 of SEQ ID NO: 1886180
aggaguuuauucucugauc

SEQ ID NO: 2392157 - RNA, 19 nt, Artificial Sequence
  Description of Artificial Sequence: Synthetic oligonucleotide
  Antisense strand to SEQ ID NO: 2392156
gaucagagaauaaacuccu

SEQ ID NO: 2392158 - RNA, 19 nt, Artificial Sequence
  Description of Artificial Sequence: Synthetic oligonucleotide
  Sense strand starting at position 2740 of SEQ ID NO: 1886180
ggaguuuauucucugaucu

SEQ ID NO: 2392159 - RNA, 19 nt, Artificial Sequence
  Description of Artificial Sequence: Synthetic oligonucleotide
  Antisense strand to SEQ ID NO: 2392158
agaucagagaauaaacucc

SEQ ID NO: 2392160 - RNA, 19 nt, Artificial Sequence
  Description of Artificial Sequence: Synthetic oligonucleotide
  Sense strand starting at position 2742 of SEQ ID NO: 1886180
aguuuauucucugaucucu

SEQ ID NO: 2392161 - RNA, 19 nt, Artificial Sequence
  Description of Artificial Sequence: Synthetic oligonucleotide
  Antisense strand to SEQ ID NO: 2392160
agagaucagagaauaaacu

SEQ ID NO: 2392162 - RNA, 19 nt, Artificial Sequence
  Description of Artificial Sequence: Synthetic oligonucleotide
  Sense strand starting at position 2881 of SEQ ID NO: 1886180
gaaggauaugagcagugua

SEQ ID NO: 2392163 - RNA, 19 nt, Artificial Sequence
  Description of Artificial Sequence: Synthetic oligonucleotide
  Antisense strand to SEQ ID NO: 2392162
uacacugcucauauccuuc

SEQ ID NO: 2392164 - RNA, 19 nt, Artificial Sequence
  Description of Artificial Sequence: Synthetic oligonucleotide
  Sense strand starting at position 2884 of SEQ ID NO: 1886180
ggauaugagcaguguagaa

SEQ ID NO: 2392165 - RNA, 19 nt, Artificial Sequence
  Description of Artificial Sequence: Synthetic oligonucleotide
  Antisense strand to SEQ ID NO: 2392164
uucuacacugcucauaucc

SEQ ID NO: 2392166 - RNA, 19 nt, Artificial Sequence
  Description of Artificial Sequence: Synthetic oligonucleotide
  Sense strand starting at position 2948 of SEQ ID NO: 1886180
gaaugagcaguauggauau

SEQ ID NO: 2392167 - RNA, 19 nt, Artificial Sequence
  Description of Artificial Sequence: Synthetic oligonucleotide
  Antisense strand to SEQ ID NO: 2392166
auauccauacugcucauuc

SEQ ID NO: 2392168 - RNA, 19 nt, Artificial Sequence
  Description of Artificial Sequence: Synthetic oligonucleotide
  Sense strand starting at position 3570 of SEQ ID NO: 1886180
accucaguauaauaagaga

SEQ ID NO: 2392169 - RNA, 19 nt, Artificial Sequence
  Description of Artificial Sequence: Synthetic oligonucleotide
  Antisense strand to SEQ ID NO: 2392168
ucucuuauuauacugaggu

SEQ ID NO: 2392170 - RNA, 19 nt, Artificial Sequence
  Description of Artificial Sequence: Synthetic oligonucleotide
  Sense strand starting at position 3573 of SEQ ID NO: 1886180
ucaguauaauaagagaaca

SEQ ID NO: 2392171 - RNA, 19 nt, Artificial Sequence
  Description of Artificial Sequence: Synthetic oligonucleotide
  Antisense strand to SEQ ID NO: 2392170
uguucucuuauuauacuga

SEQ ID NO: 2392172 - RNA, 19 nt, Artificial Sequence
  Description of Artificial Sequence: Synthetic oligonucleotide
  Sense strand starting at position 3959 of SEQ ID NO: 1886180
ggcaccauucuggaugcaa

SEQ ID NO: 2392173 - RNA, 19 nt, Artificial Sequence
  Description of Artificial Sequence: Synthetic oligonucleotide
  Antisense strand to SEQ ID NO: 2392172
uugcauccagaauggugcc

SEQ ID NO: 2392174 - RNA, 19 nt, Artificial Sequence
  Description of Artificial Sequence: Synthetic oligonucleotide
  Sense strand starting at position 435 of SEQ ID NO: 1886181
auggcaauuccuugcuaaa

SEQ ID NO: 2392175 - RNA, 19 nt, Artificial Sequence
  Description of Artificial Sequence: Synthetic oligonucleotide
  Antisense strand to SEQ ID NO: 2392174
uuuagcaaggaauugccau

SEQ ID NO: 2392176 - RNA, 19 nt, Artificial Sequence
  Description of Artificial Sequence: Synthetic oligonucleotide
  Sense strand starting at position 448 of SEQ ID NO: 1886181
gcuaaaucauguucccugu

SEQ ID NO: 2392177 - RNA, 19 nt, Artificial Sequence
  Description of Artificial Sequence: Synthetic oligonucleotide
  Antisense strand to SEQ ID NO: 2392176
acagggaacaugauuuagc

SEQ ID NO: 2392178 - RNA, 19 nt, Artificial Sequence
  Description of Artificial Sequence: Synthetic oligonucleotide
  Sense strand starting at position 912 of SEQ ID NO: 1886181
ugcauuaaaggcuaauauu

SEQ ID NO: 2392179 - RNA, 19 nt, Artificial Sequence
  Description of Artificial Sequence: Synthetic oligonucleotide
  Antisense strand to SEQ ID NO: 2392178
aauauuagccuuuaaugca

SEQ ID NO: 2392180 - RNA, 19 nt, Artificial Sequence
  Description of Artificial Sequence: Synthetic oligonucleotide
  Sense strand starting at position 924 of SEQ ID NO: 1886181
uaauauugguugcguccau

SEQ ID NO: 2392181 - RNA, 19 nt, Artificial Sequence
  Description of Artificial Sequence: Synthetic oligonucleotide
  Antisense strand to SEQ ID NO: 2392180
auggacgcaaccaauauua

SEQ ID NO: 2392182 - RNA, 19 nt, Artificial Sequence
  Description of Artificial Sequence: Synthetic oligonucleotide
  Sense strand starting at position 1010 of SEQ ID NO: 1886181
ucuguuagucaugggcuga

SEQ ID NO: 2392183 - RNA, 19 nt, Artificial Sequence
  Description of Artificial Sequence: Synthetic oligonucleotide
  Antisense strand to SEQ ID NO: 2392182
ucagcccaugacuaacaga

SEQ ID NO: 2392184 - RNA, 19 nt, Artificial Sequence
  Description of Artificial Sequence: Synthetic oligonucleotide
  Sense strand starting at position 1011 of SEQ ID NO: 1886181
cuguuagucaugggcugau

SEQ ID NO: 2392185 - RNA, 19 nt, Artificial Sequence
  Description of Artificial Sequence: Synthetic oligonucleotide
  Antisense strand to SEQ ID NO: 2392184
aucagcccaugacuaacag

SEQ ID NO: 2392186 - RNA, 19 nt, Artificial Sequence
  Description of Artificial Sequence: Synthetic oligonucleotide
  Sense strand starting at position 1067 of SEQ ID NO: 1886181
gggccucccagaggugaua

SEQ ID NO: 2392187 - RNA, 19 nt, Artificial Sequence
  Description of Artificial Sequence: Synthetic oligonucleotide
  Antisense strand to SEQ ID NO: 2392186
uaucaccucugggaggccc

SEQ ID NO: 2392188 - RNA, 19 nt, Artificial Sequence
  Description of Artificial Sequence: Synthetic oligonucleotide
  Sense strand starting at position 1108 of SEQ ID NO: 1886181
cgugguuucuauguccaua

SEQ ID NO: 2392189 - RNA, 19 nt, Artificial Sequence
  Description of Artificial Sequence: Synthetic oligonucleotide
  Antisense strand to SEQ ID NO: 2392188
uauggacauagaaaccacg

SEQ ID NO: 2392190 - RNA, 19 nt, Artificial Sequence
  Description of Artificial Sequence: Synthetic oligonucleotide
  Sense strand starting at position 1223 of SEQ ID NO: 1886181
gaaagacguuucuagcuuc

SEQ ID NO: 2392191 - RNA, 19 nt, Artificial Sequence
  Description of Artificial Sequence: Synthetic oligonucleotide
  Antisense strand to SEQ ID NO: 2392190
gaagcuagaaacgucuuuc

SEQ ID NO: 2392192 - RNA, 19 nt, Artificial Sequence
  Description of Artificial Sequence: Synthetic oligonucleotide
  Sense strand starting at position 1242 of SEQ ID NO: 1886181
auauaagcagugcaauuaa

SEQ ID NO: 2392193 - RNA, 19 nt, Artificial Sequence
  Description of Artificial Sequence: Synthetic oligonucleotide
  Antisense strand to SEQ ID NO: 2392192
uuaauugcacugcuuauau

SEQ ID NO: 2392194 - RNA, 19 nt, Artificial Sequence
  Description of Artificial Sequence: Synthetic oligonucleotide
  Sense strand starting at position 1290 of SEQ ID NO: 1886181
guggaaaucucaccacaca

SEQ ID NO: 2392195 - RNA, 19 nt, Artificial Sequence
  Description of Artificial Sequence: Synthetic oligonucleotide
  Antisense strand to SEQ ID NO: 2392194
uguguggugagauuuccac

SEQ ID NO: 2392196 - RNA, 19 nt, Artificial Sequence
  Description of Artificial Sequence: Synthetic oligonucleotide
  Sense strand starting at position 1332 of SEQ ID NO: 1886181
agaauaaacuaguugggca

SEQ ID NO: 2392197 - RNA, 19 nt, Artificial Sequence
  Description of Artificial Sequence: Synthetic oligonucleotide
  Antisense strand to SEQ ID NO: 2392196
ugcccaacuaguuuauucu

SEQ ID NO: 2392198 - RNA, 19 nt, Artificial Sequence
  Description of Artificial Sequence: Synthetic oligonucleotide
  Sense strand starting at position 1924 of SEQ ID NO: 1886181
ggguaaacguccugaaauc

SEQ ID NO: 2392199 - RNA, 19 nt, Artificial Sequence
  Description of Artificial Sequence: Synthetic oligonucleotide
  Antisense strand to SEQ ID NO: 2392198
gauuucaggacguuuaccc

SEQ ID NO: 2392200 - RNA, 19 nt, Artificial Sequence
  Description of Artificial Sequence: Synthetic oligonucleotide
  Sense strand starting at position 1925 of SEQ ID NO: 1886181
gguaaacguccugaaaucu

SEQ ID NO: 2392201 - RNA, 19 nt, Artificial Sequence
  Description of Artificial Sequence: Synthetic oligonucleotide
  Antisense strand to SEQ ID NO: 2392200
agauuucaggacguuuacc

SEQ ID NO: 2392202 - RNA, 19 nt, Artificial Sequence
  Description of Artificial Sequence: Synthetic oligonucleotide
  Sense strand starting at position 2240 of SEQ ID NO: 1886181
agaaauaucucagcaggua

SEQ ID NO: 2392203 - RNA, 19 nt, Artificial Sequence
  Description of Artificial Sequence: Synthetic oligonucleotide
  Antisense strand to SEQ ID NO: 2392202
uaccugcugagauauuucu

SEQ ID NO: 2392204 - RNA, 19 nt, Artificial Sequence
  Description of Artificial Sequence: Synthetic oligonucleotide
  Sense strand starting at position 2275 of SEQ ID NO: 1886181
agccucaaucaugggauca

SEQ ID NO: 2392205 - RNA, 19 nt, Artificial Sequence
  Description of Artificial Sequence: Synthetic oligonucleotide
  Antisense strand to SEQ ID NO: 2392204
ugaucccaugauugaggcu

SEQ ID NO: 2392206 - RNA, 19 nt, Artificial Sequence
  Description of Artificial Sequence: Synthetic oligonucleotide
  Sense strand starting at position 2276 of SEQ ID NO: 1886181
gccucaaucaugggaucag

SEQ ID NO: 2392207 - RNA, 19 nt, Artificial Sequence
  Description of Artificial Sequence: Synthetic oligonucleotide
  Antisense strand to SEQ ID NO: 2392206
cugaucccaugauugaggc

SEQ ID NO: 2392208 - RNA, 19 nt, Artificial Sequence
  Description of Artificial Sequence: Synthetic oligonucleotide
  Sense strand starting at position 2419 of SEQ ID NO: 1886181
gaacucugaguguguucuu

SEQ ID NO: 2392209 - RNA, 19 nt, Artificial Sequence
  Description of Artificial Sequence: Synthetic oligonucleotide
  Antisense strand to SEQ ID NO: 2392208
aagaacacacucagaguuc

SEQ ID NO: 2392210 - RNA, 19 nt, Artificial Sequence
  Description of Artificial Sequence: Synthetic oligonucleotide
  Sense strand starting at position 2586 of SEQ ID NO: 1886181
uccuuauagcugcauugua

SEQ ID NO: 2392211 - RNA, 19 nt, Artificial Sequence
  Description of Artificial Sequence: Synthetic oligonucleotide
  Antisense strand to SEQ ID NO: 2392210
uacaaugcagcuauaagga

SEQ ID NO: 2392212 - RNA, 19 nt, Artificial Sequence
  Description of Artificial Sequence: Synthetic oligonucleotide
  Sense strand starting at position 2705 of SEQ ID NO: 1886181
ggacauauguguucaugug

SEQ ID NO: 2392213 - RNA, 19 nt, Artificial Sequence
  Description of Artificial Sequence: Synthetic oligonucleotide
  Antisense strand to SEQ ID NO: 2392212
cacaugaacacauaugucc

SEQ ID NO: 2392214 - RNA, 19 nt, Artificial Sequence
  Description of Artificial Sequence: Synthetic oligonucleotide
  Sense strand starting at position 2787 of SEQ ID NO: 1886181
aauggaaguucugucauua

SEQ ID NO: 2392215 - RNA, 19 nt, Artificial Sequence
  Description of Artificial Sequence: Synthetic oligonucleotide
  Antisense strand to SEQ ID NO: 2392214
uaaugacagaacuuccauu

SEQ ID NO: 2392216 - RNA, 19 nt, Artificial Sequence
  Description of Artificial Sequence: Synthetic oligonucleotide
  Sense strand starting at position 2791 of SEQ ID NO: 1886181
gaaguucugucauuagguc

SEQ ID NO: 2392217 - RNA, 19 nt, Artificial Sequence
  Description of Artificial Sequence: Synthetic oligonucleotide
  Antisense strand to SEQ ID NO: 2392216
gaccuaaugacagaacuuc

SEQ ID NO: 2392218 - RNA, 19 nt, Artificial Sequence
  Description of Artificial Sequence: Synthetic oligonucleotide
  Sense strand starting at position 2908 of SEQ ID NO: 1886181
cucuguuauuuguuugauu

SEQ ID NO: 2392219 - RNA, 19 nt, Artificial Sequence
  Description of Artificial Sequence: Synthetic oligonucleotide
  Antisense strand to SEQ ID NO: 2392218
aaucaaacaaauaacagag

SEQ ID NO: 2392220 - RNA, 19 nt, Artificial Sequence
  Description of Artificial Sequence: Synthetic oligonucleotide
  Sense strand starting at position 2961 of SEQ ID NO: 1886181
auacguucugacugguguu

SEQ ID NO: 2392221 - RNA, 19 nt, Artificial Sequence
  Description of Artificial Sequence: Synthetic oligonucleotide
  Antisense strand to SEQ ID NO: 2392220
aacaccagucagaacguau

SEQ ID NO: 2392222 - RNA, 19 nt, Artificial Sequence
  Description of Artificial Sequence: Synthetic oligonucleotide
  Sense strand starting at position 2962 of SEQ ID NO: 1886181
uacguucugacugguguua

SEQ ID NO: 2392223 - RNA, 19 nt, Artificial Sequence
  Description of Artificial Sequence: Synthetic oligonucleotide
  Antisense strand to SEQ ID NO: 2392222
uaacaccagucagaacgua

SEQ ID NO: 2392224 - RNA, 19 nt, Artificial Sequence
  Description of Artificial Sequence: Synthetic oligonucleotide
  Sense strand starting at position 3498 of SEQ ID NO: 1886181
ucaacugaugugcauuauu

SEQ ID NO: 2392225 - RNA, 19 nt, Artificial Sequence
  Description of Artificial Sequence: Synthetic oligonucleotide
  Antisense strand to SEQ ID NO: 2392224
aauaaugcacaucaguuga

SEQ ID NO: 2392226 - RNA, 19 nt, Artificial Sequence
  Description of Artificial Sequence: Synthetic oligonucleotide
  Sense strand starting at position 3580 of SEQ ID NO: 1886181
cagugaagaugagauuugu

SEQ ID NO: 2392227 - RNA, 19 nt, Artificial Sequence
  Description of Artificial Sequence: Synthetic oligonucleotide
  Antisense strand to SEQ ID NO: 2392226
acaaaucucaucuucacug

SEQ ID NO: 2392228 - RNA, 19 nt, Artificial Sequence
  Description of Artificial Sequence: Synthetic oligonucleotide
  Sense strand starting at position 3591 of SEQ ID NO: 1886181
agauuugucugccaagguu

SEQ ID NO: 2392229 - RNA, 19 nt, Artificial Sequence
  Description of Artificial Sequence: Synthetic oligonucleotide
  Antisense strand to SEQ ID NO: 2392228
aaccuuggcagacaaaucu

SEQ ID NO: 2392230 - RNA, 19 nt, Artificial Sequence
  Description of Artificial Sequence: Synthetic oligonucleotide
  Sense strand starting at position 3652 of SEQ ID NO: 1886181
gcaagaacaugguagauga

SEQ ID NO: 2392231 - RNA, 19 nt, Artificial Sequence
  Description of Artificial Sequence: Synthetic oligonucleotide
  Antisense strand to SEQ ID NO: 2392230
ucaucuaccauguucuugc

SEQ ID NO: 2392232 - RNA, 19 nt, Artificial Sequence
  Description of Artificial Sequence: Synthetic oligonucleotide
  Sense strand starting at position 647 of SEQ ID NO: 1886182
aguauauacugagucauca

SEQ ID NO: 2392233 - RNA, 19 nt, Artificial Sequence
  Description of Artificial Sequence: Synthetic oligonucleotide
  Antisense strand to SEQ ID NO: 2392232
ugaugacucaguauauacu

SEQ ID NO: 2392234 - RNA, 19 nt, Artificial Sequence
  Description of Artificial Sequence: Synthetic oligonucleotide
  Sense strand starting at position 780 of SEQ ID NO: 1886182
guguaucacucccuaacau

SEQ ID NO: 2392235 - RNA, 19 nt, Artificial Sequence
  Description of Artificial Sequence: Synthetic oligonucleotide
  Antisense strand to SEQ ID NO: 2392234
auguuagggagugauacac

SEQ ID NO: 2392236 - RNA, 19 nt, Artificial Sequence
  Description of Artificial Sequence: Synthetic oligonucleotide
  Sense strand starting at position 930 of SEQ ID NO: 1886182
gccaauuggcaauauaauu

SEQ ID NO: 2392237 - RNA, 19 nt, Artificial Sequence
  Description of Artificial Sequence: Synthetic oligonucleotide
  Antisense strand to SEQ ID NO: 2392236
aauuauauugccaauuggc

SEQ ID NO: 2392238 - RNA, 19 nt, Artificial Sequence
  Description of Artificial Sequence: Synthetic oligonucleotide
  Sense strand starting at position 943 of SEQ ID NO: 1886182
auaauuccacgauaugagu

SEQ ID NO: 2392239 - RNA, 19 nt, Artificial Sequence
  Description of Artificial Sequence: Synthetic oligonucleotide
  Antisense strand to SEQ ID NO: 2392238
acucauaucguggaauuau

SEQ ID NO: 2392240 - RNA, 19 nt, Artificial Sequence
  Description of Artificial Sequence: Synthetic oligonucleotide
  Sense strand starting at position 952 of SEQ ID NO: 1886182
cgauaugaguguccacaua

SEQ ID NO: 2392241 - RNA, 19 nt, Artificial Sequence
  Description of Artificial Sequence: Synthetic oligonucleotide
  Antisense strand to SEQ ID NO: 2392240
uauguggacacucauaucg

SEQ ID NO: 2392242 - RNA, 19 nt, Artificial Sequence
  Description of Artificial Sequence: Synthetic oligonucleotide
  Sense strand starting at position 1032 of SEQ ID NO: 1886182
uaguacagguuuccugaaa

SEQ ID NO: 2392243 - RNA, 19 nt, Artificial Sequence
  Description of Artificial Sequence: Synthetic oligonucleotide
  Antisense strand to SEQ ID NO: 2392242
uuucaggaaaccuguacua

SEQ ID NO: 2392244 - RNA, 19 nt, Artificial Sequence
  Description of Artificial Sequence: Synthetic oligonucleotide
  Sense strand starting at position 1039 of SEQ ID NO: 1886182
gguuuccugaaagguuuaa

SEQ ID NO: 2392245 - RNA, 19 nt, Artificial Sequence
  Description of Artificial Sequence: Synthetic oligonucleotide
  Antisense strand to SEQ ID NO: 2392244
uuaaaccuuucaggaaacc

SEQ ID NO: 2392246 - RNA, 19 nt, Artificial Sequence
  Description of Artificial Sequence: Synthetic oligonucleotide
  Sense strand starting at position 1160 of SEQ ID NO: 1886182
auuuaugcucccugucacu

SEQ ID NO: 2392247 - RNA, 19 nt, Artificial Sequence
  Description of Artificial Sequence: Synthetic oligonucleotide
  Antisense strand to SEQ ID NO: 2392246
agugacagggagcauaaau

SEQ ID NO: 2392248 - RNA, 19 nt, Artificial Sequence
  Description of Artificial Sequence: Synthetic oligonucleotide
  Sense strand starting at position 1258 of SEQ ID NO: 1886182
cuaaaugacgcccacagau

SEQ ID NO: 2392249 - RNA, 19 nt, Artificial Sequence
  Description of Artificial Sequence: Synthetic oligonucleotide
  Antisense strand to SEQ ID NO: 2392248
aucugugggcgucauuuag

SEQ ID NO: 2392250 - RNA, 19 nt, Artificial Sequence
  Description of Artificial Sequence: Synthetic oligonucleotide
  Sense strand starting at position 1276 of SEQ ID NO: 1886182
ugggucuuuccgggauaug

SEQ ID NO: 2392251 - RNA, 19 nt, Artificial Sequence
  Description of Artificial Sequence: Synthetic oligonucleotide
  Antisense strand to SEQ ID NO: 2392250
cauaucccggaaagaccca

SEQ ID NO: 2392252 - RNA, 19 nt, Artificial Sequence
  Description of Artificial Sequence: Synthetic oligonucleotide
  Sense strand starting at position 1277 of SEQ ID NO: 1886182
gggucuuuccgggauaugu

SEQ ID NO: 2392253 - RNA, 19 nt, Artificial Sequence
  Description of Artificial Sequence: Synthetic oligonucleotide
  Antisense strand to SEQ ID NO: 2392252
acauaucccggaaagaccc

SEQ ID NO: 2392254 - RNA, 19 nt, Artificial Sequence
  Description of Artificial Sequence: Synthetic oligonucleotide
  Sense strand starting at position 1279 of SEQ ID NO: 1886182
gucuuuccgggauauguga

SEQ ID NO: 2392255 - RNA, 19 nt, Artificial Sequence
  Description of Artificial Sequence: Synthetic oligonucleotide
  Antisense strand to SEQ ID NO: 2392254
ucacauaucccggaaagac

SEQ ID NO: 2392256 - RNA, 19 nt, Artificial Sequence
  Description of Artificial Sequence: Synthetic oligonucleotide
  Sense strand starting at position 1338 of SEQ ID NO: 1886182
caaacuggugacugcauaa

SEQ ID NO: 2392257 - RNA, 19 nt, Artificial Sequence
  Description of Artificial Sequence: Synthetic oligonucleotide
  Antisense strand to SEQ ID NO: 2392256
uuaugcagucaccaguuug

SEQ ID NO: 2392258 - RNA, 19 nt, Artificial Sequence
  Description of Artificial Sequence: Synthetic oligonucleotide
  Sense strand starting at position 1422 of SEQ ID NO: 1886182
uggguuuagaaaggugacu

SEQ ID NO: 2392259 - RNA, 19 nt, Artificial Sequence
  Description of Artificial Sequence: Synthetic oligonucleotide
  Antisense strand to SEQ ID NO: 2392258
agucaccuuucuaaaccca

SEQ ID NO: 2392260 - RNA, 19 nt, Artificial Sequence
  Description of Artificial Sequence: Synthetic oligonucleotide
  Sense strand starting at position 1424 of SEQ ID NO: 1886182
gguuuagaaaggugacuag

SEQ ID NO: 2392261 - RNA, 19 nt, Artificial Sequence
  Description of Artificial Sequence: Synthetic oligonucleotide
  Antisense strand to SEQ ID NO: 2392260
cuagucaccuuucuaaacc

SEQ ID NO: 2392262 - RNA, 19 nt, Artificial Sequence
  Description of Artificial Sequence: Synthetic oligonucleotide
  Sense strand starting at position 1597 of SEQ ID NO: 1886182
acugguaguacagagaguu

SEQ ID NO: 2392263 - RNA, 19 nt, Artificial Sequence
  Description of Artificial Sequence: Synthetic oligonucleotide
  Antisense strand to SEQ ID NO: 2392262
aacucucuguacuaccagu

SEQ ID NO: 2392264 - RNA, 19 nt, Artificial Sequence
  Description of Artificial Sequence: Synthetic oligonucleotide
  Sense strand starting at position 1744 of SEQ ID NO: 1886182
cgugauuucugauaaugau

SEQ ID NO: 2392265 - RNA, 19 nt, Artificial Sequence
  Description of Artificial Sequence: Synthetic oligonucleotide
  Antisense strand to SEQ ID NO: 2392264
aucauuaucagaaaucacg

SEQ ID NO: 2392266 - RNA, 19 nt, Artificial Sequence
  Description of Artificial Sequence: Synthetic oligonucleotide
  Sense strand starting at position 1747 of SEQ ID NO: 1886182
gauuucugauaaugaugua

SEQ ID NO: 2392267 - RNA, 19 nt, Artificial Sequence
  Description of Artificial Sequence: Synthetic oligonucleotide
  Antisense strand to SEQ ID NO: 2392266
uacaucauuaucagaaauc

SEQ ID NO: 2392268 - RNA, 19 nt, Artificial Sequence
  Description of Artificial Sequence: Synthetic oligonucleotide
  Sense strand starting at position 1823 of SEQ ID NO: 1886182
acuuauuacuuggugcaca

SEQ ID NO: 2392269 - RNA, 19 nt, Artificial Sequence
  Description of Artificial Sequence: Synthetic oligonucleotide
  Antisense strand to SEQ ID NO: 2392268
ugugcaccaaguaauaagu

SEQ ID NO: 2392270 - RNA, 19 nt, Artificial Sequence
  Description of Artificial Sequence: Synthetic oligonucleotide
  Sense strand starting at position 1973 of SEQ ID NO: 1886182
acgugauuguuccuaggau

SEQ ID NO: 2392271 - RNA, 19 nt, Artificial Sequence
  Description of Artificial Sequence: Synthetic oligonucleotide
  Antisense strand to SEQ ID NO: 2392270
auccuaggaacaaucacgu

SEQ ID NO: 2392272 - RNA, 19 nt, Artificial Sequence
  Description of Artificial Sequence: Synthetic oligonucleotide
  Sense strand starting at position 2021 of SEQ ID NO: 1886182
auuagucaguuauuggaau

SEQ ID NO: 2392273 - RNA, 19 nt, Artificial Sequence
  Description of Artificial Sequence: Synthetic oligonucleotide
  Antisense strand to SEQ ID NO: 2392272
auuccaauaacugacuaau

SEQ ID NO: 2392274 - RNA, 19 nt, Artificial Sequence
  Description of Artificial Sequence: Synthetic oligonucleotide
  Sense strand starting at position 2116 of SEQ ID NO: 1886182
uuuauacugugaguugguu

SEQ ID NO: 2392275 - RNA, 19 nt, Artificial Sequence
  Description of Artificial Sequence: Synthetic oligonucleotide
  Antisense strand to SEQ ID NO: 2392274
aaccaacucacaguauaaa

SEQ ID NO: 2392276 - RNA, 19 nt, Artificial Sequence
  Description of Artificial Sequence: Synthetic oligonucleotide
  Sense strand starting at position 2125 of SEQ ID NO: 1886182
ugaguugguuuacccugau

SEQ ID NO: 2392277 - RNA, 19 nt, Artificial Sequence
  Description of Artificial Sequence: Synthetic oligonucleotide
  Antisense strand to SEQ ID NO: 2392276
aucaggguaaaccaacuca

SEQ ID NO: 2392278 - RNA, 19 nt, Artificial Sequence
  Description of Artificial Sequence: Synthetic oligonucleotide
  Sense strand starting at position 2386 of SEQ ID NO: 1886182
gcagcaacaccugagaauu

SEQ ID NO: 2392279 - RNA, 19 nt, Artificial Sequence
  Description of Artificial Sequence: Synthetic oligonucleotide
  Antisense strand to SEQ ID NO: 2392278
aauucucagguguugcugc

SEQ ID NO: 2392280 - RNA, 19 nt, Artificial Sequence
  Description of Artificial Sequence: Synthetic oligonucleotide
  Sense strand starting at position 2783 of SEQ ID NO: 1886182
gucaaacucuuguuugcaa

SEQ ID NO: 2392281 - RNA, 19 nt, Artificial Sequence
  Description of Artificial Sequence: Synthetic oligonucleotide
  Antisense strand to SEQ ID NO: 2392280
uugcaaacaagaguuugac

SEQ ID NO: 2392282 - RNA, 19 nt, Artificial Sequence
  Description of Artificial Sequence: Synthetic oligonucleotide
  Sense strand starting at position 2883 of SEQ ID NO: 1886182
aguauauacggucaacaua

SEQ ID NO: 2392283 - RNA, 19 nt, Artificial Sequence
  Description of Artificial Sequence: Synthetic oligonucleotide
  Antisense strand to SEQ ID NO: 2392282
uauguugaccguauauacu

SEQ ID NO: 2392284 - RNA, 19 nt, Artificial Sequence
  Description of Artificial Sequence: Synthetic oligonucleotide
  Sense strand starting at position 3083 of SEQ ID NO: 1886182
auugcuuagaaggauuagu

SEQ ID NO: 2392285 - RNA, 19 nt, Artificial Sequence
  Description of Artificial Sequence: Synthetic oligonucleotide
  Antisense strand to SEQ ID NO: 2392284
acuaauccuucuaagcaau

SEQ ID NO: 2392286 - RNA, 19 nt, Artificial Sequence
  Description of Artificial Sequence: Synthetic oligonucleotide
  Sense strand starting at position 3269 of SEQ ID NO: 1886182
guuggaauuguagacaucu

SEQ ID NO: 2392287 - RNA, 19 nt, Artificial Sequence
  Description of Artificial Sequence: Synthetic oligonucleotide
  Antisense strand to SEQ ID NO: 2392286
agaugucuacaauuccaac

SEQ ID NO: 2392288 - RNA, 19 nt, Artificial Sequence
  Description of Artificial Sequence: Synthetic oligonucleotide
  Sense strand starting at position 3278 of SEQ ID NO: 1886182
guagacaucuacuuccuga

SEQ ID NO: 2392289 - RNA, 19 nt, Artificial Sequence
  Description of Artificial Sequence: Synthetic oligonucleotide
  Antisense strand to SEQ ID NO: 2392288
ucaggaaguagaugucuac

SEQ ID NO: 2392290 - RNA, 19 nt, Artificial Sequence
  Description of Artificial Sequence: Synthetic oligonucleotide
  Sense strand starting at position 3508 of SEQ ID NO: 1886182
agaauugcuugcgcaagaa

SEQ ID NO: 2392291 - RNA, 19 nt, Artificial Sequence
  Description of Artificial Sequence: Synthetic oligonucleotide
  Antisense strand to SEQ ID NO: 2392290
uucuugcgcaagcaauucu

SEQ ID NO: 2392292 - RNA, 19 nt, Artificial Sequence
  Description of Artificial Sequence: Synthetic oligonucleotide
  Sense strand starting at position 3520 of SEQ ID NO: 1886182
gcaagaauugcuugaacac

SEQ ID NO: 2392293 - RNA, 19 nt, Artificial Sequence
  Description of Artificial Sequence: Synthetic oligonucleotide
  Antisense strand to SEQ ID NO: 2392292
guguucaagcaauucuugc

SEQ ID NO: 2392294 - RNA, 19 nt, Artificial Sequence
  Description of Artificial Sequence: Synthetic oligonucleotide
  Sense strand starting at position 3666 of SEQ ID NO: 1886182
caagauuuaugguacuugu

SEQ ID NO: 2392295 - RNA, 19 nt, Artificial Sequence
  Description of Artificial Sequence: Synthetic oligonucleotide
  Antisense strand to SEQ ID NO: 2392294
acaaguaccauaaaucuug

SEQ ID NO: 2392296 - RNA, 19 nt, Artificial Sequence
  Description of Artificial Sequence: Synthetic oligonucleotide
  Sense strand starting at position 3689 of SEQ ID NO: 1886182
ggauuuacauauugaucaa

SEQ ID NO: 2392297 - RNA, 19 nt, Artificial Sequence
  Description of Artificial Sequence: Synthetic oligonucleotide
  Antisense strand to SEQ ID NO: 2392296
uugaucaauauguaaaucc

SEQ ID NO: 2392298 - RNA, 19 nt, Artificial Sequence
  Description of Artificial Sequence: Synthetic oligonucleotide
  Sense strand starting at position 3737 of SEQ ID NO: 1886182
uccuuacauuuaugaggaa

SEQ ID NO: 2392299 - RNA, 19 nt, Artificial Sequence
  Description of Artificial Sequence: Synthetic oligonucleotide
  Antisense strand to SEQ ID NO: 2392298
uuccucauaaauguaagga

SEQ ID NO: 2392300 - RNA, 19 nt, Artificial Sequence
  Description of Artificial Sequence: Synthetic oligonucleotide
  Sense strand starting at position 3738 of SEQ ID NO: 1886182
ccuuacauuuaugaggaaa

SEQ ID NO: 2392301 - RNA, 19 nt, Artificial Sequence
  Description of Artificial Sequence: Synthetic oligonucleotide
  Antisense strand to SEQ ID NO: 2392300
uuuccucauaaauguaagg

SEQ ID NO: 2392302 - RNA, 19 nt, Artificial Sequence
  Description of Artificial Sequence: Synthetic oligonucleotide
  Sense strand starting at position 3761 of SEQ ID NO: 1886182
auuagcauguggucaaaua

SEQ ID NO: 2392303 - RNA, 19 nt, Artificial Sequence
  Description of Artificial Sequence: Synthetic oligonucleotide
  Antisense strand to SEQ ID NO: 2392302
uauuugaccacaugcuaau

SEQ ID NO: 2392304 - RNA, 19 nt, Artificial Sequence
  Description of Artificial Sequence: Synthetic oligonucleotide
  Sense strand starting at position 3762 of SEQ ID NO: 1886182
uuagcauguggucaaauaa

SEQ ID NO: 2392305 - RNA, 19 nt, Artificial Sequence
  Description of Artificial Sequence: Synthetic oligonucleotide
  Antisense strand to SEQ ID NO: 2392304
uuauuugaccacaugcuaa

SEQ ID NO: 2392306 - RNA, 19 nt, Artificial Sequence
  Description of Artificial Sequence: Synthetic oligonucleotide
  Sense strand starting at position 3777 of SEQ ID NO: 1886182
auaaauuagguauggaguu

SEQ ID NO: 2392307 - RNA, 19 nt, Artificial Sequence
  Description of Artificial Sequence: Synthetic oligonucleotide
  Antisense strand to SEQ ID NO: 2392306
aacuccauaccuaauuuau

SEQ ID NO: 2392308 - RNA, 19 nt, Artificial Sequence
  Description of Artificial Sequence: Synthetic oligonucleotide
  Sense strand starting at position 3823 of SEQ ID NO: 1886182
cgcagauauccguaggcag

SEQ ID NO: 2392309 - RNA, 19 nt, Artificial Sequence
  Description of Artificial Sequence: Synthetic oligonucleotide
  Antisense strand to SEQ ID NO: 2392308
cugccuacggauaucugcg

SEQ ID NO: 2392310 - RNA, 19 nt, Artificial Sequence
  Description of Artificial Sequence: Synthetic oligonucleotide
  Sense strand starting at position 3950 of SEQ ID NO: 1886182
uugcaaucuuaggugaaac

SEQ ID NO: 2392311 - RNA, 19 nt, Artificial Sequence
  Description of Artificial Sequence: Synthetic oligonucleotide
  Antisense strand to SEQ ID NO: 2392310
guuucaccuaagauugcaa

SEQ ID NO: 2392312 - RNA, 19 nt, Artificial Sequence
  Description of Artificial Sequence: Synthetic oligonucleotide
  Sense strand starting at position 516 of SEQ ID NO: 1886183
agugcaguggcccaucaua

SEQ ID NO: 2392313 - RNA, 19 nt, Artificial Sequence
  Description of Artificial Sequence: Synthetic oligonucleotide
  Antisense strand to SEQ ID NO: 2392312
uaugaugggccacugcacu

SEQ ID NO: 2392314 - RNA, 19 nt, Artificial Sequence
  Description of Artificial Sequence: Synthetic oligonucleotide
  Sense strand starting at position 837 of SEQ ID NO: 1886183
ccucccucgccagauaaua

SEQ ID NO: 2392315 - RNA, 19 nt, Artificial Sequence
  Description of Artificial Sequence: Synthetic oligonucleotide
  Antisense strand to SEQ ID NO: 2392314
uauuaucuggcgagggagg

SEQ ID NO: 2392316 - RNA, 19 nt, Artificial Sequence
  Description of Artificial Sequence: Synthetic oligonucleotide
  Sense strand starting at position 916 of SEQ ID NO: 1886183
uuccacuucgcccaagaau

SEQ ID NO: 2392317 - RNA, 19 nt, Artificial Sequence
  Description of Artificial Sequence: Synthetic oligonucleotide
  Antisense strand to SEQ ID NO: 2392316
auucuugggcgaaguggaa

SEQ ID NO: 2392318 - RNA, 19 nt, Artificial Sequence
  Description of Artificial Sequence: Synthetic oligonucleotide
  Sense strand starting at position 1004 of SEQ ID NO: 1886183
gcgagaucucgguuggcug

SEQ ID NO: 2392319 - RNA, 19 nt, Artificial Sequence
  Description of Artificial Sequence: Synthetic oligonucleotide
  Antisense strand to SEQ ID NO: 2392318
cagccaaccgagaucucgc

SEQ ID NO: 2392320 - RNA, 19 nt, Artificial Sequence
  Description of Artificial Sequence: Synthetic oligonucleotide
  Sense strand starting at position 1147 of SEQ ID NO: 1886183
uggccagguuuaucuccaa

SEQ ID NO: 2392321 - RNA, 19 nt, Artificial Sequence
  Description of Artificial Sequence: Synthetic oligonucleotide
  Antisense strand to SEQ ID NO: 2392320
uuggagauaaaccuggcca

SEQ ID NO: 2392322 - RNA, 19 nt, Artificial Sequence
  Description of Artificial Sequence: Synthetic oligonucleotide
  Sense strand starting at position 1259 of SEQ ID NO: 1886183
accggaaucacgggucaaa

SEQ ID NO: 2392323 - RNA, 19 nt, Artificial Sequence
  Description of Artificial Sequence: Synthetic oligonucleotide
  Antisense strand to SEQ ID NO: 2392322
uuugacccgugauuccggu

SEQ ID NO: 2392324 - RNA, 19 nt, Artificial Sequence
  Description of Artificial Sequence: Synthetic oligonucleotide
  Sense strand starting at position 1292 of SEQ ID NO: 1886183
cacgauacgguuuagguua

SEQ ID NO: 2392325 - RNA, 19 nt, Artificial Sequence
  Description of Artificial Sequence: Synthetic oligonucleotide
  Antisense strand to SEQ ID NO: 2392324
uaaccuaaaccguaucgug

SEQ ID NO: 2392326 - RNA, 19 nt, Artificial Sequence
  Description of Artificial Sequence: Synthetic oligonucleotide
  Sense strand starting at position 1297 of SEQ ID NO: 1886183
uacgguuuagguuaugaaa

SEQ ID NO: 2392327 - RNA, 19 nt, Artificial Sequence
  Description of Artificial Sequence: Synthetic oligonucleotide
  Antisense strand to SEQ ID NO: 2392326
uuucauaaccuaaaccgua

SEQ ID NO: 2392328 - RNA, 19 nt, Artificial Sequence
  Description of Artificial Sequence: Synthetic oligonucleotide
  Sense strand starting at position 1343 of SEQ ID NO: 1886183
gcaaaucuccaguaaagca

SEQ ID NO: 2392329 - RNA, 19 nt, Artificial Sequence
  Description of Artificial Sequence: Synthetic oligonucleotide
  Antisense strand to SEQ ID NO: 2392328
ugcuuuacuggagauuugc

SEQ ID NO: 2392330 - RNA, 19 nt, Artificial Sequence
  Description of Artificial Sequence: Synthetic oligonucleotide
  Sense strand starting at position 1359 of SEQ ID NO: 1886183
gcaccacagauugacgaau

SEQ ID NO: 2392331 - RNA, 19 nt, Artificial Sequence
  Description of Artificial Sequence: Synthetic oligonucleotide
  Antisense strand to SEQ ID NO: 2392330
auucgucaaucuguggugc

SEQ ID NO: 2392332 - RNA, 19 nt, Artificial Sequence
  Description of Artificial Sequence: Synthetic oligonucleotide
  Sense strand starting at position 1476 of SEQ ID NO: 1886183
agcaccuugcuccaggaau

SEQ ID NO: 2392333 - RNA, 19 nt, Artificial Sequence
  Description of Artificial Sequence: Synthetic oligonucleotide
  Antisense strand to SEQ ID NO: 2392332
auuccuggagcaaggugcu

SEQ ID NO: 2392334 - RNA, 19 nt, Artificial Sequence
  Description of Artificial Sequence: Synthetic oligonucleotide
  Sense strand starting at position 1540 of SEQ ID NO: 1886183
ucagauacugccgaaacaa

SEQ ID NO: 2392335 - RNA, 19 nt, Artificial Sequence
  Description of Artificial Sequence: Synthetic oligonucleotide
  Antisense strand to SEQ ID NO: 2392334
uuguuucggcaguaucuga

SEQ ID NO: 2392336 - RNA, 19 nt, Artificial Sequence
  Description of Artificial Sequence: Synthetic oligonucleotide
  Sense strand starting at position 1582 of SEQ ID NO: 1886183
gcuaauaguccagcugcga

SEQ ID NO: 2392337 - RNA, 19 nt, Artificial Sequence
  Description of Artificial Sequence: Synthetic oligonucleotide
  Antisense strand to SEQ ID NO: 2392336
ucgcagcuggacuauuagc

SEQ ID NO: 2392338 - RNA, 19 nt, Artificial Sequence
  Description of Artificial Sequence: Synthetic oligonucleotide
  Sense strand starting at position 1678 of SEQ ID NO: 1886183
cguggucuucgaucuggua

SEQ ID NO: 2392339 - RNA, 19 nt, Artificial Sequence
  Description of Artificial Sequence: Synthetic oligonucleotide
  Antisense strand to SEQ ID NO: 2392338
uaccagaucgaagaccacg

SEQ ID NO: 2392340 - RNA, 19 nt, Artificial Sequence
  Description of Artificial Sequence: Synthetic oligonucleotide
  Sense strand starting at position 1880 of SEQ ID NO: 1886183
cggcauaaaguuugaauua

SEQ ID NO: 2392341 - RNA, 19 nt, Artificial Sequence
  Description of Artificial Sequence: Synthetic oligonucleotide
  Antisense strand to SEQ ID NO: 2392340
uaauucaaacuuuaugccg

SEQ ID NO: 2392342 - RNA, 19 nt, Artificial Sequence
  Description of Artificial Sequence: Synthetic oligonucleotide
  Sense strand starting at position 1892 of SEQ ID NO: 1886183
ugaauuaguccuuacgcaa

SEQ ID NO: 2392343 - RNA, 19 nt, Artificial Sequence
  Description of Artificial Sequence: Synthetic oligonucleotide
  Antisense strand to SEQ ID NO: 2392342
uugcguaaggacuaauuca

SEQ ID NO: 2392344 - RNA, 19 nt, Artificial Sequence
  Description of Artificial Sequence: Synthetic oligonucleotide
  Sense strand starting at position 2500 of SEQ ID NO: 1886183
ggaccucagucuuuagaac

SEQ ID NO: 2392345 - RNA, 19 nt, Artificial Sequence
  Description of Artificial Sequence: Synthetic oligonucleotide
  Antisense strand to SEQ ID NO: 2392344
guucuaaagacugaggucc

SEQ ID NO: 2392346 - RNA, 19 nt, Artificial Sequence
  Description of Artificial Sequence: Synthetic oligonucleotide
  Sense strand starting at position 2561 of SEQ ID NO: 1886183
auggguucgagcgagaagu

SEQ ID NO: 2392347 - RNA, 19 nt, Artificial Sequence
  Description of Artificial Sequence: Synthetic oligonucleotide
  Antisense strand to SEQ ID NO: 2392346
acuucucgcucgaacccau

SEQ ID NO: 2392348 - RNA, 19 nt, Artificial Sequence
  Description of Artificial Sequence: Synthetic oligonucleotide
  Sense strand starting at position 2572 of SEQ ID NO: 1886183
cgagaaguccgagaucaga

SEQ ID NO: 2392349 - RNA, 19 nt, Artificial Sequence
  Description of Artificial Sequence: Synthetic oligonucleotide
  Antisense strand to SEQ ID NO: 2392348
ucugaucucggacuucucg

SEQ ID NO: 2392350 - RNA, 19 nt, Artificial Sequence
  Description of Artificial Sequence: Synthetic oligonucleotide
  Sense strand starting at position 2599 of SEQ ID NO: 1886183
gccacagcuguuuaauauc

SEQ ID NO: 2392351 - RNA, 19 nt, Artificial Sequence
  Description of Artificial Sequence: Synthetic oligonucleotide
  Antisense strand to SEQ ID NO: 2392350
gauauuaaacagcuguggc

SEQ ID NO: 2392352 - RNA, 19 nt, Artificial Sequence
  Description of Artificial Sequence: Synthetic oligonucleotide
  Sense strand starting at position 2638 of SEQ ID NO: 1886183
ccugaucugucuuuccauu

SEQ ID NO: 2392353 - RNA, 19 nt, Artificial Sequence
  Description of Artificial Sequence: Synthetic oligonucleotide
  Antisense strand to SEQ ID NO: 2392352
aauggaaagacagaucagg

SEQ ID NO: 2392354 - RNA, 19 nt, Artificial Sequence
  Description of Artificial Sequence: Synthetic oligonucleotide
  Sense strand starting at position 2654 of SEQ ID NO: 1886183
auuacaccgugcuuagaaa

SEQ ID NO: 2392355 - RNA, 19 nt, Artificial Sequence
  Description of Artificial Sequence: Synthetic oligonucleotide
  Antisense strand to SEQ ID NO: 2392354
uuucuaagcacgguguaau

SEQ ID NO: 2392356 - RNA, 19 nt, Artificial Sequence
  Description of Artificial Sequence: Synthetic oligonucleotide
  Sense strand starting at position 2676 of SEQ ID NO: 1886183
ccaaucuccgauugccaaa

SEQ ID NO: 2392357 - RNA, 19 nt, Artificial Sequence
  Description of Artificial Sequence: Synthetic oligonucleotide
  Antisense strand to SEQ ID NO: 2392356
uuuggcaaucggagauugg

SEQ ID NO: 2392358 - RNA, 19 nt, Artificial Sequence
  Description of Artificial Sequence: Synthetic oligonucleotide
  Sense strand starting at position 3103 of SEQ ID NO: 1886183
acuucuaaagcgcaaugua

SEQ ID NO: 2392359 - RNA, 19 nt, Artificial Sequence
  Description of Artificial Sequence: Synthetic oligonucleotide
  Antisense strand to SEQ ID NO: 2392358
uacauugcgcuuuagaagu

SEQ ID NO: 2392360 - RNA, 19 nt, Artificial Sequence
  Description of Artificial Sequence: Synthetic oligonucleotide
  Sense strand starting at position 3153 of SEQ ID NO: 1886183
uguauacaacuccgugaau

SEQ ID NO: 2392361 - RNA, 19 nt, Artificial Sequence
  Description of Artificial Sequence: Synthetic oligonucleotide
  Antisense strand to SEQ ID NO: 2392360
auucacggaguuguauaca

SEQ ID NO: 2392362 - RNA, 19 nt, Artificial Sequence
  Description of Artificial Sequence: Synthetic oligonucleotide
  Sense strand starting at position 3154 of SEQ ID NO: 1886183
guauacaacuccgugaauu

SEQ ID NO: 2392363 - RNA, 19 nt, Artificial Sequence
  Description of Artificial Sequence: Synthetic oligonucleotide
  Antisense strand to SEQ ID NO: 2392362
aauucacggaguuguauac

SEQ ID NO: 2392364 - RNA, 19 nt, Artificial Sequence
  Description of Artificial Sequence: Synthetic oligonucleotide
  Sense strand starting at position 3156 of SEQ ID NO: 1886183
auacaacuccgugaauuau

SEQ ID NO: 2392365 - RNA, 19 nt, Artificial Sequence
  Description of Artificial Sequence: Synthetic oligonucleotide
  Antisense strand to SEQ ID NO: 2392364
auaauucacggaguuguau

SEQ ID NO: 2392366 - RNA, 19 nt, Artificial Sequence
  Description of Artificial Sequence: Synthetic oligonucleotide
  Sense strand starting at position 3162 of SEQ ID NO: 1886183
cuccgugaauuauuacaaa

SEQ ID NO: 2392367 - RNA, 19 nt, Artificial Sequence
  Description of Artificial Sequence: Synthetic oligonucleotide
  Antisense strand to SEQ ID NO: 2392366
uuuguaauaauucacggag

SEQ ID NO: 2392368 - RNA, 19 nt, Artificial Sequence
  Description of Artificial Sequence: Synthetic oligonucleotide
  Sense strand starting at position 3246 of SEQ ID NO: 1886183
gacgauugagcccaagagu

SEQ ID NO: 2392369 - RNA, 19 nt, Artificial Sequence
  Description of Artificial Sequence: Synthetic oligonucleotide
  Antisense strand to SEQ ID NO: 2392368
acucuugggcucaaucguc

SEQ ID NO: 2392370 - RNA, 19 nt, Artificial Sequence
  Description of Artificial Sequence: Synthetic oligonucleotide
  Sense strand starting at position 3378 of SEQ ID NO: 1886183
ggaucuagccugggaggua

SEQ ID NO: 2392371 - RNA, 19 nt, Artificial Sequence
  Description of Artificial Sequence: Synthetic oligonucleotide
  Antisense strand to SEQ ID NO: 2392370
uaccucccaggcuagaucc

SEQ ID NO: 2392372 - RNA, 19 nt, Artificial Sequence
  Description of Artificial Sequence: Synthetic oligonucleotide
  Sense strand starting at position 3556 of SEQ ID NO: 1886183
cuauacugguuucuaauga

SEQ ID NO: 2392373 - RNA, 19 nt, Artificial Sequence
  Description of Artificial Sequence: Synthetic oligonucleotide
  Antisense strand to SEQ ID NO: 2392372
ucauuagaaaccaguauag

SEQ ID NO: 2392374 - RNA, 19 nt, Artificial Sequence
  Description of Artificial Sequence: Synthetic oligonucleotide
  Sense strand starting at position 3623 of SEQ ID NO: 1886183
gaguguugaguguuucguu

SEQ ID NO: 2392375 - RNA, 19 nt, Artificial Sequence
  Description of Artificial Sequence: Synthetic oligonucleotide
  Antisense strand to SEQ ID NO: 2392374
aacgaaacacucaacacuc

SEQ ID NO: 2392376 - RNA, 19 nt, Artificial Sequence
  Description of Artificial Sequence: Synthetic oligonucleotide
  Sense strand starting at position 3625 of SEQ ID NO: 1886183
guguugaguguuucguugu

SEQ ID NO: 2392377 - RNA, 19 nt, Artificial Sequence
  Description of Artificial Sequence: Synthetic oligonucleotide
  Antisense strand to SEQ ID NO: 2392376
acaacgaaacacucaacac

SEQ ID NO: 2392378 - RNA, 19 nt, Artificial Sequence
  Description of Artificial Sequence: Synthetic oligonucleotide
  Sense strand starting at position 3690 of SEQ ID NO: 1886183
cuauucugcugguuacaca

SEQ ID NO: 2392379 - RNA, 19 nt, Artificial Sequence
  Description of Artificial Sequence: Synthetic oligonucleotide
  Antisense strand to SEQ ID NO: 2392378
uguguaaccagcagaauag

SEQ ID NO: 2392380 - RNA, 19 nt, Artificial Sequence
  Description of Artificial Sequence: Synthetic oligonucleotide
  Sense strand starting at position 3784 of SEQ ID NO: 1886183
uugauaucuucugugaugu

SEQ ID NO: 2392381 - RNA, 19 nt, Artificial Sequence
  Description of Artificial Sequence: Synthetic oligonucleotide
  Antisense strand to SEQ ID NO: 2392380
acaucacagaagauaucaa

SEQ ID NO: 2392382 - RNA, 19 nt, Artificial Sequence
  Description of Artificial Sequence: Synthetic oligonucleotide
  Sense strand starting at position 3785 of SEQ ID NO: 1886183
ugauaucuucugugaugug

SEQ ID NO: 2392383 - RNA, 19 nt, Artificial Sequence
  Description of Artificial Sequence: Synthetic oligonucleotide
  Antisense strand to SEQ ID NO: 2392382
cacaucacagaagauauca

SEQ ID NO: 2392384 - RNA, 19 nt, Artificial Sequence
  Description of Artificial Sequence: Synthetic oligonucleotide
  Sense strand starting at position 3851 of SEQ ID NO: 1886183
ugugaaguucuuuauauac

SEQ ID NO: 2392385 - RNA, 19 nt, Artificial Sequence
  Description of Artificial Sequence: Synthetic oligonucleotide
  Antisense strand to SEQ ID NO: 2392384
guauauaaagaacuucaca

SEQ ID NO: 2392386 - RNA, 19 nt, Artificial Sequence
  Description of Artificial Sequence: Synthetic oligonucleotide
  Sense strand starting at position 3861 of SEQ ID NO: 1886183
uuuauauacugguuaucag

SEQ ID NO: 2392387 - RNA, 19 nt, Artificial Sequence
  Description of Artificial Sequence: Synthetic oligonucleotide
  Antisense strand to SEQ ID NO: 2392386
cugauaaccaguauauaaa

SEQ ID NO: 2392388 - RNA, 19 nt, Artificial Sequence
  Description of Artificial Sequence: Synthetic oligonucleotide
  Sense strand starting at position 3872 of SEQ ID NO: 1886183
guuaucagcccucaguuau

SEQ ID NO: 2392389 - RNA, 19 nt, Artificial Sequence
  Description of Artificial Sequence: Synthetic oligonucleotide
  Antisense strand to SEQ ID NO: 2392388
auaacugagggcugauaac

SEQ ID NO: 2392390 - RNA, 19 nt, Artificial Sequence
  Description of Artificial Sequence: Synthetic oligonucleotide
  Sense strand starting at position 3943 of SEQ ID NO: 1886183
guguccuuugaugaauaga

SEQ ID NO: 2392391 - RNA, 19 nt, Artificial Sequence
  Description of Artificial Sequence: Synthetic oligonucleotide
  Antisense strand to SEQ ID NO: 2392390
ucuauucaucaaaggacac

SEQ ID NO: 2392392 - RNA, 19 nt, Artificial Sequence
  Description of Artificial Sequence: Synthetic oligonucleotide
  Sense strand starting at position 5 of SEQ ID NO: 1886184
gaaauuauuagugggugga

SEQ ID NO: 2392393 - RNA, 19 nt, Artificial Sequence
  Description of Artificial Sequence: Synthetic oligonucleotide
  Antisense strand to SEQ ID NO: 2392392
uccacccacuaauaauuuc

SEQ ID NO: 2392394 - RNA, 19 nt, Artificial Sequence
  Description of Artificial Sequence: Synthetic oligonucleotide
  Sense strand starting at position 6 of SEQ ID NO: 1886184
aaauuauuaguggguggaa

SEQ ID NO: 2392395 - RNA, 19 nt, Artificial Sequence
  Description of Artificial Sequence: Synthetic oligonucleotide
  Antisense strand to SEQ ID NO: 2392394
uuccacccacuaauaauuu

SEQ ID NO: 2392396 - RNA, 19 nt, Artificial Sequence
  Description of Artificial Sequence: Synthetic oligonucleotide
  Sense strand starting at position 7 of SEQ ID NO: 1886184
aauuauuaguggguggaau

SEQ ID NO: 2392397 - RNA, 19 nt, Artificial Sequence
  Description of Artificial Sequence: Synthetic oligonucleotide
  Antisense strand to SEQ ID NO: 2392396
auuccacccacuaauaauu

SEQ ID NO: 2392398 - RNA, 19 nt, Artificial Sequence
  Description of Artificial Sequence: Synthetic oligonucleotide
  Sense strand starting at position 8 of SEQ ID NO: 1886184
auuauuaguggguggaauc

SEQ ID NO: 2392399 - RNA, 19 nt, Artificial Sequence
  Description of Artificial Sequence: Synthetic oligonucleotide
  Antisense strand to SEQ ID NO: 2392398
gauuccacccacuaauaau

SEQ ID NO: 2392400 - RNA, 19 nt, Artificial Sequence
  Description of Artificial Sequence: Synthetic oligonucleotide
  Sense strand starting at position 9 of SEQ ID NO: 1886184
uuauuaguggguggaaucu

SEQ ID NO: 2392401 - RNA, 19 nt, Artificial Sequence
  Description of Artificial Sequence: Synthetic oligonucleotide
  Antisense strand to SEQ ID NO: 2392400
agauuccacccacuaauaa

SEQ ID NO: 2392402 - RNA, 19 nt, Artificial Sequence
  Description of Artificial Sequence: Synthetic oligonucleotide
  Sense strand starting at position 64 of SEQ ID NO: 1886184
auaaaugacugagauucca

SEQ ID NO: 2392403 - RNA, 19 nt, Artificial Sequence
  Description of Artificial Sequence: Synthetic oligonucleotide
  Antisense strand to SEQ ID NO: 2392402
uggaaucucagucauuuau

SEQ ID NO: 2392404 - RNA, 19 nt, Artificial Sequence
  Description of Artificial Sequence: Synthetic oligonucleotide
  Sense strand starting at position 80 of SEQ ID NO: 1886184
ccaugaauaggcgacaauu

SEQ ID NO: 2392405 - RNA, 19 nt, Artificial Sequence
  Description of Artificial Sequence: Synthetic oligonucleotide
  Antisense strand to SEQ ID NO: 2392404
aauugucgccuauucaugg

SEQ ID NO: 2392406 - RNA, 19 nt, Artificial Sequence
  Description of Artificial Sequence: Synthetic oligonucleotide
  Sense strand starting at position 91 of SEQ ID NO: 1886184
cgacaauuugcuggcaugu

SEQ ID NO: 2392407 - RNA, 19 nt, Artificial Sequence
  Description of Artificial Sequence: Synthetic oligonucleotide
  Antisense strand to SEQ ID NO: 2392406
acaugccagcaaauugucg

SEQ ID NO: 2392408 - RNA, 19 nt, Artificial Sequence
  Description of Artificial Sequence: Synthetic oligonucleotide
  Sense strand starting at position 93 of SEQ ID NO: 1886184
acaauuugcuggcauguca

SEQ ID NO: 2392409 - RNA, 19 nt, Artificial Sequence
  Description of Artificial Sequence: Synthetic oligonucleotide
  Antisense strand to SEQ ID NO: 2392408
ugacaugccagcaaauugu

SEQ ID NO: 2392410 - RNA, 19 nt, Artificial Sequence
  Description of Artificial Sequence: Synthetic oligonucleotide
  Sense strand starting at position 208 of SEQ ID NO: 1886184
aacuauagucuuggagaua

SEQ ID NO: 2392411 - RNA, 19 nt, Artificial Sequence
  Description of Artificial Sequence: Synthetic oligonucleotide
  Antisense strand to SEQ ID NO: 2392410
uaucuccaagacuauaguu

SEQ ID NO: 2392412 - RNA, 19 nt, Artificial Sequence
  Description of Artificial Sequence: Synthetic oligonucleotide
  Sense strand starting at position 209 of SEQ ID NO: 1886184
acuauagucuuggagauaa

SEQ ID NO: 2392413 - RNA, 19 nt, Artificial Sequence
  Description of Artificial Sequence: Synthetic oligonucleotide
  Antisense strand to SEQ ID NO: 2392412
uuaucuccaagacuauagu

SEQ ID NO: 2392414 - RNA, 19 nt, Artificial Sequence
  Description of Artificial Sequence: Synthetic oligonucleotide
  Sense strand starting at position 297 of SEQ ID NO: 1886184
gccacaaccuaggauugaa

SEQ ID NO: 2392415 - RNA, 19 nt, Artificial Sequence
  Description of Artificial Sequence: Synthetic oligonucleotide
  Antisense strand to SEQ ID NO: 2392414
uucaauccuagguuguggc

SEQ ID NO: 2392416 - RNA, 19 nt, Artificial Sequence
  Description of Artificial Sequence: Synthetic oligonucleotide
  Sense strand starting at position 381 of SEQ ID NO: 1886184
agcaaagucuuaucaaagu

SEQ ID NO: 2392417 - RNA, 19 nt, Artificial Sequence
  Description of Artificial Sequence: Synthetic oligonucleotide
  Antisense strand to SEQ ID NO: 2392416
acuuugauaagacuuugcu

SEQ ID NO: 2392418 - RNA, 19 nt, Artificial Sequence
  Description of Artificial Sequence: Synthetic oligonucleotide
  Sense strand starting at position 522 of SEQ ID NO: 1886184
aaaguaaucucuuccggua

SEQ ID NO: 2392419 - RNA, 19 nt, Artificial Sequence
  Description of Artificial Sequence: Synthetic oligonucleotide
  Antisense strand to SEQ ID NO: 2392418
uaccggaagagauuacuuu

SEQ ID NO: 2392420 - RNA, 19 nt, Artificial Sequence
  Description of Artificial Sequence: Synthetic oligonucleotide
  Sense strand starting at position 527 of SEQ ID NO: 1886184
aaucucuuccgguagcaaa

SEQ ID NO: 2392421 - RNA, 19 nt, Artificial Sequence
  Description of Artificial Sequence: Synthetic oligonucleotide
  Antisense strand to SEQ ID NO: 2392420
uuugcuaccggaagagauu

SEQ ID NO: 2392422 - RNA, 19 nt, Artificial Sequence
  Description of Artificial Sequence: Synthetic oligonucleotide
  Sense strand starting at position 759 of SEQ ID NO: 1886184
guuucuaagggucgccaau

SEQ ID NO: 2392423 - RNA, 19 nt, Artificial Sequence
  Description of Artificial Sequence: Synthetic oligonucleotide
  Antisense strand to SEQ ID NO: 2392422
auuggcgacccuuagaaac

SEQ ID NO: 2392424 - RNA, 19 nt, Artificial Sequence
  Description of Artificial Sequence: Synthetic oligonucleotide
  Sense strand starting at position 761 of SEQ ID NO: 1886184
uucuaagggucgccaauaa

SEQ ID NO: 2392425 - RNA, 19 nt, Artificial Sequence
  Description of Artificial Sequence: Synthetic oligonucleotide
  Antisense strand to SEQ ID NO: 2392424
uuauuggcgacccuuagaa

SEQ ID NO: 2392426 - RNA, 19 nt, Artificial Sequence
  Description of Artificial Sequence: Synthetic oligonucleotide
  Sense strand starting at position 946 of SEQ ID NO: 1886184
gcaugcacguguccauaaa

SEQ ID NO: 2392427 - RNA, 19 nt, Artificial Sequence
  Description of Artificial Sequence: Synthetic oligonucleotide
  Antisense strand to SEQ ID NO: 2392426
uuuauggacacgugcaugc

SEQ ID NO: 2392428 - RNA, 19 nt, Artificial Sequence
  Description of Artificial Sequence: Synthetic oligonucleotide
  Sense strand starting at position 947 of SEQ ID NO: 1886184
caugcacguguccauaaau

SEQ ID NO: 2392429 - RNA, 19 nt, Artificial Sequence
  Description of Artificial Sequence: Synthetic oligonucleotide
  Antisense strand to SEQ ID NO: 2392428
auuuauggacacgugcaug

SEQ ID NO: 2392430 - RNA, 19 nt, Artificial Sequence
  Description of Artificial Sequence: Synthetic oligonucleotide
  Sense strand starting at position 956 of SEQ ID NO: 1886184
guccauaaaugagcucaca

SEQ ID NO: 2392431 - RNA, 19 nt, Artificial Sequence
  Description of Artificial Sequence: Synthetic oligonucleotide
  Antisense strand to SEQ ID NO: 2392430
ugugagcucauuuauggac

SEQ ID NO: 2392432 - RNA, 19 nt, Artificial Sequence
  Description of Artificial Sequence: Synthetic oligonucleotide
  Sense strand starting at position 1168 of SEQ ID NO: 1886184
caauguguguuaucuguca

SEQ ID NO: 2392433 - RNA, 19 nt, Artificial Sequence
  Description of Artificial Sequence: Synthetic oligonucleotide
  Antisense strand to SEQ ID NO: 2392432
ugacagauaacacacauug

SEQ ID NO: 2392434 - RNA, 19 nt, Artificial Sequence
  Description of Artificial Sequence: Synthetic oligonucleotide
  Sense strand starting at position 1212 of SEQ ID NO: 1886184
aggccuuaucgcguuugca

SEQ ID NO: 2392435 - RNA, 19 nt, Artificial Sequence
  Description of Artificial Sequence: Synthetic oligonucleotide
  Antisense strand to SEQ ID NO: 2392434
ugcaaacgcgauaaggccu

SEQ ID NO: 2392436 - RNA, 19 nt, Artificial Sequence
  Description of Artificial Sequence: Synthetic oligonucleotide
  Sense strand starting at position 1213 of SEQ ID NO: 1886184
ggccuuaucgcguuugcag

SEQ ID NO: 2392437 - RNA, 19 nt, Artificial Sequence
  Description of Artificial Sequence: Synthetic oligonucleotide
  Antisense strand to SEQ ID NO: 2392436
cugcaaacgcgauaaggcc

SEQ ID NO: 2392438 - RNA, 19 nt, Artificial Sequence
  Description of Artificial Sequence: Synthetic oligonucleotide
  Sense strand starting at position 1352 of SEQ ID NO: 1886184
ggcggagaucuggaggcuu

SEQ ID NO: 2392439 - RNA, 19 nt, Artificial Sequence
  Description of Artificial Sequence: Synthetic oligonucleotide
  Antisense strand to SEQ ID NO: 2392438
aagccuccagaucuccgcc

SEQ ID NO: 2392440 - RNA, 19 nt, Artificial Sequence
  Description of Artificial Sequence: Synthetic oligonucleotide
  Sense strand starting at position 1665 of SEQ ID NO: 1886184
gcuggaggcuucgcauaca

SEQ ID NO: 2392441 - RNA, 19 nt, Artificial Sequence
  Description of Artificial Sequence: Synthetic oligonucleotide
  Antisense strand to SEQ ID NO: 2392440
uguaugcgaagccuccagc

SEQ ID NO: 2392442 - RNA, 19 nt, Artificial Sequence
  Description of Artificial Sequence: Synthetic oligonucleotide
  Sense strand starting at position 2060 of SEQ ID NO: 1886184
gguuguuggccuugaucuc

SEQ ID NO: 2392443 - RNA, 19 nt, Artificial Sequence
  Description of Artificial Sequence: Synthetic oligonucleotide
  Antisense strand to SEQ ID NO: 2392442
gagaucaaggccaacaacc

SEQ ID NO: 2392444 - RNA, 19 nt, Artificial Sequence
  Description of Artificial Sequence: Synthetic oligonucleotide
  Sense strand starting at position 3115 of SEQ ID NO: 1886184
ggcuauggaucauauugga

SEQ ID NO: 2392445 - RNA, 19 nt, Artificial Sequence
  Description of Artificial Sequence: Synthetic oligonucleotide
  Antisense strand to SEQ ID NO: 2392444
uccaauaugauccauagcc

SEQ ID NO: 2392446 - RNA, 19 nt, Artificial Sequence
  Description of Artificial Sequence: Synthetic oligonucleotide
  Sense strand starting at position 3234 of SEQ ID NO: 1886184
cgcaaauuuacguggagca

SEQ ID NO: 2392447 - RNA, 19 nt, Artificial Sequence
  Description of Artificial Sequence: Synthetic oligonucleotide
  Antisense strand to SEQ ID NO: 2392446
ugcuccacguaaauuugcg

SEQ ID NO: 2392448 - RNA, 19 nt, Artificial Sequence
  Description of Artificial Sequence: Synthetic oligonucleotide
  Sense strand starting at position 3235 of SEQ ID NO: 1886184
gcaaauuuacguggagcau

SEQ ID NO: 2392449 - RNA, 19 nt, Artificial Sequence
  Description of Artificial Sequence: Synthetic oligonucleotide
  Antisense strand to SEQ ID NO: 2392448
augcuccacguaaauuugc

SEQ ID NO: 2392450 - RNA, 19 nt, Artificial Sequence
  Description of Artificial Sequence: Synthetic oligonucleotide
  Sense strand starting at position 3278 of SEQ ID NO: 1886184
ucggccuuccugcuuuauu

SEQ ID NO: 2392451 - RNA, 19 nt, Artificial Sequence
  Description of Artificial Sequence: Synthetic oligonucleotide
  Antisense strand to SEQ ID NO: 2392450
aauaaagcaggaaggccga

SEQ ID NO: 2392452 - RNA, 19 nt, Artificial Sequence
  Description of Artificial Sequence: Synthetic oligonucleotide
  Sense strand starting at position 3288 of SEQ ID NO: 1886184
ugcuuuauuccugagcggu

SEQ ID NO: 2392453 - RNA, 19 nt, Artificial Sequence
  Description of Artificial Sequence: Synthetic oligonucleotide
  Antisense strand to SEQ ID NO: 2392452
accgcucaggaauaaagca

SEQ ID NO: 2392454 - RNA, 19 nt, Artificial Sequence
  Description of Artificial Sequence: Synthetic oligonucleotide
  Sense strand starting at position 3291 of SEQ ID NO: 1886184
uuuauuccugagcggugua

SEQ ID NO: 2392455 - RNA, 19 nt, Artificial Sequence
  Description of Artificial Sequence: Synthetic oligonucleotide
  Antisense strand to SEQ ID NO: 2392454
uacaccgcucaggaauaaa

SEQ ID NO: 2392456 - RNA, 19 nt, Artificial Sequence
  Description of Artificial Sequence: Synthetic oligonucleotide
  Sense strand starting at position 3292 of SEQ ID NO: 1886184
uuauuccugagcgguguaa

SEQ ID NO: 2392457 - RNA, 19 nt, Artificial Sequence
  Description of Artificial Sequence: Synthetic oligonucleotide
  Antisense strand to SEQ ID NO: 2392456
uuacaccgcucaggaauaa

SEQ ID NO: 2392458 - RNA, 19 nt, Artificial Sequence
  Description of Artificial Sequence: Synthetic oligonucleotide
  Sense strand starting at position 3294 of SEQ ID NO: 1886184
auuccugagcgguguaaga

SEQ ID NO: 2392459 - RNA, 19 nt, Artificial Sequence
  Description of Artificial Sequence: Synthetic oligonucleotide
  Antisense strand to SEQ ID NO: 2392458
ucuuacaccgcucaggaau

SEQ ID NO: 2392460 - RNA, 19 nt, Artificial Sequence
  Description of Artificial Sequence: Synthetic oligonucleotide
  Sense strand starting at position 3322 of SEQ ID NO: 1886184
uggguaucuucgagaaacg

SEQ ID NO: 2392461 - RNA, 19 nt, Artificial Sequence
  Description of Artificial Sequence: Synthetic oligonucleotide
  Antisense strand to SEQ ID NO: 2392460
cguuucucgaagauaccca

SEQ ID NO: 2392462 - RNA, 19 nt, Artificial Sequence
  Description of Artificial Sequence: Synthetic oligonucleotide
  Sense strand starting at position 3480 of SEQ ID NO: 1886184
ggguuugugcgaagguguu

SEQ ID NO: 2392463 - RNA, 19 nt, Artificial Sequence
  Description of Artificial Sequence: Synthetic oligonucleotide
  Antisense strand to SEQ ID NO: 2392462
aacaccuucgcacaaaccc

SEQ ID NO: 2392464 - RNA, 19 nt, Artificial Sequence
  Description of Artificial Sequence: Synthetic oligonucleotide
  Sense strand starting at position 3564 of SEQ ID NO: 1886184
ggugcaagcuuucuccaaa

SEQ ID NO: 2392465 - RNA, 19 nt, Artificial Sequence
  Description of Artificial Sequence: Synthetic oligonucleotide
  Antisense strand to SEQ ID NO: 2392464
uuuggagaaagcuugcacc

SEQ ID NO: 2392466 - RNA, 19 nt, Artificial Sequence
  Description of Artificial Sequence: Synthetic oligonucleotide
  Sense strand starting at position 3873 of SEQ ID NO: 1886184
ugcuuugaaugucuguuga

SEQ ID NO: 2392467 - RNA, 19 nt, Artificial Sequence
  Description of Artificial Sequence: Synthetic oligonucleotide
  Antisense strand to SEQ ID NO: 2392466
ucaacagacauucaaagca

SEQ ID NO: 2392468 - RNA, 19 nt, Artificial Sequence
  Description of Artificial Sequence: Synthetic oligonucleotide
  Sense strand starting at position 3875 of SEQ ID NO: 1886184
cuuugaaugucuguugauc

SEQ ID NO: 2392469 - RNA, 19 nt, Artificial Sequence
  Description of Artificial Sequence: Synthetic oligonucleotide
  Antisense strand to SEQ ID NO: 2392468
gaucaacagacauucaaag

SEQ ID NO: 2392470 - RNA, 19 nt, Artificial Sequence
  Description of Artificial Sequence: Synthetic oligonucleotide
  Sense strand starting at position 3880 of SEQ ID NO: 1886184
aaugucuguugaucuagaa

SEQ ID NO: 2392471 - RNA, 19 nt, Artificial Sequence
  Description of Artificial Sequence: Synthetic oligonucleotide
  Antisense strand to SEQ ID NO: 2392470
uucuagaucaacagacauu

SEQ ID NO: 2392472 - RNA, 19 nt, Artificial Sequence
  Description of Artificial Sequence: Synthetic oligonucleotide
  Sense strand starting at position 350 of SEQ ID NO: 1886185
ccucacuguuugcuggaaa

SEQ ID NO: 2392473 - RNA, 19 nt, Artificial Sequence
  Description of Artificial Sequence: Synthetic oligonucleotide
  Antisense strand to SEQ ID NO: 2392472
uuuccagcaaacagugagg

SEQ ID NO: 2392474 - RNA, 19 nt, Artificial Sequence
  Description of Artificial Sequence: Synthetic oligonucleotide
  Sense strand starting at position 353 of SEQ ID NO: 1886185
cacuguuugcuggaaaguc

SEQ ID NO: 2392475 - RNA, 19 nt, Artificial Sequence
  Description of Artificial Sequence: Synthetic oligonucleotide
  Antisense strand to SEQ ID NO: 2392474
gacuuuccagcaaacagug

SEQ ID NO: 2392476 - RNA, 19 nt, Artificial Sequence
  Description of Artificial Sequence: Synthetic oligonucleotide
  Sense strand starting at position 557 of SEQ ID NO: 1886185
uuaaaugcagcccaugaua

SEQ ID NO: 2392477 - RNA, 19 nt, Artificial Sequence
  Description of Artificial Sequence: Synthetic oligonucleotide
  Antisense strand to SEQ ID NO: 2392476
uaucaugggcugcauuuaa

SEQ ID NO: 2392478 - RNA, 19 nt, Artificial Sequence
  Description of Artificial Sequence: Synthetic oligonucleotide
  Sense strand starting at position 1415 of SEQ ID NO: 1886185
gucauccacugguugguaa

SEQ ID NO: 2392479 - RNA, 19 nt, Artificial Sequence
  Description of Artificial Sequence: Synthetic oligonucleotide
  Antisense strand to SEQ ID NO: 2392478
uuaccaaccaguggaugac

SEQ ID NO: 2392480 - RNA, 19 nt, Artificial Sequence
  Description of Artificial Sequence: Synthetic oligonucleotide
  Sense strand starting at position 1438 of SEQ ID NO: 1886185
gcgagaggacucggaucuu

SEQ ID NO: 2392481 - RNA, 19 nt, Artificial Sequence
  Description of Artificial Sequence: Synthetic oligonucleotide
  Antisense strand to SEQ ID NO: 2392480
aagauccgaguccucucgc

SEQ ID NO: 2392482 - RNA, 19 nt, Artificial Sequence
  Description of Artificial Sequence: Synthetic oligonucleotide
  Sense strand starting at position 1571 of SEQ ID NO: 1886185
aaaggaguuugugcacauc

SEQ ID NO: 2392483 - RNA, 19 nt, Artificial Sequence
  Description of Artificial Sequence: Synthetic oligonucleotide
  Antisense strand to SEQ ID NO: 2392482
gaugugcacaaacuccuuu

SEQ ID NO: 2392484 - RNA, 19 nt, Artificial Sequence
  Description of Artificial Sequence: Synthetic oligonucleotide
  Sense strand starting at position 1574 of SEQ ID NO: 1886185
ggaguuugugcacaucuga

SEQ ID NO: 2392485 - RNA, 19 nt, Artificial Sequence
  Description of Artificial Sequence: Synthetic oligonucleotide
  Antisense strand to SEQ ID NO: 2392484
ucagaugugcacaaacucc

SEQ ID NO: 2392486 - RNA, 19 nt, Artificial Sequence
  Description of Artificial Sequence: Synthetic oligonucleotide
  Sense strand starting at position 1737 of SEQ ID NO: 1886185
gcgagacuuacuuggguag

SEQ ID NO: 2392487 - RNA, 19 nt, Artificial Sequence
  Description of Artificial Sequence: Synthetic oligonucleotide
  Antisense strand to SEQ ID NO: 2392486
cuacccaaguaagucucgc

SEQ ID NO: 2392488 - RNA, 19 nt, Artificial Sequence
  Description of Artificial Sequence: Synthetic oligonucleotide
  Sense strand starting at position 1741 of SEQ ID NO: 1886185
gacuuacuuggguagcgau

SEQ ID NO: 2392489 - RNA, 19 nt, Artificial Sequence
  Description of Artificial Sequence: Synthetic oligonucleotide
  Antisense strand to SEQ ID NO: 2392488
aucgcuacccaaguaaguc

SEQ ID NO: 2392490 - RNA, 19 nt, Artificial Sequence
  Description of Artificial Sequence: Synthetic oligonucleotide
  Sense strand starting at position 2192 of SEQ ID NO: 1886185
cugugugucccguugauac

SEQ ID NO: 2392491 - RNA, 19 nt, Artificial Sequence
  Description of Artificial Sequence: Synthetic oligonucleotide
  Antisense strand to SEQ ID NO: 2392490
guaucaacgggacacacag

SEQ ID NO: 2392492 - RNA, 19 nt, Artificial Sequence
  Description of Artificial Sequence: Synthetic oligonucleotide
  Sense strand starting at position 2440 of SEQ ID NO: 1886185
gggagacaucugugaugug

SEQ ID NO: 2392493 - RNA, 19 nt, Artificial Sequence
  Description of Artificial Sequence: Synthetic oligonucleotide
  Antisense strand to SEQ ID NO: 2392492
cacaucacagaugucuccc

SEQ ID NO: 2392494 - RNA, 19 nt, Artificial Sequence
  Description of Artificial Sequence: Synthetic oligonucleotide
  Sense strand starting at position 2575 of SEQ ID NO: 1886185
gacaaaugucaugguuaug

SEQ ID NO: 2392495 - RNA, 19 nt, Artificial Sequence
  Description of Artificial Sequence: Synthetic oligonucleotide
  Antisense strand to SEQ ID NO: 2392494
cauaaccaugacauuuguc

SEQ ID NO: 2392496 - RNA, 19 nt, Artificial Sequence
  Description of Artificial Sequence: Synthetic oligonucleotide
  Sense strand starting at position 2578 of SEQ ID NO: 1886185
aaaugucaugguuauguaa

SEQ ID NO: 2392497 - RNA, 19 nt, Artificial Sequence
  Description of Artificial Sequence: Synthetic oligonucleotide
  Antisense strand to SEQ ID NO: 2392496
uuacauaaccaugacauuu

SEQ ID NO: 2392498 - RNA, 19 nt, Artificial Sequence
  Description of Artificial Sequence: Synthetic oligonucleotide
  Sense strand starting at position 2598 of SEQ ID NO: 1886185
auguuaacaguaggauaaa

SEQ ID NO: 2392499 - RNA, 19 nt, Artificial Sequence
  Description of Artificial Sequence: Synthetic oligonucleotide
  Antisense strand to SEQ ID NO: 2392498
uuuauccuacuguuaacau

SEQ ID NO: 2392500 - RNA, 19 nt, Artificial Sequence
  Description of Artificial Sequence: Synthetic oligonucleotide
  Sense strand starting at position 2635 of SEQ ID NO: 1886185
gggacugucuuugccacuu

SEQ ID NO: 2392501 - RNA, 19 nt, Artificial Sequence
  Description of Artificial Sequence: Synthetic oligonucleotide
  Antisense strand to SEQ ID NO: 2392500
aaguggcaaagacaguccc

SEQ ID NO: 2392502 - RNA, 19 nt, Artificial Sequence
  Description of Artificial Sequence: Synthetic oligonucleotide
  Sense strand starting at position 2703 of SEQ ID NO: 1886185
acacguauaaaggauugua

SEQ ID NO: 2392503 - RNA, 19 nt, Artificial Sequence
  Description of Artificial Sequence: Synthetic oligonucleotide
  Antisense strand to SEQ ID NO: 2392502
uacaauccuuuauacgugu

SEQ ID NO: 2392504 - RNA, 19 nt, Artificial Sequence
  Description of Artificial Sequence: Synthetic oligonucleotide
  Sense strand starting at position 2706 of SEQ ID NO: 1886185
cguauaaaggauuguaaga

SEQ ID NO: 2392505 - RNA, 19 nt, Artificial Sequence
  Description of Artificial Sequence: Synthetic oligonucleotide
  Antisense strand to SEQ ID NO: 2392504
ucuuacaauccuuuauacg

SEQ ID NO: 2392506 - RNA, 19 nt, Artificial Sequence
  Description of Artificial Sequence: Synthetic oligonucleotide
  Sense strand starting at position 2764 of SEQ ID NO: 1886185
caggaacugucuucugguu

SEQ ID NO: 2392507 - RNA, 19 nt, Artificial Sequence
  Description of Artificial Sequence: Synthetic oligonucleotide
  Antisense strand to SEQ ID NO: 2392506
aaccagaagacaguuccug

SEQ ID NO: 2392508 - RNA, 19 nt, Artificial Sequence
  Description of Artificial Sequence: Synthetic oligonucleotide
  Sense strand starting at position 2769 of SEQ ID NO: 1886185
acugucuucugguuaagau

SEQ ID NO: 2392509 - RNA, 19 nt, Artificial Sequence
  Description of Artificial Sequence: Synthetic oligonucleotide
  Antisense strand to SEQ ID NO: 2392508
aucuuaaccagaagacagu

SEQ ID NO: 2392510 - RNA, 19 nt, Artificial Sequence
  Description of Artificial Sequence: Synthetic oligonucleotide
  Sense strand starting at position 2770 of SEQ ID NO: 1886185
cugucuucugguuaagauc

SEQ ID NO: 2392511 - RNA, 19 nt, Artificial Sequence
  Description of Artificial Sequence: Synthetic oligonucleotide
  Antisense strand to SEQ ID NO: 2392510
gaucuuaaccagaagacag

SEQ ID NO: 2392512 - RNA, 19 nt, Artificial Sequence
  Description of Artificial Sequence: Synthetic oligonucleotide
  Sense strand starting at position 2777 of SEQ ID NO: 1886185
cugguuaagaucugugauc

SEQ ID NO: 2392513 - RNA, 19 nt, Artificial Sequence
  Description of Artificial Sequence: Synthetic oligonucleotide
  Antisense strand to SEQ ID NO: 2392512
gaucacagaucuuaaccag

SEQ ID NO: 2392514 - RNA, 19 nt, Artificial Sequence
  Description of Artificial Sequence: Synthetic oligonucleotide
  Sense strand starting at position 2778 of SEQ ID NO: 1886185
ugguuaagaucugugaucu

SEQ ID NO: 2392515 - RNA, 19 nt, Artificial Sequence
  Description of Artificial Sequence: Synthetic oligonucleotide
  Antisense strand to SEQ ID NO: 2392514
agaucacagaucuuaacca

SEQ ID NO: 2392516 - RNA, 19 nt, Artificial Sequence
  Description of Artificial Sequence: Synthetic oligonucleotide
  Sense strand starting at position 2779 of SEQ ID NO: 1886185
gguuaagaucugugaucuu

SEQ ID NO: 2392517 - RNA, 19 nt, Artificial Sequence
  Description of Artificial Sequence: Synthetic oligonucleotide
  Antisense strand to SEQ ID NO: 2392516
aagaucacagaucuuaacc

SEQ ID NO: 2392518 - RNA, 19 nt, Artificial Sequence
  Description of Artificial Sequence: Synthetic oligonucleotide
  Sense strand starting at position 2782 of SEQ ID NO: 1886185
uaagaucugugaucuugac

SEQ ID NO: 2392519 - RNA, 19 nt, Artificial Sequence
  Description of Artificial Sequence: Synthetic oligonucleotide
  Antisense strand to SEQ ID NO: 2392518
gucaagaucacagaucuua

SEQ ID NO: 2392520 - RNA, 19 nt, Artificial Sequence
  Description of Artificial Sequence: Synthetic oligonucleotide
  Sense strand starting at position 2790 of SEQ ID NO: 1886185
gugaucuugacaugaguua

SEQ ID NO: 2392521 - RNA, 19 nt, Artificial Sequence
  Description of Artificial Sequence: Synthetic oligonucleotide
  Antisense strand to SEQ ID NO: 2392520
uaacucaugucaagaucac

SEQ ID NO: 2392522 - RNA, 19 nt, Artificial Sequence
  Description of Artificial Sequence: Synthetic oligonucleotide
  Sense strand starting at position 2815 of SEQ ID NO: 1886185
auauuuaggucugggaauu

SEQ ID NO: 2392523 - RNA, 19 nt, Artificial Sequence
  Description of Artificial Sequence: Synthetic oligonucleotide
  Antisense strand to SEQ ID NO: 2392522
aauucccagaccuaaauau

SEQ ID NO: 2392524 - RNA, 19 nt, Artificial Sequence
  Description of Artificial Sequence: Synthetic oligonucleotide
  Sense strand starting at position 2884 of SEQ ID NO: 1886185
aguauaacagucuguauau

SEQ ID NO: 2392525 - RNA, 19 nt, Artificial Sequence
  Description of Artificial Sequence: Synthetic oligonucleotide
  Antisense strand to SEQ ID NO: 2392524
auauacagacuguuauacu

SEQ ID NO: 2392526 - RNA, 19 nt, Artificial Sequence
  Description of Artificial Sequence: Synthetic oligonucleotide
  Sense strand starting at position 2885 of SEQ ID NO: 1886185
guauaacagucuguauauu

SEQ ID NO: 2392527 - RNA, 19 nt, Artificial Sequence
  Description of Artificial Sequence: Synthetic oligonucleotide
  Antisense strand to SEQ ID NO: 2392526
aauauacagacuguuauac

SEQ ID NO: 2392528 - RNA, 19 nt, Artificial Sequence
  Description of Artificial Sequence: Synthetic oligonucleotide
  Sense strand starting at position 2906 of SEQ ID NO: 1886185
cugcuuagucuguauauug

SEQ ID NO: 2392529 - RNA, 19 nt, Artificial Sequence
  Description of Artificial Sequence: Synthetic oligonucleotide
  Antisense strand to SEQ ID NO: 2392528
caauauacagacuaagcag

SEQ ID NO: 2392530 - RNA, 19 nt, Artificial Sequence
  Description of Artificial Sequence: Synthetic oligonucleotide
  Sense strand starting at position 3081 of SEQ ID NO: 1886185
uuuccuagcucauugaaga

SEQ ID NO: 2392531 - RNA, 19 nt, Artificial Sequence
  Description of Artificial Sequence: Synthetic oligonucleotide
  Antisense strand to SEQ ID NO: 2392530
ucuucaaugagcuaggaaa

SEQ ID NO: 2392532 - RNA, 19 nt, Artificial Sequence
  Description of Artificial Sequence: Synthetic oligonucleotide
  Sense strand starting at position 3082 of SEQ ID NO: 1886185
uuccuagcucauugaagag

SEQ ID NO: 2392533 - RNA, 19 nt, Artificial Sequence
  Description of Artificial Sequence: Synthetic oligonucleotide
  Antisense strand to SEQ ID NO: 2392532
cucuucaaugagcuaggaa

SEQ ID NO: 2392534 - RNA, 19 nt, Artificial Sequence
  Description of Artificial Sequence: Synthetic oligonucleotide
  Sense strand starting at position 3729 of SEQ ID NO: 1886185
caggauauacugugcuuua

SEQ ID NO: 2392535 - RNA, 19 nt, Artificial Sequence
  Description of Artificial Sequence: Synthetic oligonucleotide
  Antisense strand to SEQ ID NO: 2392534
uaaagcacaguauauccug

SEQ ID NO: 2392536 - RNA, 19 nt, Artificial Sequence
  Description of Artificial Sequence: Synthetic oligonucleotide
  Sense strand starting at position 3730 of SEQ ID NO: 1886185
aggauauacugugcuuuau

SEQ ID NO: 2392537 - RNA, 19 nt, Artificial Sequence
  Description of Artificial Sequence: Synthetic oligonucleotide
  Antisense strand to SEQ ID NO: 2392536
auaaagcacaguauauccu

SEQ ID NO: 2392538 - RNA, 19 nt, Artificial Sequence
  Description of Artificial Sequence: Synthetic oligonucleotide
  Sense strand starting at position 3740 of SEQ ID NO: 1886185
gugcuuuaucuagacaauc

SEQ ID NO: 2392539 - RNA, 19 nt, Artificial Sequence
  Description of Artificial Sequence: Synthetic oligonucleotide
  Antisense strand to SEQ ID NO: 2392538
gauugucuagauaaagcac

SEQ ID NO: 2392540 - RNA, 19 nt, Artificial Sequence
  Description of Artificial Sequence: Synthetic oligonucleotide
  Sense strand starting at position 3749 of SEQ ID NO: 1886185
cuagacaaucccuaguguu

SEQ ID NO: 2392541 - RNA, 19 nt, Artificial Sequence
  Description of Artificial Sequence: Synthetic oligonucleotide
  Antisense strand to SEQ ID NO: 2392540
aacacuagggauugucuag

SEQ ID NO: 2392542 - RNA, 19 nt, Artificial Sequence
  Description of Artificial Sequence: Synthetic oligonucleotide
  Sense strand starting at position 3836 of SEQ ID NO: 1886185
auauguaagucuuugcaca

SEQ ID NO: 2392543 - RNA, 19 nt, Artificial Sequence
  Description of Artificial Sequence: Synthetic oligonucleotide
  Antisense strand to SEQ ID NO: 2392542
ugugcaaagacuuacauau

SEQ ID NO: 2392544 - RNA, 19 nt, Artificial Sequence
  Description of Artificial Sequence: Synthetic oligonucleotide
  Sense strand starting at position 3838 of SEQ ID NO: 1886185
auguaagucuuugcacaac

SEQ ID NO: 2392545 - RNA, 19 nt, Artificial Sequence
  Description of Artificial Sequence: Synthetic oligonucleotide
  Antisense strand to SEQ ID NO: 2392544
guugugcaaagacuuacau

SEQ ID NO: 2392546 - RNA, 19 nt, Artificial Sequence
  Description of Artificial Sequence: Synthetic oligonucleotide
  Sense strand starting at position 3850 of SEQ ID NO: 1886185
gcacaacuuucugugaauu

SEQ ID NO: 2392547 - RNA, 19 nt, Artificial Sequence
  Description of Artificial Sequence: Synthetic oligonucleotide
  Antisense strand to SEQ ID NO: 2392546
aauucacagaaaguugugc

SEQ ID NO: 2392548 - RNA, 19 nt, Artificial Sequence
  Description of Artificial Sequence: Synthetic oligonucleotide
  Sense strand starting at position 3860 of SEQ ID NO: 1886185
cugugaauuccuggaggca

SEQ ID NO: 2392549 - RNA, 19 nt, Artificial Sequence
  Description of Artificial Sequence: Synthetic oligonucleotide
  Antisense strand to SEQ ID NO: 2392548
ugccuccaggaauucacag

SEQ ID NO: 2392550 - RNA, 19 nt, Artificial Sequence
  Description of Artificial Sequence: Synthetic oligonucleotide
  Sense strand starting at position 3861 of SEQ ID NO: 1886185
ugugaauuccuggaggcag

SEQ ID NO: 2392551 - RNA, 19 nt, Artificial Sequence
  Description of Artificial Sequence: Synthetic oligonucleotide
  Antisense strand to SEQ ID NO: 2392550
cugccuccaggaauucaca

SEQ ID NO: 2392552 - RNA, 19 nt, Artificial Sequence
  Description of Artificial Sequence: Synthetic oligonucleotide
  Sense strand starting at position 36 of SEQ ID NO: 1886186
uguagagacucucccuaua

SEQ ID NO: 2392553 - RNA, 19 nt, Artificial Sequence
  Description of Artificial Sequence: Synthetic oligonucleotide
  Antisense strand to SEQ ID NO: 2392552
uauagggagagucucuaca

SEQ ID NO: 2392554 - RNA, 19 nt, Artificial Sequence
  Description of Artificial Sequence: Synthetic oligonucleotide
  Sense strand starting at position 112 of SEQ ID NO: 1886186
cuucgaacuccuugcucau

SEQ ID NO: 2392555 - RNA, 19 nt, Artificial Sequence
  Description of Artificial Sequence: Synthetic oligonucleotide
  Antisense strand to SEQ ID NO: 2392554
augagcaaggaguucgaag

SEQ ID NO: 2392556 - RNA, 19 nt, Artificial Sequence
  Description of Artificial Sequence: Synthetic oligonucleotide
  Sense strand starting at position 173 of SEQ ID NO: 1886186
ccauuuagugcucaguucu

SEQ ID NO: 2392557 - RNA, 19 nt, Artificial Sequence
  Description of Artificial Sequence: Synthetic oligonucleotide
  Antisense strand to SEQ ID NO: 2392556
agaacugagcacuaaaugg

SEQ ID NO: 2392558 - RNA, 19 nt, Artificial Sequence
  Description of Artificial Sequence: Synthetic oligonucleotide
  Sense strand starting at position 211 of SEQ ID NO: 1886186
uauggucguggcgucaaau

SEQ ID NO: 2392559 - RNA, 19 nt, Artificial Sequence
  Description of Artificial Sequence: Synthetic oligonucleotide
  Antisense strand to SEQ ID NO: 2392558
auuugacgccacgaccaua

SEQ ID NO: 2392560 - RNA, 19 nt, Artificial Sequence
  Description of Artificial Sequence: Synthetic oligonucleotide
  Sense strand starting at position 214 of SEQ ID NO: 1886186
ggucguggcgucaaauauc

SEQ ID NO: 2392561 - RNA, 19 nt, Artificial Sequence
  Description of Artificial Sequence: Synthetic oligonucleotide
  Antisense strand to SEQ ID NO: 2392560
gauauuugacgccacgacc

SEQ ID NO: 2392562 - RNA, 19 nt, Artificial Sequence
  Description of Artificial Sequence: Synthetic oligonucleotide
  Sense strand starting at position 291 of SEQ ID NO: 1886186
agaucaugucuacagcuuu

SEQ ID NO: 2392563 - RNA, 19 nt, Artificial Sequence
  Description of Artificial Sequence: Synthetic oligonucleotide
  Antisense strand to SEQ ID NO: 2392562
aaagcuguagacaugaucu

SEQ ID NO: 2392564 - RNA, 19 nt, Artificial Sequence
  Description of Artificial Sequence: Synthetic oligonucleotide
  Sense strand starting at position 299 of SEQ ID NO: 1886186
ucuacagcuuucuugugau

SEQ ID NO: 2392565 - RNA, 19 nt, Artificial Sequence
  Description of Artificial Sequence: Synthetic oligonucleotide
  Antisense strand to SEQ ID NO: 2392564
aucacaagaaagcuguaga

SEQ ID NO: 2392566 - RNA, 19 nt, Artificial Sequence
  Description of Artificial Sequence: Synthetic oligonucleotide
  Sense strand starting at position 331 of SEQ ID NO: 1886186
aguuuaaagagaugcaaag

SEQ ID NO: 2392567 - RNA, 19 nt, Artificial Sequence
  Description of Artificial Sequence: Synthetic oligonucleotide
  Antisense strand to SEQ ID NO: 2392566
cuuugcaucucuuuaaacu

SEQ ID NO: 2392568 - RNA, 19 nt, Artificial Sequence
  Description of Artificial Sequence: Synthetic oligonucleotide
  Sense strand starting at position 351 of SEQ ID NO: 1886186
augaguaucuugugcauuu

SEQ ID NO: 2392569 - RNA, 19 nt, Artificial Sequence
  Description of Artificial Sequence: Synthetic oligonucleotide
  Antisense strand to SEQ ID NO: 2392568
aaaugcacaagauacucau

SEQ ID NO: 2392570 - RNA, 19 nt, Artificial Sequence
  Description of Artificial Sequence: Synthetic oligonucleotide
  Sense strand starting at position 1157 of SEQ ID NO: 1886186
ccaccuauaccucgaauug

SEQ ID NO: 2392571 - RNA, 19 nt, Artificial Sequence
  Description of Artificial Sequence: Synthetic oligonucleotide
  Antisense strand to SEQ ID NO: 2392570
caauucgagguauaggugg

SEQ ID NO: 2392572 - RNA, 19 nt, Artificial Sequence
  Description of Artificial Sequence: Synthetic oligonucleotide
  Sense strand starting at position 1428 of SEQ ID NO: 1886186
ugccuugaugaccaggauu

SEQ ID NO: 2392573 - RNA, 19 nt, Artificial Sequence
  Description of Artificial Sequence: Synthetic oligonucleotide
  Antisense strand to SEQ ID NO: 2392572
aauccuggucaucaaggca

SEQ ID NO: 2392574 - RNA, 19 nt, Artificial Sequence
  Description of Artificial Sequence: Synthetic oligonucleotide
  Sense strand starting at position 1607 of SEQ ID NO: 1886186
agucuugacuaagaagauc

SEQ ID NO: 2392575 - RNA, 19 nt, Artificial Sequence
  Description of Artificial Sequence: Synthetic oligonucleotide
  Antisense strand to SEQ ID NO: 2392574
gaucuucuuagucaagacu

SEQ ID NO: 2392576 - RNA, 19 nt, Artificial Sequence
  Description of Artificial Sequence: Synthetic oligonucleotide
  Sense strand starting at position 1631 of SEQ ID NO: 1886186
ggagguacuacuuguguau

SEQ ID NO: 2392577 - RNA, 19 nt, Artificial Sequence
  Description of Artificial Sequence: Synthetic oligonucleotide
  Antisense strand to SEQ ID NO: 2392576
auacacaaguaguaccucc

SEQ ID NO: 2392578 - RNA, 19 nt, Artificial Sequence
  Description of Artificial Sequence: Synthetic oligonucleotide
  Sense strand starting at position 1634 of SEQ ID NO: 1886186
gguacuacuuguguaucaa

SEQ ID NO: 2392579 - RNA, 19 nt, Artificial Sequence
  Description of Artificial Sequence: Synthetic oligonucleotide
  Antisense strand to SEQ ID NO: 2392578
uugauacacaaguaguacc

SEQ ID NO: 2392580 - RNA, 19 nt, Artificial Sequence
  Description of Artificial Sequence: Synthetic oligonucleotide
  Sense strand starting at position 1646 of SEQ ID NO: 1886186
guaucaacugucuaucaca

SEQ ID NO: 2392581 - RNA, 19 nt, Artificial Sequence
  Description of Artificial Sequence: Synthetic oligonucleotide
  Antisense strand to SEQ ID NO: 2392580
ugugauagacaguugauac

SEQ ID NO: 2392582 - RNA, 19 nt, Artificial Sequence
  Description of Artificial Sequence: Synthetic oligonucleotide
  Sense strand starting at position 1691 of SEQ ID NO: 1886186
gccgcauuucuuuggaaca

SEQ ID NO: 2392583 - RNA, 19 nt, Artificial Sequence
  Description of Artificial Sequence: Synthetic oligonucleotide
  Antisense strand to SEQ ID NO: 2392582
uguuccaaagaaaugcggc

SEQ ID NO: 2392584 - RNA, 19 nt, Artificial Sequence
  Description of Artificial Sequence: Synthetic oligonucleotide
  Sense strand starting at position 1692 of SEQ ID NO: 1886186
ccgcauuucuuuggaacau

SEQ ID NO: 2392585 - RNA, 19 nt, Artificial Sequence
  Description of Artificial Sequence: Synthetic oligonucleotide
  Antisense strand to SEQ ID NO: 2392584
auguuccaaagaaaugcgg

SEQ ID NO: 2392586 - RNA, 19 nt, Artificial Sequence
  Description of Artificial Sequence: Synthetic oligonucleotide
  Sense strand starting at position 1693 of SEQ ID NO: 1886186
cgcauuucuuuggaacaua

SEQ ID NO: 2392587 - RNA, 19 nt, Artificial Sequence
  Description of Artificial Sequence: Synthetic oligonucleotide
  Antisense strand to SEQ ID NO: 2392586
uauguuccaaagaaaugcg

SEQ ID NO: 2392588 - RNA, 19 nt, Artificial Sequence
  Description of Artificial Sequence: Synthetic oligonucleotide
  Sense strand starting at position 1786 of SEQ ID NO: 1886186
ucugcuagucacugcuuua

SEQ ID NO: 2392589 - RNA, 19 nt, Artificial Sequence
  Description of Artificial Sequence: Synthetic oligonucleotide
  Antisense strand to SEQ ID NO: 2392588
uaaagcagugacuagcaga

SEQ ID NO: 2392590 - RNA, 19 nt, Artificial Sequence
  Description of Artificial Sequence: Synthetic oligonucleotide
  Sense strand starting at position 1789 of SEQ ID NO: 1886186
gcuagucacugcuuuacaa

SEQ ID NO: 2392591 - RNA, 19 nt, Artificial Sequence
  Description of Artificial Sequence: Synthetic oligonucleotide
  Antisense strand to SEQ ID NO: 2392590
uuguaaagcagugacuagc

SEQ ID NO: 2392592 - RNA, 19 nt, Artificial Sequence
  Description of Artificial Sequence: Synthetic oligonucleotide
  Sense strand starting at position 1866 of SEQ ID NO: 1886186
auuguuggauuaccacaua

SEQ ID NO: 2392593 - RNA, 19 nt, Artificial Sequence
  Description of Artificial Sequence: Synthetic oligonucleotide
  Antisense strand to SEQ ID NO: 2392592
uaugugguaauccaacaau

SEQ ID NO: 2392594 - RNA, 19 nt, Artificial Sequence
  Description of Artificial Sequence: Synthetic oligonucleotide
  Sense strand starting at position 2050 of SEQ ID NO: 1886186
cacugauggugucuacuaa

SEQ ID NO: 2392595 - RNA, 19 nt, Artificial Sequence
  Description of Artificial Sequence: Synthetic oligonucleotide
  Antisense strand to SEQ ID NO: 2392594
uuaguagacaccaucagug

SEQ ID NO: 2392596 - RNA, 19 nt, Artificial Sequence
  Description of Artificial Sequence: Synthetic oligonucleotide
  Sense strand starting at position 2051 of SEQ ID NO: 1886186
acugauggugucuacuaau

SEQ ID NO: 2392597 - RNA, 19 nt, Artificial Sequence
  Description of Artificial Sequence: Synthetic oligonucleotide
  Antisense strand to SEQ ID NO: 2392596
auuaguagacaccaucagu

SEQ ID NO: 2392598 - RNA, 19 nt, Artificial Sequence
  Description of Artificial Sequence: Synthetic oligonucleotide
  Sense strand starting at position 2077 of SEQ ID NO: 1886186
guuacuaccugagaaaguu

SEQ ID NO: 2392599 - RNA, 19 nt, Artificial Sequence
  Description of Artificial Sequence: Synthetic oligonucleotide
  Antisense strand to SEQ ID NO: 2392598
aacuuucucagguaguaac

SEQ ID NO: 2392600 - RNA, 19 nt, Artificial Sequence
  Description of Artificial Sequence: Synthetic oligonucleotide
  Sense strand starting at position 2173 of SEQ ID NO: 1886186
uacuguuugcaguguauua

SEQ ID NO: 2392601 - RNA, 19 nt, Artificial Sequence
  Description of Artificial Sequence: Synthetic oligonucleotide
  Antisense strand to SEQ ID NO: 2392600
uaauacacugcaaacagua

SEQ ID NO: 2392602 - RNA, 19 nt, Artificial Sequence
  Description of Artificial Sequence: Synthetic oligonucleotide
  Sense strand starting at position 2183 of SEQ ID NO: 1886186
aguguauuauggguaugca

SEQ ID NO: 2392603 - RNA, 19 nt, Artificial Sequence
  Description of Artificial Sequence: Synthetic oligonucleotide
  Antisense strand to SEQ ID NO: 2392602
ugcauacccauaauacacu

SEQ ID NO: 2392604 - RNA, 19 nt, Artificial Sequence
  Description of Artificial Sequence: Synthetic oligonucleotide
  Sense strand starting at position 2184 of SEQ ID NO: 1886186
guguauuauggguaugcaa

SEQ ID NO: 2392605 - RNA, 19 nt, Artificial Sequence
  Description of Artificial Sequence: Synthetic oligonucleotide
  Antisense strand to SEQ ID NO: 2392604
uugcauacccauaauacac

SEQ ID NO: 2392606 - RNA, 19 nt, Artificial Sequence
  Description of Artificial Sequence: Synthetic oligonucleotide
  Sense strand starting at position 2186 of SEQ ID NO: 1886186
guauuauggguaugcaaau

SEQ ID NO: 2392607 - RNA, 19 nt, Artificial Sequence
  Description of Artificial Sequence: Synthetic oligonucleotide
  Antisense strand to SEQ ID NO: 2392606
auuugcauacccauaauac

SEQ ID NO: 2392608 - RNA, 19 nt, Artificial Sequence
  Description of Artificial Sequence: Synthetic oligonucleotide
  Sense strand starting at position 2209 of SEQ ID NO: 1886186
ccugaauaaucgucuuuag

SEQ ID NO: 2392609 - RNA, 19 nt, Artificial Sequence
  Description of Artificial Sequence: Synthetic oligonucleotide
  Antisense strand to SEQ ID NO: 2392608
cuaaagacgauuauucagg

SEQ ID NO: 2392610 - RNA, 19 nt, Artificial Sequence
  Description of Artificial Sequence: Synthetic oligonucleotide
  Sense strand starting at position 2212 of SEQ ID NO: 1886186
gaauaaucgucuuuagacu

SEQ ID NO: 2392611 - RNA, 19 nt, Artificial Sequence
  Description of Artificial Sequence: Synthetic oligonucleotide
  Antisense strand to SEQ ID NO: 2392610
agucuaaagacgauuauuc

SEQ ID NO: 2392612 - RNA, 19 nt, Artificial Sequence
  Description of Artificial Sequence: Synthetic oligonucleotide
  Sense strand starting at position 2220 of SEQ ID NO: 1886186
gucuuuagacuccggaaau

SEQ ID NO: 2392613 - RNA, 19 nt, Artificial Sequence
  Description of Artificial Sequence: Synthetic oligonucleotide
  Antisense strand to SEQ ID NO: 2392612
auuuccggagucuaaagac

SEQ ID NO: 2392614 - RNA, 19 nt, Artificial Sequence
  Description of Artificial Sequence: Synthetic oligonucleotide
  Sense strand starting at position 2231 of SEQ ID NO: 1886186
ccggaaauaccuuagcagu

SEQ ID NO: 2392615 - RNA, 19 nt, Artificial Sequence
  Description of Artificial Sequence: Synthetic oligonucleotide
  Antisense strand to SEQ ID NO: 2392614
acugcuaagguauuuccgg

SEQ ID NO: 2392616 - RNA, 19 nt, Artificial Sequence
  Description of Artificial Sequence: Synthetic oligonucleotide
  Sense strand starting at position 2233 of SEQ ID NO: 1886186
ggaaauaccuuagcaguca

SEQ ID NO: 2392617 - RNA, 19 nt, Artificial Sequence
  Description of Artificial Sequence: Synthetic oligonucleotide
  Antisense strand to SEQ ID NO: 2392616
ugacugcuaagguauuucc

SEQ ID NO: 2392618 - RNA, 19 nt, Artificial Sequence
  Description of Artificial Sequence: Synthetic oligonucleotide
  Sense strand starting at position 2470 of SEQ ID NO: 1886186
gcuaauugcccaggacuuu

SEQ ID NO: 2392619 - RNA, 19 nt, Artificial Sequence
  Description of Artificial Sequence: Synthetic oligonucleotide
  Antisense strand to SEQ ID NO: 2392618
aaaguccugggcaauuagc

SEQ ID NO: 2392620 - RNA, 19 nt, Artificial Sequence
  Description of Artificial Sequence: Synthetic oligonucleotide
  Sense strand starting at position 2551 of SEQ ID NO: 1886186
guauauagucuaugugcau

SEQ ID NO: 2392621 - RNA, 19 nt, Artificial Sequence
  Description of Artificial Sequence: Synthetic oligonucleotide
  Antisense strand to SEQ ID NO: 2392620
augcacauagacuauauac

SEQ ID NO: 2392622 - RNA, 19 nt, Artificial Sequence
  Description of Artificial Sequence: Synthetic oligonucleotide
  Sense strand starting at position 2557 of SEQ ID NO: 1886186
agucuaugugcauacauaa

SEQ ID NO: 2392623 - RNA, 19 nt, Artificial Sequence
  Description of Artificial Sequence: Synthetic oligonucleotide
  Antisense strand to SEQ ID NO: 2392622
uuauguaugcacauagacu

SEQ ID NO: 2392624 - RNA, 19 nt, Artificial Sequence
  Description of Artificial Sequence: Synthetic oligonucleotide
  Sense strand starting at position 2682 of SEQ ID NO: 1886186
cuauauggguagucacuau

SEQ ID NO: 2392625 - RNA, 19 nt, Artificial Sequence
  Description of Artificial Sequence: Synthetic oligonucleotide
  Antisense strand to SEQ ID NO: 2392624
auagugacuacccauauag

SEQ ID NO: 2392626 - RNA, 19 nt, Artificial Sequence
  Description of Artificial Sequence: Synthetic oligonucleotide
  Sense strand starting at position 2689 of SEQ ID NO: 1886186
gguagucacuaucuggaau

SEQ ID NO: 2392627 - RNA, 19 nt, Artificial Sequence
  Description of Artificial Sequence: Synthetic oligonucleotide
  Antisense strand to SEQ ID NO: 2392626
auuccagauagugacuacc

SEQ ID NO: 2392628 - RNA, 19 nt, Artificial Sequence
  Description of Artificial Sequence: Synthetic oligonucleotide
  Sense strand starting at position 2702 of SEQ ID NO: 1886186
uggaauauguauuaaccau

SEQ ID NO: 2392629 - RNA, 19 nt, Artificial Sequence
  Description of Artificial Sequence: Synthetic oligonucleotide
  Antisense strand to SEQ ID NO: 2392628
augguuaauacauauucca

SEQ ID NO: 2392630 - RNA, 19 nt, Artificial Sequence
  Description of Artificial Sequence: Synthetic oligonucleotide
  Sense strand starting at position 3910 of SEQ ID NO: 1886186
ccucuuggguuauuguaaa

SEQ ID NO: 2392631 - RNA, 19 nt, Artificial Sequence
  Description of Artificial Sequence: Synthetic oligonucleotide
  Antisense strand to SEQ ID NO: 2392630
uuuacaauaacccaagagg

SEQ ID NO: 2392632 - RNA, 19 nt, Artificial Sequence
  Description of Artificial Sequence: Synthetic oligonucleotide
  Sense strand starting at position 41 of SEQ ID NO: 1886187
gguggugaguuguuuauua

SEQ ID NO: 2392633 - RNA, 19 nt, Artificial Sequence
  Description of Artificial Sequence: Synthetic oligonucleotide
  Antisense strand to SEQ ID NO: 2392632
uaauaaacaacucaccacc

SEQ ID NO: 2392634 - RNA, 19 nt, Artificial Sequence
  Description of Artificial Sequence: Synthetic oligonucleotide
  Sense strand starting at position 43 of SEQ ID NO: 1886187
uggugaguuguuuauuaaa

SEQ ID NO: 2392635 - RNA, 19 nt, Artificial Sequence
  Description of Artificial Sequence: Synthetic oligonucleotide
  Antisense strand to SEQ ID NO: 2392634
uuuaauaaacaacucacca

SEQ ID NO: 2392636 - RNA, 19 nt, Artificial Sequence
  Description of Artificial Sequence: Synthetic oligonucleotide
  Sense strand starting at position 45 of SEQ ID NO: 1886187
gugaguuguuuauuaaaca

SEQ ID NO: 2392637 - RNA, 19 nt, Artificial Sequence
  Description of Artificial Sequence: Synthetic oligonucleotide
  Antisense strand to SEQ ID NO: 2392636
uguuuaauaaacaacucac

SEQ ID NO: 2392638 - RNA, 19 nt, Artificial Sequence
  Description of Artificial Sequence: Synthetic oligonucleotide
  Sense strand starting at position 176 of SEQ ID NO: 1886187
agguaauugcaccauauaa

SEQ ID NO: 2392639 - RNA, 19 nt, Artificial Sequence
  Description of Artificial Sequence: Synthetic oligonucleotide
  Antisense strand to SEQ ID NO: 2392638
uuauauggugcaauuaccu

SEQ ID NO: 2392640 - RNA, 19 nt, Artificial Sequence
  Description of Artificial Sequence: Synthetic oligonucleotide
  Sense strand starting at position 409 of SEQ ID NO: 1886187
gcuggaagauuagacauuu

SEQ ID NO: 2392641 - RNA, 19 nt, Artificial Sequence
  Description of Artificial Sequence: Synthetic oligonucleotide
  Antisense strand to SEQ ID NO: 2392640
aaaugucuaaucuuccagc

SEQ ID NO: 2392642 - RNA, 19 nt, Artificial Sequence
  Description of Artificial Sequence: Synthetic oligonucleotide
  Sense strand starting at position 417 of SEQ ID NO: 1886187
auuagacauuuguaaagga

SEQ ID NO: 2392643 - RNA, 19 nt, Artificial Sequence
  Description of Artificial Sequence: Synthetic oligonucleotide
  Antisense strand to SEQ ID NO: 2392642
uccuuuacaaaugucuaau

SEQ ID NO: 2392644 - RNA, 19 nt, Artificial Sequence
  Description of Artificial Sequence: Synthetic oligonucleotide
  Sense strand starting at position 1327 of SEQ ID NO: 1886187
aggaguuccaauggccaaa

SEQ ID NO: 2392645 - RNA, 19 nt, Artificial Sequence
  Description of Artificial Sequence: Synthetic oligonucleotide
  Antisense strand to SEQ ID NO: 2392644
uuuggccauuggaacuccu

SEQ ID NO: 2392646 - RNA, 19 nt, Artificial Sequence
  Description of Artificial Sequence: Synthetic oligonucleotide
  Sense strand starting at position 1436 of SEQ ID NO: 1886187
gggcaauuauuagucauug

SEQ ID NO: 2392647 - RNA, 19 nt, Artificial Sequence
  Description of Artificial Sequence: Synthetic oligonucleotide
  Antisense strand to SEQ ID NO: 2392646
caaugacuaauaauugccc

SEQ ID NO: 2392648 - RNA, 19 nt, Artificial Sequence
  Description of Artificial Sequence: Synthetic oligonucleotide
  Sense strand starting at position 1437 of SEQ ID NO: 1886187
ggcaauuauuagucauugu

SEQ ID NO: 2392649 - RNA, 19 nt, Artificial Sequence
  Description of Artificial Sequence: Synthetic oligonucleotide
  Antisense strand to SEQ ID NO: 2392648
acaaugacuaauaauugcc

SEQ ID NO: 2392650 - RNA, 19 nt, Artificial Sequence
  Description of Artificial Sequence: Synthetic oligonucleotide
  Sense strand starting at position 1441 of SEQ ID NO: 1886187
auuauuagucauuguccau

SEQ ID NO: 2392651 - RNA, 19 nt, Artificial Sequence
  Description of Artificial Sequence: Synthetic oligonucleotide
  Antisense strand to SEQ ID NO: 2392650
auggacaaugacuaauaau

SEQ ID NO: 2392652 - RNA, 19 nt, Artificial Sequence
  Description of Artificial Sequence: Synthetic oligonucleotide
  Sense strand starting at position 1463 of SEQ ID NO: 1886187
ugccgauugagcgcuugaa

SEQ ID NO: 2392653 - RNA, 19 nt, Artificial Sequence
  Description of Artificial Sequence: Synthetic oligonucleotide
  Antisense strand to SEQ ID NO: 2392652
uucaagcgcucaaucggca

SEQ ID NO: 2392654 - RNA, 19 nt, Artificial Sequence
  Description of Artificial Sequence: Synthetic oligonucleotide
  Sense strand starting at position 1492 of SEQ ID NO: 1886187
uccuaauugagaugcgcua

SEQ ID NO: 2392655 - RNA, 19 nt, Artificial Sequence
  Description of Artificial Sequence: Synthetic oligonucleotide
  Antisense strand to SEQ ID NO: 2392654
uagcgcaucucaauuagga

SEQ ID NO: 2392656 - RNA, 19 nt, Artificial Sequence
  Description of Artificial Sequence: Synthetic oligonucleotide
  Sense strand starting at position 1629 of SEQ ID NO: 1886187
uacccaaugcagugggauu

SEQ ID NO: 2392657 - RNA, 19 nt, Artificial Sequence
  Description of Artificial Sequence: Synthetic oligonucleotide
  Antisense strand to SEQ ID NO: 2392656
aaucccacugcauugggua

SEQ ID NO: 2392658 - RNA, 19 nt, Artificial Sequence
  Description of Artificial Sequence: Synthetic oligonucleotide
  Sense strand starting at position 1630 of SEQ ID NO: 1886187
acccaaugcagugggauua

SEQ ID NO: 2392659 - RNA, 19 nt, Artificial Sequence
  Description of Artificial Sequence: Synthetic oligonucleotide
  Antisense strand to SEQ ID NO: 2392658
uaaucccacugcauugggu

SEQ ID NO: 2392660 - RNA, 19 nt, Artificial Sequence
  Description of Artificial Sequence: Synthetic oligonucleotide
  Sense strand starting at position 1721 of SEQ ID NO: 1886187
uucuaacuuguuggaagaa

SEQ ID NO: 2392661 - RNA, 19 nt, Artificial Sequence
  Description of Artificial Sequence: Synthetic oligonucleotide
  Antisense strand to SEQ ID NO: 2392660
uucuuccaacaaguuagaa

SEQ ID NO: 2392662 - RNA, 19 nt, Artificial Sequence
  Description of Artificial Sequence: Synthetic oligonucleotide
  Sense strand starting at position 1776 of SEQ ID NO: 1886187
guuuaaacgcaugagcgau

SEQ ID NO: 2392663 - RNA, 19 nt, Artificial Sequence
  Description of Artificial Sequence: Synthetic oligonucleotide
  Antisense strand to SEQ ID NO: 2392662
aucgcucaugcguuuaaac

SEQ ID NO: 2392664 - RNA, 19 nt, Artificial Sequence
  Description of Artificial Sequence: Synthetic oligonucleotide
  Sense strand starting at position 1780 of SEQ ID NO: 1886187
aaacgcaugagcgauugaa

SEQ ID NO: 2392665 - RNA, 19 nt, Artificial Sequence
  Description of Artificial Sequence: Synthetic oligonucleotide
  Antisense strand to SEQ ID NO: 2392664
uucaaucgcucaugcguuu

SEQ ID NO: 2392666 - RNA, 19 nt, Artificial Sequence
  Description of Artificial Sequence: Synthetic oligonucleotide
  Sense strand starting at position 1879 of SEQ ID NO: 1886187
uuuauauagccuugucgga

SEQ ID NO: 2392667 - RNA, 19 nt, Artificial Sequence
  Description of Artificial Sequence: Synthetic oligonucleotide
  Antisense strand to SEQ ID NO: 2392666
uccgacaaggcuauauaaa

SEQ ID NO: 2392668 - RNA, 19 nt, Artificial Sequence
  Description of Artificial Sequence: Synthetic oligonucleotide
  Sense strand starting at position 1881 of SEQ ID NO: 1886187
uauauagccuugucggaac

SEQ ID NO: 2392669 - RNA, 19 nt, Artificial Sequence
  Description of Artificial Sequence: Synthetic oligonucleotide
  Antisense strand to SEQ ID NO: 2392668
guuccgacaaggcuauaua

SEQ ID NO: 2392670 - RNA, 19 nt, Artificial Sequence
  Description of Artificial Sequence: Synthetic oligonucleotide
  Sense strand starting at position 1992 of SEQ ID NO: 1886187
accagaguaugcuuguuaa

SEQ ID NO: 2392671 - RNA, 19 nt, Artificial Sequence
  Description of Artificial Sequence: Synthetic oligonucleotide
  Antisense strand to SEQ ID NO: 2392670
uuaacaagcauacucuggu

SEQ ID NO: 2392672 - RNA, 19 nt, Artificial Sequence
  Description of Artificial Sequence: Synthetic oligonucleotide
  Sense strand starting at position 1995 of SEQ ID NO: 1886187
agaguaugcuuguuaauuu

SEQ ID NO: 2392673 - RNA, 19 nt, Artificial Sequence
  Description of Artificial Sequence: Synthetic oligonucleotide
  Antisense strand to SEQ ID NO: 2392672
aaauuaacaagcauacucu

SEQ ID NO: 2392674 - RNA, 19 nt, Artificial Sequence
  Description of Artificial Sequence: Synthetic oligonucleotide
  Sense strand starting at position 2020 of SEQ ID NO: 1886187
ucguuucucggguaacaga

SEQ ID NO: 2392675 - RNA, 19 nt, Artificial Sequence
  Description of Artificial Sequence: Synthetic oligonucleotide
  Antisense strand to SEQ ID NO: 2392674
ucuguuacccgagaaacga

SEQ ID NO: 2392676 - RNA, 19 nt, Artificial Sequence
  Description of Artificial Sequence: Synthetic oligonucleotide
  Sense strand starting at position 2045 of SEQ ID NO: 1886187
uaguauagugauggugacu

SEQ ID NO: 2392677 - RNA, 19 nt, Artificial Sequence
  Description of Artificial Sequence: Synthetic oligonucleotide
  Antisense strand to SEQ ID NO: 2392676
agucaccaucacuauacua

SEQ ID NO: 2392678 - RNA, 19 nt, Artificial Sequence
  Description of Artificial Sequence: Synthetic oligonucleotide
  Sense strand starting at position 2050 of SEQ ID NO: 1886187
uagugauggugacuaguga

SEQ ID NO: 2392679 - RNA, 19 nt, Artificial Sequence
  Description of Artificial Sequence: Synthetic oligonucleotide
  Antisense strand to SEQ ID NO: 2392678
ucacuagucaccaucacua

SEQ ID NO: 2392680 - RNA, 19 nt, Artificial Sequence
  Description of Artificial Sequence: Synthetic oligonucleotide
  Sense strand starting at position 2051 of SEQ ID NO: 1886187
agugauggugacuagugaa

SEQ ID NO: 2392681 - RNA, 19 nt, Artificial Sequence
  Description of Artificial Sequence: Synthetic oligonucleotide
  Antisense strand to SEQ ID NO: 2392680
uucacuagucaccaucacu

SEQ ID NO: 2392682 - RNA, 19 nt, Artificial Sequence
  Description of Artificial Sequence: Synthetic oligonucleotide
  Sense strand starting at position 2064 of SEQ ID NO: 1886187
agugaaugccaagguucua

SEQ ID NO: 2392683 - RNA, 19 nt, Artificial Sequence
  Description of Artificial Sequence: Synthetic oligonucleotide
  Antisense strand to SEQ ID NO: 2392682
uagaaccuuggcauucacu

SEQ ID NO: 2392684 - RNA, 19 nt, Artificial Sequence
  Description of Artificial Sequence: Synthetic oligonucleotide
  Sense strand starting at position 2193 of SEQ ID NO: 1886187
gugcauuauggguaugcaa

SEQ ID NO: 2392685 - RNA, 19 nt, Artificial Sequence
  Description of Artificial Sequence: Synthetic oligonucleotide
  Antisense strand to SEQ ID NO: 2392684
uugcauacccauaaugcac

SEQ ID NO: 2392686 - RNA, 19 nt, Artificial Sequence
  Description of Artificial Sequence: Synthetic oligonucleotide
  Sense strand starting at position 2195 of SEQ ID NO: 1886187
gcauuauggguaugcaaau

SEQ ID NO: 2392687 - RNA, 19 nt, Artificial Sequence
  Description of Artificial Sequence: Synthetic oligonucleotide
  Antisense strand to SEQ ID NO: 2392686
auuugcauacccauaaugc

SEQ ID NO: 2392688 - RNA, 19 nt, Artificial Sequence
  Description of Artificial Sequence: Synthetic oligonucleotide
  Sense strand starting at position 2196 of SEQ ID NO: 1886187
cauuauggguaugcaaaua

SEQ ID NO: 2392689 - RNA, 19 nt, Artificial Sequence
  Description of Artificial Sequence: Synthetic oligonucleotide
  Antisense strand to SEQ ID NO: 2392688
uauuugcauacccauaaug

SEQ ID NO: 2392690 - RNA, 19 nt, Artificial Sequence
  Description of Artificial Sequence: Synthetic oligonucleotide
  Sense strand starting at position 2251 of SEQ ID NO: 1886187
cacagagugccuuauguca

SEQ ID NO: 2392691 - RNA, 19 nt, Artificial Sequence
  Description of Artificial Sequence: Synthetic oligonucleotide
  Antisense strand to SEQ ID NO: 2392690
ugacauaaggcacucugug

SEQ ID NO: 2392692 - RNA, 19 nt, Artificial Sequence
  Description of Artificial Sequence: Synthetic oligonucleotide
  Sense strand starting at position 2309 of SEQ ID NO: 1886187
uaacgcuuuccuggucaga

SEQ ID NO: 2392693 - RNA, 19 nt, Artificial Sequence
  Description of Artificial Sequence: Synthetic oligonucleotide
  Antisense strand to SEQ ID NO: 2392692
ucugaccaggaaagcguua

SEQ ID NO: 2392694 - RNA, 19 nt, Artificial Sequence
  Description of Artificial Sequence: Synthetic oligonucleotide
  Sense strand starting at position 2311 of SEQ ID NO: 1886187
acgcuuuccuggucagaga

SEQ ID NO: 2392695 - RNA, 19 nt, Artificial Sequence
  Description of Artificial Sequence: Synthetic oligonucleotide
  Antisense strand to SEQ ID NO: 2392694
ucucugaccaggaaagcgu

SEQ ID NO: 2392696 - RNA, 19 nt, Artificial Sequence
  Description of Artificial Sequence: Synthetic oligonucleotide
  Sense strand starting at position 2348 of SEQ ID NO: 1886187
uguguauuuguacgucuga

SEQ ID NO: 2392697 - RNA, 19 nt, Artificial Sequence
  Description of Artificial Sequence: Synthetic oligonucleotide
  Antisense strand to SEQ ID NO: 2392696
ucagacguacaaauacaca

SEQ ID NO: 2392698 - RNA, 19 nt, Artificial Sequence
  Description of Artificial Sequence: Synthetic oligonucleotide
  Sense strand starting at position 2361 of SEQ ID NO: 1886187
gucugaguuugauuucuuu

SEQ ID NO: 2392699 - RNA, 19 nt, Artificial Sequence
  Description of Artificial Sequence: Synthetic oligonucleotide
  Antisense strand to SEQ ID NO: 2392698
aaagaaaucaaacucagac

SEQ ID NO: 2392700 - RNA, 19 nt, Artificial Sequence
  Description of Artificial Sequence: Synthetic oligonucleotide
  Sense strand starting at position 2416 of SEQ ID NO: 1886187
uuggcaagucaaugauuaa

SEQ ID NO: 2392701 - RNA, 19 nt, Artificial Sequence
  Description of Artificial Sequence: Synthetic oligonucleotide
  Antisense strand to SEQ ID NO: 2392700
uuaaucauugacuugccaa

SEQ ID NO: 2392702 - RNA, 19 nt, Artificial Sequence
  Description of Artificial Sequence: Synthetic oligonucleotide
  Sense strand starting at position 2419 of SEQ ID NO: 1886187
gcaagucaaugauuaacac

SEQ ID NO: 2392703 - RNA, 19 nt, Artificial Sequence
  Description of Artificial Sequence: Synthetic oligonucleotide
  Antisense strand to SEQ ID NO: 2392702
guguuaaucauugacuugc

SEQ ID NO: 2392704 - RNA, 19 nt, Artificial Sequence
  Description of Artificial Sequence: Synthetic oligonucleotide
  Sense strand starting at position 2423 of SEQ ID NO: 1886187
gucaaugauuaacacagaa

SEQ ID NO: 2392705 - RNA, 19 nt, Artificial Sequence
  Description of Artificial Sequence: Synthetic oligonucleotide
  Antisense strand to SEQ ID NO: 2392704
uucuguguuaaucauugac

SEQ ID NO: 2392706 - RNA, 19 nt, Artificial Sequence
  Description of Artificial Sequence: Synthetic oligonucleotide
  Sense strand starting at position 2620 of SEQ ID NO: 1886187
uugagaauucccggcaaug

SEQ ID NO: 2392707 - RNA, 19 nt, Artificial Sequence
  Description of Artificial Sequence: Synthetic oligonucleotide
  Antisense strand to SEQ ID NO: 2392706
cauugccgggaauucucaa

SEQ ID NO: 2392708 - RNA, 19 nt, Artificial Sequence
  Description of Artificial Sequence: Synthetic oligonucleotide
  Sense strand starting at position 2622 of SEQ ID NO: 1886187
gagaauucccggcaauguc

SEQ ID NO: 2392709 - RNA, 19 nt, Artificial Sequence
  Description of Artificial Sequence: Synthetic oligonucleotide
  Antisense strand to SEQ ID NO: 2392708
gacauugccgggaauucuc

SEQ ID NO: 2392710 - RNA, 19 nt, Artificial Sequence
  Description of Artificial Sequence: Synthetic oligonucleotide
  Sense strand starting at position 3127 of SEQ ID NO: 1886187
gcaagucaaucauauuuga

SEQ ID NO: 2392711 - RNA, 19 nt, Artificial Sequence
  Description of Artificial Sequence: Synthetic oligonucleotide
  Antisense strand to SEQ ID NO: 2392710
ucaaauaugauugacuugc

SEQ ID NO: 2392712 - RNA, 19 nt, Artificial Sequence
  Description of Artificial Sequence: Synthetic oligonucleotide
  Sense strand starting at position 107 of SEQ ID NO: 1886188
acuauugaguuucuggaga

SEQ ID NO: 2392713 - RNA, 19 nt, Artificial Sequence
  Description of Artificial Sequence: Synthetic oligonucleotide
  Antisense strand to SEQ ID NO: 2392712
ucuccagaaacucaauagu

SEQ ID NO: 2392714 - RNA, 19 nt, Artificial Sequence
  Description of Artificial Sequence: Synthetic oligonucleotide
  Sense strand starting at position 185 of SEQ ID NO: 1886188
uugacucuauguguccaaa

SEQ ID NO: 2392715 - RNA, 19 nt, Artificial Sequence
  Description of Artificial Sequence: Synthetic oligonucleotide
  Antisense strand to SEQ ID NO: 2392714
uuuggacacauagagucaa

SEQ ID NO: 2392716 - RNA, 19 nt, Artificial Sequence
  Description of Artificial Sequence: Synthetic oligonucleotide
  Sense strand starting at position 187 of SEQ ID NO: 1886188
gacucuauguguccaaaga

SEQ ID NO: 2392717 - RNA, 19 nt, Artificial Sequence
  Description of Artificial Sequence: Synthetic oligonucleotide
  Antisense strand to SEQ ID NO: 2392716
ucuuuggacacauagaguc

SEQ ID NO: 2392718 - RNA, 19 nt, Artificial Sequence
  Description of Artificial Sequence: Synthetic oligonucleotide
  Sense strand starting at position 188 of SEQ ID NO: 1886188
acucuauguguccaaagag

SEQ ID NO: 2392719 - RNA, 19 nt, Artificial Sequence
  Description of Artificial Sequence: Synthetic oligonucleotide
  Antisense strand to SEQ ID NO: 2392718
cucuuuggacacauagagu

SEQ ID NO: 2392720 - RNA, 19 nt, Artificial Sequence
  Description of Artificial Sequence: Synthetic oligonucleotide
  Sense strand starting at position 208 of SEQ ID NO: 1886188
cgaagacuugcccaaguuc

SEQ ID NO: 2392721 - RNA, 19 nt, Artificial Sequence
  Description of Artificial Sequence: Synthetic oligonucleotide
  Antisense strand to SEQ ID NO: 2392720
gaacuugggcaagucuucg

SEQ ID NO: 2392722 - RNA, 19 nt, Artificial Sequence
  Description of Artificial Sequence: Synthetic oligonucleotide
  Sense strand starting at position 233 of SEQ ID NO: 1886188
cagguuagugcagaggaaa

SEQ ID NO: 2392723 - RNA, 19 nt, Artificial Sequence
  Description of Artificial Sequence: Synthetic oligonucleotide
  Antisense strand to SEQ ID NO: 2392722
uuuccucugcacuaaccug

SEQ ID NO: 2392724 - RNA, 19 nt, Artificial Sequence
  Description of Artificial Sequence: Synthetic oligonucleotide
  Sense strand starting at position 451 of SEQ ID NO: 1886188
ccgaccaguuucuuuagaa

SEQ ID NO: 2392725 - RNA, 19 nt, Artificial Sequence
  Description of Artificial Sequence: Synthetic oligonucleotide
  Antisense strand to SEQ ID NO: 2392724
uucuaaagaaacuggucgg

SEQ ID NO: 2392726 - RNA, 19 nt, Artificial Sequence
  Description of Artificial Sequence: Synthetic oligonucleotide
  Sense strand starting at position 452 of SEQ ID NO: 1886188
cgaccaguuucuuuagaac

SEQ ID NO: 2392727 - RNA, 19 nt, Artificial Sequence
  Description of Artificial Sequence: Synthetic oligonucleotide
  Antisense strand to SEQ ID NO: 2392726
guucuaaagaaacuggucg

SEQ ID NO: 2392728 - RNA, 19 nt, Artificial Sequence
  Description of Artificial Sequence: Synthetic oligonucleotide
  Sense strand starting at position 541 of SEQ ID NO: 1886188
uccacauacguagacuaau

SEQ ID NO: 2392729 - RNA, 19 nt, Artificial Sequence
  Description of Artificial Sequence: Synthetic oligonucleotide
  Antisense strand to SEQ ID NO: 2392728
auuagucuacguaugugga

SEQ ID NO: 2392730 - RNA, 19 nt, Artificial Sequence
  Description of Artificial Sequence: Synthetic oligonucleotide
  Sense strand starting at position 673 of SEQ ID NO: 1886188
ccaaguggccuccaaagaa

SEQ ID NO: 2392731 - RNA, 19 nt, Artificial Sequence
  Description of Artificial Sequence: Synthetic oligonucleotide
  Antisense strand to SEQ ID NO: 2392730
uucuuuggaggccacuugg

SEQ ID NO: 2392732 - RNA, 19 nt, Artificial Sequence
  Description of Artificial Sequence: Synthetic oligonucleotide
  Sense strand starting at position 729 of SEQ ID NO: 1886188
caaagauuguccucuaacg

SEQ ID NO: 2392733 - RNA, 19 nt, Artificial Sequence
  Description of Artificial Sequence: Synthetic oligonucleotide
  Antisense strand to SEQ ID NO: 2392732
cguuagaggacaaucuuug

SEQ ID NO: 2392734 - RNA, 19 nt, Artificial Sequence
  Description of Artificial Sequence: Synthetic oligonucleotide
  Sense strand starting at position 809 of SEQ ID NO: 1886188
ggcuguuaccuggaaagga

SEQ ID NO: 2392735 - RNA, 19 nt, Artificial Sequence
  Description of Artificial Sequence: Synthetic oligonucleotide
  Antisense strand to SEQ ID NO: 2392734
uccuuuccagguaacagcc

SEQ ID NO: 2392736 - RNA, 19 nt, Artificial Sequence
  Description of Artificial Sequence: Synthetic oligonucleotide
  Sense strand starting at position 1111 of SEQ ID NO: 1886188
aagucaucgcaggaaaucu

SEQ ID NO: 2392737 - RNA, 19 nt, Artificial Sequence
  Description of Artificial Sequence: Synthetic oligonucleotide
  Antisense strand to SEQ ID NO: 2392736
agauuuccugcgaugacuu

SEQ ID NO: 2392738 - RNA, 19 nt, Artificial Sequence
  Description of Artificial Sequence: Synthetic oligonucleotide
  Sense strand starting at position 1121 of SEQ ID NO: 1886188
aggaaaucugaacgugguu

SEQ ID NO: 2392739 - RNA, 19 nt, Artificial Sequence
  Description of Artificial Sequence: Synthetic oligonucleotide
  Antisense strand to SEQ ID NO: 2392738
aaccacguucagauuuccu

SEQ ID NO: 2392740 - RNA, 19 nt, Artificial Sequence
  Description of Artificial Sequence: Synthetic oligonucleotide
  Sense strand starting at position 1184 of SEQ ID NO: 1886188
guaacucaauuaccugaga

SEQ ID NO: 2392741 - RNA, 19 nt, Artificial Sequence
  Description of Artificial Sequence: Synthetic oligonucleotide
  Antisense strand to SEQ ID NO: 2392740
ucucagguaauugaguuac

SEQ ID NO: 2392742 - RNA, 19 nt, Artificial Sequence
  Description of Artificial Sequence: Synthetic oligonucleotide
  Sense strand starting at position 1420 of SEQ ID NO: 1886188
uggugaagcccuugacaua

SEQ ID NO: 2392743 - RNA, 19 nt, Artificial Sequence
  Description of Artificial Sequence: Synthetic oligonucleotide
  Antisense strand to SEQ ID NO: 2392742
uaugucaagggcuucacca

SEQ ID NO: 2392744 - RNA, 19 nt, Artificial Sequence
  Description of Artificial Sequence: Synthetic oligonucleotide
  Sense strand starting at position 1421 of SEQ ID NO: 1886188
ggugaagcccuugacauau

SEQ ID NO: 2392745 - RNA, 19 nt, Artificial Sequence
  Description of Artificial Sequence: Synthetic oligonucleotide
  Antisense strand to SEQ ID NO: 2392744
auaugucaagggcuucacc

SEQ ID NO: 2392746 - RNA, 19 nt, Artificial Sequence
  Description of Artificial Sequence: Synthetic oligonucleotide
  Sense strand starting at position 1427 of SEQ ID NO: 1886188
gcccuugacauaugguaga

SEQ ID NO: 2392747 - RNA, 19 nt, Artificial Sequence
  Description of Artificial Sequence: Synthetic oligonucleotide
  Antisense strand to SEQ ID NO: 2392746
ucuaccauaugucaagggc

SEQ ID NO: 2392748 - RNA, 19 nt, Artificial Sequence
  Description of Artificial Sequence: Synthetic oligonucleotide
  Sense strand starting at position 1440 of SEQ ID NO: 1886188
gguagauacucauuaagug

SEQ ID NO: 2392749 - RNA, 19 nt, Artificial Sequence
  Description of Artificial Sequence: Synthetic oligonucleotide
  Antisense strand to SEQ ID NO: 2392748
cacuuaaugaguaucuacc

SEQ ID NO: 2392750 - RNA, 19 nt, Artificial Sequence
  Description of Artificial Sequence: Synthetic oligonucleotide
  Sense strand starting at position 1486 of SEQ ID NO: 1886188
aggauucugucacucuuau

SEQ ID NO: 2392751 - RNA, 19 nt, Artificial Sequence
  Description of Artificial Sequence: Synthetic oligonucleotide
  Antisense strand to SEQ ID NO: 2392750
auaagagugacagaauccu

SEQ ID NO: 2392752 - RNA, 19 nt, Artificial Sequence
  Description of Artificial Sequence: Synthetic oligonucleotide
  Sense strand starting at position 1587 of SEQ ID NO: 1886188
uuuccuuaaguguaaggua

SEQ ID NO: 2392753 - RNA, 19 nt, Artificial Sequence
  Description of Artificial Sequence: Synthetic oligonucleotide
  Antisense strand to SEQ ID NO: 2392752
uaccuuacacuuaaggaaa

SEQ ID NO: 2392754 - RNA, 19 nt, Artificial Sequence
  Description of Artificial Sequence: Synthetic oligonucleotide
  Sense strand starting at position 2000 of SEQ ID NO: 1886188
cgguguuucguccuuucca

SEQ ID NO: 2392755 - RNA, 19 nt, Artificial Sequence
  Description of Artificial Sequence: Synthetic oligonucleotide
  Antisense strand to SEQ ID NO: 2392754
uggaaaggacgaaacaccg

SEQ ID NO: 2392756 - RNA, 19 nt, Artificial Sequence
  Description of Artificial Sequence: Synthetic oligonucleotide
  Sense strand starting at position 2002 of SEQ ID NO: 1886188
guguuucguccuuuccaca

SEQ ID NO: 2392757 - RNA, 19 nt, Artificial Sequence
  Description of Artificial Sequence: Synthetic oligonucleotide
  Antisense strand to SEQ ID NO: 2392756
uguggaaaggacgaaacac

SEQ ID NO: 2392758 - RNA, 19 nt, Artificial Sequence
  Description of Artificial Sequence: Synthetic oligonucleotide
  Sense strand starting at position 2007 of SEQ ID NO: 1886188
ucguccuuuccacaagaua

SEQ ID NO: 2392759 - RNA, 19 nt, Artificial Sequence
  Description of Artificial Sequence: Synthetic oligonucleotide
  Antisense strand to SEQ ID NO: 2392758
uaucuuguggaaaggacga

SEQ ID NO: 2392760 - RNA, 19 nt, Artificial Sequence
  Description of Artificial Sequence: Synthetic oligonucleotide
  Sense strand starting at position 2209 of SEQ ID NO: 1886188
cguauaugcaaauaugaag

SEQ ID NO: 2392761 - RNA, 19 nt, Artificial Sequence
  Description of Artificial Sequence: Synthetic oligonucleotide
  Antisense strand to SEQ ID NO: 2392760
cuucauauuugcauauacg

SEQ ID NO: 2392762 - RNA, 19 nt, Artificial Sequence
  Description of Artificial Sequence: Synthetic oligonucleotide
  Sense strand starting at position 2225 of SEQ ID NO: 1886188
aaggaaucaugggaaauag

SEQ ID NO: 2392763 - RNA, 19 nt, Artificial Sequence
  Description of Artificial Sequence: Synthetic oligonucleotide
  Antisense strand to SEQ ID NO: 2392762
cuauuucccaugauuccuu

SEQ ID NO: 2392764 - RNA, 19 nt, Artificial Sequence
  Description of Artificial Sequence: Synthetic oligonucleotide
  Sense strand starting at position 2830 of SEQ ID NO: 1886188
caggcucugggagguuaaa

SEQ ID NO: 2392765 - RNA, 19 nt, Artificial Sequence
  Description of Artificial Sequence: Synthetic oligonucleotide
  Antisense strand to SEQ ID NO: 2392764
uuuaaccucccagagccug

SEQ ID NO: 2392766 - RNA, 19 nt, Artificial Sequence
  Description of Artificial Sequence: Synthetic oligonucleotide
  Sense strand starting at position 2874 of SEQ ID NO: 1886188
ugguuaaaguaguugggau

SEQ ID NO: 2392767 - RNA, 19 nt, Artificial Sequence
  Description of Artificial Sequence: Synthetic oligonucleotide
  Antisense strand to SEQ ID NO: 2392766
aucccaacuacuuuaacca

SEQ ID NO: 2392768 - RNA, 19 nt, Artificial Sequence
  Description of Artificial Sequence: Synthetic oligonucleotide
  Sense strand starting at position 2875 of SEQ ID NO: 1886188
gguuaaaguaguugggauu

SEQ ID NO: 2392769 - RNA, 19 nt, Artificial Sequence
  Description of Artificial Sequence: Synthetic oligonucleotide
  Antisense strand to SEQ ID NO: 2392768
aaucccaacuacuuuaacc

SEQ ID NO: 2392770 - RNA, 19 nt, Artificial Sequence
  Description of Artificial Sequence: Synthetic oligonucleotide
  Sense strand starting at position 3001 of SEQ ID NO: 1886188
uuguuagaguuacuccaga

SEQ ID NO: 2392771 - RNA, 19 nt, Artificial Sequence
  Description of Artificial Sequence: Synthetic oligonucleotide
  Antisense strand to SEQ ID NO: 2392770
ucuggaguaacucuaacaa

SEQ ID NO: 2392772 - RNA, 19 nt, Artificial Sequence
  Description of Artificial Sequence: Synthetic oligonucleotide
  Sense strand starting at position 3191 of SEQ ID NO: 1886188
ccgagacgugugcugugaa

SEQ ID NO: 2392773 - RNA, 19 nt, Artificial Sequence
  Description of Artificial Sequence: Synthetic oligonucleotide
  Antisense strand to SEQ ID NO: 2392772
uucacagcacacgucucgg

SEQ ID NO: 2392774 - RNA, 19 nt, Artificial Sequence
  Description of Artificial Sequence: Synthetic oligonucleotide
  Sense strand starting at position 3196 of SEQ ID NO: 1886188
acgugugcugugaaagugu

SEQ ID NO: 2392775 - RNA, 19 nt, Artificial Sequence
  Description of Artificial Sequence: Synthetic oligonucleotide
  Antisense strand to SEQ ID NO: 2392774
acacuuucacagcacacgu

SEQ ID NO: 2392776 - RNA, 19 nt, Artificial Sequence
  Description of Artificial Sequence: Synthetic oligonucleotide
  Sense strand starting at position 3276 of SEQ ID NO: 1886188
ggagcugucauugaugaua

SEQ ID NO: 2392777 - RNA, 19 nt, Artificial Sequence
  Description of Artificial Sequence: Synthetic oligonucleotide
  Antisense strand to SEQ ID NO: 2392776
uaucaucaaugacagcucc

SEQ ID NO: 2392778 - RNA, 19 nt, Artificial Sequence
  Description of Artificial Sequence: Synthetic oligonucleotide
  Sense strand starting at position 3511 of SEQ ID NO: 1886188
cucgguacgccucuuaagu

SEQ ID NO: 2392779 - RNA, 19 nt, Artificial Sequence
  Description of Artificial Sequence: Synthetic oligonucleotide
  Antisense strand to SEQ ID NO: 2392778
acuuaagaggcguaccgag

SEQ ID NO: 2392780 - RNA, 19 nt, Artificial Sequence
  Description of Artificial Sequence: Synthetic oligonucleotide
  Sense strand starting at position 3522 of SEQ ID NO: 1886188
ucuuaagugaaauggaagu

SEQ ID NO: 2392781 - RNA, 19 nt, Artificial Sequence
  Description of Artificial Sequence: Synthetic oligonucleotide
  Antisense strand to SEQ ID NO: 2392780
acuuccauuucacuuaaga

SEQ ID NO: 2392782 - RNA, 19 nt, Artificial Sequence
  Description of Artificial Sequence: Synthetic oligonucleotide
  Sense strand starting at position 3610 of SEQ ID NO: 1886188
auggccuuuacugagugaa

SEQ ID NO: 2392783 - RNA, 19 nt, Artificial Sequence
  Description of Artificial Sequence: Synthetic oligonucleotide
  Antisense strand to SEQ ID NO: 2392782
uucacucaguaaaggccau

SEQ ID NO: 2392784 - RNA, 19 nt, Artificial Sequence
  Description of Artificial Sequence: Synthetic oligonucleotide
  Sense strand starting at position 3783 of SEQ ID NO: 1886188
ucauaaaugccuuauugug

SEQ ID NO: 2392785 - RNA, 19 nt, Artificial Sequence
  Description of Artificial Sequence: Synthetic oligonucleotide
  Antisense strand to SEQ ID NO: 2392784
cacaauaaggcauuuauga

SEQ ID NO: 2392786 - RNA, 19 nt, Artificial Sequence
  Description of Artificial Sequence: Synthetic oligonucleotide
  Sense strand starting at position 3790 of SEQ ID NO: 1886188
ugccuuauuguggaaacua

SEQ ID NO: 2392787 - RNA, 19 nt, Artificial Sequence
  Description of Artificial Sequence: Synthetic oligonucleotide
  Antisense strand to SEQ ID NO: 2392786
uaguuuccacaauaaggca

SEQ ID NO: 2392788 - RNA, 19 nt, Artificial Sequence
  Description of Artificial Sequence: Synthetic oligonucleotide
  Sense strand starting at position 3861 of SEQ ID NO: 1886188
guuacuuugagccagaggu

SEQ ID NO: 2392789 - RNA, 19 nt, Artificial Sequence
  Description of Artificial Sequence: Synthetic oligonucleotide
  Antisense strand to SEQ ID NO: 2392788
accucuggcucaaaguaac

SEQ ID NO: 2392790 - RNA, 19 nt, Artificial Sequence
  Description of Artificial Sequence: Synthetic oligonucleotide
  Sense strand starting at position 3865 of SEQ ID NO: 1886188
cuuugagccagagguagau

SEQ ID NO: 2392791 - RNA, 19 nt, Artificial Sequence
  Description of Artificial Sequence: Synthetic oligonucleotide
  Antisense strand to SEQ ID NO: 2392790
aucuaccucuggcucaaag

SEQ ID NO: 2392792 - RNA, 19 nt, Artificial Sequence
  Description of Artificial Sequence: Synthetic oligonucleotide
  Sense strand starting at position 101 of SEQ ID NO: 1886189
cagaaagugccucaucugu

SEQ ID NO: 2392793 - RNA, 19 nt, Artificial Sequence
  Description of Artificial Sequence: Synthetic oligonucleotide
  Antisense strand to SEQ ID NO: 2392792
acagaugaggcacuuucug

SEQ ID NO: 2392794 - RNA, 19 nt, Artificial Sequence
  Description of Artificial Sequence: Synthetic oligonucleotide
  Sense strand starting at position 150 of SEQ ID NO: 1886189
gguugaguccuggagaucu

SEQ ID NO: 2392795 - RNA, 19 nt, Artificial Sequence
  Description of Artificial Sequence: Synthetic oligonucleotide
  Antisense strand to SEQ ID NO: 2392794
agaucuccaggacucaacc

SEQ ID NO: 2392796 - RNA, 19 nt, Artificial Sequence
  Description of Artificial Sequence: Synthetic oligonucleotide
  Sense strand starting at position 158 of SEQ ID NO: 1886189
ccuggagaucucuguauuc

SEQ ID NO: 2392797 - RNA, 19 nt, Artificial Sequence
  Description of Artificial Sequence: Synthetic oligonucleotide
  Antisense strand to SEQ ID NO: 2392796
gaauacagagaucuccagg

SEQ ID NO: 2392798 - RNA, 19 nt, Artificial Sequence
  Description of Artificial Sequence: Synthetic oligonucleotide
  Sense strand starting at position 167 of SEQ ID NO: 1886189
cucuguauucccgugucau

SEQ ID NO: 2392799 - RNA, 19 nt, Artificial Sequence
  Description of Artificial Sequence: Synthetic oligonucleotide
  Antisense strand to SEQ ID NO: 2392798
augacacgggaauacagag

SEQ ID NO: 2392800 - RNA, 19 nt, Artificial Sequence
  Description of Artificial Sequence: Synthetic oligonucleotide
  Sense strand starting at position 290 of SEQ ID NO: 1886189
ugcagucuuagauagguac

SEQ ID NO: 2392801 - RNA, 19 nt, Artificial Sequence
  Description of Artificial Sequence: Synthetic oligonucleotide
  Antisense strand to SEQ ID NO: 2392800
guaccuaucuaagacugca

SEQ ID NO: 2392802 - RNA, 19 nt, Artificial Sequence
  Description of Artificial Sequence: Synthetic oligonucleotide
  Sense strand starting at position 293 of SEQ ID NO: 1886189
agucuuagauagguacaga

SEQ ID NO: 2392803 - RNA, 19 nt, Artificial Sequence
  Description of Artificial Sequence: Synthetic oligonucleotide
  Antisense strand to SEQ ID NO: 2392802
ucuguaccuaucuaagacu

SEQ ID NO: 2392804 - RNA, 19 nt, Artificial Sequence
  Description of Artificial Sequence: Synthetic oligonucleotide
  Sense strand starting at position 325 of SEQ ID NO: 1886189
agccuacagagaugugaau

SEQ ID NO: 2392805 - RNA, 19 nt, Artificial Sequence
  Description of Artificial Sequence: Synthetic oligonucleotide
  Antisense strand to SEQ ID NO: 2392804
auucacaucucuguaggcu

SEQ ID NO: 2392806 - RNA, 19 nt, Artificial Sequence
  Description of Artificial Sequence: Synthetic oligonucleotide
  Sense strand starting at position 378 of SEQ ID NO: 1886189
guaggaguuugaguccuua

SEQ ID NO: 2392807 - RNA, 19 nt, Artificial Sequence
  Description of Artificial Sequence: Synthetic oligonucleotide
  Antisense strand to SEQ ID NO: 2392806
uaaggacucaaacuccuac

SEQ ID NO: 2392808 - RNA, 19 nt, Artificial Sequence
  Description of Artificial Sequence: Synthetic oligonucleotide
  Sense strand starting at position 698 of SEQ ID NO: 1886189
gucaaagaauugguuuaaa

SEQ ID NO: 2392809 - RNA, 19 nt, Artificial Sequence
  Description of Artificial Sequence: Synthetic oligonucleotide
  Antisense strand to SEQ ID NO: 2392808
uuuaaaccaauucuuugac

SEQ ID NO: 2392810 - RNA, 19 nt, Artificial Sequence
  Description of Artificial Sequence: Synthetic oligonucleotide
  Sense strand starting at position 780 of SEQ ID NO: 1886189
guuagaaaucaggagacgu

SEQ ID NO: 2392811 - RNA, 19 nt, Artificial Sequence
  Description of Artificial Sequence: Synthetic oligonucleotide
  Antisense strand to SEQ ID NO: 2392810
acgucuccugauuucuaac

SEQ ID NO: 2392812 - RNA, 19 nt, Artificial Sequence
  Description of Artificial Sequence: Synthetic oligonucleotide
  Sense strand starting at position 807 of SEQ ID NO: 1886189
gcucuaauucugccgcuau

SEQ ID NO: 2392813 - RNA, 19 nt, Artificial Sequence
  Description of Artificial Sequence: Synthetic oligonucleotide
  Antisense strand to SEQ ID NO: 2392812
auagcggcagaauuagagc

SEQ ID NO: 2392814 - RNA, 19 nt, Artificial Sequence
  Description of Artificial Sequence: Synthetic oligonucleotide
  Sense strand starting at position 820 of SEQ ID NO: 1886189
cgcuaucuuggacaaguua

SEQ ID NO: 2392815 - RNA, 19 nt, Artificial Sequence
  Description of Artificial Sequence: Synthetic oligonucleotide
  Antisense strand to SEQ ID NO: 2392814
uaacuuguccaagauagcg

SEQ ID NO: 2392816 - RNA, 19 nt, Artificial Sequence
  Description of Artificial Sequence: Synthetic oligonucleotide
  Sense strand starting at position 835 of SEQ ID NO: 1886189
guuauugacuucucuggac

SEQ ID NO: 2392817 - RNA, 19 nt, Artificial Sequence
  Description of Artificial Sequence: Synthetic oligonucleotide
  Antisense strand to SEQ ID NO: 2392816
guccagagaagucaauaac

SEQ ID NO: 2392818 - RNA, 19 nt, Artificial Sequence
  Description of Artificial Sequence: Synthetic oligonucleotide
  Sense strand starting at position 943 of SEQ ID NO: 1886189
ggcucauggacccgagauu

SEQ ID NO: 2392819 - RNA, 19 nt, Artificial Sequence
  Description of Artificial Sequence: Synthetic oligonucleotide
  Antisense strand to SEQ ID NO: 2392818
aaucucggguccaugagcc

SEQ ID NO: 2392820 - RNA, 19 nt, Artificial Sequence
  Description of Artificial Sequence: Synthetic oligonucleotide
  Sense strand starting at position 984 of SEQ ID NO: 1886189
uggucacuuuaagugauau

SEQ ID NO: 2392821 - RNA, 19 nt, Artificial Sequence
  Description of Artificial Sequence: Synthetic oligonucleotide
  Antisense strand to SEQ ID NO: 2392820
auaucacuuaaagugacca

SEQ ID NO: 2392822 - RNA, 19 nt, Artificial Sequence
  Description of Artificial Sequence: Synthetic oligonucleotide
  Sense strand starting at position 1055 of SEQ ID NO: 1886189
ggcaguacuugauuaugaa

SEQ ID NO: 2392823 - RNA, 19 nt, Artificial Sequence
  Description of Artificial Sequence: Synthetic oligonucleotide
  Antisense strand to SEQ ID NO: 2392822
uucauaaucaaguacugcc

SEQ ID NO: 2392824 - RNA, 19 nt, Artificial Sequence
  Description of Artificial Sequence: Synthetic oligonucleotide
  Sense strand starting at position 1056 of SEQ ID NO: 1886189
gcaguacuugauuaugaag

SEQ ID NO: 2392825 - RNA, 19 nt, Artificial Sequence
  Description of Artificial Sequence: Synthetic oligonucleotide
  Antisense strand to SEQ ID NO: 2392824
cuucauaaucaaguacugc

SEQ ID NO: 2392826 - RNA, 19 nt, Artificial Sequence
  Description of Artificial Sequence: Synthetic oligonucleotide
  Sense strand starting at position 1986 of SEQ ID NO: 1886189
ugccgaagugagcacauau

SEQ ID NO: 2392827 - RNA, 19 nt, Artificial Sequence
  Description of Artificial Sequence: Synthetic oligonucleotide
  Antisense strand to SEQ ID NO: 2392826
auaugugcucacuucggca

SEQ ID NO: 2392828 - RNA, 19 nt, Artificial Sequence
  Description of Artificial Sequence: Synthetic oligonucleotide
  Sense strand starting at position 2103 of SEQ ID NO: 1886189
acuagauuagcagaccagu

SEQ ID NO: 2392829 - RNA, 19 nt, Artificial Sequence
  Description of Artificial Sequence: Synthetic oligonucleotide
  Antisense strand to SEQ ID NO: 2392828
acuggucugcuaaucuagu

SEQ ID NO: 2392830 - RNA, 19 nt, Artificial Sequence
  Description of Artificial Sequence: Synthetic oligonucleotide
  Sense strand starting at position 2111 of SEQ ID NO: 1886189
agcagaccaguuugagaaa

SEQ ID NO: 2392831 - RNA, 19 nt, Artificial Sequence
  Description of Artificial Sequence: Synthetic oligonucleotide
  Antisense strand to SEQ ID NO: 2392830
uuucucaaacuggucugcu

SEQ ID NO: 2392832 - RNA, 19 nt, Artificial Sequence
  Description of Artificial Sequence: Synthetic oligonucleotide
  Sense strand starting at position 2301 of SEQ ID NO: 1886189
guuccaguuccugggauua

SEQ ID NO: 2392833 - RNA, 19 nt, Artificial Sequence
  Description of Artificial Sequence: Synthetic oligonucleotide
  Antisense strand to SEQ ID NO: 2392832
uaaucccaggaacuggaac

SEQ ID NO: 2392834 - RNA, 19 nt, Artificial Sequence
  Description of Artificial Sequence: Synthetic oligonucleotide
  Sense strand starting at position 2532 of SEQ ID NO: 1886189
aauuuaucgucacagagaa

SEQ ID NO: 2392835 - RNA, 19 nt, Artificial Sequence
  Description of Artificial Sequence: Synthetic oligonucleotide
  Antisense strand to SEQ ID NO: 2392834
uucucugugacgauaaauu

SEQ ID NO: 2392836 - RNA, 19 nt, Artificial Sequence
  Description of Artificial Sequence: Synthetic oligonucleotide
  Sense strand starting at position 2566 of SEQ ID NO: 1886189
gcgaauauuaggcagguua

SEQ ID NO: 2392837 - RNA, 19 nt, Artificial Sequence
  Description of Artificial Sequence: Synthetic oligonucleotide
  Antisense strand to SEQ ID NO: 2392836
uaaccugccuaauauucgc

SEQ ID NO: 2392838 - RNA, 19 nt, Artificial Sequence
  Description of Artificial Sequence: Synthetic oligonucleotide
  Sense strand starting at position 2568 of SEQ ID NO: 1886189
gaauauuaggcagguuauu

SEQ ID NO: 2392839 - RNA, 19 nt, Artificial Sequence
  Description of Artificial Sequence: Synthetic oligonucleotide
  Antisense strand to SEQ ID NO: 2392838
aauaaccugccuaauauuc

SEQ ID NO: 2392840 - RNA, 19 nt, Artificial Sequence
  Description of Artificial Sequence: Synthetic oligonucleotide
  Sense strand starting at position 2579 of SEQ ID NO: 1886189
agguuauuagucuacauau

SEQ ID NO: 2392841 - RNA, 19 nt, Artificial Sequence
  Description of Artificial Sequence: Synthetic oligonucleotide
  Antisense strand to SEQ ID NO: 2392840
auauguagacuaauaaccu

SEQ ID NO: 2392842 - RNA, 19 nt, Artificial Sequence
  Description of Artificial Sequence: Synthetic oligonucleotide
  Sense strand starting at position 2581 of SEQ ID NO: 1886189
guuauuagucuacauauga

SEQ ID NO: 2392843 - RNA, 19 nt, Artificial Sequence
  Description of Artificial Sequence: Synthetic oligonucleotide
  Antisense strand to SEQ ID NO: 2392842
ucauauguagacuaauaac

SEQ ID NO: 2392844 - RNA, 19 nt, Artificial Sequence
  Description of Artificial Sequence: Synthetic oligonucleotide
  Sense strand starting at position 2588 of SEQ ID NO: 1886189
gucuacauaugaucagaua

SEQ ID NO: 2392845 - RNA, 19 nt, Artificial Sequence
  Description of Artificial Sequence: Synthetic oligonucleotide
  Antisense strand to SEQ ID NO: 2392844
uaucugaucauauguagac

SEQ ID NO: 2392846 - RNA, 19 nt, Artificial Sequence
  Description of Artificial Sequence: Synthetic oligonucleotide
  Sense strand starting at position 2956 of SEQ ID NO: 1886189
cccugcagucaagaugaua

SEQ ID NO: 2392847 - RNA, 19 nt, Artificial Sequence
  Description of Artificial Sequence: Synthetic oligonucleotide
  Antisense strand to SEQ ID NO: 2392846
uaucaucuugacugcaggg

SEQ ID NO: 2392848 - RNA, 19 nt, Artificial Sequence
  Description of Artificial Sequence: Synthetic oligonucleotide
  Sense strand starting at position 3006 of SEQ ID NO: 1886189
gagccaaaguaauugugaa

SEQ ID NO: 2392849 - RNA, 19 nt, Artificial Sequence
  Description of Artificial Sequence: Synthetic oligonucleotide
  Antisense strand to SEQ ID NO: 2392848
uucacaauuacuuuggcuc

SEQ ID NO: 2392850 - RNA, 19 nt, Artificial Sequence
  Description of Artificial Sequence: Synthetic oligonucleotide
  Sense strand starting at position 3030 of SEQ ID NO: 1886189
aauuuauauccguguggcu

SEQ ID NO: 2392851 - RNA, 19 nt, Artificial Sequence
  Description of Artificial Sequence: Synthetic oligonucleotide
  Antisense strand to SEQ ID NO: 2392850
agccacacggauauaaauu

SEQ ID NO: 2392852 - RNA, 19 nt, Artificial Sequence
  Description of Artificial Sequence: Synthetic oligonucleotide
  Sense strand starting at position 3097 of SEQ ID NO: 1886189
ggguaucaucagggucaca

SEQ ID NO: 2392853 - RNA, 19 nt, Artificial Sequence
  Description of Artificial Sequence: Synthetic oligonucleotide
  Antisense strand to SEQ ID NO: 2392852
ugugacccugaugauaccc

SEQ ID NO: 2392854 - RNA, 19 nt, Artificial Sequence
  Description of Artificial Sequence: Synthetic oligonucleotide
  Sense strand starting at position 3161 of SEQ ID NO: 1886189
uggagauaaacuuguguca

SEQ ID NO: 2392855 - RNA, 19 nt, Artificial Sequence
  Description of Artificial Sequence: Synthetic oligonucleotide
  Antisense strand to SEQ ID NO: 2392854
ugacacaaguuuaucucca

SEQ ID NO: 2392856 - RNA, 19 nt, Artificial Sequence
  Description of Artificial Sequence: Synthetic oligonucleotide
  Sense strand starting at position 3164 of SEQ ID NO: 1886189
agauaaacuugugucaaag

SEQ ID NO: 2392857 - RNA, 19 nt, Artificial Sequence
  Description of Artificial Sequence: Synthetic oligonucleotide
  Antisense strand to SEQ ID NO: 2392856
cuuugacacaaguuuaucu

SEQ ID NO: 2392858 - RNA, 19 nt, Artificial Sequence
  Description of Artificial Sequence: Synthetic oligonucleotide
  Sense strand starting at position 3664 of SEQ ID NO: 1886189
ucaaguuugcaguaaccca

SEQ ID NO: 2392859 - RNA, 19 nt, Artificial Sequence
  Description of Artificial Sequence: Synthetic oligonucleotide
  Antisense strand to SEQ ID NO: 2392858
uggguuacugcaaacuuga

SEQ ID NO: 2392860 - RNA, 19 nt, Artificial Sequence
  Description of Artificial Sequence: Synthetic oligonucleotide
  Sense strand starting at position 3761 of SEQ ID NO: 1886189
ugugaaaccagagguaugu

SEQ ID NO: 2392861 - RNA, 19 nt, Artificial Sequence
  Description of Artificial Sequence: Synthetic oligonucleotide
  Antisense strand to SEQ ID NO: 2392860
acauaccucugguuucaca

SEQ ID NO: 2392862 - RNA, 19 nt, Artificial Sequence
  Description of Artificial Sequence: Synthetic oligonucleotide
  Sense strand starting at position 3765 of SEQ ID NO: 1886189
aaaccagagguauguucuu

SEQ ID NO: 2392863 - RNA, 19 nt, Artificial Sequence
  Description of Artificial Sequence: Synthetic oligonucleotide
  Antisense strand to SEQ ID NO: 2392862
aagaacauaccucugguuu

SEQ ID NO: 2392864 - RNA, 19 nt, Artificial Sequence
  Description of Artificial Sequence: Synthetic oligonucleotide
  Sense strand starting at position 3819 of SEQ ID NO: 1886189
auaccaguaguuuagugaa

SEQ ID NO: 2392865 - RNA, 19 nt, Artificial Sequence
  Description of Artificial Sequence: Synthetic oligonucleotide
  Antisense strand to SEQ ID NO: 2392864
uucacuaaacuacugguau

SEQ ID NO: 2392866 - RNA, 19 nt, Artificial Sequence
  Description of Artificial Sequence: Synthetic oligonucleotide
  Sense strand starting at position 3821 of SEQ ID NO: 1886189
accaguaguuuagugaaau

SEQ ID NO: 2392867 - RNA, 19 nt, Artificial Sequence
  Description of Artificial Sequence: Synthetic oligonucleotide
  Antisense strand to SEQ ID NO: 2392866
auuucacuaaacuacuggu

SEQ ID NO: 2392868 - RNA, 19 nt, Artificial Sequence
  Description of Artificial Sequence: Synthetic oligonucleotide
  Sense strand starting at position 3845 of SEQ ID NO: 1886189
gcaggguuuguggagagaa

SEQ ID NO: 2392869 - RNA, 19 nt, Artificial Sequence
  Description of Artificial Sequence: Synthetic oligonucleotide
  Antisense strand to SEQ ID NO: 2392868
uucucuccacaaacccugc

SEQ ID NO: 2392870 - RNA, 19 nt, Artificial Sequence
  Description of Artificial Sequence: Synthetic oligonucleotide
  Sense strand starting at position 3977 of SEQ ID NO: 1886189
auuuauuagcagugugauc

SEQ ID NO: 2392871 - RNA, 19 nt, Artificial Sequence
  Description of Artificial Sequence: Synthetic oligonucleotide
  Antisense strand to SEQ ID NO: 2392870
gaucacacugcuaauaaau

SEQ ID NO: 2392872 - RNA, 19 nt, Artificial Sequence
  Description of Artificial Sequence: Synthetic oligonucleotide
  Sense strand starting at position 107 of SEQ ID NO: 1886190
acuauugaguuucuggaga

SEQ ID NO: 2392873 - RNA, 19 nt, Artificial Sequence
  Description of Artificial Sequence: Synthetic oligonucleotide
  Antisense strand to SEQ ID NO: 2392872
ucuccagaaacucaauagu

SEQ ID NO: 2392874 - RNA, 19 nt, Artificial Sequence
  Description of Artificial Sequence: Synthetic oligonucleotide
  Sense strand starting at position 185 of SEQ ID NO: 1886190
uugacucuauguguccaaa

SEQ ID NO: 2392875 - RNA, 19 nt, Artificial Sequence
  Description of Artificial Sequence: Synthetic oligonucleotide
  Antisense strand to SEQ ID NO: 2392874
uuuggacacauagagucaa

SEQ ID NO: 2392876 - RNA, 19 nt, Artificial Sequence
  Description of Artificial Sequence: Synthetic oligonucleotide
  Sense strand starting at position 187 of SEQ ID NO: 1886190
gacucuauguguccaaaga

SEQ ID NO: 2392877 - RNA, 19 nt, Artificial Sequence
  Description of Artificial Sequence: Synthetic oligonucleotide
  Antisense strand to SEQ ID NO: 2392876
ucuuuggacacauagaguc

SEQ ID NO: 2392878 - RNA, 19 nt, Artificial Sequence
  Description of Artificial Sequence: Synthetic oligonucleotide
  Sense strand starting at position 188 of SEQ ID NO: 1886190
acucuauguguccaaagag

SEQ ID NO: 2392879 - RNA, 19 nt, Artificial Sequence
  Description of Artificial Sequence: Synthetic oligonucleotide
  Antisense strand to SEQ ID NO: 2392878
cucuuuggacacauagagu

SEQ ID NO: 2392880 - RNA, 19 nt, Artificial Sequence
  Description of Artificial Sequence: Synthetic oligonucleotide
  Sense strand starting at position 208 of SEQ ID NO: 1886190
cgaagacuugcccaaguuc

SEQ ID NO: 2392881 - RNA, 19 nt, Artificial Sequence
  Description of Artificial Sequence: Synthetic oligonucleotide
  Antisense strand to SEQ ID NO: 2392880
gaacuugggcaagucuucg

SEQ ID NO: 2392882 - RNA, 19 nt, Artificial Sequence
  Description of Artificial Sequence: Synthetic oligonucleotide
  Sense strand starting at position 233 of SEQ ID NO: 1886190
cagguuagugcagaggaaa

SEQ ID NO: 2392883 - RNA, 19 nt, Artificial Sequence
  Description of Artificial Sequence: Synthetic oligonucleotide
  Antisense strand to SEQ ID NO: 2392882
uuuccucugcacuaaccug

SEQ ID NO: 2392884 - RNA, 19 nt, Artificial Sequence
  Description of Artificial Sequence: Synthetic oligonucleotide
  Sense strand starting at position 451 of SEQ ID NO: 1886190
ccgaccaguuucuuuagaa

SEQ ID NO: 2392885 - RNA, 19 nt, Artificial Sequence
  Description of Artificial Sequence: Synthetic oligonucleotide
  Antisense strand to SEQ ID NO: 2392884
uucuaaagaaacuggucgg

SEQ ID NO: 2392886 - RNA, 19 nt, Artificial Sequence
  Description of Artificial Sequence: Synthetic oligonucleotide
  Sense strand starting at position 452 of SEQ ID NO: 1886190
cgaccaguuucuuuagaac

SEQ ID NO: 2392887 - RNA, 19 nt, Artificial Sequence
  Description of Artificial Sequence: Synthetic oligonucleotide
  Antisense strand to SEQ ID NO: 2392886
guucuaaagaaacuggucg

SEQ ID NO: 2392888 - RNA, 19 nt, Artificial Sequence
  Description of Artificial Sequence: Synthetic oligonucleotide
  Sense strand starting at position 541 of SEQ ID NO: 1886190
uccacauacguagacuaau

SEQ ID NO: 2392889 - RNA, 19 nt, Artificial Sequence
  Description of Artificial Sequence: Synthetic oligonucleotide
  Antisense strand to SEQ ID NO: 2392888
auuagucuacguaugugga

SEQ ID NO: 2392890 - RNA, 19 nt, Artificial Sequence
  Description of Artificial Sequence: Synthetic oligonucleotide
  Sense strand starting at position 673 of SEQ ID NO: 1886190
ccaaguggccuccaaagaa

SEQ ID NO: 2392891 - RNA, 19 nt, Artificial Sequence
  Description of Artificial Sequence: Synthetic oligonucleotide
  Antisense strand to SEQ ID NO: 2392890
uucuuuggaggccacuugg

SEQ ID NO: 2392892 - RNA, 19 nt, Artificial Sequence
  Description of Artificial Sequence: Synthetic oligonucleotide
  Sense strand starting at position 729 of SEQ ID NO: 1886190
caaagauuguccucuaacg

SEQ ID NO: 2392893 - RNA, 19 nt, Artificial Sequence
  Description of Artificial Sequence: Synthetic oligonucleotide
  Antisense strand to SEQ ID NO: 2392892
cguuagaggacaaucuuug

SEQ ID NO: 2392894 - RNA, 19 nt, Artificial Sequence
  Description of Artificial Sequence: Synthetic oligonucleotide
  Sense strand starting at position 809 of SEQ ID NO: 1886190
ggcuguuaccuggaaagga

SEQ ID NO: 2392895 - RNA, 19 nt, Artificial Sequence
  Description of Artificial Sequence: Synthetic oligonucleotide
  Antisense strand to SEQ ID NO: 2392894
uccuuuccagguaacagcc

SEQ ID NO: 2392896 - RNA, 19 nt, Artificial Sequence
  Description of Artificial Sequence: Synthetic oligonucleotide
  Sense strand starting at position 1111 of SEQ ID NO: 1886190
aagucaucgcaggaaaucu

SEQ ID NO: 2392897 - RNA, 19 nt, Artificial Sequence
  Description of Artificial Sequence: Synthetic oligonucleotide
  Antisense strand to SEQ ID NO: 2392896
agauuuccugcgaugacuu

SEQ ID NO: 2392898 - RNA, 19 nt, Artificial Sequence
  Description of Artificial Sequence: Synthetic oligonucleotide
  Sense strand starting at position 1121 of SEQ ID NO: 1886190
aggaaaucugaacgugguu

SEQ ID NO: 2392899 - RNA, 19 nt, Artificial Sequence
  Description of Artificial Sequence: Synthetic oligonucleotide
  Antisense strand to SEQ ID NO: 2392898
aaccacguucagauuuccu

SEQ ID NO: 2392900 - RNA, 19 nt, Artificial Sequence
  Description of Artificial Sequence: Synthetic oligonucleotide
  Sense strand starting at position 1184 of SEQ ID NO: 1886190
guaacucaauuaccugaga

SEQ ID NO: 2392901 - RNA, 19 nt, Artificial Sequence
  Description of Artificial Sequence: Synthetic oligonucleotide
  Antisense strand to SEQ ID NO: 2392900
ucucagguaauugaguuac

SEQ ID NO: 2392902 - RNA, 19 nt, Artificial Sequence
  Description of Artificial Sequence: Synthetic oligonucleotide
  Sense strand starting at position 1420 of SEQ ID NO: 1886190
uggugaagcccuugacaua

SEQ ID NO: 2392903 - RNA, 19 nt, Artificial Sequence
  Description of Artificial Sequence: Synthetic oligonucleotide
  Antisense strand to SEQ ID NO: 2392902
uaugucaagggcuucacca

SEQ ID NO: 2392904 - RNA, 19 nt, Artificial Sequence
  Description of Artificial Sequence: Synthetic oligonucleotide
  Sense strand starting at position 1421 of SEQ ID NO: 1886190
ggugaagcccuugacauau

SEQ ID NO: 2392905 - RNA, 19 nt, Artificial Sequence
  Description of Artificial Sequence: Synthetic oligonucleotide
  Antisense strand to SEQ ID NO: 2392904
auaugucaagggcuucacc

SEQ ID NO: 2392906 - RNA, 19 nt, Artificial Sequence
  Description of Artificial Sequence: Synthetic oligonucleotide
  Sense strand starting at position 1427 of SEQ ID NO: 1886190
gcccuugacauaugguaga

SEQ ID NO: 2392907 - RNA, 19 nt, Artificial Sequence
  Description of Artificial Sequence: Synthetic oligonucleotide
  Antisense strand to SEQ ID NO: 2392906
ucuaccauaugucaagggc

SEQ ID NO: 2392908 - RNA, 19 nt, Artificial Sequence
  Description of Artificial Sequence: Synthetic oligonucleotide
  Sense strand starting at position 1440 of SEQ ID NO: 1886190
gguagauacucauuaagug

SEQ ID NO: 2392909 - RNA, 19 nt, Artificial Sequence
  Description of Artificial Sequence: Synthetic oligonucleotide
  Antisense strand to SEQ ID NO: 2392908
cacuuaaugaguaucuacc

SEQ ID NO: 2392910 - RNA, 19 nt, Artificial Sequence
  Description of Artificial Sequence: Synthetic oligonucleotide
  Sense strand starting at position 1486 of SEQ ID NO: 1886190
aggauucugucacucuuau

SEQ ID NO: 2392911 - RNA, 19 nt, Artificial Sequence
  Description of Artificial Sequence: Synthetic oligonucleotide
  Antisense strand to SEQ ID NO: 2392910
auaagagugacagaauccu

SEQ ID NO: 2392912 - RNA, 19 nt, Artificial Sequence
  Description of Artificial Sequence: Synthetic oligonucleotide
  Sense strand starting at position 1587 of SEQ ID NO: 1886190
uuuccuuaaguguaaggua

SEQ ID NO: 2392913 - RNA, 19 nt, Artificial Sequence
  Description of Artificial Sequence: Synthetic oligonucleotide
  Antisense strand to SEQ ID NO: 2392912
uaccuuacacuuaaggaaa

SEQ ID NO: 2392914 - RNA, 19 nt, Artificial Sequence
  Description of Artificial Sequence: Synthetic oligonucleotide
  Sense strand starting at position 2000 of SEQ ID NO: 1886190
cgguguuucguccuuucca

SEQ ID NO: 2392915 - RNA, 19 nt, Artificial Sequence
  Description of Artificial Sequence: Synthetic oligonucleotide
  Antisense strand to SEQ ID NO: 2392914
uggaaaggacgaaacaccg

SEQ ID NO: 2392916 - RNA, 19 nt, Artificial Sequence
  Description of Artificial Sequence: Synthetic oligonucleotide
  Sense strand starting at position 2002 of SEQ ID NO: 1886190
guguuucguccuuuccaca

SEQ ID NO: 2392917 - RNA, 19 nt, Artificial Sequence
  Description of Artificial Sequence: Synthetic oligonucleotide
  Antisense strand to SEQ ID NO: 2392916
uguggaaaggacgaaacac

SEQ ID NO: 2392918 - RNA, 19 nt, Artificial Sequence
  Description of Artificial Sequence: Synthetic oligonucleotide
  Sense strand starting at position 2007 of SEQ ID NO: 1886190
ucguccuuuccacaagaua

SEQ ID NO: 2392919 - RNA, 19 nt, Artificial Sequence
  Description of Artificial Sequence: Synthetic oligonucleotide
  Antisense strand to SEQ ID NO: 2392918
uaucuuguggaaaggacga

SEQ ID NO: 2392920 - RNA, 19 nt, Artificial Sequence
  Description of Artificial Sequence: Synthetic oligonucleotide
  Sense strand starting at position 2209 of SEQ ID NO: 1886190
cguauaugcaaauaugaag

SEQ ID NO: 2392921 - RNA, 19 nt, Artificial Sequence
  Description of Artificial Sequence: Synthetic oligonucleotide
  Antisense strand to SEQ ID NO: 2392920
cuucauauuugcauauacg

SEQ ID NO: 2392922 - RNA, 19 nt, Artificial Sequence
  Description of Artificial Sequence: Synthetic oligonucleotide
  Sense strand starting at position 2225 of SEQ ID NO: 1886190
aaggaaucaugggaaauag

SEQ ID NO: 2392923 - RNA, 19 nt, Artificial Sequence
  Description of Artificial Sequence: Synthetic oligonucleotide
  Antisense strand to SEQ ID NO: 2392922
cuauuucccaugauuccuu

SEQ ID NO: 2392924 - RNA, 19 nt, Artificial Sequence
  Description of Artificial Sequence: Synthetic oligonucleotide
  Sense strand starting at position 2830 of SEQ ID NO: 1886190
caggcucugggagguuaaa

SEQ ID NO: 2392925 - RNA, 19 nt, Artificial Sequence
  Description of Artificial Sequence: Synthetic oligonucleotide
  Antisense strand to SEQ ID NO: 2392924
uuuaaccucccagagccug

SEQ ID NO: 2392926 - RNA, 19 nt, Artificial Sequence
  Description of Artificial Sequence: Synthetic oligonucleotide
  Sense strand starting at position 2874 of SEQ ID NO: 1886190
ugguuaaaguaguugggau

SEQ ID NO: 2392927 - RNA, 19 nt, Artificial Sequence
  Description of Artificial Sequence: Synthetic oligonucleotide
  Antisense strand to SEQ ID NO: 2392926
aucccaacuacuuuaacca

SEQ ID NO: 2392928 - RNA, 19 nt, Artificial Sequence
  Description of Artificial Sequence: Synthetic oligonucleotide
  Sense strand starting at position 2875 of SEQ ID NO: 1886190
gguuaaaguaguugggauu

SEQ ID NO: 2392929 - RNA, 19 nt, Artificial Sequence
  Description of Artificial Sequence: Synthetic oligonucleotide
  Antisense strand to SEQ ID NO: 2392928
aaucccaacuacuuuaacc

SEQ ID NO: 2392930 - RNA, 19 nt, Artificial Sequence
  Description of Artificial Sequence: Synthetic oligonucleotide
  Sense strand starting at position 3001 of SEQ ID NO: 1886190
uuguuagaguuacuccaga

SEQ ID NO: 2392931 - RNA, 19 nt, Artificial Sequence
  Description of Artificial Sequence: Synthetic oligonucleotide
  Antisense strand to SEQ ID NO: 2392930
ucuggaguaacucuaacaa

SEQ ID NO: 2392932 - RNA, 19 nt, Artificial Sequence
  Description of Artificial Sequence: Synthetic oligonucleotide
  Sense strand starting at position 3191 of SEQ ID NO: 1886190
ccgagacgugugcugugaa

SEQ ID NO: 2392933 - RNA, 19 nt, Artificial Sequence
  Description of Artificial Sequence: Synthetic oligonucleotide
  Antisense strand to SEQ ID NO: 2392932
uucacagcacacgucucgg

SEQ ID NO: 2392934 - RNA, 19 nt, Artificial Sequence
  Description of Artificial Sequence: Synthetic oligonucleotide
  Sense strand starting at position 3196 of SEQ ID NO: 1886190
acgugugcugugaaagugu

SEQ ID NO: 2392935 - RNA, 19 nt, Artificial Sequence
  Description of Artificial Sequence: Synthetic oligonucleotide
  Antisense strand to SEQ ID NO: 2392934
acacuuucacagcacacgu

SEQ ID NO: 2392936 - RNA, 19 nt, Artificial Sequence
  Description of Artificial Sequence: Synthetic oligonucleotide
  Sense strand starting at position 3276 of SEQ ID NO: 1886190
ggagcugucauugaugaua

SEQ ID NO: 2392937 - RNA, 19 nt, Artificial Sequence
  Description of Artificial Sequence: Synthetic oligonucleotide
  Antisense strand to SEQ ID NO: 2392936
uaucaucaaugacagcucc

SEQ ID NO: 2392938 - RNA, 19 nt, Artificial Sequence
  Description of Artificial Sequence: Synthetic oligonucleotide
  Sense strand starting at position 3511 of SEQ ID NO: 1886190
cucgguacgccucuuaagu

SEQ ID NO: 2392939 - RNA, 19 nt, Artificial Sequence
  Description of Artificial Sequence: Synthetic oligonucleotide
  Antisense strand to SEQ ID NO: 2392938
acuuaagaggcguaccgag

SEQ ID NO: 2392940 - RNA, 19 nt, Artificial Sequence
  Description of Artificial Sequence: Synthetic oligonucleotide
  Sense strand starting at position 3522 of SEQ ID NO: 1886190
ucuuaagugaaauggaagu

SEQ ID NO: 2392941 - RNA, 19 nt, Artificial Sequence
  Description of Artificial Sequence: Synthetic oligonucleotide
  Antisense strand to SEQ ID NO: 2392940
acuuccauuucacuuaaga

SEQ ID NO: 2392942 - RNA, 19 nt, Artificial Sequence
  Description of Artificial Sequence: Synthetic oligonucleotide
  Sense strand starting at position 3610 of SEQ ID NO: 1886190
auggccuuuacugagugaa

SEQ ID NO: 2392943 - RNA, 19 nt, Artificial Sequence
  Description of Artificial Sequence: Synthetic oligonucleotide
  Antisense strand to SEQ ID NO: 2392942
uucacucaguaaaggccau

SEQ ID NO: 2392944 - RNA, 19 nt, Artificial Sequence
  Description of Artificial Sequence: Synthetic oligonucleotide
  Sense strand starting at position 3783 of SEQ ID NO: 1886190
ucauaaaugccuuauugug

SEQ ID NO: 2392945 - RNA, 19 nt, Artificial Sequence
  Description of Artificial Sequence: Synthetic oligonucleotide
  Antisense strand to SEQ ID NO: 2392944
cacaauaaggcauuuauga

SEQ ID NO: 2392946 - RNA, 19 nt, Artificial Sequence
  Description of Artificial Sequence: Synthetic oligonucleotide
  Sense strand starting at position 3790 of SEQ ID NO: 1886190
ugccuuauuguggaaacua

SEQ ID NO: 2392947 - RNA, 19 nt, Artificial Sequence
  Description of Artificial Sequence: Synthetic oligonucleotide
  Antisense strand to SEQ ID NO: 2392946
uaguuuccacaauaaggca

SEQ ID NO: 2392948 - RNA, 19 nt, Artificial Sequence
  Description of Artificial Sequence: Synthetic oligonucleotide
  Sense strand starting at position 3861 of SEQ ID NO: 1886190
guuacuuugagccagaggu

SEQ ID NO: 2392949 - RNA, 19 nt, Artificial Sequence
  Description of Artificial Sequence: Synthetic oligonucleotide
  Antisense strand to SEQ ID NO: 2392948
accucuggcucaaaguaac

SEQ ID NO: 2392950 - RNA, 19 nt, Artificial Sequence
  Description of Artificial Sequence: Synthetic oligonucleotide
  Sense strand starting at position 3865 of SEQ ID NO: 1886190
cuuugagccagagguagau

SEQ ID NO: 2392951 - RNA, 19 nt, Artificial Sequence
  Description of Artificial Sequence: Synthetic oligonucleotide
  Antisense strand to SEQ ID NO: 2392950
aucuaccucuggcucaaag

SEQ ID NO: 2392952 - RNA, 19 nt, Artificial Sequence
  Description of Artificial Sequence: Synthetic oligonucleotide
  Sense strand starting at position 107 of SEQ ID NO: 1886191
acuauugaguuucuggaga

SEQ ID NO: 2392953 - RNA, 19 nt, Artificial Sequence
  Description of Artificial Sequence: Synthetic oligonucleotide
  Antisense strand to SEQ ID NO: 2392952
ucuccagaaacucaauagu

SEQ ID NO: 2392954 - RNA, 19 nt, Artificial Sequence
  Description of Artificial Sequence: Synthetic oligonucleotide
  Sense strand starting at position 185 of SEQ ID NO: 1886191
uugacucuauguguccaaa

SEQ ID NO: 2392955 - RNA, 19 nt, Artificial Sequence
  Description of Artificial Sequence: Synthetic oligonucleotide
  Antisense strand to SEQ ID NO: 2392954
uuuggacacauagagucaa

SEQ ID NO: 2392956 - RNA, 19 nt, Artificial Sequence
  Description of Artificial Sequence: Synthetic oligonucleotide
  Sense strand starting at position 187 of SEQ ID NO: 1886191
gacucuauguguccaaaga

SEQ ID NO: 2392957 - RNA, 19 nt, Artificial Sequence
  Description of Artificial Sequence: Synthetic oligonucleotide
  Antisense strand to SEQ ID NO: 2392956
ucuuuggacacauagaguc

SEQ ID NO: 2392958 - RNA, 19 nt, Artificial Sequence
  Description of Artificial Sequence: Synthetic oligonucleotide
  Sense strand starting at position 188 of SEQ ID NO: 1886191
acucuauguguccaaagag

SEQ ID NO: 2392959 - RNA, 19 nt, Artificial Sequence
  Description of Artificial Sequence: Synthetic oligonucleotide
  Antisense strand to SEQ ID NO: 2392958
cucuuuggacacauagagu

SEQ ID NO: 2392960 - RNA, 19 nt, Artificial Sequence
  Description of Artificial Sequence: Synthetic oligonucleotide
  Sense strand starting at position 208 of SEQ ID NO: 1886191
cgaagacuugcccaaguuc

SEQ ID NO: 2392961 - RNA, 19 nt, Artificial Sequence
  Description of Artificial Sequence: Synthetic oligonucleotide
  Antisense strand to SEQ ID NO: 2392960
gaacuugggcaagucuucg

SEQ ID NO: 2392962 - RNA, 19 nt, Artificial Sequence
  Description of Artificial Sequence: Synthetic oligonucleotide
  Sense strand starting at position 233 of SEQ ID NO: 1886191
cagguuagugcagaggaaa

SEQ ID NO: 2392963 - RNA, 19 nt, Artificial Sequence
  Description of Artificial Sequence: Synthetic oligonucleotide
  Antisense strand to SEQ ID NO: 2392962
uuuccucugcacuaaccug

SEQ ID NO: 2392964 - RNA, 19 nt, Artificial Sequence
  Description of Artificial Sequence: Synthetic oligonucleotide
  Sense strand starting at position 451 of SEQ ID NO: 1886191
ccgaccaguuucuuuagaa

SEQ ID NO: 2392965 - RNA, 19 nt, Artificial Sequence
  Description of Artificial Sequence: Synthetic oligonucleotide
  Antisense strand to SEQ ID NO: 2392964
uucuaaagaaacuggucgg

SEQ ID NO: 2392966 - RNA, 19 nt, Artificial Sequence
  Description of Artificial Sequence: Synthetic oligonucleotide
  Sense strand starting at position 452 of SEQ ID NO: 1886191
cgaccaguuucuuuagaac

SEQ ID NO: 2392967 - RNA, 19 nt, Artificial Sequence
  Description of Artificial Sequence: Synthetic oligonucleotide
  Antisense strand to SEQ ID NO: 2392966
guucuaaagaaacuggucg

SEQ ID NO: 2392968 - RNA, 19 nt, Artificial Sequence
  Description of Artificial Sequence: Synthetic oligonucleotide
  Sense strand starting at position 541 of SEQ ID NO: 1886191
uccacauacguagacuaau

SEQ ID NO: 2392969 - RNA, 19 nt, Artificial Sequence
  Description of Artificial Sequence: Synthetic oligonucleotide
  Antisense strand to SEQ ID NO: 2392968
auuagucuacguaugugga

SEQ ID NO: 2392970 - RNA, 19 nt, Artificial Sequence
  Description of Artificial Sequence: Synthetic oligonucleotide
  Sense strand starting at position 673 of SEQ ID NO: 1886191
ccaaguggccuccaaagaa

SEQ ID NO: 2392971 - RNA, 19 nt, Artificial Sequence
  Description of Artificial Sequence: Synthetic oligonucleotide
  Antisense strand to SEQ ID NO: 2392970
uucuuuggaggccacuugg

SEQ ID NO: 2392972 - RNA, 19 nt, Artificial Sequence
  Description of Artificial Sequence: Synthetic oligonucleotide
  Sense strand starting at position 729 of SEQ ID NO: 1886191
caaagauuguccucuaacg

SEQ ID NO: 2392973 - RNA, 19 nt, Artificial Sequence
  Description of Artificial Sequence: Synthetic oligonucleotide
  Antisense strand to SEQ ID NO: 2392972
cguuagaggacaaucuuug

SEQ ID NO: 2392974 - RNA, 19 nt, Artificial Sequence
  Description of Artificial Sequence: Synthetic oligonucleotide
  Sense strand starting at position 809 of SEQ ID NO: 1886191
ggcuguuaccuggaaagga

SEQ ID NO: 2392975 - RNA, 19 nt, Artificial Sequence
  Description of Artificial Sequence: Synthetic oligonucleotide
  Antisense strand to SEQ ID NO: 2392974
uccuuuccagguaacagcc

SEQ ID NO: 2392976 - RNA, 19 nt, Artificial Sequence
  Description of Artificial Sequence: Synthetic oligonucleotide
  Sense strand starting at position 1111 of SEQ ID NO: 1886191
aagucaucgcaggaaaucu

SEQ ID NO: 2392977 - RNA, 19 nt, Artificial Sequence
  Description of Artificial Sequence: Synthetic oligonucleotide
  Antisense strand to SEQ ID NO: 2392976
agauuuccugcgaugacuu

SEQ ID NO: 2392978 - RNA, 19 nt, Artificial Sequence
  Description of Artificial Sequence: Synthetic oligonucleotide
  Sense strand starting at position 1121 of SEQ ID NO: 1886191
aggaaaucugaacgugguu

SEQ ID NO: 2392979 - RNA, 19 nt, Artificial Sequence
  Description of Artificial Sequence: Synthetic oligonucleotide
  Antisense strand to SEQ ID NO: 2392978
aaccacguucagauuuccu

SEQ ID NO: 2392980 - RNA, 19 nt, Artificial Sequence
  Description of Artificial Sequence: Synthetic oligonucleotide
  Sense strand starting at position 1184 of SEQ ID NO: 1886191
guaacucaauuaccugaga

SEQ ID NO: 2392981 - RNA, 19 nt, Artificial Sequence
  Description of Artificial Sequence: Synthetic oligonucleotide
  Antisense strand to SEQ ID NO: 2392980
ucucagguaauugaguuac

SEQ ID NO: 2392982 - RNA, 19 nt, Artificial Sequence
  Description of Artificial Sequence: Synthetic oligonucleotide
  Sense strand starting at position 1420 of SEQ ID NO: 1886191
uggugaagcccuugacaua

SEQ ID NO: 2392983 - RNA, 19 nt, Artificial Sequence
  Description of Artificial Sequence: Synthetic oligonucleotide
  Antisense strand to SEQ ID NO: 2392982
uaugucaagggcuucacca

SEQ ID NO: 2392984 - RNA, 19 nt, Artificial Sequence
  Description of Artificial Sequence: Synthetic oligonucleotide
  Sense strand starting at position 1421 of SEQ ID NO: 1886191
ggugaagcccuugacauau

SEQ ID NO: 2392985 - RNA, 19 nt, Artificial Sequence
  Description of Artificial Sequence: Synthetic oligonucleotide
  Antisense strand to SEQ ID NO: 2392984
auaugucaagggcuucacc

SEQ ID NO: 2392986 - RNA, 19 nt, Artificial Sequence
  Description of Artificial Sequence: Synthetic oligonucleotide
  Sense strand starting at position 1427 of SEQ ID NO: 1886191
gcccuugacauaugguaga

SEQ ID NO: 2392987 - RNA, 19 nt, Artificial Sequence
  Description of Artificial Sequence: Synthetic oligonucleotide
  Antisense strand to SEQ ID NO: 2392986
ucuaccauaugucaagggc

SEQ ID NO: 2392988 - RNA, 19 nt, Artificial Sequence
  Description of Artificial Sequence: Synthetic oligonucleotide
  Sense strand starting at position 1440 of SEQ ID NO: 1886191
gguagauacucauuaagug

SEQ ID NO: 2392989 - RNA, 19 nt, Artificial Sequence
  Description of Artificial Sequence: Synthetic oligonucleotide
  Antisense strand to SEQ ID NO: 2392988
cacuuaaugaguaucuacc

SEQ ID NO: 2392990 - RNA, 19 nt, Artificial Sequence
  Description of Artificial Sequence: Synthetic oligonucleotide
  Sense strand starting at position 1486 of SEQ ID NO: 1886191
aggauucugucacucuuau

SEQ ID NO: 2392991 - RNA, 19 nt, Artificial Sequence
  Description of Artificial Sequence: Synthetic oligonucleotide
  Antisense strand to SEQ ID NO: 2392990
auaagagugacagaauccu

SEQ ID NO: 2392992 - RNA, 19 nt, Artificial Sequence
  Description of Artificial Sequence: Synthetic oligonucleotide
  Sense strand starting at position 1587 of SEQ ID NO: 1886191
uuuccuuaaguguaaggua

SEQ ID NO: 2392993 - RNA, 19 nt, Artificial Sequence
  Description of Artificial Sequence: Synthetic oligonucleotide
  Antisense strand to SEQ ID NO: 2392992
uaccuuacacuuaaggaaa

SEQ ID NO: 2392994 - RNA, 19 nt, Artificial Sequence
  Description of Artificial Sequence: Synthetic oligonucleotide
  Sense strand starting at position 2000 of SEQ ID NO: 1886191
cgguguuucguccuuucca

SEQ ID NO: 2392995 - RNA, 19 nt, Artificial Sequence
  Description of Artificial Sequence: Synthetic oligonucleotide
  Antisense strand to SEQ ID NO: 2392994
uggaaaggacgaaacaccg

SEQ ID NO: 2392996 - RNA, 19 nt, Artificial Sequence
  Description of Artificial Sequence: Synthetic oligonucleotide
  Sense strand starting at position 2002 of SEQ ID NO: 1886191
guguuucguccuuuccaca

SEQ ID NO: 2392997 - RNA, 19 nt, Artificial Sequence
  Description of Artificial Sequence: Synthetic oligonucleotide
  Antisense strand to SEQ ID NO: 2392996
uguggaaaggacgaaacac

SEQ ID NO: 2392998 - RNA, 19 nt, Artificial Sequence
  Description of Artificial Sequence: Synthetic oligonucleotide
  Sense strand starting at position 2007 of SEQ ID NO: 1886191
ucguccuuuccacaagaua

SEQ ID NO: 2392999 - RNA, 19 nt, Artificial Sequence
  Description of Artificial Sequence: Synthetic oligonucleotide
  Antisense strand to SEQ ID NO: 2392998
uaucuuguggaaaggacga

SEQ ID NO: 2393000 - RNA, 19 nt, Artificial Sequence
  Description of Artificial Sequence: Synthetic oligonucleotide
  Sense strand starting at position 2209 of SEQ ID NO: 1886191
cguauaugcaaauaugaag

SEQ ID NO: 2393001 - RNA, 19 nt, Artificial Sequence
  Description of Artificial Sequence: Synthetic oligonucleotide
  Antisense strand to SEQ ID NO: 2393000
cuucauauuugcauauacg

SEQ ID NO: 2393002 - RNA, 19 nt, Artificial Sequence
  Description of Artificial Sequence: Synthetic oligonucleotide
  Sense strand starting at position 2225 of SEQ ID NO: 1886191
aaggaaucaugggaaauag

SEQ ID NO: 2393003 - RNA, 19 nt, Artificial Sequence
  Description of Artificial Sequence: Synthetic oligonucleotide
  Antisense strand to SEQ ID NO: 2393002
cuauuucccaugauuccuu

SEQ ID NO: 2393004 - RNA, 19 nt, Artificial Sequence
  Description of Artificial Sequence: Synthetic oligonucleotide
  Sense strand starting at position 2830 of SEQ ID NO: 1886191
caggcucugggagguuaaa

SEQ ID NO: 2393005 - RNA, 19 nt, Artificial Sequence
  Description of Artificial Sequence: Synthetic oligonucleotide
  Antisense strand to SEQ ID NO: 2393004
uuuaaccucccagagccug

SEQ ID NO: 2393006 - RNA, 19 nt, Artificial Sequence
  Description of Artificial Sequence: Synthetic oligonucleotide
  Sense strand starting at position 2874 of SEQ ID NO: 1886191
ugguuaaaguaguugggau

SEQ ID NO: 2393007 - RNA, 19 nt, Artificial Sequence
  Description of Artificial Sequence: Synthetic oligonucleotide
  Antisense strand to SEQ ID NO: 2393006
aucccaacuacuuuaacca

SEQ ID NO: 2393008 - RNA, 19 nt, Artificial Sequence
  Description of Artificial Sequence: Synthetic oligonucleotide
  Sense strand starting at position 2875 of SEQ ID NO: 1886191
gguuaaaguaguugggauu

SEQ ID NO: 2393009 - RNA, 19 nt, Artificial Sequence
  Description of Artificial Sequence: Synthetic oligonucleotide
  Antisense strand to SEQ ID NO: 2393008
aaucccaacuacuuuaacc

SEQ ID NO: 2393010 - RNA, 19 nt, Artificial Sequence
  Description of Artificial Sequence: Synthetic oligonucleotide
  Sense strand starting at position 3001 of SEQ ID NO: 1886191
uuguuagaguuacuccaga

SEQ ID NO: 2393011 - RNA, 19 nt, Artificial Sequence
  Description of Artificial Sequence: Synthetic oligonucleotide
  Antisense strand to SEQ ID NO: 2393010
ucuggaguaacucuaacaa

SEQ ID NO: 2393012 - RNA, 19 nt, Artificial Sequence
  Description of Artificial Sequence: Synthetic oligonucleotide
  Sense strand starting at position 3191 of SEQ ID NO: 1886191
ccgagacgugugcugugaa

SEQ ID NO: 2393013 - RNA, 19 nt, Artificial Sequence
  Description of Artificial Sequence: Synthetic oligonucleotide
  Antisense strand to SEQ ID NO: 2393012
uucacagcacacgucucgg

SEQ ID NO: 2393014 - RNA, 19 nt, Artificial Sequence
  Description of Artificial Sequence: Synthetic oligonucleotide
  Sense strand starting at position 3196 of SEQ ID NO: 1886191
acgugugcugugaaagugu

SEQ ID NO: 2393015 - RNA, 19 nt, Artificial Sequence
  Description of Artificial Sequence: Synthetic oligonucleotide
  Antisense strand to SEQ ID NO: 2393014
acacuuucacagcacacgu

SEQ ID NO: 2393016 - RNA, 19 nt, Artificial Sequence
  Description of Artificial Sequence: Synthetic oligonucleotide
  Sense strand starting at position 3276 of SEQ ID NO: 1886191
ggagcugucauugaugaua

SEQ ID NO: 2393017 - RNA, 19 nt, Artificial Sequence
  Description of Artificial Sequence: Synthetic oligonucleotide
  Antisense strand to SEQ ID NO: 2393016
uaucaucaaugacagcucc

SEQ ID NO: 2393018 - RNA, 19 nt, Artificial Sequence
  Description of Artificial Sequence: Synthetic oligonucleotide
  Sense strand starting at position 3511 of SEQ ID NO: 1886191
cucgguacgccucuuaagu

SEQ ID NO: 2393019 - RNA, 19 nt, Artificial Sequence
  Description of Artificial Sequence: Synthetic oligonucleotide
  Antisense strand to SEQ ID NO: 2393018
acuuaagaggcguaccgag

SEQ ID NO: 2393020 - RNA, 19 nt, Artificial Sequence
  Description of Artificial Sequence: Synthetic oligonucleotide
  Sense strand starting at position 3522 of SEQ ID NO: 1886191
ucuuaagugaaauggaagu

SEQ ID NO: 2393021 - RNA, 19 nt, Artificial Sequence
  Description of Artificial Sequence: Synthetic oligonucleotide
  Antisense strand to SEQ ID NO: 2393020
acuuccauuucacuuaaga

SEQ ID NO: 2393022 - RNA, 19 nt, Artificial Sequence
  Description of Artificial Sequence: Synthetic oligonucleotide
  Sense strand starting at position 3610 of SEQ ID NO: 1886191
auggccuuuacugagugaa

SEQ ID NO: 2393023 - RNA, 19 nt, Artificial Sequence
  Description of Artificial Sequence: Synthetic oligonucleotide
  Antisense strand to SEQ ID NO: 2393022
uucacucaguaaaggccau

SEQ ID NO: 2393024 - RNA, 19 nt, Artificial Sequence
  Description of Artificial Sequence: Synthetic oligonucleotide
  Sense strand starting at position 3783 of SEQ ID NO: 1886191
ucauaaaugccuuauugug

SEQ ID NO: 2393025 - RNA, 19 nt, Artificial Sequence
  Description of Artificial Sequence: Synthetic oligonucleotide
  Antisense strand to SEQ ID NO: 2393024
cacaauaaggcauuuauga

SEQ ID NO: 2393026 - RNA, 19 nt, Artificial Sequence
  Description of Artificial Sequence: Synthetic oligonucleotide
  Sense strand starting at position 3790 of SEQ ID NO: 1886191
ugccuuauuguggaaacua

SEQ ID NO: 2393027 - RNA, 19 nt, Artificial Sequence
  Description of Artificial Sequence: Synthetic oligonucleotide
  Antisense strand to SEQ ID NO: 2393026
uaguuuccacaauaaggca

SEQ ID NO: 2393028 - RNA, 19 nt, Artificial Sequence
  Description of Artificial Sequence: Synthetic oligonucleotide
  Sense strand starting at position 3861 of SEQ ID NO: 1886191
guuacuuugagccagaggu

SEQ ID NO: 2393029 - RNA, 19 nt, Artificial Sequence
  Description of Artificial Sequence: Synthetic oligonucleotide
  Antisense strand to SEQ ID NO: 2393028
accucuggcucaaaguaac

SEQ ID NO: 2393030 - RNA, 19 nt, Artificial Sequence
  Description of Artificial Sequence: Synthetic oligonucleotide
  Sense strand starting at position 3865 of SEQ ID NO: 1886191
cuuugagccagagguagau

SEQ ID NO: 2393031 - RNA, 19 nt, Artificial Sequence
  Description of Artificial Sequence: Synthetic oligonucleotide
  Antisense strand to SEQ ID NO: 2393030
aucuaccucuggcucaaag

SEQ ID NO: 2393032 - RNA, 19 nt, Artificial Sequence
  Description of Artificial Sequence: Synthetic oligonucleotide
  Sense strand starting at position 107 of SEQ ID NO: 1886192
acuauugaguuucuggaga

SEQ ID NO: 2393033 - RNA, 19 nt, Artificial Sequence
  Description of Artificial Sequence: Synthetic oligonucleotide
  Antisense strand to SEQ ID NO: 2393032
ucuccagaaacucaauagu

SEQ ID NO: 2393034 - RNA, 19 nt, Artificial Sequence
  Description of Artificial Sequence: Synthetic oligonucleotide
  Sense strand starting at position 185 of SEQ ID NO: 1886192
uugacucuauguguccaaa

SEQ ID NO: 2393035 - RNA, 19 nt, Artificial Sequence
  Description of Artificial Sequence: Synthetic oligonucleotide
  Antisense strand to SEQ ID NO: 2393034
uuuggacacauagagucaa

SEQ ID NO: 2393036 - RNA, 19 nt, Artificial Sequence
  Description of Artificial Sequence: Synthetic oligonucleotide
  Sense strand starting at position 187 of SEQ ID NO: 1886192
gacucuauguguccaaaga

SEQ ID NO: 2393037 - RNA, 19 nt, Artificial Sequence
  Description of Artificial Sequence: Synthetic oligonucleotide
  Antisense strand to SEQ ID NO: 2393036
ucuuuggacacauagaguc

SEQ ID NO: 2393038 - RNA, 19 nt, Artificial Sequence
  Description of Artificial Sequence: Synthetic oligonucleotide
  Sense strand starting at position 188 of SEQ ID NO: 1886192
acucuauguguccaaagag

SEQ ID NO: 2393039 - RNA, 19 nt, Artificial Sequence
  Description of Artificial Sequence: Synthetic oligonucleotide
  Antisense strand to SEQ ID NO: 2393038
cucuuuggacacauagagu

SEQ ID NO: 2393040 - RNA, 19 nt, Artificial Sequence
  Description of Artificial Sequence: Synthetic oligonucleotide
  Sense strand starting at position 208 of SEQ ID NO: 1886192
cgaagacuugcccaaguuc

SEQ ID NO: 2393041 - RNA, 19 nt, Artificial Sequence
  Description of Artificial Sequence: Synthetic oligonucleotide
  Antisense strand to SEQ ID NO: 2393040
gaacuugggcaagucuucg

SEQ ID NO: 2393042 - RNA, 19 nt, Artificial Sequence
  Description of Artificial Sequence: Synthetic oligonucleotide
  Sense strand starting at position 233 of SEQ ID NO: 1886192
cagguuagugcagaggaaa

SEQ ID NO: 2393043 - RNA, 19 nt, Artificial Sequence
  Description of Artificial Sequence: Synthetic oligonucleotide
  Antisense strand to SEQ ID NO: 2393042
uuuccucugcacuaaccug

SEQ ID NO: 2393044 - RNA, 19 nt, Artificial Sequence
  Description of Artificial Sequence: Synthetic oligonucleotide
  Sense strand starting at position 451 of SEQ ID NO: 1886192
ccgaccaguuucuuuagaa

SEQ ID NO: 2393045 - RNA, 19 nt, Artificial Sequence
  Description of Artificial Sequence: Synthetic oligonucleotide
  Antisense strand to SEQ ID NO: 2393044
uucuaaagaaacuggucgg

SEQ ID NO: 2393046 - RNA, 19 nt, Artificial Sequence
  Description of Artificial Sequence: Synthetic oligonucleotide
  Sense strand starting at position 452 of SEQ ID NO: 1886192
cgaccaguuucuuuagaac

SEQ ID NO: 2393047 - RNA, 19 nt, Artificial Sequence
  Description of Artificial Sequence: Synthetic oligonucleotide
  Antisense strand to SEQ ID NO: 2393046
guucuaaagaaacuggucg

SEQ ID NO: 2393048 - RNA, 19 nt, Artificial Sequence
  Description of Artificial Sequence: Synthetic oligonucleotide
  Sense strand starting at position 541 of SEQ ID NO: 1886192
uccacauacguagacuaau

SEQ ID NO: 2393049 - RNA, 19 nt, Artificial Sequence
  Description of Artificial Sequence: Synthetic oligonucleotide
  Antisense strand to SEQ ID NO: 2393048
auuagucuacguaugugga

SEQ ID NO: 2393050 - RNA, 19 nt, Artificial Sequence
  Description of Artificial Sequence: Synthetic oligonucleotide
  Sense strand starting at position 673 of SEQ ID NO: 1886192
ccaaguggccuccaaagaa

SEQ ID NO: 2393051 - RNA, 19 nt, Artificial Sequence
  Description of Artificial Sequence: Synthetic oligonucleotide
  Antisense strand to SEQ ID NO: 2393050
uucuuuggaggccacuugg

SEQ ID NO: 2393052 - RNA, 19 nt, Artificial Sequence
  Description of Artificial Sequence: Synthetic oligonucleotide
  Sense strand starting at position 729 of SEQ ID NO: 1886192
caaagauuguccucuaacg

SEQ ID NO: 2393053 - RNA, 19 nt, Artificial Sequence
  Description of Artificial Sequence: Synthetic oligonucleotide
  Antisense strand to SEQ ID NO: 2393052
cguuagaggacaaucuuug

SEQ ID NO: 2393054 - RNA, 19 nt, Artificial Sequence
  Description of Artificial Sequence: Synthetic oligonucleotide
  Sense strand starting at position 809 of SEQ ID NO: 1886192
ggcuguuaccuggaaagga

SEQ ID NO: 2393055 - RNA, 19 nt, Artificial Sequence
  Description of Artificial Sequence: Synthetic oligonucleotide
  Antisense strand to SEQ ID NO: 2393054
uccuuuccagguaacagcc

SEQ ID NO: 2393056 - RNA, 19 nt, Artificial Sequence
  Description of Artificial Sequence: Synthetic oligonucleotide
  Sense strand starting at position 1111 of SEQ ID NO: 1886192
aagucaucgcaggaaaucu

SEQ ID NO: 2393057 - RNA, 19 nt, Artificial Sequence
  Description of Artificial Sequence: Synthetic oligonucleotide
  Antisense strand to SEQ ID NO: 2393056
agauuuccugcgaugacuu

SEQ ID NO: 2393058 - RNA, 19 nt, Artificial Sequence
  Description of Artificial Sequence: Synthetic oligonucleotide
  Sense strand starting at position 1121 of SEQ ID NO: 1886192
aggaaaucugaacgugguu

SEQ ID NO: 2393059 - RNA, 19 nt, Artificial Sequence
  Description of Artificial Sequence: Synthetic oligonucleotide
  Antisense strand to SEQ ID NO: 2393058
aaccacguucagauuuccu

SEQ ID NO: 2393060 - RNA, 19 nt, Artificial Sequence
  Description of Artificial Sequence: Synthetic oligonucleotide
  Sense strand starting at position 1184 of SEQ ID NO: 1886192
guaacucaauuaccugaga

SEQ ID NO: 2393061 - RNA, 19 nt, Artificial Sequence
  Description of Artificial Sequence: Synthetic oligonucleotide
  Antisense strand to SEQ ID NO: 2393060
ucucagguaauugaguuac

SEQ ID NO: 2393062 - RNA, 19 nt, Artificial Sequence
  Description of Artificial Sequence: Synthetic oligonucleotide
  Sense strand starting at position 1420 of SEQ ID NO: 1886192
uggugaagcccuugacaua

SEQ ID NO: 2393063 - RNA, 19 nt, Artificial Sequence
  Description of Artificial Sequence: Synthetic oligonucleotide
  Antisense strand to SEQ ID NO: 2393062
uaugucaagggcuucacca

SEQ ID NO: 2393064 - RNA, 19 nt, Artificial Sequence
  Description of Artificial Sequence: Synthetic oligonucleotide
  Sense strand starting at position 1421 of SEQ ID NO: 1886192
ggugaagcccuugacauau

SEQ ID NO: 2393065 - RNA, 19 nt, Artificial Sequence
  Description of Artificial Sequence: Synthetic oligonucleotide
  Antisense strand to SEQ ID NO: 2393064
auaugucaagggcuucacc

SEQ ID NO: 2393066 - RNA, 19 nt, Artificial Sequence
  Description of Artificial Sequence: Synthetic oligonucleotide
  Sense strand starting at position 1427 of SEQ ID NO: 1886192
gcccuugacauaugguaga

SEQ ID NO: 2393067 - RNA, 19 nt, Artificial Sequence
  Description of Artificial Sequence: Synthetic oligonucleotide
  Antisense strand to SEQ ID NO: 2393066
ucuaccauaugucaagggc

SEQ ID NO: 2393068 - RNA, 19 nt, Artificial Sequence
  Description of Artificial Sequence: Synthetic oligonucleotide
  Sense strand starting at position 1440 of SEQ ID NO: 1886192
gguagauacucauuaagug

SEQ ID NO: 2393069 - RNA, 19 nt, Artificial Sequence
  Description of Artificial Sequence: Synthetic oligonucleotide
  Antisense strand to SEQ ID NO: 2393068
cacuuaaugaguaucuacc

SEQ ID NO: 2393070 - RNA, 19 nt, Artificial Sequence
  Description of Artificial Sequence: Synthetic oligonucleotide
  Sense strand starting at position 1486 of SEQ ID NO: 1886192
aggauucugucacucuuau

SEQ ID NO: 2393071 - RNA, 19 nt, Artificial Sequence
  Description of Artificial Sequence: Synthetic oligonucleotide
  Antisense strand to SEQ ID NO: 2393070
auaagagugacagaauccu

SEQ ID NO: 2393072 - RNA, 19 nt, Artificial Sequence
  Description of Artificial Sequence: Synthetic oligonucleotide
  Sense strand starting at position 1587 of SEQ ID NO: 1886192
uuuccuuaaguguaaggua

SEQ ID NO: 2393073 - RNA, 19 nt, Artificial Sequence
  Description of Artificial Sequence: Synthetic oligonucleotide
  Antisense strand to SEQ ID NO: 2393072
uaccuuacacuuaaggaaa

SEQ ID NO: 2393074 - RNA, 19 nt, Artificial Sequence
  Description of Artificial Sequence: Synthetic oligonucleotide
  Sense strand starting at position 2000 of SEQ ID NO: 1886192
cgguguuucguccuuucca

SEQ ID NO: 2393075 - RNA, 19 nt, Artificial Sequence
  Description of Artificial Sequence: Synthetic oligonucleotide
  Antisense strand to SEQ ID NO: 2393074
uggaaaggacgaaacaccg

SEQ ID NO: 2393076 - RNA, 19 nt, Artificial Sequence
  Description of Artificial Sequence: Synthetic oligonucleotide
  Sense strand starting at position 2002 of SEQ ID NO: 1886192
guguuucguccuuuccaca

SEQ ID NO: 2393077 - RNA, 19 nt, Artificial Sequence
  Description of Artificial Sequence: Synthetic oligonucleotide
  Antisense strand to SEQ ID NO: 2393076
uguggaaaggacgaaacac

SEQ ID NO: 2393078 - RNA, 19 nt, Artificial Sequence
  Description of Artificial Sequence: Synthetic oligonucleotide
  Sense strand starting at position 2007 of SEQ ID NO: 1886192
ucguccuuuccacaagaua

SEQ ID NO: 2393079 - RNA, 19 nt, Artificial Sequence
  Description of Artificial Sequence: Synthetic oligonucleotide
  Antisense strand to SEQ ID NO: 2393078
uaucuuguggaaaggacga

SEQ ID NO: 2393080 - RNA, 19 nt, Artificial Sequence
  Description of Artificial Sequence: Synthetic oligonucleotide
  Sense strand starting at position 2209 of SEQ ID NO: 1886192
cguauaugcaaauaugaag

SEQ ID NO: 2393081 - RNA, 19 nt, Artificial Sequence
  Description of Artificial Sequence: Synthetic oligonucleotide
  Antisense strand to SEQ ID NO: 2393080
cuucauauuugcauauacg

SEQ ID NO: 2393082 - RNA, 19 nt, Artificial Sequence
  Description of Artificial Sequence: Synthetic oligonucleotide
  Sense strand starting at position 2225 of SEQ ID NO: 1886192
aaggaaucaugggaaauag

SEQ ID NO: 2393083 - RNA, 19 nt, Artificial Sequence
  Description of Artificial Sequence: Synthetic oligonucleotide
  Antisense strand to SEQ ID NO: 2393082
cuauuucccaugauuccuu

SEQ ID NO: 2393084 - RNA, 19 nt, Artificial Sequence
  Description of Artificial Sequence: Synthetic oligonucleotide
  Sense strand starting at position 2830 of SEQ ID NO: 1886192
caggcucugggagguuaaa

SEQ ID NO: 2393085 - RNA, 19 nt, Artificial Sequence
  Description of Artificial Sequence: Synthetic oligonucleotide
  Antisense strand to SEQ ID NO: 2393084
uuuaaccucccagagccug

SEQ ID NO: 2393086 - RNA, 19 nt, Artificial Sequence
  Description of Artificial Sequence: Synthetic oligonucleotide
  Sense strand starting at position 2874 of SEQ ID NO: 1886192
ugguuaaaguaguugggau

SEQ ID NO: 2393087 - RNA, 19 nt, Artificial Sequence
  Description of Artificial Sequence: Synthetic oligonucleotide
  Antisense strand to SEQ ID NO: 2393086
aucccaacuacuuuaacca

SEQ ID NO: 2393088 - RNA, 19 nt, Artificial Sequence
  Description of Artificial Sequence: Synthetic oligonucleotide
  Sense strand starting at position 2875 of SEQ ID NO: 1886192
gguuaaaguaguugggauu

SEQ ID NO: 2393089 - RNA, 19 nt, Artificial Sequence
  Description of Artificial Sequence: Synthetic oligonucleotide
  Antisense strand to SEQ ID NO: 2393088
aaucccaacuacuuuaacc

SEQ ID NO: 2393090 - RNA, 19 nt, Artificial Sequence
  Description of Artificial Sequence: Synthetic oligonucleotide
  Sense strand starting at position 3001 of SEQ ID NO: 1886192
uuguuagaguuacuccaga

SEQ ID NO: 2393091 - RNA, 19 nt, Artificial Sequence
  Description of Artificial Sequence: Synthetic oligonucleotide
  Antisense strand to SEQ ID NO: 2393090
ucuggaguaacucuaacaa

SEQ ID NO: 2393092 - RNA, 19 nt, Artificial Sequence
  Description of Artificial Sequence: Synthetic oligonucleotide
  Sense strand starting at position 3191 of SEQ ID NO: 1886192
ccgagacgugugcugugaa

SEQ ID NO: 2393093 - RNA, 19 nt, Artificial Sequence
  Description of Artificial Sequence: Synthetic oligonucleotide
  Antisense strand to SEQ ID NO: 2393092
uucacagcacacgucucgg

SEQ ID NO: 2393094 - RNA, 19 nt, Artificial Sequence
  Description of Artificial Sequence: Synthetic oligonucleotide
  Sense strand starting at position 3196 of SEQ ID NO: 1886192
acgugugcugugaaagugu

SEQ ID NO: 2393095 - RNA, 19 nt, Artificial Sequence
  Description of Artificial Sequence: Synthetic oligonucleotide
  Antisense strand to SEQ ID NO: 2393094
acacuuucacagcacacgu

SEQ ID NO: 2393096 - RNA, 19 nt, Artificial Sequence
  Description of Artificial Sequence: Synthetic oligonucleotide
  Sense strand starting at position 3276 of SEQ ID NO: 1886192
ggagcugucauugaugaua

SEQ ID NO: 2393097 - RNA, 19 nt, Artificial Sequence
  Description of Artificial Sequence: Synthetic oligonucleotide
  Antisense strand to SEQ ID NO: 2393096
uaucaucaaugacagcucc

SEQ ID NO: 2393098 - RNA, 19 nt, Artificial Sequence
  Description of Artificial Sequence: Synthetic oligonucleotide
  Sense strand starting at position 3511 of SEQ ID NO: 1886192
cucgguacgccucuuaagu

SEQ ID NO: 2393099 - RNA, 19 nt, Artificial Sequence
  Description of Artificial Sequence: Synthetic oligonucleotide
  Antisense strand to SEQ ID NO: 2393098
acuuaagaggcguaccgag

SEQ ID NO: 2393100 - RNA, 19 nt, Artificial Sequence
  Description of Artificial Sequence: Synthetic oligonucleotide
  Sense strand starting at position 3522 of SEQ ID NO: 1886192
ucuuaagugaaauggaagu

SEQ ID NO: 2393101 - RNA, 19 nt, Artificial Sequence
  Description of Artificial Sequence: Synthetic oligonucleotide
  Antisense strand to SEQ ID NO: 2393100
acuuccauuucacuuaaga

SEQ ID NO: 2393102 - RNA, 19 nt, Artificial Sequence
  Description of Artificial Sequence: Synthetic oligonucleotide
  Sense strand starting at position 3610 of SEQ ID NO: 1886192
auggccuuuacugagugaa

SEQ ID NO: 2393103 - RNA, 19 nt, Artificial Sequence
  Description of Artificial Sequence: Synthetic oligonucleotide
  Antisense strand to SEQ ID NO: 2393102
uucacucaguaaaggccau

SEQ ID NO: 2393104 - RNA, 19 nt, Artificial Sequence
  Description of Artificial Sequence: Synthetic oligonucleotide
  Sense strand starting at position 3783 of SEQ ID NO: 1886192
ucauaaaugccuuauugug

SEQ ID NO: 2393105 - RNA, 19 nt, Artificial Sequence
  Description of Artificial Sequence: Synthetic oligonucleotide
  Antisense strand to SEQ ID NO: 2393104
cacaauaaggcauuuauga

SEQ ID NO: 2393106 - RNA, 19 nt, Artificial Sequence
  Description of Artificial Sequence: Synthetic oligonucleotide
  Sense strand starting at position 3790 of SEQ ID NO: 1886192
ugccuuauuguggaaacua

SEQ ID NO: 2393107 - RNA, 19 nt, Artificial Sequence
  Description of Artificial Sequence: Synthetic oligonucleotide
  Antisense strand to SEQ ID NO: 2393106
uaguuuccacaauaaggca

SEQ ID NO: 2393108 - RNA, 19 nt, Artificial Sequence
  Description of Artificial Sequence: Synthetic oligonucleotide
  Sense strand starting at position 3861 of SEQ ID NO: 1886192
guuacuuugagccagaggu

SEQ ID NO: 2393109 - RNA, 19 nt, Artificial Sequence
  Description of Artificial Sequence: Synthetic oligonucleotide
  Antisense strand to SEQ ID NO: 2393108
accucuggcucaaaguaac

SEQ ID NO: 2393110 - RNA, 19 nt, Artificial Sequence
  Description of Artificial Sequence: Synthetic oligonucleotide
  Sense strand starting at position 3865 of SEQ ID NO: 1886192
cuuugagccagagguagau

SEQ ID NO: 2393111 - RNA, 19 nt, Artificial Sequence
  Description of Artificial Sequence: Synthetic oligonucleotide
  Antisense strand to SEQ ID NO: 2393110
aucuaccucuggcucaaag

SEQ ID NO: 2393112 - RNA, 19 nt, Artificial Sequence
  Description of Artificial Sequence: Synthetic oligonucleotide
  Sense strand starting at position 107 of SEQ ID NO: 1886193
acuauugaguuucuggaga

SEQ ID NO: 2393113 - RNA, 19 nt, Artificial Sequence
  Description of Artificial Sequence: Synthetic oligonucleotide
  Antisense strand to SEQ ID NO: 2393112
ucuccagaaacucaauagu

SEQ ID NO: 2393114 - RNA, 19 nt, Artificial Sequence
  Description of Artificial Sequence: Synthetic oligonucleotide
  Sense strand starting at position 185 of SEQ ID NO: 1886193
uugacucuauguguccaaa

SEQ ID NO: 2393115 - RNA, 19 nt, Artificial Sequence
  Description of Artificial Sequence: Synthetic oligonucleotide
  Antisense strand to SEQ ID NO: 2393114
uuuggacacauagagucaa

SEQ ID NO: 2393116 - RNA, 19 nt, Artificial Sequence
  Description of Artificial Sequence: Synthetic oligonucleotide
  Sense strand starting at position 187 of SEQ ID NO: 1886193
gacucuauguguccaaaga

SEQ ID NO: 2393117 - RNA, 19 nt, Artificial Sequence
  Description of Artificial Sequence: Synthetic oligonucleotide
  Antisense strand to SEQ ID NO: 2393116
ucuuuggacacauagaguc

SEQ ID NO: 2393118 - RNA, 19 nt, Artificial Sequence
  Description of Artificial Sequence: Synthetic oligonucleotide
  Sense strand starting at position 188 of SEQ ID NO: 1886193
acucuauguguccaaagag

SEQ ID NO: 2393119 - RNA, 19 nt, Artificial Sequence
  Description of Artificial Sequence: Synthetic oligonucleotide
  Antisense strand to SEQ ID NO: 2393118
cucuuuggacacauagagu

SEQ ID NO: 2393120 - RNA, 19 nt, Artificial Sequence
  Description of Artificial Sequence: Synthetic oligonucleotide
  Sense strand starting at position 208 of SEQ ID NO: 1886193
cgaagacuugcccaaguuc

SEQ ID NO: 2393121 - RNA, 19 nt, Artificial Sequence
  Description of Artificial Sequence: Synthetic oligonucleotide
  Antisense strand to SEQ ID NO: 2393120
gaacuugggcaagucuucg

SEQ ID NO: 2393122 - RNA, 19 nt, Artificial Sequence
  Description of Artificial Sequence: Synthetic oligonucleotide
  Sense strand starting at position 233 of SEQ ID NO: 1886193
cagguuagugcagaggaaa

SEQ ID NO: 2393123 - RNA, 19 nt, Artificial Sequence
  Description of Artificial Sequence: Synthetic oligonucleotide
  Antisense strand to SEQ ID NO: 2393122
uuuccucugcacuaaccug

SEQ ID NO: 2393124 - RNA, 19 nt, Artificial Sequence
  Description of Artificial Sequence: Synthetic oligonucleotide
  Sense strand starting at position 451 of SEQ ID NO: 1886193
ccgaccaguuucuuuagaa

SEQ ID NO: 2393125 - RNA, 19 nt, Artificial Sequence
  Description of Artificial Sequence: Synthetic oligonucleotide
  Antisense strand to SEQ ID NO: 2393124
uucuaaagaaacuggucgg

SEQ ID NO: 2393126 - RNA, 19 nt, Artificial Sequence
  Description of Artificial Sequence: Synthetic oligonucleotide
  Sense strand starting at position 452 of SEQ ID NO: 1886193
cgaccaguuucuuuagaac

SEQ ID NO: 2393127 - RNA, 19 nt, Artificial Sequence
  Description of Artificial Sequence: Synthetic oligonucleotide
  Antisense strand to SEQ ID NO: 2393126
guucuaaagaaacuggucg

SEQ ID NO: 2393128 - RNA, 19 nt, Artificial Sequence
  Description of Artificial Sequence: Synthetic oligonucleotide
  Sense strand starting at position 541 of SEQ ID NO: 1886193
uccacauacguagacuaau

SEQ ID NO: 2393129 - RNA, 19 nt, Artificial Sequence
  Description of Artificial Sequence: Synthetic oligonucleotide
  Antisense strand to SEQ ID NO: 2393128
auuagucuacguaugugga

SEQ ID NO: 2393130 - RNA, 19 nt, Artificial Sequence
  Description of Artificial Sequence: Synthetic oligonucleotide
  Sense strand starting at position 673 of SEQ ID NO: 1886193
ccaaguggccuccaaagaa

SEQ ID NO: 2393131 - RNA, 19 nt, Artificial Sequence
  Description of Artificial Sequence: Synthetic oligonucleotide
  Antisense strand to SEQ ID NO: 2393130
uucuuuggaggccacuugg

SEQ ID NO: 2393132 - RNA, 19 nt, Artificial Sequence
  Description of Artificial Sequence: Synthetic oligonucleotide
  Sense strand starting at position 729 of SEQ ID NO: 1886193
caaagauuguccucuaacg

SEQ ID NO: 2393133 - RNA, 19 nt, Artificial Sequence
  Description of Artificial Sequence: Synthetic oligonucleotide
  Antisense strand to SEQ ID NO: 2393132
cguuagaggacaaucuuug

SEQ ID NO: 2393134 - RNA, 19 nt, Artificial Sequence
  Description of Artificial Sequence: Synthetic oligonucleotide
  Sense strand starting at position 809 of SEQ ID NO: 1886193
ggcuguuaccuggaaagga

SEQ ID NO: 2393135 - RNA, 19 nt, Artificial Sequence
  Description of Artificial Sequence: Synthetic oligonucleotide
  Antisense strand to SEQ ID NO: 2393134
uccuuuccagguaacagcc

SEQ ID NO: 2393136 - RNA, 19 nt, Artificial Sequence
  Description of Artificial Sequence: Synthetic oligonucleotide
  Sense strand starting at position 1111 of SEQ ID NO: 1886193
aagucaucgcaggaaaucu

SEQ ID NO: 2393137 - RNA, 19 nt, Artificial Sequence
  Description of Artificial Sequence: Synthetic oligonucleotide
  Antisense strand to SEQ ID NO: 2393136
agauuuccugcgaugacuu

SEQ ID NO: 2393138 - RNA, 19 nt, Artificial Sequence
  Description of Artificial Sequence: Synthetic oligonucleotide
  Sense strand starting at position 1121 of SEQ ID NO: 1886193
aggaaaucugaacgugguu

SEQ ID NO: 2393139 - RNA, 19 nt, Artificial Sequence
  Description of Artificial Sequence: Synthetic oligonucleotide
  Antisense strand to SEQ ID NO: 2393138
aaccacguucagauuuccu

SEQ ID NO: 2393140 - RNA, 19 nt, Artificial Sequence
  Description of Artificial Sequence: Synthetic oligonucleotide
  Sense strand starting at position 1184 of SEQ ID NO: 1886193
guaacucaauuaccugaga

SEQ ID NO: 2393141 - RNA, 19 nt, Artificial Sequence
  Description of Artificial Sequence: Synthetic oligonucleotide
  Antisense strand to SEQ ID NO: 2393140
ucucagguaauugaguuac

SEQ ID NO: 2393142 - RNA, 19 nt, Artificial Sequence
  Description of Artificial Sequence: Synthetic oligonucleotide
  Sense strand starting at position 1420 of SEQ ID NO: 1886193
uggugaagcccuugacaua

SEQ ID NO: 2393143 - RNA, 19 nt, Artificial Sequence
  Description of Artificial Sequence: Synthetic oligonucleotide
  Antisense strand to SEQ ID NO: 2393142
uaugucaagggcuucacca

SEQ ID NO: 2393144 - RNA, 19 nt, Artificial Sequence
  Description of Artificial Sequence: Synthetic oligonucleotide
  Sense strand starting at position 1421 of SEQ ID NO: 1886193
ggugaagcccuugacauau

SEQ ID NO: 2393145 - RNA, 19 nt, Artificial Sequence
  Description of Artificial Sequence: Synthetic oligonucleotide
  Antisense strand to SEQ ID NO: 2393144
auaugucaagggcuucacc

SEQ ID NO: 2393146 - RNA, 19 nt, Artificial Sequence
  Description of Artificial Sequence: Synthetic oligonucleotide
  Sense strand starting at position 1427 of SEQ ID NO: 1886193
gcccuugacauaugguaga

SEQ ID NO: 2393147 - RNA, 19 nt, Artificial Sequence
  Description of Artificial Sequence: Synthetic oligonucleotide
  Antisense strand to SEQ ID NO: 2393146
ucuaccauaugucaagggc

SEQ ID NO: 2393148 - RNA, 19 nt, Artificial Sequence
  Description of Artificial Sequence: Synthetic oligonucleotide
  Sense strand starting at position 1440 of SEQ ID NO: 1886193
gguagauacucauuaagug

SEQ ID NO: 2393149 - RNA, 19 nt, Artificial Sequence
  Description of Artificial Sequence: Synthetic oligonucleotide
  Antisense strand to SEQ ID NO: 2393148
cacuuaaugaguaucuacc

SEQ ID NO: 2393150 - RNA, 19 nt, Artificial Sequence
  Description of Artificial Sequence: Synthetic oligonucleotide
  Sense strand starting at position 1486 of SEQ ID NO: 1886193
aggauucugucacucuuau

SEQ ID NO: 2393151 - RNA, 19 nt, Artificial Sequence
  Description of Artificial Sequence: Synthetic oligonucleotide
  Antisense strand to SEQ ID NO: 2393150
auaagagugacagaauccu

SEQ ID NO: 2393152 - RNA, 19 nt, Artificial Sequence
  Description of Artificial Sequence: Synthetic oligonucleotide
  Sense strand starting at position 1587 of SEQ ID NO: 1886193
uuuccuuaaguguaaggua

SEQ ID NO: 2393153 - RNA, 19 nt, Artificial Sequence
  Description of Artificial Sequence: Synthetic oligonucleotide
  Antisense strand to SEQ ID NO: 2393152
uaccuuacacuuaaggaaa

SEQ ID NO: 2393154 - RNA, 19 nt, Artificial Sequence
  Description of Artificial Sequence: Synthetic oligonucleotide
  Sense strand starting at position 2000 of SEQ ID NO: 1886193
cgguguuucguccuuucca

SEQ ID NO: 2393155 - RNA, 19 nt, Artificial Sequence
  Description of Artificial Sequence: Synthetic oligonucleotide
  Antisense strand to SEQ ID NO: 2393154
uggaaaggacgaaacaccg

SEQ ID NO: 2393156 - RNA, 19 nt, Artificial Sequence
  Description of Artificial Sequence: Synthetic oligonucleotide
  Sense strand starting at position 2002 of SEQ ID NO: 1886193
guguuucguccuuuccaca

SEQ ID NO: 2393157 - RNA, 19 nt, Artificial Sequence
  Description of Artificial Sequence: Synthetic oligonucleotide
  Antisense strand to SEQ ID NO: 2393156
uguggaaaggacgaaacac

SEQ ID NO: 2393158 - RNA, 19 nt, Artificial Sequence
  Description of Artificial Sequence: Synthetic oligonucleotide
  Sense strand starting at position 2007 of SEQ ID NO: 1886193
ucguccuuuccacaagaua

SEQ ID NO: 2393159 - RNA, 19 nt, Artificial Sequence
  Description of Artificial Sequence: Synthetic oligonucleotide
  Antisense strand to SEQ ID NO: 2393158
uaucuuguggaaaggacga

SEQ ID NO: 2393160 - RNA, 19 nt, Artificial Sequence
  Description of Artificial Sequence: Synthetic oligonucleotide
  Sense strand starting at position 2209 of SEQ ID NO: 1886193
cguauaugcaaauaugaag

SEQ ID NO: 2393161 - RNA, 19 nt, Artificial Sequence
  Description of Artificial Sequence: Synthetic oligonucleotide
  Antisense strand to SEQ ID NO: 2393160
cuucauauuugcauauacg

SEQ ID NO: 2393162 - RNA, 19 nt, Artificial Sequence
  Description of Artificial Sequence: Synthetic oligonucleotide
  Sense strand starting at position 2225 of SEQ ID NO: 1886193
aaggaaucaugggaaauag

SEQ ID NO: 2393163 - RNA, 19 nt, Artificial Sequence
  Description of Artificial Sequence: Synthetic oligonucleotide
  Antisense strand to SEQ ID NO: 2393162
cuauuucccaugauuccuu

SEQ ID NO: 2393164 - RNA, 19 nt, Artificial Sequence
  Description of Artificial Sequence: Synthetic oligonucleotide
  Sense strand starting at position 2830 of SEQ ID NO: 1886193
caggcucugggagguuaaa

SEQ ID NO: 2393165 - RNA, 19 nt, Artificial Sequence
  Description of Artificial Sequence: Synthetic oligonucleotide
  Antisense strand to SEQ ID NO: 2393164
uuuaaccucccagagccug

SEQ ID NO: 2393166 - RNA, 19 nt, Artificial Sequence
  Description of Artificial Sequence: Synthetic oligonucleotide
  Sense strand starting at position 2874 of SEQ ID NO: 1886193
ugguuaaaguaguugggau

SEQ ID NO: 2393167 - RNA, 19 nt, Artificial Sequence
  Description of Artificial Sequence: Synthetic oligonucleotide
  Antisense strand to SEQ ID NO: 2393166
aucccaacuacuuuaacca

SEQ ID NO: 2393168 - RNA, 19 nt, Artificial Sequence
  Description of Artificial Sequence: Synthetic oligonucleotide
  Sense strand starting at position 2875 of SEQ ID NO: 1886193
gguuaaaguaguugggauu

SEQ ID NO: 2393169 - RNA, 19 nt, Artificial Sequence
  Description of Artificial Sequence: Synthetic oligonucleotide
  Antisense strand to SEQ ID NO: 2393168
aaucccaacuacuuuaacc

SEQ ID NO: 2393170 - RNA, 19 nt, Artificial Sequence
  Description of Artificial Sequence: Synthetic oligonucleotide
  Sense strand starting at position 3001 of SEQ ID NO: 1886193
uuguuagaguuacuccaga

SEQ ID NO: 2393171 - RNA, 19 nt, Artificial Sequence
  Description of Artificial Sequence: Synthetic oligonucleotide
  Antisense strand to SEQ ID NO: 2393170
ucuggaguaacucuaacaa

SEQ ID NO: 2393172 - RNA, 19 nt, Artificial Sequence
  Description of Artificial Sequence: Synthetic oligonucleotide
  Sense strand starting at position 3191 of SEQ ID NO: 1886193
ccgagacgugugcugugaa

SEQ ID NO: 2393173 - RNA, 19 nt, Artificial Sequence
  Description of Artificial Sequence: Synthetic oligonucleotide
  Antisense strand to SEQ ID NO: 2393172
uucacagcacacgucucgg

SEQ ID NO: 2393174 - RNA, 19 nt, Artificial Sequence
  Description of Artificial Sequence: Synthetic oligonucleotide
  Sense strand starting at position 3196 of SEQ ID NO: 1886193
acgugugcugugaaagugu

SEQ ID NO: 2393175 - RNA, 19 nt, Artificial Sequence
  Description of Artificial Sequence: Synthetic oligonucleotide
  Antisense strand to SEQ ID NO: 2393174
acacuuucacagcacacgu

SEQ ID NO: 2393176 - RNA, 19 nt, Artificial Sequence
  Description of Artificial Sequence: Synthetic oligonucleotide
  Sense strand starting at position 3276 of SEQ ID NO: 1886193
ggagcugucauugaugaua

SEQ ID NO: 2393177 - RNA, 19 nt, Artificial Sequence
  Description of Artificial Sequence: Synthetic oligonucleotide
  Antisense strand to SEQ ID NO: 2393176
uaucaucaaugacagcucc

SEQ ID NO: 2393178 - RNA, 19 nt, Artificial Sequence
  Description of Artificial Sequence: Synthetic oligonucleotide
  Sense strand starting at position 3511 of SEQ ID NO: 1886193
cucgguacgccucuuaagu

SEQ ID NO: 2393179 - RNA, 19 nt, Artificial Sequence
  Description of Artificial Sequence: Synthetic oligonucleotide
  Antisense strand to SEQ ID NO: 2393178
acuuaagaggcguaccgag

SEQ ID NO: 2393180 - RNA, 19 nt, Artificial Sequence
  Description of Artificial Sequence: Synthetic oligonucleotide
  Sense strand starting at position 3522 of SEQ ID NO: 1886193
ucuuaagugaaauggaagu

SEQ ID NO: 2393181 - RNA, 19 nt, Artificial Sequence
  Description of Artificial Sequence: Synthetic oligonucleotide
  Antisense strand to SEQ ID NO: 2393180
acuuccauuucacuuaaga

SEQ ID NO: 2393182 - RNA, 19 nt, Artificial Sequence
  Description of Artificial Sequence: Synthetic oligonucleotide
  Sense strand starting at position 3610 of SEQ ID NO: 1886193
auggccuuuacugagugaa

SEQ ID NO: 2393183 - RNA, 19 nt, Artificial Sequence
  Description of Artificial Sequence: Synthetic oligonucleotide
  Antisense strand to SEQ ID NO: 2393182
uucacucaguaaaggccau

SEQ ID NO: 2393184 - RNA, 19 nt, Artificial Sequence
  Description of Artificial Sequence: Synthetic oligonucleotide
  Sense strand starting at position 3783 of SEQ ID NO: 1886193
ucauaaaugccuuauugug

SEQ ID NO: 2393185 - RNA, 19 nt, Artificial Sequence
  Description of Artificial Sequence: Synthetic oligonucleotide
  Antisense strand to SEQ ID NO: 2393184
cacaauaaggcauuuauga

SEQ ID NO: 2393186 - RNA, 19 nt, Artificial Sequence
  Description of Artificial Sequence: Synthetic oligonucleotide
  Sense strand starting at position 3790 of SEQ ID NO: 1886193
ugccuuauuguggaaacua

SEQ ID NO: 2393187 - RNA, 19 nt, Artificial Sequence
  Description of Artificial Sequence: Synthetic oligonucleotide
  Antisense strand to SEQ ID NO: 2393186
uaguuuccacaauaaggca

SEQ ID NO: 2393188 - RNA, 19 nt, Artificial Sequence
  Description of Artificial Sequence: Synthetic oligonucleotide
  Sense strand starting at position 3861 of SEQ ID NO: 1886193
guuacuuugagccagaggu

SEQ ID NO: 2393189 - RNA, 19 nt, Artificial Sequence
  Description of Artificial Sequence: Synthetic oligonucleotide
  Antisense strand to SEQ ID NO: 2393188
accucuggcucaaaguaac

SEQ ID NO: 2393190 - RNA, 19 nt, Artificial Sequence
  Description of Artificial Sequence: Synthetic oligonucleotide
  Sense strand starting at position 3865 of SEQ ID NO: 1886193
cuuugagccagagguagau

SEQ ID NO: 2393191 - RNA, 19 nt, Artificial Sequence
  Description of Artificial Sequence: Synthetic oligonucleotide
  Antisense strand to SEQ ID NO: 2393190
aucuaccucuggcucaaag

SEQ ID NO: 2393192 - RNA, 19 nt, Artificial Sequence
  Description of Artificial Sequence: Synthetic oligonucleotide
  Sense strand starting at position 69 of SEQ ID NO: 1886194
caaugaauuccguagguug

SEQ ID NO: 2393193 - RNA, 19 nt, Artificial Sequence
  Description of Artificial Sequence: Synthetic oligonucleotide
  Antisense strand to SEQ ID NO: 2393192
caaccuacggaauucauug

SEQ ID NO: 2393194 - RNA, 19 nt, Artificial Sequence
  Description of Artificial Sequence: Synthetic oligonucleotide
  Sense strand starting at position 92 of SEQ ID NO: 1886194
gugaacuuuccugaagcac

SEQ ID NO: 2393195 - RNA, 19 nt, Artificial Sequence
  Description of Artificial Sequence: Synthetic oligonucleotide
  Antisense strand to SEQ ID NO: 2393194
gugcuucaggaaaguucac

SEQ ID NO: 2393196 - RNA, 19 nt, Artificial Sequence
  Description of Artificial Sequence: Synthetic oligonucleotide
  Sense strand starting at position 631 of SEQ ID NO: 1886194
cugggagacucugucuuaa

SEQ ID NO: 2393197 - RNA, 19 nt, Artificial Sequence
  Description of Artificial Sequence: Synthetic oligonucleotide
  Antisense strand to SEQ ID NO: 2393196
uuaagacagagucucccag

SEQ ID NO: 2393198 - RNA, 19 nt, Artificial Sequence
  Description of Artificial Sequence: Synthetic oligonucleotide
  Sense strand starting at position 683 of SEQ ID NO: 1886194
acacuagauucuguuuaug

SEQ ID NO: 2393199 - RNA, 19 nt, Artificial Sequence
  Description of Artificial Sequence: Synthetic oligonucleotide
  Antisense strand to SEQ ID NO: 2393198
cauaaacagaaucuagugu

SEQ ID NO: 2393200 - RNA, 19 nt, Artificial Sequence
  Description of Artificial Sequence: Synthetic oligonucleotide
  Sense strand starting at position 686 of SEQ ID NO: 1886194
cuagauucuguuuaugcaa

SEQ ID NO: 2393201 - RNA, 19 nt, Artificial Sequence
  Description of Artificial Sequence: Synthetic oligonucleotide
  Antisense strand to SEQ ID NO: 2393200
uugcauaaacagaaucuag

SEQ ID NO: 2393202 - RNA, 19 nt, Artificial Sequence
  Description of Artificial Sequence: Synthetic oligonucleotide
  Sense strand starting at position 743 of SEQ ID NO: 1886194
gaggccauuguuuagaacu

SEQ ID NO: 2393203 - RNA, 19 nt, Artificial Sequence
  Description of Artificial Sequence: Synthetic oligonucleotide
  Antisense strand to SEQ ID NO: 2393202
aguucuaaacaauggccuc

SEQ ID NO: 2393204 - RNA, 19 nt, Artificial Sequence
  Description of Artificial Sequence: Synthetic oligonucleotide
  Sense strand starting at position 754 of SEQ ID NO: 1886194
uuagaacuucugcacuaga

SEQ ID NO: 2393205 - RNA, 19 nt, Artificial Sequence
  Description of Artificial Sequence: Synthetic oligonucleotide
  Antisense strand to SEQ ID NO: 2393204
ucuagugcagaaguucuaa

SEQ ID NO: 2393206 - RNA, 19 nt, Artificial Sequence
  Description of Artificial Sequence: Synthetic oligonucleotide
  Sense strand starting at position 1098 of SEQ ID NO: 1886194
uguuccacucauugggaca

SEQ ID NO: 2393207 - RNA, 19 nt, Artificial Sequence
  Description of Artificial Sequence: Synthetic oligonucleotide
  Antisense strand to SEQ ID NO: 2393206
ugucccaaugaguggaaca

SEQ ID NO: 2393208 - RNA, 19 nt, Artificial Sequence
  Description of Artificial Sequence: Synthetic oligonucleotide
  Sense strand starting at position 1109 of SEQ ID NO: 1886194
uugggacacucauuccauu

SEQ ID NO: 2393209 - RNA, 19 nt, Artificial Sequence
  Description of Artificial Sequence: Synthetic oligonucleotide
  Antisense strand to SEQ ID NO: 2393208
aauggaaugagugucccaa

SEQ ID NO: 2393210 - RNA, 19 nt, Artificial Sequence
  Description of Artificial Sequence: Synthetic oligonucleotide
  Sense strand starting at position 1308 of SEQ ID NO: 1886194
acauguaaguacucaauac

SEQ ID NO: 2393211 - RNA, 19 nt, Artificial Sequence
  Description of Artificial Sequence: Synthetic oligonucleotide
  Antisense strand to SEQ ID NO: 2393210
guauugaguacuuacaugu

SEQ ID NO: 2393212 - RNA, 19 nt, Artificial Sequence
  Description of Artificial Sequence: Synthetic oligonucleotide
  Sense strand starting at position 1312 of SEQ ID NO: 1886194
guaaguacucaauacuauu

SEQ ID NO: 2393213 - RNA, 19 nt, Artificial Sequence
  Description of Artificial Sequence: Synthetic oligonucleotide
  Antisense strand to SEQ ID NO: 2393212
aauaguauugaguacuuac

SEQ ID NO: 2393214 - RNA, 19 nt, Artificial Sequence
  Description of Artificial Sequence: Synthetic oligonucleotide
  Sense strand starting at position 1521 of SEQ ID NO: 1886194
ucuguuuacggucaauaaa

SEQ ID NO: 2393215 - RNA, 19 nt, Artificial Sequence
  Description of Artificial Sequence: Synthetic oligonucleotide
  Antisense strand to SEQ ID NO: 2393214
uuuauugaccguaaacaga

SEQ ID NO: 2393216 - RNA, 19 nt, Artificial Sequence
  Description of Artificial Sequence: Synthetic oligonucleotide
  Sense strand starting at position 1524 of SEQ ID NO: 1886194
guuuacggucaauaaaucu

SEQ ID NO: 2393217 - RNA, 19 nt, Artificial Sequence
  Description of Artificial Sequence: Synthetic oligonucleotide
  Antisense strand to SEQ ID NO: 2393216
agauuuauugaccguaaac

SEQ ID NO: 2393218 - RNA, 19 nt, Artificial Sequence
  Description of Artificial Sequence: Synthetic oligonucleotide
  Sense strand starting at position 1536 of SEQ ID NO: 1886194
uaaaucuuuccguaaugga

SEQ ID NO: 2393219 - RNA, 19 nt, Artificial Sequence
  Description of Artificial Sequence: Synthetic oligonucleotide
  Antisense strand to SEQ ID NO: 2393218
uccauuacggaaagauuua

SEQ ID NO: 2393220 - RNA, 19 nt, Artificial Sequence
  Description of Artificial Sequence: Synthetic oligonucleotide
  Sense strand starting at position 1543 of SEQ ID NO: 1886194
uuccguaauggaugagaac

SEQ ID NO: 2393221 - RNA, 19 nt, Artificial Sequence
  Description of Artificial Sequence: Synthetic oligonucleotide
  Antisense strand to SEQ ID NO: 2393220
guucucauccauuacggaa

SEQ ID NO: 2393222 - RNA, 19 nt, Artificial Sequence
  Description of Artificial Sequence: Synthetic oligonucleotide
  Sense strand starting at position 1743 of SEQ ID NO: 1886194
auaugaggaguuuggguua

SEQ ID NO: 2393223 - RNA, 19 nt, Artificial Sequence
  Description of Artificial Sequence: Synthetic oligonucleotide
  Antisense strand to SEQ ID NO: 2393222
uaacccaaacuccucauau

SEQ ID NO: 2393224 - RNA, 19 nt, Artificial Sequence
  Description of Artificial Sequence: Synthetic oligonucleotide
  Sense strand starting at position 1748 of SEQ ID NO: 1886194
aggaguuuggguuacggaa

SEQ ID NO: 2393225 - RNA, 19 nt, Artificial Sequence
  Description of Artificial Sequence: Synthetic oligonucleotide
  Antisense strand to SEQ ID NO: 2393224
uuccguaacccaaacuccu

SEQ ID NO: 2393226 - RNA, 19 nt, Artificial Sequence
  Description of Artificial Sequence: Synthetic oligonucleotide
  Sense strand starting at position 2601 of SEQ ID NO: 1886194
ugaugaugucuguaaguga

SEQ ID NO: 2393227 - RNA, 19 nt, Artificial Sequence
  Description of Artificial Sequence: Synthetic oligonucleotide
  Antisense strand to SEQ ID NO: 2393226
ucacuuacagacaucauca

SEQ ID NO: 2393228 - RNA, 19 nt, Artificial Sequence
  Description of Artificial Sequence: Synthetic oligonucleotide
  Sense strand starting at position 2673 of SEQ ID NO: 1886194
uugugaaaggccuaagauu

SEQ ID NO: 2393229 - RNA, 19 nt, Artificial Sequence
  Description of Artificial Sequence: Synthetic oligonucleotide
  Antisense strand to SEQ ID NO: 2393228
aaucuuaggccuuucacaa

SEQ ID NO: 2393230 - RNA, 19 nt, Artificial Sequence
  Description of Artificial Sequence: Synthetic oligonucleotide
  Sense strand starting at position 2681 of SEQ ID NO: 1886194
ggccuaagauuccugauau

SEQ ID NO: 2393231 - RNA, 19 nt, Artificial Sequence
  Description of Artificial Sequence: Synthetic oligonucleotide
  Antisense strand to SEQ ID NO: 2393230
auaucaggaaucuuaggcc

SEQ ID NO: 2393232 - RNA, 19 nt, Artificial Sequence
  Description of Artificial Sequence: Synthetic oligonucleotide
  Sense strand starting at position 2838 of SEQ ID NO: 1886194
guauguaagcaaugagaac

SEQ ID NO: 2393233 - RNA, 19 nt, Artificial Sequence
  Description of Artificial Sequence: Synthetic oligonucleotide
  Antisense strand to SEQ ID NO: 2393232
guucucauugcuuacauac

SEQ ID NO: 2393234 - RNA, 19 nt, Artificial Sequence
  Description of Artificial Sequence: Synthetic oligonucleotide
  Sense strand starting at position 2890 of SEQ ID NO: 1886194
guguccugagaguaacacu

SEQ ID NO: 2393235 - RNA, 19 nt, Artificial Sequence
  Description of Artificial Sequence: Synthetic oligonucleotide
  Antisense strand to SEQ ID NO: 2393234
aguguuacucucaggacac

SEQ ID NO: 2393236 - RNA, 19 nt, Artificial Sequence
  Description of Artificial Sequence: Synthetic oligonucleotide
  Sense strand starting at position 3015 of SEQ ID NO: 1886194
gaggguagauguuuaggga

SEQ ID NO: 2393237 - RNA, 19 nt, Artificial Sequence
  Description of Artificial Sequence: Synthetic oligonucleotide
  Antisense strand to SEQ ID NO: 2393236
ucccuaaacaucuacccuc

SEQ ID NO: 2393238 - RNA, 19 nt, Artificial Sequence
  Description of Artificial Sequence: Synthetic oligonucleotide
  Sense strand starting at position 3030 of SEQ ID NO: 1886194
gggagagauucuuccucac

SEQ ID NO: 2393239 - RNA, 19 nt, Artificial Sequence
  Description of Artificial Sequence: Synthetic oligonucleotide
  Antisense strand to SEQ ID NO: 2393238
gugaggaagaaucucuccc

SEQ ID NO: 2393240 - RNA, 19 nt, Artificial Sequence
  Description of Artificial Sequence: Synthetic oligonucleotide
  Sense strand starting at position 3167 of SEQ ID NO: 1886194
aacugugagcuagagugaa

SEQ ID NO: 2393241 - RNA, 19 nt, Artificial Sequence
  Description of Artificial Sequence: Synthetic oligonucleotide
  Antisense strand to SEQ ID NO: 2393240
uucacucuagcucacaguu

SEQ ID NO: 2393242 - RNA, 19 nt, Artificial Sequence
  Description of Artificial Sequence: Synthetic oligonucleotide
  Sense strand starting at position 3175 of SEQ ID NO: 1886194
gcuagagugaagcagaaau

SEQ ID NO: 2393243 - RNA, 19 nt, Artificial Sequence
  Description of Artificial Sequence: Synthetic oligonucleotide
  Antisense strand to SEQ ID NO: 2393242
auuucugcuucacucuagc

SEQ ID NO: 2393244 - RNA, 19 nt, Artificial Sequence
  Description of Artificial Sequence: Synthetic oligonucleotide
  Sense strand starting at position 3207 of SEQ ID NO: 1886194
cuccaagauggucauaagu

SEQ ID NO: 2393245 - RNA, 19 nt, Artificial Sequence
  Description of Artificial Sequence: Synthetic oligonucleotide
  Antisense strand to SEQ ID NO: 2393244
acuuaugaccaucuuggag

SEQ ID NO: 2393246 - RNA, 19 nt, Artificial Sequence
  Description of Artificial Sequence: Synthetic oligonucleotide
  Sense strand starting at position 3233 of SEQ ID NO: 1886194
gacugaauuggugaguugu

SEQ ID NO: 2393247 - RNA, 19 nt, Artificial Sequence
  Description of Artificial Sequence: Synthetic oligonucleotide
  Antisense strand to SEQ ID NO: 2393246
acaacucaccaauucaguc

SEQ ID NO: 2393248 - RNA, 19 nt, Artificial Sequence
  Description of Artificial Sequence: Synthetic oligonucleotide
  Sense strand starting at position 3258 of SEQ ID NO: 1886194
uuuguaauccacugaagag

SEQ ID NO: 2393249 - RNA, 19 nt, Artificial Sequence
  Description of Artificial Sequence: Synthetic oligonucleotide
  Antisense strand to SEQ ID NO: 2393248
cucuucaguggauuacaaa

SEQ ID NO: 2393250 - RNA, 19 nt, Artificial Sequence
  Description of Artificial Sequence: Synthetic oligonucleotide
  Sense strand starting at position 3310 of SEQ ID NO: 1886194
auagauuucuggcauagag

SEQ ID NO: 2393251 - RNA, 19 nt, Artificial Sequence
  Description of Artificial Sequence: Synthetic oligonucleotide
  Antisense strand to SEQ ID NO: 2393250
cucuaugccagaaaucuau

SEQ ID NO: 2393252 - RNA, 19 nt, Artificial Sequence
  Description of Artificial Sequence: Synthetic oligonucleotide
  Sense strand starting at position 3394 of SEQ ID NO: 1886194
uacggaaugcuagaguuau

SEQ ID NO: 2393253 - RNA, 19 nt, Artificial Sequence
  Description of Artificial Sequence: Synthetic oligonucleotide
  Antisense strand to SEQ ID NO: 2393252
auaacucuagcauuccgua

SEQ ID NO: 2393254 - RNA, 19 nt, Artificial Sequence
  Description of Artificial Sequence: Synthetic oligonucleotide
  Sense strand starting at position 3405 of SEQ ID NO: 1886194
agaguuauggcugacugua

SEQ ID NO: 2393255 - RNA, 19 nt, Artificial Sequence
  Description of Artificial Sequence: Synthetic oligonucleotide
  Antisense strand to SEQ ID NO: 2393254
uacagucagccauaacucu

SEQ ID NO: 2393256 - RNA, 19 nt, Artificial Sequence
  Description of Artificial Sequence: Synthetic oligonucleotide
  Sense strand starting at position 3475 of SEQ ID NO: 1886194
guauaauucccucagguau

SEQ ID NO: 2393257 - RNA, 19 nt, Artificial Sequence
  Description of Artificial Sequence: Synthetic oligonucleotide
  Antisense strand to SEQ ID NO: 2393256
auaccugagggaauuauac

SEQ ID NO: 2393258 - RNA, 19 nt, Artificial Sequence
  Description of Artificial Sequence: Synthetic oligonucleotide
  Sense strand starting at position 3533 of SEQ ID NO: 1886194
ucuugaguccaagaaccuu

SEQ ID NO: 2393259 - RNA, 19 nt, Artificial Sequence
  Description of Artificial Sequence: Synthetic oligonucleotide
  Antisense strand to SEQ ID NO: 2393258
aagguucuuggacucaaga

SEQ ID NO: 2393260 - RNA, 19 nt, Artificial Sequence
  Description of Artificial Sequence: Synthetic oligonucleotide
  Sense strand starting at position 3664 of SEQ ID NO: 1886194
guaugagaacuuugcaaau

SEQ ID NO: 2393261 - RNA, 19 nt, Artificial Sequence
  Description of Artificial Sequence: Synthetic oligonucleotide
  Antisense strand to SEQ ID NO: 2393260
auuugcaaaguucucauac

SEQ ID NO: 2393262 - RNA, 19 nt, Artificial Sequence
  Description of Artificial Sequence: Synthetic oligonucleotide
  Sense strand starting at position 3832 of SEQ ID NO: 1886194
ucagacuauuaagucagua

SEQ ID NO: 2393263 - RNA, 19 nt, Artificial Sequence
  Description of Artificial Sequence: Synthetic oligonucleotide
  Antisense strand to SEQ ID NO: 2393262
uacugacuuaauagucuga

SEQ ID NO: 2393264 - RNA, 19 nt, Artificial Sequence
  Description of Artificial Sequence: Synthetic oligonucleotide
  Sense strand starting at position 3931 of SEQ ID NO: 1886194
uuuauaugaugugcagaaa

SEQ ID NO: 2393265 - RNA, 19 nt, Artificial Sequence
  Description of Artificial Sequence: Synthetic oligonucleotide
  Antisense strand to SEQ ID NO: 2393264
uuucugcacaucauauaaa

SEQ ID NO: 2393266 - RNA, 19 nt, Artificial Sequence
  Description of Artificial Sequence: Synthetic oligonucleotide
  Sense strand starting at position 3932 of SEQ ID NO: 1886194
uuauaugaugugcagaaac

SEQ ID NO: 2393267 - RNA, 19 nt, Artificial Sequence
  Description of Artificial Sequence: Synthetic oligonucleotide
  Antisense strand to SEQ ID NO: 2393266
guuucugcacaucauauaa

SEQ ID NO: 2393268 - RNA, 19 nt, Artificial Sequence
  Description of Artificial Sequence: Synthetic oligonucleotide
  Sense strand starting at position 3934 of SEQ ID NO: 1886194
auaugaugugcagaaacuu

SEQ ID NO: 2393269 - RNA, 19 nt, Artificial Sequence
  Description of Artificial Sequence: Synthetic oligonucleotide
  Antisense strand to SEQ ID NO: 2393268
aaguuucugcacaucauau

SEQ ID NO: 2393270 - RNA, 19 nt, Artificial Sequence
  Description of Artificial Sequence: Synthetic oligonucleotide
  Sense strand starting at position 3954 of SEQ ID NO: 1886194
agaauuuauugagauguca

SEQ ID NO: 2393271 - RNA, 19 nt, Artificial Sequence
  Description of Artificial Sequence: Synthetic oligonucleotide
  Antisense strand to SEQ ID NO: 2393270
ugacaucucaauaaauucu

SEQ ID NO: 2393272 - RNA, 19 nt, Artificial Sequence
  Description of Artificial Sequence: Synthetic oligonucleotide
  Sense strand starting at position 111 of SEQ ID NO: 1886195
cuuugauuaugagccacau

SEQ ID NO: 2393273 - RNA, 19 nt, Artificial Sequence
  Description of Artificial Sequence: Synthetic oligonucleotide
  Antisense strand to SEQ ID NO: 2393272
auguggcucauaaucaaag

SEQ ID NO: 2393274 - RNA, 19 nt, Artificial Sequence
  Description of Artificial Sequence: Synthetic oligonucleotide
  Sense strand starting at position 214 of SEQ ID NO: 1886195
ggagccauugguugaugaa

SEQ ID NO: 2393275 - RNA, 19 nt, Artificial Sequence
  Description of Artificial Sequence: Synthetic oligonucleotide
  Antisense strand to SEQ ID NO: 2393274
uucaucaaccaauggcucc

SEQ ID NO: 2393276 - RNA, 19 nt, Artificial Sequence
  Description of Artificial Sequence: Synthetic oligonucleotide
  Sense strand starting at position 215 of SEQ ID NO: 1886195
gagccauugguugaugaac

SEQ ID NO: 2393277 - RNA, 19 nt, Artificial Sequence
  Description of Artificial Sequence: Synthetic oligonucleotide
  Antisense strand to SEQ ID NO: 2393276
guucaucaaccaauggcuc

SEQ ID NO: 2393278 - RNA, 19 nt, Artificial Sequence
  Description of Artificial Sequence: Synthetic oligonucleotide
  Sense strand starting at position 527 of SEQ ID NO: 1886195
cugagaaccugucuggaag

SEQ ID NO: 2393279 - RNA, 19 nt, Artificial Sequence
  Description of Artificial Sequence: Synthetic oligonucleotide
  Antisense strand to SEQ ID NO: 2393278
cuuccagacagguucucag

SEQ ID NO: 2393280 - RNA, 19 nt, Artificial Sequence
  Description of Artificial Sequence: Synthetic oligonucleotide
  Sense strand starting at position 715 of SEQ ID NO: 1886195
ucccuaucucuguagagag

SEQ ID NO: 2393281 - RNA, 19 nt, Artificial Sequence
  Description of Artificial Sequence: Synthetic oligonucleotide
  Antisense strand to SEQ ID NO: 2393280
cucucuacagagauaggga

SEQ ID NO: 2393282 - RNA, 19 nt, Artificial Sequence
  Description of Artificial Sequence: Synthetic oligonucleotide
  Sense strand starting at position 743 of SEQ ID NO: 1886195
gcucguggucuguuuguga

SEQ ID NO: 2393283 - RNA, 19 nt, Artificial Sequence
  Description of Artificial Sequence: Synthetic oligonucleotide
  Antisense strand to SEQ ID NO: 2393282
ucacaaacagaccacgagc

SEQ ID NO: 2393284 - RNA, 19 nt, Artificial Sequence
  Description of Artificial Sequence: Synthetic oligonucleotide
  Sense strand starting at position 1124 of SEQ ID NO: 1886195
agaguacacuuacuuuaag

SEQ ID NO: 2393285 - RNA, 19 nt, Artificial Sequence
  Description of Artificial Sequence: Synthetic oligonucleotide
  Antisense strand to SEQ ID NO: 2393284
cuuaaaguaaguguacucu

SEQ ID NO: 2393286 - RNA, 19 nt, Artificial Sequence
  Description of Artificial Sequence: Synthetic oligonucleotide
  Sense strand starting at position 1199 of SEQ ID NO: 1886195
cagaguacuuggucugaaa

SEQ ID NO: 2393287 - RNA, 19 nt, Artificial Sequence
  Description of Artificial Sequence: Synthetic oligonucleotide
  Antisense strand to SEQ ID NO: 2393286
uuucagaccaaguacucug

SEQ ID NO: 2393288 - RNA, 19 nt, Artificial Sequence
  Description of Artificial Sequence: Synthetic oligonucleotide
  Sense strand starting at position 1254 of SEQ ID NO: 1886195
gggacaucaugaguagcaa

SEQ ID NO: 2393289 - RNA, 19 nt, Artificial Sequence
  Description of Artificial Sequence: Synthetic oligonucleotide
  Antisense strand to SEQ ID NO: 2393288
uugcuacucaugauguccc

SEQ ID NO: 2393290 - RNA, 19 nt, Artificial Sequence
  Description of Artificial Sequence: Synthetic oligonucleotide
  Sense strand starting at position 1342 of SEQ ID NO: 1886195
uuaccaaagucauuugugu

SEQ ID NO: 2393291 - RNA, 19 nt, Artificial Sequence
  Description of Artificial Sequence: Synthetic oligonucleotide
  Antisense strand to SEQ ID NO: 2393290
acacaaaugacuuugguaa

SEQ ID NO: 2393292 - RNA, 19 nt, Artificial Sequence
  Description of Artificial Sequence: Synthetic oligonucleotide
  Sense strand starting at position 1427 of SEQ ID NO: 1886195
aagugucaucaugauugua

SEQ ID NO: 2393293 - RNA, 19 nt, Artificial Sequence
  Description of Artificial Sequence: Synthetic oligonucleotide
  Antisense strand to SEQ ID NO: 2393292
uacaaucaugaugacacuu

SEQ ID NO: 2393294 - RNA, 19 nt, Artificial Sequence
  Description of Artificial Sequence: Synthetic oligonucleotide
  Sense strand starting at position 1563 of SEQ ID NO: 1886195
agaucuaguuaccuuaaga

SEQ ID NO: 2393295 - RNA, 19 nt, Artificial Sequence
  Description of Artificial Sequence: Synthetic oligonucleotide
  Antisense strand to SEQ ID NO: 2393294
ucuuaagguaacuagaucu

SEQ ID NO: 2393296 - RNA, 19 nt, Artificial Sequence
  Description of Artificial Sequence: Synthetic oligonucleotide
  Sense strand starting at position 1994 of SEQ ID NO: 1886195
ggcagaauacuauguucua

SEQ ID NO: 2393297 - RNA, 19 nt, Artificial Sequence
  Description of Artificial Sequence: Synthetic oligonucleotide
  Antisense strand to SEQ ID NO: 2393296
uagaacauaguauucugcc

SEQ ID NO: 2393298 - RNA, 19 nt, Artificial Sequence
  Description of Artificial Sequence: Synthetic oligonucleotide
  Sense strand starting at position 1995 of SEQ ID NO: 1886195
gcagaauacuauguucuag

SEQ ID NO: 2393299 - RNA, 19 nt, Artificial Sequence
  Description of Artificial Sequence: Synthetic oligonucleotide
  Antisense strand to SEQ ID NO: 2393298
cuagaacauaguauucugc

SEQ ID NO: 2393300 - RNA, 19 nt, Artificial Sequence
  Description of Artificial Sequence: Synthetic oligonucleotide
  Sense strand starting at position 2007 of SEQ ID NO: 1886195
guucuagaauauuccggaa

SEQ ID NO: 2393301 - RNA, 19 nt, Artificial Sequence
  Description of Artificial Sequence: Synthetic oligonucleotide
  Antisense strand to SEQ ID NO: 2393300
uuccggaauauucuagaac

SEQ ID NO: 2393302 - RNA, 19 nt, Artificial Sequence
  Description of Artificial Sequence: Synthetic oligonucleotide
  Sense strand starting at position 2071 of SEQ ID NO: 1886195
gguuucuguguguuugcau

SEQ ID NO: 2393303 - RNA, 19 nt, Artificial Sequence
  Description of Artificial Sequence: Synthetic oligonucleotide
  Antisense strand to SEQ ID NO: 2393302
augcaaacacacagaaacc

SEQ ID NO: 2393304 - RNA, 19 nt, Artificial Sequence
  Description of Artificial Sequence: Synthetic oligonucleotide
  Sense strand starting at position 2128 of SEQ ID NO: 1886195
gucuuccugguuuaaauau

SEQ ID NO: 2393305 - RNA, 19 nt, Artificial Sequence
  Description of Artificial Sequence: Synthetic oligonucleotide
  Antisense strand to SEQ ID NO: 2393304
auauuuaaaccaggaagac

SEQ ID NO: 2393306 - RNA, 19 nt, Artificial Sequence
  Description of Artificial Sequence: Synthetic oligonucleotide
  Sense strand starting at position 2152 of SEQ ID NO: 1886195
agggcacucccauagguuu

SEQ ID NO: 2393307 - RNA, 19 nt, Artificial Sequence
  Description of Artificial Sequence: Synthetic oligonucleotide
  Antisense strand to SEQ ID NO: 2393306
aaaccuaugggagugcccu

SEQ ID NO: 2393308 - RNA, 19 nt, Artificial Sequence
  Description of Artificial Sequence: Synthetic oligonucleotide
  Sense strand starting at position 2200 of SEQ ID NO: 1886195
guaugcuccaaggaguaaa

SEQ ID NO: 2393309 - RNA, 19 nt, Artificial Sequence
  Description of Artificial Sequence: Synthetic oligonucleotide
  Antisense strand to SEQ ID NO: 2393308
uuuacuccuuggagcauac

SEQ ID NO: 2393310 - RNA, 19 nt, Artificial Sequence
  Description of Artificial Sequence: Synthetic oligonucleotide
  Sense strand starting at position 2286 of SEQ ID NO: 1886195
guacuuccaguuuaauaua

SEQ ID NO: 2393311 - RNA, 19 nt, Artificial Sequence
  Description of Artificial Sequence: Synthetic oligonucleotide
  Antisense strand to SEQ ID NO: 2393310
uauauuaaacuggaaguac

SEQ ID NO: 2393312 - RNA, 19 nt, Artificial Sequence
  Description of Artificial Sequence: Synthetic oligonucleotide
  Sense strand starting at position 2399 of SEQ ID NO: 1886195
uugguacuucuauggaauc

SEQ ID NO: 2393313 - RNA, 19 nt, Artificial Sequence
  Description of Artificial Sequence: Synthetic oligonucleotide
  Antisense strand to SEQ ID NO: 2393312
gauuccauagaaguaccaa

SEQ ID NO: 2393314 - RNA, 19 nt, Artificial Sequence
  Description of Artificial Sequence: Synthetic oligonucleotide
  Sense strand starting at position 2412 of SEQ ID NO: 1886195
ggaaucauuuacuaugaag

SEQ ID NO: 2393315 - RNA, 19 nt, Artificial Sequence
  Description of Artificial Sequence: Synthetic oligonucleotide
  Antisense strand to SEQ ID NO: 2393314
cuucauaguaaaugauucc

SEQ ID NO: 2393316 - RNA, 19 nt, Artificial Sequence
  Description of Artificial Sequence: Synthetic oligonucleotide
  Sense strand starting at position 2545 of SEQ ID NO: 1886195
ucacuuucucuagggaaau

SEQ ID NO: 2393317 - RNA, 19 nt, Artificial Sequence
  Description of Artificial Sequence: Synthetic oligonucleotide
  Antisense strand to SEQ ID NO: 2393316
auuucccuagagaaaguga

SEQ ID NO: 2393318 - RNA, 19 nt, Artificial Sequence
  Description of Artificial Sequence: Synthetic oligonucleotide
  Sense strand starting at position 2576 of SEQ ID NO: 1886195
ucagaauggcuagguuaaa

SEQ ID NO: 2393319 - RNA, 19 nt, Artificial Sequence
  Description of Artificial Sequence: Synthetic oligonucleotide
  Antisense strand to SEQ ID NO: 2393318
uuuaaccuagccauucuga

SEQ ID NO: 2393320 - RNA, 19 nt, Artificial Sequence
  Description of Artificial Sequence: Synthetic oligonucleotide
  Sense strand starting at position 2616 of SEQ ID NO: 1886195
gucguaucuccauaauuaa

SEQ ID NO: 2393321 - RNA, 19 nt, Artificial Sequence
  Description of Artificial Sequence: Synthetic oligonucleotide
  Antisense strand to SEQ ID NO: 2393320
uuaauuauggagauacgac

SEQ ID NO: 2393322 - RNA, 19 nt, Artificial Sequence
  Description of Artificial Sequence: Synthetic oligonucleotide
  Sense strand starting at position 2763 of SEQ ID NO: 1886195
auucuucuuguauagguua

SEQ ID NO: 2393323 - RNA, 19 nt, Artificial Sequence
  Description of Artificial Sequence: Synthetic oligonucleotide
  Antisense strand to SEQ ID NO: 2393322
uaaccuauacaagaagaau

SEQ ID NO: 2393324 - RNA, 19 nt, Artificial Sequence
  Description of Artificial Sequence: Synthetic oligonucleotide
  Sense strand starting at position 2895 of SEQ ID NO: 1886195
uggcaacuccaauauaagu

SEQ ID NO: 2393325 - RNA, 19 nt, Artificial Sequence
  Description of Artificial Sequence: Synthetic oligonucleotide
  Antisense strand to SEQ ID NO: 2393324
acuuauauuggaguugcca

SEQ ID NO: 2393326 - RNA, 19 nt, Artificial Sequence
  Description of Artificial Sequence: Synthetic oligonucleotide
  Sense strand starting at position 2917 of SEQ ID NO: 1886195
gcucccaguuauuuauauu

SEQ ID NO: 2393327 - RNA, 19 nt, Artificial Sequence
  Description of Artificial Sequence: Synthetic oligonucleotide
  Antisense strand to SEQ ID NO: 2393326
aauauaaauaacugggagc

SEQ ID NO: 2393328 - RNA, 19 nt, Artificial Sequence
  Description of Artificial Sequence: Synthetic oligonucleotide
  Sense strand starting at position 2997 of SEQ ID NO: 1886195
augcuuccuccuggagaca

SEQ ID NO: 2393329 - RNA, 19 nt, Artificial Sequence
  Description of Artificial Sequence: Synthetic oligonucleotide
  Antisense strand to SEQ ID NO: 2393328
ugucuccaggaggaagcau

SEQ ID NO: 2393330 - RNA, 19 nt, Artificial Sequence
  Description of Artificial Sequence: Synthetic oligonucleotide
  Sense strand starting at position 3102 of SEQ ID NO: 1886195
caauguaaucgucaugaaa

SEQ ID NO: 2393331 - RNA, 19 nt, Artificial Sequence
  Description of Artificial Sequence: Synthetic oligonucleotide
  Antisense strand to SEQ ID NO: 2393330
uuucaugacgauuacauug

SEQ ID NO: 2393332 - RNA, 19 nt, Artificial Sequence
  Description of Artificial Sequence: Synthetic oligonucleotide
  Sense strand starting at position 3126 of SEQ ID NO: 1886195
ugaugagaacacugcauca

SEQ ID NO: 2393333 - RNA, 19 nt, Artificial Sequence
  Description of Artificial Sequence: Synthetic oligonucleotide
  Antisense strand to SEQ ID NO: 2393332
ugaugcaguguucucauca

SEQ ID NO: 2393334 - RNA, 19 nt, Artificial Sequence
  Description of Artificial Sequence: Synthetic oligonucleotide
  Sense strand starting at position 3171 of SEQ ID NO: 1886195
agucaaagcagugguauuu

SEQ ID NO: 2393335 - RNA, 19 nt, Artificial Sequence
  Description of Artificial Sequence: Synthetic oligonucleotide
  Antisense strand to SEQ ID NO: 2393334
aaauaccacugcuuugacu

SEQ ID NO: 2393336 - RNA, 19 nt, Artificial Sequence
  Description of Artificial Sequence: Synthetic oligonucleotide
  Sense strand starting at position 3226 of SEQ ID NO: 1886195
acacucagcgaauauagau

SEQ ID NO: 2393337 - RNA, 19 nt, Artificial Sequence
  Description of Artificial Sequence: Synthetic oligonucleotide
  Antisense strand to SEQ ID NO: 2393336
aucuauauucgcugagugu

SEQ ID NO: 2393338 - RNA, 19 nt, Artificial Sequence
  Description of Artificial Sequence: Synthetic oligonucleotide
  Sense strand starting at position 3342 of SEQ ID NO: 1886195
agcacuauuuccuaaggaa

SEQ ID NO: 2393339 - RNA, 19 nt, Artificial Sequence
  Description of Artificial Sequence: Synthetic oligonucleotide
  Antisense strand to SEQ ID NO: 2393338
uuccuuaggaaauagugcu

SEQ ID NO: 2393340 - RNA, 19 nt, Artificial Sequence
  Description of Artificial Sequence: Synthetic oligonucleotide
  Sense strand starting at position 3385 of SEQ ID NO: 1886195
cugaaagugcacuaaugua

SEQ ID NO: 2393341 - RNA, 19 nt, Artificial Sequence
  Description of Artificial Sequence: Synthetic oligonucleotide
  Antisense strand to SEQ ID NO: 2393340
uacauuagugcacuuucag

SEQ ID NO: 2393342 - RNA, 19 nt, Artificial Sequence
  Description of Artificial Sequence: Synthetic oligonucleotide
  Sense strand starting at position 3549 of SEQ ID NO: 1886195
gugagacagucuucaagga

SEQ ID NO: 2393343 - RNA, 19 nt, Artificial Sequence
  Description of Artificial Sequence: Synthetic oligonucleotide
  Antisense strand to SEQ ID NO: 2393342
uccuugaagacugucucac

SEQ ID NO: 2393344 - RNA, 19 nt, Artificial Sequence
  Description of Artificial Sequence: Synthetic oligonucleotide
  Sense strand starting at position 3726 of SEQ ID NO: 1886195
cuaaauaaguccuuuggaa

SEQ ID NO: 2393345 - RNA, 19 nt, Artificial Sequence
  Description of Artificial Sequence: Synthetic oligonucleotide
  Antisense strand to SEQ ID NO: 2393344
uuccaaaggacuuauuuag

SEQ ID NO: 2393346 - RNA, 19 nt, Artificial Sequence
  Description of Artificial Sequence: Synthetic oligonucleotide
  Sense strand starting at position 3754 of SEQ ID NO: 1886195
gggagcaagugugugauuu

SEQ ID NO: 2393347 - RNA, 19 nt, Artificial Sequence
  Description of Artificial Sequence: Synthetic oligonucleotide
  Antisense strand to SEQ ID NO: 2393346
aaaucacacacuugcuccc

SEQ ID NO: 2393348 - RNA, 19 nt, Artificial Sequence
  Description of Artificial Sequence: Synthetic oligonucleotide
  Sense strand starting at position 3810 of SEQ ID NO: 1886195
aaaugucugccguggauuu

SEQ ID NO: 2393349 - RNA, 19 nt, Artificial Sequence
  Description of Artificial Sequence: Synthetic oligonucleotide
  Antisense strand to SEQ ID NO: 2393348
aaauccacggcagacauuu

SEQ ID NO: 2393350 - RNA, 19 nt, Artificial Sequence
  Description of Artificial Sequence: Synthetic oligonucleotide
  Sense strand starting at position 3869 of SEQ ID NO: 1886195
aaguaauaggucugaugug

SEQ ID NO: 2393351 - RNA, 19 nt, Artificial Sequence
  Description of Artificial Sequence: Synthetic oligonucleotide
  Antisense strand to SEQ ID NO: 2393350
cacaucagaccuauuacuu

SEQ ID NO: 2393352 - RNA, 19 nt, Artificial Sequence
  Description of Artificial Sequence: Synthetic oligonucleotide
  Sense strand starting at position 48 of SEQ ID NO: 1886196
agucucuuacaguauuaca

SEQ ID NO: 2393353 - RNA, 19 nt, Artificial Sequence
  Description of Artificial Sequence: Synthetic oligonucleotide
  Antisense strand to SEQ ID NO: 2393352
uguaauacuguaagagacu

SEQ ID NO: 2393354 - RNA, 19 nt, Artificial Sequence
  Description of Artificial Sequence: Synthetic oligonucleotide
  Sense strand starting at position 127 of SEQ ID NO: 1886196
acuugaagucuguguuuac

SEQ ID NO: 2393355 - RNA, 19 nt, Artificial Sequence
  Description of Artificial Sequence: Synthetic oligonucleotide
  Antisense strand to SEQ ID NO: 2393354
guaaacacagacuucaagu

SEQ ID NO: 2393356 - RNA, 19 nt, Artificial Sequence
  Description of Artificial Sequence: Synthetic oligonucleotide
  Sense strand starting at position 128 of SEQ ID NO: 1886196
cuugaagucuguguuuaca

SEQ ID NO: 2393357 - RNA, 19 nt, Artificial Sequence
  Description of Artificial Sequence: Synthetic oligonucleotide
  Antisense strand to SEQ ID NO: 2393356
uguaaacacagacuucaag

SEQ ID NO: 2393358 - RNA, 19 nt, Artificial Sequence
  Description of Artificial Sequence: Synthetic oligonucleotide
  Sense strand starting at position 131 of SEQ ID NO: 1886196
gaagucuguguuuacacca

SEQ ID NO: 2393359 - RNA, 19 nt, Artificial Sequence
  Description of Artificial Sequence: Synthetic oligonucleotide
  Antisense strand to SEQ ID NO: 2393358
ugguguaaacacagacuuc

SEQ ID NO: 2393360 - RNA, 19 nt, Artificial Sequence
  Description of Artificial Sequence: Synthetic oligonucleotide
  Sense strand starting at position 136 of SEQ ID NO: 1886196
cuguguuuacaccaaagaa

SEQ ID NO: 2393361 - RNA, 19 nt, Artificial Sequence
  Description of Artificial Sequence: Synthetic oligonucleotide
  Antisense strand to SEQ ID NO: 2393360
uucuuugguguaaacacag

SEQ ID NO: 2393362 - RNA, 19 nt, Artificial Sequence
  Description of Artificial Sequence: Synthetic oligonucleotide
  Sense strand starting at position 233 of SEQ ID NO: 1886196
agacuuaacugguuccaga

SEQ ID NO: 2393363 - RNA, 19 nt, Artificial Sequence
  Description of Artificial Sequence: Synthetic oligonucleotide
  Antisense strand to SEQ ID NO: 2393362
ucuggaaccaguuaagucu

SEQ ID NO: 2393364 - RNA, 19 nt, Artificial Sequence
  Description of Artificial Sequence: Synthetic oligonucleotide
  Sense strand starting at position 236 of SEQ ID NO: 1886196
cuuaacugguuccagaaga

SEQ ID NO: 2393365 - RNA, 19 nt, Artificial Sequence
  Description of Artificial Sequence: Synthetic oligonucleotide
  Antisense strand to SEQ ID NO: 2393364
ucuucuggaaccaguuaag

SEQ ID NO: 2393366 - RNA, 19 nt, Artificial Sequence
  Description of Artificial Sequence: Synthetic oligonucleotide
  Sense strand starting at position 308 of SEQ ID NO: 1886196
uauggaauguauggauuaa

SEQ ID NO: 2393367 - RNA, 19 nt, Artificial Sequence
  Description of Artificial Sequence: Synthetic oligonucleotide
  Antisense strand to SEQ ID NO: 2393366
uuaauccauacauuccaua

SEQ ID NO: 2393368 - RNA, 19 nt, Artificial Sequence
  Description of Artificial Sequence: Synthetic oligonucleotide
  Sense strand starting at position 321 of SEQ ID NO: 1886196
gauuaaaggucucagauuc

SEQ ID NO: 2393369 - RNA, 19 nt, Artificial Sequence
  Description of Artificial Sequence: Synthetic oligonucleotide
  Antisense strand to SEQ ID NO: 2393368
gaaucugagaccuuuaauc

SEQ ID NO: 2393370 - RNA, 19 nt, Artificial Sequence
  Description of Artificial Sequence: Synthetic oligonucleotide
  Sense strand starting at position 373 of SEQ ID NO: 1886196
gcuuuaucauuugaggauu

SEQ ID NO: 2393371 - RNA, 19 nt, Artificial Sequence
  Description of Artificial Sequence: Synthetic oligonucleotide
  Antisense strand to SEQ ID NO: 2393370
aauccucaaaugauaaagc

SEQ ID NO: 2393372 - RNA, 19 nt, Artificial Sequence
  Description of Artificial Sequence: Synthetic oligonucleotide
  Sense strand starting at position 411 of SEQ ID NO: 1886196
cagaaaguuuaccucagga

SEQ ID NO: 2393373 - RNA, 19 nt, Artificial Sequence
  Description of Artificial Sequence: Synthetic oligonucleotide
  Antisense strand to SEQ ID NO: 2393372
uccugagguaaacuuucug

SEQ ID NO: 2393374 - RNA, 19 nt, Artificial Sequence
  Description of Artificial Sequence: Synthetic oligonucleotide
  Sense strand starting at position 509 of SEQ ID NO: 1886196
ucaucagaugcgugacaua

SEQ ID NO: 2393375 - RNA, 19 nt, Artificial Sequence
  Description of Artificial Sequence: Synthetic oligonucleotide
  Antisense strand to SEQ ID NO: 2393374
uaugucacgcaucugauga

SEQ ID NO: 2393376 - RNA, 19 nt, Artificial Sequence
  Description of Artificial Sequence: Synthetic oligonucleotide
  Sense strand starting at position 518 of SEQ ID NO: 1886196
gcgugacauaacuacaaag

SEQ ID NO: 2393377 - RNA, 19 nt, Artificial Sequence
  Description of Artificial Sequence: Synthetic oligonucleotide
  Antisense strand to SEQ ID NO: 2393376
cuuuguaguuaugucacgc

SEQ ID NO: 2393378 - RNA, 19 nt, Artificial Sequence
  Description of Artificial Sequence: Synthetic oligonucleotide
  Sense strand starting at position 589 of SEQ ID NO: 1886196
ugagcacaugugcauauau

SEQ ID NO: 2393379 - RNA, 19 nt, Artificial Sequence
  Description of Artificial Sequence: Synthetic oligonucleotide
  Antisense strand to SEQ ID NO: 2393378
auauaugcacaugugcuca

SEQ ID NO: 2393380 - RNA, 19 nt, Artificial Sequence
  Description of Artificial Sequence: Synthetic oligonucleotide
  Sense strand starting at position 591 of SEQ ID NO: 1886196
agcacaugugcauauauaa

SEQ ID NO: 2393381 - RNA, 19 nt, Artificial Sequence
  Description of Artificial Sequence: Synthetic oligonucleotide
  Antisense strand to SEQ ID NO: 2393380
uuauauaugcacaugugcu

SEQ ID NO: 2393382 - RNA, 19 nt, Artificial Sequence
  Description of Artificial Sequence: Synthetic oligonucleotide
  Sense strand starting at position 709 of SEQ ID NO: 1886196
cuugguuucucacucucua

SEQ ID NO: 2393383 - RNA, 19 nt, Artificial Sequence
  Description of Artificial Sequence: Synthetic oligonucleotide
  Antisense strand to SEQ ID NO: 2393382
uagagagugagaaaccaag

SEQ ID NO: 2393384 - RNA, 19 nt, Artificial Sequence
  Description of Artificial Sequence: Synthetic oligonucleotide
  Sense strand starting at position 845 of SEQ ID NO: 1886196
ggcaauuaauacguugacu

SEQ ID NO: 2393385 - RNA, 19 nt, Artificial Sequence
  Description of Artificial Sequence: Synthetic oligonucleotide
  Antisense strand to SEQ ID NO: 2393384
agucaacguauuaauugcc

SEQ ID NO: 2393386 - RNA, 19 nt, Artificial Sequence
  Description of Artificial Sequence: Synthetic oligonucleotide
  Sense strand starting at position 880 of SEQ ID NO: 1886196
aggccauaugccuauaaau

SEQ ID NO: 2393387 - RNA, 19 nt, Artificial Sequence
  Description of Artificial Sequence: Synthetic oligonucleotide
  Antisense strand to SEQ ID NO: 2393386
auuuauaggcauauggccu

SEQ ID NO: 2393388 - RNA, 19 nt, Artificial Sequence
  Description of Artificial Sequence: Synthetic oligonucleotide
  Sense strand starting at position 889 of SEQ ID NO: 1886196
gccuauaaaucucucgaac

SEQ ID NO: 2393389 - RNA, 19 nt, Artificial Sequence
  Description of Artificial Sequence: Synthetic oligonucleotide
  Antisense strand to SEQ ID NO: 2393388
guucgagagauuuauaggc

SEQ ID NO: 2393390 - RNA, 19 nt, Artificial Sequence
  Description of Artificial Sequence: Synthetic oligonucleotide
  Sense strand starting at position 915 of SEQ ID NO: 1886196
gcaacugugaaguaagcau

SEQ ID NO: 2393391 - RNA, 19 nt, Artificial Sequence
  Description of Artificial Sequence: Synthetic oligonucleotide
  Antisense strand to SEQ ID NO: 2393390
augcuuacuucacaguugc

SEQ ID NO: 2393392 - RNA, 19 nt, Artificial Sequence
  Description of Artificial Sequence: Synthetic oligonucleotide
  Sense strand starting at position 919 of SEQ ID NO: 1886196
cugugaaguaagcauuaga

SEQ ID NO: 2393393 - RNA, 19 nt, Artificial Sequence
  Description of Artificial Sequence: Synthetic oligonucleotide
  Antisense strand to SEQ ID NO: 2393392
ucuaaugcuuacuucacag

SEQ ID NO: 2393394 - RNA, 19 nt, Artificial Sequence
  Description of Artificial Sequence: Synthetic oligonucleotide
  Sense strand starting at position 922 of SEQ ID NO: 1886196
ugaaguaagcauuagaagu

SEQ ID NO: 2393395 - RNA, 19 nt, Artificial Sequence
  Description of Artificial Sequence: Synthetic oligonucleotide
  Antisense strand to SEQ ID NO: 2393394
acuucuaaugcuuacuuca

SEQ ID NO: 2393396 - RNA, 19 nt, Artificial Sequence
  Description of Artificial Sequence: Synthetic oligonucleotide
  Sense strand starting at position 1413 of SEQ ID NO: 1886196
ggagucucaggcuaacgaa

SEQ ID NO: 2393397 - RNA, 19 nt, Artificial Sequence
  Description of Artificial Sequence: Synthetic oligonucleotide
  Antisense strand to SEQ ID NO: 2393396
uucguuagccugagacucc

SEQ ID NO: 2393398 - RNA, 19 nt, Artificial Sequence
  Description of Artificial Sequence: Synthetic oligonucleotide
  Sense strand starting at position 1445 of SEQ ID NO: 1886196
cgucucuucccgagucgga

SEQ ID NO: 2393399 - RNA, 19 nt, Artificial Sequence
  Description of Artificial Sequence: Synthetic oligonucleotide
  Antisense strand to SEQ ID NO: 2393398
uccgacucgggaagagacg

SEQ ID NO: 2393400 - RNA, 19 nt, Artificial Sequence
  Description of Artificial Sequence: Synthetic oligonucleotide
  Sense strand starting at position 1524 of SEQ ID NO: 1886196
ccugcuaucuuguugcgga

SEQ ID NO: 2393401 - RNA, 19 nt, Artificial Sequence
  Description of Artificial Sequence: Synthetic oligonucleotide
  Antisense strand to SEQ ID NO: 2393400
uccgcaacaagauagcagg

SEQ ID NO: 2393402 - RNA, 19 nt, Artificial Sequence
  Description of Artificial Sequence: Synthetic oligonucleotide
  Sense strand starting at position 1580 of SEQ ID NO: 1886196
gcgcuuguucguguggaag

SEQ ID NO: 2393403 - RNA, 19 nt, Artificial Sequence
  Description of Artificial Sequence: Synthetic oligonucleotide
  Antisense strand to SEQ ID NO: 2393402
cuuccacacgaacaagcgc

SEQ ID NO: 2393404 - RNA, 19 nt, Artificial Sequence
  Description of Artificial Sequence: Synthetic oligonucleotide
  Sense strand starting at position 1713 of SEQ ID NO: 1886196
gcaaccuucugggaagagu

SEQ ID NO: 2393405 - RNA, 19 nt, Artificial Sequence
  Description of Artificial Sequence: Synthetic oligonucleotide
  Antisense strand to SEQ ID NO: 2393404
acucuucccagaagguugc

SEQ ID NO: 2393406 - RNA, 19 nt, Artificial Sequence
  Description of Artificial Sequence: Synthetic oligonucleotide
  Sense strand starting at position 2008 of SEQ ID NO: 1886196
acaggcgaagccuguuaaa

SEQ ID NO: 2393407 - RNA, 19 nt, Artificial Sequence
  Description of Artificial Sequence: Synthetic oligonucleotide
  Antisense strand to SEQ ID NO: 2393406
uuuaacaggcuucgccugu

SEQ ID NO: 2393408 - RNA, 19 nt, Artificial Sequence
  Description of Artificial Sequence: Synthetic oligonucleotide
  Sense strand starting at position 2251 of SEQ ID NO: 1886196
gugcgaugugcucuagcgu

SEQ ID NO: 2393409 - RNA, 19 nt, Artificial Sequence
  Description of Artificial Sequence: Synthetic oligonucleotide
  Antisense strand to SEQ ID NO: 2393408
acgcuagagcacaucgcac

SEQ ID NO: 2393410 - RNA, 19 nt, Artificial Sequence
  Description of Artificial Sequence: Synthetic oligonucleotide
  Sense strand starting at position 2412 of SEQ ID NO: 1886196
gccggagacuugucaggua

SEQ ID NO: 2393411 - RNA, 19 nt, Artificial Sequence
  Description of Artificial Sequence: Synthetic oligonucleotide
  Antisense strand to SEQ ID NO: 2393410
uaccugacaagucuccggc

SEQ ID NO: 2393412 - RNA, 19 nt, Artificial Sequence
  Description of Artificial Sequence: Synthetic oligonucleotide
  Sense strand starting at position 2471 of SEQ ID NO: 1886196
cgggccuuugcucaaaugu

SEQ ID NO: 2393413 - RNA, 19 nt, Artificial Sequence
  Description of Artificial Sequence: Synthetic oligonucleotide
  Antisense strand to SEQ ID NO: 2393412
acauuugagcaaaggcccg

SEQ ID NO: 2393414 - RNA, 19 nt, Artificial Sequence
  Description of Artificial Sequence: Synthetic oligonucleotide
  Sense strand starting at position 2480 of SEQ ID NO: 1886196
gcucaaaugucgccuuauc

SEQ ID NO: 2393415 - RNA, 19 nt, Artificial Sequence
  Description of Artificial Sequence: Synthetic oligonucleotide
  Antisense strand to SEQ ID NO: 2393414
gauaaggcgacauuugagc

SEQ ID NO: 2393416 - RNA, 19 nt, Artificial Sequence
  Description of Artificial Sequence: Synthetic oligonucleotide
  Sense strand starting at position 2490 of SEQ ID NO: 1886196
cgccuuaucagagggcuuu

SEQ ID NO: 2393417 - RNA, 19 nt, Artificial Sequence
  Description of Artificial Sequence: Synthetic oligonucleotide
  Antisense strand to SEQ ID NO: 2393416
aaagcccucugauaaggcg

SEQ ID NO: 2393418 - RNA, 19 nt, Artificial Sequence
  Description of Artificial Sequence: Synthetic oligonucleotide
  Sense strand starting at position 2559 of SEQ ID NO: 1886196
cuagcacuugccgugugau

SEQ ID NO: 2393419 - RNA, 19 nt, Artificial Sequence
  Description of Artificial Sequence: Synthetic oligonucleotide
  Antisense strand to SEQ ID NO: 2393418
aucacacggcaagugcuag

SEQ ID NO: 2393420 - RNA, 19 nt, Artificial Sequence
  Description of Artificial Sequence: Synthetic oligonucleotide
  Sense strand starting at position 2600 of SEQ ID NO: 1886196
gggugagcuccaugacagu

SEQ ID NO: 2393421 - RNA, 19 nt, Artificial Sequence
  Description of Artificial Sequence: Synthetic oligonucleotide
  Antisense strand to SEQ ID NO: 2393420
acugucauggagcucaccc

SEQ ID NO: 2393422 - RNA, 19 nt, Artificial Sequence
  Description of Artificial Sequence: Synthetic oligonucleotide
  Sense strand starting at position 2606 of SEQ ID NO: 1886196
gcuccaugacaguaauggu

SEQ ID NO: 2393423 - RNA, 19 nt, Artificial Sequence
  Description of Artificial Sequence: Synthetic oligonucleotide
  Antisense strand to SEQ ID NO: 2393422
accauuacugucauggagc

SEQ ID NO: 2393424 - RNA, 19 nt, Artificial Sequence
  Description of Artificial Sequence: Synthetic oligonucleotide
  Sense strand starting at position 2636 of SEQ ID NO: 1886196
gcuaauucccagugcuuga

SEQ ID NO: 2393425 - RNA, 19 nt, Artificial Sequence
  Description of Artificial Sequence: Synthetic oligonucleotide
  Antisense strand to SEQ ID NO: 2393424
ucaagcacugggaauuagc

SEQ ID NO: 2393426 - RNA, 19 nt, Artificial Sequence
  Description of Artificial Sequence: Synthetic oligonucleotide
  Sense strand starting at position 3089 of SEQ ID NO: 1886196
ggagcaaacuuccagucaa

SEQ ID NO: 2393427 - RNA, 19 nt, Artificial Sequence
  Description of Artificial Sequence: Synthetic oligonucleotide
  Antisense strand to SEQ ID NO: 2393426
uugacuggaaguuugcucc

SEQ ID NO: 2393428 - RNA, 19 nt, Artificial Sequence
  Description of Artificial Sequence: Synthetic oligonucleotide
  Sense strand starting at position 3497 of SEQ ID NO: 1886196
agugaagugacaugguaac

SEQ ID NO: 2393429 - RNA, 19 nt, Artificial Sequence
  Description of Artificial Sequence: Synthetic oligonucleotide
  Antisense strand to SEQ ID NO: 2393428
guuaccaugucacuucacu

SEQ ID NO: 2393430 - RNA, 19 nt, Artificial Sequence
  Description of Artificial Sequence: Synthetic oligonucleotide
  Sense strand starting at position 3530 of SEQ ID NO: 1886196
ucgauuuccugggcucaca

SEQ ID NO: 2393431 - RNA, 19 nt, Artificial Sequence
  Description of Artificial Sequence: Synthetic oligonucleotide
  Antisense strand to SEQ ID NO: 2393430
ugugagcccaggaaaucga

SEQ ID NO: 2393432 - RNA, 19 nt, Artificial Sequence
  Description of Artificial Sequence: Synthetic oligonucleotide
  Sense strand starting at position 40 of SEQ ID NO: 1886197
acuugaagucuguguuuac

SEQ ID NO: 2393433 - RNA, 19 nt, Artificial Sequence
  Description of Artificial Sequence: Synthetic oligonucleotide
  Antisense strand to SEQ ID NO: 2393432
guaaacacagacuucaagu

SEQ ID NO: 2393434 - RNA, 19 nt, Artificial Sequence
  Description of Artificial Sequence: Synthetic oligonucleotide
  Sense strand starting at position 41 of SEQ ID NO: 1886197
cuugaagucuguguuuaca

SEQ ID NO: 2393435 - RNA, 19 nt, Artificial Sequence
  Description of Artificial Sequence: Synthetic oligonucleotide
  Antisense strand to SEQ ID NO: 2393434
uguaaacacagacuucaag

SEQ ID NO: 2393436 - RNA, 19 nt, Artificial Sequence
  Description of Artificial Sequence: Synthetic oligonucleotide
  Sense strand starting at position 44 of SEQ ID NO: 1886197
gaagucuguguuuacacca

SEQ ID NO: 2393437 - RNA, 19 nt, Artificial Sequence
  Description of Artificial Sequence: Synthetic oligonucleotide
  Antisense strand to SEQ ID NO: 2393436
ugguguaaacacagacuuc

SEQ ID NO: 2393438 - RNA, 19 nt, Artificial Sequence
  Description of Artificial Sequence: Synthetic oligonucleotide
  Sense strand starting at position 49 of SEQ ID NO: 1886197
cuguguuuacaccaaagaa

SEQ ID NO: 2393439 - RNA, 19 nt, Artificial Sequence
  Description of Artificial Sequence: Synthetic oligonucleotide
  Antisense strand to SEQ ID NO: 2393438
uucuuugguguaaacacag

SEQ ID NO: 2393440 - RNA, 19 nt, Artificial Sequence
  Description of Artificial Sequence: Synthetic oligonucleotide
  Sense strand starting at position 146 of SEQ ID NO: 1886197
agacuuaacugguuccaga

SEQ ID NO: 2393441 - RNA, 19 nt, Artificial Sequence
  Description of Artificial Sequence: Synthetic oligonucleotide
  Antisense strand to SEQ ID NO: 2393440
ucuggaaccaguuaagucu

SEQ ID NO: 2393442 - RNA, 19 nt, Artificial Sequence
  Description of Artificial Sequence: Synthetic oligonucleotide
  Sense strand starting at position 149 of SEQ ID NO: 1886197
cuuaacugguuccagaaga

SEQ ID NO: 2393443 - RNA, 19 nt, Artificial Sequence
  Description of Artificial Sequence: Synthetic oligonucleotide
  Antisense strand to SEQ ID NO: 2393442
ucuucuggaaccaguuaag

SEQ ID NO: 2393444 - RNA, 19 nt, Artificial Sequence
  Description of Artificial Sequence: Synthetic oligonucleotide
  Sense strand starting at position 221 of SEQ ID NO: 1886197
uauggaauguauggauuaa

SEQ ID NO: 2393445 - RNA, 19 nt, Artificial Sequence
  Description of Artificial Sequence: Synthetic oligonucleotide
  Antisense strand to SEQ ID NO: 2393444
uuaauccauacauuccaua

SEQ ID NO: 2393446 - RNA, 19 nt, Artificial Sequence
  Description of Artificial Sequence: Synthetic oligonucleotide
  Sense strand starting at position 234 of SEQ ID NO: 1886197
gauuaaaggucucagauuc

SEQ ID NO: 2393447 - RNA, 19 nt, Artificial Sequence
  Description of Artificial Sequence: Synthetic oligonucleotide
  Antisense strand to SEQ ID NO: 2393446
gaaucugagaccuuuaauc

SEQ ID NO: 2393448 - RNA, 19 nt, Artificial Sequence
  Description of Artificial Sequence: Synthetic oligonucleotide
  Sense strand starting at position 286 of SEQ ID NO: 1886197
gcuuuaucauuugaggauu

SEQ ID NO: 2393449 - RNA, 19 nt, Artificial Sequence
  Description of Artificial Sequence: Synthetic oligonucleotide
  Antisense strand to SEQ ID NO: 2393448
aauccucaaaugauaaagc

SEQ ID NO: 2393450 - RNA, 19 nt, Artificial Sequence
  Description of Artificial Sequence: Synthetic oligonucleotide
  Sense strand starting at position 324 of SEQ ID NO: 1886197
cagaaaguuuaccucagga

SEQ ID NO: 2393451 - RNA, 19 nt, Artificial Sequence
  Description of Artificial Sequence: Synthetic oligonucleotide
  Antisense strand to SEQ ID NO: 2393450
uccugagguaaacuuucug

SEQ ID NO: 2393452 - RNA, 19 nt, Artificial Sequence
  Description of Artificial Sequence: Synthetic oligonucleotide
  Sense strand starting at position 422 of SEQ ID NO: 1886197
ucaucagaugcgugacaua

SEQ ID NO: 2393453 - RNA, 19 nt, Artificial Sequence
  Description of Artificial Sequence: Synthetic oligonucleotide
  Antisense strand to SEQ ID NO: 2393452
uaugucacgcaucugauga

SEQ ID NO: 2393454 - RNA, 19 nt, Artificial Sequence
  Description of Artificial Sequence: Synthetic oligonucleotide
  Sense strand starting at position 431 of SEQ ID NO: 1886197
gcgugacauaacuacaaag

SEQ ID NO: 2393455 - RNA, 19 nt, Artificial Sequence
  Description of Artificial Sequence: Synthetic oligonucleotide
  Antisense strand to SEQ ID NO: 2393454
cuuuguaguuaugucacgc

SEQ ID NO: 2393456 - RNA, 19 nt, Artificial Sequence
  Description of Artificial Sequence: Synthetic oligonucleotide
  Sense strand starting at position 502 of SEQ ID NO: 1886197
ugagcacaugugcauauau

SEQ ID NO: 2393457 - RNA, 19 nt, Artificial Sequence
  Description of Artificial Sequence: Synthetic oligonucleotide
  Antisense strand to SEQ ID NO: 2393456
auauaugcacaugugcuca

SEQ ID NO: 2393458 - RNA, 19 nt, Artificial Sequence
  Description of Artificial Sequence: Synthetic oligonucleotide
  Sense strand starting at position 504 of SEQ ID NO: 1886197
agcacaugugcauauauaa

SEQ ID NO: 2393459 - RNA, 19 nt, Artificial Sequence
  Description of Artificial Sequence: Synthetic oligonucleotide
  Antisense strand to SEQ ID NO: 2393458
uuauauaugcacaugugcu

SEQ ID NO: 2393460 - RNA, 19 nt, Artificial Sequence
  Description of Artificial Sequence: Synthetic oligonucleotide
  Sense strand starting at position 622 of SEQ ID NO: 1886197
cuugguuucucacucucua

SEQ ID NO: 2393461 - RNA, 19 nt, Artificial Sequence
  Description of Artificial Sequence: Synthetic oligonucleotide
  Antisense strand to SEQ ID NO: 2393460
uagagagugagaaaccaag

SEQ ID NO: 2393462 - RNA, 19 nt, Artificial Sequence
  Description of Artificial Sequence: Synthetic oligonucleotide
  Sense strand starting at position 758 of SEQ ID NO: 1886197
ggcaauuaauacguugacu

SEQ ID NO: 2393463 - RNA, 19 nt, Artificial Sequence
  Description of Artificial Sequence: Synthetic oligonucleotide
  Antisense strand to SEQ ID NO: 2393462
agucaacguauuaauugcc

SEQ ID NO: 2393464 - RNA, 19 nt, Artificial Sequence
  Description of Artificial Sequence: Synthetic oligonucleotide
  Sense strand starting at position 793 of SEQ ID NO: 1886197
aggccauaugccuauaaau

SEQ ID NO: 2393465 - RNA, 19 nt, Artificial Sequence
  Description of Artificial Sequence: Synthetic oligonucleotide
  Antisense strand to SEQ ID NO: 2393464
auuuauaggcauauggccu

SEQ ID NO: 2393466 - RNA, 19 nt, Artificial Sequence
  Description of Artificial Sequence: Synthetic oligonucleotide
  Sense strand starting at position 802 of SEQ ID NO: 1886197
gccuauaaaucucucgaac

SEQ ID NO: 2393467 - RNA, 19 nt, Artificial Sequence
  Description of Artificial Sequence: Synthetic oligonucleotide
  Antisense strand to SEQ ID NO: 2393466
guucgagagauuuauaggc

SEQ ID NO: 2393468 - RNA, 19 nt, Artificial Sequence
  Description of Artificial Sequence: Synthetic oligonucleotide
  Sense strand starting at position 824 of SEQ ID NO: 1886197
aacugcaacugugaaguaa

SEQ ID NO: 2393469 - RNA, 19 nt, Artificial Sequence
  Description of Artificial Sequence: Synthetic oligonucleotide
  Antisense strand to SEQ ID NO: 2393468
uuacuucacaguugcaguu

SEQ ID NO: 2393470 - RNA, 19 nt, Artificial Sequence
  Description of Artificial Sequence: Synthetic oligonucleotide
  Sense strand starting at position 828 of SEQ ID NO: 1886197
gcaacugugaaguaagcau

SEQ ID NO: 2393471 - RNA, 19 nt, Artificial Sequence
  Description of Artificial Sequence: Synthetic oligonucleotide
  Antisense strand to SEQ ID NO: 2393470
augcuuacuucacaguugc

SEQ ID NO: 2393472 - RNA, 19 nt, Artificial Sequence
  Description of Artificial Sequence: Synthetic oligonucleotide
  Sense strand starting at position 832 of SEQ ID NO: 1886197
cugugaaguaagcauuaga

SEQ ID NO: 2393473 - RNA, 19 nt, Artificial Sequence
  Description of Artificial Sequence: Synthetic oligonucleotide
  Antisense strand to SEQ ID NO: 2393472
ucuaaugcuuacuucacag

SEQ ID NO: 2393474 - RNA, 19 nt, Artificial Sequence
  Description of Artificial Sequence: Synthetic oligonucleotide
  Sense strand starting at position 835 of SEQ ID NO: 1886197
ugaaguaagcauuagaagu

SEQ ID NO: 2393475 - RNA, 19 nt, Artificial Sequence
  Description of Artificial Sequence: Synthetic oligonucleotide
  Antisense strand to SEQ ID NO: 2393474
acuucuaaugcuuacuuca

SEQ ID NO: 2393476 - RNA, 19 nt, Artificial Sequence
  Description of Artificial Sequence: Synthetic oligonucleotide
  Sense strand starting at position 1326 of SEQ ID NO: 1886197
ggagucucaggcuaacgaa

SEQ ID NO: 2393477 - RNA, 19 nt, Artificial Sequence
  Description of Artificial Sequence: Synthetic oligonucleotide
  Antisense strand to SEQ ID NO: 2393476
uucguuagccugagacucc

SEQ ID NO: 2393478 - RNA, 19 nt, Artificial Sequence
  Description of Artificial Sequence: Synthetic oligonucleotide
  Sense strand starting at position 1358 of SEQ ID NO: 1886197
cgucucuucccgagucgga

SEQ ID NO: 2393479 - RNA, 19 nt, Artificial Sequence
  Description of Artificial Sequence: Synthetic oligonucleotide
  Antisense strand to SEQ ID NO: 2393478
uccgacucgggaagagacg

SEQ ID NO: 2393480 - RNA, 19 nt, Artificial Sequence
  Description of Artificial Sequence: Synthetic oligonucleotide
  Sense strand starting at position 1437 of SEQ ID NO: 1886197
ccugcuaucuuguugcgga

SEQ ID NO: 2393481 - RNA, 19 nt, Artificial Sequence
  Description of Artificial Sequence: Synthetic oligonucleotide
  Antisense strand to SEQ ID NO: 2393480
uccgcaacaagauagcagg

SEQ ID NO: 2393482 - RNA, 19 nt, Artificial Sequence
  Description of Artificial Sequence: Synthetic oligonucleotide
  Sense strand starting at position 1493 of SEQ ID NO: 1886197
gcgcuuguucguguggaag

SEQ ID NO: 2393483 - RNA, 19 nt, Artificial Sequence
  Description of Artificial Sequence: Synthetic oligonucleotide
  Antisense strand to SEQ ID NO: 2393482
cuuccacacgaacaagcgc

SEQ ID NO: 2393484 - RNA, 19 nt, Artificial Sequence
  Description of Artificial Sequence: Synthetic oligonucleotide
  Sense strand starting at position 1626 of SEQ ID NO: 1886197
gcaaccuucugggaagagu

SEQ ID NO: 2393485 - RNA, 19 nt, Artificial Sequence
  Description of Artificial Sequence: Synthetic oligonucleotide
  Antisense strand to SEQ ID NO: 2393484
acucuucccagaagguugc

SEQ ID NO: 2393486 - RNA, 19 nt, Artificial Sequence
  Description of Artificial Sequence: Synthetic oligonucleotide
  Sense strand starting at position 1921 of SEQ ID NO: 1886197
acaggcgaagccuguuaaa

SEQ ID NO: 2393487 - RNA, 19 nt, Artificial Sequence
  Description of Artificial Sequence: Synthetic oligonucleotide
  Antisense strand to SEQ ID NO: 2393486
uuuaacaggcuucgccugu

SEQ ID NO: 2393488 - RNA, 19 nt, Artificial Sequence
  Description of Artificial Sequence: Synthetic oligonucleotide
  Sense strand starting at position 2164 of SEQ ID NO: 1886197
gugcgaugugcucuagcgu

SEQ ID NO: 2393489 - RNA, 19 nt, Artificial Sequence
  Description of Artificial Sequence: Synthetic oligonucleotide
  Antisense strand to SEQ ID NO: 2393488
acgcuagagcacaucgcac

SEQ ID NO: 2393490 - RNA, 19 nt, Artificial Sequence
  Description of Artificial Sequence: Synthetic oligonucleotide
  Sense strand starting at position 2325 of SEQ ID NO: 1886197
gccggagacuugucaggua

SEQ ID NO: 2393491 - RNA, 19 nt, Artificial Sequence
  Description of Artificial Sequence: Synthetic oligonucleotide
  Antisense strand to SEQ ID NO: 2393490
uaccugacaagucuccggc

SEQ ID NO: 2393492 - RNA, 19 nt, Artificial Sequence
  Description of Artificial Sequence: Synthetic oligonucleotide
  Sense strand starting at position 2384 of SEQ ID NO: 1886197
cgggccuuugcucaaaugu

SEQ ID NO: 2393493 - RNA, 19 nt, Artificial Sequence
  Description of Artificial Sequence: Synthetic oligonucleotide
  Antisense strand to SEQ ID NO: 2393492
acauuugagcaaaggcccg

SEQ ID NO: 2393494 - RNA, 19 nt, Artificial Sequence
  Description of Artificial Sequence: Synthetic oligonucleotide
  Sense strand starting at position 2393 of SEQ ID NO: 1886197
gcucaaaugucgccuuauc

SEQ ID NO: 2393495 - RNA, 19 nt, Artificial Sequence
  Description of Artificial Sequence: Synthetic oligonucleotide
  Antisense strand to SEQ ID NO: 2393494
gauaaggcgacauuugagc

SEQ ID NO: 2393496 - RNA, 19 nt, Artificial Sequence
  Description of Artificial Sequence: Synthetic oligonucleotide
  Sense strand starting at position 2403 of SEQ ID NO: 1886197
cgccuuaucagagggcuuu

SEQ ID NO: 2393497 - RNA, 19 nt, Artificial Sequence
  Description of Artificial Sequence: Synthetic oligonucleotide
  Antisense strand to SEQ ID NO: 2393496
aaagcccucugauaaggcg

SEQ ID NO: 2393498 - RNA, 19 nt, Artificial Sequence
  Description of Artificial Sequence: Synthetic oligonucleotide
  Sense strand starting at position 2472 of SEQ ID NO: 1886197
cuagcacuugccgugugau

SEQ ID NO: 2393499 - RNA, 19 nt, Artificial Sequence
  Description of Artificial Sequence: Synthetic oligonucleotide
  Antisense strand to SEQ ID NO: 2393498
aucacacggcaagugcuag

SEQ ID NO: 2393500 - RNA, 19 nt, Artificial Sequence
  Description of Artificial Sequence: Synthetic oligonucleotide
  Sense strand starting at position 2513 of SEQ ID NO: 1886197
gggugagcuccaugacagu

SEQ ID NO: 2393501 - RNA, 19 nt, Artificial Sequence
  Description of Artificial Sequence: Synthetic oligonucleotide
  Antisense strand to SEQ ID NO: 2393500
acugucauggagcucaccc

SEQ ID NO: 2393502 - RNA, 19 nt, Artificial Sequence
  Description of Artificial Sequence: Synthetic oligonucleotide
  Sense strand starting at position 2519 of SEQ ID NO: 1886197
gcuccaugacaguaauggu

SEQ ID NO: 2393503 - RNA, 19 nt, Artificial Sequence
  Description of Artificial Sequence: Synthetic oligonucleotide
  Antisense strand to SEQ ID NO: 2393502
accauuacugucauggagc

SEQ ID NO: 2393504 - RNA, 19 nt, Artificial Sequence
  Description of Artificial Sequence: Synthetic oligonucleotide
  Sense strand starting at position 2549 of SEQ ID NO: 1886197
gcuaauucccagugcuuga

SEQ ID NO: 2393505 - RNA, 19 nt, Artificial Sequence
  Description of Artificial Sequence: Synthetic oligonucleotide
  Antisense strand to SEQ ID NO: 2393504
ucaagcacugggaauuagc

SEQ ID NO: 2393506 - RNA, 19 nt, Artificial Sequence
  Description of Artificial Sequence: Synthetic oligonucleotide
  Sense strand starting at position 3002 of SEQ ID NO: 1886197
ggagcaaacuuccagucaa

SEQ ID NO: 2393507 - RNA, 19 nt, Artificial Sequence
  Description of Artificial Sequence: Synthetic oligonucleotide
  Antisense strand to SEQ ID NO: 2393506
uugacuggaaguuugcucc

SEQ ID NO: 2393508 - RNA, 19 nt, Artificial Sequence
  Description of Artificial Sequence: Synthetic oligonucleotide
  Sense strand starting at position 3410 of SEQ ID NO: 1886197
agugaagugacaugguaac

SEQ ID NO: 2393509 - RNA, 19 nt, Artificial Sequence
  Description of Artificial Sequence: Synthetic oligonucleotide
  Antisense strand to SEQ ID NO: 2393508
guuaccaugucacuucacu

SEQ ID NO: 2393510 - RNA, 19 nt, Artificial Sequence
  Description of Artificial Sequence: Synthetic oligonucleotide
  Sense strand starting at position 3443 of SEQ ID NO: 1886197
ucgauuuccugggcucaca

SEQ ID NO: 2393511 - RNA, 19 nt, Artificial Sequence
  Description of Artificial Sequence: Synthetic oligonucleotide
  Antisense strand to SEQ ID NO: 2393510
ugugagcccaggaaaucga

SEQ ID NO: 2393512 - RNA, 19 nt, Artificial Sequence
  Description of Artificial Sequence: Synthetic oligonucleotide
  Sense strand starting at position 121 of SEQ ID NO: 1886198
gucauaugcagauagcuga

SEQ ID NO: 2393513 - RNA, 19 nt, Artificial Sequence
  Description of Artificial Sequence: Synthetic oligonucleotide
  Antisense strand to SEQ ID NO: 2393512
ucagcuaucugcauaugac

SEQ ID NO: 2393514 - RNA, 19 nt, Artificial Sequence
  Description of Artificial Sequence: Synthetic oligonucleotide
  Sense strand starting at position 248 of SEQ ID NO: 1886198
gggagcuagagaugugagu

SEQ ID NO: 2393515 - RNA, 19 nt, Artificial Sequence
  Description of Artificial Sequence: Synthetic oligonucleotide
  Antisense strand to SEQ ID NO: 2393514
acucacaucucuagcuccc

SEQ ID NO: 2393516 - RNA, 19 nt, Artificial Sequence
  Description of Artificial Sequence: Synthetic oligonucleotide
  Sense strand starting at position 331 of SEQ ID NO: 1886198
ugugaagucacagaagcua

SEQ ID NO: 2393517 - RNA, 19 nt, Artificial Sequence
  Description of Artificial Sequence: Synthetic oligonucleotide
  Antisense strand to SEQ ID NO: 2393516
uagcuucugugacuucaca

SEQ ID NO: 2393518 - RNA, 19 nt, Artificial Sequence
  Description of Artificial Sequence: Synthetic oligonucleotide
  Sense strand starting at position 465 of SEQ ID NO: 1886198
cugagagaagguugcuuaa

SEQ ID NO: 2393519 - RNA, 19 nt, Artificial Sequence
  Description of Artificial Sequence: Synthetic oligonucleotide
  Antisense strand to SEQ ID NO: 2393518
uuaagcaaccuucucucag

SEQ ID NO: 2393520 - RNA, 19 nt, Artificial Sequence
  Description of Artificial Sequence: Synthetic oligonucleotide
  Sense strand starting at position 467 of SEQ ID NO: 1886198
gagagaagguugcuuaaag

SEQ ID NO: 2393521 - RNA, 19 nt, Artificial Sequence
  Description of Artificial Sequence: Synthetic oligonucleotide
  Antisense strand to SEQ ID NO: 2393520
cuuuaagcaaccuucucuc

SEQ ID NO: 2393522 - RNA, 19 nt, Artificial Sequence
  Description of Artificial Sequence: Synthetic oligonucleotide
  Sense strand starting at position 784 of SEQ ID NO: 1886198
uaccuauguguauggauga

SEQ ID NO: 2393523 - RNA, 19 nt, Artificial Sequence
  Description of Artificial Sequence: Synthetic oligonucleotide
  Antisense strand to SEQ ID NO: 2393522
ucauccauacacauaggua

SEQ ID NO: 2393524 - RNA, 19 nt, Artificial Sequence
  Description of Artificial Sequence: Synthetic oligonucleotide
  Sense strand starting at position 809 of SEQ ID NO: 1886198
gaauaugcugagcauguau

SEQ ID NO: 2393525 - RNA, 19 nt, Artificial Sequence
  Description of Artificial Sequence: Synthetic oligonucleotide
  Antisense strand to SEQ ID NO: 2393524
auacaugcucagcauauuc

SEQ ID NO: 2393526 - RNA, 19 nt, Artificial Sequence
  Description of Artificial Sequence: Synthetic oligonucleotide
  Sense strand starting at position 824 of SEQ ID NO: 1886198
guauucuguauugagagag

SEQ ID NO: 2393527 - RNA, 19 nt, Artificial Sequence
  Description of Artificial Sequence: Synthetic oligonucleotide
  Antisense strand to SEQ ID NO: 2393526
cucucucaauacagaauac

SEQ ID NO: 2393528 - RNA, 19 nt, Artificial Sequence
  Description of Artificial Sequence: Synthetic oligonucleotide
  Sense strand starting at position 902 of SEQ ID NO: 1886198
cuaguuauaucauuagaca

SEQ ID NO: 2393529 - RNA, 19 nt, Artificial Sequence
  Description of Artificial Sequence: Synthetic oligonucleotide
  Antisense strand to SEQ ID NO: 2393528
ugucuaaugauauaacuag

SEQ ID NO: 2393530 - RNA, 19 nt, Artificial Sequence
  Description of Artificial Sequence: Synthetic oligonucleotide
  Sense strand starting at position 1014 of SEQ ID NO: 1886198
ggaaaucugagcugacucu

SEQ ID NO: 2393531 - RNA, 19 nt, Artificial Sequence
  Description of Artificial Sequence: Synthetic oligonucleotide
  Antisense strand to SEQ ID NO: 2393530
agagucagcucagauuucc

SEQ ID NO: 2393532 - RNA, 19 nt, Artificial Sequence
  Description of Artificial Sequence: Synthetic oligonucleotide
  Sense strand starting at position 1091 of SEQ ID NO: 1886198
caugacaguugguuugaua

SEQ ID NO: 2393533 - RNA, 19 nt, Artificial Sequence
  Description of Artificial Sequence: Synthetic oligonucleotide
  Antisense strand to SEQ ID NO: 2393532
uaucaaaccaacugucaug

SEQ ID NO: 2393534 - RNA, 19 nt, Artificial Sequence
  Description of Artificial Sequence: Synthetic oligonucleotide
  Sense strand starting at position 1100 of SEQ ID NO: 1886198
ugguuugauaaauggauac

SEQ ID NO: 2393535 - RNA, 19 nt, Artificial Sequence
  Description of Artificial Sequence: Synthetic oligonucleotide
  Antisense strand to SEQ ID NO: 2393534
guauccauuuaucaaacca

SEQ ID NO: 2393536 - RNA, 19 nt, Artificial Sequence
  Description of Artificial Sequence: Synthetic oligonucleotide
  Sense strand starting at position 1384 of SEQ ID NO: 1886198
cguggagcugcccagauuu

SEQ ID NO: 2393537 - RNA, 19 nt, Artificial Sequence
  Description of Artificial Sequence: Synthetic oligonucleotide
  Antisense strand to SEQ ID NO: 2393536
aaaucugggcagcuccacg

SEQ ID NO: 2393538 - RNA, 19 nt, Artificial Sequence
  Description of Artificial Sequence: Synthetic oligonucleotide
  Sense strand starting at position 1458 of SEQ ID NO: 1886198
auuugcuguucuuuccaga

SEQ ID NO: 2393539 - RNA, 19 nt, Artificial Sequence
  Description of Artificial Sequence: Synthetic oligonucleotide
  Antisense strand to SEQ ID NO: 2393538
ucuggaaagaacagcaaau

SEQ ID NO: 2393540 - RNA, 19 nt, Artificial Sequence
  Description of Artificial Sequence: Synthetic oligonucleotide
  Sense strand starting at position 1612 of SEQ ID NO: 1886198
agguaugaaucugcccaga

SEQ ID NO: 2393541 - RNA, 19 nt, Artificial Sequence
  Description of Artificial Sequence: Synthetic oligonucleotide
  Antisense strand to SEQ ID NO: 2393540
ucugggcagauucauaccu

SEQ ID NO: 2393542 - RNA, 19 nt, Artificial Sequence
  Description of Artificial Sequence: Synthetic oligonucleotide
  Sense strand starting at position 1614 of SEQ ID NO: 1886198
guaugaaucugcccagagg

SEQ ID NO: 2393543 - RNA, 19 nt, Artificial Sequence
  Description of Artificial Sequence: Synthetic oligonucleotide
  Antisense strand to SEQ ID NO: 2393542
ccucugggcagauucauac

SEQ ID NO: 2393544 - RNA, 19 nt, Artificial Sequence
  Description of Artificial Sequence: Synthetic oligonucleotide
  Sense strand starting at position 1615 of SEQ ID NO: 1886198
uaugaaucugcccagaggu

SEQ ID NO: 2393545 - RNA, 19 nt, Artificial Sequence
  Description of Artificial Sequence: Synthetic oligonucleotide
  Antisense strand to SEQ ID NO: 2393544
accucugggcagauucaua

SEQ ID NO: 2393546 - RNA, 19 nt, Artificial Sequence
  Description of Artificial Sequence: Synthetic oligonucleotide
  Sense strand starting at position 1739 of SEQ ID NO: 1886198
gguccuauuguacacuaau

SEQ ID NO: 2393547 - RNA, 19 nt, Artificial Sequence
  Description of Artificial Sequence: Synthetic oligonucleotide
  Antisense strand to SEQ ID NO: 2393546
auuaguguacaauaggacc

SEQ ID NO: 2393548 - RNA, 19 nt, Artificial Sequence
  Description of Artificial Sequence: Synthetic oligonucleotide
  Sense strand starting at position 2087 of SEQ ID NO: 1886198
augucaagaaguggugaau

SEQ ID NO: 2393549 - RNA, 19 nt, Artificial Sequence
  Description of Artificial Sequence: Synthetic oligonucleotide
  Antisense strand to SEQ ID NO: 2393548
auucaccacuucuugacau

SEQ ID NO: 2393550 - RNA, 19 nt, Artificial Sequence
  Description of Artificial Sequence: Synthetic oligonucleotide
  Sense strand starting at position 2090 of SEQ ID NO: 1886198
ucaagaaguggugaaucga

SEQ ID NO: 2393551 - RNA, 19 nt, Artificial Sequence
  Description of Artificial Sequence: Synthetic oligonucleotide
  Antisense strand to SEQ ID NO: 2393550
ucgauucaccacuucuuga

SEQ ID NO: 2393552 - RNA, 19 nt, Artificial Sequence
  Description of Artificial Sequence: Synthetic oligonucleotide
  Sense strand starting at position 2098 of SEQ ID NO: 1886198
uggugaaucgauggagaca

SEQ ID NO: 2393553 - RNA, 19 nt, Artificial Sequence
  Description of Artificial Sequence: Synthetic oligonucleotide
  Antisense strand to SEQ ID NO: 2393552
ugucuccaucgauucacca

SEQ ID NO: 2393554 - RNA, 19 nt, Artificial Sequence
  Description of Artificial Sequence: Synthetic oligonucleotide
  Sense strand starting at position 2100 of SEQ ID NO: 1886198
gugaaucgauggagacaga

SEQ ID NO: 2393555 - RNA, 19 nt, Artificial Sequence
  Description of Artificial Sequence: Synthetic oligonucleotide
  Antisense strand to SEQ ID NO: 2393554
ucugucuccaucgauucac

SEQ ID NO: 2393556 - RNA, 19 nt, Artificial Sequence
  Description of Artificial Sequence: Synthetic oligonucleotide
  Sense strand starting at position 2230 of SEQ ID NO: 1886198
gugguacaacuccacgaau

SEQ ID NO: 2393557 - RNA, 19 nt, Artificial Sequence
  Description of Artificial Sequence: Synthetic oligonucleotide
  Antisense strand to SEQ ID NO: 2393556
auucguggaguuguaccac

SEQ ID NO: 2393558 - RNA, 19 nt, Artificial Sequence
  Description of Artificial Sequence: Synthetic oligonucleotide
  Sense strand starting at position 2385 of SEQ ID NO: 1886198
ggucaucauggcggauuua

SEQ ID NO: 2393559 - RNA, 19 nt, Artificial Sequence
  Description of Artificial Sequence: Synthetic oligonucleotide
  Antisense strand to SEQ ID NO: 2393558
uaaauccgccaugaugacc

SEQ ID NO: 2393560 - RNA, 19 nt, Artificial Sequence
  Description of Artificial Sequence: Synthetic oligonucleotide
  Sense strand starting at position 2401 of SEQ ID NO: 1886198
uuacaaaggugauuguuau

SEQ ID NO: 2393561 - RNA, 19 nt, Artificial Sequence
  Description of Artificial Sequence: Synthetic oligonucleotide
  Antisense strand to SEQ ID NO: 2393560
auaacaaucaccuuuguaa

SEQ ID NO: 2393562 - RNA, 19 nt, Artificial Sequence
  Description of Artificial Sequence: Synthetic oligonucleotide
  Sense strand starting at position 2423 of SEQ ID NO: 1886198
aauuauuuguuggagggaa

SEQ ID NO: 2393563 - RNA, 19 nt, Artificial Sequence
  Description of Artificial Sequence: Synthetic oligonucleotide
  Antisense strand to SEQ ID NO: 2393562
uucccuccaacaaauaauu

SEQ ID NO: 2393564 - RNA, 19 nt, Artificial Sequence
  Description of Artificial Sequence: Synthetic oligonucleotide
  Sense strand starting at position 2803 of SEQ ID NO: 1886198
aauagaucugacuguguua

SEQ ID NO: 2393565 - RNA, 19 nt, Artificial Sequence
  Description of Artificial Sequence: Synthetic oligonucleotide
  Antisense strand to SEQ ID NO: 2393564
uaacacagucagaucuauu

SEQ ID NO: 2393566 - RNA, 19 nt, Artificial Sequence
  Description of Artificial Sequence: Synthetic oligonucleotide
  Sense strand starting at position 3099 of SEQ ID NO: 1886198
uguuguauacuguaacaca

SEQ ID NO: 2393567 - RNA, 19 nt, Artificial Sequence
  Description of Artificial Sequence: Synthetic oligonucleotide
  Antisense strand to SEQ ID NO: 2393566
uguguuacaguauacaaca

SEQ ID NO: 2393568 - RNA, 19 nt, Artificial Sequence
  Description of Artificial Sequence: Synthetic oligonucleotide
  Sense strand starting at position 3152 of SEQ ID NO: 1886198
gcucgugagcggagagaau

SEQ ID NO: 2393569 - RNA, 19 nt, Artificial Sequence
  Description of Artificial Sequence: Synthetic oligonucleotide
  Antisense strand to SEQ ID NO: 2393568
auucucuccgcucacgagc

SEQ ID NO: 2393570 - RNA, 19 nt, Artificial Sequence
  Description of Artificial Sequence: Synthetic oligonucleotide
  Sense strand starting at position 3186 of SEQ ID NO: 1886198
gugcuuucucaggacacau

SEQ ID NO: 2393571 - RNA, 19 nt, Artificial Sequence
  Description of Artificial Sequence: Synthetic oligonucleotide
  Antisense strand to SEQ ID NO: 2393570
auguguccugagaaagcac

SEQ ID NO: 2393572 - RNA, 19 nt, Artificial Sequence
  Description of Artificial Sequence: Synthetic oligonucleotide
  Sense strand starting at position 3292 of SEQ ID NO: 1886198
cugacaucuugggucagau

SEQ ID NO: 2393573 - RNA, 19 nt, Artificial Sequence
  Description of Artificial Sequence: Synthetic oligonucleotide
  Antisense strand to SEQ ID NO: 2393572
aucugacccaagaugucag

SEQ ID NO: 2393574 - RNA, 19 nt, Artificial Sequence
  Description of Artificial Sequence: Synthetic oligonucleotide
  Sense strand starting at position 3366 of SEQ ID NO: 1886198
gggcucuacucucuagaua

SEQ ID NO: 2393575 - RNA, 19 nt, Artificial Sequence
  Description of Artificial Sequence: Synthetic oligonucleotide
  Antisense strand to SEQ ID NO: 2393574
uaucuagagaguagagccc

SEQ ID NO: 2393576 - RNA, 19 nt, Artificial Sequence
  Description of Artificial Sequence: Synthetic oligonucleotide
  Sense strand starting at position 3367 of SEQ ID NO: 1886198
ggcucuacucucuagauag

SEQ ID NO: 2393577 - RNA, 19 nt, Artificial Sequence
  Description of Artificial Sequence: Synthetic oligonucleotide
  Antisense strand to SEQ ID NO: 2393576
cuaucuagagaguagagcc

SEQ ID NO: 2393578 - RNA, 19 nt, Artificial Sequence
  Description of Artificial Sequence: Synthetic oligonucleotide
  Sense strand starting at position 3498 of SEQ ID NO: 1886198
ggaggcaucucugugauaa

SEQ ID NO: 2393579 - RNA, 19 nt, Artificial Sequence
  Description of Artificial Sequence: Synthetic oligonucleotide
  Antisense strand to SEQ ID NO: 2393578
uuaucacagagaugccucc

SEQ ID NO: 2393580 - RNA, 19 nt, Artificial Sequence
  Description of Artificial Sequence: Synthetic oligonucleotide
  Sense strand starting at position 3499 of SEQ ID NO: 1886198
gaggcaucucugugauaag

SEQ ID NO: 2393581 - RNA, 19 nt, Artificial Sequence
  Description of Artificial Sequence: Synthetic oligonucleotide
  Antisense strand to SEQ ID NO: 2393580
cuuaucacagagaugccuc

SEQ ID NO: 2393582 - RNA, 19 nt, Artificial Sequence
  Description of Artificial Sequence: Synthetic oligonucleotide
  Sense strand starting at position 3584 of SEQ ID NO: 1886198
cccacuucugguuaucacu

SEQ ID NO: 2393583 - RNA, 19 nt, Artificial Sequence
  Description of Artificial Sequence: Synthetic oligonucleotide
  Antisense strand to SEQ ID NO: 2393582
agugauaaccagaaguggg

SEQ ID NO: 2393584 - RNA, 19 nt, Artificial Sequence
  Description of Artificial Sequence: Synthetic oligonucleotide
  Sense strand starting at position 3673 of SEQ ID NO: 1886198
ugucuaccagucuaggaaa

SEQ ID NO: 2393585 - RNA, 19 nt, Artificial Sequence
  Description of Artificial Sequence: Synthetic oligonucleotide
  Antisense strand to SEQ ID NO: 2393584
uuuccuagacugguagaca

SEQ ID NO: 2393586 - RNA, 19 nt, Artificial Sequence
  Description of Artificial Sequence: Synthetic oligonucleotide
  Sense strand starting at position 3781 of SEQ ID NO: 1886198
uuugcuuugaugggaaaga

SEQ ID NO: 2393587 - RNA, 19 nt, Artificial Sequence
  Description of Artificial Sequence: Synthetic oligonucleotide
  Antisense strand to SEQ ID NO: 2393586
ucuuucccaucaaagcaaa

SEQ ID NO: 2393588 - RNA, 19 nt, Artificial Sequence
  Description of Artificial Sequence: Synthetic oligonucleotide
  Sense strand starting at position 3810 of SEQ ID NO: 1886198
acgggaguugaauaguuca

SEQ ID NO: 2393589 - RNA, 19 nt, Artificial Sequence
  Description of Artificial Sequence: Synthetic oligonucleotide
  Antisense strand to SEQ ID NO: 2393588
ugaacuauucaacucccgu

SEQ ID NO: 2393590 - RNA, 19 nt, Artificial Sequence
  Description of Artificial Sequence: Synthetic oligonucleotide
  Sense strand starting at position 3941 of SEQ ID NO: 1886198
uugggauaucugcaagcug

SEQ ID NO: 2393591 - RNA, 19 nt, Artificial Sequence
  Description of Artificial Sequence: Synthetic oligonucleotide
  Antisense strand to SEQ ID NO: 2393590
cagcuugcagauaucccaa

SEQ ID NO: 2393592 - RNA, 19 nt, Artificial Sequence
  Description of Artificial Sequence: Synthetic oligonucleotide
  Sense strand starting at position 47 of SEQ ID NO: 1886199
ugauuccuucugcagagga

SEQ ID NO: 2393593 - RNA, 19 nt, Artificial Sequence
  Description of Artificial Sequence: Synthetic oligonucleotide
  Antisense strand to SEQ ID NO: 2393592
uccucugcagaaggaauca

SEQ ID NO: 2393594 - RNA, 19 nt, Artificial Sequence
  Description of Artificial Sequence: Synthetic oligonucleotide
  Sense strand starting at position 242 of SEQ ID NO: 1886199
aucaaacaguguuuacuua

SEQ ID NO: 2393595 - RNA, 19 nt, Artificial Sequence
  Description of Artificial Sequence: Synthetic oligonucleotide
  Antisense strand to SEQ ID NO: 2393594
uaaguaaacacuguuugau

SEQ ID NO: 2393596 - RNA, 19 nt, Artificial Sequence
  Description of Artificial Sequence: Synthetic oligonucleotide
  Sense strand starting at position 243 of SEQ ID NO: 1886199
ucaaacaguguuuacuuau

SEQ ID NO: 2393597 - RNA, 19 nt, Artificial Sequence
  Description of Artificial Sequence: Synthetic oligonucleotide
  Antisense strand to SEQ ID NO: 2393596
auaaguaaacacuguuuga

SEQ ID NO: 2393598 - RNA, 19 nt, Artificial Sequence
  Description of Artificial Sequence: Synthetic oligonucleotide
  Sense strand starting at position 249 of SEQ ID NO: 1886199
aguguuuacuuaucuaaag

SEQ ID NO: 2393599 - RNA, 19 nt, Artificial Sequence
  Description of Artificial Sequence: Synthetic oligonucleotide
  Antisense strand to SEQ ID NO: 2393598
cuuuagauaaguaaacacu

SEQ ID NO: 2393600 - RNA, 19 nt, Artificial Sequence
  Description of Artificial Sequence: Synthetic oligonucleotide
  Sense strand starting at position 305 of SEQ ID NO: 1886199
agagaagagcaauguuauu

SEQ ID NO: 2393601 - RNA, 19 nt, Artificial Sequence
  Description of Artificial Sequence: Synthetic oligonucleotide
  Antisense strand to SEQ ID NO: 2393600
aauaacauugcucuucucu

SEQ ID NO: 2393602 - RNA, 19 nt, Artificial Sequence
  Description of Artificial Sequence: Synthetic oligonucleotide
  Sense strand starting at position 407 of SEQ ID NO: 1886199
gcuugacugcuccauuugu

SEQ ID NO: 2393603 - RNA, 19 nt, Artificial Sequence
  Description of Artificial Sequence: Synthetic oligonucleotide
  Antisense strand to SEQ ID NO: 2393602
acaaauggagcagucaagc

SEQ ID NO: 2393604 - RNA, 19 nt, Artificial Sequence
  Description of Artificial Sequence: Synthetic oligonucleotide
  Sense strand starting at position 608 of SEQ ID NO: 1886199
gucucauuacauggaauau

SEQ ID NO: 2393605 - RNA, 19 nt, Artificial Sequence
  Description of Artificial Sequence: Synthetic oligonucleotide
  Antisense strand to SEQ ID NO: 2393604
auauuccauguaaugagac

SEQ ID NO: 2393606 - RNA, 19 nt, Artificial Sequence
  Description of Artificial Sequence: Synthetic oligonucleotide
  Sense strand starting at position 1273 of SEQ ID NO: 1886199
caagauagguugucaucca

SEQ ID NO: 2393607 - RNA, 19 nt, Artificial Sequence
  Description of Artificial Sequence: Synthetic oligonucleotide
  Antisense strand to SEQ ID NO: 2393606
uggaugacaaccuaucuug

SEQ ID NO: 2393608 - RNA, 19 nt, Artificial Sequence
  Description of Artificial Sequence: Synthetic oligonucleotide
  Sense strand starting at position 1461 of SEQ ID NO: 1886199
cuguuagguccugauaaua

SEQ ID NO: 2393609 - RNA, 19 nt, Artificial Sequence
  Description of Artificial Sequence: Synthetic oligonucleotide
  Antisense strand to SEQ ID NO: 2393608
uauuaucaggaccuaacag

SEQ ID NO: 2393610 - RNA, 19 nt, Artificial Sequence
  Description of Artificial Sequence: Synthetic oligonucleotide
  Sense strand starting at position 1742 of SEQ ID NO: 1886199
cugagagaucuagguccca

SEQ ID NO: 2393611 - RNA, 19 nt, Artificial Sequence
  Description of Artificial Sequence: Synthetic oligonucleotide
  Antisense strand to SEQ ID NO: 2393610
ugggaccuagaucucucag

SEQ ID NO: 2393612 - RNA, 19 nt, Artificial Sequence
  Description of Artificial Sequence: Synthetic oligonucleotide
  Sense strand starting at position 1782 of SEQ ID NO: 1886199
aguuucuugagguaccgau

SEQ ID NO: 2393613 - RNA, 19 nt, Artificial Sequence
  Description of Artificial Sequence: Synthetic oligonucleotide
  Antisense strand to SEQ ID NO: 2393612
aucgguaccucaagaaacu

SEQ ID NO: 2393614 - RNA, 19 nt, Artificial Sequence
  Description of Artificial Sequence: Synthetic oligonucleotide
  Sense strand starting at position 1824 of SEQ ID NO: 1886199
ugagaagucuuuguccuag

SEQ ID NO: 2393615 - RNA, 19 nt, Artificial Sequence
  Description of Artificial Sequence: Synthetic oligonucleotide
  Antisense strand to SEQ ID NO: 2393614
cuaggacaaagacuucuca

SEQ ID NO: 2393616 - RNA, 19 nt, Artificial Sequence
  Description of Artificial Sequence: Synthetic oligonucleotide
  Sense strand starting at position 1849 of SEQ ID NO: 1886199
gagggcguccuccaggauu

SEQ ID NO: 2393617 - RNA, 19 nt, Artificial Sequence
  Description of Artificial Sequence: Synthetic oligonucleotide
  Antisense strand to SEQ ID NO: 2393616
aauccuggaggacgcccuc

SEQ ID NO: 2393618 - RNA, 19 nt, Artificial Sequence
  Description of Artificial Sequence: Synthetic oligonucleotide
  Sense strand starting at position 1860 of SEQ ID NO: 1886199
ccaggauucuggguucuca

SEQ ID NO: 2393619 - RNA, 19 nt, Artificial Sequence
  Description of Artificial Sequence: Synthetic oligonucleotide
  Antisense strand to SEQ ID NO: 2393618
ugagaacccagaauccugg

SEQ ID NO: 2393620 - RNA, 19 nt, Artificial Sequence
  Description of Artificial Sequence: Synthetic oligonucleotide
  Sense strand starting at position 1934 of SEQ ID NO: 1886199
gcaguuacuacguuugcau

SEQ ID NO: 2393621 - RNA, 19 nt, Artificial Sequence
  Description of Artificial Sequence: Synthetic oligonucleotide
  Antisense strand to SEQ ID NO: 2393620
augcaaacguaguaacugc

SEQ ID NO: 2393622 - RNA, 19 nt, Artificial Sequence
  Description of Artificial Sequence: Synthetic oligonucleotide
  Sense strand starting at position 1941 of SEQ ID NO: 1886199
cuacguuugcaugauaaca

SEQ ID NO: 2393623 - RNA, 19 nt, Artificial Sequence
  Description of Artificial Sequence: Synthetic oligonucleotide
  Antisense strand to SEQ ID NO: 2393622
uguuaucaugcaaacguag

SEQ ID NO: 2393624 - RNA, 19 nt, Artificial Sequence
  Description of Artificial Sequence: Synthetic oligonucleotide
  Sense strand starting at position 2031 of SEQ ID NO: 1886199
acugcuaacagguaugagu

SEQ ID NO: 2393625 - RNA, 19 nt, Artificial Sequence
  Description of Artificial Sequence: Synthetic oligonucleotide
  Antisense strand to SEQ ID NO: 2393624
acucauaccuguuagcagu

SEQ ID NO: 2393626 - RNA, 19 nt, Artificial Sequence
  Description of Artificial Sequence: Synthetic oligonucleotide
  Sense strand starting at position 2135 of SEQ ID NO: 1886199
ucccuuacaugggugaauu

SEQ ID NO: 2393627 - RNA, 19 nt, Artificial Sequence
  Description of Artificial Sequence: Synthetic oligonucleotide
  Antisense strand to SEQ ID NO: 2393626
aauucacccauguaaggga

SEQ ID NO: 2393628 - RNA, 19 nt, Artificial Sequence
  Description of Artificial Sequence: Synthetic oligonucleotide
  Sense strand starting at position 2143 of SEQ ID NO: 1886199
augggugaauuucagggua

SEQ ID NO: 2393629 - RNA, 19 nt, Artificial Sequence
  Description of Artificial Sequence: Synthetic oligonucleotide
  Antisense strand to SEQ ID NO: 2393628
uacccugaaauucacccau

SEQ ID NO: 2393630 - RNA, 19 nt, Artificial Sequence
  Description of Artificial Sequence: Synthetic oligonucleotide
  Sense strand starting at position 2184 of SEQ ID NO: 1886199
auaaaucuucuguguugga

SEQ ID NO: 2393631 - RNA, 19 nt, Artificial Sequence
  Description of Artificial Sequence: Synthetic oligonucleotide
  Antisense strand to SEQ ID NO: 2393630
uccaacacagaagauuuau

SEQ ID NO: 2393632 - RNA, 19 nt, Artificial Sequence
  Description of Artificial Sequence: Synthetic oligonucleotide
  Sense strand starting at position 2185 of SEQ ID NO: 1886199
uaaaucuucuguguuggaa

SEQ ID NO: 2393633 - RNA, 19 nt, Artificial Sequence
  Description of Artificial Sequence: Synthetic oligonucleotide
  Antisense strand to SEQ ID NO: 2393632
uuccaacacagaagauuua

SEQ ID NO: 2393634 - RNA, 19 nt, Artificial Sequence
  Description of Artificial Sequence: Synthetic oligonucleotide
  Sense strand starting at position 2197 of SEQ ID NO: 1886199
guuggaaugccugacugga

SEQ ID NO: 2393635 - RNA, 19 nt, Artificial Sequence
  Description of Artificial Sequence: Synthetic oligonucleotide
  Antisense strand to SEQ ID NO: 2393634
uccagucaggcauuccaac

SEQ ID NO: 2393636 - RNA, 19 nt, Artificial Sequence
  Description of Artificial Sequence: Synthetic oligonucleotide
  Sense strand starting at position 2210 of SEQ ID NO: 1886199
acuggauccugguugauau

SEQ ID NO: 2393637 - RNA, 19 nt, Artificial Sequence
  Description of Artificial Sequence: Synthetic oligonucleotide
  Antisense strand to SEQ ID NO: 2393636
auaucaaccaggauccagu

SEQ ID NO: 2393638 - RNA, 19 nt, Artificial Sequence
  Description of Artificial Sequence: Synthetic oligonucleotide
  Sense strand starting at position 2211 of SEQ ID NO: 1886199
cuggauccugguugauaua

SEQ ID NO: 2393639 - RNA, 19 nt, Artificial Sequence
  Description of Artificial Sequence: Synthetic oligonucleotide
  Antisense strand to SEQ ID NO: 2393638
uauaucaaccaggauccag

SEQ ID NO: 2393640 - RNA, 19 nt, Artificial Sequence
  Description of Artificial Sequence: Synthetic oligonucleotide
  Sense strand starting at position 2290 of SEQ ID NO: 1886199
cucagauacuuggucaaag

SEQ ID NO: 2393641 - RNA, 19 nt, Artificial Sequence
  Description of Artificial Sequence: Synthetic oligonucleotide
  Antisense strand to SEQ ID NO: 2393640
cuuugaccaaguaucugag

SEQ ID NO: 2393642 - RNA, 19 nt, Artificial Sequence
  Description of Artificial Sequence: Synthetic oligonucleotide
  Sense strand starting at position 2291 of SEQ ID NO: 1886199
ucagauacuuggucaaaga

SEQ ID NO: 2393643 - RNA, 19 nt, Artificial Sequence
  Description of Artificial Sequence: Synthetic oligonucleotide
  Antisense strand to SEQ ID NO: 2393642
ucuuugaccaaguaucuga

SEQ ID NO: 2393644 - RNA, 19 nt, Artificial Sequence
  Description of Artificial Sequence: Synthetic oligonucleotide
  Sense strand starting at position 2301 of SEQ ID NO: 1886199
ggucaaagauuaucuugag

SEQ ID NO: 2393645 - RNA, 19 nt, Artificial Sequence
  Description of Artificial Sequence: Synthetic oligonucleotide
  Antisense strand to SEQ ID NO: 2393644
cucaagauaaucuuugacc

SEQ ID NO: 2393646 - RNA, 19 nt, Artificial Sequence
  Description of Artificial Sequence: Synthetic oligonucleotide
  Sense strand starting at position 2302 of SEQ ID NO: 1886199
gucaaagauuaucuugagu

SEQ ID NO: 2393647 - RNA, 19 nt, Artificial Sequence
  Description of Artificial Sequence: Synthetic oligonucleotide
  Antisense strand to SEQ ID NO: 2393646
acucaagauaaucuuugac

SEQ ID NO: 2393648 - RNA, 19 nt, Artificial Sequence
  Description of Artificial Sequence: Synthetic oligonucleotide
  Sense strand starting at position 2305 of SEQ ID NO: 1886199
aaagauuaucuugaguguc

SEQ ID NO: 2393649 - RNA, 19 nt, Artificial Sequence
  Description of Artificial Sequence: Synthetic oligonucleotide
  Antisense strand to SEQ ID NO: 2393648
gacacucaagauaaucuuu

SEQ ID NO: 2393650 - RNA, 19 nt, Artificial Sequence
  Description of Artificial Sequence: Synthetic oligonucleotide
  Sense strand starting at position 2328 of SEQ ID NO: 1886199
ugaggguguguuggaugaa

SEQ ID NO: 2393651 - RNA, 19 nt, Artificial Sequence
  Description of Artificial Sequence: Synthetic oligonucleotide
  Antisense strand to SEQ ID NO: 2393650
uucauccaacacacccuca

SEQ ID NO: 2393652 - RNA, 19 nt, Artificial Sequence
  Description of Artificial Sequence: Synthetic oligonucleotide
  Sense strand starting at position 2359 of SEQ ID NO: 1886199
auugacggacuuugaauaa

SEQ ID NO: 2393653 - RNA, 19 nt, Artificial Sequence
  Description of Artificial Sequence: Synthetic oligonucleotide
  Antisense strand to SEQ ID NO: 2393652
uuauucaaaguccgucaau

SEQ ID NO: 2393654 - RNA, 19 nt, Artificial Sequence
  Description of Artificial Sequence: Synthetic oligonucleotide
  Sense strand starting at position 2407 of SEQ ID NO: 1886199
ccuuauucccagcaguuga

SEQ ID NO: 2393655 - RNA, 19 nt, Artificial Sequence
  Description of Artificial Sequence: Synthetic oligonucleotide
  Antisense strand to SEQ ID NO: 2393654
ucaacugcugggaauaagg

SEQ ID NO: 2393656 - RNA, 19 nt, Artificial Sequence
  Description of Artificial Sequence: Synthetic oligonucleotide
  Sense strand starting at position 2480 of SEQ ID NO: 1886199
gcagacugccucuagacuu

SEQ ID NO: 2393657 - RNA, 19 nt, Artificial Sequence
  Description of Artificial Sequence: Synthetic oligonucleotide
  Antisense strand to SEQ ID NO: 2393656
aagucuagaggcagucugc

SEQ ID NO: 2393658 - RNA, 19 nt, Artificial Sequence
  Description of Artificial Sequence: Synthetic oligonucleotide
  Sense strand starting at position 2487 of SEQ ID NO: 1886199
gccucuagacuugaacuga

SEQ ID NO: 2393659 - RNA, 19 nt, Artificial Sequence
  Description of Artificial Sequence: Synthetic oligonucleotide
  Antisense strand to SEQ ID NO: 2393658
ucaguucaagucuagaggc

SEQ ID NO: 2393660 - RNA, 19 nt, Artificial Sequence
  Description of Artificial Sequence: Synthetic oligonucleotide
  Sense strand starting at position 2560 of SEQ ID NO: 1886199
cuccauaauugugugaaug

SEQ ID NO: 2393661 - RNA, 19 nt, Artificial Sequence
  Description of Artificial Sequence: Synthetic oligonucleotide
  Antisense strand to SEQ ID NO: 2393660
cauucacacaauuauggag

SEQ ID NO: 2393662 - RNA, 19 nt, Artificial Sequence
  Description of Artificial Sequence: Synthetic oligonucleotide
  Sense strand starting at position 2580 of SEQ ID NO: 1886199
gagccaguucuuuauaaga

SEQ ID NO: 2393663 - RNA, 19 nt, Artificial Sequence
  Description of Artificial Sequence: Synthetic oligonucleotide
  Antisense strand to SEQ ID NO: 2393662
ucuuauaaagaacuggcuc

SEQ ID NO: 2393664 - RNA, 19 nt, Artificial Sequence
  Description of Artificial Sequence: Synthetic oligonucleotide
  Sense strand starting at position 3089 of SEQ ID NO: 1886199
uggugaggcccugacagau

SEQ ID NO: 2393665 - RNA, 19 nt, Artificial Sequence
  Description of Artificial Sequence: Synthetic oligonucleotide
  Antisense strand to SEQ ID NO: 2393664
aucugucagggccucacca

SEQ ID NO: 2393666 - RNA, 19 nt, Artificial Sequence
  Description of Artificial Sequence: Synthetic oligonucleotide
  Sense strand starting at position 3118 of SEQ ID NO: 1886199
ugagaauacgggcaccuau

SEQ ID NO: 2393667 - RNA, 19 nt, Artificial Sequence
  Description of Artificial Sequence: Synthetic oligonucleotide
  Antisense strand to SEQ ID NO: 2393666
auaggugcccguauucuca

SEQ ID NO: 2393668 - RNA, 19 nt, Artificial Sequence
  Description of Artificial Sequence: Synthetic oligonucleotide
  Sense strand starting at position 3274 of SEQ ID NO: 1886199
ggagcuugagaguggaaca

SEQ ID NO: 2393669 - RNA, 19 nt, Artificial Sequence
  Description of Artificial Sequence: Synthetic oligonucleotide
  Antisense strand to SEQ ID NO: 2393668
uguuccacucucaagcucc

SEQ ID NO: 2393670 - RNA, 19 nt, Artificial Sequence
  Description of Artificial Sequence: Synthetic oligonucleotide
  Sense strand starting at position 3454 of SEQ ID NO: 1886199
uaggaagagucccuaaauu

SEQ ID NO: 2393671 - RNA, 19 nt, Artificial Sequence
  Description of Artificial Sequence: Synthetic oligonucleotide
  Antisense strand to SEQ ID NO: 2393670
aauuuagggacucuuccua

SEQ ID NO: 2393672 - RNA, 19 nt, Artificial Sequence
  Description of Artificial Sequence: Synthetic oligonucleotide
  Sense strand starting at position 16 of SEQ ID NO: 1886200
uugagucagucauugggca

SEQ ID NO: 2393673 - RNA, 19 nt, Artificial Sequence
  Description of Artificial Sequence: Synthetic oligonucleotide
  Antisense strand to SEQ ID NO: 2393672
ugcccaaugacugacucaa

SEQ ID NO: 2393674 - RNA, 19 nt, Artificial Sequence
  Description of Artificial Sequence: Synthetic oligonucleotide
  Sense strand starting at position 18 of SEQ ID NO: 1886200
gagucagucauugggcacu

SEQ ID NO: 2393675 - RNA, 19 nt, Artificial Sequence
  Description of Artificial Sequence: Synthetic oligonucleotide
  Antisense strand to SEQ ID NO: 2393674
agugcccaaugacugacuc

SEQ ID NO: 2393676 - RNA, 19 nt, Artificial Sequence
  Description of Artificial Sequence: Synthetic oligonucleotide
  Sense strand starting at position 20 of SEQ ID NO: 1886200
gucagucauugggcacuaa

SEQ ID NO: 2393677 - RNA, 19 nt, Artificial Sequence
  Description of Artificial Sequence: Synthetic oligonucleotide
  Antisense strand to SEQ ID NO: 2393676
uuagugcccaaugacugac

SEQ ID NO: 2393678 - RNA, 19 nt, Artificial Sequence
  Description of Artificial Sequence: Synthetic oligonucleotide
  Sense strand starting at position 130 of SEQ ID NO: 1886200
ugcuuaagacuuggacacu

SEQ ID NO: 2393679 - RNA, 19 nt, Artificial Sequence
  Description of Artificial Sequence: Synthetic oligonucleotide
  Antisense strand to SEQ ID NO: 2393678
aguguccaagucuuaagca

SEQ ID NO: 2393680 - RNA, 19 nt, Artificial Sequence
  Description of Artificial Sequence: Synthetic oligonucleotide
  Sense strand starting at position 426 of SEQ ID NO: 1886200
gucacuacuuaguccuauu

SEQ ID NO: 2393681 - RNA, 19 nt, Artificial Sequence
  Description of Artificial Sequence: Synthetic oligonucleotide
  Antisense strand to SEQ ID NO: 2393680
aauaggacuaaguagugac

SEQ ID NO: 2393682 - RNA, 19 nt, Artificial Sequence
  Description of Artificial Sequence: Synthetic oligonucleotide
  Sense strand starting at position 456 of SEQ ID NO: 1886200
agagaaaggugcuagaaag

SEQ ID NO: 2393683 - RNA, 19 nt, Artificial Sequence
  Description of Artificial Sequence: Synthetic oligonucleotide
  Antisense strand to SEQ ID NO: 2393682
cuuucuagcaccuuucucu

SEQ ID NO: 2393684 - RNA, 19 nt, Artificial Sequence
  Description of Artificial Sequence: Synthetic oligonucleotide
  Sense strand starting at position 664 of SEQ ID NO: 1886200
cucucagcucuagagacuu

SEQ ID NO: 2393685 - RNA, 19 nt, Artificial Sequence
  Description of Artificial Sequence: Synthetic oligonucleotide
  Antisense strand to SEQ ID NO: 2393684
aagucucuagagcugagag

SEQ ID NO: 2393686 - RNA, 19 nt, Artificial Sequence
  Description of Artificial Sequence: Synthetic oligonucleotide
  Sense strand starting at position 672 of SEQ ID NO: 1886200
ucuagagacuuugcccuaa

SEQ ID NO: 2393687 - RNA, 19 nt, Artificial Sequence
  Description of Artificial Sequence: Synthetic oligonucleotide
  Antisense strand to SEQ ID NO: 2393686
uuagggcaaagucucuaga

SEQ ID NO: 2393688 - RNA, 19 nt, Artificial Sequence
  Description of Artificial Sequence: Synthetic oligonucleotide
  Sense strand starting at position 676 of SEQ ID NO: 1886200
gagacuuugcccuaaggcu

SEQ ID NO: 2393689 - RNA, 19 nt, Artificial Sequence
  Description of Artificial Sequence: Synthetic oligonucleotide
  Antisense strand to SEQ ID NO: 2393688
agccuuagggcaaagucuc

SEQ ID NO: 2393690 - RNA, 19 nt, Artificial Sequence
  Description of Artificial Sequence: Synthetic oligonucleotide
  Sense strand starting at position 924 of SEQ ID NO: 1886200
ugugccuuugcccauacau

SEQ ID NO: 2393691 - RNA, 19 nt, Artificial Sequence
  Description of Artificial Sequence: Synthetic oligonucleotide
  Antisense strand to SEQ ID NO: 2393690
auguaugggcaaaggcaca

SEQ ID NO: 2393692 - RNA, 19 nt, Artificial Sequence
  Description of Artificial Sequence: Synthetic oligonucleotide
  Sense strand starting at position 1087 of SEQ ID NO: 1886200
cugggacauuacuuguuua

SEQ ID NO: 2393693 - RNA, 19 nt, Artificial Sequence
  Description of Artificial Sequence: Synthetic oligonucleotide
  Antisense strand to SEQ ID NO: 2393692
uaaacaaguaaugucccag

SEQ ID NO: 2393694 - RNA, 19 nt, Artificial Sequence
  Description of Artificial Sequence: Synthetic oligonucleotide
  Sense strand starting at position 1090 of SEQ ID NO: 1886200
ggacauuacuuguuuaagc

SEQ ID NO: 2393695 - RNA, 19 nt, Artificial Sequence
  Description of Artificial Sequence: Synthetic oligonucleotide
  Antisense strand to SEQ ID NO: 2393694
gcuuaaacaaguaaugucc

SEQ ID NO: 2393696 - RNA, 19 nt, Artificial Sequence
  Description of Artificial Sequence: Synthetic oligonucleotide
  Sense strand starting at position 1187 of SEQ ID NO: 1886200
ggacaaggaucgguucaca

SEQ ID NO: 2393697 - RNA, 19 nt, Artificial Sequence
  Description of Artificial Sequence: Synthetic oligonucleotide
  Antisense strand to SEQ ID NO: 2393696
ugugaaccgauccuugucc

SEQ ID NO: 2393698 - RNA, 19 nt, Artificial Sequence
  Description of Artificial Sequence: Synthetic oligonucleotide
  Sense strand starting at position 1417 of SEQ ID NO: 1886200
ggcgcuaguuggaaggaaa

SEQ ID NO: 2393699 - RNA, 19 nt, Artificial Sequence
  Description of Artificial Sequence: Synthetic oligonucleotide
  Antisense strand to SEQ ID NO: 2393698
uuuccuuccaacuagcgcc

SEQ ID NO: 2393700 - RNA, 19 nt, Artificial Sequence
  Description of Artificial Sequence: Synthetic oligonucleotide
  Sense strand starting at position 2041 of SEQ ID NO: 1886200
agucacucucgcgagacuu

SEQ ID NO: 2393701 - RNA, 19 nt, Artificial Sequence
  Description of Artificial Sequence: Synthetic oligonucleotide
  Antisense strand to SEQ ID NO: 2393700
aagucucgcgagagugacu

SEQ ID NO: 2393702 - RNA, 19 nt, Artificial Sequence
  Description of Artificial Sequence: Synthetic oligonucleotide
  Sense strand starting at position 2130 of SEQ ID NO: 1886200
ggagcuguccgaggugcua

SEQ ID NO: 2393703 - RNA, 19 nt, Artificial Sequence
  Description of Artificial Sequence: Synthetic oligonucleotide
  Antisense strand to SEQ ID NO: 2393702
uagcaccucggacagcucc

SEQ ID NO: 2393704 - RNA, 19 nt, Artificial Sequence
  Description of Artificial Sequence: Synthetic oligonucleotide
  Sense strand starting at position 2377 of SEQ ID NO: 1886200
ugcggaagguccuucagau

SEQ ID NO: 2393705 - RNA, 19 nt, Artificial Sequence
  Description of Artificial Sequence: Synthetic oligonucleotide
  Antisense strand to SEQ ID NO: 2393704
aucugaaggaccuuccgca

SEQ ID NO: 2393706 - RNA, 19 nt, Artificial Sequence
  Description of Artificial Sequence: Synthetic oligonucleotide
  Sense strand starting at position 2738 of SEQ ID NO: 1886200
agagaugaauaccaagaga

SEQ ID NO: 2393707 - RNA, 19 nt, Artificial Sequence
  Description of Artificial Sequence: Synthetic oligonucleotide
  Antisense strand to SEQ ID NO: 2393706
ucucuugguauucaucucu

SEQ ID NO: 2393708 - RNA, 19 nt, Artificial Sequence
  Description of Artificial Sequence: Synthetic oligonucleotide
  Sense strand starting at position 2850 of SEQ ID NO: 1886200
uuuauugugauugguguuu

SEQ ID NO: 2393709 - RNA, 19 nt, Artificial Sequence
  Description of Artificial Sequence: Synthetic oligonucleotide
  Antisense strand to SEQ ID NO: 2393708
aaacaccaaucacaauaaa

SEQ ID NO: 2393710 - RNA, 19 nt, Artificial Sequence
  Description of Artificial Sequence: Synthetic oligonucleotide
  Sense strand starting at position 2871 of SEQ ID NO: 1886200
auaguaaaccuccguggga

SEQ ID NO: 2393711 - RNA, 19 nt, Artificial Sequence
  Description of Artificial Sequence: Synthetic oligonucleotide
  Antisense strand to SEQ ID NO: 2393710
ucccacggagguuuacuau

SEQ ID NO: 2393712 - RNA, 19 nt, Artificial Sequence
  Description of Artificial Sequence: Synthetic oligonucleotide
  Sense strand starting at position 2872 of SEQ ID NO: 1886200
uaguaaaccuccgugggau

SEQ ID NO: 2393713 - RNA, 19 nt, Artificial Sequence
  Description of Artificial Sequence: Synthetic oligonucleotide
  Antisense strand to SEQ ID NO: 2393712
aucccacggagguuuacua

SEQ ID NO: 2393714 - RNA, 19 nt, Artificial Sequence
  Description of Artificial Sequence: Synthetic oligonucleotide
  Sense strand starting at position 2873 of SEQ ID NO: 1886200
aguaaaccuccgugggauc

SEQ ID NO: 2393715 - RNA, 19 nt, Artificial Sequence
  Description of Artificial Sequence: Synthetic oligonucleotide
  Antisense strand to SEQ ID NO: 2393714
gaucccacggagguuuacu

SEQ ID NO: 2393716 - RNA, 19 nt, Artificial Sequence
  Description of Artificial Sequence: Synthetic oligonucleotide
  Sense strand starting at position 3026 of SEQ ID NO: 1886200
cagggauucuuugccuaga

SEQ ID NO: 2393717 - RNA, 19 nt, Artificial Sequence
  Description of Artificial Sequence: Synthetic oligonucleotide
  Antisense strand to SEQ ID NO: 2393716
ucuaggcaaagaaucccug

SEQ ID NO: 2393718 - RNA, 19 nt, Artificial Sequence
  Description of Artificial Sequence: Synthetic oligonucleotide
  Sense strand starting at position 3027 of SEQ ID NO: 1886200
agggauucuuugccuagaa

SEQ ID NO: 2393719 - RNA, 19 nt, Artificial Sequence
  Description of Artificial Sequence: Synthetic oligonucleotide
  Antisense strand to SEQ ID NO: 2393718
uucuaggcaaagaaucccu

SEQ ID NO: 2393720 - RNA, 19 nt, Artificial Sequence
  Description of Artificial Sequence: Synthetic oligonucleotide
  Sense strand starting at position 3028 of SEQ ID NO: 1886200
gggauucuuugccuagaau

SEQ ID NO: 2393721 - RNA, 19 nt, Artificial Sequence
  Description of Artificial Sequence: Synthetic oligonucleotide
  Antisense strand to SEQ ID NO: 2393720
auucuaggcaaagaauccc

SEQ ID NO: 2393722 - RNA, 19 nt, Artificial Sequence
  Description of Artificial Sequence: Synthetic oligonucleotide
  Sense strand starting at position 3029 of SEQ ID NO: 1886200
ggauucuuugccuagaaua

SEQ ID NO: 2393723 - RNA, 19 nt, Artificial Sequence
  Description of Artificial Sequence: Synthetic oligonucleotide
  Antisense strand to SEQ ID NO: 2393722
uauucuaggcaaagaaucc

SEQ ID NO: 2393724 - RNA, 19 nt, Artificial Sequence
  Description of Artificial Sequence: Synthetic oligonucleotide
  Sense strand starting at position 3031 of SEQ ID NO: 1886200
auucuuugccuagaauaag

SEQ ID NO: 2393725 - RNA, 19 nt, Artificial Sequence
  Description of Artificial Sequence: Synthetic oligonucleotide
  Antisense strand to SEQ ID NO: 2393724
cuuauucuaggcaaagaau

SEQ ID NO: 2393726 - RNA, 19 nt, Artificial Sequence
  Description of Artificial Sequence: Synthetic oligonucleotide
  Sense strand starting at position 3279 of SEQ ID NO: 1886200
caguccugucccugguuga

SEQ ID NO: 2393727 - RNA, 19 nt, Artificial Sequence
  Description of Artificial Sequence: Synthetic oligonucleotide
  Antisense strand to SEQ ID NO: 2393726
ucaaccagggacaggacug

SEQ ID NO: 2393728 - RNA, 19 nt, Artificial Sequence
  Description of Artificial Sequence: Synthetic oligonucleotide
  Sense strand starting at position 3379 of SEQ ID NO: 1886200
ugggaaccugucgaaguua

SEQ ID NO: 2393729 - RNA, 19 nt, Artificial Sequence
  Description of Artificial Sequence: Synthetic oligonucleotide
  Antisense strand to SEQ ID NO: 2393728
uaacuucgacagguuccca

SEQ ID NO: 2393730 - RNA, 19 nt, Artificial Sequence
  Description of Artificial Sequence: Synthetic oligonucleotide
  Sense strand starting at position 3391 of SEQ ID NO: 1886200
gaaguuaucaaguguggcu

SEQ ID NO: 2393731 - RNA, 19 nt, Artificial Sequence
  Description of Artificial Sequence: Synthetic oligonucleotide
  Antisense strand to SEQ ID NO: 2393730
agccacacuugauaacuuc

SEQ ID NO: 2393732 - RNA, 19 nt, Artificial Sequence
  Description of Artificial Sequence: Synthetic oligonucleotide
  Sense strand starting at position 3433 of SEQ ID NO: 1886200
ccaugugggccucaggaaa

SEQ ID NO: 2393733 - RNA, 19 nt, Artificial Sequence
  Description of Artificial Sequence: Synthetic oligonucleotide
  Antisense strand to SEQ ID NO: 2393732
uuuccugaggcccacaugg

SEQ ID NO: 2393734 - RNA, 19 nt, Artificial Sequence
  Description of Artificial Sequence: Synthetic oligonucleotide
  Sense strand starting at position 3597 of SEQ ID NO: 1886200
gucugaugaccacggacaa

SEQ ID NO: 2393735 - RNA, 19 nt, Artificial Sequence
  Description of Artificial Sequence: Synthetic oligonucleotide
  Antisense strand to SEQ ID NO: 2393734
uuguccguggucaucagac

SEQ ID NO: 2393736 - RNA, 19 nt, Artificial Sequence
  Description of Artificial Sequence: Synthetic oligonucleotide
  Sense strand starting at position 3787 of SEQ ID NO: 1886200
ggcauuugcugguuaccua

SEQ ID NO: 2393737 - RNA, 19 nt, Artificial Sequence
  Description of Artificial Sequence: Synthetic oligonucleotide
  Antisense strand to SEQ ID NO: 2393736
uagguaaccagcaaaugcc

SEQ ID NO: 2393738 - RNA, 19 nt, Artificial Sequence
  Description of Artificial Sequence: Synthetic oligonucleotide
  Sense strand starting at position 3795 of SEQ ID NO: 1886200
cugguuaccuaccaugaga

SEQ ID NO: 2393739 - RNA, 19 nt, Artificial Sequence
  Description of Artificial Sequence: Synthetic oligonucleotide
  Antisense strand to SEQ ID NO: 2393738
ucucaugguagguaaccag

SEQ ID NO: 2393740 - RNA, 19 nt, Artificial Sequence
  Description of Artificial Sequence: Synthetic oligonucleotide
  Sense strand starting at position 3797 of SEQ ID NO: 1886200
gguuaccuaccaugagaag

SEQ ID NO: 2393741 - RNA, 19 nt, Artificial Sequence
  Description of Artificial Sequence: Synthetic oligonucleotide
  Antisense strand to SEQ ID NO: 2393740
cuucucaugguagguaacc

SEQ ID NO: 2393742 - RNA, 19 nt, Artificial Sequence
  Description of Artificial Sequence: Synthetic oligonucleotide
  Sense strand starting at position 3817 of SEQ ID NO: 1886200
agcauacagcagugguuaa

SEQ ID NO: 2393743 - RNA, 19 nt, Artificial Sequence
  Description of Artificial Sequence: Synthetic oligonucleotide
  Antisense strand to SEQ ID NO: 2393742
uuaaccacugcuguaugcu

SEQ ID NO: 2393744 - RNA, 19 nt, Artificial Sequence
  Description of Artificial Sequence: Synthetic oligonucleotide
  Sense strand starting at position 3821 of SEQ ID NO: 1886200
uacagcagugguuaagaau

SEQ ID NO: 2393745 - RNA, 19 nt, Artificial Sequence
  Description of Artificial Sequence: Synthetic oligonucleotide
  Antisense strand to SEQ ID NO: 2393744
auucuuaaccacugcugua

SEQ ID NO: 2393746 - RNA, 19 nt, Artificial Sequence
  Description of Artificial Sequence: Synthetic oligonucleotide
  Sense strand starting at position 3830 of SEQ ID NO: 1886200
gguuaagaauaucaaccua

SEQ ID NO: 2393747 - RNA, 19 nt, Artificial Sequence
  Description of Artificial Sequence: Synthetic oligonucleotide
  Antisense strand to SEQ ID NO: 2393746
uagguugauauucuuaacc

SEQ ID NO: 2393748 - RNA, 19 nt, Artificial Sequence
  Description of Artificial Sequence: Synthetic oligonucleotide
  Sense strand starting at position 3876 of SEQ ID NO: 1886200
gugugaauuugagaaggua

SEQ ID NO: 2393749 - RNA, 19 nt, Artificial Sequence
  Description of Artificial Sequence: Synthetic oligonucleotide
  Antisense strand to SEQ ID NO: 2393748
uaccuucucaaauucacac

SEQ ID NO: 2393750 - RNA, 19 nt, Artificial Sequence
  Description of Artificial Sequence: Synthetic oligonucleotide
  Sense strand starting at position 3890 of SEQ ID NO: 1886200
agguacuaauccucacuga

SEQ ID NO: 2393751 - RNA, 19 nt, Artificial Sequence
  Description of Artificial Sequence: Synthetic oligonucleotide
  Antisense strand to SEQ ID NO: 2393750
ucagugaggauuaguaccu

SEQ ID NO: 2393752 - RNA, 19 nt, Artificial Sequence
  Description of Artificial Sequence: Synthetic oligonucleotide
  Sense strand starting at position 25 of SEQ ID NO: 1886201
ugcgauuucuuaucacucu

SEQ ID NO: 2393753 - RNA, 19 nt, Artificial Sequence
  Description of Artificial Sequence: Synthetic oligonucleotide
  Antisense strand to SEQ ID NO: 2393752
agagugauaagaaaucgca

SEQ ID NO: 2393754 - RNA, 19 nt, Artificial Sequence
  Description of Artificial Sequence: Synthetic oligonucleotide
  Sense strand starting at position 51 of SEQ ID NO: 1886201
gggcuagaguucguucuau

SEQ ID NO: 2393755 - RNA, 19 nt, Artificial Sequence
  Description of Artificial Sequence: Synthetic oligonucleotide
  Antisense strand to SEQ ID NO: 2393754
auagaacgaacucuagccc

SEQ ID NO: 2393756 - RNA, 19 nt, Artificial Sequence
  Description of Artificial Sequence: Synthetic oligonucleotide
  Sense strand starting at position 96 of SEQ ID NO: 1886201
cugguucugcugugaacuu

SEQ ID NO: 2393757 - RNA, 19 nt, Artificial Sequence
  Description of Artificial Sequence: Synthetic oligonucleotide
  Antisense strand to SEQ ID NO: 2393756
aaguucacagcagaaccag

SEQ ID NO: 2393758 - RNA, 19 nt, Artificial Sequence
  Description of Artificial Sequence: Synthetic oligonucleotide
  Sense strand starting at position 132 of SEQ ID NO: 1886201
gacagauucugucugugcu

SEQ ID NO: 2393759 - RNA, 19 nt, Artificial Sequence
  Description of Artificial Sequence: Synthetic oligonucleotide
  Antisense strand to SEQ ID NO: 2393758
agcacagacagaaucuguc

SEQ ID NO: 2393760 - RNA, 19 nt, Artificial Sequence
  Description of Artificial Sequence: Synthetic oligonucleotide
  Sense strand starting at position 133 of SEQ ID NO: 1886201
acagauucugucugugcuu

SEQ ID NO: 2393761 - RNA, 19 nt, Artificial Sequence
  Description of Artificial Sequence: Synthetic oligonucleotide
  Antisense strand to SEQ ID NO: 2393760
aagcacagacagaaucugu

SEQ ID NO: 2393762 - RNA, 19 nt, Artificial Sequence
  Description of Artificial Sequence: Synthetic oligonucleotide
  Sense strand starting at position 155 of SEQ ID NO: 1886201
ucggauggauguuuagaga

SEQ ID NO: 2393763 - RNA, 19 nt, Artificial Sequence
  Description of Artificial Sequence: Synthetic oligonucleotide
  Antisense strand to SEQ ID NO: 2393762
ucucuaaacauccauccga

SEQ ID NO: 2393764 - RNA, 19 nt, Artificial Sequence
  Description of Artificial Sequence: Synthetic oligonucleotide
  Sense strand starting at position 158 of SEQ ID NO: 1886201
gauggauguuuagagaacu

SEQ ID NO: 2393765 - RNA, 19 nt, Artificial Sequence
  Description of Artificial Sequence: Synthetic oligonucleotide
  Antisense strand to SEQ ID NO: 2393764
aguucucuaaacauccauc

SEQ ID NO: 2393766 - RNA, 19 nt, Artificial Sequence
  Description of Artificial Sequence: Synthetic oligonucleotide
  Sense strand starting at position 190 of SEQ ID NO: 1886201
gagggcuccuucuuugaga

SEQ ID NO: 2393767 - RNA, 19 nt, Artificial Sequence
  Description of Artificial Sequence: Synthetic oligonucleotide
  Antisense strand to SEQ ID NO: 2393766
ucucaaagaaggagcccuc

SEQ ID NO: 2393768 - RNA, 19 nt, Artificial Sequence
  Description of Artificial Sequence: Synthetic oligonucleotide
  Sense strand starting at position 229 of SEQ ID NO: 1886201
aggacuggaaguggucaaa

SEQ ID NO: 2393769 - RNA, 19 nt, Artificial Sequence
  Description of Artificial Sequence: Synthetic oligonucleotide
  Antisense strand to SEQ ID NO: 2393768
uuugaccacuuccaguccu

SEQ ID NO: 2393770 - RNA, 19 nt, Artificial Sequence
  Description of Artificial Sequence: Synthetic oligonucleotide
  Sense strand starting at position 658 of SEQ ID NO: 1886201
agacauguggaaggcuuua

SEQ ID NO: 2393771 - RNA, 19 nt, Artificial Sequence
  Description of Artificial Sequence: Synthetic oligonucleotide
  Antisense strand to SEQ ID NO: 2393770
uaaagccuuccacaugucu

SEQ ID NO: 2393772 - RNA, 19 nt, Artificial Sequence
  Description of Artificial Sequence: Synthetic oligonucleotide
  Sense strand starting at position 786 of SEQ ID NO: 1886201
uugcaauaggcucaauaau

SEQ ID NO: 2393773 - RNA, 19 nt, Artificial Sequence
  Description of Artificial Sequence: Synthetic oligonucleotide
  Antisense strand to SEQ ID NO: 2393772
auuauugagccuauugcaa

SEQ ID NO: 2393774 - RNA, 19 nt, Artificial Sequence
  Description of Artificial Sequence: Synthetic oligonucleotide
  Sense strand starting at position 978 of SEQ ID NO: 1886201
uugugcauucucugaagag

SEQ ID NO: 2393775 - RNA, 19 nt, Artificial Sequence
  Description of Artificial Sequence: Synthetic oligonucleotide
  Antisense strand to SEQ ID NO: 2393774
cucuucagagaaugcacaa

SEQ ID NO: 2393776 - RNA, 19 nt, Artificial Sequence
  Description of Artificial Sequence: Synthetic oligonucleotide
  Sense strand starting at position 988 of SEQ ID NO: 1886201
ucugaagagucagccugaa

SEQ ID NO: 2393777 - RNA, 19 nt, Artificial Sequence
  Description of Artificial Sequence: Synthetic oligonucleotide
  Antisense strand to SEQ ID NO: 2393776
uucaggcugacucuucaga

SEQ ID NO: 2393778 - RNA, 19 nt, Artificial Sequence
  Description of Artificial Sequence: Synthetic oligonucleotide
  Sense strand starting at position 1053 of SEQ ID NO: 1886201
ccaguuuaacaucaauagu

SEQ ID NO: 2393779 - RNA, 19 nt, Artificial Sequence
  Description of Artificial Sequence: Synthetic oligonucleotide
  Antisense strand to SEQ ID NO: 2393778
acuauugauguuaaacugg

SEQ ID NO: 2393780 - RNA, 19 nt, Artificial Sequence
  Description of Artificial Sequence: Synthetic oligonucleotide
  Sense strand starting at position 1069 of SEQ ID NO: 1886201
agugaaguaugcccacacu

SEQ ID NO: 2393781 - RNA, 19 nt, Artificial Sequence
  Description of Artificial Sequence: Synthetic oligonucleotide
  Antisense strand to SEQ ID NO: 2393780
agugugggcauacuucacu

SEQ ID NO: 2393782 - RNA, 19 nt, Artificial Sequence
  Description of Artificial Sequence: Synthetic oligonucleotide
  Sense strand starting at position 2029 of SEQ ID NO: 1886201
ccguguucuccggaacuac

SEQ ID NO: 2393783 - RNA, 19 nt, Artificial Sequence
  Description of Artificial Sequence: Synthetic oligonucleotide
  Antisense strand to SEQ ID NO: 2393782
guaguuccggagaacacgg

SEQ ID NO: 2393784 - RNA, 19 nt, Artificial Sequence
  Description of Artificial Sequence: Synthetic oligonucleotide
  Sense strand starting at position 2115 of SEQ ID NO: 1886201
gcgccuauucguuucagac

SEQ ID NO: 2393785 - RNA, 19 nt, Artificial Sequence
  Description of Artificial Sequence: Synthetic oligonucleotide
  Antisense strand to SEQ ID NO: 2393784
gucugaaacgaauaggcgc

SEQ ID NO: 2393786 - RNA, 19 nt, Artificial Sequence
  Description of Artificial Sequence: Synthetic oligonucleotide
  Sense strand starting at position 2128 of SEQ ID NO: 1886201
ucagacgaaucauugauga

SEQ ID NO: 2393787 - RNA, 19 nt, Artificial Sequence
  Description of Artificial Sequence: Synthetic oligonucleotide
  Antisense strand to SEQ ID NO: 2393786
ucaucaaugauucgucuga

SEQ ID NO: 2393788 - RNA, 19 nt, Artificial Sequence
  Description of Artificial Sequence: Synthetic oligonucleotide
  Sense strand starting at position 2733 of SEQ ID NO: 1886201
gcugccacgccaguuuaua

SEQ ID NO: 2393789 - RNA, 19 nt, Artificial Sequence
  Description of Artificial Sequence: Synthetic oligonucleotide
  Antisense strand to SEQ ID NO: 2393788
uauaaacuggcguggcagc

SEQ ID NO: 2393790 - RNA, 19 nt, Artificial Sequence
  Description of Artificial Sequence: Synthetic oligonucleotide
  Sense strand starting at position 2788 of SEQ ID NO: 1886201
cccuguuagucccuauuua

SEQ ID NO: 2393791 - RNA, 19 nt, Artificial Sequence
  Description of Artificial Sequence: Synthetic oligonucleotide
  Antisense strand to SEQ ID NO: 2393790
uaaauagggacuaacaggg

SEQ ID NO: 2393792 - RNA, 19 nt, Artificial Sequence
  Description of Artificial Sequence: Synthetic oligonucleotide
  Sense strand starting at position 2808 of SEQ ID NO: 1886201
ccuuacuaugcagaugaau

SEQ ID NO: 2393793 - RNA, 19 nt, Artificial Sequence
  Description of Artificial Sequence: Synthetic oligonucleotide
  Antisense strand to SEQ ID NO: 2393792
auucaucugcauaguaagg

SEQ ID NO: 2393794 - RNA, 19 nt, Artificial Sequence
  Description of Artificial Sequence: Synthetic oligonucleotide
  Sense strand starting at position 2819 of SEQ ID NO: 1886201
agaugaauauaucgagaca

SEQ ID NO: 2393795 - RNA, 19 nt, Artificial Sequence
  Description of Artificial Sequence: Synthetic oligonucleotide
  Antisense strand to SEQ ID NO: 2393794
ugucucgauauauucaucu

SEQ ID NO: 2393796 - RNA, 19 nt, Artificial Sequence
  Description of Artificial Sequence: Synthetic oligonucleotide
  Sense strand starting at position 2822 of SEQ ID NO: 1886201
ugaauauaucgagacagcu

SEQ ID NO: 2393797 - RNA, 19 nt, Artificial Sequence
  Description of Artificial Sequence: Synthetic oligonucleotide
  Antisense strand to SEQ ID NO: 2393796
agcugucucgauauauuca

SEQ ID NO: 2393798 - RNA, 19 nt, Artificial Sequence
  Description of Artificial Sequence: Synthetic oligonucleotide
  Sense strand starting at position 2844 of SEQ ID NO: 1886201
gacugaggucucugcccuu

SEQ ID NO: 2393799 - RNA, 19 nt, Artificial Sequence
  Description of Artificial Sequence: Synthetic oligonucleotide
  Antisense strand to SEQ ID NO: 2393798
aagggcagagaccucaguc

SEQ ID NO: 2393800 - RNA, 19 nt, Artificial Sequence
  Description of Artificial Sequence: Synthetic oligonucleotide
  Sense strand starting at position 2931 of SEQ ID NO: 1886201
gugguaaugcuuuaccacu

SEQ ID NO: 2393801 - RNA, 19 nt, Artificial Sequence
  Description of Artificial Sequence: Synthetic oligonucleotide
  Antisense strand to SEQ ID NO: 2393800
agugguaaagcauuaccac

SEQ ID NO: 2393802 - RNA, 19 nt, Artificial Sequence
  Description of Artificial Sequence: Synthetic oligonucleotide
  Sense strand starting at position 3000 of SEQ ID NO: 1886201
ugcacaguccugggucauu

SEQ ID NO: 2393803 - RNA, 19 nt, Artificial Sequence
  Description of Artificial Sequence: Synthetic oligonucleotide
  Antisense strand to SEQ ID NO: 2393802
aaugacccaggacugugca

SEQ ID NO: 2393804 - RNA, 19 nt, Artificial Sequence
  Description of Artificial Sequence: Synthetic oligonucleotide
  Sense strand starting at position 3005 of SEQ ID NO: 1886201
aguccugggucauucgaga

SEQ ID NO: 2393805 - RNA, 19 nt, Artificial Sequence
  Description of Artificial Sequence: Synthetic oligonucleotide
  Antisense strand to SEQ ID NO: 2393804
ucucgaaugacccaggacu

SEQ ID NO: 2393806 - RNA, 19 nt, Artificial Sequence
  Description of Artificial Sequence: Synthetic oligonucleotide
  Sense strand starting at position 3010 of SEQ ID NO: 1886201
ugggucauucgagauuaau

SEQ ID NO: 2393807 - RNA, 19 nt, Artificial Sequence
  Description of Artificial Sequence: Synthetic oligonucleotide
  Antisense strand to SEQ ID NO: 2393806
auuaaucucgaaugaccca

SEQ ID NO: 2393808 - RNA, 19 nt, Artificial Sequence
  Description of Artificial Sequence: Synthetic oligonucleotide
  Sense strand starting at position 3019 of SEQ ID NO: 1886201
cgagauuaauaccauugac

SEQ ID NO: 2393809 - RNA, 19 nt, Artificial Sequence
  Description of Artificial Sequence: Synthetic oligonucleotide
  Antisense strand to SEQ ID NO: 2393808
gucaaugguauuaaucucg

SEQ ID NO: 2393810 - RNA, 19 nt, Artificial Sequence
  Description of Artificial Sequence: Synthetic oligonucleotide
  Sense strand starting at position 3176 of SEQ ID NO: 1886201
cggaguuaugugcaaccca

SEQ ID NO: 2393811 - RNA, 19 nt, Artificial Sequence
  Description of Artificial Sequence: Synthetic oligonucleotide
  Antisense strand to SEQ ID NO: 2393810
uggguugcacauaacuccg

SEQ ID NO: 2393812 - RNA, 19 nt, Artificial Sequence
  Description of Artificial Sequence: Synthetic oligonucleotide
  Sense strand starting at position 3199 of SEQ ID NO: 1886201
acuacaaugcagugcuauu

SEQ ID NO: 2393813 - RNA, 19 nt, Artificial Sequence
  Description of Artificial Sequence: Synthetic oligonucleotide
  Antisense strand to SEQ ID NO: 2393812
aauagcacugcauuguagu

SEQ ID NO: 2393814 - RNA, 19 nt, Artificial Sequence
  Description of Artificial Sequence: Synthetic oligonucleotide
  Sense strand starting at position 3215 of SEQ ID NO: 1886201
auuaaaugcuuugcgaaau

SEQ ID NO: 2393815 - RNA, 19 nt, Artificial Sequence
  Description of Artificial Sequence: Synthetic oligonucleotide
  Antisense strand to SEQ ID NO: 2393814
auuucgcaaagcauuuaau

SEQ ID NO: 2393816 - RNA, 19 nt, Artificial Sequence
  Description of Artificial Sequence: Synthetic oligonucleotide
  Sense strand starting at position 3228 of SEQ ID NO: 1886201
cgaaaugcuacgugcuaaa

SEQ ID NO: 2393817 - RNA, 19 nt, Artificial Sequence
  Description of Artificial Sequence: Synthetic oligonucleotide
  Antisense strand to SEQ ID NO: 2393816
uuuagcacguagcauuucg

SEQ ID NO: 2393818 - RNA, 19 nt, Artificial Sequence
  Description of Artificial Sequence: Synthetic oligonucleotide
  Sense strand starting at position 3241 of SEQ ID NO: 1886201
gcuaaauggagguguguuc

SEQ ID NO: 2393819 - RNA, 19 nt, Artificial Sequence
  Description of Artificial Sequence: Synthetic oligonucleotide
  Antisense strand to SEQ ID NO: 2393818
gaacacaccuccauuuagc

SEQ ID NO: 2393820 - RNA, 19 nt, Artificial Sequence
  Description of Artificial Sequence: Synthetic oligonucleotide
  Sense strand starting at position 3676 of SEQ ID NO: 1886201
ccuggaacccugcauugua

SEQ ID NO: 2393821 - RNA, 19 nt, Artificial Sequence
  Description of Artificial Sequence: Synthetic oligonucleotide
  Antisense strand to SEQ ID NO: 2393820
uacaaugcaggguuccagg

SEQ ID NO: 2393822 - RNA, 19 nt, Artificial Sequence
  Description of Artificial Sequence: Synthetic oligonucleotide
  Sense strand starting at position 3823 of SEQ ID NO: 1886201
uagagaaucaguugcgaag

SEQ ID NO: 2393823 - RNA, 19 nt, Artificial Sequence
  Description of Artificial Sequence: Synthetic oligonucleotide
  Antisense strand to SEQ ID NO: 2393822
cuucgcaacugauucucua

SEQ ID NO: 2393824 - RNA, 19 nt, Artificial Sequence
  Description of Artificial Sequence: Synthetic oligonucleotide
  Sense strand starting at position 3838 of SEQ ID NO: 1886201
gaagcagggccauggaaau

SEQ ID NO: 2393825 - RNA, 19 nt, Artificial Sequence
  Description of Artificial Sequence: Synthetic oligonucleotide
  Antisense strand to SEQ ID NO: 2393824
auuuccauggcccugcuuc

SEQ ID NO: 2393826 - RNA, 19 nt, Artificial Sequence
  Description of Artificial Sequence: Synthetic oligonucleotide
  Sense strand starting at position 3867 of SEQ ID NO: 1886201
ccucuuaacuuagugucaa

SEQ ID NO: 2393827 - RNA, 19 nt, Artificial Sequence
  Description of Artificial Sequence: Synthetic oligonucleotide
  Antisense strand to SEQ ID NO: 2393826
uugacacuaaguuaagagg

SEQ ID NO: 2393828 - RNA, 19 nt, Artificial Sequence
  Description of Artificial Sequence: Synthetic oligonucleotide
  Sense strand starting at position 3914 of SEQ ID NO: 1886201
ugaacuuaauuugggagaa

SEQ ID NO: 2393829 - RNA, 19 nt, Artificial Sequence
  Description of Artificial Sequence: Synthetic oligonucleotide
  Antisense strand to SEQ ID NO: 2393828
uucucccaaauuaaguuca

SEQ ID NO: 2393830 - RNA, 19 nt, Artificial Sequence
  Description of Artificial Sequence: Synthetic oligonucleotide
  Sense strand starting at position 3915 of SEQ ID NO: 1886201
gaacuuaauuugggagaaa

SEQ ID NO: 2393831 - RNA, 19 nt, Artificial Sequence
  Description of Artificial Sequence: Synthetic oligonucleotide
  Antisense strand to SEQ ID NO: 2393830
uuucucccaaauuaaguuc

SEQ ID NO: 2393832 - RNA, 19 nt, Artificial Sequence
  Description of Artificial Sequence: Synthetic oligonucleotide
  Sense strand starting at position 392 of SEQ ID NO: 1886202
aucacauccguauagaagu

SEQ ID NO: 2393833 - RNA, 19 nt, Artificial Sequence
  Description of Artificial Sequence: Synthetic oligonucleotide
  Antisense strand to SEQ ID NO: 2393832
acuucuauacggaugugau

SEQ ID NO: 2393834 - RNA, 19 nt, Artificial Sequence
  Description of Artificial Sequence: Synthetic oligonucleotide
  Sense strand starting at position 398 of SEQ ID NO: 1886202
uccguauagaaguaaaugu

SEQ ID NO: 2393835 - RNA, 19 nt, Artificial Sequence
  Description of Artificial Sequence: Synthetic oligonucleotide
  Antisense strand to SEQ ID NO: 2393834
acauuuacuucuauacgga

SEQ ID NO: 2393836 - RNA, 19 nt, Artificial Sequence
  Description of Artificial Sequence: Synthetic oligonucleotide
  Sense strand starting at position 478 of SEQ ID NO: 1886202
uuuggagacuauuaagaua

SEQ ID NO: 2393837 - RNA, 19 nt, Artificial Sequence
  Description of Artificial Sequence: Synthetic oligonucleotide
  Antisense strand to SEQ ID NO: 2393836
uaucuuaauagucuccaaa

SEQ ID NO: 2393838 - RNA, 19 nt, Artificial Sequence
  Description of Artificial Sequence: Synthetic oligonucleotide
  Sense strand starting at position 481 of SEQ ID NO: 1886202
ggagacuauuaagauacaa

SEQ ID NO: 2393839 - RNA, 19 nt, Artificial Sequence
  Description of Artificial Sequence: Synthetic oligonucleotide
  Antisense strand to SEQ ID NO: 2393838
uuguaucuuaauagucucc

SEQ ID NO: 2393840 - RNA, 19 nt, Artificial Sequence
  Description of Artificial Sequence: Synthetic oligonucleotide
  Sense strand starting at position 563 of SEQ ID NO: 1886202
ucagcaugcuuguaauucu

SEQ ID NO: 2393841 - RNA, 19 nt, Artificial Sequence
  Description of Artificial Sequence: Synthetic oligonucleotide
  Antisense strand to SEQ ID NO: 2393840
agaauuacaagcaugcuga

SEQ ID NO: 2393842 - RNA, 19 nt, Artificial Sequence
  Description of Artificial Sequence: Synthetic oligonucleotide
  Sense strand starting at position 570 of SEQ ID NO: 1886202
gcuuguaauucucugaaug

SEQ ID NO: 2393843 - RNA, 19 nt, Artificial Sequence
  Description of Artificial Sequence: Synthetic oligonucleotide
  Antisense strand to SEQ ID NO: 2393842
cauucagagaauuacaagc

SEQ ID NO: 2393844 - RNA, 19 nt, Artificial Sequence
  Description of Artificial Sequence: Synthetic oligonucleotide
  Sense strand starting at position 571 of SEQ ID NO: 1886202
cuuguaauucucugaaugg

SEQ ID NO: 2393845 - RNA, 19 nt, Artificial Sequence
  Description of Artificial Sequence: Synthetic oligonucleotide
  Antisense strand to SEQ ID NO: 2393844
ccauucagagaauuacaag

SEQ ID NO: 2393846 - RNA, 19 nt, Artificial Sequence
  Description of Artificial Sequence: Synthetic oligonucleotide
  Sense strand starting at position 572 of SEQ ID NO: 1886202
uuguaauucucugaauggu

SEQ ID NO: 2393847 - RNA, 19 nt, Artificial Sequence
  Description of Artificial Sequence: Synthetic oligonucleotide
  Antisense strand to SEQ ID NO: 2393846
accauucagagaauuacaa

SEQ ID NO: 2393848 - RNA, 19 nt, Artificial Sequence
  Description of Artificial Sequence: Synthetic oligonucleotide
  Sense strand starting at position 580 of SEQ ID NO: 1886202
cucugaaugguccauguua

SEQ ID NO: 2393849 - RNA, 19 nt, Artificial Sequence
  Description of Artificial Sequence: Synthetic oligonucleotide
  Antisense strand to SEQ ID NO: 2393848
uaacauggaccauucagag

SEQ ID NO: 2393850 - RNA, 19 nt, Artificial Sequence
  Description of Artificial Sequence: Synthetic oligonucleotide
  Sense strand starting at position 582 of SEQ ID NO: 1886202
cugaaugguccauguuaau

SEQ ID NO: 2393851 - RNA, 19 nt, Artificial Sequence
  Description of Artificial Sequence: Synthetic oligonucleotide
  Antisense strand to SEQ ID NO: 2393850
auuaacauggaccauucag

SEQ ID NO: 2393852 - RNA, 19 nt, Artificial Sequence
  Description of Artificial Sequence: Synthetic oligonucleotide
  Sense strand starting at position 1097 of SEQ ID NO: 1886202
ucugaauccuccuuuguga

SEQ ID NO: 2393853 - RNA, 19 nt, Artificial Sequence
  Description of Artificial Sequence: Synthetic oligonucleotide
  Antisense strand to SEQ ID NO: 2393852
ucacaaaggaggauucaga

SEQ ID NO: 2393854 - RNA, 19 nt, Artificial Sequence
  Description of Artificial Sequence: Synthetic oligonucleotide
  Sense strand starting at position 1099 of SEQ ID NO: 1886202
ugaauccuccuuugugaag

SEQ ID NO: 2393855 - RNA, 19 nt, Artificial Sequence
  Description of Artificial Sequence: Synthetic oligonucleotide
  Antisense strand to SEQ ID NO: 2393854
cuucacaaaggaggauuca

SEQ ID NO: 2393856 - RNA, 19 nt, Artificial Sequence
  Description of Artificial Sequence: Synthetic oligonucleotide
  Sense strand starting at position 1100 of SEQ ID NO: 1886202
gaauccuccuuugugaagu

SEQ ID NO: 2393857 - RNA, 19 nt, Artificial Sequence
  Description of Artificial Sequence: Synthetic oligonucleotide
  Antisense strand to SEQ ID NO: 2393856
acuucacaaaggaggauuc

SEQ ID NO: 2393858 - RNA, 19 nt, Artificial Sequence
  Description of Artificial Sequence: Synthetic oligonucleotide
  Sense strand starting at position 1110 of SEQ ID NO: 1886202
uugugaaguucucccucua

SEQ ID NO: 2393859 - RNA, 19 nt, Artificial Sequence
  Description of Artificial Sequence: Synthetic oligonucleotide
  Antisense strand to SEQ ID NO: 2393858
uagagggagaacuucacaa

SEQ ID NO: 2393860 - RNA, 19 nt, Artificial Sequence
  Description of Artificial Sequence: Synthetic oligonucleotide
  Sense strand starting at position 1215 of SEQ ID NO: 1886202
ggcaauguuguaugucuga

SEQ ID NO: 2393861 - RNA, 19 nt, Artificial Sequence
  Description of Artificial Sequence: Synthetic oligonucleotide
  Antisense strand to SEQ ID NO: 2393860
ucagacauacaacauugcc

SEQ ID NO: 2393862 - RNA, 19 nt, Artificial Sequence
  Description of Artificial Sequence: Synthetic oligonucleotide
  Sense strand starting at position 1332 of SEQ ID NO: 1886202
aguaguauaugcuguggaa

SEQ ID NO: 2393863 - RNA, 19 nt, Artificial Sequence
  Description of Artificial Sequence: Synthetic oligonucleotide
  Antisense strand to SEQ ID NO: 2393862
uuccacagcauauacuacu

SEQ ID NO: 2393864 - RNA, 19 nt, Artificial Sequence
  Description of Artificial Sequence: Synthetic oligonucleotide
  Sense strand starting at position 1334 of SEQ ID NO: 1886202
uaguauaugcuguggaauu

SEQ ID NO: 2393865 - RNA, 19 nt, Artificial Sequence
  Description of Artificial Sequence: Synthetic oligonucleotide
  Antisense strand to SEQ ID NO: 2393864
aauuccacagcauauacua

SEQ ID NO: 2393866 - RNA, 19 nt, Artificial Sequence
  Description of Artificial Sequence: Synthetic oligonucleotide
  Sense strand starting at position 1335 of SEQ ID NO: 1886202
aguauaugcuguggaauuu

SEQ ID NO: 2393867 - RNA, 19 nt, Artificial Sequence
  Description of Artificial Sequence: Synthetic oligonucleotide
  Antisense strand to SEQ ID NO: 2393866
aaauuccacagcauauacu

SEQ ID NO: 2393868 - RNA, 19 nt, Artificial Sequence
  Description of Artificial Sequence: Synthetic oligonucleotide
  Sense strand starting at position 1763 of SEQ ID NO: 1886202
uccuuuacauguuugaaag

SEQ ID NO: 2393869 - RNA, 19 nt, Artificial Sequence
  Description of Artificial Sequence: Synthetic oligonucleotide
  Antisense strand to SEQ ID NO: 2393868
cuuucaaacauguaaagga

SEQ ID NO: 2393870 - RNA, 19 nt, Artificial Sequence
  Description of Artificial Sequence: Synthetic oligonucleotide
  Sense strand starting at position 1764 of SEQ ID NO: 1886202
ccuuuacauguuugaaagu

SEQ ID NO: 2393871 - RNA, 19 nt, Artificial Sequence
  Description of Artificial Sequence: Synthetic oligonucleotide
  Antisense strand to SEQ ID NO: 2393870
acuuucaaacauguaaagg

SEQ ID NO: 2393872 - RNA, 19 nt, Artificial Sequence
  Description of Artificial Sequence: Synthetic oligonucleotide
  Sense strand starting at position 1765 of SEQ ID NO: 1886202
cuuuacauguuugaaagua

SEQ ID NO: 2393873 - RNA, 19 nt, Artificial Sequence
  Description of Artificial Sequence: Synthetic oligonucleotide
  Antisense strand to SEQ ID NO: 2393872
uacuuucaaacauguaaag

SEQ ID NO: 2393874 - RNA, 19 nt, Artificial Sequence
  Description of Artificial Sequence: Synthetic oligonucleotide
  Sense strand starting at position 1795 of SEQ ID NO: 1886202
acuuuaggguauucuacau

SEQ ID NO: 2393875 - RNA, 19 nt, Artificial Sequence
  Description of Artificial Sequence: Synthetic oligonucleotide
  Antisense strand to SEQ ID NO: 2393874
auguagaauacccuaaagu

SEQ ID NO: 2393876 - RNA, 19 nt, Artificial Sequence
  Description of Artificial Sequence: Synthetic oligonucleotide
  Sense strand starting at position 2010 of SEQ ID NO: 1886202
acuaaaguccuauauccga

SEQ ID NO: 2393877 - RNA, 19 nt, Artificial Sequence
  Description of Artificial Sequence: Synthetic oligonucleotide
  Antisense strand to SEQ ID NO: 2393876
ucggauauaggacuuuagu

SEQ ID NO: 2393878 - RNA, 19 nt, Artificial Sequence
  Description of Artificial Sequence: Synthetic oligonucleotide
  Sense strand starting at position 2015 of SEQ ID NO: 1886202
aguccuauauccgagagcu

SEQ ID NO: 2393879 - RNA, 19 nt, Artificial Sequence
  Description of Artificial Sequence: Synthetic oligonucleotide
  Antisense strand to SEQ ID NO: 2393878
agcucucggauauaggacu

SEQ ID NO: 2393880 - RNA, 19 nt, Artificial Sequence
  Description of Artificial Sequence: Synthetic oligonucleotide
  Sense strand starting at position 2095 of SEQ ID NO: 1886202
uuuauccaaugguguauau

SEQ ID NO: 2393881 - RNA, 19 nt, Artificial Sequence
  Description of Artificial Sequence: Synthetic oligonucleotide
  Antisense strand to SEQ ID NO: 2393880
auauacaccauuggauaaa

SEQ ID NO: 2393882 - RNA, 19 nt, Artificial Sequence
  Description of Artificial Sequence: Synthetic oligonucleotide
  Sense strand starting at position 2099 of SEQ ID NO: 1886202
uccaaugguguauauguau

SEQ ID NO: 2393883 - RNA, 19 nt, Artificial Sequence
  Description of Artificial Sequence: Synthetic oligonucleotide
  Antisense strand to SEQ ID NO: 2393882
auacauauacaccauugga

SEQ ID NO: 2393884 - RNA, 19 nt, Artificial Sequence
  Description of Artificial Sequence: Synthetic oligonucleotide
  Sense strand starting at position 2105 of SEQ ID NO: 1886202
gguguauauguauaugaac

SEQ ID NO: 2393885 - RNA, 19 nt, Artificial Sequence
  Description of Artificial Sequence: Synthetic oligonucleotide
  Antisense strand to SEQ ID NO: 2393884
guucauauacauauacacc

SEQ ID NO: 2393886 - RNA, 19 nt, Artificial Sequence
  Description of Artificial Sequence: Synthetic oligonucleotide
  Sense strand starting at position 2108 of SEQ ID NO: 1886202
guauauguauaugaacacu

SEQ ID NO: 2393887 - RNA, 19 nt, Artificial Sequence
  Description of Artificial Sequence: Synthetic oligonucleotide
  Antisense strand to SEQ ID NO: 2393886
aguguucauauacauauac

SEQ ID NO: 2393888 - RNA, 19 nt, Artificial Sequence
  Description of Artificial Sequence: Synthetic oligonucleotide
  Sense strand starting at position 2155 of SEQ ID NO: 1886202
agugcuauauaggaucagu

SEQ ID NO: 2393889 - RNA, 19 nt, Artificial Sequence
  Description of Artificial Sequence: Synthetic oligonucleotide
  Antisense strand to SEQ ID NO: 2393888
acugauccuauauagcacu

SEQ ID NO: 2393890 - RNA, 19 nt, Artificial Sequence
  Description of Artificial Sequence: Synthetic oligonucleotide
  Sense strand starting at position 2610 of SEQ ID NO: 1886202
gacuaaggaucugguccua

SEQ ID NO: 2393891 - RNA, 19 nt, Artificial Sequence
  Description of Artificial Sequence: Synthetic oligonucleotide
  Antisense strand to SEQ ID NO: 2393890
uaggaccagauccuuaguc

SEQ ID NO: 2393892 - RNA, 19 nt, Artificial Sequence
  Description of Artificial Sequence: Synthetic oligonucleotide
  Sense strand starting at position 2615 of SEQ ID NO: 1886202
aggaucugguccuauaaua

SEQ ID NO: 2393893 - RNA, 19 nt, Artificial Sequence
  Description of Artificial Sequence: Synthetic oligonucleotide
  Antisense strand to SEQ ID NO: 2393892
uauuauaggaccagauccu

SEQ ID NO: 2393894 - RNA, 19 nt, Artificial Sequence
  Description of Artificial Sequence: Synthetic oligonucleotide
  Sense strand starting at position 2701 of SEQ ID NO: 1886202
ccuauuuauugcccagagu

SEQ ID NO: 2393895 - RNA, 19 nt, Artificial Sequence
  Description of Artificial Sequence: Synthetic oligonucleotide
  Antisense strand to SEQ ID NO: 2393894
acucugggcaauaaauagg

SEQ ID NO: 2393896 - RNA, 19 nt, Artificial Sequence
  Description of Artificial Sequence: Synthetic oligonucleotide
  Sense strand starting at position 2939 of SEQ ID NO: 1886202
cuccaaagguaaugaguua

SEQ ID NO: 2393897 - RNA, 19 nt, Artificial Sequence
  Description of Artificial Sequence: Synthetic oligonucleotide
  Antisense strand to SEQ ID NO: 2393896
uaacucauuaccuuuggag

SEQ ID NO: 2393898 - RNA, 19 nt, Artificial Sequence
  Description of Artificial Sequence: Synthetic oligonucleotide
  Sense strand starting at position 2946 of SEQ ID NO: 1886202
gguaaugaguuaucaauuc

SEQ ID NO: 2393899 - RNA, 19 nt, Artificial Sequence
  Description of Artificial Sequence: Synthetic oligonucleotide
  Antisense strand to SEQ ID NO: 2393898
gaauugauaacucauuacc

SEQ ID NO: 2393900 - RNA, 19 nt, Artificial Sequence
  Description of Artificial Sequence: Synthetic oligonucleotide
  Sense strand starting at position 3586 of SEQ ID NO: 1886202
gagcaagauucugucccua

SEQ ID NO: 2393901 - RNA, 19 nt, Artificial Sequence
  Description of Artificial Sequence: Synthetic oligonucleotide
  Antisense strand to SEQ ID NO: 2393900
uagggacagaaucuugcuc

SEQ ID NO: 2393902 - RNA, 19 nt, Artificial Sequence
  Description of Artificial Sequence: Synthetic oligonucleotide
  Sense strand starting at position 3588 of SEQ ID NO: 1886202
gcaagauucugucccuaaa

SEQ ID NO: 2393903 - RNA, 19 nt, Artificial Sequence
  Description of Artificial Sequence: Synthetic oligonucleotide
  Antisense strand to SEQ ID NO: 2393902
uuuagggacagaaucuugc

SEQ ID NO: 2393904 - RNA, 19 nt, Artificial Sequence
  Description of Artificial Sequence: Synthetic oligonucleotide
  Sense strand starting at position 3619 of SEQ ID NO: 1886202
aagcaaagcgcugggauua

SEQ ID NO: 2393905 - RNA, 19 nt, Artificial Sequence
  Description of Artificial Sequence: Synthetic oligonucleotide
  Antisense strand to SEQ ID NO: 2393904
uaaucccagcgcuuugcuu

SEQ ID NO: 2393906 - RNA, 19 nt, Artificial Sequence
  Description of Artificial Sequence: Synthetic oligonucleotide
  Sense strand starting at position 3930 of SEQ ID NO: 1886202
cauuuagcaugugaaugau

SEQ ID NO: 2393907 - RNA, 19 nt, Artificial Sequence
  Description of Artificial Sequence: Synthetic oligonucleotide
  Antisense strand to SEQ ID NO: 2393906
aucauucacaugcuaaaug

SEQ ID NO: 2393908 - RNA, 19 nt, Artificial Sequence
  Description of Artificial Sequence: Synthetic oligonucleotide
  Sense strand starting at position 3933 of SEQ ID NO: 1886202
uuagcaugugaaugauauu

SEQ ID NO: 2393909 - RNA, 19 nt, Artificial Sequence
  Description of Artificial Sequence: Synthetic oligonucleotide
  Antisense strand to SEQ ID NO: 2393908
aauaucauucacaugcuaa

SEQ ID NO: 2393910 - RNA, 19 nt, Artificial Sequence
  Description of Artificial Sequence: Synthetic oligonucleotide
  Sense strand starting at position 3936 of SEQ ID NO: 1886202
gcaugugaaugauauuuau

SEQ ID NO: 2393911 - RNA, 19 nt, Artificial Sequence
  Description of Artificial Sequence: Synthetic oligonucleotide
  Antisense strand to SEQ ID NO: 2393910
auaaauaucauucacaugc

SEQ ID NO: 2393912 - RNA, 19 nt, Artificial Sequence
  Description of Artificial Sequence: Synthetic oligonucleotide
  Sense strand starting at position 65 of SEQ ID NO: 1886203
accugcaaagucugacaaa

SEQ ID NO: 2393913 - RNA, 19 nt, Artificial Sequence
  Description of Artificial Sequence: Synthetic oligonucleotide
  Antisense strand to SEQ ID NO: 2393912
uuugucagacuuugcaggu

SEQ ID NO: 2393914 - RNA, 19 nt, Artificial Sequence
  Description of Artificial Sequence: Synthetic oligonucleotide
  Sense strand starting at position 211 of SEQ ID NO: 1886203
uggacugucuacucugaaa

SEQ ID NO: 2393915 - RNA, 19 nt, Artificial Sequence
  Description of Artificial Sequence: Synthetic oligonucleotide
  Antisense strand to SEQ ID NO: 2393914
uuucagaguagacagucca

SEQ ID NO: 2393916 - RNA, 19 nt, Artificial Sequence
  Description of Artificial Sequence: Synthetic oligonucleotide
  Sense strand starting at position 666 of SEQ ID NO: 1886203
ggguucuaauaggcuuuau

SEQ ID NO: 2393917 - RNA, 19 nt, Artificial Sequence
  Description of Artificial Sequence: Synthetic oligonucleotide
  Antisense strand to SEQ ID NO: 2393916
auaaagccuauuagaaccc

SEQ ID NO: 2393918 - RNA, 19 nt, Artificial Sequence
  Description of Artificial Sequence: Synthetic oligonucleotide
  Sense strand starting at position 682 of SEQ ID NO: 1886203
uauggaauacuacacguua

SEQ ID NO: 2393919 - RNA, 19 nt, Artificial Sequence
  Description of Artificial Sequence: Synthetic oligonucleotide
  Antisense strand to SEQ ID NO: 2393918
uaacguguaguauuccaua

SEQ ID NO: 2393920 - RNA, 19 nt, Artificial Sequence
  Description of Artificial Sequence: Synthetic oligonucleotide
  Sense strand starting at position 684 of SEQ ID NO: 1886203
uggaauacuacacguuagu

SEQ ID NO: 2393921 - RNA, 19 nt, Artificial Sequence
  Description of Artificial Sequence: Synthetic oligonucleotide
  Antisense strand to SEQ ID NO: 2393920
acuaacguguaguauucca

SEQ ID NO: 2393922 - RNA, 19 nt, Artificial Sequence
  Description of Artificial Sequence: Synthetic oligonucleotide
  Sense strand starting at position 698 of SEQ ID NO: 1886203
uuaguaugaacacggauaa

SEQ ID NO: 2393923 - RNA, 19 nt, Artificial Sequence
  Description of Artificial Sequence: Synthetic oligonucleotide
  Antisense strand to SEQ ID NO: 2393922
uuauccguguucauacuaa

SEQ ID NO: 2393924 - RNA, 19 nt, Artificial Sequence
  Description of Artificial Sequence: Synthetic oligonucleotide
  Sense strand starting at position 699 of SEQ ID NO: 1886203
uaguaugaacacggauaaa

SEQ ID NO: 2393925 - RNA, 19 nt, Artificial Sequence
  Description of Artificial Sequence: Synthetic oligonucleotide
  Antisense strand to SEQ ID NO: 2393924
uuuauccguguucauacua

SEQ ID NO: 2393926 - RNA, 19 nt, Artificial Sequence
  Description of Artificial Sequence: Synthetic oligonucleotide
  Sense strand starting at position 728 of SEQ ID NO: 1886203
acucaacacguauaaaguu

SEQ ID NO: 2393927 - RNA, 19 nt, Artificial Sequence
  Description of Artificial Sequence: Synthetic oligonucleotide
  Antisense strand to SEQ ID NO: 2393926
aacuuuauacguguugagu

SEQ ID NO: 2393928 - RNA, 19 nt, Artificial Sequence
  Description of Artificial Sequence: Synthetic oligonucleotide
  Sense strand starting at position 1251 of SEQ ID NO: 1886203
cacagaaucuuggcguaaa

SEQ ID NO: 2393929 - RNA, 19 nt, Artificial Sequence
  Description of Artificial Sequence: Synthetic oligonucleotide
  Antisense strand to SEQ ID NO: 2393928
uuuacgccaagauucugug

SEQ ID NO: 2393930 - RNA, 19 nt, Artificial Sequence
  Description of Artificial Sequence: Synthetic oligonucleotide
  Sense strand starting at position 1254 of SEQ ID NO: 1886203
agaaucuuggcguaaacua

SEQ ID NO: 2393931 - RNA, 19 nt, Artificial Sequence
  Description of Artificial Sequence: Synthetic oligonucleotide
  Antisense strand to SEQ ID NO: 2393930
uaguuuacgccaagauucu

SEQ ID NO: 2393932 - RNA, 19 nt, Artificial Sequence
  Description of Artificial Sequence: Synthetic oligonucleotide
  Sense strand starting at position 1265 of SEQ ID NO: 1886203
guaaacuaacauggguuua

SEQ ID NO: 2393933 - RNA, 19 nt, Artificial Sequence
  Description of Artificial Sequence: Synthetic oligonucleotide
  Antisense strand to SEQ ID NO: 2393932
uaaacccauguuaguuuac

SEQ ID NO: 2393934 - RNA, 19 nt, Artificial Sequence
  Description of Artificial Sequence: Synthetic oligonucleotide
  Sense strand starting at position 1270 of SEQ ID NO: 1886203
cuaacauggguuuaguaau

SEQ ID NO: 2393935 - RNA, 19 nt, Artificial Sequence
  Description of Artificial Sequence: Synthetic oligonucleotide
  Antisense strand to SEQ ID NO: 2393934
auuacuaaacccauguuag

SEQ ID NO: 2393936 - RNA, 19 nt, Artificial Sequence
  Description of Artificial Sequence: Synthetic oligonucleotide
  Sense strand starting at position 1278 of SEQ ID NO: 1886203
gguuuaguaauacagagua

SEQ ID NO: 2393937 - RNA, 19 nt, Artificial Sequence
  Description of Artificial Sequence: Synthetic oligonucleotide
  Antisense strand to SEQ ID NO: 2393936
uacucuguauuacuaaacc

SEQ ID NO: 2393938 - RNA, 19 nt, Artificial Sequence
  Description of Artificial Sequence: Synthetic oligonucleotide
  Sense strand starting at position 1334 of SEQ ID NO: 1886203
uuggaaaguugguuugaga

SEQ ID NO: 2393939 - RNA, 19 nt, Artificial Sequence
  Description of Artificial Sequence: Synthetic oligonucleotide
  Antisense strand to SEQ ID NO: 2393938
ucucaaaccaacuuuccaa

SEQ ID NO: 2393940 - RNA, 19 nt, Artificial Sequence
  Description of Artificial Sequence: Synthetic oligonucleotide
  Sense strand starting at position 1485 of SEQ ID NO: 1886203
ugaaguguauacuugguca

SEQ ID NO: 2393941 - RNA, 19 nt, Artificial Sequence
  Description of Artificial Sequence: Synthetic oligonucleotide
  Antisense strand to SEQ ID NO: 2393940
ugaccaaguauacacuuca

SEQ ID NO: 2393942 - RNA, 19 nt, Artificial Sequence
  Description of Artificial Sequence: Synthetic oligonucleotide
  Sense strand starting at position 1487 of SEQ ID NO: 1886203
aaguguauacuuggucaaa

SEQ ID NO: 2393943 - RNA, 19 nt, Artificial Sequence
  Description of Artificial Sequence: Synthetic oligonucleotide
  Antisense strand to SEQ ID NO: 2393942
uuugaccaaguauacacuu

SEQ ID NO: 2393944 - RNA, 19 nt, Artificial Sequence
  Description of Artificial Sequence: Synthetic oligonucleotide
  Sense strand starting at position 1637 of SEQ ID NO: 1886203
uguggcauucuguaaauaa

SEQ ID NO: 2393945 - RNA, 19 nt, Artificial Sequence
  Description of Artificial Sequence: Synthetic oligonucleotide
  Antisense strand to SEQ ID NO: 2393944
uuauuuacagaaugccaca

SEQ ID NO: 2393946 - RNA, 19 nt, Artificial Sequence
  Description of Artificial Sequence: Synthetic oligonucleotide
  Sense strand starting at position 1655 of SEQ ID NO: 1886203
agacuacauuggucuugau

SEQ ID NO: 2393947 - RNA, 19 nt, Artificial Sequence
  Description of Artificial Sequence: Synthetic oligonucleotide
  Antisense strand to SEQ ID NO: 2393946
aucaagaccaauguagucu

SEQ ID NO: 2393948 - RNA, 19 nt, Artificial Sequence
  Description of Artificial Sequence: Synthetic oligonucleotide
  Sense strand starting at position 1659 of SEQ ID NO: 1886203
uacauuggucuugaugcaa

SEQ ID NO: 2393949 - RNA, 19 nt, Artificial Sequence
  Description of Artificial Sequence: Synthetic oligonucleotide
  Antisense strand to SEQ ID NO: 2393948
uugcaucaagaccaaugua

SEQ ID NO: 2393950 - RNA, 19 nt, Artificial Sequence
  Description of Artificial Sequence: Synthetic oligonucleotide
  Sense strand starting at position 1774 of SEQ ID NO: 1886203
agagcaagauucucacaug

SEQ ID NO: 2393951 - RNA, 19 nt, Artificial Sequence
  Description of Artificial Sequence: Synthetic oligonucleotide
  Antisense strand to SEQ ID NO: 2393950
caugugagaaucuugcucu

SEQ ID NO: 2393952 - RNA, 19 nt, Artificial Sequence
  Description of Artificial Sequence: Synthetic oligonucleotide
  Sense strand starting at position 1867 of SEQ ID NO: 1886203
cguguaauugcuguuggua

SEQ ID NO: 2393953 - RNA, 19 nt, Artificial Sequence
  Description of Artificial Sequence: Synthetic oligonucleotide
  Antisense strand to SEQ ID NO: 2393952
uaccaacagcaauuacacg

SEQ ID NO: 2393954 - RNA, 19 nt, Artificial Sequence
  Description of Artificial Sequence: Synthetic oligonucleotide
  Sense strand starting at position 1987 of SEQ ID NO: 1886203
uuucuuagucuccagaaga

SEQ ID NO: 2393955 - RNA, 19 nt, Artificial Sequence
  Description of Artificial Sequence: Synthetic oligonucleotide
  Antisense strand to SEQ ID NO: 2393954
ucuucuggagacuaagaaa

SEQ ID NO: 2393956 - RNA, 19 nt, Artificial Sequence
  Description of Artificial Sequence: Synthetic oligonucleotide
  Sense strand starting at position 2090 of SEQ ID NO: 1886203
ggagauuaacucuguacau

SEQ ID NO: 2393957 - RNA, 19 nt, Artificial Sequence
  Description of Artificial Sequence: Synthetic oligonucleotide
  Antisense strand to SEQ ID NO: 2393956
auguacagaguuaaucucc

SEQ ID NO: 2393958 - RNA, 19 nt, Artificial Sequence
  Description of Artificial Sequence: Synthetic oligonucleotide
  Sense strand starting at position 2122 of SEQ ID NO: 1886203
uguaaccaaugguuaauua

SEQ ID NO: 2393959 - RNA, 19 nt, Artificial Sequence
  Description of Artificial Sequence: Synthetic oligonucleotide
  Antisense strand to SEQ ID NO: 2393958
uaauuaaccauugguuaca

SEQ ID NO: 2393960 - RNA, 19 nt, Artificial Sequence
  Description of Artificial Sequence: Synthetic oligonucleotide
  Sense strand starting at position 2197 of SEQ ID NO: 1886203
uucugucaucaggaagucu

SEQ ID NO: 2393961 - RNA, 19 nt, Artificial Sequence
  Description of Artificial Sequence: Synthetic oligonucleotide
  Antisense strand to SEQ ID NO: 2393960
agacuuccugaugacagaa

SEQ ID NO: 2393962 - RNA, 19 nt, Artificial Sequence
  Description of Artificial Sequence: Synthetic oligonucleotide
  Sense strand starting at position 2312 of SEQ ID NO: 1886203
guauaucaugucugacuac

SEQ ID NO: 2393963 - RNA, 19 nt, Artificial Sequence
  Description of Artificial Sequence: Synthetic oligonucleotide
  Antisense strand to SEQ ID NO: 2393962
guagucagacaugauauac

SEQ ID NO: 2393964 - RNA, 19 nt, Artificial Sequence
  Description of Artificial Sequence: Synthetic oligonucleotide
  Sense strand starting at position 2426 of SEQ ID NO: 1886203
cugugacagaaucaugguu

SEQ ID NO: 2393965 - RNA, 19 nt, Artificial Sequence
  Description of Artificial Sequence: Synthetic oligonucleotide
  Antisense strand to SEQ ID NO: 2393964
aaccaugauucugucacag

SEQ ID NO: 2393966 - RNA, 19 nt, Artificial Sequence
  Description of Artificial Sequence: Synthetic oligonucleotide
  Sense strand starting at position 2510 of SEQ ID NO: 1886203
caaauuagccugcaguuga

SEQ ID NO: 2393967 - RNA, 19 nt, Artificial Sequence
  Description of Artificial Sequence: Synthetic oligonucleotide
  Antisense strand to SEQ ID NO: 2393966
ucaacugcaggcuaauuug

SEQ ID NO: 2393968 - RNA, 19 nt, Artificial Sequence
  Description of Artificial Sequence: Synthetic oligonucleotide
  Sense strand starting at position 2575 of SEQ ID NO: 1886203
gguauaugaacuuggauuc

SEQ ID NO: 2393969 - RNA, 19 nt, Artificial Sequence
  Description of Artificial Sequence: Synthetic oligonucleotide
  Antisense strand to SEQ ID NO: 2393968
gaauccaaguucauauacc

SEQ ID NO: 2393970 - RNA, 19 nt, Artificial Sequence
  Description of Artificial Sequence: Synthetic oligonucleotide
  Sense strand starting at position 2637 of SEQ ID NO: 1886203
uaggucucuugcuugaaag

SEQ ID NO: 2393971 - RNA, 19 nt, Artificial Sequence
  Description of Artificial Sequence: Synthetic oligonucleotide
  Antisense strand to SEQ ID NO: 2393970
cuuucaagcaagagaccua

SEQ ID NO: 2393972 - RNA, 19 nt, Artificial Sequence
  Description of Artificial Sequence: Synthetic oligonucleotide
  Sense strand starting at position 2639 of SEQ ID NO: 1886203
ggucucuugcuugaaagga

SEQ ID NO: 2393973 - RNA, 19 nt, Artificial Sequence
  Description of Artificial Sequence: Synthetic oligonucleotide
  Antisense strand to SEQ ID NO: 2393972
uccuuucaagcaagagacc

SEQ ID NO: 2393974 - RNA, 19 nt, Artificial Sequence
  Description of Artificial Sequence: Synthetic oligonucleotide
  Sense strand starting at position 2796 of SEQ ID NO: 1886203
uggcuuuacuggguauaua

SEQ ID NO: 2393975 - RNA, 19 nt, Artificial Sequence
  Description of Artificial Sequence: Synthetic oligonucleotide
  Antisense strand to SEQ ID NO: 2393974
uauauacccaguaaagcca

SEQ ID NO: 2393976 - RNA, 19 nt, Artificial Sequence
  Description of Artificial Sequence: Synthetic oligonucleotide
  Sense strand starting at position 2797 of SEQ ID NO: 1886203
ggcuuuacuggguauauac

SEQ ID NO: 2393977 - RNA, 19 nt, Artificial Sequence
  Description of Artificial Sequence: Synthetic oligonucleotide
  Antisense strand to SEQ ID NO: 2393976
guauauacccaguaaagcc

SEQ ID NO: 2393978 - RNA, 19 nt, Artificial Sequence
  Description of Artificial Sequence: Synthetic oligonucleotide
  Sense strand starting at position 3824 of SEQ ID NO: 1886203
ggugacuucuaaucuggga

SEQ ID NO: 2393979 - RNA, 19 nt, Artificial Sequence
  Description of Artificial Sequence: Synthetic oligonucleotide
  Antisense strand to SEQ ID NO: 2393978
ucccagauuagaagucacc

SEQ ID NO: 2393980 - RNA, 19 nt, Artificial Sequence
  Description of Artificial Sequence: Synthetic oligonucleotide
  Sense strand starting at position 3876 of SEQ ID NO: 1886203
gggaaagauguaugugguu

SEQ ID NO: 2393981 - RNA, 19 nt, Artificial Sequence
  Description of Artificial Sequence: Synthetic oligonucleotide
  Antisense strand to SEQ ID NO: 2393980
aaccacauacaucuuuccc

SEQ ID NO: 2393982 - RNA, 19 nt, Artificial Sequence
  Description of Artificial Sequence: Synthetic oligonucleotide
  Sense strand starting at position 3878 of SEQ ID NO: 1886203
gaaagauguaugugguuua

SEQ ID NO: 2393983 - RNA, 19 nt, Artificial Sequence
  Description of Artificial Sequence: Synthetic oligonucleotide
  Antisense strand to SEQ ID NO: 2393982
uaaaccacauacaucuuuc

SEQ ID NO: 2393984 - RNA, 19 nt, Artificial Sequence
  Description of Artificial Sequence: Synthetic oligonucleotide
  Sense strand starting at position 3881 of SEQ ID NO: 1886203
agauguaugugguuuagaa

SEQ ID NO: 2393985 - RNA, 19 nt, Artificial Sequence
  Description of Artificial Sequence: Synthetic oligonucleotide
  Antisense strand to SEQ ID NO: 2393984
uucuaaaccacauacaucu

SEQ ID NO: 2393986 - RNA, 19 nt, Artificial Sequence
  Description of Artificial Sequence: Synthetic oligonucleotide
  Sense strand starting at position 3883 of SEQ ID NO: 1886203
auguaugugguuuagaaug

SEQ ID NO: 2393987 - RNA, 19 nt, Artificial Sequence
  Description of Artificial Sequence: Synthetic oligonucleotide
  Antisense strand to SEQ ID NO: 2393986
cauucuaaaccacauacau

SEQ ID NO: 2393988 - RNA, 19 nt, Artificial Sequence
  Description of Artificial Sequence: Synthetic oligonucleotide
  Sense strand starting at position 3916 of SEQ ID NO: 1886203
gcaagagaccuuugacaug

SEQ ID NO: 2393989 - RNA, 19 nt, Artificial Sequence
  Description of Artificial Sequence: Synthetic oligonucleotide
  Antisense strand to SEQ ID NO: 2393988
caugucaaaggucucuugc

SEQ ID NO: 2393990 - RNA, 19 nt, Artificial Sequence
  Description of Artificial Sequence: Synthetic oligonucleotide
  Sense strand starting at position 3951 of SEQ ID NO: 1886203
guuagacuauacuuaagag

SEQ ID NO: 2393991 - RNA, 19 nt, Artificial Sequence
  Description of Artificial Sequence: Synthetic oligonucleotide
  Antisense strand to SEQ ID NO: 2393990
cucuuaaguauagucuaac

SEQ ID NO: 2393992 - RNA, 19 nt, Artificial Sequence
  Description of Artificial Sequence: Synthetic oligonucleotide
  Sense strand starting at position 13 of SEQ ID NO: 1886204
caacuaaugucagugaagu

SEQ ID NO: 2393993 - RNA, 19 nt, Artificial Sequence
  Description of Artificial Sequence: Synthetic oligonucleotide
  Antisense strand to SEQ ID NO: 2393992
acuucacugacauuaguug

SEQ ID NO: 2393994 - RNA, 19 nt, Artificial Sequence
  Description of Artificial Sequence: Synthetic oligonucleotide
  Sense strand starting at position 14 of SEQ ID NO: 1886204
aacuaaugucagugaagua

SEQ ID NO: 2393995 - RNA, 19 nt, Artificial Sequence
  Description of Artificial Sequence: Synthetic oligonucleotide
  Antisense strand to SEQ ID NO: 2393994
uacuucacugacauuaguu

SEQ ID NO: 2393996 - RNA, 19 nt, Artificial Sequence
  Description of Artificial Sequence: Synthetic oligonucleotide
  Sense strand starting at position 170 of SEQ ID NO: 1886204
ucugaaaucuagcuuuaga

SEQ ID NO: 2393997 - RNA, 19 nt, Artificial Sequence
  Description of Artificial Sequence: Synthetic oligonucleotide
  Antisense strand to SEQ ID NO: 2393996
ucuaaagcuagauuucaga

SEQ ID NO: 2393998 - RNA, 19 nt, Artificial Sequence
  Description of Artificial Sequence: Synthetic oligonucleotide
  Sense strand starting at position 173 of SEQ ID NO: 1886204
gaaaucuagcuuuagaguc

SEQ ID NO: 2393999 - RNA, 19 nt, Artificial Sequence
  Description of Artificial Sequence: Synthetic oligonucleotide
  Antisense strand to SEQ ID NO: 2393998
gacucuaaagcuagauuuc

SEQ ID NO: 2394000 - RNA, 19 nt, Artificial Sequence
  Description of Artificial Sequence: Synthetic oligonucleotide
  Sense strand starting at position 246 of SEQ ID NO: 1886204
guuuaauaagaacaacguu

SEQ ID NO: 2394001 - RNA, 19 nt, Artificial Sequence
  Description of Artificial Sequence: Synthetic oligonucleotide
  Antisense strand to SEQ ID NO: 2394000
aacguuguucuuauuaaac

SEQ ID NO: 2394002 - RNA, 19 nt, Artificial Sequence
  Description of Artificial Sequence: Synthetic oligonucleotide
  Sense strand starting at position 406 of SEQ ID NO: 1886204
ccuagcauagaguacaaua

SEQ ID NO: 2394003 - RNA, 19 nt, Artificial Sequence
  Description of Artificial Sequence: Synthetic oligonucleotide
  Antisense strand to SEQ ID NO: 2394002
uauuguacucuaugcuagg

SEQ ID NO: 2394004 - RNA, 19 nt, Artificial Sequence
  Description of Artificial Sequence: Synthetic oligonucleotide
  Sense strand starting at position 455 of SEQ ID NO: 1886204
agagaaauaucuguggcau

SEQ ID NO: 2394005 - RNA, 19 nt, Artificial Sequence
  Description of Artificial Sequence: Synthetic oligonucleotide
  Antisense strand to SEQ ID NO: 2394004
augccacagauauuucucu

SEQ ID NO: 2394006 - RNA, 19 nt, Artificial Sequence
  Description of Artificial Sequence: Synthetic oligonucleotide
  Sense strand starting at position 456 of SEQ ID NO: 1886204
gagaaauaucuguggcauc

SEQ ID NO: 2394007 - RNA, 19 nt, Artificial Sequence
  Description of Artificial Sequence: Synthetic oligonucleotide
  Antisense strand to SEQ ID NO: 2394006
gaugccacagauauuucuc

SEQ ID NO: 2394008 - RNA, 19 nt, Artificial Sequence
  Description of Artificial Sequence: Synthetic oligonucleotide
  Sense strand starting at position 524 of SEQ ID NO: 1886204
uuugaaguguugucauaaa

SEQ ID NO: 2394009 - RNA, 19 nt, Artificial Sequence
  Description of Artificial Sequence: Synthetic oligonucleotide
  Antisense strand to SEQ ID NO: 2394008
uuuaugacaacacuucaaa

SEQ ID NO: 2394010 - RNA, 19 nt, Artificial Sequence
  Description of Artificial Sequence: Synthetic oligonucleotide
  Sense strand starting at position 578 of SEQ ID NO: 1886204
gcucaauucugacugacag

SEQ ID NO: 2394011 - RNA, 19 nt, Artificial Sequence
  Description of Artificial Sequence: Synthetic oligonucleotide
  Antisense strand to SEQ ID NO: 2394010
cugucagucagaauugagc

SEQ ID NO: 2394012 - RNA, 19 nt, Artificial Sequence
  Description of Artificial Sequence: Synthetic oligonucleotide
  Sense strand starting at position 579 of SEQ ID NO: 1886204
cucaauucugacugacaga

SEQ ID NO: 2394013 - RNA, 19 nt, Artificial Sequence
  Description of Artificial Sequence: Synthetic oligonucleotide
  Antisense strand to SEQ ID NO: 2394012
ucugucagucagaauugag

SEQ ID NO: 2394014 - RNA, 19 nt, Artificial Sequence
  Description of Artificial Sequence: Synthetic oligonucleotide
  Sense strand starting at position 634 of SEQ ID NO: 1886204
aggaaagguuguguaucua

SEQ ID NO: 2394015 - RNA, 19 nt, Artificial Sequence
  Description of Artificial Sequence: Synthetic oligonucleotide
  Antisense strand to SEQ ID NO: 2394014
uagauacacaaccuuuccu

SEQ ID NO: 2394016 - RNA, 19 nt, Artificial Sequence
  Description of Artificial Sequence: Synthetic oligonucleotide
  Sense strand starting at position 645 of SEQ ID NO: 1886204
uguaucuacuucccuaagu

SEQ ID NO: 2394017 - RNA, 19 nt, Artificial Sequence
  Description of Artificial Sequence: Synthetic oligonucleotide
  Antisense strand to SEQ ID NO: 2394016
acuuagggaaguagauaca

SEQ ID NO: 2394018 - RNA, 19 nt, Artificial Sequence
  Description of Artificial Sequence: Synthetic oligonucleotide
  Sense strand starting at position 658 of SEQ ID NO: 1886204
cuaaguggcaguuauaagu

SEQ ID NO: 2394019 - RNA, 19 nt, Artificial Sequence
  Description of Artificial Sequence: Synthetic oligonucleotide
  Antisense strand to SEQ ID NO: 2394018
acuuauaacugccacuuag

SEQ ID NO: 2394020 - RNA, 19 nt, Artificial Sequence
  Description of Artificial Sequence: Synthetic oligonucleotide
  Sense strand starting at position 1012 of SEQ ID NO: 1886204
gggcaaguaguguaacugu

SEQ ID NO: 2394021 - RNA, 19 nt, Artificial Sequence
  Description of Artificial Sequence: Synthetic oligonucleotide
  Antisense strand to SEQ ID NO: 2394020
acaguuacacuacuugccc

SEQ ID NO: 2394022 - RNA, 19 nt, Artificial Sequence
  Description of Artificial Sequence: Synthetic oligonucleotide
  Sense strand starting at position 1043 of SEQ ID NO: 1886204
cccagagugguccaaguca

SEQ ID NO: 2394023 - RNA, 19 nt, Artificial Sequence
  Description of Artificial Sequence: Synthetic oligonucleotide
  Antisense strand to SEQ ID NO: 2394022
ugacuuggaccacucuggg

SEQ ID NO: 2394024 - RNA, 19 nt, Artificial Sequence
  Description of Artificial Sequence: Synthetic oligonucleotide
  Sense strand starting at position 1419 of SEQ ID NO: 1886204
ggccacagucuccaaagaa

SEQ ID NO: 2394025 - RNA, 19 nt, Artificial Sequence
  Description of Artificial Sequence: Synthetic oligonucleotide
  Antisense strand to SEQ ID NO: 2394024
uucuuuggagacuguggcc

SEQ ID NO: 2394026 - RNA, 19 nt, Artificial Sequence
  Description of Artificial Sequence: Synthetic oligonucleotide
  Sense strand starting at position 1437 of SEQ ID NO: 1886204
aagcgaaugacccggguau

SEQ ID NO: 2394027 - RNA, 19 nt, Artificial Sequence
  Description of Artificial Sequence: Synthetic oligonucleotide
  Antisense strand to SEQ ID NO: 2394026
auacccgggucauucgcuu

SEQ ID NO: 2394028 - RNA, 19 nt, Artificial Sequence
  Description of Artificial Sequence: Synthetic oligonucleotide
  Sense strand starting at position 2594 of SEQ ID NO: 1886204
aagguuggaccgugugaga

SEQ ID NO: 2394029 - RNA, 19 nt, Artificial Sequence
  Description of Artificial Sequence: Synthetic oligonucleotide
  Antisense strand to SEQ ID NO: 2394028
ucucacacgguccaaccuu

SEQ ID NO: 2394030 - RNA, 19 nt, Artificial Sequence
  Description of Artificial Sequence: Synthetic oligonucleotide
  Sense strand starting at position 2596 of SEQ ID NO: 1886204
gguuggaccgugugagaga

SEQ ID NO: 2394031 - RNA, 19 nt, Artificial Sequence
  Description of Artificial Sequence: Synthetic oligonucleotide
  Antisense strand to SEQ ID NO: 2394030
ucucucacacgguccaacc

SEQ ID NO: 2394032 - RNA, 19 nt, Artificial Sequence
  Description of Artificial Sequence: Synthetic oligonucleotide
  Sense strand starting at position 2701 of SEQ ID NO: 1886204
gugcaacagcgugaugaga

SEQ ID NO: 2394033 - RNA, 19 nt, Artificial Sequence
  Description of Artificial Sequence: Synthetic oligonucleotide
  Antisense strand to SEQ ID NO: 2394032
ucucaucacgcuguugcac

SEQ ID NO: 2394034 - RNA, 19 nt, Artificial Sequence
  Description of Artificial Sequence: Synthetic oligonucleotide
  Sense strand starting at position 2709 of SEQ ID NO: 1886204
gcgugaugagaccaccagu

SEQ ID NO: 2394035 - RNA, 19 nt, Artificial Sequence
  Description of Artificial Sequence: Synthetic oligonucleotide
  Antisense strand to SEQ ID NO: 2394034
acugguggucucaucacgc

SEQ ID NO: 2394036 - RNA, 19 nt, Artificial Sequence
  Description of Artificial Sequence: Synthetic oligonucleotide
  Sense strand starting at position 2783 of SEQ ID NO: 1886204
uugacauggucuccuugaa

SEQ ID NO: 2394037 - RNA, 19 nt, Artificial Sequence
  Description of Artificial Sequence: Synthetic oligonucleotide
  Antisense strand to SEQ ID NO: 2394036
uucaaggagaccaugucaa

SEQ ID NO: 2394038 - RNA, 19 nt, Artificial Sequence
  Description of Artificial Sequence: Synthetic oligonucleotide
  Sense strand starting at position 2832 of SEQ ID NO: 1886204
ccuugaagugacuaucuuu

SEQ ID NO: 2394039 - RNA, 19 nt, Artificial Sequence
  Description of Artificial Sequence: Synthetic oligonucleotide
  Antisense strand to SEQ ID NO: 2394038
aaagauagucacuucaagg

SEQ ID NO: 2394040 - RNA, 19 nt, Artificial Sequence
  Description of Artificial Sequence: Synthetic oligonucleotide
  Sense strand starting at position 2914 of SEQ ID NO: 1886204
gcuggauuacuugguauca

SEQ ID NO: 2394041 - RNA, 19 nt, Artificial Sequence
  Description of Artificial Sequence: Synthetic oligonucleotide
  Antisense strand to SEQ ID NO: 2394040
ugauaccaaguaauccagc

SEQ ID NO: 2394042 - RNA, 19 nt, Artificial Sequence
  Description of Artificial Sequence: Synthetic oligonucleotide
  Sense strand starting at position 2915 of SEQ ID NO: 1886204
cuggauuacuugguaucau

SEQ ID NO: 2394043 - RNA, 19 nt, Artificial Sequence
  Description of Artificial Sequence: Synthetic oligonucleotide
  Antisense strand to SEQ ID NO: 2394042
augauaccaaguaauccag

SEQ ID NO: 2394044 - RNA, 19 nt, Artificial Sequence
  Description of Artificial Sequence: Synthetic oligonucleotide
  Sense strand starting at position 3013 of SEQ ID NO: 1886204
acuggaacucuuuguagua

SEQ ID NO: 2394045 - RNA, 19 nt, Artificial Sequence
  Description of Artificial Sequence: Synthetic oligonucleotide
  Antisense strand to SEQ ID NO: 2394044
uacuacaaagaguuccagu

SEQ ID NO: 2394046 - RNA, 19 nt, Artificial Sequence
  Description of Artificial Sequence: Synthetic oligonucleotide
  Sense strand starting at position 3014 of SEQ ID NO: 1886204
cuggaacucuuuguaguau

SEQ ID NO: 2394047 - RNA, 19 nt, Artificial Sequence
  Description of Artificial Sequence: Synthetic oligonucleotide
  Antisense strand to SEQ ID NO: 2394046
auacuacaaagaguuccag

SEQ ID NO: 2394048 - RNA, 19 nt, Artificial Sequence
  Description of Artificial Sequence: Synthetic oligonucleotide
  Sense strand starting at position 3023 of SEQ ID NO: 1886204
uuuguaguauccucgaaau

SEQ ID NO: 2394049 - RNA, 19 nt, Artificial Sequence
  Description of Artificial Sequence: Synthetic oligonucleotide
  Antisense strand to SEQ ID NO: 2394048
auuucgaggauacuacaaa

SEQ ID NO: 2394050 - RNA, 19 nt, Artificial Sequence
  Description of Artificial Sequence: Synthetic oligonucleotide
  Sense strand starting at position 3025 of SEQ ID NO: 1886204
uguaguauccucgaaauuc

SEQ ID NO: 2394051 - RNA, 19 nt, Artificial Sequence
  Description of Artificial Sequence: Synthetic oligonucleotide
  Antisense strand to SEQ ID NO: 2394050
gaauuucgaggauacuaca

SEQ ID NO: 2394052 - RNA, 19 nt, Artificial Sequence
  Description of Artificial Sequence: Synthetic oligonucleotide
  Sense strand starting at position 3033 of SEQ ID NO: 1886204
ccucgaaauucuuuaaaug

SEQ ID NO: 2394053 - RNA, 19 nt, Artificial Sequence
  Description of Artificial Sequence: Synthetic oligonucleotide
  Antisense strand to SEQ ID NO: 2394052
cauuuaaagaauuucgagg

SEQ ID NO: 2394054 - RNA, 19 nt, Artificial Sequence
  Description of Artificial Sequence: Synthetic oligonucleotide
  Sense strand starting at position 3075 of SEQ ID NO: 1886204
uugaauuuauuggaggaug

SEQ ID NO: 2394055 - RNA, 19 nt, Artificial Sequence
  Description of Artificial Sequence: Synthetic oligonucleotide
  Antisense strand to SEQ ID NO: 2394054
cauccuccaauaaauucaa

SEQ ID NO: 2394056 - RNA, 19 nt, Artificial Sequence
  Description of Artificial Sequence: Synthetic oligonucleotide
  Sense strand starting at position 3083 of SEQ ID NO: 1886204
auuggaggauggcuguaau

SEQ ID NO: 2394057 - RNA, 19 nt, Artificial Sequence
  Description of Artificial Sequence: Synthetic oligonucleotide
  Antisense strand to SEQ ID NO: 2394056
auuacagccauccuccaau

SEQ ID NO: 2394058 - RNA, 19 nt, Artificial Sequence
  Description of Artificial Sequence: Synthetic oligonucleotide
  Sense strand starting at position 3195 of SEQ ID NO: 1886204
uugggaaauagcugcaguu

SEQ ID NO: 2394059 - RNA, 19 nt, Artificial Sequence
  Description of Artificial Sequence: Synthetic oligonucleotide
  Antisense strand to SEQ ID NO: 2394058
aacugcagcuauuucccaa

SEQ ID NO: 2394060 - RNA, 19 nt, Artificial Sequence
  Description of Artificial Sequence: Synthetic oligonucleotide
  Sense strand starting at position 3735 of SEQ ID NO: 1886204
acuaauaauuccgcuggua

SEQ ID NO: 2394061 - RNA, 19 nt, Artificial Sequence
  Description of Artificial Sequence: Synthetic oligonucleotide
  Antisense strand to SEQ ID NO: 2394060
uaccagcggaauuauuagu

SEQ ID NO: 2394062 - RNA, 19 nt, Artificial Sequence
  Description of Artificial Sequence: Synthetic oligonucleotide
  Sense strand starting at position 3747 of SEQ ID NO: 1886204
gcugguacaauggaauauu

SEQ ID NO: 2394063 - RNA, 19 nt, Artificial Sequence
  Description of Artificial Sequence: Synthetic oligonucleotide
  Antisense strand to SEQ ID NO: 2394062
aauauuccauuguaccagc

SEQ ID NO: 2394064 - RNA, 19 nt, Artificial Sequence
  Description of Artificial Sequence: Synthetic oligonucleotide
  Sense strand starting at position 3756 of SEQ ID NO: 1886204
auggaauauuaaucuggca

SEQ ID NO: 2394065 - RNA, 19 nt, Artificial Sequence
  Description of Artificial Sequence: Synthetic oligonucleotide
  Antisense strand to SEQ ID NO: 2394064
ugccagauuaauauuccau

SEQ ID NO: 2394066 - RNA, 19 nt, Artificial Sequence
  Description of Artificial Sequence: Synthetic oligonucleotide
  Sense strand starting at position 3847 of SEQ ID NO: 1886204
agcauugcaugauuccauu

SEQ ID NO: 2394067 - RNA, 19 nt, Artificial Sequence
  Description of Artificial Sequence: Synthetic oligonucleotide
  Antisense strand to SEQ ID NO: 2394066
aauggaaucaugcaaugcu

SEQ ID NO: 2394068 - RNA, 19 nt, Artificial Sequence
  Description of Artificial Sequence: Synthetic oligonucleotide
  Sense strand starting at position 3856 of SEQ ID NO: 1886204
ugauuccauuuaggugaaa

SEQ ID NO: 2394069 - RNA, 19 nt, Artificial Sequence
  Description of Artificial Sequence: Synthetic oligonucleotide
  Antisense strand to SEQ ID NO: 2394068
uuucaccuaaauggaauca

SEQ ID NO: 2394070 - RNA, 19 nt, Artificial Sequence
  Description of Artificial Sequence: Synthetic oligonucleotide
  Sense strand starting at position 3903 of SEQ ID NO: 1886204
ggaaaucagugguugccua

SEQ ID NO: 2394071 - RNA, 19 nt, Artificial Sequence
  Description of Artificial Sequence: Synthetic oligonucleotide
  Antisense strand to SEQ ID NO: 2394070
uaggcaaccacugauuucc

SEQ ID NO: 2394072 - RNA, 19 nt, Artificial Sequence
  Description of Artificial Sequence: Synthetic oligonucleotide
  Sense strand starting at position 473 of SEQ ID NO: 1886205
ucagaagucuggugacaca

SEQ ID NO: 2394073 - RNA, 19 nt, Artificial Sequence
  Description of Artificial Sequence: Synthetic oligonucleotide
  Antisense strand to SEQ ID NO: 2394072
ugugucaccagacuucuga

SEQ ID NO: 2394074 - RNA, 19 nt, Artificial Sequence
  Description of Artificial Sequence: Synthetic oligonucleotide
  Sense strand starting at position 497 of SEQ ID NO: 1886205
aagggucucuauucuguau

SEQ ID NO: 2394075 - RNA, 19 nt, Artificial Sequence
  Description of Artificial Sequence: Synthetic oligonucleotide
  Antisense strand to SEQ ID NO: 2394074
auacagaauagagacccuu

SEQ ID NO: 2394076 - RNA, 19 nt, Artificial Sequence
  Description of Artificial Sequence: Synthetic oligonucleotide
  Sense strand starting at position 500 of SEQ ID NO: 1886205
ggucucuauucuguauuga

SEQ ID NO: 2394077 - RNA, 19 nt, Artificial Sequence
  Description of Artificial Sequence: Synthetic oligonucleotide
  Antisense strand to SEQ ID NO: 2394076
ucaauacagaauagagacc

SEQ ID NO: 2394078 - RNA, 19 nt, Artificial Sequence
  Description of Artificial Sequence: Synthetic oligonucleotide
  Sense strand starting at position 501 of SEQ ID NO: 1886205
gucucuauucuguauugag

SEQ ID NO: 2394079 - RNA, 19 nt, Artificial Sequence
  Description of Artificial Sequence: Synthetic oligonucleotide
  Antisense strand to SEQ ID NO: 2394078
cucaauacagaauagagac

SEQ ID NO: 2394080 - RNA, 19 nt, Artificial Sequence
  Description of Artificial Sequence: Synthetic oligonucleotide
  Sense strand starting at position 610 of SEQ ID NO: 1886205
acaacuguauuugaaaugu

SEQ ID NO: 2394081 - RNA, 19 nt, Artificial Sequence
  Description of Artificial Sequence: Synthetic oligonucleotide
  Antisense strand to SEQ ID NO: 2394080
acauuucaaauacaguugu

SEQ ID NO: 2394082 - RNA, 19 nt, Artificial Sequence
  Description of Artificial Sequence: Synthetic oligonucleotide
  Sense strand starting at position 704 of SEQ ID NO: 1886205
cguccuuuccuguaaggcu

SEQ ID NO: 2394083 - RNA, 19 nt, Artificial Sequence
  Description of Artificial Sequence: Synthetic oligonucleotide
  Antisense strand to SEQ ID NO: 2394082
agccuuacaggaaaggacg

SEQ ID NO: 2394084 - RNA, 19 nt, Artificial Sequence
  Description of Artificial Sequence: Synthetic oligonucleotide
  Sense strand starting at position 712 of SEQ ID NO: 1886205
ccuguaaggcugugagcua

SEQ ID NO: 2394085 - RNA, 19 nt, Artificial Sequence
  Description of Artificial Sequence: Synthetic oligonucleotide
  Antisense strand to SEQ ID NO: 2394084
uagcucacagccuuacagg

SEQ ID NO: 2394086 - RNA, 19 nt, Artificial Sequence
  Description of Artificial Sequence: Synthetic oligonucleotide
  Sense strand starting at position 713 of SEQ ID NO: 1886205
cuguaaggcugugagcuaa

SEQ ID NO: 2394087 - RNA, 19 nt, Artificial Sequence
  Description of Artificial Sequence: Synthetic oligonucleotide
  Antisense strand to SEQ ID NO: 2394086
uuagcucacagccuuacag

SEQ ID NO: 2394088 - RNA, 19 nt, Artificial Sequence
  Description of Artificial Sequence: Synthetic oligonucleotide
  Sense strand starting at position 992 of SEQ ID NO: 1886205
cugguuaccgccuaaggaa

SEQ ID NO: 2394089 - RNA, 19 nt, Artificial Sequence
  Description of Artificial Sequence: Synthetic oligonucleotide
  Antisense strand to SEQ ID NO: 2394088
uuccuuaggcgguaaccag

SEQ ID NO: 2394090 - RNA, 19 nt, Artificial Sequence
  Description of Artificial Sequence: Synthetic oligonucleotide
  Sense strand starting at position 2217 of SEQ ID NO: 1886205
gcagcaacaucugguauuu

SEQ ID NO: 2394091 - RNA, 19 nt, Artificial Sequence
  Description of Artificial Sequence: Synthetic oligonucleotide
  Antisense strand to SEQ ID NO: 2394090
aaauaccagauguugcugc

SEQ ID NO: 2394092 - RNA, 19 nt, Artificial Sequence
  Description of Artificial Sequence: Synthetic oligonucleotide
  Sense strand starting at position 2333 of SEQ ID NO: 1886205
uuggaucaguggcugagau

SEQ ID NO: 2394093 - RNA, 19 nt, Artificial Sequence
  Description of Artificial Sequence: Synthetic oligonucleotide
  Antisense strand to SEQ ID NO: 2394092
aucucagccacugauccaa

SEQ ID NO: 2394094 - RNA, 19 nt, Artificial Sequence
  Description of Artificial Sequence: Synthetic oligonucleotide
  Sense strand starting at position 2334 of SEQ ID NO: 1886205
uggaucaguggcugagauu

SEQ ID NO: 2394095 - RNA, 19 nt, Artificial Sequence
  Description of Artificial Sequence: Synthetic oligonucleotide
  Antisense strand to SEQ ID NO: 2394094
aaucucagccacugaucca

SEQ ID NO: 2394096 - RNA, 19 nt, Artificial Sequence
  Description of Artificial Sequence: Synthetic oligonucleotide
  Sense strand starting at position 2335 of SEQ ID NO: 1886205
ggaucaguggcugagauua

SEQ ID NO: 2394097 - RNA, 19 nt, Artificial Sequence
  Description of Artificial Sequence: Synthetic oligonucleotide
  Antisense strand to SEQ ID NO: 2394096
uaaucucagccacugaucc

SEQ ID NO: 2394098 - RNA, 19 nt, Artificial Sequence
  Description of Artificial Sequence: Synthetic oligonucleotide
  Sense strand starting at position 2337 of SEQ ID NO: 1886205
aucaguggcugagauuaga

SEQ ID NO: 2394099 - RNA, 19 nt, Artificial Sequence
  Description of Artificial Sequence: Synthetic oligonucleotide
  Antisense strand to SEQ ID NO: 2394098
ucuaaucucagccacugau

SEQ ID NO: 2394100 - RNA, 19 nt, Artificial Sequence
  Description of Artificial Sequence: Synthetic oligonucleotide
  Sense strand starting at position 2799 of SEQ ID NO: 1886205
uggcgugaacccgguagau

SEQ ID NO: 2394101 - RNA, 19 nt, Artificial Sequence
  Description of Artificial Sequence: Synthetic oligonucleotide
  Antisense strand to SEQ ID NO: 2394100
aucuaccggguucacgcca

SEQ ID NO: 2394102 - RNA, 19 nt, Artificial Sequence
  Description of Artificial Sequence: Synthetic oligonucleotide
  Sense strand starting at position 3100 of SEQ ID NO: 1886205
gccggagaaccgugugaac

SEQ ID NO: 2394103 - RNA, 19 nt, Artificial Sequence
  Description of Artificial Sequence: Synthetic oligonucleotide
  Antisense strand to SEQ ID NO: 2394102
guucacacgguucuccggc

SEQ ID NO: 2394104 - RNA, 19 nt, Artificial Sequence
  Description of Artificial Sequence: Synthetic oligonucleotide
  Sense strand starting at position 3493 of SEQ ID NO: 1886205
gccacaauuggguauaucu

SEQ ID NO: 2394105 - RNA, 19 nt, Artificial Sequence
  Description of Artificial Sequence: Synthetic oligonucleotide
  Antisense strand to SEQ ID NO: 2394104
agauauacccaauuguggc

SEQ ID NO: 2394106 - RNA, 19 nt, Artificial Sequence
  Description of Artificial Sequence: Synthetic oligonucleotide
  Sense strand starting at position 3500 of SEQ ID NO: 1886205
uuggguauaucuugaugag

SEQ ID NO: 2394107 - RNA, 19 nt, Artificial Sequence
  Description of Artificial Sequence: Synthetic oligonucleotide
  Antisense strand to SEQ ID NO: 2394106
cucaucaagauauacccaa

SEQ ID NO: 2394108 - RNA, 19 nt, Artificial Sequence
  Description of Artificial Sequence: Synthetic oligonucleotide
  Sense strand starting at position 3501 of SEQ ID NO: 1886205
uggguauaucuugaugagc

SEQ ID NO: 2394109 - RNA, 19 nt, Artificial Sequence
  Description of Artificial Sequence: Synthetic oligonucleotide
  Antisense strand to SEQ ID NO: 2394108
gcucaucaagauauaccca

SEQ ID NO: 2394110 - RNA, 19 nt, Artificial Sequence
  Description of Artificial Sequence: Synthetic oligonucleotide
  Sense strand starting at position 3503 of SEQ ID NO: 1886205
gguauaucuugaugagcac

SEQ ID NO: 2394111 - RNA, 19 nt, Artificial Sequence
  Description of Artificial Sequence: Synthetic oligonucleotide
  Antisense strand to SEQ ID NO: 2394110
gugcucaucaagauauacc

SEQ ID NO: 2394112 - RNA, 19 nt, Artificial Sequence
  Description of Artificial Sequence: Synthetic oligonucleotide
  Sense strand starting at position 3504 of SEQ ID NO: 1886205
guauaucuugaugagcaca

SEQ ID NO: 2394113 - RNA, 19 nt, Artificial Sequence
  Description of Artificial Sequence: Synthetic oligonucleotide
  Antisense strand to SEQ ID NO: 2394112
ugugcucaucaagauauac

SEQ ID NO: 2394114 - RNA, 19 nt, Artificial Sequence
  Description of Artificial Sequence: Synthetic oligonucleotide
  Sense strand starting at position 3509 of SEQ ID NO: 1886205
ucuugaugagcacagcaua

SEQ ID NO: 2394115 - RNA, 19 nt, Artificial Sequence
  Description of Artificial Sequence: Synthetic oligonucleotide
  Antisense strand to SEQ ID NO: 2394114
uaugcugugcucaucaaga

SEQ ID NO: 2394116 - RNA, 19 nt, Artificial Sequence
  Description of Artificial Sequence: Synthetic oligonucleotide
  Sense strand starting at position 3624 of SEQ ID NO: 1886205
guauuuauaugucugucua

SEQ ID NO: 2394117 - RNA, 19 nt, Artificial Sequence
  Description of Artificial Sequence: Synthetic oligonucleotide
  Antisense strand to SEQ ID NO: 2394116
uagacagacauauaaauac

SEQ ID NO: 2394118 - RNA, 19 nt, Artificial Sequence
  Description of Artificial Sequence: Synthetic oligonucleotide
  Sense strand starting at position 473 of SEQ ID NO: 1886206
ucagaagucuggugacaca

SEQ ID NO: 2394119 - RNA, 19 nt, Artificial Sequence
  Description of Artificial Sequence: Synthetic oligonucleotide
  Antisense strand to SEQ ID NO: 2394118
ugugucaccagacuucuga

SEQ ID NO: 2394120 - RNA, 19 nt, Artificial Sequence
  Description of Artificial Sequence: Synthetic oligonucleotide
  Sense strand starting at position 497 of SEQ ID NO: 1886206
aagggucucuauucuguau

SEQ ID NO: 2394121 - RNA, 19 nt, Artificial Sequence
  Description of Artificial Sequence: Synthetic oligonucleotide
  Antisense strand to SEQ ID NO: 2394120
auacagaauagagacccuu

SEQ ID NO: 2394122 - RNA, 19 nt, Artificial Sequence
  Description of Artificial Sequence: Synthetic oligonucleotide
  Sense strand starting at position 500 of SEQ ID NO: 1886206
ggucucuauucuguauuga

SEQ ID NO: 2394123 - RNA, 19 nt, Artificial Sequence
  Description of Artificial Sequence: Synthetic oligonucleotide
  Antisense strand to SEQ ID NO: 2394122
ucaauacagaauagagacc

SEQ ID NO: 2394124 - RNA, 19 nt, Artificial Sequence
  Description of Artificial Sequence: Synthetic oligonucleotide
  Sense strand starting at position 501 of SEQ ID NO: 1886206
gucucuauucuguauugag

SEQ ID NO: 2394125 - RNA, 19 nt, Artificial Sequence
  Description of Artificial Sequence: Synthetic oligonucleotide
  Antisense strand to SEQ ID NO: 2394124
cucaauacagaauagagac

SEQ ID NO: 2394126 - RNA, 19 nt, Artificial Sequence
  Description of Artificial Sequence: Synthetic oligonucleotide
  Sense strand starting at position 610 of SEQ ID NO: 1886206
acaacuguauuugaaaugu

SEQ ID NO: 2394127 - RNA, 19 nt, Artificial Sequence
  Description of Artificial Sequence: Synthetic oligonucleotide
  Antisense strand to SEQ ID NO: 2394126
acauuucaaauacaguugu

SEQ ID NO: 2394128 - RNA, 19 nt, Artificial Sequence
  Description of Artificial Sequence: Synthetic oligonucleotide
  Sense strand starting at position 704 of SEQ ID NO: 1886206
cguccuuuccuguaaggcu

SEQ ID NO: 2394129 - RNA, 19 nt, Artificial Sequence
  Description of Artificial Sequence: Synthetic oligonucleotide
  Antisense strand to SEQ ID NO: 2394128
agccuuacaggaaaggacg

SEQ ID NO: 2394130 - RNA, 19 nt, Artificial Sequence
  Description of Artificial Sequence: Synthetic oligonucleotide
  Sense strand starting at position 712 of SEQ ID NO: 1886206
ccuguaaggcugugagcua

SEQ ID NO: 2394131 - RNA, 19 nt, Artificial Sequence
  Description of Artificial Sequence: Synthetic oligonucleotide
  Antisense strand to SEQ ID NO: 2394130
uagcucacagccuuacagg

SEQ ID NO: 2394132 - RNA, 19 nt, Artificial Sequence
  Description of Artificial Sequence: Synthetic oligonucleotide
  Sense strand starting at position 713 of SEQ ID NO: 1886206
cuguaaggcugugagcuaa

SEQ ID NO: 2394133 - RNA, 19 nt, Artificial Sequence
  Description of Artificial Sequence: Synthetic oligonucleotide
  Antisense strand to SEQ ID NO: 2394132
uuagcucacagccuuacag

SEQ ID NO: 2394134 - RNA, 19 nt, Artificial Sequence
  Description of Artificial Sequence: Synthetic oligonucleotide
  Sense strand starting at position 992 of SEQ ID NO: 1886206
cugguuaccgccuaaggaa

SEQ ID NO: 2394135 - RNA, 19 nt, Artificial Sequence
  Description of Artificial Sequence: Synthetic oligonucleotide
  Antisense strand to SEQ ID NO: 2394134
uuccuuaggcgguaaccag

SEQ ID NO: 2394136 - RNA, 19 nt, Artificial Sequence
  Description of Artificial Sequence: Synthetic oligonucleotide
  Sense strand starting at position 2217 of SEQ ID NO: 1886206
gcagcaacaucugguauuu

SEQ ID NO: 2394137 - RNA, 19 nt, Artificial Sequence
  Description of Artificial Sequence: Synthetic oligonucleotide
  Antisense strand to SEQ ID NO: 2394136
aaauaccagauguugcugc

SEQ ID NO: 2394138 - RNA, 19 nt, Artificial Sequence
  Description of Artificial Sequence: Synthetic oligonucleotide
  Sense strand starting at position 2333 of SEQ ID NO: 1886206
uuggaucaguggcugagau

SEQ ID NO: 2394139 - RNA, 19 nt, Artificial Sequence
  Description of Artificial Sequence: Synthetic oligonucleotide
  Antisense strand to SEQ ID NO: 2394138
aucucagccacugauccaa

SEQ ID NO: 2394140 - RNA, 19 nt, Artificial Sequence
  Description of Artificial Sequence: Synthetic oligonucleotide
  Sense strand starting at position 2334 of SEQ ID NO: 1886206
uggaucaguggcugagauu

SEQ ID NO: 2394141 - RNA, 19 nt, Artificial Sequence
  Description of Artificial Sequence: Synthetic oligonucleotide
  Antisense strand to SEQ ID NO: 2394140
aaucucagccacugaucca

SEQ ID NO: 2394142 - RNA, 19 nt, Artificial Sequence
  Description of Artificial Sequence: Synthetic oligonucleotide
  Sense strand starting at position 2335 of SEQ ID NO: 1886206
ggaucaguggcugagauua

SEQ ID NO: 2394143 - RNA, 19 nt, Artificial Sequence
  Description of Artificial Sequence: Synthetic oligonucleotide
  Antisense strand to SEQ ID NO: 2394142
uaaucucagccacugaucc

SEQ ID NO: 2394144 - RNA, 19 nt, Artificial Sequence
  Description of Artificial Sequence: Synthetic oligonucleotide
  Sense strand starting at position 2337 of SEQ ID NO: 1886206
aucaguggcugagauuaga

SEQ ID NO: 2394145 - RNA, 19 nt, Artificial Sequence
  Description of Artificial Sequence: Synthetic oligonucleotide
  Antisense strand to SEQ ID NO: 2394144
ucuaaucucagccacugau

SEQ ID NO: 2394146 - RNA, 19 nt, Artificial Sequence
  Description of Artificial Sequence: Synthetic oligonucleotide
  Sense strand starting at position 2799 of SEQ ID NO: 1886206
uggcgugaacccgguagau

SEQ ID NO: 2394147 - RNA, 19 nt, Artificial Sequence
  Description of Artificial Sequence: Synthetic oligonucleotide
  Antisense strand to SEQ ID NO: 2394146
aucuaccggguucacgcca

SEQ ID NO: 2394148 - RNA, 19 nt, Artificial Sequence
  Description of Artificial Sequence: Synthetic oligonucleotide
  Sense strand starting at position 3100 of SEQ ID NO: 1886206
gccggagaaccgugugaac

SEQ ID NO: 2394149 - RNA, 19 nt, Artificial Sequence
  Description of Artificial Sequence: Synthetic oligonucleotide
  Antisense strand to SEQ ID NO: 2394148
guucacacgguucuccggc

SEQ ID NO: 2394150 - RNA, 19 nt, Artificial Sequence
  Description of Artificial Sequence: Synthetic oligonucleotide
  Sense strand starting at position 3493 of SEQ ID NO: 1886206
gccacaauuggguauaucu

SEQ ID NO: 2394151 - RNA, 19 nt, Artificial Sequence
  Description of Artificial Sequence: Synthetic oligonucleotide
  Antisense strand to SEQ ID NO: 2394150
agauauacccaauuguggc

SEQ ID NO: 2394152 - RNA, 19 nt, Artificial Sequence
  Description of Artificial Sequence: Synthetic oligonucleotide
  Sense strand starting at position 3500 of SEQ ID NO: 1886206
uuggguauaucuugaugag

SEQ ID NO: 2394153 - RNA, 19 nt, Artificial Sequence
  Description of Artificial Sequence: Synthetic oligonucleotide
  Antisense strand to SEQ ID NO: 2394152
cucaucaagauauacccaa

SEQ ID NO: 2394154 - RNA, 19 nt, Artificial Sequence
  Description of Artificial Sequence: Synthetic oligonucleotide
  Sense strand starting at position 3501 of SEQ ID NO: 1886206
uggguauaucuugaugagc

SEQ ID NO: 2394155 - RNA, 19 nt, Artificial Sequence
  Description of Artificial Sequence: Synthetic oligonucleotide
  Antisense strand to SEQ ID NO: 2394154
gcucaucaagauauaccca

SEQ ID NO: 2394156 - RNA, 19 nt, Artificial Sequence
  Description of Artificial Sequence: Synthetic oligonucleotide
  Sense strand starting at position 3503 of SEQ ID NO: 1886206
gguauaucuugaugagcac

SEQ ID NO: 2394157 - RNA, 19 nt, Artificial Sequence
  Description of Artificial Sequence: Synthetic oligonucleotide
  Antisense strand to SEQ ID NO: 2394156
gugcucaucaagauauacc

SEQ ID NO: 2394158 - RNA, 19 nt, Artificial Sequence
  Description of Artificial Sequence: Synthetic oligonucleotide
  Sense strand starting at position 3504 of SEQ ID NO: 1886206
guauaucuugaugagcaca

SEQ ID NO: 2394159 - RNA, 19 nt, Artificial Sequence
  Description of Artificial Sequence: Synthetic oligonucleotide
  Antisense strand to SEQ ID NO: 2394158
ugugcucaucaagauauac

SEQ ID NO: 2394160 - RNA, 19 nt, Artificial Sequence
  Description of Artificial Sequence: Synthetic oligonucleotide
  Sense strand starting at position 3509 of SEQ ID NO: 1886206
ucuugaugagcacagcaua

SEQ ID NO: 2394161 - RNA, 19 nt, Artificial Sequence
  Description of Artificial Sequence: Synthetic oligonucleotide
  Antisense strand to SEQ ID NO: 2394160
uaugcugugcucaucaaga

SEQ ID NO: 2394162 - RNA, 19 nt, Artificial Sequence
  Description of Artificial Sequence: Synthetic oligonucleotide
  Sense strand starting at position 3624 of SEQ ID NO: 1886206
guauuuauaugucugucua

SEQ ID NO: 2394163 - RNA, 19 nt, Artificial Sequence
  Description of Artificial Sequence: Synthetic oligonucleotide
  Antisense strand to SEQ ID NO: 2394162
uagacagacauauaaauac

SEQ ID NO: 2394164 - RNA, 19 nt, Artificial Sequence
  Description of Artificial Sequence: Synthetic oligonucleotide
  Sense strand starting at position 43 of SEQ ID NO: 1886207
uugaguggucacugcucaa

SEQ ID NO: 2394165 - RNA, 19 nt, Artificial Sequence
  Description of Artificial Sequence: Synthetic oligonucleotide
  Antisense strand to SEQ ID NO: 2394164
uugagcagugaccacucaa

SEQ ID NO: 2394166 - RNA, 19 nt, Artificial Sequence
  Description of Artificial Sequence: Synthetic oligonucleotide
  Sense strand starting at position 46 of SEQ ID NO: 1886207
aguggucacugcucaacaa

SEQ ID NO: 2394167 - RNA, 19 nt, Artificial Sequence
  Description of Artificial Sequence: Synthetic oligonucleotide
  Antisense strand to SEQ ID NO: 2394166
uuguugagcagugaccacu

SEQ ID NO: 2394168 - RNA, 19 nt, Artificial Sequence
  Description of Artificial Sequence: Synthetic oligonucleotide
  Sense strand starting at position 47 of SEQ ID NO: 1886207
guggucacugcucaacaau

SEQ ID NO: 2394169 - RNA, 19 nt, Artificial Sequence
  Description of Artificial Sequence: Synthetic oligonucleotide
  Antisense strand to SEQ ID NO: 2394168
auuguugagcagugaccac

SEQ ID NO: 2394170 - RNA, 19 nt, Artificial Sequence
  Description of Artificial Sequence: Synthetic oligonucleotide
  Sense strand starting at position 71 of SEQ ID NO: 1886207
ggcuaaacauugucccuaa

SEQ ID NO: 2394171 - RNA, 19 nt, Artificial Sequence
  Description of Artificial Sequence: Synthetic oligonucleotide
  Antisense strand to SEQ ID NO: 2394170
uuagggacaauguuuagcc

SEQ ID NO: 2394172 - RNA, 19 nt, Artificial Sequence
  Description of Artificial Sequence: Synthetic oligonucleotide
  Sense strand starting at position 100 of SEQ ID NO: 1886207
ugucuagagucugccuuua

SEQ ID NO: 2394173 - RNA, 19 nt, Artificial Sequence
  Description of Artificial Sequence: Synthetic oligonucleotide
  Antisense strand to SEQ ID NO: 2394172
uaaaggcagacucuagaca

SEQ ID NO: 2394174 - RNA, 19 nt, Artificial Sequence
  Description of Artificial Sequence: Synthetic oligonucleotide
  Sense strand starting at position 102 of SEQ ID NO: 1886207
ucuagagucugccuuuaac

SEQ ID NO: 2394175 - RNA, 19 nt, Artificial Sequence
  Description of Artificial Sequence: Synthetic oligonucleotide
  Antisense strand to SEQ ID NO: 2394174
guuaaaggcagacucuaga

SEQ ID NO: 2394176 - RNA, 19 nt, Artificial Sequence
  Description of Artificial Sequence: Synthetic oligonucleotide
  Sense strand starting at position 166 of SEQ ID NO: 1886207
cuccgcuuaggcuggaaau

SEQ ID NO: 2394177 - RNA, 19 nt, Artificial Sequence
  Description of Artificial Sequence: Synthetic oligonucleotide
  Antisense strand to SEQ ID NO: 2394176
auuuccagccuaagcggag

SEQ ID NO: 2394178 - RNA, 19 nt, Artificial Sequence
  Description of Artificial Sequence: Synthetic oligonucleotide
  Sense strand starting at position 168 of SEQ ID NO: 1886207
ccgcuuaggcuggaaauca

SEQ ID NO: 2394179 - RNA, 19 nt, Artificial Sequence
  Description of Artificial Sequence: Synthetic oligonucleotide
  Antisense strand to SEQ ID NO: 2394178
ugauuuccagccuaagcgg

SEQ ID NO: 2394180 - RNA, 19 nt, Artificial Sequence
  Description of Artificial Sequence: Synthetic oligonucleotide
  Sense strand starting at position 255 of SEQ ID NO: 1886207
aggccagugacaugugaau

SEQ ID NO: 2394181 - RNA, 19 nt, Artificial Sequence
  Description of Artificial Sequence: Synthetic oligonucleotide
  Antisense strand to SEQ ID NO: 2394180
auucacaugucacuggccu

SEQ ID NO: 2394182 - RNA, 19 nt, Artificial Sequence
  Description of Artificial Sequence: Synthetic oligonucleotide
  Sense strand starting at position 257 of SEQ ID NO: 1886207
gccagugacaugugaaugu

SEQ ID NO: 2394183 - RNA, 19 nt, Artificial Sequence
  Description of Artificial Sequence: Synthetic oligonucleotide
  Antisense strand to SEQ ID NO: 2394182
acauucacaugucacuggc

SEQ ID NO: 2394184 - RNA, 19 nt, Artificial Sequence
  Description of Artificial Sequence: Synthetic oligonucleotide
  Sense strand starting at position 261 of SEQ ID NO: 1886207
gugacaugugaauguccca

SEQ ID NO: 2394185 - RNA, 19 nt, Artificial Sequence
  Description of Artificial Sequence: Synthetic oligonucleotide
  Antisense strand to SEQ ID NO: 2394184
ugggacauucacaugucac

SEQ ID NO: 2394186 - RNA, 19 nt, Artificial Sequence
  Description of Artificial Sequence: Synthetic oligonucleotide
  Sense strand starting at position 492 of SEQ ID NO: 1886207
agaaucuucuaauugcagu

SEQ ID NO: 2394187 - RNA, 19 nt, Artificial Sequence
  Description of Artificial Sequence: Synthetic oligonucleotide
  Antisense strand to SEQ ID NO: 2394186
acugcaauuagaagauucu

SEQ ID NO: 2394188 - RNA, 19 nt, Artificial Sequence
  Description of Artificial Sequence: Synthetic oligonucleotide
  Sense strand starting at position 521 of SEQ ID NO: 1886207
gggccaauuugugggagaa

SEQ ID NO: 2394189 - RNA, 19 nt, Artificial Sequence
  Description of Artificial Sequence: Synthetic oligonucleotide
  Antisense strand to SEQ ID NO: 2394188
uucucccacaaauuggccc

SEQ ID NO: 2394190 - RNA, 19 nt, Artificial Sequence
  Description of Artificial Sequence: Synthetic oligonucleotide
  Sense strand starting at position 560 of SEQ ID NO: 1886207
aaauguggacguugaauga

SEQ ID NO: 2394191 - RNA, 19 nt, Artificial Sequence
  Description of Artificial Sequence: Synthetic oligonucleotide
  Antisense strand to SEQ ID NO: 2394190
ucauucaacguccacauuu

SEQ ID NO: 2394192 - RNA, 19 nt, Artificial Sequence
  Description of Artificial Sequence: Synthetic oligonucleotide
  Sense strand starting at position 814 of SEQ ID NO: 1886207
ccuguuuccucugcucaga

SEQ ID NO: 2394193 - RNA, 19 nt, Artificial Sequence
  Description of Artificial Sequence: Synthetic oligonucleotide
  Antisense strand to SEQ ID NO: 2394192
ucugagcagaggaaacagg

SEQ ID NO: 2394194 - RNA, 19 nt, Artificial Sequence
  Description of Artificial Sequence: Synthetic oligonucleotide
  Sense strand starting at position 938 of SEQ ID NO: 1886207
cuguguuauuugucauccu

SEQ ID NO: 2394195 - RNA, 19 nt, Artificial Sequence
  Description of Artificial Sequence: Synthetic oligonucleotide
  Antisense strand to SEQ ID NO: 2394194
aggaugacaaauaacacag

SEQ ID NO: 2394196 - RNA, 19 nt, Artificial Sequence
  Description of Artificial Sequence: Synthetic oligonucleotide
  Sense strand starting at position 1403 of SEQ ID NO: 1886207
cgcagaaucucuccgauuu

SEQ ID NO: 2394197 - RNA, 19 nt, Artificial Sequence
  Description of Artificial Sequence: Synthetic oligonucleotide
  Antisense strand to SEQ ID NO: 2394196
aaaucggagagauucugcg

SEQ ID NO: 2394198 - RNA, 19 nt, Artificial Sequence
  Description of Artificial Sequence: Synthetic oligonucleotide
  Sense strand starting at position 2095 of SEQ ID NO: 1886207
uagaucuagcucugagauu

SEQ ID NO: 2394199 - RNA, 19 nt, Artificial Sequence
  Description of Artificial Sequence: Synthetic oligonucleotide
  Antisense strand to SEQ ID NO: 2394198
aaucucagagcuagaucua

SEQ ID NO: 2394200 - RNA, 19 nt, Artificial Sequence
  Description of Artificial Sequence: Synthetic oligonucleotide
  Sense strand starting at position 2215 of SEQ ID NO: 1886207
cucgguguauguuuaagaa

SEQ ID NO: 2394201 - RNA, 19 nt, Artificial Sequence
  Description of Artificial Sequence: Synthetic oligonucleotide
  Antisense strand to SEQ ID NO: 2394200
uucuuaaacauacaccgag

SEQ ID NO: 2394202 - RNA, 19 nt, Artificial Sequence
  Description of Artificial Sequence: Synthetic oligonucleotide
  Sense strand starting at position 2352 of SEQ ID NO: 1886207
ggugcaaucugcucaaaug

SEQ ID NO: 2394203 - RNA, 19 nt, Artificial Sequence
  Description of Artificial Sequence: Synthetic oligonucleotide
  Antisense strand to SEQ ID NO: 2394202
cauuugagcagauugcacc

SEQ ID NO: 2394204 - RNA, 19 nt, Artificial Sequence
  Description of Artificial Sequence: Synthetic oligonucleotide
  Sense strand starting at position 2353 of SEQ ID NO: 1886207
gugcaaucugcucaaauga

SEQ ID NO: 2394205 - RNA, 19 nt, Artificial Sequence
  Description of Artificial Sequence: Synthetic oligonucleotide
  Antisense strand to SEQ ID NO: 2394204
ucauuugagcagauugcac

SEQ ID NO: 2394206 - RNA, 19 nt, Artificial Sequence
  Description of Artificial Sequence: Synthetic oligonucleotide
  Sense strand starting at position 2382 of SEQ ID NO: 1886207
cugggagcccuagaguuau

SEQ ID NO: 2394207 - RNA, 19 nt, Artificial Sequence
  Description of Artificial Sequence: Synthetic oligonucleotide
  Antisense strand to SEQ ID NO: 2394206
auaacucuagggcucccag

SEQ ID NO: 2394208 - RNA, 19 nt, Artificial Sequence
  Description of Artificial Sequence: Synthetic oligonucleotide
  Sense strand starting at position 2492 of SEQ ID NO: 1886207
uaaagagcucguugcauau

SEQ ID NO: 2394209 - RNA, 19 nt, Artificial Sequence
  Description of Artificial Sequence: Synthetic oligonucleotide
  Antisense strand to SEQ ID NO: 2394208
auaugcaacgagcucuuua

SEQ ID NO: 2394210 - RNA, 19 nt, Artificial Sequence
  Description of Artificial Sequence: Synthetic oligonucleotide
  Sense strand starting at position 2502 of SEQ ID NO: 1886207
guugcauauccggcggagu

SEQ ID NO: 2394211 - RNA, 19 nt, Artificial Sequence
  Description of Artificial Sequence: Synthetic oligonucleotide
  Antisense strand to SEQ ID NO: 2394210
acuccgccggauaugcaac

SEQ ID NO: 2394212 - RNA, 19 nt, Artificial Sequence
  Description of Artificial Sequence: Synthetic oligonucleotide
  Sense strand starting at position 2561 of SEQ ID NO: 1886207
agcugugucaguuacagag

SEQ ID NO: 2394213 - RNA, 19 nt, Artificial Sequence
  Description of Artificial Sequence: Synthetic oligonucleotide
  Antisense strand to SEQ ID NO: 2394212
cucuguaacugacacagcu

SEQ ID NO: 2394214 - RNA, 19 nt, Artificial Sequence
  Description of Artificial Sequence: Synthetic oligonucleotide
  Sense strand starting at position 2640 of SEQ ID NO: 1886207
ggagcauugcguuaaccuc

SEQ ID NO: 2394215 - RNA, 19 nt, Artificial Sequence
  Description of Artificial Sequence: Synthetic oligonucleotide
  Antisense strand to SEQ ID NO: 2394214
gagguuaacgcaaugcucc

SEQ ID NO: 2394216 - RNA, 19 nt, Artificial Sequence
  Description of Artificial Sequence: Synthetic oligonucleotide
  Sense strand starting at position 2693 of SEQ ID NO: 1886207
cgcugaaucuggcuuccaa

SEQ ID NO: 2394217 - RNA, 19 nt, Artificial Sequence
  Description of Artificial Sequence: Synthetic oligonucleotide
  Antisense strand to SEQ ID NO: 2394216
uuggaagccagauucagcg

SEQ ID NO: 2394218 - RNA, 19 nt, Artificial Sequence
  Description of Artificial Sequence: Synthetic oligonucleotide
  Sense strand starting at position 2707 of SEQ ID NO: 1886207
uccaaaggucccgaggauu

SEQ ID NO: 2394219 - RNA, 19 nt, Artificial Sequence
  Description of Artificial Sequence: Synthetic oligonucleotide
  Antisense strand to SEQ ID NO: 2394218
aauccucgggaccuuugga

SEQ ID NO: 2394220 - RNA, 19 nt, Artificial Sequence
  Description of Artificial Sequence: Synthetic oligonucleotide
  Sense strand starting at position 2734 of SEQ ID NO: 1886207
uagaauauauguuuggcaa

SEQ ID NO: 2394221 - RNA, 19 nt, Artificial Sequence
  Description of Artificial Sequence: Synthetic oligonucleotide
  Antisense strand to SEQ ID NO: 2394220
uugccaaacauauauucua

SEQ ID NO: 2394222 - RNA, 19 nt, Artificial Sequence
  Description of Artificial Sequence: Synthetic oligonucleotide
  Sense strand starting at position 2735 of SEQ ID NO: 1886207
agaauauauguuuggcaac

SEQ ID NO: 2394223 - RNA, 19 nt, Artificial Sequence
  Description of Artificial Sequence: Synthetic oligonucleotide
  Antisense strand to SEQ ID NO: 2394222
guugccaaacauauauucu

SEQ ID NO: 2394224 - RNA, 19 nt, Artificial Sequence
  Description of Artificial Sequence: Synthetic oligonucleotide
  Sense strand starting at position 3049 of SEQ ID NO: 1886207
aagcauguagacuggaaua

SEQ ID NO: 2394225 - RNA, 19 nt, Artificial Sequence
  Description of Artificial Sequence: Synthetic oligonucleotide
  Antisense strand to SEQ ID NO: 2394224
uauuccagucuacaugcuu

SEQ ID NO: 2394226 - RNA, 19 nt, Artificial Sequence
  Description of Artificial Sequence: Synthetic oligonucleotide
  Sense strand starting at position 3072 of SEQ ID NO: 1886207
guguuccuccucugauacu

SEQ ID NO: 2394227 - RNA, 19 nt, Artificial Sequence
  Description of Artificial Sequence: Synthetic oligonucleotide
  Antisense strand to SEQ ID NO: 2394226
aguaucagaggaggaacac

SEQ ID NO: 2394228 - RNA, 19 nt, Artificial Sequence
  Description of Artificial Sequence: Synthetic oligonucleotide
  Sense strand starting at position 3112 of SEQ ID NO: 1886207
aguggagaucgugggauaa

SEQ ID NO: 2394229 - RNA, 19 nt, Artificial Sequence
  Description of Artificial Sequence: Synthetic oligonucleotide
  Antisense strand to SEQ ID NO: 2394228
uuaucccacgaucuccacu

SEQ ID NO: 2394230 - RNA, 19 nt, Artificial Sequence
  Description of Artificial Sequence: Synthetic oligonucleotide
  Sense strand starting at position 3134 of SEQ ID NO: 1886207
cagccagucagaggguuaa

SEQ ID NO: 2394231 - RNA, 19 nt, Artificial Sequence
  Description of Artificial Sequence: Synthetic oligonucleotide
  Antisense strand to SEQ ID NO: 2394230
uuaacccucugacuggcug

SEQ ID NO: 2394232 - RNA, 19 nt, Artificial Sequence
  Description of Artificial Sequence: Synthetic oligonucleotide
  Sense strand starting at position 3147 of SEQ ID NO: 1886207
gguuaaugagcaugacuug

SEQ ID NO: 2394233 - RNA, 19 nt, Artificial Sequence
  Description of Artificial Sequence: Synthetic oligonucleotide
  Antisense strand to SEQ ID NO: 2394232
caagucaugcucauuaacc

SEQ ID NO: 2394234 - RNA, 19 nt, Artificial Sequence
  Description of Artificial Sequence: Synthetic oligonucleotide
  Sense strand starting at position 3156 of SEQ ID NO: 1886207
gcaugacuugggugagugu

SEQ ID NO: 2394235 - RNA, 19 nt, Artificial Sequence
  Description of Artificial Sequence: Synthetic oligonucleotide
  Antisense strand to SEQ ID NO: 2394234
acacucacccaagucaugc

SEQ ID NO: 2394236 - RNA, 19 nt, Artificial Sequence
  Description of Artificial Sequence: Synthetic oligonucleotide
  Sense strand starting at position 3418 of SEQ ID NO: 1886207
ccaugcuccagagagguuu

SEQ ID NO: 2394237 - RNA, 19 nt, Artificial Sequence
  Description of Artificial Sequence: Synthetic oligonucleotide
  Antisense strand to SEQ ID NO: 2394236
aaaccucucuggagcaugg

SEQ ID NO: 2394238 - RNA, 19 nt, Artificial Sequence
  Description of Artificial Sequence: Synthetic oligonucleotide
  Sense strand starting at position 3538 of SEQ ID NO: 1886207
cuccacagucguuaguaca

SEQ ID NO: 2394239 - RNA, 19 nt, Artificial Sequence
  Description of Artificial Sequence: Synthetic oligonucleotide
  Antisense strand to SEQ ID NO: 2394238
uguacuaacgacuguggag

SEQ ID NO: 2394240 - RNA, 19 nt, Artificial Sequence
  Description of Artificial Sequence: Synthetic oligonucleotide
  Sense strand starting at position 3709 of SEQ ID NO: 1886207
auagauuuauuggagguuu

SEQ ID NO: 2394241 - RNA, 19 nt, Artificial Sequence
  Description of Artificial Sequence: Synthetic oligonucleotide
  Antisense strand to SEQ ID NO: 2394240
aaaccuccaauaaaucuau

SEQ ID NO: 2394242 - RNA, 19 nt, Artificial Sequence
  Description of Artificial Sequence: Synthetic oligonucleotide
  Sense strand starting at position 3762 of SEQ ID NO: 1886207
gguacucaucauugcuaca

SEQ ID NO: 2394243 - RNA, 19 nt, Artificial Sequence
  Description of Artificial Sequence: Synthetic oligonucleotide
  Antisense strand to SEQ ID NO: 2394242
uguagcaaugaugaguacc

SEQ ID NO: 2394244 - RNA, 19 nt, Artificial Sequence
  Description of Artificial Sequence: Synthetic oligonucleotide
  Sense strand starting at position 38 of SEQ ID NO: 1886208
uuaaguuuaccggagccuu

SEQ ID NO: 2394245 - RNA, 19 nt, Artificial Sequence
  Description of Artificial Sequence: Synthetic oligonucleotide
  Antisense strand to SEQ ID NO: 2394244
aaggcuccgguaaacuuaa

SEQ ID NO: 2394246 - RNA, 19 nt, Artificial Sequence
  Description of Artificial Sequence: Synthetic oligonucleotide
  Sense strand starting at position 58 of SEQ ID NO: 1886208
agauaaaguugccacuuga

SEQ ID NO: 2394247 - RNA, 19 nt, Artificial Sequence
  Description of Artificial Sequence: Synthetic oligonucleotide
  Antisense strand to SEQ ID NO: 2394246
ucaaguggcaacuuuaucu

SEQ ID NO: 2394248 - RNA, 19 nt, Artificial Sequence
  Description of Artificial Sequence: Synthetic oligonucleotide
  Sense strand starting at position 182 of SEQ ID NO: 1886208
cgcagugucacagagagaa

SEQ ID NO: 2394249 - RNA, 19 nt, Artificial Sequence
  Description of Artificial Sequence: Synthetic oligonucleotide
  Antisense strand to SEQ ID NO: 2394248
uucucucugugacacugcg

SEQ ID NO: 2394250 - RNA, 19 nt, Artificial Sequence
  Description of Artificial Sequence: Synthetic oligonucleotide
  Sense strand starting at position 2132 of SEQ ID NO: 1886208
cgcugauuguugcgcaaac

SEQ ID NO: 2394251 - RNA, 19 nt, Artificial Sequence
  Description of Artificial Sequence: Synthetic oligonucleotide
  Antisense strand to SEQ ID NO: 2394250
guuugcgcaacaaucagcg

SEQ ID NO: 2394252 - RNA, 19 nt, Artificial Sequence
  Description of Artificial Sequence: Synthetic oligonucleotide
  Sense strand starting at position 2133 of SEQ ID NO: 1886208
gcugauuguugcgcaaaca

SEQ ID NO: 2394253 - RNA, 19 nt, Artificial Sequence
  Description of Artificial Sequence: Synthetic oligonucleotide
  Antisense strand to SEQ ID NO: 2394252
uguuugcgcaacaaucagc

SEQ ID NO: 2394254 - RNA, 19 nt, Artificial Sequence
  Description of Artificial Sequence: Synthetic oligonucleotide
  Sense strand starting at position 2134 of SEQ ID NO: 1886208
cugauuguugcgcaaacaa

SEQ ID NO: 2394255 - RNA, 19 nt, Artificial Sequence
  Description of Artificial Sequence: Synthetic oligonucleotide
  Antisense strand to SEQ ID NO: 2394254
uuguuugcgcaacaaucag

SEQ ID NO: 2394256 - RNA, 19 nt, Artificial Sequence
  Description of Artificial Sequence: Synthetic oligonucleotide
  Sense strand starting at position 2500 of SEQ ID NO: 1886208
acuuuaaaguuguuccaaa

SEQ ID NO: 2394257 - RNA, 19 nt, Artificial Sequence
  Description of Artificial Sequence: Synthetic oligonucleotide
  Antisense strand to SEQ ID NO: 2394256
uuuggaacaacuuuaaagu

SEQ ID NO: 2394258 - RNA, 19 nt, Artificial Sequence
  Description of Artificial Sequence: Synthetic oligonucleotide
  Sense strand starting at position 2501 of SEQ ID NO: 1886208
cuuuaaaguuguuccaaac

SEQ ID NO: 2394259 - RNA, 19 nt, Artificial Sequence
  Description of Artificial Sequence: Synthetic oligonucleotide
  Antisense strand to SEQ ID NO: 2394258
guuuggaacaacuuuaaag

SEQ ID NO: 2394260 - RNA, 19 nt, Artificial Sequence
  Description of Artificial Sequence: Synthetic oligonucleotide
  Sense strand starting at position 2916 of SEQ ID NO: 1886208
ggaucacgcuuucccuaga

SEQ ID NO: 2394261 - RNA, 19 nt, Artificial Sequence
  Description of Artificial Sequence: Synthetic oligonucleotide
  Antisense strand to SEQ ID NO: 2394260
ucuagggaaagcgugaucc

SEQ ID NO: 2394262 - RNA, 19 nt, Artificial Sequence
  Description of Artificial Sequence: Synthetic oligonucleotide
  Sense strand starting at position 2921 of SEQ ID NO: 1886208
acgcuuucccuagagaggu

SEQ ID NO: 2394263 - RNA, 19 nt, Artificial Sequence
  Description of Artificial Sequence: Synthetic oligonucleotide
  Antisense strand to SEQ ID NO: 2394262
accucucuagggaaagcgu

SEQ ID NO: 2394264 - RNA, 19 nt, Artificial Sequence
  Description of Artificial Sequence: Synthetic oligonucleotide
  Sense strand starting at position 3105 of SEQ ID NO: 1886208
uuguaaagucgggauuggu

SEQ ID NO: 2394265 - RNA, 19 nt, Artificial Sequence
  Description of Artificial Sequence: Synthetic oligonucleotide
  Antisense strand to SEQ ID NO: 2394264
accaaucccgacuuuacaa

SEQ ID NO: 2394266 - RNA, 19 nt, Artificial Sequence
  Description of Artificial Sequence: Synthetic oligonucleotide
  Sense strand starting at position 3364 of SEQ ID NO: 1886208
gcgggucucccuggagagu

SEQ ID NO: 2394267 - RNA, 19 nt, Artificial Sequence
  Description of Artificial Sequence: Synthetic oligonucleotide
  Antisense strand to SEQ ID NO: 2394266
acucuccagggagacccgc

SEQ ID NO: 2394268 - RNA, 19 nt, Artificial Sequence
  Description of Artificial Sequence: Synthetic oligonucleotide
  Sense strand starting at position 3366 of SEQ ID NO: 1886208
gggucucccuggagaguga

SEQ ID NO: 2394269 - RNA, 19 nt, Artificial Sequence
  Description of Artificial Sequence: Synthetic oligonucleotide
  Antisense strand to SEQ ID NO: 2394268
ucacucuccagggagaccc

SEQ ID NO: 2394270 - RNA, 19 nt, Artificial Sequence
  Description of Artificial Sequence: Synthetic oligonucleotide
  Sense strand starting at position 3497 of SEQ ID NO: 1886208
ugcugagcuuuaccuggaa

SEQ ID NO: 2394271 - RNA, 19 nt, Artificial Sequence
  Description of Artificial Sequence: Synthetic oligonucleotide
  Antisense strand to SEQ ID NO: 2394270
uuccagguaaagcucagca

SEQ ID NO: 2394272 - RNA, 19 nt, Artificial Sequence
  Description of Artificial Sequence: Synthetic oligonucleotide
  Sense strand starting at position 3500 of SEQ ID NO: 1886208
ugagcuuuaccuggaacca

SEQ ID NO: 2394273 - RNA, 19 nt, Artificial Sequence
  Description of Artificial Sequence: Synthetic oligonucleotide
  Antisense strand to SEQ ID NO: 2394272
ugguuccagguaaagcuca

SEQ ID NO: 2394274 - RNA, 19 nt, Artificial Sequence
  Description of Artificial Sequence: Synthetic oligonucleotide
  Sense strand starting at position 3638 of SEQ ID NO: 1886208
gccucaguuucuuguuuga

SEQ ID NO: 2394275 - RNA, 19 nt, Artificial Sequence
  Description of Artificial Sequence: Synthetic oligonucleotide
  Antisense strand to SEQ ID NO: 2394274
ucaaacaagaaacugaggc

SEQ ID NO: 2394276 - RNA, 19 nt, Artificial Sequence
  Description of Artificial Sequence: Synthetic oligonucleotide
  Sense strand starting at position 3640 of SEQ ID NO: 1886208
cucaguuucuuguuugaaa

SEQ ID NO: 2394277 - RNA, 19 nt, Artificial Sequence
  Description of Artificial Sequence: Synthetic oligonucleotide
  Antisense strand to SEQ ID NO: 2394276
uuucaaacaagaaacugag

SEQ ID NO: 2394278 - RNA, 19 nt, Artificial Sequence
  Description of Artificial Sequence: Synthetic oligonucleotide
  Sense strand starting at position 3641 of SEQ ID NO: 1886208
ucaguuucuuguuugaaac

SEQ ID NO: 2394279 - RNA, 19 nt, Artificial Sequence
  Description of Artificial Sequence: Synthetic oligonucleotide
  Antisense strand to SEQ ID NO: 2394278
guuucaaacaagaaacuga

SEQ ID NO: 2394280 - RNA, 19 nt, Artificial Sequence
  Description of Artificial Sequence: Synthetic oligonucleotide
  Sense strand starting at position 3698 of SEQ ID NO: 1886208
cacgaaggucccuggagau

SEQ ID NO: 2394281 - RNA, 19 nt, Artificial Sequence
  Description of Artificial Sequence: Synthetic oligonucleotide
  Antisense strand to SEQ ID NO: 2394280
aucuccagggaccuucgug

SEQ ID NO: 2394282 - RNA, 19 nt, Artificial Sequence
  Description of Artificial Sequence: Synthetic oligonucleotide
  Sense strand starting at position 3711 of SEQ ID NO: 1886208
ggagauagugcacguuaaa

SEQ ID NO: 2394283 - RNA, 19 nt, Artificial Sequence
  Description of Artificial Sequence: Synthetic oligonucleotide
  Antisense strand to SEQ ID NO: 2394282
uuuaacgugcacuaucucc

SEQ ID NO: 2394284 - RNA, 19 nt, Artificial Sequence
  Description of Artificial Sequence: Synthetic oligonucleotide
  Sense strand starting at position 3926 of SEQ ID NO: 1886208
cguguaugcucuuugugga

SEQ ID NO: 2394285 - RNA, 19 nt, Artificial Sequence
  Description of Artificial Sequence: Synthetic oligonucleotide
  Antisense strand to SEQ ID NO: 2394284
uccacaaagagcauacacg

SEQ ID NO: 2394286 - RNA, 19 nt, Artificial Sequence
  Description of Artificial Sequence: Synthetic oligonucleotide
  Sense strand starting at position 3927 of SEQ ID NO: 1886208
guguaugcucuuuguggau

SEQ ID NO: 2394287 - RNA, 19 nt, Artificial Sequence
  Description of Artificial Sequence: Synthetic oligonucleotide
  Antisense strand to SEQ ID NO: 2394286
auccacaaagagcauacac

SEQ ID NO: 2394288 - RNA, 19 nt, Artificial Sequence
  Description of Artificial Sequence: Synthetic oligonucleotide
  Sense strand starting at position 3929 of SEQ ID NO: 1886208
guaugcucuuuguggauua

SEQ ID NO: 2394289 - RNA, 19 nt, Artificial Sequence
  Description of Artificial Sequence: Synthetic oligonucleotide
  Antisense strand to SEQ ID NO: 2394288
uaauccacaaagagcauac

SEQ ID NO: 2394290 - RNA, 19 nt, Artificial Sequence
  Description of Artificial Sequence: Synthetic oligonucleotide
  Sense strand starting at position 3930 of SEQ ID NO: 1886208
uaugcucuuuguggauuau

SEQ ID NO: 2394291 - RNA, 19 nt, Artificial Sequence
  Description of Artificial Sequence: Synthetic oligonucleotide
  Antisense strand to SEQ ID NO: 2394290
auaauccacaaagagcaua

SEQ ID NO: 2394292 - RNA, 19 nt, Artificial Sequence
  Description of Artificial Sequence: Synthetic oligonucleotide
  Sense strand starting at position 3936 of SEQ ID NO: 1886208
cuuuguggauuaucuuuga

SEQ ID NO: 2394293 - RNA, 19 nt, Artificial Sequence
  Description of Artificial Sequence: Synthetic oligonucleotide
  Antisense strand to SEQ ID NO: 2394292
ucaaagauaauccacaaag

SEQ ID NO: 2394294 - RNA, 19 nt, Artificial Sequence
  Description of Artificial Sequence: Synthetic oligonucleotide
  Sense strand starting at position 3939 of SEQ ID NO: 1886208
uguggauuaucuuugacug

SEQ ID NO: 2394295 - RNA, 19 nt, Artificial Sequence
  Description of Artificial Sequence: Synthetic oligonucleotide
  Antisense strand to SEQ ID NO: 2394294
cagucaaagauaauccaca

SEQ ID NO: 2394296 - RNA, 19 nt, Artificial Sequence
  Description of Artificial Sequence: Synthetic oligonucleotide
  Sense strand starting at position 3940 of SEQ ID NO: 1886208
guggauuaucuuugacugu

SEQ ID NO: 2394297 - RNA, 19 nt, Artificial Sequence
  Description of Artificial Sequence: Synthetic oligonucleotide
  Antisense strand to SEQ ID NO: 2394296
acagucaaagauaauccac

SEQ ID NO: 2394298 - RNA, 19 nt, Artificial Sequence
  Description of Artificial Sequence: Synthetic oligonucleotide
  Sense strand starting at position 3943 of SEQ ID NO: 1886208
gauuaucuuugacugugua

SEQ ID NO: 2394299 - RNA, 19 nt, Artificial Sequence
  Description of Artificial Sequence: Synthetic oligonucleotide
  Antisense strand to SEQ ID NO: 2394298
uacacagucaaagauaauc

SEQ ID NO: 2394300 - RNA, 19 nt, Artificial Sequence
  Description of Artificial Sequence: Synthetic oligonucleotide
  Sense strand starting at position 3944 of SEQ ID NO: 1886208
auuaucuuugacuguguau

SEQ ID NO: 2394301 - RNA, 19 nt, Artificial Sequence
  Description of Artificial Sequence: Synthetic oligonucleotide
  Antisense strand to SEQ ID NO: 2394300
auacacagucaaagauaau

SEQ ID NO: 2394302 - RNA, 19 nt, Artificial Sequence
  Description of Artificial Sequence: Synthetic oligonucleotide
  Sense strand starting at position 3951 of SEQ ID NO: 1886208
uugacuguguauuacaaua

SEQ ID NO: 2394303 - RNA, 19 nt, Artificial Sequence
  Description of Artificial Sequence: Synthetic oligonucleotide
  Antisense strand to SEQ ID NO: 2394302
uauuguaauacacagucaa

SEQ ID NO: 2394304 - RNA, 19 nt, Artificial Sequence
  Description of Artificial Sequence: Synthetic oligonucleotide
  Sense strand starting at position 3968 of SEQ ID NO: 1886208
uaauaauaguucgugcgua

SEQ ID NO: 2394305 - RNA, 19 nt, Artificial Sequence
  Description of Artificial Sequence: Synthetic oligonucleotide
  Antisense strand to SEQ ID NO: 2394304
uacgcacgaacuauuauua

SEQ ID NO: 2394306 - RNA, 19 nt, Artificial Sequence
  Description of Artificial Sequence: Synthetic oligonucleotide
  Sense strand starting at position 3969 of SEQ ID NO: 1886208
aauaauaguucgugcguau

SEQ ID NO: 2394307 - RNA, 19 nt, Artificial Sequence
  Description of Artificial Sequence: Synthetic oligonucleotide
  Antisense strand to SEQ ID NO: 2394306
auacgcacgaacuauuauu

SEQ ID NO: 2394308 - RNA, 19 nt, Artificial Sequence
  Description of Artificial Sequence: Synthetic oligonucleotide
  Sense strand starting at position 3970 of SEQ ID NO: 1886208
auaauaguucgugcguauu

SEQ ID NO: 2394309 - RNA, 19 nt, Artificial Sequence
  Description of Artificial Sequence: Synthetic oligonucleotide
  Antisense strand to SEQ ID NO: 2394308
aauacgcacgaacuauuau

SEQ ID NO: 2394310 - RNA, 19 nt, Artificial Sequence
  Description of Artificial Sequence: Synthetic oligonucleotide
  Sense strand starting at position 3972 of SEQ ID NO: 1886208
aauaguucgugcguauuga

SEQ ID NO: 2394311 - RNA, 19 nt, Artificial Sequence
  Description of Artificial Sequence: Synthetic oligonucleotide
  Antisense strand to SEQ ID NO: 2394310
ucaauacgcacgaacuauu

SEQ ID NO: 2394312 - RNA, 19 nt, Artificial Sequence
  Description of Artificial Sequence: Synthetic oligonucleotide
  Sense strand starting at position 3979 of SEQ ID NO: 1886208
cgugcguauugagucguua

SEQ ID NO: 2394313 - RNA, 19 nt, Artificial Sequence
  Description of Artificial Sequence: Synthetic oligonucleotide
  Antisense strand to SEQ ID NO: 2394312
uaacgacucaauacgcacg

SEQ ID NO: 2394314 - RNA, 19 nt, Artificial Sequence
  Description of Artificial Sequence: Synthetic oligonucleotide
  Sense strand starting at position 3980 of SEQ ID NO: 1886208
gugcguauugagucguuac

SEQ ID NO: 2394315 - RNA, 19 nt, Artificial Sequence
  Description of Artificial Sequence: Synthetic oligonucleotide
  Antisense strand to SEQ ID NO: 2394314
guaacgacucaauacgcac

SEQ ID NO: 2394316 - RNA, 19 nt, Artificial Sequence
  Description of Artificial Sequence: Synthetic oligonucleotide
  Sense strand starting at position 3981 of SEQ ID NO: 1886208
ugcguauugagucguuacu

SEQ ID NO: 2394317 - RNA, 19 nt, Artificial Sequence
  Description of Artificial Sequence: Synthetic oligonucleotide
  Antisense strand to SEQ ID NO: 2394316
aguaacgacucaauacgca

SEQ ID NO: 2394318 - RNA, 19 nt, Artificial Sequence
  Description of Artificial Sequence: Synthetic oligonucleotide
  Sense strand starting at position 3982 of SEQ ID NO: 1886208
gcguauugagucguuacua

SEQ ID NO: 2394319 - RNA, 19 nt, Artificial Sequence
  Description of Artificial Sequence: Synthetic oligonucleotide
  Antisense strand to SEQ ID NO: 2394318
uaguaacgacucaauacgc

SEQ ID NO: 2394320 - RNA, 19 nt, Artificial Sequence
  Description of Artificial Sequence: Synthetic oligonucleotide
  Sense strand starting at position 3983 of SEQ ID NO: 1886208
cguauugagucguuacuau

SEQ ID NO: 2394321 - RNA, 19 nt, Artificial Sequence
  Description of Artificial Sequence: Synthetic oligonucleotide
  Antisense strand to SEQ ID NO: 2394320
auaguaacgacucaauacg

SEQ ID NO: 2394322 - RNA, 19 nt, Artificial Sequence
  Description of Artificial Sequence: Synthetic oligonucleotide
  Sense strand starting at position 176 of SEQ ID NO: 1886209
uucucugugccuggaauua

SEQ ID NO: 2394323 - RNA, 19 nt, Artificial Sequence
  Description of Artificial Sequence: Synthetic oligonucleotide
  Antisense strand to SEQ ID NO: 2394322
uaauuccaggcacagagaa

SEQ ID NO: 2394324 - RNA, 19 nt, Artificial Sequence
  Description of Artificial Sequence: Synthetic oligonucleotide
  Sense strand starting at position 243 of SEQ ID NO: 1886209
guugauacuucugcuuaug

SEQ ID NO: 2394325 - RNA, 19 nt, Artificial Sequence
  Description of Artificial Sequence: Synthetic oligonucleotide
  Antisense strand to SEQ ID NO: 2394324
cauaagcagaaguaucaac

SEQ ID NO: 2394326 - RNA, 19 nt, Artificial Sequence
  Description of Artificial Sequence: Synthetic oligonucleotide
  Sense strand starting at position 318 of SEQ ID NO: 1886209
ugcauaaaguaguucuuaa

SEQ ID NO: 2394327 - RNA, 19 nt, Artificial Sequence
  Description of Artificial Sequence: Synthetic oligonucleotide
  Antisense strand to SEQ ID NO: 2394326
uuaagaacuacuuuaugca

SEQ ID NO: 2394328 - RNA, 19 nt, Artificial Sequence
  Description of Artificial Sequence: Synthetic oligonucleotide
  Sense strand starting at position 890 of SEQ ID NO: 1886209
agaugacugcaauaaugca

SEQ ID NO: 2394329 - RNA, 19 nt, Artificial Sequence
  Description of Artificial Sequence: Synthetic oligonucleotide
  Antisense strand to SEQ ID NO: 2394328
ugcauuauugcagucaucu

SEQ ID NO: 2394330 - RNA, 19 nt, Artificial Sequence
  Description of Artificial Sequence: Synthetic oligonucleotide
  Sense strand starting at position 970 of SEQ ID NO: 1886209
ugcagugcacucuacagaa

SEQ ID NO: 2394331 - RNA, 19 nt, Artificial Sequence
  Description of Artificial Sequence: Synthetic oligonucleotide
  Antisense strand to SEQ ID NO: 2394330
uucuguagagugcacugca

SEQ ID NO: 2394332 - RNA, 19 nt, Artificial Sequence
  Description of Artificial Sequence: Synthetic oligonucleotide
  Sense strand starting at position 1040 of SEQ ID NO: 1886209
uguguaaauguauguaaca

SEQ ID NO: 2394333 - RNA, 19 nt, Artificial Sequence
  Description of Artificial Sequence: Synthetic oligonucleotide
  Antisense strand to SEQ ID NO: 2394332
uguuacauacauuuacaca

SEQ ID NO: 2394334 - RNA, 19 nt, Artificial Sequence
  Description of Artificial Sequence: Synthetic oligonucleotide
  Sense strand starting at position 1053 of SEQ ID NO: 1886209
guaacaggcaaugaaaguu

SEQ ID NO: 2394335 - RNA, 19 nt, Artificial Sequence
  Description of Artificial Sequence: Synthetic oligonucleotide
  Antisense strand to SEQ ID NO: 2394334
aacuuucauugccuguuac

SEQ ID NO: 2394336 - RNA, 19 nt, Artificial Sequence
  Description of Artificial Sequence: Synthetic oligonucleotide
  Sense strand starting at position 1129 of SEQ ID NO: 1886209
gugacagacucaucuccau

SEQ ID NO: 2394337 - RNA, 19 nt, Artificial Sequence
  Description of Artificial Sequence: Synthetic oligonucleotide
  Antisense strand to SEQ ID NO: 2394336
auggagaugagucugucac

SEQ ID NO: 2394338 - RNA, 19 nt, Artificial Sequence
  Description of Artificial Sequence: Synthetic oligonucleotide
  Sense strand starting at position 1217 of SEQ ID NO: 1886209
auggauuuauacuguaugu

SEQ ID NO: 2394339 - RNA, 19 nt, Artificial Sequence
  Description of Artificial Sequence: Synthetic oligonucleotide
  Antisense strand to SEQ ID NO: 2394338
acauacaguauaaauccau

SEQ ID NO: 2394340 - RNA, 19 nt, Artificial Sequence
  Description of Artificial Sequence: Synthetic oligonucleotide
  Sense strand starting at position 1227 of SEQ ID NO: 1886209
acuguauguagauguacau

SEQ ID NO: 2394341 - RNA, 19 nt, Artificial Sequence
  Description of Artificial Sequence: Synthetic oligonucleotide
  Antisense strand to SEQ ID NO: 2394340
auguacaucuacauacagu

SEQ ID NO: 2394342 - RNA, 19 nt, Artificial Sequence
  Description of Artificial Sequence: Synthetic oligonucleotide
  Sense strand starting at position 1296 of SEQ ID NO: 1886209
agacgaauugucuagcaau

SEQ ID NO: 2394343 - RNA, 19 nt, Artificial Sequence
  Description of Artificial Sequence: Synthetic oligonucleotide
  Antisense strand to SEQ ID NO: 2394342
auugcuagacaauucgucu

SEQ ID NO: 2394344 - RNA, 19 nt, Artificial Sequence
  Description of Artificial Sequence: Synthetic oligonucleotide
  Sense strand starting at position 1322 of SEQ ID NO: 1886209
aacaguaugguguacaaca

SEQ ID NO: 2394345 - RNA, 19 nt, Artificial Sequence
  Description of Artificial Sequence: Synthetic oligonucleotide
  Antisense strand to SEQ ID NO: 2394344
uguuguacaccauacuguu

SEQ ID NO: 2394346 - RNA, 19 nt, Artificial Sequence
  Description of Artificial Sequence: Synthetic oligonucleotide
  Sense strand starting at position 1324 of SEQ ID NO: 1886209
caguaugguguacaacaaa

SEQ ID NO: 2394347 - RNA, 19 nt, Artificial Sequence
  Description of Artificial Sequence: Synthetic oligonucleotide
  Antisense strand to SEQ ID NO: 2394346
uuuguuguacaccauacug

SEQ ID NO: 2394348 - RNA, 19 nt, Artificial Sequence
  Description of Artificial Sequence: Synthetic oligonucleotide
  Sense strand starting at position 1382 of SEQ ID NO: 1886209
ucggcucuguuauuaacaa

SEQ ID NO: 2394349 - RNA, 19 nt, Artificial Sequence
  Description of Artificial Sequence: Synthetic oligonucleotide
  Antisense strand to SEQ ID NO: 2394348
uuguuaauaacagagccga

SEQ ID NO: 2394350 - RNA, 19 nt, Artificial Sequence
  Description of Artificial Sequence: Synthetic oligonucleotide
  Sense strand starting at position 1404 of SEQ ID NO: 1886209
guauaacuuucggccuauc

SEQ ID NO: 2394351 - RNA, 19 nt, Artificial Sequence
  Description of Artificial Sequence: Synthetic oligonucleotide
  Antisense strand to SEQ ID NO: 2394350
gauaggccgaaaguuauac

SEQ ID NO: 2394352 - RNA, 19 nt, Artificial Sequence
  Description of Artificial Sequence: Synthetic oligonucleotide
  Sense strand starting at position 1428 of SEQ ID NO: 1886209
caucaugcuucgguuuaag

SEQ ID NO: 2394353 - RNA, 19 nt, Artificial Sequence
  Description of Artificial Sequence: Synthetic oligonucleotide
  Antisense strand to SEQ ID NO: 2394352
cuuaaaccgaagcaugaug

SEQ ID NO: 2394354 - RNA, 19 nt, Artificial Sequence
  Description of Artificial Sequence: Synthetic oligonucleotide
  Sense strand starting at position 1431 of SEQ ID NO: 1886209
caugcuucgguuuaagcua

SEQ ID NO: 2394355 - RNA, 19 nt, Artificial Sequence
  Description of Artificial Sequence: Synthetic oligonucleotide
  Antisense strand to SEQ ID NO: 2394354
uagcuuaaaccgaagcaug

SEQ ID NO: 2394356 - RNA, 19 nt, Artificial Sequence
  Description of Artificial Sequence: Synthetic oligonucleotide
  Sense strand starting at position 1672 of SEQ ID NO: 1886209
uuagucuggugagugcaua

SEQ ID NO: 2394357 - RNA, 19 nt, Artificial Sequence
  Description of Artificial Sequence: Synthetic oligonucleotide
  Antisense strand to SEQ ID NO: 2394356
uaugcacucaccagacuaa

SEQ ID NO: 2394358 - RNA, 19 nt, Artificial Sequence
  Description of Artificial Sequence: Synthetic oligonucleotide
  Sense strand starting at position 2125 of SEQ ID NO: 1886209
guugacguuauccaggaga

SEQ ID NO: 2394359 - RNA, 19 nt, Artificial Sequence
  Description of Artificial Sequence: Synthetic oligonucleotide
  Antisense strand to SEQ ID NO: 2394358
ucuccuggauaacgucaac

SEQ ID NO: 2394360 - RNA, 19 nt, Artificial Sequence
  Description of Artificial Sequence: Synthetic oligonucleotide
  Sense strand starting at position 2127 of SEQ ID NO: 1886209
ugacguuauccaggagaau

SEQ ID NO: 2394361 - RNA, 19 nt, Artificial Sequence
  Description of Artificial Sequence: Synthetic oligonucleotide
  Antisense strand to SEQ ID NO: 2394360
auucuccuggauaacguca

SEQ ID NO: 2394362 - RNA, 19 nt, Artificial Sequence
  Description of Artificial Sequence: Synthetic oligonucleotide
  Sense strand starting at position 2139 of SEQ ID NO: 1886209
ggagaaucgcguuggacuc

SEQ ID NO: 2394363 - RNA, 19 nt, Artificial Sequence
  Description of Artificial Sequence: Synthetic oligonucleotide
  Antisense strand to SEQ ID NO: 2394362
gaguccaacgcgauucucc

SEQ ID NO: 2394364 - RNA, 19 nt, Artificial Sequence
  Description of Artificial Sequence: Synthetic oligonucleotide
  Sense strand starting at position 2145 of SEQ ID NO: 1886209
ucgcguuggacucagggaa

SEQ ID NO: 2394365 - RNA, 19 nt, Artificial Sequence
  Description of Artificial Sequence: Synthetic oligonucleotide
  Antisense strand to SEQ ID NO: 2394364
uucccugaguccaacgcga

SEQ ID NO: 2394366 - RNA, 19 nt, Artificial Sequence
  Description of Artificial Sequence: Synthetic oligonucleotide
  Sense strand starting at position 2245 of SEQ ID NO: 1886209
gggagaacgacuugcagau

SEQ ID NO: 2394367 - RNA, 19 nt, Artificial Sequence
  Description of Artificial Sequence: Synthetic oligonucleotide
  Antisense strand to SEQ ID NO: 2394366
aucugcaagucguucuccc

SEQ ID NO: 2394368 - RNA, 19 nt, Artificial Sequence
  Description of Artificial Sequence: Synthetic oligonucleotide
  Sense strand starting at position 2354 of SEQ ID NO: 1886209
uguucuauuucguuucuua

SEQ ID NO: 2394369 - RNA, 19 nt, Artificial Sequence
  Description of Artificial Sequence: Synthetic oligonucleotide
  Antisense strand to SEQ ID NO: 2394368
uaagaaacgaaauagaaca

SEQ ID NO: 2394370 - RNA, 19 nt, Artificial Sequence
  Description of Artificial Sequence: Synthetic oligonucleotide
  Sense strand starting at position 2357 of SEQ ID NO: 1886209
ucuauuucguuucuuacua

SEQ ID NO: 2394371 - RNA, 19 nt, Artificial Sequence
  Description of Artificial Sequence: Synthetic oligonucleotide
  Antisense strand to SEQ ID NO: 2394370
uaguaagaaacgaaauaga

SEQ ID NO: 2394372 - RNA, 19 nt, Artificial Sequence
  Description of Artificial Sequence: Synthetic oligonucleotide
  Sense strand starting at position 2358 of SEQ ID NO: 1886209
cuauuucguuucuuacuau

SEQ ID NO: 2394373 - RNA, 19 nt, Artificial Sequence
  Description of Artificial Sequence: Synthetic oligonucleotide
  Antisense strand to SEQ ID NO: 2394372
auaguaagaaacgaaauag

SEQ ID NO: 2394374 - RNA, 19 nt, Artificial Sequence
  Description of Artificial Sequence: Synthetic oligonucleotide
  Sense strand starting at position 2384 of SEQ ID NO: 1886209
gucucauugcuugcgguua

SEQ ID NO: 2394375 - RNA, 19 nt, Artificial Sequence
  Description of Artificial Sequence: Synthetic oligonucleotide
  Antisense strand to SEQ ID NO: 2394374
uaaccgcaagcaaugagac

SEQ ID NO: 2394376 - RNA, 19 nt, Artificial Sequence
  Description of Artificial Sequence: Synthetic oligonucleotide
  Sense strand starting at position 2389 of SEQ ID NO: 1886209
auugcuugcgguuauaaug

SEQ ID NO: 2394377 - RNA, 19 nt, Artificial Sequence
  Description of Artificial Sequence: Synthetic oligonucleotide
  Antisense strand to SEQ ID NO: 2394376
cauuauaaccgcaagcaau

SEQ ID NO: 2394378 - RNA, 19 nt, Artificial Sequence
  Description of Artificial Sequence: Synthetic oligonucleotide
  Sense strand starting at position 2455 of SEQ ID NO: 1886209
gcucauaagcgucuggcaa

SEQ ID NO: 2394379 - RNA, 19 nt, Artificial Sequence
  Description of Artificial Sequence: Synthetic oligonucleotide
  Antisense strand to SEQ ID NO: 2394378
uugccagacgcuuaugagc

SEQ ID NO: 2394380 - RNA, 19 nt, Artificial Sequence
  Description of Artificial Sequence: Synthetic oligonucleotide
  Sense strand starting at position 2546 of SEQ ID NO: 1886209
cucuaauagccacauggua

SEQ ID NO: 2394381 - RNA, 19 nt, Artificial Sequence
  Description of Artificial Sequence: Synthetic oligonucleotide
  Antisense strand to SEQ ID NO: 2394380
uaccauguggcuauuagag

SEQ ID NO: 2394382 - RNA, 19 nt, Artificial Sequence
  Description of Artificial Sequence: Synthetic oligonucleotide
  Sense strand starting at position 2722 of SEQ ID NO: 1886209
ggucuugcuucuucugaga

SEQ ID NO: 2394383 - RNA, 19 nt, Artificial Sequence
  Description of Artificial Sequence: Synthetic oligonucleotide
  Antisense strand to SEQ ID NO: 2394382
ucucagaagaagcaagacc

SEQ ID NO: 2394384 - RNA, 19 nt, Artificial Sequence
  Description of Artificial Sequence: Synthetic oligonucleotide
  Sense strand starting at position 2785 of SEQ ID NO: 1886209
gccagcaaucauuggugua

SEQ ID NO: 2394385 - RNA, 19 nt, Artificial Sequence
  Description of Artificial Sequence: Synthetic oligonucleotide
  Antisense strand to SEQ ID NO: 2394384
uacaccaaugauugcuggc

SEQ ID NO: 2394386 - RNA, 19 nt, Artificial Sequence
  Description of Artificial Sequence: Synthetic oligonucleotide
  Sense strand starting at position 2787 of SEQ ID NO: 1886209
cagcaaucauugguguacu

SEQ ID NO: 2394387 - RNA, 19 nt, Artificial Sequence
  Description of Artificial Sequence: Synthetic oligonucleotide
  Antisense strand to SEQ ID NO: 2394386
aguacaccaaugauugcug

SEQ ID NO: 2394388 - RNA, 19 nt, Artificial Sequence
  Description of Artificial Sequence: Synthetic oligonucleotide
  Sense strand starting at position 3050 of SEQ ID NO: 1886209
cuguuaaaguucucaagaa

SEQ ID NO: 2394389 - RNA, 19 nt, Artificial Sequence
  Description of Artificial Sequence: Synthetic oligonucleotide
  Antisense strand to SEQ ID NO: 2394388
uucuugagaacuuuaacag

SEQ ID NO: 2394390 - RNA, 19 nt, Artificial Sequence
  Description of Artificial Sequence: Synthetic oligonucleotide
  Sense strand starting at position 3151 of SEQ ID NO: 1886209
uucggaguaucccuuuaaa

SEQ ID NO: 2394391 - RNA, 19 nt, Artificial Sequence
  Description of Artificial Sequence: Synthetic oligonucleotide
  Antisense strand to SEQ ID NO: 2394390
uuuaaagggauacuccgaa

SEQ ID NO: 2394392 - RNA, 19 nt, Artificial Sequence
  Description of Artificial Sequence: Synthetic oligonucleotide
  Sense strand starting at position 3482 of SEQ ID NO: 1886209
acgaaagauucucucuacu

SEQ ID NO: 2394393 - RNA, 19 nt, Artificial Sequence
  Description of Artificial Sequence: Synthetic oligonucleotide
  Antisense strand to SEQ ID NO: 2394392
aguagagagaaucuuucgu

SEQ ID NO: 2394394 - RNA, 19 nt, Artificial Sequence
  Description of Artificial Sequence: Synthetic oligonucleotide
  Sense strand starting at position 3588 of SEQ ID NO: 1886209
gguacuuucuguuucugaa

SEQ ID NO: 2394395 - RNA, 19 nt, Artificial Sequence
  Description of Artificial Sequence: Synthetic oligonucleotide
  Antisense strand to SEQ ID NO: 2394394
uucagaaacagaaaguacc

SEQ ID NO: 2394396 - RNA, 19 nt, Artificial Sequence
  Description of Artificial Sequence: Synthetic oligonucleotide
  Sense strand starting at position 3652 of SEQ ID NO: 1886209
ucagauuguuucuucuugu

SEQ ID NO: 2394397 - RNA, 19 nt, Artificial Sequence
  Description of Artificial Sequence: Synthetic oligonucleotide
  Antisense strand to SEQ ID NO: 2394396
acaagaagaaacaaucuga

SEQ ID NO: 2394398 - RNA, 19 nt, Artificial Sequence
  Description of Artificial Sequence: Synthetic oligonucleotide
  Sense strand starting at position 3723 of SEQ ID NO: 1886209
uaucaaauuuaugagcgua

SEQ ID NO: 2394399 - RNA, 19 nt, Artificial Sequence
  Description of Artificial Sequence: Synthetic oligonucleotide
  Antisense strand to SEQ ID NO: 2394398
uacgcucauaaauuugaua

SEQ ID NO: 2394400 - RNA, 19 nt, Artificial Sequence
  Description of Artificial Sequence: Synthetic oligonucleotide
  Sense strand starting at position 3873 of SEQ ID NO: 1886209
guuagauuacuagaagugu

SEQ ID NO: 2394401 - RNA, 19 nt, Artificial Sequence
  Description of Artificial Sequence: Synthetic oligonucleotide
  Antisense strand to SEQ ID NO: 2394400
acacuucuaguaaucuaac

SEQ ID NO: 2394402 - RNA, 19 nt, Artificial Sequence
  Description of Artificial Sequence: Synthetic oligonucleotide
  Sense strand starting at position 48 of SEQ ID NO: 1886210
gaagaacuguuucuccaug

SEQ ID NO: 2394403 - RNA, 19 nt, Artificial Sequence
  Description of Artificial Sequence: Synthetic oligonucleotide
  Antisense strand to SEQ ID NO: 2394402
cauggagaaacaguucuuc

SEQ ID NO: 2394404 - RNA, 19 nt, Artificial Sequence
  Description of Artificial Sequence: Synthetic oligonucleotide
  Sense strand starting at position 1985 of SEQ ID NO: 1886210
cugugucaucaugaaccua

SEQ ID NO: 2394405 - RNA, 19 nt, Artificial Sequence
  Description of Artificial Sequence: Synthetic oligonucleotide
  Antisense strand to SEQ ID NO: 2394404
uagguucaugaugacacag

SEQ ID NO: 2394406 - RNA, 19 nt, Artificial Sequence
  Description of Artificial Sequence: Synthetic oligonucleotide
  Sense strand starting at position 2003 of SEQ ID NO: 1886210
agccaaggccucugcaaua

SEQ ID NO: 2394407 - RNA, 19 nt, Artificial Sequence
  Description of Artificial Sequence: Synthetic oligonucleotide
  Antisense strand to SEQ ID NO: 2394406
uauugcagaggccuuggcu

SEQ ID NO: 2394408 - RNA, 19 nt, Artificial Sequence
  Description of Artificial Sequence: Synthetic oligonucleotide
  Sense strand starting at position 2061 of SEQ ID NO: 1886210
guuuacguuucuguccuaa

SEQ ID NO: 2394409 - RNA, 19 nt, Artificial Sequence
  Description of Artificial Sequence: Synthetic oligonucleotide
  Antisense strand to SEQ ID NO: 2394408
uuaggacagaaacguaaac

SEQ ID NO: 2394410 - RNA, 19 nt, Artificial Sequence
  Description of Artificial Sequence: Synthetic oligonucleotide
  Sense strand starting at position 2110 of SEQ ID NO: 1886210
ugacacuacugaguaggau

SEQ ID NO: 2394411 - RNA, 19 nt, Artificial Sequence
  Description of Artificial Sequence: Synthetic oligonucleotide
  Antisense strand to SEQ ID NO: 2394410
auccuacucaguaguguca

SEQ ID NO: 2394412 - RNA, 19 nt, Artificial Sequence
  Description of Artificial Sequence: Synthetic oligonucleotide
  Sense strand starting at position 2204 of SEQ ID NO: 1886210
aaugguaucguaugacacu

SEQ ID NO: 2394413 - RNA, 19 nt, Artificial Sequence
  Description of Artificial Sequence: Synthetic oligonucleotide
  Antisense strand to SEQ ID NO: 2394412
agugucauacgauaccauu

SEQ ID NO: 2394414 - RNA, 19 nt, Artificial Sequence
  Description of Artificial Sequence: Synthetic oligonucleotide
  Sense strand starting at position 2259 of SEQ ID NO: 1886210
agaugucauucucccacua

SEQ ID NO: 2394415 - RNA, 19 nt, Artificial Sequence
  Description of Artificial Sequence: Synthetic oligonucleotide
  Antisense strand to SEQ ID NO: 2394414
uagugggagaaugacaucu

SEQ ID NO: 2394416 - RNA, 19 nt, Artificial Sequence
  Description of Artificial Sequence: Synthetic oligonucleotide
  Sense strand starting at position 2320 of SEQ ID NO: 1886210
gcauuauuauguguaugga

SEQ ID NO: 2394417 - RNA, 19 nt, Artificial Sequence
  Description of Artificial Sequence: Synthetic oligonucleotide
  Antisense strand to SEQ ID NO: 2394416
uccauacacauaauaaugc

SEQ ID NO: 2394418 - RNA, 19 nt, Artificial Sequence
  Description of Artificial Sequence: Synthetic oligonucleotide
  Sense strand starting at position 2323 of SEQ ID NO: 1886210
uuauuauguguauggacaa

SEQ ID NO: 2394419 - RNA, 19 nt, Artificial Sequence
  Description of Artificial Sequence: Synthetic oligonucleotide
  Antisense strand to SEQ ID NO: 2394418
uuguccauacacauaauaa

SEQ ID NO: 2394420 - RNA, 19 nt, Artificial Sequence
  Description of Artificial Sequence: Synthetic oligonucleotide
  Sense strand starting at position 2358 of SEQ ID NO: 1886210
augcaauuauaagacagaa

SEQ ID NO: 2394421 - RNA, 19 nt, Artificial Sequence
  Description of Artificial Sequence: Synthetic oligonucleotide
  Antisense strand to SEQ ID NO: 2394420
uucugucuuauaauugcau

SEQ ID NO: 2394422 - RNA, 19 nt, Artificial Sequence
  Description of Artificial Sequence: Synthetic oligonucleotide
  Sense strand starting at position 2373 of SEQ ID NO: 1886210
agaaucaagcaauguauua

SEQ ID NO: 2394423 - RNA, 19 nt, Artificial Sequence
  Description of Artificial Sequence: Synthetic oligonucleotide
  Antisense strand to SEQ ID NO: 2394422
uaauacauugcuugauucu

SEQ ID NO: 2394424 - RNA, 19 nt, Artificial Sequence
  Description of Artificial Sequence: Synthetic oligonucleotide
  Sense strand starting at position 2757 of SEQ ID NO: 1886210
ugacuaccugcugaaauca

SEQ ID NO: 2394425 - RNA, 19 nt, Artificial Sequence
  Description of Artificial Sequence: Synthetic oligonucleotide
  Antisense strand to SEQ ID NO: 2394424
ugauuucagcagguaguca

SEQ ID NO: 2394426 - RNA, 19 nt, Artificial Sequence
  Description of Artificial Sequence: Synthetic oligonucleotide
  Sense strand starting at position 2765 of SEQ ID NO: 1886210
ugcugaaaucagugaaggu

SEQ ID NO: 2394427 - RNA, 19 nt, Artificial Sequence
  Description of Artificial Sequence: Synthetic oligonucleotide
  Antisense strand to SEQ ID NO: 2394426
accuucacugauuucagca

SEQ ID NO: 2394428 - RNA, 19 nt, Artificial Sequence
  Description of Artificial Sequence: Synthetic oligonucleotide
  Sense strand starting at position 2766 of SEQ ID NO: 1886210
gcugaaaucagugaaggua

SEQ ID NO: 2394429 - RNA, 19 nt, Artificial Sequence
  Description of Artificial Sequence: Synthetic oligonucleotide
  Antisense strand to SEQ ID NO: 2394428
uaccuucacugauuucagc

SEQ ID NO: 2394430 - RNA, 19 nt, Artificial Sequence
  Description of Artificial Sequence: Synthetic oligonucleotide
  Sense strand starting at position 2769 of SEQ ID NO: 1886210
gaaaucagugaagguagua

SEQ ID NO: 2394431 - RNA, 19 nt, Artificial Sequence
  Description of Artificial Sequence: Synthetic oligonucleotide
  Antisense strand to SEQ ID NO: 2394430
uacuaccuucacugauuuc

SEQ ID NO: 2394432 - RNA, 19 nt, Artificial Sequence
  Description of Artificial Sequence: Synthetic oligonucleotide
  Sense strand starting at position 2774 of SEQ ID NO: 1886210
cagugaagguaguaucaga

SEQ ID NO: 2394433 - RNA, 19 nt, Artificial Sequence
  Description of Artificial Sequence: Synthetic oligonucleotide
  Antisense strand to SEQ ID NO: 2394432
ucugauacuaccuucacug

SEQ ID NO: 2394434 - RNA, 19 nt, Artificial Sequence
  Description of Artificial Sequence: Synthetic oligonucleotide
  Sense strand starting at position 2779 of SEQ ID NO: 1886210
aagguaguaucagagguaa

SEQ ID NO: 2394435 - RNA, 19 nt, Artificial Sequence
  Description of Artificial Sequence: Synthetic oligonucleotide
  Antisense strand to SEQ ID NO: 2394434
uuaccucugauacuaccuu

SEQ ID NO: 2394436 - RNA, 19 nt, Artificial Sequence
  Description of Artificial Sequence: Synthetic oligonucleotide
  Sense strand starting at position 2781 of SEQ ID NO: 1886210
gguaguaucagagguaaac

SEQ ID NO: 2394437 - RNA, 19 nt, Artificial Sequence
  Description of Artificial Sequence: Synthetic oligonucleotide
  Antisense strand to SEQ ID NO: 2394436
guuuaccucugauacuacc

SEQ ID NO: 2394438 - RNA, 19 nt, Artificial Sequence
  Description of Artificial Sequence: Synthetic oligonucleotide
  Sense strand starting at position 2819 of SEQ ID NO: 1886210
uuugcuaaucuuugaaaug

SEQ ID NO: 2394439 - RNA, 19 nt, Artificial Sequence
  Description of Artificial Sequence: Synthetic oligonucleotide
  Antisense strand to SEQ ID NO: 2394438
cauuucaaagauuagcaaa

SEQ ID NO: 2394440 - RNA, 19 nt, Artificial Sequence
  Description of Artificial Sequence: Synthetic oligonucleotide
  Sense strand starting at position 2820 of SEQ ID NO: 1886210
uugcuaaucuuugaaauga

SEQ ID NO: 2394441 - RNA, 19 nt, Artificial Sequence
  Description of Artificial Sequence: Synthetic oligonucleotide
  Antisense strand to SEQ ID NO: 2394440
ucauuucaaagauuagcaa

SEQ ID NO: 2394442 - RNA, 19 nt, Artificial Sequence
  Description of Artificial Sequence: Synthetic oligonucleotide
  Sense strand starting at position 2883 of SEQ ID NO: 1886210
cuauguaaaucaguuucua

SEQ ID NO: 2394443 - RNA, 19 nt, Artificial Sequence
  Description of Artificial Sequence: Synthetic oligonucleotide
  Antisense strand to SEQ ID NO: 2394442
uagaaacugauuuacauag

SEQ ID NO: 2394444 - RNA, 19 nt, Artificial Sequence
  Description of Artificial Sequence: Synthetic oligonucleotide
  Sense strand starting at position 2891 of SEQ ID NO: 1886210
aucaguuucuacuuguaau

SEQ ID NO: 2394445 - RNA, 19 nt, Artificial Sequence
  Description of Artificial Sequence: Synthetic oligonucleotide
  Antisense strand to SEQ ID NO: 2394444
auuacaaguagaaacugau

SEQ ID NO: 2394446 - RNA, 19 nt, Artificial Sequence
  Description of Artificial Sequence: Synthetic oligonucleotide
  Sense strand starting at position 2938 of SEQ ID NO: 1886210
aaauaccgguauguuaaua

SEQ ID NO: 2394447 - RNA, 19 nt, Artificial Sequence
  Description of Artificial Sequence: Synthetic oligonucleotide
  Antisense strand to SEQ ID NO: 2394446
uauuaacauaccgguauuu

SEQ ID NO: 2394448 - RNA, 19 nt, Artificial Sequence
  Description of Artificial Sequence: Synthetic oligonucleotide
  Sense strand starting at position 2943 of SEQ ID NO: 1886210
ccgguauguuaauaacaaa

SEQ ID NO: 2394449 - RNA, 19 nt, Artificial Sequence
  Description of Artificial Sequence: Synthetic oligonucleotide
  Antisense strand to SEQ ID NO: 2394448
uuuguuauuaacauaccgg

SEQ ID NO: 2394450 - RNA, 19 nt, Artificial Sequence
  Description of Artificial Sequence: Synthetic oligonucleotide
  Sense strand starting at position 3009 of SEQ ID NO: 1886210
cagggagcucccuaagcaa

SEQ ID NO: 2394451 - RNA, 19 nt, Artificial Sequence
  Description of Artificial Sequence: Synthetic oligonucleotide
  Antisense strand to SEQ ID NO: 2394450
uugcuuagggagcucccug

SEQ ID NO: 2394452 - RNA, 19 nt, Artificial Sequence
  Description of Artificial Sequence: Synthetic oligonucleotide
  Sense strand starting at position 3164 of SEQ ID NO: 1886210
augaaagcaugucaaacau

SEQ ID NO: 2394453 - RNA, 19 nt, Artificial Sequence
  Description of Artificial Sequence: Synthetic oligonucleotide
  Antisense strand to SEQ ID NO: 2394452
auguuugacaugcuuucau

SEQ ID NO: 2394454 - RNA, 19 nt, Artificial Sequence
  Description of Artificial Sequence: Synthetic oligonucleotide
  Sense strand starting at position 3173 of SEQ ID NO: 1886210
ugucaaacaugauaugcaa

SEQ ID NO: 2394455 - RNA, 19 nt, Artificial Sequence
  Description of Artificial Sequence: Synthetic oligonucleotide
  Antisense strand to SEQ ID NO: 2394454
uugcauaucauguuugaca

SEQ ID NO: 2394456 - RNA, 19 nt, Artificial Sequence
  Description of Artificial Sequence: Synthetic oligonucleotide
  Sense strand starting at position 3204 of SEQ ID NO: 1886210
uaaggagccgguuaauaaa

SEQ ID NO: 2394457 - RNA, 19 nt, Artificial Sequence
  Description of Artificial Sequence: Synthetic oligonucleotide
  Antisense strand to SEQ ID NO: 2394456
uuuauuaaccggcuccuua

SEQ ID NO: 2394458 - RNA, 19 nt, Artificial Sequence
  Description of Artificial Sequence: Synthetic oligonucleotide
  Sense strand starting at position 3221 of SEQ ID NO: 1886210
aaauguguaucaggaaauc

SEQ ID NO: 2394459 - RNA, 19 nt, Artificial Sequence
  Description of Artificial Sequence: Synthetic oligonucleotide
  Antisense strand to SEQ ID NO: 2394458
gauuuccugauacacauuu

SEQ ID NO: 2394460 - RNA, 19 nt, Artificial Sequence
  Description of Artificial Sequence: Synthetic oligonucleotide
  Sense strand starting at position 3237 of SEQ ID NO: 1886210
aucagaaaguuguugacca

SEQ ID NO: 2394461 - RNA, 19 nt, Artificial Sequence
  Description of Artificial Sequence: Synthetic oligonucleotide
  Antisense strand to SEQ ID NO: 2394460
uggucaacaacuuucugau

SEQ ID NO: 2394462 - RNA, 19 nt, Artificial Sequence
  Description of Artificial Sequence: Synthetic oligonucleotide
  Sense strand starting at position 3238 of SEQ ID NO: 1886210
ucagaaaguuguugaccaa

SEQ ID NO: 2394463 - RNA, 19 nt, Artificial Sequence
  Description of Artificial Sequence: Synthetic oligonucleotide
  Antisense strand to SEQ ID NO: 2394462
uuggucaacaacuuucuga

SEQ ID NO: 2394464 - RNA, 19 nt, Artificial Sequence
  Description of Artificial Sequence: Synthetic oligonucleotide
  Sense strand starting at position 3241 of SEQ ID NO: 1886210
gaaaguuguugaccaacca

SEQ ID NO: 2394465 - RNA, 19 nt, Artificial Sequence
  Description of Artificial Sequence: Synthetic oligonucleotide
  Antisense strand to SEQ ID NO: 2394464
ugguuggucaacaacuuuc

SEQ ID NO: 2394466 - RNA, 19 nt, Artificial Sequence
  Description of Artificial Sequence: Synthetic oligonucleotide
  Sense strand starting at position 3264 of SEQ ID NO: 1886210
uuagaugagacauguaugu

SEQ ID NO: 2394467 - RNA, 19 nt, Artificial Sequence
  Description of Artificial Sequence: Synthetic oligonucleotide
  Antisense strand to SEQ ID NO: 2394466
acauacaugucucaucuaa

SEQ ID NO: 2394468 - RNA, 19 nt, Artificial Sequence
  Description of Artificial Sequence: Synthetic oligonucleotide
  Sense strand starting at position 3592 of SEQ ID NO: 1886210
acguguauguaguuuaaug

SEQ ID NO: 2394469 - RNA, 19 nt, Artificial Sequence
  Description of Artificial Sequence: Synthetic oligonucleotide
  Antisense strand to SEQ ID NO: 2394468
cauuaaacuacauacacgu

SEQ ID NO: 2394470 - RNA, 19 nt, Artificial Sequence
  Description of Artificial Sequence: Synthetic oligonucleotide
  Sense strand starting at position 3594 of SEQ ID NO: 1886210
guguauguaguuuaaugca

SEQ ID NO: 2394471 - RNA, 19 nt, Artificial Sequence
  Description of Artificial Sequence: Synthetic oligonucleotide
  Antisense strand to SEQ ID NO: 2394470
ugcauuaaacuacauacac

SEQ ID NO: 2394472 - RNA, 19 nt, Artificial Sequence
  Description of Artificial Sequence: Synthetic oligonucleotide
  Sense strand starting at position 3602 of SEQ ID NO: 1886210
aguuuaaugcaagaaugua

SEQ ID NO: 2394473 - RNA, 19 nt, Artificial Sequence
  Description of Artificial Sequence: Synthetic oligonucleotide
  Antisense strand to SEQ ID NO: 2394472
uacauucuugcauuaaacu

SEQ ID NO: 2394474 - RNA, 19 nt, Artificial Sequence
  Description of Artificial Sequence: Synthetic oligonucleotide
  Sense strand starting at position 3610 of SEQ ID NO: 1886210
gcaagaauguaggaugauu

SEQ ID NO: 2394475 - RNA, 19 nt, Artificial Sequence
  Description of Artificial Sequence: Synthetic oligonucleotide
  Antisense strand to SEQ ID NO: 2394474
aaucauccuacauucuugc

SEQ ID NO: 2394476 - RNA, 19 nt, Artificial Sequence
  Description of Artificial Sequence: Synthetic oligonucleotide
  Sense strand starting at position 3669 of SEQ ID NO: 1886210
gacugauauguugaugugu

SEQ ID NO: 2394477 - RNA, 19 nt, Artificial Sequence
  Description of Artificial Sequence: Synthetic oligonucleotide
  Antisense strand to SEQ ID NO: 2394476
acacaucaacauaucaguc

SEQ ID NO: 2394478 - RNA, 19 nt, Artificial Sequence
  Description of Artificial Sequence: Synthetic oligonucleotide
  Sense strand starting at position 3678 of SEQ ID NO: 1886210
guugaugugugucccuagu

SEQ ID NO: 2394479 - RNA, 19 nt, Artificial Sequence
  Description of Artificial Sequence: Synthetic oligonucleotide
  Antisense strand to SEQ ID NO: 2394478
acuagggacacacaucaac

SEQ ID NO: 2394480 - RNA, 19 nt, Artificial Sequence
  Description of Artificial Sequence: Synthetic oligonucleotide
  Sense strand starting at position 3707 of SEQ ID NO: 1886210
agaagcuuagacuagcauu

SEQ ID NO: 2394481 - RNA, 19 nt, Artificial Sequence
  Description of Artificial Sequence: Synthetic oligonucleotide
  Antisense strand to SEQ ID NO: 2394480
aaugcuagucuaagcuucu

SEQ ID NO: 2394482 - RNA, 19 nt, Artificial Sequence
  Description of Artificial Sequence: Synthetic oligonucleotide
  Sense strand starting at position 1 of SEQ ID NO: 1886211
uguacucaucuuggacaaa

SEQ ID NO: 2394483 - RNA, 19 nt, Artificial Sequence
  Description of Artificial Sequence: Synthetic oligonucleotide
  Antisense strand to SEQ ID NO: 2394482
uuuguccaagaugaguaca

SEQ ID NO: 2394484 - RNA, 19 nt, Artificial Sequence
  Description of Artificial Sequence: Synthetic oligonucleotide
  Sense strand starting at position 2 of SEQ ID NO: 1886211
guacucaucuuggacaaau

SEQ ID NO: 2394485 - RNA, 19 nt, Artificial Sequence
  Description of Artificial Sequence: Synthetic oligonucleotide
  Antisense strand to SEQ ID NO: 2394484
auuuguccaagaugaguac

SEQ ID NO: 2394486 - RNA, 19 nt, Artificial Sequence
  Description of Artificial Sequence: Synthetic oligonucleotide
  Sense strand starting at position 57 of SEQ ID NO: 1886211
aagguaucaucauugugac

SEQ ID NO: 2394487 - RNA, 19 nt, Artificial Sequence
  Description of Artificial Sequence: Synthetic oligonucleotide
  Antisense strand to SEQ ID NO: 2394486
gucacaaugaugauaccuu

SEQ ID NO: 2394488 - RNA, 19 nt, Artificial Sequence
  Description of Artificial Sequence: Synthetic oligonucleotide
  Sense strand starting at position 58 of SEQ ID NO: 1886211
agguaucaucauugugacu

SEQ ID NO: 2394489 - RNA, 19 nt, Artificial Sequence
  Description of Artificial Sequence: Synthetic oligonucleotide
  Antisense strand to SEQ ID NO: 2394488
agucacaaugaugauaccu

SEQ ID NO: 2394490 - RNA, 19 nt, Artificial Sequence
  Description of Artificial Sequence: Synthetic oligonucleotide
  Sense strand starting at position 60 of SEQ ID NO: 1886211
guaucaucauugugacuua

SEQ ID NO: 2394491 - RNA, 19 nt, Artificial Sequence
  Description of Artificial Sequence: Synthetic oligonucleotide
  Antisense strand to SEQ ID NO: 2394490
uaagucacaaugaugauac

SEQ ID NO: 2394492 - RNA, 19 nt, Artificial Sequence
  Description of Artificial Sequence: Synthetic oligonucleotide
  Sense strand starting at position 120 of SEQ ID NO: 1886211
ccuugacaucauugccgaa

SEQ ID NO: 2394493 - RNA, 19 nt, Artificial Sequence
  Description of Artificial Sequence: Synthetic oligonucleotide
  Antisense strand to SEQ ID NO: 2394492
uucggcaaugaugucaagg

SEQ ID NO: 2394494 - RNA, 19 nt, Artificial Sequence
  Description of Artificial Sequence: Synthetic oligonucleotide
  Sense strand starting at position 200 of SEQ ID NO: 1886211
cagccaugcucacuagagu

SEQ ID NO: 2394495 - RNA, 19 nt, Artificial Sequence
  Description of Artificial Sequence: Synthetic oligonucleotide
  Antisense strand to SEQ ID NO: 2394494
acucuagugagcauggcug

SEQ ID NO: 2394496 - RNA, 19 nt, Artificial Sequence
  Description of Artificial Sequence: Synthetic oligonucleotide
  Sense strand starting at position 201 of SEQ ID NO: 1886211
agccaugcucacuagaguu

SEQ ID NO: 2394497 - RNA, 19 nt, Artificial Sequence
  Description of Artificial Sequence: Synthetic oligonucleotide
  Antisense strand to SEQ ID NO: 2394496
aacucuagugagcauggcu

SEQ ID NO: 2394498 - RNA, 19 nt, Artificial Sequence
  Description of Artificial Sequence: Synthetic oligonucleotide
  Sense strand starting at position 209 of SEQ ID NO: 1886211
ucacuagaguuacacauua

SEQ ID NO: 2394499 - RNA, 19 nt, Artificial Sequence
  Description of Artificial Sequence: Synthetic oligonucleotide
  Antisense strand to SEQ ID NO: 2394498
uaauguguaacucuaguga

SEQ ID NO: 2394500 - RNA, 19 nt, Artificial Sequence
  Description of Artificial Sequence: Synthetic oligonucleotide
  Sense strand starting at position 250 of SEQ ID NO: 1886211
aguacaaugucccaaauuu

SEQ ID NO: 2394501 - RNA, 19 nt, Artificial Sequence
  Description of Artificial Sequence: Synthetic oligonucleotide
  Antisense strand to SEQ ID NO: 2394500
aaauuugggacauuguacu

SEQ ID NO: 2394502 - RNA, 19 nt, Artificial Sequence
  Description of Artificial Sequence: Synthetic oligonucleotide
  Sense strand starting at position 361 of SEQ ID NO: 1886211
aaagaagucugcuuguuug

SEQ ID NO: 2394503 - RNA, 19 nt, Artificial Sequence
  Description of Artificial Sequence: Synthetic oligonucleotide
  Antisense strand to SEQ ID NO: 2394502
caaacaagcagacuucuuu

SEQ ID NO: 2394504 - RNA, 19 nt, Artificial Sequence
  Description of Artificial Sequence: Synthetic oligonucleotide
  Sense strand starting at position 364 of SEQ ID NO: 1886211
gaagucugcuuguuugaag

SEQ ID NO: 2394505 - RNA, 19 nt, Artificial Sequence
  Description of Artificial Sequence: Synthetic oligonucleotide
  Antisense strand to SEQ ID NO: 2394504
cuucaaacaagcagacuuc

SEQ ID NO: 2394506 - RNA, 19 nt, Artificial Sequence
  Description of Artificial Sequence: Synthetic oligonucleotide
  Sense strand starting at position 365 of SEQ ID NO: 1886211
aagucugcuuguuugaagu

SEQ ID NO: 2394507 - RNA, 19 nt, Artificial Sequence
  Description of Artificial Sequence: Synthetic oligonucleotide
  Antisense strand to SEQ ID NO: 2394506
acuucaaacaagcagacuu

SEQ ID NO: 2394508 - RNA, 19 nt, Artificial Sequence
  Description of Artificial Sequence: Synthetic oligonucleotide
  Sense strand starting at position 373 of SEQ ID NO: 1886211
uuguuugaagucuggguuu

SEQ ID NO: 2394509 - RNA, 19 nt, Artificial Sequence
  Description of Artificial Sequence: Synthetic oligonucleotide
  Antisense strand to SEQ ID NO: 2394508
aaacccagacuucaaacaa

SEQ ID NO: 2394510 - RNA, 19 nt, Artificial Sequence
  Description of Artificial Sequence: Synthetic oligonucleotide
  Sense strand starting at position 375 of SEQ ID NO: 1886211
guuugaagucuggguuucu

SEQ ID NO: 2394511 - RNA, 19 nt, Artificial Sequence
  Description of Artificial Sequence: Synthetic oligonucleotide
  Antisense strand to SEQ ID NO: 2394510
agaaacccagacuucaaac

SEQ ID NO: 2394512 - RNA, 19 nt, Artificial Sequence
  Description of Artificial Sequence: Synthetic oligonucleotide
  Sense strand starting at position 376 of SEQ ID NO: 1886211
uuugaagucuggguuucuu

SEQ ID NO: 2394513 - RNA, 19 nt, Artificial Sequence
  Description of Artificial Sequence: Synthetic oligonucleotide
  Antisense strand to SEQ ID NO: 2394512
aagaaacccagacuucaaa

SEQ ID NO: 2394514 - RNA, 19 nt, Artificial Sequence
  Description of Artificial Sequence: Synthetic oligonucleotide
  Sense strand starting at position 400 of SEQ ID NO: 1886211
guugcuguaucacagagaa

SEQ ID NO: 2394515 - RNA, 19 nt, Artificial Sequence
  Description of Artificial Sequence: Synthetic oligonucleotide
  Antisense strand to SEQ ID NO: 2394514
uucucugugauacagcaac

SEQ ID NO: 2394516 - RNA, 19 nt, Artificial Sequence
  Description of Artificial Sequence: Synthetic oligonucleotide
  Sense strand starting at position 402 of SEQ ID NO: 1886211
ugcuguaucacagagaaug

SEQ ID NO: 2394517 - RNA, 19 nt, Artificial Sequence
  Description of Artificial Sequence: Synthetic oligonucleotide
  Antisense strand to SEQ ID NO: 2394516
cauucucugugauacagca

SEQ ID NO: 2394518 - RNA, 19 nt, Artificial Sequence
  Description of Artificial Sequence: Synthetic oligonucleotide
  Sense strand starting at position 422 of SEQ ID NO: 1886211
cugauuugaucugaauaua

SEQ ID NO: 2394519 - RNA, 19 nt, Artificial Sequence
  Description of Artificial Sequence: Synthetic oligonucleotide
  Antisense strand to SEQ ID NO: 2394518
uauauucagaucaaaucag

SEQ ID NO: 2394520 - RNA, 19 nt, Artificial Sequence
  Description of Artificial Sequence: Synthetic oligonucleotide
  Sense strand starting at position 592 of SEQ ID NO: 1886211
ugccaaccuguauguugaa

SEQ ID NO: 2394521 - RNA, 19 nt, Artificial Sequence
  Description of Artificial Sequence: Synthetic oligonucleotide
  Antisense strand to SEQ ID NO: 2394520
uucaacauacagguuggca

SEQ ID NO: 2394522 - RNA, 19 nt, Artificial Sequence
  Description of Artificial Sequence: Synthetic oligonucleotide
  Sense strand starting at position 593 of SEQ ID NO: 1886211
gccaaccuguauguugaaa

SEQ ID NO: 2394523 - RNA, 19 nt, Artificial Sequence
  Description of Artificial Sequence: Synthetic oligonucleotide
  Antisense strand to SEQ ID NO: 2394522
uuucaacauacagguuggc

SEQ ID NO: 2394524 - RNA, 19 nt, Artificial Sequence
  Description of Artificial Sequence: Synthetic oligonucleotide
  Sense strand starting at position 13 of SEQ ID NO: 1886212
cuaagaaucauugggaguu

SEQ ID NO: 2394525 - RNA, 19 nt, Artificial Sequence
  Description of Artificial Sequence: Synthetic oligonucleotide
  Antisense strand to SEQ ID NO: 2394524
aacucccaaugauucuuag

SEQ ID NO: 2394526 - RNA, 19 nt, Artificial Sequence
  Description of Artificial Sequence: Synthetic oligonucleotide
  Sense strand starting at position 23 of SEQ ID NO: 1886212
uugggaguucuugggagaa

SEQ ID NO: 2394527 - RNA, 19 nt, Artificial Sequence
  Description of Artificial Sequence: Synthetic oligonucleotide
  Antisense strand to SEQ ID NO: 2394526
uucucccaagaacucccaa

SEQ ID NO: 2394528 - RNA, 19 nt, Artificial Sequence
  Description of Artificial Sequence: Synthetic oligonucleotide
  Sense strand starting at position 25 of SEQ ID NO: 1886212
gggaguucuugggagaaau

SEQ ID NO: 2394529 - RNA, 19 nt, Artificial Sequence
  Description of Artificial Sequence: Synthetic oligonucleotide
  Antisense strand to SEQ ID NO: 2394528
auuucucccaagaacuccc

SEQ ID NO: 2394530 - RNA, 19 nt, Artificial Sequence
  Description of Artificial Sequence: Synthetic oligonucleotide
  Sense strand starting at position 116 of SEQ ID NO: 1886212
agaguucuuugggaaauuu

SEQ ID NO: 2394531 - RNA, 19 nt, Artificial Sequence
  Description of Artificial Sequence: Synthetic oligonucleotide
  Antisense strand to SEQ ID NO: 2394530
aaauuucccaaagaacucu

SEQ ID NO: 2394532 - RNA, 19 nt, Artificial Sequence
  Description of Artificial Sequence: Synthetic oligonucleotide
  Sense strand starting at position 124 of SEQ ID NO: 1886212
uugggaaauuuauagcugu

SEQ ID NO: 2394533 - RNA, 19 nt, Artificial Sequence
  Description of Artificial Sequence: Synthetic oligonucleotide
  Antisense strand to SEQ ID NO: 2394532
acagcuauaaauuucccaa

SEQ ID NO: 2394534 - RNA, 19 nt, Artificial Sequence
  Description of Artificial Sequence: Synthetic oligonucleotide
  Sense strand starting at position 354 of SEQ ID NO: 1886212
ggugguguguucccacacu

SEQ ID NO: 2394535 - RNA, 19 nt, Artificial Sequence
  Description of Artificial Sequence: Synthetic oligonucleotide
  Antisense strand to SEQ ID NO: 2394534
agugugggaacacaccacc

SEQ ID NO: 2394536 - RNA, 19 nt, Artificial Sequence
  Description of Artificial Sequence: Synthetic oligonucleotide
  Sense strand starting at position 592 of SEQ ID NO: 1886212
auaggcacauuccuagaaa

SEQ ID NO: 2394537 - RNA, 19 nt, Artificial Sequence
  Description of Artificial Sequence: Synthetic oligonucleotide
  Antisense strand to SEQ ID NO: 2394536
uuucuaggaaugugccuau

SEQ ID NO: 2394538 - RNA, 19 nt, Artificial Sequence
  Description of Artificial Sequence: Synthetic oligonucleotide
  Sense strand starting at position 622 of SEQ ID NO: 1886212
caggaacugucacaagaag

SEQ ID NO: 2394539 - RNA, 19 nt, Artificial Sequence
  Description of Artificial Sequence: Synthetic oligonucleotide
  Antisense strand to SEQ ID NO: 2394538
cuucuugugacaguuccug

SEQ ID NO: 2394540 - RNA, 19 nt, Artificial Sequence
  Description of Artificial Sequence: Synthetic oligonucleotide
  Sense strand starting at position 678 of SEQ ID NO: 1886212
ugaauuagcuacucaaguu

SEQ ID NO: 2394541 - RNA, 19 nt, Artificial Sequence
  Description of Artificial Sequence: Synthetic oligonucleotide
  Antisense strand to SEQ ID NO: 2394540
aacuugaguagcuaauuca

SEQ ID NO: 2394542 - RNA, 19 nt, Artificial Sequence
  Description of Artificial Sequence: Synthetic oligonucleotide
  Sense strand starting at position 721 of SEQ ID NO: 1886212
ugauuucucugaugaauuc

SEQ ID NO: 2394543 - RNA, 19 nt, Artificial Sequence
  Description of Artificial Sequence: Synthetic oligonucleotide
  Antisense strand to SEQ ID NO: 2394542
gaauucaucagagaaauca

SEQ ID NO: 2394544 - RNA, 19 nt, Artificial Sequence
  Description of Artificial Sequence: Synthetic oligonucleotide
  Sense strand starting at position 819 of SEQ ID NO: 1886212
auuccaugagucuacuauu

SEQ ID NO: 2394545 - RNA, 19 nt, Artificial Sequence
  Description of Artificial Sequence: Synthetic oligonucleotide
  Antisense strand to SEQ ID NO: 2394544
aauaguagacucauggaau

SEQ ID NO: 2394546 - RNA, 19 nt, Artificial Sequence
  Description of Artificial Sequence: Synthetic oligonucleotide
  Sense strand starting at position 1061 of SEQ ID NO: 1886212
auaccuguauuccuagaua

SEQ ID NO: 2394547 - RNA, 19 nt, Artificial Sequence
  Description of Artificial Sequence: Synthetic oligonucleotide
  Antisense strand to SEQ ID NO: 2394546
uaucuaggaauacagguau

SEQ ID NO: 2394548 - RNA, 19 nt, Artificial Sequence
  Description of Artificial Sequence: Synthetic oligonucleotide
  Sense strand starting at position 1190 of SEQ ID NO: 1886212
gagagacuuugucuuccca

SEQ ID NO: 2394549 - RNA, 19 nt, Artificial Sequence
  Description of Artificial Sequence: Synthetic oligonucleotide
  Antisense strand to SEQ ID NO: 2394548
ugggaagacaaagucucuc

SEQ ID NO: 2394550 - RNA, 19 nt, Artificial Sequence
  Description of Artificial Sequence: Synthetic oligonucleotide
  Sense strand starting at position 1347 of SEQ ID NO: 1886212
guauuuagauauuauccag

SEQ ID NO: 2394551 - RNA, 19 nt, Artificial Sequence
  Description of Artificial Sequence: Synthetic oligonucleotide
  Antisense strand to SEQ ID NO: 2394550
cuggauaauaucuaaauac

SEQ ID NO: 2394552 - RNA, 19 nt, Artificial Sequence
  Description of Artificial Sequence: Synthetic oligonucleotide
  Sense strand starting at position 1411 of SEQ ID NO: 1886212
gaacgcaugacguauauga

SEQ ID NO: 2394553 - RNA, 19 nt, Artificial Sequence
  Description of Artificial Sequence: Synthetic oligonucleotide
  Antisense strand to SEQ ID NO: 2394552
ucauauacgucaugcguuc

SEQ ID NO: 2394554 - RNA, 19 nt, Artificial Sequence
  Description of Artificial Sequence: Synthetic oligonucleotide
  Sense strand starting at position 1413 of SEQ ID NO: 1886212
acgcaugacguauaugaau

SEQ ID NO: 2394555 - RNA, 19 nt, Artificial Sequence
  Description of Artificial Sequence: Synthetic oligonucleotide
  Antisense strand to SEQ ID NO: 2394554
auucauauacgucaugcgu

SEQ ID NO: 2394556 - RNA, 19 nt, Artificial Sequence
  Description of Artificial Sequence: Synthetic oligonucleotide
  Sense strand starting at position 1415 of SEQ ID NO: 1886212
gcaugacguauaugaauuc

SEQ ID NO: 2394557 - RNA, 19 nt, Artificial Sequence
  Description of Artificial Sequence: Synthetic oligonucleotide
  Antisense strand to SEQ ID NO: 2394556
gaauucauauacgucaugc

SEQ ID NO: 2394558 - RNA, 19 nt, Artificial Sequence
  Description of Artificial Sequence: Synthetic oligonucleotide
  Sense strand starting at position 1422 of SEQ ID NO: 1886212
guauaugaauuccaaagga

SEQ ID NO: 2394559 - RNA, 19 nt, Artificial Sequence
  Description of Artificial Sequence: Synthetic oligonucleotide
  Antisense strand to SEQ ID NO: 2394558
uccuuuggaauucauauac

SEQ ID NO: 2394560 - RNA, 19 nt, Artificial Sequence
  Description of Artificial Sequence: Synthetic oligonucleotide
  Sense strand starting at position 1435 of SEQ ID NO: 1886212
aaaggauguugguuuaacu

SEQ ID NO: 2394561 - RNA, 19 nt, Artificial Sequence
  Description of Artificial Sequence: Synthetic oligonucleotide
  Antisense strand to SEQ ID NO: 2394560
aguuaaaccaacauccuuu

SEQ ID NO: 2394562 - RNA, 19 nt, Artificial Sequence
  Description of Artificial Sequence: Synthetic oligonucleotide
  Sense strand starting at position 1578 of SEQ ID NO: 1886212
auugguuccuuugucaaua

SEQ ID NO: 2394563 - RNA, 19 nt, Artificial Sequence
  Description of Artificial Sequence: Synthetic oligonucleotide
  Antisense strand to SEQ ID NO: 2394562
uauugacaaaggaaccaau

SEQ ID NO: 2394564 - RNA, 19 nt, Artificial Sequence
  Description of Artificial Sequence: Synthetic oligonucleotide
  Sense strand starting at position 1579 of SEQ ID NO: 1886212
uugguuccuuugucaauau

SEQ ID NO: 2394565 - RNA, 19 nt, Artificial Sequence
  Description of Artificial Sequence: Synthetic oligonucleotide
  Antisense strand to SEQ ID NO: 2394564
auauugacaaaggaaccaa

SEQ ID NO: 2394566 - RNA, 19 nt, Artificial Sequence
  Description of Artificial Sequence: Synthetic oligonucleotide
  Sense strand starting at position 1636 of SEQ ID NO: 1886212
aucacaguuccuugaccuu

SEQ ID NO: 2394567 - RNA, 19 nt, Artificial Sequence
  Description of Artificial Sequence: Synthetic oligonucleotide
  Antisense strand to SEQ ID NO: 2394566
aaggucaaggaacugugau

SEQ ID NO: 2394568 - RNA, 19 nt, Artificial Sequence
  Description of Artificial Sequence: Synthetic oligonucleotide
  Sense strand starting at position 1758 of SEQ ID NO: 1886212
agucuugggucacuaacca

SEQ ID NO: 2394569 - RNA, 19 nt, Artificial Sequence
  Description of Artificial Sequence: Synthetic oligonucleotide
  Antisense strand to SEQ ID NO: 2394568
ugguuagugacccaagacu

SEQ ID NO: 2394570 - RNA, 19 nt, Artificial Sequence
  Description of Artificial Sequence: Synthetic oligonucleotide
  Sense strand starting at position 1783 of SEQ ID NO: 1886212
agugcauacugacucauaa

SEQ ID NO: 2394571 - RNA, 19 nt, Artificial Sequence
  Description of Artificial Sequence: Synthetic oligonucleotide
  Antisense strand to SEQ ID NO: 2394570
uuaugagucaguaugcacu

SEQ ID NO: 2394572 - RNA, 19 nt, Artificial Sequence
  Description of Artificial Sequence: Synthetic oligonucleotide
  Sense strand starting at position 1816 of SEQ ID NO: 1886212
gcccucuucggagagauag

SEQ ID NO: 2394573 - RNA, 19 nt, Artificial Sequence
  Description of Artificial Sequence: Synthetic oligonucleotide
  Antisense strand to SEQ ID NO: 2394572
cuaucucuccgaagagggc

SEQ ID NO: 2394574 - RNA, 19 nt, Artificial Sequence
  Description of Artificial Sequence: Synthetic oligonucleotide
  Sense strand starting at position 2051 of SEQ ID NO: 1886212
ugugcaugguuaucuaauc

SEQ ID NO: 2394575 - RNA, 19 nt, Artificial Sequence
  Description of Artificial Sequence: Synthetic oligonucleotide
  Antisense strand to SEQ ID NO: 2394574
gauuagauaaccaugcaca

SEQ ID NO: 2394576 - RNA, 19 nt, Artificial Sequence
  Description of Artificial Sequence: Synthetic oligonucleotide
  Sense strand starting at position 2067 of SEQ ID NO: 1886212
auccaucaucagugagaag

SEQ ID NO: 2394577 - RNA, 19 nt, Artificial Sequence
  Description of Artificial Sequence: Synthetic oligonucleotide
  Antisense strand to SEQ ID NO: 2394576
cuucucacugaugauggau

SEQ ID NO: 2394578 - RNA, 19 nt, Artificial Sequence
  Description of Artificial Sequence: Synthetic oligonucleotide
  Sense strand starting at position 2070 of SEQ ID NO: 1886212
caucaucagugagaagagu

SEQ ID NO: 2394579 - RNA, 19 nt, Artificial Sequence
  Description of Artificial Sequence: Synthetic oligonucleotide
  Antisense strand to SEQ ID NO: 2394578
acucuucucacugaugaug

SEQ ID NO: 2394580 - RNA, 19 nt, Artificial Sequence
  Description of Artificial Sequence: Synthetic oligonucleotide
  Sense strand starting at position 2566 of SEQ ID NO: 1886212
gugacuacaugacaaauau

SEQ ID NO: 2394581 - RNA, 19 nt, Artificial Sequence
  Description of Artificial Sequence: Synthetic oligonucleotide
  Antisense strand to SEQ ID NO: 2394580
auauuugucauguagucac

SEQ ID NO: 2394582 - RNA, 19 nt, Artificial Sequence
  Description of Artificial Sequence: Synthetic oligonucleotide
  Sense strand starting at position 2586 of SEQ ID NO: 1886212
aguagaaacaucuguguuc

SEQ ID NO: 2394583 - RNA, 19 nt, Artificial Sequence
  Description of Artificial Sequence: Synthetic oligonucleotide
  Antisense strand to SEQ ID NO: 2394582
gaacacagauguuucuacu

SEQ ID NO: 2394584 - RNA, 19 nt, Artificial Sequence
  Description of Artificial Sequence: Synthetic oligonucleotide
  Sense strand starting at position 2929 of SEQ ID NO: 1886212
uagggauacucacauagca

SEQ ID NO: 2394585 - RNA, 19 nt, Artificial Sequence
  Description of Artificial Sequence: Synthetic oligonucleotide
  Antisense strand to SEQ ID NO: 2394584
ugcuaugugaguaucccua

SEQ ID NO: 2394586 - RNA, 19 nt, Artificial Sequence
  Description of Artificial Sequence: Synthetic oligonucleotide
  Sense strand starting at position 3135 of SEQ ID NO: 1886212
ccuugaaauucugugacau

SEQ ID NO: 2394587 - RNA, 19 nt, Artificial Sequence
  Description of Artificial Sequence: Synthetic oligonucleotide
  Antisense strand to SEQ ID NO: 2394586
augucacagaauuucaagg

SEQ ID NO: 2394588 - RNA, 19 nt, Artificial Sequence
  Description of Artificial Sequence: Synthetic oligonucleotide
  Sense strand starting at position 3136 of SEQ ID NO: 1886212
cuugaaauucugugacauc

SEQ ID NO: 2394589 - RNA, 19 nt, Artificial Sequence
  Description of Artificial Sequence: Synthetic oligonucleotide
  Antisense strand to SEQ ID NO: 2394588
gaugucacagaauuucaag

SEQ ID NO: 2394590 - RNA, 19 nt, Artificial Sequence
  Description of Artificial Sequence: Synthetic oligonucleotide
  Sense strand starting at position 3261 of SEQ ID NO: 1886212
agagcaaucuuugcacaag

SEQ ID NO: 2394591 - RNA, 19 nt, Artificial Sequence
  Description of Artificial Sequence: Synthetic oligonucleotide
  Antisense strand to SEQ ID NO: 2394590
cuugugcaaagauugcucu

SEQ ID NO: 2394592 - RNA, 19 nt, Artificial Sequence
  Description of Artificial Sequence: Synthetic oligonucleotide
  Sense strand starting at position 3264 of SEQ ID NO: 1886212
gcaaucuuugcacaaguca

SEQ ID NO: 2394593 - RNA, 19 nt, Artificial Sequence
  Description of Artificial Sequence: Synthetic oligonucleotide
  Antisense strand to SEQ ID NO: 2394592
ugacuugugcaaagauugc

SEQ ID NO: 2394594 - RNA, 19 nt, Artificial Sequence
  Description of Artificial Sequence: Synthetic oligonucleotide
  Sense strand starting at position 3285 of SEQ ID NO: 1886212
gaucuuugguccuuuguca

SEQ ID NO: 2394595 - RNA, 19 nt, Artificial Sequence
  Description of Artificial Sequence: Synthetic oligonucleotide
  Antisense strand to SEQ ID NO: 2394594
ugacaaaggaccaaagauc

SEQ ID NO: 2394596 - RNA, 19 nt, Artificial Sequence
  Description of Artificial Sequence: Synthetic oligonucleotide
  Sense strand starting at position 3298 of SEQ ID NO: 1886212
uugucaccuuugucauuua

SEQ ID NO: 2394597 - RNA, 19 nt, Artificial Sequence
  Description of Artificial Sequence: Synthetic oligonucleotide
  Antisense strand to SEQ ID NO: 2394596
uaaaugacaaaggugacaa

SEQ ID NO: 2394598 - RNA, 19 nt, Artificial Sequence
  Description of Artificial Sequence: Synthetic oligonucleotide
  Sense strand starting at position 3707 of SEQ ID NO: 1886212
gaaucagauucugaaguug

SEQ ID NO: 2394599 - RNA, 19 nt, Artificial Sequence
  Description of Artificial Sequence: Synthetic oligonucleotide
  Antisense strand to SEQ ID NO: 2394598
caacuucagaaucugauuc

SEQ ID NO: 2394600 - RNA, 19 nt, Artificial Sequence
  Description of Artificial Sequence: Synthetic oligonucleotide
  Sense strand starting at position 3722 of SEQ ID NO: 1886212
guuguauuccgccaaauaa

SEQ ID NO: 2394601 - RNA, 19 nt, Artificial Sequence
  Description of Artificial Sequence: Synthetic oligonucleotide
  Antisense strand to SEQ ID NO: 2394600
uuauuuggcggaauacaac

SEQ ID NO: 2394602 - RNA, 19 nt, Artificial Sequence
  Description of Artificial Sequence: Synthetic oligonucleotide
  Sense strand starting at position 3754 of SEQ ID NO: 1886212
acgccaugugguggguaaa

SEQ ID NO: 2394603 - RNA, 19 nt, Artificial Sequence
  Description of Artificial Sequence: Synthetic oligonucleotide
  Antisense strand to SEQ ID NO: 2394602
uuuacccaccacauggcgu

SEQ ID NO: 2394604 - RNA, 19 nt, Artificial Sequence
  Description of Artificial Sequence: Synthetic oligonucleotide
  Sense strand starting at position 35 of SEQ ID NO: 1886213
ggcugaaacucuuugaucu

SEQ ID NO: 2394605 - RNA, 19 nt, Artificial Sequence
  Description of Artificial Sequence: Synthetic oligonucleotide
  Antisense strand to SEQ ID NO: 2394604
agaucaaagaguuucagcc

SEQ ID NO: 2394606 - RNA, 19 nt, Artificial Sequence
  Description of Artificial Sequence: Synthetic oligonucleotide
  Sense strand starting at position 112 of SEQ ID NO: 1886213
uuaguaugucgagaacuca

SEQ ID NO: 2394607 - RNA, 19 nt, Artificial Sequence
  Description of Artificial Sequence: Synthetic oligonucleotide
  Antisense strand to SEQ ID NO: 2394606
ugaguucucgacauacuaa

SEQ ID NO: 2394608 - RNA, 19 nt, Artificial Sequence
  Description of Artificial Sequence: Synthetic oligonucleotide
  Sense strand starting at position 159 of SEQ ID NO: 1886213
uuguguauugacuaaguaa

SEQ ID NO: 2394609 - RNA, 19 nt, Artificial Sequence
  Description of Artificial Sequence: Synthetic oligonucleotide
  Antisense strand to SEQ ID NO: 2394608
uuacuuagucaauacacaa

SEQ ID NO: 2394610 - RNA, 19 nt, Artificial Sequence
  Description of Artificial Sequence: Synthetic oligonucleotide
  Sense strand starting at position 162 of SEQ ID NO: 1886213
uguauugacuaaguaaucu

SEQ ID NO: 2394611 - RNA, 19 nt, Artificial Sequence
  Description of Artificial Sequence: Synthetic oligonucleotide
  Antisense strand to SEQ ID NO: 2394610
agauuacuuagucaauaca

SEQ ID NO: 2394612 - RNA, 19 nt, Artificial Sequence
  Description of Artificial Sequence: Synthetic oligonucleotide
  Sense strand starting at position 303 of SEQ ID NO: 1886213
augagaaacuucuuugcau

SEQ ID NO: 2394613 - RNA, 19 nt, Artificial Sequence
  Description of Artificial Sequence: Synthetic oligonucleotide
  Antisense strand to SEQ ID NO: 2394612
augcaaagaaguuucucau

SEQ ID NO: 2394614 - RNA, 19 nt, Artificial Sequence
  Description of Artificial Sequence: Synthetic oligonucleotide
  Sense strand starting at position 304 of SEQ ID NO: 1886213
ugagaaacuucuuugcaug

SEQ ID NO: 2394615 - RNA, 19 nt, Artificial Sequence
  Description of Artificial Sequence: Synthetic oligonucleotide
  Antisense strand to SEQ ID NO: 2394614
caugcaaagaaguuucuca

SEQ ID NO: 2394616 - RNA, 19 nt, Artificial Sequence
  Description of Artificial Sequence: Synthetic oligonucleotide
  Sense strand starting at position 318 of SEQ ID NO: 1886213
gcaugugguguagaaauaa

SEQ ID NO: 2394617 - RNA, 19 nt, Artificial Sequence
  Description of Artificial Sequence: Synthetic oligonucleotide
  Antisense strand to SEQ ID NO: 2394616
uuauuucuacaccacaugc

SEQ ID NO: 2394618 - RNA, 19 nt, Artificial Sequence
  Description of Artificial Sequence: Synthetic oligonucleotide
  Sense strand starting at position 437 of SEQ ID NO: 1886213
acaagagacaugugccagu

SEQ ID NO: 2394619 - RNA, 19 nt, Artificial Sequence
  Description of Artificial Sequence: Synthetic oligonucleotide
  Antisense strand to SEQ ID NO: 2394618
acuggcacaugucucuugu

SEQ ID NO: 2394620 - RNA, 19 nt, Artificial Sequence
  Description of Artificial Sequence: Synthetic oligonucleotide
  Sense strand starting at position 780 of SEQ ID NO: 1886213
ugacuaguucgauaaguuu

SEQ ID NO: 2394621 - RNA, 19 nt, Artificial Sequence
  Description of Artificial Sequence: Synthetic oligonucleotide
  Antisense strand to SEQ ID NO: 2394620
aaacuuaucgaacuaguca

SEQ ID NO: 2394622 - RNA, 19 nt, Artificial Sequence
  Description of Artificial Sequence: Synthetic oligonucleotide
  Sense strand starting at position 854 of SEQ ID NO: 1886213
uguaaagcucaauguauuu

SEQ ID NO: 2394623 - RNA, 19 nt, Artificial Sequence
  Description of Artificial Sequence: Synthetic oligonucleotide
  Antisense strand to SEQ ID NO: 2394622
aaauacauugagcuuuaca

SEQ ID NO: 2394624 - RNA, 19 nt, Artificial Sequence
  Description of Artificial Sequence: Synthetic oligonucleotide
  Sense strand starting at position 864 of SEQ ID NO: 1886213
aauguauuugcaugaugca

SEQ ID NO: 2394625 - RNA, 19 nt, Artificial Sequence
  Description of Artificial Sequence: Synthetic oligonucleotide
  Antisense strand to SEQ ID NO: 2394624
ugcaucaugcaaauacauu

SEQ ID NO: 2394626 - RNA, 19 nt, Artificial Sequence
  Description of Artificial Sequence: Synthetic oligonucleotide
  Sense strand starting at position 1116 of SEQ ID NO: 1886213
uggagucucuauucugaaa

SEQ ID NO: 2394627 - RNA, 19 nt, Artificial Sequence
  Description of Artificial Sequence: Synthetic oligonucleotide
  Antisense strand to SEQ ID NO: 2394626
uuucagaauagagacucca

SEQ ID NO: 2394628 - RNA, 19 nt, Artificial Sequence
  Description of Artificial Sequence: Synthetic oligonucleotide
  Sense strand starting at position 1300 of SEQ ID NO: 1886213
ucaauaguguaggugacau

SEQ ID NO: 2394629 - RNA, 19 nt, Artificial Sequence
  Description of Artificial Sequence: Synthetic oligonucleotide
  Antisense strand to SEQ ID NO: 2394628
augucaccuacacuauuga

SEQ ID NO: 2394630 - RNA, 19 nt, Artificial Sequence
  Description of Artificial Sequence: Synthetic oligonucleotide
  Sense strand starting at position 1600 of SEQ ID NO: 1886213
uuaauagaggcaugccaua

SEQ ID NO: 2394631 - RNA, 19 nt, Artificial Sequence
  Description of Artificial Sequence: Synthetic oligonucleotide
  Antisense strand to SEQ ID NO: 2394630
uauggcaugccucuauuaa

SEQ ID NO: 2394632 - RNA, 19 nt, Artificial Sequence
  Description of Artificial Sequence: Synthetic oligonucleotide
  Sense strand starting at position 1724 of SEQ ID NO: 1886213
uccuauauguaaguaucua

SEQ ID NO: 2394633 - RNA, 19 nt, Artificial Sequence
  Description of Artificial Sequence: Synthetic oligonucleotide
  Antisense strand to SEQ ID NO: 2394632
uagauacuuacauauagga

SEQ ID NO: 2394634 - RNA, 19 nt, Artificial Sequence
  Description of Artificial Sequence: Synthetic oligonucleotide
  Sense strand starting at position 1732 of SEQ ID NO: 1886213
guaaguaucuaucuacaau

SEQ ID NO: 2394635 - RNA, 19 nt, Artificial Sequence
  Description of Artificial Sequence: Synthetic oligonucleotide
  Antisense strand to SEQ ID NO: 2394634
auuguagauagauacuuac

SEQ ID NO: 2394636 - RNA, 19 nt, Artificial Sequence
  Description of Artificial Sequence: Synthetic oligonucleotide
  Sense strand starting at position 1816 of SEQ ID NO: 1886213
gcccucuucgaagagauag

SEQ ID NO: 2394637 - RNA, 19 nt, Artificial Sequence
  Description of Artificial Sequence: Synthetic oligonucleotide
  Antisense strand to SEQ ID NO: 2394636
cuaucucuucgaagagggc

SEQ ID NO: 2394638 - RNA, 19 nt, Artificial Sequence
  Description of Artificial Sequence: Synthetic oligonucleotide
  Sense strand starting at position 2066 of SEQ ID NO: 1886213
aaugcaucaucagugagaa

SEQ ID NO: 2394639 - RNA, 19 nt, Artificial Sequence
  Description of Artificial Sequence: Synthetic oligonucleotide
  Antisense strand to SEQ ID NO: 2394638
uucucacugaugaugcauu

SEQ ID NO: 2394640 - RNA, 19 nt, Artificial Sequence
  Description of Artificial Sequence: Synthetic oligonucleotide
  Sense strand starting at position 2067 of SEQ ID NO: 1886213
augcaucaucagugagaac

SEQ ID NO: 2394641 - RNA, 19 nt, Artificial Sequence
  Description of Artificial Sequence: Synthetic oligonucleotide
  Antisense strand to SEQ ID NO: 2394640
guucucacugaugaugcau

SEQ ID NO: 2394642 - RNA, 19 nt, Artificial Sequence
  Description of Artificial Sequence: Synthetic oligonucleotide
  Sense strand starting at position 2564 of SEQ ID NO: 1886213
guaugauuacaguacuaau

SEQ ID NO: 2394643 - RNA, 19 nt, Artificial Sequence
  Description of Artificial Sequence: Synthetic oligonucleotide
  Antisense strand to SEQ ID NO: 2394642
auuaguacuguaaucauac

SEQ ID NO: 2394644 - RNA, 19 nt, Artificial Sequence
  Description of Artificial Sequence: Synthetic oligonucleotide
  Sense strand starting at position 2610 of SEQ ID NO: 1886213
gugccagauaaagauguaa

SEQ ID NO: 2394645 - RNA, 19 nt, Artificial Sequence
  Description of Artificial Sequence: Synthetic oligonucleotide
  Antisense strand to SEQ ID NO: 2394644
uuacaucuuuaucuggcac

SEQ ID NO: 2394646 - RNA, 19 nt, Artificial Sequence
  Description of Artificial Sequence: Synthetic oligonucleotide
  Sense strand starting at position 2860 of SEQ ID NO: 1886213
acucacagucuuugacauu

SEQ ID NO: 2394647 - RNA, 19 nt, Artificial Sequence
  Description of Artificial Sequence: Synthetic oligonucleotide
  Antisense strand to SEQ ID NO: 2394646
aaugucaaagacugugagu

SEQ ID NO: 2394648 - RNA, 19 nt, Artificial Sequence
  Description of Artificial Sequence: Synthetic oligonucleotide
  Sense strand starting at position 2880 of SEQ ID NO: 1886213
ugacaucauugcccacaga

SEQ ID NO: 2394649 - RNA, 19 nt, Artificial Sequence
  Description of Artificial Sequence: Synthetic oligonucleotide
  Antisense strand to SEQ ID NO: 2394648
ucugugggcaaugauguca

SEQ ID NO: 2394650 - RNA, 19 nt, Artificial Sequence
  Description of Artificial Sequence: Synthetic oligonucleotide
  Sense strand starting at position 2945 of SEQ ID NO: 1886213
ugaaguuuccuugaaguug

SEQ ID NO: 2394651 - RNA, 19 nt, Artificial Sequence
  Description of Artificial Sequence: Synthetic oligonucleotide
  Antisense strand to SEQ ID NO: 2394650
caacuucaaggaaacuuca

SEQ ID NO: 2394652 - RNA, 19 nt, Artificial Sequence
  Description of Artificial Sequence: Synthetic oligonucleotide
  Sense strand starting at position 3011 of SEQ ID NO: 1886213
aucagagaaugcuccaaau

SEQ ID NO: 2394653 - RNA, 19 nt, Artificial Sequence
  Description of Artificial Sequence: Synthetic oligonucleotide
  Antisense strand to SEQ ID NO: 2394652
auuuggagcauucucugau

SEQ ID NO: 2394654 - RNA, 19 nt, Artificial Sequence
  Description of Artificial Sequence: Synthetic oligonucleotide
  Sense strand starting at position 3233 of SEQ ID NO: 1886213
uuguaucuugaaugggaaa

SEQ ID NO: 2394655 - RNA, 19 nt, Artificial Sequence
  Description of Artificial Sequence: Synthetic oligonucleotide
  Antisense strand to SEQ ID NO: 2394654
uuucccauucaagauacaa

SEQ ID NO: 2394656 - RNA, 19 nt, Artificial Sequence
  Description of Artificial Sequence: Synthetic oligonucleotide
  Sense strand starting at position 3234 of SEQ ID NO: 1886213
uguaucuugaaugggaaau

SEQ ID NO: 2394657 - RNA, 19 nt, Artificial Sequence
  Description of Artificial Sequence: Synthetic oligonucleotide
  Antisense strand to SEQ ID NO: 2394656
auuucccauucaagauaca

SEQ ID NO: 2394658 - RNA, 19 nt, Artificial Sequence
  Description of Artificial Sequence: Synthetic oligonucleotide
  Sense strand starting at position 3256 of SEQ ID NO: 1886213
aaaguuguggucuaccaau

SEQ ID NO: 2394659 - RNA, 19 nt, Artificial Sequence
  Description of Artificial Sequence: Synthetic oligonucleotide
  Antisense strand to SEQ ID NO: 2394658
auugguagaccacaacuuu

SEQ ID NO: 2394660 - RNA, 19 nt, Artificial Sequence
  Description of Artificial Sequence: Synthetic oligonucleotide
  Sense strand starting at position 3309 of SEQ ID NO: 1886213
augaaagacacgugauagu

SEQ ID NO: 2394661 - RNA, 19 nt, Artificial Sequence
  Description of Artificial Sequence: Synthetic oligonucleotide
  Antisense strand to SEQ ID NO: 2394660
acuaucacgugucuuucau

SEQ ID NO: 2394662 - RNA, 19 nt, Artificial Sequence
  Description of Artificial Sequence: Synthetic oligonucleotide
  Sense strand starting at position 3328 of SEQ ID NO: 1886213
gcuauugugagauaauuga

SEQ ID NO: 2394663 - RNA, 19 nt, Artificial Sequence
  Description of Artificial Sequence: Synthetic oligonucleotide
  Antisense strand to SEQ ID NO: 2394662
ucaauuaucucacaauagc

SEQ ID NO: 2394664 - RNA, 19 nt, Artificial Sequence
  Description of Artificial Sequence: Synthetic oligonucleotide
  Sense strand starting at position 3344 of SEQ ID NO: 1886213
ugaggaguucaccaguuag

SEQ ID NO: 2394665 - RNA, 19 nt, Artificial Sequence
  Description of Artificial Sequence: Synthetic oligonucleotide
  Antisense strand to SEQ ID NO: 2394664
cuaacuggugaacuccuca

SEQ ID NO: 2394666 - RNA, 19 nt, Artificial Sequence
  Description of Artificial Sequence: Synthetic oligonucleotide
  Sense strand starting at position 3374 of SEQ ID NO: 1886213
auguguuauuuauccuguu

SEQ ID NO: 2394667 - RNA, 19 nt, Artificial Sequence
  Description of Artificial Sequence: Synthetic oligonucleotide
  Antisense strand to SEQ ID NO: 2394666
aacaggauaaauaacacau

SEQ ID NO: 2394668 - RNA, 19 nt, Artificial Sequence
  Description of Artificial Sequence: Synthetic oligonucleotide
  Sense strand starting at position 3446 of SEQ ID NO: 1886213
guacuuauccuugauccag

SEQ ID NO: 2394669 - RNA, 19 nt, Artificial Sequence
  Description of Artificial Sequence: Synthetic oligonucleotide
  Antisense strand to SEQ ID NO: 2394668
cuggaucaaggauaaguac

SEQ ID NO: 2394670 - RNA, 19 nt, Artificial Sequence
  Description of Artificial Sequence: Synthetic oligonucleotide
  Sense strand starting at position 3564 of SEQ ID NO: 1886213
gaugucugacuugacuuua

SEQ ID NO: 2394671 - RNA, 19 nt, Artificial Sequence
  Description of Artificial Sequence: Synthetic oligonucleotide
  Antisense strand to SEQ ID NO: 2394670
uaaagucaagucagacauc

SEQ ID NO: 2394672 - RNA, 19 nt, Artificial Sequence
  Description of Artificial Sequence: Synthetic oligonucleotide
  Sense strand starting at position 3606 of SEQ ID NO: 1886213
uccagaagcuucucagaac

SEQ ID NO: 2394673 - RNA, 19 nt, Artificial Sequence
  Description of Artificial Sequence: Synthetic oligonucleotide
  Antisense strand to SEQ ID NO: 2394672
guucugagaagcuucugga

SEQ ID NO: 2394674 - RNA, 19 nt, Artificial Sequence
  Description of Artificial Sequence: Synthetic oligonucleotide
  Sense strand starting at position 3617 of SEQ ID NO: 1886213
cucagaacccuuuggucua

SEQ ID NO: 2394675 - RNA, 19 nt, Artificial Sequence
  Description of Artificial Sequence: Synthetic oligonucleotide
  Antisense strand to SEQ ID NO: 2394674
uagaccaaaggguucugag

SEQ ID NO: 2394676 - RNA, 19 nt, Artificial Sequence
  Description of Artificial Sequence: Synthetic oligonucleotide
  Sense strand starting at position 3715 of SEQ ID NO: 1886213
aggaguuaacuaugaacuu

SEQ ID NO: 2394677 - RNA, 19 nt, Artificial Sequence
  Description of Artificial Sequence: Synthetic oligonucleotide
  Antisense strand to SEQ ID NO: 2394676
aaguucauaguuaacuccu

SEQ ID NO: 2394678 - RNA, 19 nt, Artificial Sequence
  Description of Artificial Sequence: Synthetic oligonucleotide
  Sense strand starting at position 3819 of SEQ ID NO: 1886213
guguauauucccuauccag

SEQ ID NO: 2394679 - RNA, 19 nt, Artificial Sequence
  Description of Artificial Sequence: Synthetic oligonucleotide
  Antisense strand to SEQ ID NO: 2394678
cuggauagggaauauacac

SEQ ID NO: 2394680 - RNA, 19 nt, Artificial Sequence
  Description of Artificial Sequence: Synthetic oligonucleotide
  Sense strand starting at position 3826 of SEQ ID NO: 1886213
uucccuauccaggguagaa

SEQ ID NO: 2394681 - RNA, 19 nt, Artificial Sequence
  Description of Artificial Sequence: Synthetic oligonucleotide
  Antisense strand to SEQ ID NO: 2394680
uucuacccuggauagggaa

SEQ ID NO: 2394682 - RNA, 19 nt, Artificial Sequence
  Description of Artificial Sequence: Synthetic oligonucleotide
  Sense strand starting at position 3938 of SEQ ID NO: 1886213
agcacuuugcaugagaaua

SEQ ID NO: 2394683 - RNA, 19 nt, Artificial Sequence
  Description of Artificial Sequence: Synthetic oligonucleotide
  Antisense strand to SEQ ID NO: 2394682
uauucucaugcaaagugcu

SEQ ID NO: 2394684 - RNA, 19 nt, Artificial Sequence
  Description of Artificial Sequence: Synthetic oligonucleotide
  Sense strand starting at position 13 of SEQ ID NO: 1886214
cuaagaaucauugggaguu

SEQ ID NO: 2394685 - RNA, 19 nt, Artificial Sequence
  Description of Artificial Sequence: Synthetic oligonucleotide
  Antisense strand to SEQ ID NO: 2394684
aacucccaaugauucuuag

SEQ ID NO: 2394686 - RNA, 19 nt, Artificial Sequence
  Description of Artificial Sequence: Synthetic oligonucleotide
  Sense strand starting at position 23 of SEQ ID NO: 1886214
uugggaguucuugggagaa

SEQ ID NO: 2394687 - RNA, 19 nt, Artificial Sequence
  Description of Artificial Sequence: Synthetic oligonucleotide
  Antisense strand to SEQ ID NO: 2394686
uucucccaagaacucccaa

SEQ ID NO: 2394688 - RNA, 19 nt, Artificial Sequence
  Description of Artificial Sequence: Synthetic oligonucleotide
  Sense strand starting at position 25 of SEQ ID NO: 1886214
gggaguucuugggagaaau

SEQ ID NO: 2394689 - RNA, 19 nt, Artificial Sequence
  Description of Artificial Sequence: Synthetic oligonucleotide
  Antisense strand to SEQ ID NO: 2394688
auuucucccaagaacuccc

SEQ ID NO: 2394690 - RNA, 19 nt, Artificial Sequence
  Description of Artificial Sequence: Synthetic oligonucleotide
  Sense strand starting at position 116 of SEQ ID NO: 1886214
agaguucuuugggaaauuu

SEQ ID NO: 2394691 - RNA, 19 nt, Artificial Sequence
  Description of Artificial Sequence: Synthetic oligonucleotide
  Antisense strand to SEQ ID NO: 2394690
aaauuucccaaagaacucu

SEQ ID NO: 2394692 - RNA, 19 nt, Artificial Sequence
  Description of Artificial Sequence: Synthetic oligonucleotide
  Sense strand starting at position 124 of SEQ ID NO: 1886214
uugggaaauuuauagcugu

SEQ ID NO: 2394693 - RNA, 19 nt, Artificial Sequence
  Description of Artificial Sequence: Synthetic oligonucleotide
  Antisense strand to SEQ ID NO: 2394692
acagcuauaaauuucccaa

SEQ ID NO: 2394694 - RNA, 19 nt, Artificial Sequence
  Description of Artificial Sequence: Synthetic oligonucleotide
  Sense strand starting at position 354 of SEQ ID NO: 1886214
ggugguguguucccacacu

SEQ ID NO: 2394695 - RNA, 19 nt, Artificial Sequence
  Description of Artificial Sequence: Synthetic oligonucleotide
  Antisense strand to SEQ ID NO: 2394694
agugugggaacacaccacc

SEQ ID NO: 2394696 - RNA, 19 nt, Artificial Sequence
  Description of Artificial Sequence: Synthetic oligonucleotide
  Sense strand starting at position 592 of SEQ ID NO: 1886214
auaggcacauuccuagaaa

SEQ ID NO: 2394697 - RNA, 19 nt, Artificial Sequence
  Description of Artificial Sequence: Synthetic oligonucleotide
  Antisense strand to SEQ ID NO: 2394696
uuucuaggaaugugccuau

SEQ ID NO: 2394698 - RNA, 19 nt, Artificial Sequence
  Description of Artificial Sequence: Synthetic oligonucleotide
  Sense strand starting at position 622 of SEQ ID NO: 1886214
caggaacugucacaagaag

SEQ ID NO: 2394699 - RNA, 19 nt, Artificial Sequence
  Description of Artificial Sequence: Synthetic oligonucleotide
  Antisense strand to SEQ ID NO: 2394698
cuucuugugacaguuccug

SEQ ID NO: 2394700 - RNA, 19 nt, Artificial Sequence
  Description of Artificial Sequence: Synthetic oligonucleotide
  Sense strand starting at position 678 of SEQ ID NO: 1886214
ugaauuagcuacucaaguu

SEQ ID NO: 2394701 - RNA, 19 nt, Artificial Sequence
  Description of Artificial Sequence: Synthetic oligonucleotide
  Antisense strand to SEQ ID NO: 2394700
aacuugaguagcuaauuca

SEQ ID NO: 2394702 - RNA, 19 nt, Artificial Sequence
  Description of Artificial Sequence: Synthetic oligonucleotide
  Sense strand starting at position 721 of SEQ ID NO: 1886214
ugauuucucugaugaauuc

SEQ ID NO: 2394703 - RNA, 19 nt, Artificial Sequence
  Description of Artificial Sequence: Synthetic oligonucleotide
  Antisense strand to SEQ ID NO: 2394702
gaauucaucagagaaauca

SEQ ID NO: 2394704 - RNA, 19 nt, Artificial Sequence
  Description of Artificial Sequence: Synthetic oligonucleotide
  Sense strand starting at position 819 of SEQ ID NO: 1886214
auuccaugagucuacuauu

SEQ ID NO: 2394705 - RNA, 19 nt, Artificial Sequence
  Description of Artificial Sequence: Synthetic oligonucleotide
  Antisense strand to SEQ ID NO: 2394704
aauaguagacucauggaau

SEQ ID NO: 2394706 - RNA, 19 nt, Artificial Sequence
  Description of Artificial Sequence: Synthetic oligonucleotide
  Sense strand starting at position 1061 of SEQ ID NO: 1886214
auaccuguauuccuagaua

SEQ ID NO: 2394707 - RNA, 19 nt, Artificial Sequence
  Description of Artificial Sequence: Synthetic oligonucleotide
  Antisense strand to SEQ ID NO: 2394706
uaucuaggaauacagguau

SEQ ID NO: 2394708 - RNA, 19 nt, Artificial Sequence
  Description of Artificial Sequence: Synthetic oligonucleotide
  Sense strand starting at position 1190 of SEQ ID NO: 1886214
gagagacuuugucuuccca

SEQ ID NO: 2394709 - RNA, 19 nt, Artificial Sequence
  Description of Artificial Sequence: Synthetic oligonucleotide
  Antisense strand to SEQ ID NO: 2394708
ugggaagacaaagucucuc

SEQ ID NO: 2394710 - RNA, 19 nt, Artificial Sequence
  Description of Artificial Sequence: Synthetic oligonucleotide
  Sense strand starting at position 1347 of SEQ ID NO: 1886214
guauuuagauauuauccag

SEQ ID NO: 2394711 - RNA, 19 nt, Artificial Sequence
  Description of Artificial Sequence: Synthetic oligonucleotide
  Antisense strand to SEQ ID NO: 2394710
cuggauaauaucuaaauac

SEQ ID NO: 2394712 - RNA, 19 nt, Artificial Sequence
  Description of Artificial Sequence: Synthetic oligonucleotide
  Sense strand starting at position 1411 of SEQ ID NO: 1886214
gaacgcaugacguauauga

SEQ ID NO: 2394713 - RNA, 19 nt, Artificial Sequence
  Description of Artificial Sequence: Synthetic oligonucleotide
  Antisense strand to SEQ ID NO: 2394712
ucauauacgucaugcguuc

SEQ ID NO: 2394714 - RNA, 19 nt, Artificial Sequence
  Description of Artificial Sequence: Synthetic oligonucleotide
  Sense strand starting at position 1413 of SEQ ID NO: 1886214
acgcaugacguauaugaau

SEQ ID NO: 2394715 - RNA, 19 nt, Artificial Sequence
  Description of Artificial Sequence: Synthetic oligonucleotide
  Antisense strand to SEQ ID NO: 2394714
auucauauacgucaugcgu

SEQ ID NO: 2394716 - RNA, 19 nt, Artificial Sequence
  Description of Artificial Sequence: Synthetic oligonucleotide
  Sense strand starting at position 1415 of SEQ ID NO: 1886214
gcaugacguauaugaauuc

SEQ ID NO: 2394717 - RNA, 19 nt, Artificial Sequence
  Description of Artificial Sequence: Synthetic oligonucleotide
  Antisense strand to SEQ ID NO: 2394716
gaauucauauacgucaugc

SEQ ID NO: 2394718 - RNA, 19 nt, Artificial Sequence
  Description of Artificial Sequence: Synthetic oligonucleotide
  Sense strand starting at position 1422 of SEQ ID NO: 1886214
guauaugaauuccaaagga

SEQ ID NO: 2394719 - RNA, 19 nt, Artificial Sequence
  Description of Artificial Sequence: Synthetic oligonucleotide
  Antisense strand to SEQ ID NO: 2394718
uccuuuggaauucauauac

SEQ ID NO: 2394720 - RNA, 19 nt, Artificial Sequence
  Description of Artificial Sequence: Synthetic oligonucleotide
  Sense strand starting at position 1435 of SEQ ID NO: 1886214
aaaggauguugguuuaacu

SEQ ID NO: 2394721 - RNA, 19 nt, Artificial Sequence
  Description of Artificial Sequence: Synthetic oligonucleotide
  Antisense strand to SEQ ID NO: 2394720
aguuaaaccaacauccuuu

SEQ ID NO: 2394722 - RNA, 19 nt, Artificial Sequence
  Description of Artificial Sequence: Synthetic oligonucleotide
  Sense strand starting at position 1578 of SEQ ID NO: 1886214
auugguuccuuugucaaua

SEQ ID NO: 2394723 - RNA, 19 nt, Artificial Sequence
  Description of Artificial Sequence: Synthetic oligonucleotide
  Antisense strand to SEQ ID NO: 2394722
uauugacaaaggaaccaau

SEQ ID NO: 2394724 - RNA, 19 nt, Artificial Sequence
  Description of Artificial Sequence: Synthetic oligonucleotide
  Sense strand starting at position 1579 of SEQ ID NO: 1886214
uugguuccuuugucaauau

SEQ ID NO: 2394725 - RNA, 19 nt, Artificial Sequence
  Description of Artificial Sequence: Synthetic oligonucleotide
  Antisense strand to SEQ ID NO: 2394724
auauugacaaaggaaccaa

SEQ ID NO: 2394726 - RNA, 19 nt, Artificial Sequence
  Description of Artificial Sequence: Synthetic oligonucleotide
  Sense strand starting at position 1636 of SEQ ID NO: 1886214
aucacaguuccuugaccuu

SEQ ID NO: 2394727 - RNA, 19 nt, Artificial Sequence
  Description of Artificial Sequence: Synthetic oligonucleotide
  Antisense strand to SEQ ID NO: 2394726
aaggucaaggaacugugau

SEQ ID NO: 2394728 - RNA, 19 nt, Artificial Sequence
  Description of Artificial Sequence: Synthetic oligonucleotide
  Sense strand starting at position 1758 of SEQ ID NO: 1886214
agucuugggucacuaacca

SEQ ID NO: 2394729 - RNA, 19 nt, Artificial Sequence
  Description of Artificial Sequence: Synthetic oligonucleotide
  Antisense strand to SEQ ID NO: 2394728
ugguuagugacccaagacu

SEQ ID NO: 2394730 - RNA, 19 nt, Artificial Sequence
  Description of Artificial Sequence: Synthetic oligonucleotide
  Sense strand starting at position 1783 of SEQ ID NO: 1886214
agugcauacugacucauaa

SEQ ID NO: 2394731 - RNA, 19 nt, Artificial Sequence
  Description of Artificial Sequence: Synthetic oligonucleotide
  Antisense strand to SEQ ID NO: 2394730
uuaugagucaguaugcacu

SEQ ID NO: 2394732 - RNA, 19 nt, Artificial Sequence
  Description of Artificial Sequence: Synthetic oligonucleotide
  Sense strand starting at position 1816 of SEQ ID NO: 1886214
gcccucuucggagagauag

SEQ ID NO: 2394733 - RNA, 19 nt, Artificial Sequence
  Description of Artificial Sequence: Synthetic oligonucleotide
  Antisense strand to SEQ ID NO: 2394732
cuaucucuccgaagagggc

SEQ ID NO: 2394734 - RNA, 19 nt, Artificial Sequence
  Description of Artificial Sequence: Synthetic oligonucleotide
  Sense strand starting at position 2051 of SEQ ID NO: 1886214
ugugcaugguuaucuaauc

SEQ ID NO: 2394735 - RNA, 19 nt, Artificial Sequence
  Description of Artificial Sequence: Synthetic oligonucleotide
  Antisense strand to SEQ ID NO: 2394734
gauuagauaaccaugcaca

SEQ ID NO: 2394736 - RNA, 19 nt, Artificial Sequence
  Description of Artificial Sequence: Synthetic oligonucleotide
  Sense strand starting at position 2067 of SEQ ID NO: 1886214
auccaucaucagugagaag

SEQ ID NO: 2394737 - RNA, 19 nt, Artificial Sequence
  Description of Artificial Sequence: Synthetic oligonucleotide
  Antisense strand to SEQ ID NO: 2394736
cuucucacugaugauggau

SEQ ID NO: 2394738 - RNA, 19 nt, Artificial Sequence
  Description of Artificial Sequence: Synthetic oligonucleotide
  Sense strand starting at position 2070 of SEQ ID NO: 1886214
caucaucagugagaagagu

SEQ ID NO: 2394739 - RNA, 19 nt, Artificial Sequence
  Description of Artificial Sequence: Synthetic oligonucleotide
  Antisense strand to SEQ ID NO: 2394738
acucuucucacugaugaug

SEQ ID NO: 2394740 - RNA, 19 nt, Artificial Sequence
  Description of Artificial Sequence: Synthetic oligonucleotide
  Sense strand starting at position 2566 of SEQ ID NO: 1886214
gugacuacaugacaaauau

SEQ ID NO: 2394741 - RNA, 19 nt, Artificial Sequence
  Description of Artificial Sequence: Synthetic oligonucleotide
  Antisense strand to SEQ ID NO: 2394740
auauuugucauguagucac

SEQ ID NO: 2394742 - RNA, 19 nt, Artificial Sequence
  Description of Artificial Sequence: Synthetic oligonucleotide
  Sense strand starting at position 2586 of SEQ ID NO: 1886214
aguagaaacaucuguguuc

SEQ ID NO: 2394743 - RNA, 19 nt, Artificial Sequence
  Description of Artificial Sequence: Synthetic oligonucleotide
  Antisense strand to SEQ ID NO: 2394742
gaacacagauguuucuacu

SEQ ID NO: 2394744 - RNA, 19 nt, Artificial Sequence
  Description of Artificial Sequence: Synthetic oligonucleotide
  Sense strand starting at position 2929 of SEQ ID NO: 1886214
uagggauacucacauagca

SEQ ID NO: 2394745 - RNA, 19 nt, Artificial Sequence
  Description of Artificial Sequence: Synthetic oligonucleotide
  Antisense strand to SEQ ID NO: 2394744
ugcuaugugaguaucccua

SEQ ID NO: 2394746 - RNA, 19 nt, Artificial Sequence
  Description of Artificial Sequence: Synthetic oligonucleotide
  Sense strand starting at position 3135 of SEQ ID NO: 1886214
ccuugaaauucugugacau

SEQ ID NO: 2394747 - RNA, 19 nt, Artificial Sequence
  Description of Artificial Sequence: Synthetic oligonucleotide
  Antisense strand to SEQ ID NO: 2394746
augucacagaauuucaagg

SEQ ID NO: 2394748 - RNA, 19 nt, Artificial Sequence
  Description of Artificial Sequence: Synthetic oligonucleotide
  Sense strand starting at position 3136 of SEQ ID NO: 1886214
cuugaaauucugugacauc

SEQ ID NO: 2394749 - RNA, 19 nt, Artificial Sequence
  Description of Artificial Sequence: Synthetic oligonucleotide
  Antisense strand to SEQ ID NO: 2394748
gaugucacagaauuucaag

SEQ ID NO: 2394750 - RNA, 19 nt, Artificial Sequence
  Description of Artificial Sequence: Synthetic oligonucleotide
  Sense strand starting at position 3261 of SEQ ID NO: 1886214
agagcaaucuuugcacaag

SEQ ID NO: 2394751 - RNA, 19 nt, Artificial Sequence
  Description of Artificial Sequence: Synthetic oligonucleotide
  Antisense strand to SEQ ID NO: 2394750
cuugugcaaagauugcucu

SEQ ID NO: 2394752 - RNA, 19 nt, Artificial Sequence
  Description of Artificial Sequence: Synthetic oligonucleotide
  Sense strand starting at position 3264 of SEQ ID NO: 1886214
gcaaucuuugcacaaguca

SEQ ID NO: 2394753 - RNA, 19 nt, Artificial Sequence
  Description of Artificial Sequence: Synthetic oligonucleotide
  Antisense strand to SEQ ID NO: 2394752
ugacuugugcaaagauugc

SEQ ID NO: 2394754 - RNA, 19 nt, Artificial Sequence
  Description of Artificial Sequence: Synthetic oligonucleotide
  Sense strand starting at position 3285 of SEQ ID NO: 1886214
gaucuuugguccuuuguca

SEQ ID NO: 2394755 - RNA, 19 nt, Artificial Sequence
  Description of Artificial Sequence: Synthetic oligonucleotide
  Antisense strand to SEQ ID NO: 2394754
ugacaaaggaccaaagauc

SEQ ID NO: 2394756 - RNA, 19 nt, Artificial Sequence
  Description of Artificial Sequence: Synthetic oligonucleotide
  Sense strand starting at position 3298 of SEQ ID NO: 1886214
uugucaccuuugucauuua

SEQ ID NO: 2394757 - RNA, 19 nt, Artificial Sequence
  Description of Artificial Sequence: Synthetic oligonucleotide
  Antisense strand to SEQ ID NO: 2394756
uaaaugacaaaggugacaa

SEQ ID NO: 2394758 - RNA, 19 nt, Artificial Sequence
  Description of Artificial Sequence: Synthetic oligonucleotide
  Sense strand starting at position 3707 of SEQ ID NO: 1886214
gaaucagauucugaaguug

SEQ ID NO: 2394759 - RNA, 19 nt, Artificial Sequence
  Description of Artificial Sequence: Synthetic oligonucleotide
  Antisense strand to SEQ ID NO: 2394758
caacuucagaaucugauuc

SEQ ID NO: 2394760 - RNA, 19 nt, Artificial Sequence
  Description of Artificial Sequence: Synthetic oligonucleotide
  Sense strand starting at position 3722 of SEQ ID NO: 1886214
guuguauuccgccaaauaa

SEQ ID NO: 2394761 - RNA, 19 nt, Artificial Sequence
  Description of Artificial Sequence: Synthetic oligonucleotide
  Antisense strand to SEQ ID NO: 2394760
uuauuuggcggaauacaac

SEQ ID NO: 2394762 - RNA, 19 nt, Artificial Sequence
  Description of Artificial Sequence: Synthetic oligonucleotide
  Sense strand starting at position 3754 of SEQ ID NO: 1886214
acgccaugugguggguaaa

SEQ ID NO: 2394763 - RNA, 19 nt, Artificial Sequence
  Description of Artificial Sequence: Synthetic oligonucleotide
  Antisense strand to SEQ ID NO: 2394762
uuuacccaccacauggcgu

SEQ ID NO: 2394764 - RNA, 19 nt, Artificial Sequence
  Description of Artificial Sequence: Synthetic oligonucleotide
  Sense strand starting at position 35 of SEQ ID NO: 1886215
ggcugaaacucuuugaucu

SEQ ID NO: 2394765 - RNA, 19 nt, Artificial Sequence
  Description of Artificial Sequence: Synthetic oligonucleotide
  Antisense strand to SEQ ID NO: 2394764
agaucaaagaguuucagcc

SEQ ID NO: 2394766 - RNA, 19 nt, Artificial Sequence
  Description of Artificial Sequence: Synthetic oligonucleotide
  Sense strand starting at position 112 of SEQ ID NO: 1886215
uuaguaugucgagaacuca

SEQ ID NO: 2394767 - RNA, 19 nt, Artificial Sequence
  Description of Artificial Sequence: Synthetic oligonucleotide
  Antisense strand to SEQ ID NO: 2394766
ugaguucucgacauacuaa

SEQ ID NO: 2394768 - RNA, 19 nt, Artificial Sequence
  Description of Artificial Sequence: Synthetic oligonucleotide
  Sense strand starting at position 159 of SEQ ID NO: 1886215
uuguguauugacuaaguaa

SEQ ID NO: 2394769 - RNA, 19 nt, Artificial Sequence
  Description of Artificial Sequence: Synthetic oligonucleotide
  Antisense strand to SEQ ID NO: 2394768
uuacuuagucaauacacaa

SEQ ID NO: 2394770 - RNA, 19 nt, Artificial Sequence
  Description of Artificial Sequence: Synthetic oligonucleotide
  Sense strand starting at position 162 of SEQ ID NO: 1886215
uguauugacuaaguaaucu

SEQ ID NO: 2394771 - RNA, 19 nt, Artificial Sequence
  Description of Artificial Sequence: Synthetic oligonucleotide
  Antisense strand to SEQ ID NO: 2394770
agauuacuuagucaauaca

SEQ ID NO: 2394772 - RNA, 19 nt, Artificial Sequence
  Description of Artificial Sequence: Synthetic oligonucleotide
  Sense strand starting at position 303 of SEQ ID NO: 1886215
augagaaacuucuuugcau

SEQ ID NO: 2394773 - RNA, 19 nt, Artificial Sequence
  Description of Artificial Sequence: Synthetic oligonucleotide
  Antisense strand to SEQ ID NO: 2394772
augcaaagaaguuucucau

SEQ ID NO: 2394774 - RNA, 19 nt, Artificial Sequence
  Description of Artificial Sequence: Synthetic oligonucleotide
  Sense strand starting at position 304 of SEQ ID NO: 1886215
ugagaaacuucuuugcaug

SEQ ID NO: 2394775 - RNA, 19 nt, Artificial Sequence
  Description of Artificial Sequence: Synthetic oligonucleotide
  Antisense strand to SEQ ID NO: 2394774
caugcaaagaaguuucuca

SEQ ID NO: 2394776 - RNA, 19 nt, Artificial Sequence
  Description of Artificial Sequence: Synthetic oligonucleotide
  Sense strand starting at position 318 of SEQ ID NO: 1886215
gcaugugguguagaaauaa

SEQ ID NO: 2394777 - RNA, 19 nt, Artificial Sequence
  Description of Artificial Sequence: Synthetic oligonucleotide
  Antisense strand to SEQ ID NO: 2394776
uuauuucuacaccacaugc

SEQ ID NO: 2394778 - RNA, 19 nt, Artificial Sequence
  Description of Artificial Sequence: Synthetic oligonucleotide
  Sense strand starting at position 437 of SEQ ID NO: 1886215
acaagagacaugugccagu

SEQ ID NO: 2394779 - RNA, 19 nt, Artificial Sequence
  Description of Artificial Sequence: Synthetic oligonucleotide
  Antisense strand to SEQ ID NO: 2394778
acuggcacaugucucuugu

SEQ ID NO: 2394780 - RNA, 19 nt, Artificial Sequence
  Description of Artificial Sequence: Synthetic oligonucleotide
  Sense strand starting at position 780 of SEQ ID NO: 1886215
ugacuaguucgauaaguuu

SEQ ID NO: 2394781 - RNA, 19 nt, Artificial Sequence
  Description of Artificial Sequence: Synthetic oligonucleotide
  Antisense strand to SEQ ID NO: 2394780
aaacuuaucgaacuaguca

SEQ ID NO: 2394782 - RNA, 19 nt, Artificial Sequence
  Description of Artificial Sequence: Synthetic oligonucleotide
  Sense strand starting at position 854 of SEQ ID NO: 1886215
uguaaagcucaauguauuu

SEQ ID NO: 2394783 - RNA, 19 nt, Artificial Sequence
  Description of Artificial Sequence: Synthetic oligonucleotide
  Antisense strand to SEQ ID NO: 2394782
aaauacauugagcuuuaca

SEQ ID NO: 2394784 - RNA, 19 nt, Artificial Sequence
  Description of Artificial Sequence: Synthetic oligonucleotide
  Sense strand starting at position 864 of SEQ ID NO: 1886215
aauguauuugcaugaugca

SEQ ID NO: 2394785 - RNA, 19 nt, Artificial Sequence
  Description of Artificial Sequence: Synthetic oligonucleotide
  Antisense strand to SEQ ID NO: 2394784
ugcaucaugcaaauacauu

SEQ ID NO: 2394786 - RNA, 19 nt, Artificial Sequence
  Description of Artificial Sequence: Synthetic oligonucleotide
  Sense strand starting at position 1116 of SEQ ID NO: 1886215
uggagucucuauucugaaa

SEQ ID NO: 2394787 - RNA, 19 nt, Artificial Sequence
  Description of Artificial Sequence: Synthetic oligonucleotide
  Antisense strand to SEQ ID NO: 2394786
uuucagaauagagacucca

SEQ ID NO: 2394788 - RNA, 19 nt, Artificial Sequence
  Description of Artificial Sequence: Synthetic oligonucleotide
  Sense strand starting at position 1300 of SEQ ID NO: 1886215
ucaauaguguaggugacau

SEQ ID NO: 2394789 - RNA, 19 nt, Artificial Sequence
  Description of Artificial Sequence: Synthetic oligonucleotide
  Antisense strand to SEQ ID NO: 2394788
augucaccuacacuauuga

SEQ ID NO: 2394790 - RNA, 19 nt, Artificial Sequence
  Description of Artificial Sequence: Synthetic oligonucleotide
  Sense strand starting at position 1600 of SEQ ID NO: 1886215
uuaauagaggcaugccaua

SEQ ID NO: 2394791 - RNA, 19 nt, Artificial Sequence
  Description of Artificial Sequence: Synthetic oligonucleotide
  Antisense strand to SEQ ID NO: 2394790
uauggcaugccucuauuaa

SEQ ID NO: 2394792 - RNA, 19 nt, Artificial Sequence
  Description of Artificial Sequence: Synthetic oligonucleotide
  Sense strand starting at position 1724 of SEQ ID NO: 1886215
uccuauauguaaguaucua

SEQ ID NO: 2394793 - RNA, 19 nt, Artificial Sequence
  Description of Artificial Sequence: Synthetic oligonucleotide
  Antisense strand to SEQ ID NO: 2394792
uagauacuuacauauagga

SEQ ID NO: 2394794 - RNA, 19 nt, Artificial Sequence
  Description of Artificial Sequence: Synthetic oligonucleotide
  Sense strand starting at position 1732 of SEQ ID NO: 1886215
guaaguaucuaucuacaau

SEQ ID NO: 2394795 - RNA, 19 nt, Artificial Sequence
  Description of Artificial Sequence: Synthetic oligonucleotide
  Antisense strand to SEQ ID NO: 2394794
auuguagauagauacuuac

SEQ ID NO: 2394796 - RNA, 19 nt, Artificial Sequence
  Description of Artificial Sequence: Synthetic oligonucleotide
  Sense strand starting at position 1816 of SEQ ID NO: 1886215
gcccucuucgaagagauag

SEQ ID NO: 2394797 - RNA, 19 nt, Artificial Sequence
  Description of Artificial Sequence: Synthetic oligonucleotide
  Antisense strand to SEQ ID NO: 2394796
cuaucucuucgaagagggc

SEQ ID NO: 2394798 - RNA, 19 nt, Artificial Sequence
  Description of Artificial Sequence: Synthetic oligonucleotide
  Sense strand starting at position 2066 of SEQ ID NO: 1886215
aaugcaucaucagugagaa

SEQ ID NO: 2394799 - RNA, 19 nt, Artificial Sequence
  Description of Artificial Sequence: Synthetic oligonucleotide
  Antisense strand to SEQ ID NO: 2394798
uucucacugaugaugcauu

SEQ ID NO: 2394800 - RNA, 19 nt, Artificial Sequence
  Description of Artificial Sequence: Synthetic oligonucleotide
  Sense strand starting at position 2067 of SEQ ID NO: 1886215
augcaucaucagugagaac

SEQ ID NO: 2394801 - RNA, 19 nt, Artificial Sequence
  Description of Artificial Sequence: Synthetic oligonucleotide
  Antisense strand to SEQ ID NO: 2394800
guucucacugaugaugcau

SEQ ID NO: 2394802 - RNA, 19 nt, Artificial Sequence
  Description of Artificial Sequence: Synthetic oligonucleotide
  Sense strand starting at position 2564 of SEQ ID NO: 1886215
guaugauuacaguacuaau

SEQ ID NO: 2394803 - RNA, 19 nt, Artificial Sequence
  Description of Artificial Sequence: Synthetic oligonucleotide
  Antisense strand to SEQ ID NO: 2394802
auuaguacuguaaucauac

SEQ ID NO: 2394804 - RNA, 19 nt, Artificial Sequence
  Description of Artificial Sequence: Synthetic oligonucleotide
  Sense strand starting at position 2610 of SEQ ID NO: 1886215
gugccagauaaagauguaa

SEQ ID NO: 2394805 - RNA, 19 nt, Artificial Sequence
  Description of Artificial Sequence: Synthetic oligonucleotide
  Antisense strand to SEQ ID NO: 2394804
uuacaucuuuaucuggcac

SEQ ID NO: 2394806 - RNA, 19 nt, Artificial Sequence
  Description of Artificial Sequence: Synthetic oligonucleotide
  Sense strand starting at position 2860 of SEQ ID NO: 1886215
acucacagucuuugacauu

SEQ ID NO: 2394807 - RNA, 19 nt, Artificial Sequence
  Description of Artificial Sequence: Synthetic oligonucleotide
  Antisense strand to SEQ ID NO: 2394806
aaugucaaagacugugagu

SEQ ID NO: 2394808 - RNA, 19 nt, Artificial Sequence
  Description of Artificial Sequence: Synthetic oligonucleotide
  Sense strand starting at position 2880 of SEQ ID NO: 1886215
ugacaucauugcccacaga

SEQ ID NO: 2394809 - RNA, 19 nt, Artificial Sequence
  Description of Artificial Sequence: Synthetic oligonucleotide
  Antisense strand to SEQ ID NO: 2394808
ucugugggcaaugauguca

SEQ ID NO: 2394810 - RNA, 19 nt, Artificial Sequence
  Description of Artificial Sequence: Synthetic oligonucleotide
  Sense strand starting at position 2945 of SEQ ID NO: 1886215
ugaaguuuccuugaaguug

SEQ ID NO: 2394811 - RNA, 19 nt, Artificial Sequence
  Description of Artificial Sequence: Synthetic oligonucleotide
  Antisense strand to SEQ ID NO: 2394810
caacuucaaggaaacuuca

SEQ ID NO: 2394812 - RNA, 19 nt, Artificial Sequence
  Description of Artificial Sequence: Synthetic oligonucleotide
  Sense strand starting at position 3011 of SEQ ID NO: 1886215
aucagagaaugcuccaaau

SEQ ID NO: 2394813 - RNA, 19 nt, Artificial Sequence
  Description of Artificial Sequence: Synthetic oligonucleotide
  Antisense strand to SEQ ID NO: 2394812
auuuggagcauucucugau

SEQ ID NO: 2394814 - RNA, 19 nt, Artificial Sequence
  Description of Artificial Sequence: Synthetic oligonucleotide
  Sense strand starting at position 3233 of SEQ ID NO: 1886215
uuguaucuugaaugggaaa

SEQ ID NO: 2394815 - RNA, 19 nt, Artificial Sequence
  Description of Artificial Sequence: Synthetic oligonucleotide
  Antisense strand to SEQ ID NO: 2394814
uuucccauucaagauacaa

SEQ ID NO: 2394816 - RNA, 19 nt, Artificial Sequence
  Description of Artificial Sequence: Synthetic oligonucleotide
  Sense strand starting at position 3234 of SEQ ID NO: 1886215
uguaucuugaaugggaaau

SEQ ID NO: 2394817 - RNA, 19 nt, Artificial Sequence
  Description of Artificial Sequence: Synthetic oligonucleotide
  Antisense strand to SEQ ID NO: 2394816
auuucccauucaagauaca

SEQ ID NO: 2394818 - RNA, 19 nt, Artificial Sequence
  Description of Artificial Sequence: Synthetic oligonucleotide
  Sense strand starting at position 3256 of SEQ ID NO: 1886215
aaaguuguggucuaccaau

SEQ ID NO: 2394819 - RNA, 19 nt, Artificial Sequence
  Description of Artificial Sequence: Synthetic oligonucleotide
  Antisense strand to SEQ ID NO: 2394818
auugguagaccacaacuuu

SEQ ID NO: 2394820 - RNA, 19 nt, Artificial Sequence
  Description of Artificial Sequence: Synthetic oligonucleotide
  Sense strand starting at position 3309 of SEQ ID NO: 1886215
augaaagacacgugauagu

SEQ ID NO: 2394821 - RNA, 19 nt, Artificial Sequence
  Description of Artificial Sequence: Synthetic oligonucleotide
  Antisense strand to SEQ ID NO: 2394820
acuaucacgugucuuucau

SEQ ID NO: 2394822 - RNA, 19 nt, Artificial Sequence
  Description of Artificial Sequence: Synthetic oligonucleotide
  Sense strand starting at position 3328 of SEQ ID NO: 1886215
gcuauugugagauaauuga

SEQ ID NO: 2394823 - RNA, 19 nt, Artificial Sequence
  Description of Artificial Sequence: Synthetic oligonucleotide
  Antisense strand to SEQ ID NO: 2394822
ucaauuaucucacaauagc

SEQ ID NO: 2394824 - RNA, 19 nt, Artificial Sequence
  Description of Artificial Sequence: Synthetic oligonucleotide
  Sense strand starting at position 3344 of SEQ ID NO: 1886215
ugaggaguucaccaguuag

SEQ ID NO: 2394825 - RNA, 19 nt, Artificial Sequence
  Description of Artificial Sequence: Synthetic oligonucleotide
  Antisense strand to SEQ ID NO: 2394824
cuaacuggugaacuccuca

SEQ ID NO: 2394826 - RNA, 19 nt, Artificial Sequence
  Description of Artificial Sequence: Synthetic oligonucleotide
  Sense strand starting at position 3374 of SEQ ID NO: 1886215
auguguuauuuauccuguu

SEQ ID NO: 2394827 - RNA, 19 nt, Artificial Sequence
  Description of Artificial Sequence: Synthetic oligonucleotide
  Antisense strand to SEQ ID NO: 2394826
aacaggauaaauaacacau

SEQ ID NO: 2394828 - RNA, 19 nt, Artificial Sequence
  Description of Artificial Sequence: Synthetic oligonucleotide
  Sense strand starting at position 3446 of SEQ ID NO: 1886215
guacuuauccuugauccag

SEQ ID NO: 2394829 - RNA, 19 nt, Artificial Sequence
  Description of Artificial Sequence: Synthetic oligonucleotide
  Antisense strand to SEQ ID NO: 2394828
cuggaucaaggauaaguac

SEQ ID NO: 2394830 - RNA, 19 nt, Artificial Sequence
  Description of Artificial Sequence: Synthetic oligonucleotide
  Sense strand starting at position 3564 of SEQ ID NO: 1886215
gaugucugacuugacuuua

SEQ ID NO: 2394831 - RNA, 19 nt, Artificial Sequence
  Description of Artificial Sequence: Synthetic oligonucleotide
  Antisense strand to SEQ ID NO: 2394830
uaaagucaagucagacauc

SEQ ID NO: 2394832 - RNA, 19 nt, Artificial Sequence
  Description of Artificial Sequence: Synthetic oligonucleotide
  Sense strand starting at position 3606 of SEQ ID NO: 1886215
uccagaagcuucucagaac

SEQ ID NO: 2394833 - RNA, 19 nt, Artificial Sequence
  Description of Artificial Sequence: Synthetic oligonucleotide
  Antisense strand to SEQ ID NO: 2394832
guucugagaagcuucugga

SEQ ID NO: 2394834 - RNA, 19 nt, Artificial Sequence
  Description of Artificial Sequence: Synthetic oligonucleotide
  Sense strand starting at position 3617 of SEQ ID NO: 1886215
cucagaacccuuuggucua

SEQ ID NO: 2394835 - RNA, 19 nt, Artificial Sequence
  Description of Artificial Sequence: Synthetic oligonucleotide
  Antisense strand to SEQ ID NO: 2394834
uagaccaaaggguucugag

SEQ ID NO: 2394836 - RNA, 19 nt, Artificial Sequence
  Description of Artificial Sequence: Synthetic oligonucleotide
  Sense strand starting at position 3715 of SEQ ID NO: 1886215
aggaguuaacuaugaacuu

SEQ ID NO: 2394837 - RNA, 19 nt, Artificial Sequence
  Description of Artificial Sequence: Synthetic oligonucleotide
  Antisense strand to SEQ ID NO: 2394836
aaguucauaguuaacuccu

SEQ ID NO: 2394838 - RNA, 19 nt, Artificial Sequence
  Description of Artificial Sequence: Synthetic oligonucleotide
  Sense strand starting at position 3819 of SEQ ID NO: 1886215
guguauauucccuauccag

SEQ ID NO: 2394839 - RNA, 19 nt, Artificial Sequence
  Description of Artificial Sequence: Synthetic oligonucleotide
  Antisense strand to SEQ ID NO: 2394838
cuggauagggaauauacac

SEQ ID NO: 2394840 - RNA, 19 nt, Artificial Sequence
  Description of Artificial Sequence: Synthetic oligonucleotide
  Sense strand starting at position 3826 of SEQ ID NO: 1886215
uucccuauccaggguagaa

SEQ ID NO: 2394841 - RNA, 19 nt, Artificial Sequence
  Description of Artificial Sequence: Synthetic oligonucleotide
  Antisense strand to SEQ ID NO: 2394840
uucuacccuggauagggaa

SEQ ID NO: 2394842 - RNA, 19 nt, Artificial Sequence
  Description of Artificial Sequence: Synthetic oligonucleotide
  Sense strand starting at position 3938 of SEQ ID NO: 1886215
agcacuuugcaugagaaua

SEQ ID NO: 2394843 - RNA, 19 nt, Artificial Sequence
  Description of Artificial Sequence: Synthetic oligonucleotide
  Antisense strand to SEQ ID NO: 2394842
uauucucaugcaaagugcu

SEQ ID NO: 2394844 - RNA, 19 nt, Artificial Sequence
  Description of Artificial Sequence: Synthetic oligonucleotide
  Sense strand starting at position 289 of SEQ ID NO: 1886216
gaagacauguguccaaaca

SEQ ID NO: 2394845 - RNA, 19 nt, Artificial Sequence
  Description of Artificial Sequence: Synthetic oligonucleotide
  Antisense strand to SEQ ID NO: 2394844
uguuuggacacaugucuuc

SEQ ID NO: 2394846 - RNA, 19 nt, Artificial Sequence
  Description of Artificial Sequence: Synthetic oligonucleotide
  Sense strand starting at position 409 of SEQ ID NO: 1886216
gcaggagacgcuugguacu

SEQ ID NO: 2394847 - RNA, 19 nt, Artificial Sequence
  Description of Artificial Sequence: Synthetic oligonucleotide
  Antisense strand to SEQ ID NO: 2394846
aguaccaagcgucuccugc

SEQ ID NO: 2394848 - RNA, 19 nt, Artificial Sequence
  Description of Artificial Sequence: Synthetic oligonucleotide
  Sense strand starting at position 718 of SEQ ID NO: 1886216
cagaguucucuccaagugu

SEQ ID NO: 2394849 - RNA, 19 nt, Artificial Sequence
  Description of Artificial Sequence: Synthetic oligonucleotide
  Antisense strand to SEQ ID NO: 2394848
acacuuggagagaacucug

SEQ ID NO: 2394850 - RNA, 19 nt, Artificial Sequence
  Description of Artificial Sequence: Synthetic oligonucleotide
  Sense strand starting at position 722 of SEQ ID NO: 1886216
guucucuccaagugugcau

SEQ ID NO: 2394851 - RNA, 19 nt, Artificial Sequence
  Description of Artificial Sequence: Synthetic oligonucleotide
  Antisense strand to SEQ ID NO: 2394850
augcacacuuggagagaac

SEQ ID NO: 2394852 - RNA, 19 nt, Artificial Sequence
  Description of Artificial Sequence: Synthetic oligonucleotide
  Sense strand starting at position 729 of SEQ ID NO: 1886216
ccaagugugcaugggaaau

SEQ ID NO: 2394853 - RNA, 19 nt, Artificial Sequence
  Description of Artificial Sequence: Synthetic oligonucleotide
  Antisense strand to SEQ ID NO: 2394852
auuucccaugcacacuugg

SEQ ID NO: 2394854 - RNA, 19 nt, Artificial Sequence
  Description of Artificial Sequence: Synthetic oligonucleotide
  Sense strand starting at position 901 of SEQ ID NO: 1886216
ggugaguccguggaucaga

SEQ ID NO: 2394855 - RNA, 19 nt, Artificial Sequence
  Description of Artificial Sequence: Synthetic oligonucleotide
  Antisense strand to SEQ ID NO: 2394854
ucugauccacggacucacc

SEQ ID NO: 2394856 - RNA, 19 nt, Artificial Sequence
  Description of Artificial Sequence: Synthetic oligonucleotide
  Sense strand starting at position 930 of SEQ ID NO: 1886216
gaggcaaauucccuggaca

SEQ ID NO: 2394857 - RNA, 19 nt, Artificial Sequence
  Description of Artificial Sequence: Synthetic oligonucleotide
  Antisense strand to SEQ ID NO: 2394856
uguccagggaauuugccuc

SEQ ID NO: 2394858 - RNA, 19 nt, Artificial Sequence
  Description of Artificial Sequence: Synthetic oligonucleotide
  Sense strand starting at position 964 of SEQ ID NO: 1886216
ggccuucccagcuaaggau

SEQ ID NO: 2394859 - RNA, 19 nt, Artificial Sequence
  Description of Artificial Sequence: Synthetic oligonucleotide
  Antisense strand to SEQ ID NO: 2394858
auccuuagcugggaaggcc

SEQ ID NO: 2394860 - RNA, 19 nt, Artificial Sequence
  Description of Artificial Sequence: Synthetic oligonucleotide
  Sense strand starting at position 995 of SEQ ID NO: 1886216
gcuaguugcccacagggaa

SEQ ID NO: 2394861 - RNA, 19 nt, Artificial Sequence
  Description of Artificial Sequence: Synthetic oligonucleotide
  Antisense strand to SEQ ID NO: 2394860
uucccugugggcaacuagc

SEQ ID NO: 2394862 - RNA, 19 nt, Artificial Sequence
  Description of Artificial Sequence: Synthetic oligonucleotide
  Sense strand starting at position 1442 of SEQ ID NO: 1886216
acugcagggcuuuagagaa

SEQ ID NO: 2394863 - RNA, 19 nt, Artificial Sequence
  Description of Artificial Sequence: Synthetic oligonucleotide
  Antisense strand to SEQ ID NO: 2394862
uucucuaaagcccugcagu

SEQ ID NO: 2394864 - RNA, 19 nt, Artificial Sequence
  Description of Artificial Sequence: Synthetic oligonucleotide
  Sense strand starting at position 1460 of SEQ ID NO: 1886216
agauauccuccuuggguca

SEQ ID NO: 2394865 - RNA, 19 nt, Artificial Sequence
  Description of Artificial Sequence: Synthetic oligonucleotide
  Antisense strand to SEQ ID NO: 2394864
ugacccaaggaggauaucu

SEQ ID NO: 2394866 - RNA, 19 nt, Artificial Sequence
  Description of Artificial Sequence: Synthetic oligonucleotide
  Sense strand starting at position 1473 of SEQ ID NO: 1886216
gggucagacucccaaggaa

SEQ ID NO: 2394867 - RNA, 19 nt, Artificial Sequence
  Description of Artificial Sequence: Synthetic oligonucleotide
  Antisense strand to SEQ ID NO: 2394866
uuccuugggagucugaccc

SEQ ID NO: 2394868 - RNA, 19 nt, Artificial Sequence
  Description of Artificial Sequence: Synthetic oligonucleotide
  Sense strand starting at position 1790 of SEQ ID NO: 1886216
guugcucagagauaggcuu

SEQ ID NO: 2394869 - RNA, 19 nt, Artificial Sequence
  Description of Artificial Sequence: Synthetic oligonucleotide
  Antisense strand to SEQ ID NO: 2394868
aagccuaucucugagcaac

SEQ ID NO: 2394870 - RNA, 19 nt, Artificial Sequence
  Description of Artificial Sequence: Synthetic oligonucleotide
  Sense strand starting at position 1840 of SEQ ID NO: 1886216
aggucugcagcccgaaaua

SEQ ID NO: 2394871 - RNA, 19 nt, Artificial Sequence
  Description of Artificial Sequence: Synthetic oligonucleotide
  Antisense strand to SEQ ID NO: 2394870
uauuucgggcugcagaccu

SEQ ID NO: 2394872 - RNA, 19 nt, Artificial Sequence
  Description of Artificial Sequence: Synthetic oligonucleotide
  Sense strand starting at position 2085 of SEQ ID NO: 1886216
ucaggaauggccugagcuu

SEQ ID NO: 2394873 - RNA, 19 nt, Artificial Sequence
  Description of Artificial Sequence: Synthetic oligonucleotide
  Antisense strand to SEQ ID NO: 2394872
aagcucaggccauuccuga

SEQ ID NO: 2394874 - RNA, 19 nt, Artificial Sequence
  Description of Artificial Sequence: Synthetic oligonucleotide
  Sense strand starting at position 2652 of SEQ ID NO: 1886216
acgugauuucugcggcgga

SEQ ID NO: 2394875 - RNA, 19 nt, Artificial Sequence
  Description of Artificial Sequence: Synthetic oligonucleotide
  Antisense strand to SEQ ID NO: 2394874
uccgccgcagaaaucacgu

SEQ ID NO: 2394876 - RNA, 19 nt, Artificial Sequence
  Description of Artificial Sequence: Synthetic oligonucleotide
  Sense strand starting at position 2653 of SEQ ID NO: 1886216
cgugauuucugcggcggau

SEQ ID NO: 2394877 - RNA, 19 nt, Artificial Sequence
  Description of Artificial Sequence: Synthetic oligonucleotide
  Antisense strand to SEQ ID NO: 2394876
auccgccgcagaaaucacg

SEQ ID NO: 2394878 - RNA, 19 nt, Artificial Sequence
  Description of Artificial Sequence: Synthetic oligonucleotide
  Sense strand starting at position 2691 of SEQ ID NO: 1886216
uuccguugaacuggucuaa

SEQ ID NO: 2394879 - RNA, 19 nt, Artificial Sequence
  Description of Artificial Sequence: Synthetic oligonucleotide
  Antisense strand to SEQ ID NO: 2394878
uuagaccaguucaacggaa

SEQ ID NO: 2394880 - RNA, 19 nt, Artificial Sequence
  Description of Artificial Sequence: Synthetic oligonucleotide
  Sense strand starting at position 2711 of SEQ ID NO: 1886216
uugggcgucagcucuuauu

SEQ ID NO: 2394881 - RNA, 19 nt, Artificial Sequence
  Description of Artificial Sequence: Synthetic oligonucleotide
  Antisense strand to SEQ ID NO: 2394880
aauaagagcugacgcccaa

SEQ ID NO: 2394882 - RNA, 19 nt, Artificial Sequence
  Description of Artificial Sequence: Synthetic oligonucleotide
  Sense strand starting at position 2730 of SEQ ID NO: 1886216
uuucgagcguguuugugaa

SEQ ID NO: 2394883 - RNA, 19 nt, Artificial Sequence
  Description of Artificial Sequence: Synthetic oligonucleotide
  Antisense strand to SEQ ID NO: 2394882
uucacaaacacgcucgaaa

SEQ ID NO: 2394884 - RNA, 19 nt, Artificial Sequence
  Description of Artificial Sequence: Synthetic oligonucleotide
  Sense strand starting at position 2732 of SEQ ID NO: 1886216
ucgagcguguuugugaaua

SEQ ID NO: 2394885 - RNA, 19 nt, Artificial Sequence
  Description of Artificial Sequence: Synthetic oligonucleotide
  Antisense strand to SEQ ID NO: 2394884
uauucacaaacacgcucga

SEQ ID NO: 2394886 - RNA, 19 nt, Artificial Sequence
  Description of Artificial Sequence: Synthetic oligonucleotide
  Sense strand starting at position 2838 of SEQ ID NO: 1886216
guacgugucuucguuugua

SEQ ID NO: 2394887 - RNA, 19 nt, Artificial Sequence
  Description of Artificial Sequence: Synthetic oligonucleotide
  Antisense strand to SEQ ID NO: 2394886
uacaaacgaagacacguac

SEQ ID NO: 2394888 - RNA, 19 nt, Artificial Sequence
  Description of Artificial Sequence: Synthetic oligonucleotide
  Sense strand starting at position 2840 of SEQ ID NO: 1886216
acgugucuucguuuguaua

SEQ ID NO: 2394889 - RNA, 19 nt, Artificial Sequence
  Description of Artificial Sequence: Synthetic oligonucleotide
  Antisense strand to SEQ ID NO: 2394888
uauacaaacgaagacacgu

SEQ ID NO: 2394890 - RNA, 19 nt, Artificial Sequence
  Description of Artificial Sequence: Synthetic oligonucleotide
  Sense strand starting at position 2841 of SEQ ID NO: 1886216
cgugucuucguuuguauac

SEQ ID NO: 2394891 - RNA, 19 nt, Artificial Sequence
  Description of Artificial Sequence: Synthetic oligonucleotide
  Antisense strand to SEQ ID NO: 2394890
guauacaaacgaagacacg

SEQ ID NO: 2394892 - RNA, 19 nt, Artificial Sequence
  Description of Artificial Sequence: Synthetic oligonucleotide
  Sense strand starting at position 2842 of SEQ ID NO: 1886216
gugucuucguuuguauaca

SEQ ID NO: 2394893 - RNA, 19 nt, Artificial Sequence
  Description of Artificial Sequence: Synthetic oligonucleotide
  Antisense strand to SEQ ID NO: 2394892
uguauacaaacgaagacac

SEQ ID NO: 2394894 - RNA, 19 nt, Artificial Sequence
  Description of Artificial Sequence: Synthetic oligonucleotide
  Sense strand starting at position 2843 of SEQ ID NO: 1886216
ugucuucguuuguauacaa

SEQ ID NO: 2394895 - RNA, 19 nt, Artificial Sequence
  Description of Artificial Sequence: Synthetic oligonucleotide
  Antisense strand to SEQ ID NO: 2394894
uuguauacaaacgaagaca

SEQ ID NO: 2394896 - RNA, 19 nt, Artificial Sequence
  Description of Artificial Sequence: Synthetic oligonucleotide
  Sense strand starting at position 2854 of SEQ ID NO: 1886216
guauacaacuacucuugua

SEQ ID NO: 2394897 - RNA, 19 nt, Artificial Sequence
  Description of Artificial Sequence: Synthetic oligonucleotide
  Antisense strand to SEQ ID NO: 2394896
uacaagaguaguuguauac

SEQ ID NO: 2394898 - RNA, 19 nt, Artificial Sequence
  Description of Artificial Sequence: Synthetic oligonucleotide
  Sense strand starting at position 2919 of SEQ ID NO: 1886216
uuguauuaccauugucaaa

SEQ ID NO: 2394899 - RNA, 19 nt, Artificial Sequence
  Description of Artificial Sequence: Synthetic oligonucleotide
  Antisense strand to SEQ ID NO: 2394898
uuugacaaugguaauacaa

SEQ ID NO: 2394900 - RNA, 19 nt, Artificial Sequence
  Description of Artificial Sequence: Synthetic oligonucleotide
  Sense strand starting at position 2944 of SEQ ID NO: 1886216
cuugaauuaucccaguguu

SEQ ID NO: 2394901 - RNA, 19 nt, Artificial Sequence
  Description of Artificial Sequence: Synthetic oligonucleotide
  Antisense strand to SEQ ID NO: 2394900
aacacugggauaauucaag

SEQ ID NO: 2394902 - RNA, 19 nt, Artificial Sequence
  Description of Artificial Sequence: Synthetic oligonucleotide
  Sense strand starting at position 3311 of SEQ ID NO: 1886216
ggucaugggccuuagcauu

SEQ ID NO: 2394903 - RNA, 19 nt, Artificial Sequence
  Description of Artificial Sequence: Synthetic oligonucleotide
  Antisense strand to SEQ ID NO: 2394902
aaugcuaaggcccaugacc

SEQ ID NO: 2394904 - RNA, 19 nt, Artificial Sequence
  Description of Artificial Sequence: Synthetic oligonucleotide
  Sense strand starting at position 3338 of SEQ ID NO: 1886216
ggguaucauugucauggca

SEQ ID NO: 2394905 - RNA, 19 nt, Artificial Sequence
  Description of Artificial Sequence: Synthetic oligonucleotide
  Antisense strand to SEQ ID NO: 2394904
ugccaugacaaugauaccc

SEQ ID NO: 2394906 - RNA, 19 nt, Artificial Sequence
  Description of Artificial Sequence: Synthetic oligonucleotide
  Sense strand starting at position 3340 of SEQ ID NO: 1886216
guaucauugucauggcaga

SEQ ID NO: 2394907 - RNA, 19 nt, Artificial Sequence
  Description of Artificial Sequence: Synthetic oligonucleotide
  Antisense strand to SEQ ID NO: 2394906
ucugccaugacaaugauac

SEQ ID NO: 2394908 - RNA, 19 nt, Artificial Sequence
  Description of Artificial Sequence: Synthetic oligonucleotide
  Sense strand starting at position 3374 of SEQ ID NO: 1886216
cuaccacauuguuugaaag

SEQ ID NO: 2394909 - RNA, 19 nt, Artificial Sequence
  Description of Artificial Sequence: Synthetic oligonucleotide
  Antisense strand to SEQ ID NO: 2394908
cuuucaaacaaugugguag

SEQ ID NO: 2394910 - RNA, 19 nt, Artificial Sequence
  Description of Artificial Sequence: Synthetic oligonucleotide
  Sense strand starting at position 3376 of SEQ ID NO: 1886216
accacauuguuugaaagua

SEQ ID NO: 2394911 - RNA, 19 nt, Artificial Sequence
  Description of Artificial Sequence: Synthetic oligonucleotide
  Antisense strand to SEQ ID NO: 2394910
uacuuucaaacaauguggu

SEQ ID NO: 2394912 - RNA, 19 nt, Artificial Sequence
  Description of Artificial Sequence: Synthetic oligonucleotide
  Sense strand starting at position 3445 of SEQ ID NO: 1886216
cauggaauuuaauggaugu

SEQ ID NO: 2394913 - RNA, 19 nt, Artificial Sequence
  Description of Artificial Sequence: Synthetic oligonucleotide
  Antisense strand to SEQ ID NO: 2394912
acauccauuaaauuccaug

SEQ ID NO: 2394914 - RNA, 19 nt, Artificial Sequence
  Description of Artificial Sequence: Synthetic oligonucleotide
  Sense strand starting at position 3709 of SEQ ID NO: 1886216
ugucuuauguaauugcaua

SEQ ID NO: 2394915 - RNA, 19 nt, Artificial Sequence
  Description of Artificial Sequence: Synthetic oligonucleotide
  Antisense strand to SEQ ID NO: 2394914
uaugcaauuacauaagaca

SEQ ID NO: 2394916 - RNA, 19 nt, Artificial Sequence
  Description of Artificial Sequence: Synthetic oligonucleotide
  Sense strand starting at position 547 of SEQ ID NO: 1886217
ccauguaaacaguaacgau

SEQ ID NO: 2394917 - RNA, 19 nt, Artificial Sequence
  Description of Artificial Sequence: Synthetic oligonucleotide
  Antisense strand to SEQ ID NO: 2394916
aucguuacuguuuacaugg

SEQ ID NO: 2394918 - RNA, 19 nt, Artificial Sequence
  Description of Artificial Sequence: Synthetic oligonucleotide
  Sense strand starting at position 556 of SEQ ID NO: 1886217
caguaacgaucaugaaugu

SEQ ID NO: 2394919 - RNA, 19 nt, Artificial Sequence
  Description of Artificial Sequence: Synthetic oligonucleotide
  Antisense strand to SEQ ID NO: 2394918
acauucaugaucguuacug

SEQ ID NO: 2394920 - RNA, 19 nt, Artificial Sequence
  Description of Artificial Sequence: Synthetic oligonucleotide
  Sense strand starting at position 676 of SEQ ID NO: 1886217
caaguaggcugaccugaau

SEQ ID NO: 2394921 - RNA, 19 nt, Artificial Sequence
  Description of Artificial Sequence: Synthetic oligonucleotide
  Antisense strand to SEQ ID NO: 2394920
auucaggucagccuacuug

SEQ ID NO: 2394922 - RNA, 19 nt, Artificial Sequence
  Description of Artificial Sequence: Synthetic oligonucleotide
  Sense strand starting at position 819 of SEQ ID NO: 1886217
aggccaugcucagucaauc

SEQ ID NO: 2394923 - RNA, 19 nt, Artificial Sequence
  Description of Artificial Sequence: Synthetic oligonucleotide
  Antisense strand to SEQ ID NO: 2394922
gauugacugagcauggccu

SEQ ID NO: 2394924 - RNA, 19 nt, Artificial Sequence
  Description of Artificial Sequence: Synthetic oligonucleotide
  Sense strand starting at position 825 of SEQ ID NO: 1886217
ugcucagucaaucagggaa

SEQ ID NO: 2394925 - RNA, 19 nt, Artificial Sequence
  Description of Artificial Sequence: Synthetic oligonucleotide
  Antisense strand to SEQ ID NO: 2394924
uucccugauugacugagca

SEQ ID NO: 2394926 - RNA, 19 nt, Artificial Sequence
  Description of Artificial Sequence: Synthetic oligonucleotide
  Sense strand starting at position 1008 of SEQ ID NO: 1886217
ugaccuuuagcgggacaca

SEQ ID NO: 2394927 - RNA, 19 nt, Artificial Sequence
  Description of Artificial Sequence: Synthetic oligonucleotide
  Antisense strand to SEQ ID NO: 2394926
ugugucccgcuaaagguca

SEQ ID NO: 2394928 - RNA, 19 nt, Artificial Sequence
  Description of Artificial Sequence: Synthetic oligonucleotide
  Sense strand starting at position 1164 of SEQ ID NO: 1886217
ggcccauugcucuacaggu

SEQ ID NO: 2394929 - RNA, 19 nt, Artificial Sequence
  Description of Artificial Sequence: Synthetic oligonucleotide
  Antisense strand to SEQ ID NO: 2394928
accuguagagcaaugggcc

SEQ ID NO: 2394930 - RNA, 19 nt, Artificial Sequence
  Description of Artificial Sequence: Synthetic oligonucleotide
  Sense strand starting at position 1365 of SEQ ID NO: 1886217
ugacuugugcacugagucu

SEQ ID NO: 2394931 - RNA, 19 nt, Artificial Sequence
  Description of Artificial Sequence: Synthetic oligonucleotide
  Antisense strand to SEQ ID NO: 2394930
agacucagugcacaaguca

SEQ ID NO: 2394932 - RNA, 19 nt, Artificial Sequence
  Description of Artificial Sequence: Synthetic oligonucleotide
  Sense strand starting at position 1398 of SEQ ID NO: 1886217
acugcauugaguugaagga

SEQ ID NO: 2394933 - RNA, 19 nt, Artificial Sequence
  Description of Artificial Sequence: Synthetic oligonucleotide
  Antisense strand to SEQ ID NO: 2394932
uccuucaacucaaugcagu

SEQ ID NO: 2394934 - RNA, 19 nt, Artificial Sequence
  Description of Artificial Sequence: Synthetic oligonucleotide
  Sense strand starting at position 1665 of SEQ ID NO: 1886217
ggcagaagagcucgcugaa

SEQ ID NO: 2394935 - RNA, 19 nt, Artificial Sequence
  Description of Artificial Sequence: Synthetic oligonucleotide
  Antisense strand to SEQ ID NO: 2394934
uucagcgagcucuucugcc

SEQ ID NO: 2394936 - RNA, 19 nt, Artificial Sequence
  Description of Artificial Sequence: Synthetic oligonucleotide
  Sense strand starting at position 1987 of SEQ ID NO: 1886217
gguucucaucaucgaucca

SEQ ID NO: 2394937 - RNA, 19 nt, Artificial Sequence
  Description of Artificial Sequence: Synthetic oligonucleotide
  Antisense strand to SEQ ID NO: 2394936
uggaucgaugaugagaacc

SEQ ID NO: 2394938 - RNA, 19 nt, Artificial Sequence
  Description of Artificial Sequence: Synthetic oligonucleotide
  Sense strand starting at position 2209 of SEQ ID NO: 1886217
aggacauguguccaaccau

SEQ ID NO: 2394939 - RNA, 19 nt, Artificial Sequence
  Description of Artificial Sequence: Synthetic oligonucleotide
  Antisense strand to SEQ ID NO: 2394938
augguuggacacauguccu

SEQ ID NO: 2394940 - RNA, 19 nt, Artificial Sequence
  Description of Artificial Sequence: Synthetic oligonucleotide
  Sense strand starting at position 2314 of SEQ ID NO: 1886217
gggaaacacugauguguca

SEQ ID NO: 2394941 - RNA, 19 nt, Artificial Sequence
  Description of Artificial Sequence: Synthetic oligonucleotide
  Antisense strand to SEQ ID NO: 2394940
ugacacaucaguguuuccc

SEQ ID NO: 2394942 - RNA, 19 nt, Artificial Sequence
  Description of Artificial Sequence: Synthetic oligonucleotide
  Sense strand starting at position 2321 of SEQ ID NO: 1886217
acugaugugucauagauca

SEQ ID NO: 2394943 - RNA, 19 nt, Artificial Sequence
  Description of Artificial Sequence: Synthetic oligonucleotide
  Antisense strand to SEQ ID NO: 2394942
ugaucuaugacacaucagu

SEQ ID NO: 2394944 - RNA, 19 nt, Artificial Sequence
  Description of Artificial Sequence: Synthetic oligonucleotide
  Sense strand starting at position 2490 of SEQ ID NO: 1886217
guaucuggauccuugggua

SEQ ID NO: 2394945 - RNA, 19 nt, Artificial Sequence
  Description of Artificial Sequence: Synthetic oligonucleotide
  Antisense strand to SEQ ID NO: 2394944
uacccaaggauccagauac

SEQ ID NO: 2394946 - RNA, 19 nt, Artificial Sequence
  Description of Artificial Sequence: Synthetic oligonucleotide
  Sense strand starting at position 2682 of SEQ ID NO: 1886217
ucuggugugucccaaucca

SEQ ID NO: 2394947 - RNA, 19 nt, Artificial Sequence
  Description of Artificial Sequence: Synthetic oligonucleotide
  Antisense strand to SEQ ID NO: 2394946
uggauugggacacaccaga

SEQ ID NO: 2394948 - RNA, 19 nt, Artificial Sequence
  Description of Artificial Sequence: Synthetic oligonucleotide
  Sense strand starting at position 2750 of SEQ ID NO: 1886217
ccgggagacauaugguauc

SEQ ID NO: 2394949 - RNA, 19 nt, Artificial Sequence
  Description of Artificial Sequence: Synthetic oligonucleotide
  Antisense strand to SEQ ID NO: 2394948
gauaccauaugucucccgg

SEQ ID NO: 2394950 - RNA, 19 nt, Artificial Sequence
  Description of Artificial Sequence: Synthetic oligonucleotide
  Sense strand starting at position 2763 of SEQ ID NO: 1886217
gguaucuucuccuuucuuu

SEQ ID NO: 2394951 - RNA, 19 nt, Artificial Sequence
  Description of Artificial Sequence: Synthetic oligonucleotide
  Antisense strand to SEQ ID NO: 2394950
aaagaaaggagaagauacc

SEQ ID NO: 2394952 - RNA, 19 nt, Artificial Sequence
  Description of Artificial Sequence: Synthetic oligonucleotide
  Sense strand starting at position 2820 of SEQ ID NO: 1886217
uuguccuaauggcugagaa

SEQ ID NO: 2394953 - RNA, 19 nt, Artificial Sequence
  Description of Artificial Sequence: Synthetic oligonucleotide
  Antisense strand to SEQ ID NO: 2394952
uucucagccauuaggacaa

SEQ ID NO: 2394954 - RNA, 19 nt, Artificial Sequence
  Description of Artificial Sequence: Synthetic oligonucleotide
  Sense strand starting at position 2821 of SEQ ID NO: 1886217
uguccuaauggcugagaag

SEQ ID NO: 2394955 - RNA, 19 nt, Artificial Sequence
  Description of Artificial Sequence: Synthetic oligonucleotide
  Antisense strand to SEQ ID NO: 2394954
cuucucagccauuaggaca

SEQ ID NO: 2394956 - RNA, 19 nt, Artificial Sequence
  Description of Artificial Sequence: Synthetic oligonucleotide
  Sense strand starting at position 3126 of SEQ ID NO: 1886217
cuggguuugcugcaaucca

SEQ ID NO: 2394957 - RNA, 19 nt, Artificial Sequence
  Description of Artificial Sequence: Synthetic oligonucleotide
  Antisense strand to SEQ ID NO: 2394956
uggauugcagcaaacccag

SEQ ID NO: 2394958 - RNA, 19 nt, Artificial Sequence
  Description of Artificial Sequence: Synthetic oligonucleotide
  Sense strand starting at position 3133 of SEQ ID NO: 1886217
ugcugcaauccaugaaucu

SEQ ID NO: 2394959 - RNA, 19 nt, Artificial Sequence
  Description of Artificial Sequence: Synthetic oligonucleotide
  Antisense strand to SEQ ID NO: 2394958
agauucauggauugcagca

SEQ ID NO: 2394960 - RNA, 19 nt, Artificial Sequence
  Description of Artificial Sequence: Synthetic oligonucleotide
  Sense strand starting at position 3254 of SEQ ID NO: 1886217
guggccuggccauguuaga

SEQ ID NO: 2394961 - RNA, 19 nt, Artificial Sequence
  Description of Artificial Sequence: Synthetic oligonucleotide
  Antisense strand to SEQ ID NO: 2394960
ucuaacauggccaggccac

SEQ ID NO: 2394962 - RNA, 19 nt, Artificial Sequence
  Description of Artificial Sequence: Synthetic oligonucleotide
  Sense strand starting at position 3330 of SEQ ID NO: 1886217
cccuuuccugccuggacaa

SEQ ID NO: 2394963 - RNA, 19 nt, Artificial Sequence
  Description of Artificial Sequence: Synthetic oligonucleotide
  Antisense strand to SEQ ID NO: 2394962
uuguccaggcaggaaaggg

SEQ ID NO: 2394964 - RNA, 19 nt, Artificial Sequence
  Description of Artificial Sequence: Synthetic oligonucleotide
  Sense strand starting at position 3387 of SEQ ID NO: 1886217
uaugucugauucccaagga

SEQ ID NO: 2394965 - RNA, 19 nt, Artificial Sequence
  Description of Artificial Sequence: Synthetic oligonucleotide
  Antisense strand to SEQ ID NO: 2394964
uccuugggaaucagacaua

SEQ ID NO: 2394966 - RNA, 19 nt, Artificial Sequence
  Description of Artificial Sequence: Synthetic oligonucleotide
  Sense strand starting at position 3388 of SEQ ID NO: 1886217
augucugauucccaaggaa

SEQ ID NO: 2394967 - RNA, 19 nt, Artificial Sequence
  Description of Artificial Sequence: Synthetic oligonucleotide
  Antisense strand to SEQ ID NO: 2394966
uuccuugggaaucagacau

SEQ ID NO: 2394968 - RNA, 19 nt, Artificial Sequence
  Description of Artificial Sequence: Synthetic oligonucleotide
  Sense strand starting at position 3538 of SEQ ID NO: 1886217
cucaccuaugcucgucaau

SEQ ID NO: 2394969 - RNA, 19 nt, Artificial Sequence
  Description of Artificial Sequence: Synthetic oligonucleotide
  Antisense strand to SEQ ID NO: 2394968
auugacgagcauaggugag

SEQ ID NO: 2394970 - RNA, 19 nt, Artificial Sequence
  Description of Artificial Sequence: Synthetic oligonucleotide
  Sense strand starting at position 3676 of SEQ ID NO: 1886217
gaaagucuggugugccuaa

SEQ ID NO: 2394971 - RNA, 19 nt, Artificial Sequence
  Description of Artificial Sequence: Synthetic oligonucleotide
  Antisense strand to SEQ ID NO: 2394970
uuaggcacaccagacuuuc

SEQ ID NO: 2394972 - RNA, 19 nt, Artificial Sequence
  Description of Artificial Sequence: Synthetic oligonucleotide
  Sense strand starting at position 3683 of SEQ ID NO: 1886217
uggugugccuaauagagga

SEQ ID NO: 2394973 - RNA, 19 nt, Artificial Sequence
  Description of Artificial Sequence: Synthetic oligonucleotide
  Antisense strand to SEQ ID NO: 2394972
uccucuauuaggcacacca

SEQ ID NO: 2394974 - RNA, 19 nt, Artificial Sequence
  Description of Artificial Sequence: Synthetic oligonucleotide
  Sense strand starting at position 257 of SEQ ID NO: 1886218
uggcaagucuuccuccaca

SEQ ID NO: 2394975 - RNA, 19 nt, Artificial Sequence
  Description of Artificial Sequence: Synthetic oligonucleotide
  Antisense strand to SEQ ID NO: 2394974
uguggaggaagacuugcca

SEQ ID NO: 2394976 - RNA, 19 nt, Artificial Sequence
  Description of Artificial Sequence: Synthetic oligonucleotide
  Sense strand starting at position 299 of SEQ ID NO: 1886218
gaagacauguguccaacca

SEQ ID NO: 2394977 - RNA, 19 nt, Artificial Sequence
  Description of Artificial Sequence: Synthetic oligonucleotide
  Antisense strand to SEQ ID NO: 2394976
ugguuggacacaugucuuc

SEQ ID NO: 2394978 - RNA, 19 nt, Artificial Sequence
  Description of Artificial Sequence: Synthetic oligonucleotide
  Sense strand starting at position 320 of SEQ ID NO: 1886218
ggcucagaccucuauacag

SEQ ID NO: 2394979 - RNA, 19 nt, Artificial Sequence
  Description of Artificial Sequence: Synthetic oligonucleotide
  Antisense strand to SEQ ID NO: 2394978
cuguauagaggucugagcc

SEQ ID NO: 2394980 - RNA, 19 nt, Artificial Sequence
  Description of Artificial Sequence: Synthetic oligonucleotide
  Sense strand starting at position 405 of SEQ ID NO: 1886218
gugaaacacugaugugucu

SEQ ID NO: 2394981 - RNA, 19 nt, Artificial Sequence
  Description of Artificial Sequence: Synthetic oligonucleotide
  Antisense strand to SEQ ID NO: 2394980
agacacaucaguguuucac

SEQ ID NO: 2394982 - RNA, 19 nt, Artificial Sequence
  Description of Artificial Sequence: Synthetic oligonucleotide
  Sense strand starting at position 412 of SEQ ID NO: 1886218
acugaugugucucagacgu

SEQ ID NO: 2394983 - RNA, 19 nt, Artificial Sequence
  Description of Artificial Sequence: Synthetic oligonucleotide
  Antisense strand to SEQ ID NO: 2394982
acgucugagacacaucagu

SEQ ID NO: 2394984 - RNA, 19 nt, Artificial Sequence
  Description of Artificial Sequence: Synthetic oligonucleotide
  Sense strand starting at position 884 of SEQ ID NO: 1886218
cggagaugaccucauggcu

SEQ ID NO: 2394985 - RNA, 19 nt, Artificial Sequence
  Description of Artificial Sequence: Synthetic oligonucleotide
  Antisense strand to SEQ ID NO: 2394984
agccaugaggucaucuccg

SEQ ID NO: 2394986 - RNA, 19 nt, Artificial Sequence
  Description of Artificial Sequence: Synthetic oligonucleotide
  Sense strand starting at position 907 of SEQ ID NO: 1886218
agcagucuggacugcaaau

SEQ ID NO: 2394987 - RNA, 19 nt, Artificial Sequence
  Description of Artificial Sequence: Synthetic oligonucleotide
  Antisense strand to SEQ ID NO: 2394986
auuugcaguccagacugcu

SEQ ID NO: 2394988 - RNA, 19 nt, Artificial Sequence
  Description of Artificial Sequence: Synthetic oligonucleotide
  Sense strand starting at position 1090 of SEQ ID NO: 1886218
ggagcuagucuugacccaa

SEQ ID NO: 2394989 - RNA, 19 nt, Artificial Sequence
  Description of Artificial Sequence: Synthetic oligonucleotide
  Antisense strand to SEQ ID NO: 2394988
uugggucaagacuagcucc

SEQ ID NO: 2394990 - RNA, 19 nt, Artificial Sequence
  Description of Artificial Sequence: Synthetic oligonucleotide
  Sense strand starting at position 1188 of SEQ ID NO: 1886218
cauugagggauauggguuu

SEQ ID NO: 2394991 - RNA, 19 nt, Artificial Sequence
  Description of Artificial Sequence: Synthetic oligonucleotide
  Antisense strand to SEQ ID NO: 2394990
aaacccauaucccucaaug

SEQ ID NO: 2394992 - RNA, 19 nt, Artificial Sequence
  Description of Artificial Sequence: Synthetic oligonucleotide
  Sense strand starting at position 1194 of SEQ ID NO: 1886218
gggauauggguuuggugca

SEQ ID NO: 2394993 - RNA, 19 nt, Artificial Sequence
  Description of Artificial Sequence: Synthetic oligonucleotide
  Antisense strand to SEQ ID NO: 2394992
ugcaccaaacccauauccc

SEQ ID NO: 2394994 - RNA, 19 nt, Artificial Sequence
  Description of Artificial Sequence: Synthetic oligonucleotide
  Sense strand starting at position 1195 of SEQ ID NO: 1886218
ggauauggguuuggugcaa

SEQ ID NO: 2394995 - RNA, 19 nt, Artificial Sequence
  Description of Artificial Sequence: Synthetic oligonucleotide
  Antisense strand to SEQ ID NO: 2394994
uugcaccaaacccauaucc

SEQ ID NO: 2394996 - RNA, 19 nt, Artificial Sequence
  Description of Artificial Sequence: Synthetic oligonucleotide
  Sense strand starting at position 1206 of SEQ ID NO: 1886218
uggugcaauccuugaagcu

SEQ ID NO: 2394997 - RNA, 19 nt, Artificial Sequence
  Description of Artificial Sequence: Synthetic oligonucleotide
  Antisense strand to SEQ ID NO: 2394996
agcuucaaggauugcacca

SEQ ID NO: 2394998 - RNA, 19 nt, Artificial Sequence
  Description of Artificial Sequence: Synthetic oligonucleotide
  Sense strand starting at position 1207 of SEQ ID NO: 1886218
ggugcaauccuugaagcuc

SEQ ID NO: 2394999 - RNA, 19 nt, Artificial Sequence
  Description of Artificial Sequence: Synthetic oligonucleotide
  Antisense strand to SEQ ID NO: 2394998
gagcuucaaggauugcacc

SEQ ID NO: 2395000 - RNA, 19 nt, Artificial Sequence
  Description of Artificial Sequence: Synthetic oligonucleotide
  Sense strand starting at position 1281 of SEQ ID NO: 1886218
ccaugagaugucuguggug

SEQ ID NO: 2395001 - RNA, 19 nt, Artificial Sequence
  Description of Artificial Sequence: Synthetic oligonucleotide
  Antisense strand to SEQ ID NO: 2395000
caccacagacaucucaugg

SEQ ID NO: 2395002 - RNA, 19 nt, Artificial Sequence
  Description of Artificial Sequence: Synthetic oligonucleotide
  Sense strand starting at position 1463 of SEQ ID NO: 1886218
gccuccuccuugugucaga

SEQ ID NO: 2395003 - RNA, 19 nt, Artificial Sequence
  Description of Artificial Sequence: Synthetic oligonucleotide
  Antisense strand to SEQ ID NO: 2395002
ucugacacaaggaggaggc

SEQ ID NO: 2395004 - RNA, 19 nt, Artificial Sequence
  Description of Artificial Sequence: Synthetic oligonucleotide
  Sense strand starting at position 1464 of SEQ ID NO: 1886218
ccuccuccuugugucagau

SEQ ID NO: 2395005 - RNA, 19 nt, Artificial Sequence
  Description of Artificial Sequence: Synthetic oligonucleotide
  Antisense strand to SEQ ID NO: 2395004
aucugacacaaggaggagg

SEQ ID NO: 2395006 - RNA, 19 nt, Artificial Sequence
  Description of Artificial Sequence: Synthetic oligonucleotide
  Sense strand starting at position 1474 of SEQ ID NO: 1886218
gugucagauucccaaggaa

SEQ ID NO: 2395007 - RNA, 19 nt, Artificial Sequence
  Description of Artificial Sequence: Synthetic oligonucleotide
  Antisense strand to SEQ ID NO: 2395006
uuccuugggaaucugacac

SEQ ID NO: 2395008 - RNA, 19 nt, Artificial Sequence
  Description of Artificial Sequence: Synthetic oligonucleotide
  Sense strand starting at position 1876 of SEQ ID NO: 1886218
ccuugugauucccagcauc

SEQ ID NO: 2395009 - RNA, 19 nt, Artificial Sequence
  Description of Artificial Sequence: Synthetic oligonucleotide
  Antisense strand to SEQ ID NO: 2395008
gaugcugggaaucacaagg

SEQ ID NO: 2395010 - RNA, 19 nt, Artificial Sequence
  Description of Artificial Sequence: Synthetic oligonucleotide
  Sense strand starting at position 2283 of SEQ ID NO: 1886218
ggacucaugugaugggauc

SEQ ID NO: 2395011 - RNA, 19 nt, Artificial Sequence
  Description of Artificial Sequence: Synthetic oligonucleotide
  Antisense strand to SEQ ID NO: 2395010
gaucccaucacaugagucc

SEQ ID NO: 2395012 - RNA, 19 nt, Artificial Sequence
  Description of Artificial Sequence: Synthetic oligonucleotide
  Sense strand starting at position 2294 of SEQ ID NO: 1886218
augggauccaugugaaacg

SEQ ID NO: 2395013 - RNA, 19 nt, Artificial Sequence
  Description of Artificial Sequence: Synthetic oligonucleotide
  Antisense strand to SEQ ID NO: 2395012
cguuucacauggaucccau

SEQ ID NO: 2395014 - RNA, 19 nt, Artificial Sequence
  Description of Artificial Sequence: Synthetic oligonucleotide
  Sense strand starting at position 2530 of SEQ ID NO: 1886218
caaggaagcuugcucugaa

SEQ ID NO: 2395015 - RNA, 19 nt, Artificial Sequence
  Description of Artificial Sequence: Synthetic oligonucleotide
  Antisense strand to SEQ ID NO: 2395014
uucagagcaagcuuccuug

SEQ ID NO: 2395016 - RNA, 19 nt, Artificial Sequence
  Description of Artificial Sequence: Synthetic oligonucleotide
  Sense strand starting at position 2531 of SEQ ID NO: 1886218
aaggaagcuugcucugaag

SEQ ID NO: 2395017 - RNA, 19 nt, Artificial Sequence
  Description of Artificial Sequence: Synthetic oligonucleotide
  Antisense strand to SEQ ID NO: 2395016
cuucagagcaagcuuccuu

SEQ ID NO: 2395018 - RNA, 19 nt, Artificial Sequence
  Description of Artificial Sequence: Synthetic oligonucleotide
  Sense strand starting at position 2533 of SEQ ID NO: 1886218
ggaagcuugcucugaagcu

SEQ ID NO: 2395019 - RNA, 19 nt, Artificial Sequence
  Description of Artificial Sequence: Synthetic oligonucleotide
  Antisense strand to SEQ ID NO: 2395018
agcuucagagcaagcuucc

SEQ ID NO: 2395020 - RNA, 19 nt, Artificial Sequence
  Description of Artificial Sequence: Synthetic oligonucleotide
  Sense strand starting at position 2534 of SEQ ID NO: 1886218
gaagcuugcucugaagcua

SEQ ID NO: 2395021 - RNA, 19 nt, Artificial Sequence
  Description of Artificial Sequence: Synthetic oligonucleotide
  Antisense strand to SEQ ID NO: 2395020
uagcuucagagcaagcuuc

SEQ ID NO: 2395022 - RNA, 19 nt, Artificial Sequence
  Description of Artificial Sequence: Synthetic oligonucleotide
  Sense strand starting at position 3505 of SEQ ID NO: 1886218
gggucaccaucucgaggaa

SEQ ID NO: 2395023 - RNA, 19 nt, Artificial Sequence
  Description of Artificial Sequence: Synthetic oligonucleotide
  Antisense strand to SEQ ID NO: 2395022
uuccucgagauggugaccc

SEQ ID NO: 2395024 - RNA, 19 nt, Artificial Sequence
  Description of Artificial Sequence: Synthetic oligonucleotide
  Sense strand starting at position 3634 of SEQ ID NO: 1886218
guggaauacuggcccauca

SEQ ID NO: 2395025 - RNA, 19 nt, Artificial Sequence
  Description of Artificial Sequence: Synthetic oligonucleotide
  Antisense strand to SEQ ID NO: 2395024
ugaugggccaguauuccac

SEQ ID NO: 2395026 - RNA, 19 nt, Artificial Sequence
  Description of Artificial Sequence: Synthetic oligonucleotide
  Sense strand starting at position 329 of SEQ ID NO: 1886219
guggacauguguccaaaug

SEQ ID NO: 2395027 - RNA, 19 nt, Artificial Sequence
  Description of Artificial Sequence: Synthetic oligonucleotide
  Antisense strand to SEQ ID NO: 2395026
cauuuggacacauguccac

SEQ ID NO: 2395028 - RNA, 19 nt, Artificial Sequence
  Description of Artificial Sequence: Synthetic oligonucleotide
  Sense strand starting at position 434 of SEQ ID NO: 1886219
gugaaacacugauguguca

SEQ ID NO: 2395029 - RNA, 19 nt, Artificial Sequence
  Description of Artificial Sequence: Synthetic oligonucleotide
  Antisense strand to SEQ ID NO: 2395028
ugacacaucaguguuucac

SEQ ID NO: 2395030 - RNA, 19 nt, Artificial Sequence
  Description of Artificial Sequence: Synthetic oligonucleotide
  Sense strand starting at position 441 of SEQ ID NO: 1886219
acugaugugucauggacac

SEQ ID NO: 2395031 - RNA, 19 nt, Artificial Sequence
  Description of Artificial Sequence: Synthetic oligonucleotide
  Antisense strand to SEQ ID NO: 2395030
guguccaugacacaucagu

SEQ ID NO: 2395032 - RNA, 19 nt, Artificial Sequence
  Description of Artificial Sequence: Synthetic oligonucleotide
  Sense strand starting at position 443 of SEQ ID NO: 1886219
ugaugugucauggacacag

SEQ ID NO: 2395033 - RNA, 19 nt, Artificial Sequence
  Description of Artificial Sequence: Synthetic oligonucleotide
  Antisense strand to SEQ ID NO: 2395032
cuguguccaugacacauca

SEQ ID NO: 2395034 - RNA, 19 nt, Artificial Sequence
  Description of Artificial Sequence: Synthetic oligonucleotide
  Sense strand starting at position 792 of SEQ ID NO: 1886219
ccucguguguucucugaua

SEQ ID NO: 2395035 - RNA, 19 nt, Artificial Sequence
  Description of Artificial Sequence: Synthetic oligonucleotide
  Antisense strand to SEQ ID NO: 2395034
uaucagagaacacacgagg

SEQ ID NO: 2395036 - RNA, 19 nt, Artificial Sequence
  Description of Artificial Sequence: Synthetic oligonucleotide
  Sense strand starting at position 794 of SEQ ID NO: 1886219
ucguguguucucugauaug

SEQ ID NO: 2395037 - RNA, 19 nt, Artificial Sequence
  Description of Artificial Sequence: Synthetic oligonucleotide
  Antisense strand to SEQ ID NO: 2395036
cauaucagagaacacacga

SEQ ID NO: 2395038 - RNA, 19 nt, Artificial Sequence
  Description of Artificial Sequence: Synthetic oligonucleotide
  Sense strand starting at position 1173 of SEQ ID NO: 1886219
ugggauggcccauagcuua

SEQ ID NO: 2395039 - RNA, 19 nt, Artificial Sequence
  Description of Artificial Sequence: Synthetic oligonucleotide
  Antisense strand to SEQ ID NO: 2395038
uaagcuaugggccauccca

SEQ ID NO: 2395040 - RNA, 19 nt, Artificial Sequence
  Description of Artificial Sequence: Synthetic oligonucleotide
  Sense strand starting at position 1355 of SEQ ID NO: 1886219
auccuagaggccugacuua

SEQ ID NO: 2395041 - RNA, 19 nt, Artificial Sequence
  Description of Artificial Sequence: Synthetic oligonucleotide
  Antisense strand to SEQ ID NO: 2395040
uaagucaggccucuaggau

SEQ ID NO: 2395042 - RNA, 19 nt, Artificial Sequence
  Description of Artificial Sequence: Synthetic oligonucleotide
  Sense strand starting at position 1367 of SEQ ID NO: 1886219
ugacuuaagcaccgaguuu

SEQ ID NO: 2395043 - RNA, 19 nt, Artificial Sequence
  Description of Artificial Sequence: Synthetic oligonucleotide
  Antisense strand to SEQ ID NO: 2395042
aaacucggugcuuaaguca

SEQ ID NO: 2395044 - RNA, 19 nt, Artificial Sequence
  Description of Artificial Sequence: Synthetic oligonucleotide
  Sense strand starting at position 1478 of SEQ ID NO: 1886219
ggguccgauuccuaaggaa

SEQ ID NO: 2395045 - RNA, 19 nt, Artificial Sequence
  Description of Artificial Sequence: Synthetic oligonucleotide
  Antisense strand to SEQ ID NO: 2395044
uuccuuaggaaucggaccc

SEQ ID NO: 2395046 - RNA, 19 nt, Artificial Sequence
  Description of Artificial Sequence: Synthetic oligonucleotide
  Sense strand starting at position 1533 of SEQ ID NO: 1886219
cgggucaguuccugaggaa

SEQ ID NO: 2395047 - RNA, 19 nt, Artificial Sequence
  Description of Artificial Sequence: Synthetic oligonucleotide
  Antisense strand to SEQ ID NO: 2395046
uuccucaggaacugacccg

SEQ ID NO: 2395048 - RNA, 19 nt, Artificial Sequence
  Description of Artificial Sequence: Synthetic oligonucleotide
  Sense strand starting at position 2162 of SEQ ID NO: 1886219
uggcaagucuuccuccaca

SEQ ID NO: 2395049 - RNA, 19 nt, Artificial Sequence
  Description of Artificial Sequence: Synthetic oligonucleotide
  Antisense strand to SEQ ID NO: 2395048
uguggaggaagacuugcca

SEQ ID NO: 2395050 - RNA, 19 nt, Artificial Sequence
  Description of Artificial Sequence: Synthetic oligonucleotide
  Sense strand starting at position 2204 of SEQ ID NO: 1886219
gaagacauguguccaacca

SEQ ID NO: 2395051 - RNA, 19 nt, Artificial Sequence
  Description of Artificial Sequence: Synthetic oligonucleotide
  Antisense strand to SEQ ID NO: 2395050
ugguuggacacaugucuuc

SEQ ID NO: 2395052 - RNA, 19 nt, Artificial Sequence
  Description of Artificial Sequence: Synthetic oligonucleotide
  Sense strand starting at position 2225 of SEQ ID NO: 1886219
ggcucagaccucuauacag

SEQ ID NO: 2395053 - RNA, 19 nt, Artificial Sequence
  Description of Artificial Sequence: Synthetic oligonucleotide
  Antisense strand to SEQ ID NO: 2395052
cuguauagaggucugagcc

SEQ ID NO: 2395054 - RNA, 19 nt, Artificial Sequence
  Description of Artificial Sequence: Synthetic oligonucleotide
  Sense strand starting at position 2308 of SEQ ID NO: 1886219
augugaaacacugaugugu

SEQ ID NO: 2395055 - RNA, 19 nt, Artificial Sequence
  Description of Artificial Sequence: Synthetic oligonucleotide
  Antisense strand to SEQ ID NO: 2395054
acacaucaguguuucacau

SEQ ID NO: 2395056 - RNA, 19 nt, Artificial Sequence
  Description of Artificial Sequence: Synthetic oligonucleotide
  Sense strand starting at position 2310 of SEQ ID NO: 1886219
gugaaacacugaugugucu

SEQ ID NO: 2395057 - RNA, 19 nt, Artificial Sequence
  Description of Artificial Sequence: Synthetic oligonucleotide
  Antisense strand to SEQ ID NO: 2395056
agacacaucaguguuucac

SEQ ID NO: 2395058 - RNA, 19 nt, Artificial Sequence
  Description of Artificial Sequence: Synthetic oligonucleotide
  Sense strand starting at position 2317 of SEQ ID NO: 1886219
acugaugugucucagacgu

SEQ ID NO: 2395059 - RNA, 19 nt, Artificial Sequence
  Description of Artificial Sequence: Synthetic oligonucleotide
  Antisense strand to SEQ ID NO: 2395058
acgucugagacacaucagu

SEQ ID NO: 2395060 - RNA, 19 nt, Artificial Sequence
  Description of Artificial Sequence: Synthetic oligonucleotide
  Sense strand starting at position 2789 of SEQ ID NO: 1886219
cggagaugaccucauggcu

SEQ ID NO: 2395061 - RNA, 19 nt, Artificial Sequence
  Description of Artificial Sequence: Synthetic oligonucleotide
  Antisense strand to SEQ ID NO: 2395060
agccaugaggucaucuccg

SEQ ID NO: 2395062 - RNA, 19 nt, Artificial Sequence
  Description of Artificial Sequence: Synthetic oligonucleotide
  Sense strand starting at position 2812 of SEQ ID NO: 1886219
agcagucuggacugcaaau

SEQ ID NO: 2395063 - RNA, 19 nt, Artificial Sequence
  Description of Artificial Sequence: Synthetic oligonucleotide
  Antisense strand to SEQ ID NO: 2395062
auuugcaguccagacugcu

SEQ ID NO: 2395064 - RNA, 19 nt, Artificial Sequence
  Description of Artificial Sequence: Synthetic oligonucleotide
  Sense strand starting at position 2995 of SEQ ID NO: 1886219
ggagcuagucuugacccaa

SEQ ID NO: 2395065 - RNA, 19 nt, Artificial Sequence
  Description of Artificial Sequence: Synthetic oligonucleotide
  Antisense strand to SEQ ID NO: 2395064
uugggucaagacuagcucc

SEQ ID NO: 2395066 - RNA, 19 nt, Artificial Sequence
  Description of Artificial Sequence: Synthetic oligonucleotide
  Sense strand starting at position 3093 of SEQ ID NO: 1886219
cauugagggauauggguuu

SEQ ID NO: 2395067 - RNA, 19 nt, Artificial Sequence
  Description of Artificial Sequence: Synthetic oligonucleotide
  Antisense strand to SEQ ID NO: 2395066
aaacccauaucccucaaug

SEQ ID NO: 2395068 - RNA, 19 nt, Artificial Sequence
  Description of Artificial Sequence: Synthetic oligonucleotide
  Sense strand starting at position 3099 of SEQ ID NO: 1886219
gggauauggguuuggugca

SEQ ID NO: 2395069 - RNA, 19 nt, Artificial Sequence
  Description of Artificial Sequence: Synthetic oligonucleotide
  Antisense strand to SEQ ID NO: 2395068
ugcaccaaacccauauccc

SEQ ID NO: 2395070 - RNA, 19 nt, Artificial Sequence
  Description of Artificial Sequence: Synthetic oligonucleotide
  Sense strand starting at position 3100 of SEQ ID NO: 1886219
ggauauggguuuggugcaa

SEQ ID NO: 2395071 - RNA, 19 nt, Artificial Sequence
  Description of Artificial Sequence: Synthetic oligonucleotide
  Antisense strand to SEQ ID NO: 2395070
uugcaccaaacccauaucc

SEQ ID NO: 2395072 - RNA, 19 nt, Artificial Sequence
  Description of Artificial Sequence: Synthetic oligonucleotide
  Sense strand starting at position 3111 of SEQ ID NO: 1886219
uggugcaauccuugaagcu

SEQ ID NO: 2395073 - RNA, 19 nt, Artificial Sequence
  Description of Artificial Sequence: Synthetic oligonucleotide
  Antisense strand to SEQ ID NO: 2395072
agcuucaaggauugcacca

SEQ ID NO: 2395074 - RNA, 19 nt, Artificial Sequence
  Description of Artificial Sequence: Synthetic oligonucleotide
  Sense strand starting at position 3112 of SEQ ID NO: 1886219
ggugcaauccuugaagcuc

SEQ ID NO: 2395075 - RNA, 19 nt, Artificial Sequence
  Description of Artificial Sequence: Synthetic oligonucleotide
  Antisense strand to SEQ ID NO: 2395074
gagcuucaaggauugcacc

SEQ ID NO: 2395076 - RNA, 19 nt, Artificial Sequence
  Description of Artificial Sequence: Synthetic oligonucleotide
  Sense strand starting at position 3186 of SEQ ID NO: 1886219
ccaugagaugucuguggug

SEQ ID NO: 2395077 - RNA, 19 nt, Artificial Sequence
  Description of Artificial Sequence: Synthetic oligonucleotide
  Antisense strand to SEQ ID NO: 2395076
caccacagacaucucaugg

SEQ ID NO: 2395078 - RNA, 19 nt, Artificial Sequence
  Description of Artificial Sequence: Synthetic oligonucleotide
  Sense strand starting at position 3368 of SEQ ID NO: 1886219
gccuccuccuugugucaga

SEQ ID NO: 2395079 - RNA, 19 nt, Artificial Sequence
  Description of Artificial Sequence: Synthetic oligonucleotide
  Antisense strand to SEQ ID NO: 2395078
ucugacacaaggaggaggc

SEQ ID NO: 2395080 - RNA, 19 nt, Artificial Sequence
  Description of Artificial Sequence: Synthetic oligonucleotide
  Sense strand starting at position 3369 of SEQ ID NO: 1886219
ccuccuccuugugucagau

SEQ ID NO: 2395081 - RNA, 19 nt, Artificial Sequence
  Description of Artificial Sequence: Synthetic oligonucleotide
  Antisense strand to SEQ ID NO: 2395080
aucugacacaaggaggagg

SEQ ID NO: 2395082 - RNA, 19 nt, Artificial Sequence
  Description of Artificial Sequence: Synthetic oligonucleotide
  Sense strand starting at position 3379 of SEQ ID NO: 1886219
gugucagauucccaaggaa

SEQ ID NO: 2395083 - RNA, 19 nt, Artificial Sequence
  Description of Artificial Sequence: Synthetic oligonucleotide
  Antisense strand to SEQ ID NO: 2395082
uuccuugggaaucugacac

SEQ ID NO: 2395084 - RNA, 19 nt, Artificial Sequence
  Description of Artificial Sequence: Synthetic oligonucleotide
  Sense strand starting at position 3781 of SEQ ID NO: 1886219
ccuugugauucccagcauc

SEQ ID NO: 2395085 - RNA, 19 nt, Artificial Sequence
  Description of Artificial Sequence: Synthetic oligonucleotide
  Antisense strand to SEQ ID NO: 2395084
gaugcugggaaucacaagg

SEQ ID NO: 2395086 - RNA, 19 nt, Artificial Sequence
  Description of Artificial Sequence: Synthetic oligonucleotide
  Sense strand starting at position 180 of SEQ ID NO: 1886220
ccaggaagugcccaaucuu

SEQ ID NO: 2395087 - RNA, 19 nt, Artificial Sequence
  Description of Artificial Sequence: Synthetic oligonucleotide
  Antisense strand to SEQ ID NO: 2395086
aagauugggcacuuccugg

SEQ ID NO: 2395088 - RNA, 19 nt, Artificial Sequence
  Description of Artificial Sequence: Synthetic oligonucleotide
  Sense strand starting at position 407 of SEQ ID NO: 1886220
agaacacuggcuugucaca

SEQ ID NO: 2395089 - RNA, 19 nt, Artificial Sequence
  Description of Artificial Sequence: Synthetic oligonucleotide
  Antisense strand to SEQ ID NO: 2395088
ugugacaagccaguguucu

SEQ ID NO: 2395090 - RNA, 19 nt, Artificial Sequence
  Description of Artificial Sequence: Synthetic oligonucleotide
  Sense strand starting at position 409 of SEQ ID NO: 1886220
aacacuggcuugucacaga

SEQ ID NO: 2395091 - RNA, 19 nt, Artificial Sequence
  Description of Artificial Sequence: Synthetic oligonucleotide
  Antisense strand to SEQ ID NO: 2395090
ucugugacaagccaguguu

SEQ ID NO: 2395092 - RNA, 19 nt, Artificial Sequence
  Description of Artificial Sequence: Synthetic oligonucleotide
  Sense strand starting at position 848 of SEQ ID NO: 1886220
gacacauggugacuucuuu

SEQ ID NO: 2395093 - RNA, 19 nt, Artificial Sequence
  Description of Artificial Sequence: Synthetic oligonucleotide
  Antisense strand to SEQ ID NO: 2395092
aaagaagucaccauguguc

SEQ ID NO: 2395094 - RNA, 19 nt, Artificial Sequence
  Description of Artificial Sequence: Synthetic oligonucleotide
  Sense strand starting at position 1055 of SEQ ID NO: 1886220
acugaucccuuggccuaaa

SEQ ID NO: 2395095 - RNA, 19 nt, Artificial Sequence
  Description of Artificial Sequence: Synthetic oligonucleotide
  Antisense strand to SEQ ID NO: 2395094
uuuaggccaagggaucagu

SEQ ID NO: 2395096 - RNA, 19 nt, Artificial Sequence
  Description of Artificial Sequence: Synthetic oligonucleotide
  Sense strand starting at position 1119 of SEQ ID NO: 1886220
agagcucagccuugaccaa

SEQ ID NO: 2395097 - RNA, 19 nt, Artificial Sequence
  Description of Artificial Sequence: Synthetic oligonucleotide
  Antisense strand to SEQ ID NO: 2395096
uuggucaaggcugagcucu

SEQ ID NO: 2395098 - RNA, 19 nt, Artificial Sequence
  Description of Artificial Sequence: Synthetic oligonucleotide
  Sense strand starting at position 1227 of SEQ ID NO: 1886220
ggcuauaaauccuguguga

SEQ ID NO: 2395099 - RNA, 19 nt, Artificial Sequence
  Description of Artificial Sequence: Synthetic oligonucleotide
  Antisense strand to SEQ ID NO: 2395098
ucacacaggauuuauagcc

SEQ ID NO: 2395100 - RNA, 19 nt, Artificial Sequence
  Description of Artificial Sequence: Synthetic oligonucleotide
  Sense strand starting at position 1238 of SEQ ID NO: 1886220
cugugugauccuuaaauau

SEQ ID NO: 2395101 - RNA, 19 nt, Artificial Sequence
  Description of Artificial Sequence: Synthetic oligonucleotide
  Antisense strand to SEQ ID NO: 2395100
auauuuaaggaucacacag

SEQ ID NO: 2395102 - RNA, 19 nt, Artificial Sequence
  Description of Artificial Sequence: Synthetic oligonucleotide
  Sense strand starting at position 1365 of SEQ ID NO: 1886220
gucaguccucgaggccaga

SEQ ID NO: 2395103 - RNA, 19 nt, Artificial Sequence
  Description of Artificial Sequence: Synthetic oligonucleotide
  Antisense strand to SEQ ID NO: 2395102
ucuggccucgaggacugac

SEQ ID NO: 2395104 - RNA, 19 nt, Artificial Sequence
  Description of Artificial Sequence: Synthetic oligonucleotide
  Sense strand starting at position 1414 of SEQ ID NO: 1886220
ccugcaugagauugaagga

SEQ ID NO: 2395105 - RNA, 19 nt, Artificial Sequence
  Description of Artificial Sequence: Synthetic oligonucleotide
  Antisense strand to SEQ ID NO: 2395104
uccuucaaucucaugcagg

SEQ ID NO: 2395106 - RNA, 19 nt, Artificial Sequence
  Description of Artificial Sequence: Synthetic oligonucleotide
  Sense strand starting at position 1861 of SEQ ID NO: 1886220
uuggucauuccagggaacu

SEQ ID NO: 2395107 - RNA, 19 nt, Artificial Sequence
  Description of Artificial Sequence: Synthetic oligonucleotide
  Antisense strand to SEQ ID NO: 2395106
aguucccuggaaugaccaa

SEQ ID NO: 2395108 - RNA, 19 nt, Artificial Sequence
  Description of Artificial Sequence: Synthetic oligonucleotide
  Sense strand starting at position 1862 of SEQ ID NO: 1886220
uggucauuccagggaacuc

SEQ ID NO: 2395109 - RNA, 19 nt, Artificial Sequence
  Description of Artificial Sequence: Synthetic oligonucleotide
  Antisense strand to SEQ ID NO: 2395108
gaguucccuggaaugacca

SEQ ID NO: 2395110 - RNA, 19 nt, Artificial Sequence
  Description of Artificial Sequence: Synthetic oligonucleotide
  Sense strand starting at position 2307 of SEQ ID NO: 1886220
uggucauuuacgcgaggaa

SEQ ID NO: 2395111 - RNA, 19 nt, Artificial Sequence
  Description of Artificial Sequence: Synthetic oligonucleotide
  Antisense strand to SEQ ID NO: 2395110
uuccucgcguaaaugacca

SEQ ID NO: 2395112 - RNA, 19 nt, Artificial Sequence
  Description of Artificial Sequence: Synthetic oligonucleotide
  Sense strand starting at position 2364 of SEQ ID NO: 1886220
gucacaggguucgagcaaa

SEQ ID NO: 2395113 - RNA, 19 nt, Artificial Sequence
  Description of Artificial Sequence: Synthetic oligonucleotide
  Antisense strand to SEQ ID NO: 2395112
uuugcucgaacccugugac

SEQ ID NO: 2395114 - RNA, 19 nt, Artificial Sequence
  Description of Artificial Sequence: Synthetic oligonucleotide
  Sense strand starting at position 2446 of SEQ ID NO: 1886220
gcucgaaucugggcugcau

SEQ ID NO: 2395115 - RNA, 19 nt, Artificial Sequence
  Description of Artificial Sequence: Synthetic oligonucleotide
  Antisense strand to SEQ ID NO: 2395114
augcagcccagauucgagc

SEQ ID NO: 2395116 - RNA, 19 nt, Artificial Sequence
  Description of Artificial Sequence: Synthetic oligonucleotide
  Sense strand starting at position 2793 of SEQ ID NO: 1886220
ucagaaguagccugggcau

SEQ ID NO: 2395117 - RNA, 19 nt, Artificial Sequence
  Description of Artificial Sequence: Synthetic oligonucleotide
  Antisense strand to SEQ ID NO: 2395116
augcccaggcuacuucuga

SEQ ID NO: 2395118 - RNA, 19 nt, Artificial Sequence
  Description of Artificial Sequence: Synthetic oligonucleotide
  Sense strand starting at position 2808 of SEQ ID NO: 1886220
gcaucaaauugccaggaca

SEQ ID NO: 2395119 - RNA, 19 nt, Artificial Sequence
  Description of Artificial Sequence: Synthetic oligonucleotide
  Antisense strand to SEQ ID NO: 2395118
uguccuggcaauuugaugc

SEQ ID NO: 2395120 - RNA, 19 nt, Artificial Sequence
  Description of Artificial Sequence: Synthetic oligonucleotide
  Sense strand starting at position 2876 of SEQ ID NO: 1886220
cuccacuuccgguagggau

SEQ ID NO: 2395121 - RNA, 19 nt, Artificial Sequence
  Description of Artificial Sequence: Synthetic oligonucleotide
  Antisense strand to SEQ ID NO: 2395120
aucccuaccggaaguggag

SEQ ID NO: 2395122 - RNA, 19 nt, Artificial Sequence
  Description of Artificial Sequence: Synthetic oligonucleotide
  Sense strand starting at position 2935 of SEQ ID NO: 1886220
ccacgauucccagggccaa

SEQ ID NO: 2395123 - RNA, 19 nt, Artificial Sequence
  Description of Artificial Sequence: Synthetic oligonucleotide
  Antisense strand to SEQ ID NO: 2395122
uuggcccugggaaucgugg

SEQ ID NO: 2395124 - RNA, 19 nt, Artificial Sequence
  Description of Artificial Sequence: Synthetic oligonucleotide
  Sense strand starting at position 2936 of SEQ ID NO: 1886220
cacgauucccagggccaaa

SEQ ID NO: 2395125 - RNA, 19 nt, Artificial Sequence
  Description of Artificial Sequence: Synthetic oligonucleotide
  Antisense strand to SEQ ID NO: 2395124
uuuggcccugggaaucgug

SEQ ID NO: 2395126 - RNA, 19 nt, Artificial Sequence
  Description of Artificial Sequence: Synthetic oligonucleotide
  Sense strand starting at position 3037 of SEQ ID NO: 1886220
gggauagcccauugcucaa

SEQ ID NO: 2395127 - RNA, 19 nt, Artificial Sequence
  Description of Artificial Sequence: Synthetic oligonucleotide
  Antisense strand to SEQ ID NO: 2395126
uugagcaaugggcuauccc

SEQ ID NO: 2395128 - RNA, 19 nt, Artificial Sequence
  Description of Artificial Sequence: Synthetic oligonucleotide
  Sense strand starting at position 3291 of SEQ ID NO: 1886220
gucaauaaguccugugcga

SEQ ID NO: 2395129 - RNA, 19 nt, Artificial Sequence
  Description of Artificial Sequence: Synthetic oligonucleotide
  Antisense strand to SEQ ID NO: 2395128
ucgcacaggacuuauugac

SEQ ID NO: 2395130 - RNA, 19 nt, Artificial Sequence
  Description of Artificial Sequence: Synthetic oligonucleotide
  Sense strand starting at position 3293 of SEQ ID NO: 1886220
caauaaguccugugcgauc

SEQ ID NO: 2395131 - RNA, 19 nt, Artificial Sequence
  Description of Artificial Sequence: Synthetic oligonucleotide
  Antisense strand to SEQ ID NO: 2395130
gaucgcacaggacuuauug

SEQ ID NO: 2395132 - RNA, 19 nt, Artificial Sequence
  Description of Artificial Sequence: Synthetic oligonucleotide
  Sense strand starting at position 3302 of SEQ ID NO: 1886220
cugugcgauccuuaaaucu

SEQ ID NO: 2395133 - RNA, 19 nt, Artificial Sequence
  Description of Artificial Sequence: Synthetic oligonucleotide
  Antisense strand to SEQ ID NO: 2395132
agauuuaaggaucgcacag

SEQ ID NO: 2395134 - RNA, 19 nt, Artificial Sequence
  Description of Artificial Sequence: Synthetic oligonucleotide
  Sense strand starting at position 3395 of SEQ ID NO: 1886220
acuguauuggguugaagga

SEQ ID NO: 2395135 - RNA, 19 nt, Artificial Sequence
  Description of Artificial Sequence: Synthetic oligonucleotide
  Antisense strand to SEQ ID NO: 2395134
uccuucaacccaauacagu

SEQ ID NO: 2395136 - RNA, 19 nt, Artificial Sequence
  Description of Artificial Sequence: Synthetic oligonucleotide
  Sense strand starting at position 3462 of SEQ ID NO: 1886220
gcguccuucuugggaucaa

SEQ ID NO: 2395137 - RNA, 19 nt, Artificial Sequence
  Description of Artificial Sequence: Synthetic oligonucleotide
  Antisense strand to SEQ ID NO: 2395136
uugaucccaagaaggacgc

SEQ ID NO: 2395138 - RNA, 19 nt, Artificial Sequence
  Description of Artificial Sequence: Synthetic oligonucleotide
  Sense strand starting at position 3463 of SEQ ID NO: 1886220
cguccuucuugggaucaau

SEQ ID NO: 2395139 - RNA, 19 nt, Artificial Sequence
  Description of Artificial Sequence: Synthetic oligonucleotide
  Antisense strand to SEQ ID NO: 2395138
auugaucccaagaaggacg

SEQ ID NO: 2395140 - RNA, 19 nt, Artificial Sequence
  Description of Artificial Sequence: Synthetic oligonucleotide
  Sense strand starting at position 3473 of SEQ ID NO: 1886220
gggaucaauuaacaaggaa

SEQ ID NO: 2395141 - RNA, 19 nt, Artificial Sequence
  Description of Artificial Sequence: Synthetic oligonucleotide
  Antisense strand to SEQ ID NO: 2395140
uuccuuguuaauugauccc

SEQ ID NO: 2395142 - RNA, 19 nt, Artificial Sequence
  Description of Artificial Sequence: Synthetic oligonucleotide
  Sense strand starting at position 3533 of SEQ ID NO: 1886220
aggucagcucccuaaggaa

SEQ ID NO: 2395143 - RNA, 19 nt, Artificial Sequence
  Description of Artificial Sequence: Synthetic oligonucleotide
  Antisense strand to SEQ ID NO: 2395142
uuccuuagggagcugaccu

SEQ ID NO: 2395144 - RNA, 19 nt, Artificial Sequence
  Description of Artificial Sequence: Synthetic oligonucleotide
  Sense strand starting at position 404 of SEQ ID NO: 1886221
gggauacccaugugaugga

SEQ ID NO: 2395145 - RNA, 19 nt, Artificial Sequence
  Description of Artificial Sequence: Synthetic oligonucleotide
  Antisense strand to SEQ ID NO: 2395144
uccaucacauggguauccc

SEQ ID NO: 2395146 - RNA, 19 nt, Artificial Sequence
  Description of Artificial Sequence: Synthetic oligonucleotide
  Sense strand starting at position 838 of SEQ ID NO: 1886221
ggucccacuuggucaauaa

SEQ ID NO: 2395147 - RNA, 19 nt, Artificial Sequence
  Description of Artificial Sequence: Synthetic oligonucleotide
  Antisense strand to SEQ ID NO: 2395146
uuauugaccaagugggacc

SEQ ID NO: 2395148 - RNA, 19 nt, Artificial Sequence
  Description of Artificial Sequence: Synthetic oligonucleotide
  Sense strand starting at position 1381 of SEQ ID NO: 1886221
cgcugaguuucagcuggga

SEQ ID NO: 2395149 - RNA, 19 nt, Artificial Sequence
  Description of Artificial Sequence: Synthetic oligonucleotide
  Antisense strand to SEQ ID NO: 2395148
ucccagcugaaacucagcg

SEQ ID NO: 2395150 - RNA, 19 nt, Artificial Sequence
  Description of Artificial Sequence: Synthetic oligonucleotide
  Sense strand starting at position 1402 of SEQ ID NO: 1886221
ugcucuauguugggcugaa

SEQ ID NO: 2395151 - RNA, 19 nt, Artificial Sequence
  Description of Artificial Sequence: Synthetic oligonucleotide
  Antisense strand to SEQ ID NO: 2395150
uucagcccaacauagagca

SEQ ID NO: 2395152 - RNA, 19 nt, Artificial Sequence
  Description of Artificial Sequence: Synthetic oligonucleotide
  Sense strand starting at position 1403 of SEQ ID NO: 1886221
gcucuauguugggcugaag

SEQ ID NO: 2395153 - RNA, 19 nt, Artificial Sequence
  Description of Artificial Sequence: Synthetic oligonucleotide
  Antisense strand to SEQ ID NO: 2395152
cuucagcccaacauagagc

SEQ ID NO: 2395154 - RNA, 19 nt, Artificial Sequence
  Description of Artificial Sequence: Synthetic oligonucleotide
  Sense strand starting at position 1472 of SEQ ID NO: 1886221
gcaugcuccuagggucaga

SEQ ID NO: 2395155 - RNA, 19 nt, Artificial Sequence
  Description of Artificial Sequence: Synthetic oligonucleotide
  Antisense strand to SEQ ID NO: 2395154
ucugacccuaggagcaugc

SEQ ID NO: 2395156 - RNA, 19 nt, Artificial Sequence
  Description of Artificial Sequence: Synthetic oligonucleotide
  Sense strand starting at position 2011 of SEQ ID NO: 1886221
gaucaaucaccucgugcau

SEQ ID NO: 2395157 - RNA, 19 nt, Artificial Sequence
  Description of Artificial Sequence: Synthetic oligonucleotide
  Antisense strand to SEQ ID NO: 2395156
augcacgaggugauugauc

SEQ ID NO: 2395158 - RNA, 19 nt, Artificial Sequence
  Description of Artificial Sequence: Synthetic oligonucleotide
  Sense strand starting at position 2268 of SEQ ID NO: 1886221
cuuaucuuccacggacaca

SEQ ID NO: 2395159 - RNA, 19 nt, Artificial Sequence
  Description of Artificial Sequence: Synthetic oligonucleotide
  Antisense strand to SEQ ID NO: 2395158
uguguccguggaagauaag

SEQ ID NO: 2395160 - RNA, 19 nt, Artificial Sequence
  Description of Artificial Sequence: Synthetic oligonucleotide
  Sense strand starting at position 2287 of SEQ ID NO: 1886221
ugugaugagagccauguga

SEQ ID NO: 2395161 - RNA, 19 nt, Artificial Sequence
  Description of Artificial Sequence: Synthetic oligonucleotide
  Antisense strand to SEQ ID NO: 2395160
ucacauggcucucaucaca

SEQ ID NO: 2395162 - RNA, 19 nt, Artificial Sequence
  Description of Artificial Sequence: Synthetic oligonucleotide
  Sense strand starting at position 2289 of SEQ ID NO: 1886221
ugaugagagccaugugaaa

SEQ ID NO: 2395163 - RNA, 19 nt, Artificial Sequence
  Description of Artificial Sequence: Synthetic oligonucleotide
  Antisense strand to SEQ ID NO: 2395162
uuucacauggcucucauca

SEQ ID NO: 2395164 - RNA, 19 nt, Artificial Sequence
  Description of Artificial Sequence: Synthetic oligonucleotide
  Sense strand starting at position 2291 of SEQ ID NO: 1886221
augagagccaugugaaaua

SEQ ID NO: 2395165 - RNA, 19 nt, Artificial Sequence
  Description of Artificial Sequence: Synthetic oligonucleotide
  Antisense strand to SEQ ID NO: 2395164
uauuucacauggcucucau

SEQ ID NO: 2395166 - RNA, 19 nt, Artificial Sequence
  Description of Artificial Sequence: Synthetic oligonucleotide
  Sense strand starting at position 2380 of SEQ ID NO: 1886221
guucauugggcuugggaua

SEQ ID NO: 2395167 - RNA, 19 nt, Artificial Sequence
  Description of Artificial Sequence: Synthetic oligonucleotide
  Antisense strand to SEQ ID NO: 2395166
uaucccaagcccaaugaac

SEQ ID NO: 2395168 - RNA, 19 nt, Artificial Sequence
  Description of Artificial Sequence: Synthetic oligonucleotide
  Sense strand starting at position 2506 of SEQ ID NO: 1886221
ggucauuagccaggucaug

SEQ ID NO: 2395169 - RNA, 19 nt, Artificial Sequence
  Description of Artificial Sequence: Synthetic oligonucleotide
  Antisense strand to SEQ ID NO: 2395168
caugaccuggcuaaugacc

SEQ ID NO: 2395170 - RNA, 19 nt, Artificial Sequence
  Description of Artificial Sequence: Synthetic oligonucleotide
  Sense strand starting at position 2624 of SEQ ID NO: 1886221
cuaagcaugcacuggaaau

SEQ ID NO: 2395171 - RNA, 19 nt, Artificial Sequence
  Description of Artificial Sequence: Synthetic oligonucleotide
  Antisense strand to SEQ ID NO: 2395170
auuuccagugcaugcuuag

SEQ ID NO: 2395172 - RNA, 19 nt, Artificial Sequence
  Description of Artificial Sequence: Synthetic oligonucleotide
  Sense strand starting at position 2638 of SEQ ID NO: 1886221
gaaaucacagcuugaguca

SEQ ID NO: 2395173 - RNA, 19 nt, Artificial Sequence
  Description of Artificial Sequence: Synthetic oligonucleotide
  Antisense strand to SEQ ID NO: 2395172
ugacucaagcugugauuuc

SEQ ID NO: 2395174 - RNA, 19 nt, Artificial Sequence
  Description of Artificial Sequence: Synthetic oligonucleotide
  Sense strand starting at position 2645 of SEQ ID NO: 1886221
cagcuugagucacaugcuu

SEQ ID NO: 2395175 - RNA, 19 nt, Artificial Sequence
  Description of Artificial Sequence: Synthetic oligonucleotide
  Antisense strand to SEQ ID NO: 2395174
aagcaugugacucaagcug

SEQ ID NO: 2395176 - RNA, 19 nt, Artificial Sequence
  Description of Artificial Sequence: Synthetic oligonucleotide
  Sense strand starting at position 2688 of SEQ ID NO: 1886221
cccgcauaucuccgacaca

SEQ ID NO: 2395177 - RNA, 19 nt, Artificial Sequence
  Description of Artificial Sequence: Synthetic oligonucleotide
  Antisense strand to SEQ ID NO: 2395176
ugugucggagauaugcggg

SEQ ID NO: 2395178 - RNA, 19 nt, Artificial Sequence
  Description of Artificial Sequence: Synthetic oligonucleotide
  Sense strand starting at position 2691 of SEQ ID NO: 1886221
gcauaucuccgacacacuu

SEQ ID NO: 2395179 - RNA, 19 nt, Artificial Sequence
  Description of Artificial Sequence: Synthetic oligonucleotide
  Antisense strand to SEQ ID NO: 2395178
aagugugucggagauaugc

SEQ ID NO: 2395180 - RNA, 19 nt, Artificial Sequence
  Description of Artificial Sequence: Synthetic oligonucleotide
  Sense strand starting at position 2707 of SEQ ID NO: 1886221
cuugaacaaucaggagaca

SEQ ID NO: 2395181 - RNA, 19 nt, Artificial Sequence
  Description of Artificial Sequence: Synthetic oligonucleotide
  Antisense strand to SEQ ID NO: 2395180
ugucuccugauuguucaag

SEQ ID NO: 2395182 - RNA, 19 nt, Artificial Sequence
  Description of Artificial Sequence: Synthetic oligonucleotide
  Sense strand starting at position 2814 of SEQ ID NO: 1886221
uaggaaaggucccucgaca

SEQ ID NO: 2395183 - RNA, 19 nt, Artificial Sequence
  Description of Artificial Sequence: Synthetic oligonucleotide
  Antisense strand to SEQ ID NO: 2395182
ugucgagggaccuuuccua

SEQ ID NO: 2395184 - RNA, 19 nt, Artificial Sequence
  Description of Artificial Sequence: Synthetic oligonucleotide
  Sense strand starting at position 2864 of SEQ ID NO: 1886221
uaugacgcuugaucucaga

SEQ ID NO: 2395185 - RNA, 19 nt, Artificial Sequence
  Description of Artificial Sequence: Synthetic oligonucleotide
  Antisense strand to SEQ ID NO: 2395184
ucugagaucaagcgucaua

SEQ ID NO: 2395186 - RNA, 19 nt, Artificial Sequence
  Description of Artificial Sequence: Synthetic oligonucleotide
  Sense strand starting at position 2867 of SEQ ID NO: 1886221
gacgcuugaucucagagau

SEQ ID NO: 2395187 - RNA, 19 nt, Artificial Sequence
  Description of Artificial Sequence: Synthetic oligonucleotide
  Antisense strand to SEQ ID NO: 2395186
aucucugagaucaagcguc

SEQ ID NO: 2395188 - RNA, 19 nt, Artificial Sequence
  Description of Artificial Sequence: Synthetic oligonucleotide
  Sense strand starting at position 2886 of SEQ ID NO: 1886221
aggguaaucuccagcggga

SEQ ID NO: 2395189 - RNA, 19 nt, Artificial Sequence
  Description of Artificial Sequence: Synthetic oligonucleotide
  Antisense strand to SEQ ID NO: 2395188
ucccgcuggagauuacccu

SEQ ID NO: 2395190 - RNA, 19 nt, Artificial Sequence
  Description of Artificial Sequence: Synthetic oligonucleotide
  Sense strand starting at position 2888 of SEQ ID NO: 1886221
gguaaucuccagcgggaug

SEQ ID NO: 2395191 - RNA, 19 nt, Artificial Sequence
  Description of Artificial Sequence: Synthetic oligonucleotide
  Antisense strand to SEQ ID NO: 2395190
caucccgcuggagauuacc

SEQ ID NO: 2395192 - RNA, 19 nt, Artificial Sequence
  Description of Artificial Sequence: Synthetic oligonucleotide
  Sense strand starting at position 2974 of SEQ ID NO: 1886221
agagcucugccuugacuca

SEQ ID NO: 2395193 - RNA, 19 nt, Artificial Sequence
  Description of Artificial Sequence: Synthetic oligonucleotide
  Antisense strand to SEQ ID NO: 2395192
ugagucaaggcagagcucu

SEQ ID NO: 2395194 - RNA, 19 nt, Artificial Sequence
  Description of Artificial Sequence: Synthetic oligonucleotide
  Sense strand starting at position 3038 of SEQ ID NO: 1886221
acuggaauggcccauuacu

SEQ ID NO: 2395195 - RNA, 19 nt, Artificial Sequence
  Description of Artificial Sequence: Synthetic oligonucleotide
  Antisense strand to SEQ ID NO: 2395194
aguaaugggccauuccagu

SEQ ID NO: 2395196 - RNA, 19 nt, Artificial Sequence
  Description of Artificial Sequence: Synthetic oligonucleotide
  Sense strand starting at position 3325 of SEQ ID NO: 1886221
guauccuccuugggucuaa

SEQ ID NO: 2395197 - RNA, 19 nt, Artificial Sequence
  Description of Artificial Sequence: Synthetic oligonucleotide
  Antisense strand to SEQ ID NO: 2395196
uuagacccaaggaggauac

SEQ ID NO: 2395198 - RNA, 19 nt, Artificial Sequence
  Description of Artificial Sequence: Synthetic oligonucleotide
  Sense strand starting at position 3375 of SEQ ID NO: 1886221
gucucucccaggugggaau

SEQ ID NO: 2395199 - RNA, 19 nt, Artificial Sequence
  Description of Artificial Sequence: Synthetic oligonucleotide
  Antisense strand to SEQ ID NO: 2395198
auucccaccugggagagac

SEQ ID NO: 2395200 - RNA, 19 nt, Artificial Sequence
  Description of Artificial Sequence: Synthetic oligonucleotide
  Sense strand starting at position 3756 of SEQ ID NO: 1886221
agugucuucuuccaacaua

SEQ ID NO: 2395201 - RNA, 19 nt, Artificial Sequence
  Description of Artificial Sequence: Synthetic oligonucleotide
  Antisense strand to SEQ ID NO: 2395200
uauguuggaagaagacacu

SEQ ID NO: 2395202 - RNA, 19 nt, Artificial Sequence
  Description of Artificial Sequence: Synthetic oligonucleotide
  Sense strand starting at position 305 of SEQ ID NO: 1886222
uggucauuuacgcgaggaa

SEQ ID NO: 2395203 - RNA, 19 nt, Artificial Sequence
  Description of Artificial Sequence: Synthetic oligonucleotide
  Antisense strand to SEQ ID NO: 2395202
uuccucgcguaaaugacca

SEQ ID NO: 2395204 - RNA, 19 nt, Artificial Sequence
  Description of Artificial Sequence: Synthetic oligonucleotide
  Sense strand starting at position 362 of SEQ ID NO: 1886222
gucacaggguucgagcaaa

SEQ ID NO: 2395205 - RNA, 19 nt, Artificial Sequence
  Description of Artificial Sequence: Synthetic oligonucleotide
  Antisense strand to SEQ ID NO: 2395204
uuugcucgaacccugugac

SEQ ID NO: 2395206 - RNA, 19 nt, Artificial Sequence
  Description of Artificial Sequence: Synthetic oligonucleotide
  Sense strand starting at position 444 of SEQ ID NO: 1886222
gcucgaaucugggcugcau

SEQ ID NO: 2395207 - RNA, 19 nt, Artificial Sequence
  Description of Artificial Sequence: Synthetic oligonucleotide
  Antisense strand to SEQ ID NO: 2395206
augcagcccagauucgagc

SEQ ID NO: 2395208 - RNA, 19 nt, Artificial Sequence
  Description of Artificial Sequence: Synthetic oligonucleotide
  Sense strand starting at position 791 of SEQ ID NO: 1886222
ucagaaguagccugggcau

SEQ ID NO: 2395209 - RNA, 19 nt, Artificial Sequence
  Description of Artificial Sequence: Synthetic oligonucleotide
  Antisense strand to SEQ ID NO: 2395208
augcccaggcuacuucuga

SEQ ID NO: 2395210 - RNA, 19 nt, Artificial Sequence
  Description of Artificial Sequence: Synthetic oligonucleotide
  Sense strand starting at position 806 of SEQ ID NO: 1886222
gcaucaaauugccaggaca

SEQ ID NO: 2395211 - RNA, 19 nt, Artificial Sequence
  Description of Artificial Sequence: Synthetic oligonucleotide
  Antisense strand to SEQ ID NO: 2395210
uguccuggcaauuugaugc

SEQ ID NO: 2395212 - RNA, 19 nt, Artificial Sequence
  Description of Artificial Sequence: Synthetic oligonucleotide
  Sense strand starting at position 874 of SEQ ID NO: 1886222
cuccacuuccgguagggau

SEQ ID NO: 2395213 - RNA, 19 nt, Artificial Sequence
  Description of Artificial Sequence: Synthetic oligonucleotide
  Antisense strand to SEQ ID NO: 2395212
aucccuaccggaaguggag

SEQ ID NO: 2395214 - RNA, 19 nt, Artificial Sequence
  Description of Artificial Sequence: Synthetic oligonucleotide
  Sense strand starting at position 933 of SEQ ID NO: 1886222
ccacgauucccagggccaa

SEQ ID NO: 2395215 - RNA, 19 nt, Artificial Sequence
  Description of Artificial Sequence: Synthetic oligonucleotide
  Antisense strand to SEQ ID NO: 2395214
uuggcccugggaaucgugg

SEQ ID NO: 2395216 - RNA, 19 nt, Artificial Sequence
  Description of Artificial Sequence: Synthetic oligonucleotide
  Sense strand starting at position 934 of SEQ ID NO: 1886222
cacgauucccagggccaaa

SEQ ID NO: 2395217 - RNA, 19 nt, Artificial Sequence
  Description of Artificial Sequence: Synthetic oligonucleotide
  Antisense strand to SEQ ID NO: 2395216
uuuggcccugggaaucgug

SEQ ID NO: 2395218 - RNA, 19 nt, Artificial Sequence
  Description of Artificial Sequence: Synthetic oligonucleotide
  Sense strand starting at position 1035 of SEQ ID NO: 1886222
gggauagcccauugcucaa

SEQ ID NO: 2395219 - RNA, 19 nt, Artificial Sequence
  Description of Artificial Sequence: Synthetic oligonucleotide
  Antisense strand to SEQ ID NO: 2395218
uugagcaaugggcuauccc

SEQ ID NO: 2395220 - RNA, 19 nt, Artificial Sequence
  Description of Artificial Sequence: Synthetic oligonucleotide
  Sense strand starting at position 1289 of SEQ ID NO: 1886222
gucaauaaguccugugcga

SEQ ID NO: 2395221 - RNA, 19 nt, Artificial Sequence
  Description of Artificial Sequence: Synthetic oligonucleotide
  Antisense strand to SEQ ID NO: 2395220
ucgcacaggacuuauugac

SEQ ID NO: 2395222 - RNA, 19 nt, Artificial Sequence
  Description of Artificial Sequence: Synthetic oligonucleotide
  Sense strand starting at position 1291 of SEQ ID NO: 1886222
caauaaguccugugcgauc

SEQ ID NO: 2395223 - RNA, 19 nt, Artificial Sequence
  Description of Artificial Sequence: Synthetic oligonucleotide
  Antisense strand to SEQ ID NO: 2395222
gaucgcacaggacuuauug

SEQ ID NO: 2395224 - RNA, 19 nt, Artificial Sequence
  Description of Artificial Sequence: Synthetic oligonucleotide
  Sense strand starting at position 1300 of SEQ ID NO: 1886222
cugugcgauccuuaaaucu

SEQ ID NO: 2395225 - RNA, 19 nt, Artificial Sequence
  Description of Artificial Sequence: Synthetic oligonucleotide
  Antisense strand to SEQ ID NO: 2395224
agauuuaaggaucgcacag

SEQ ID NO: 2395226 - RNA, 19 nt, Artificial Sequence
  Description of Artificial Sequence: Synthetic oligonucleotide
  Sense strand starting at position 1393 of SEQ ID NO: 1886222
acuguauuggguugaagga

SEQ ID NO: 2395227 - RNA, 19 nt, Artificial Sequence
  Description of Artificial Sequence: Synthetic oligonucleotide
  Antisense strand to SEQ ID NO: 2395226
uccuucaacccaauacagu

SEQ ID NO: 2395228 - RNA, 19 nt, Artificial Sequence
  Description of Artificial Sequence: Synthetic oligonucleotide
  Sense strand starting at position 1460 of SEQ ID NO: 1886222
gcguccuucuugggaucaa

SEQ ID NO: 2395229 - RNA, 19 nt, Artificial Sequence
  Description of Artificial Sequence: Synthetic oligonucleotide
  Antisense strand to SEQ ID NO: 2395228
uugaucccaagaaggacgc

SEQ ID NO: 2395230 - RNA, 19 nt, Artificial Sequence
  Description of Artificial Sequence: Synthetic oligonucleotide
  Sense strand starting at position 1461 of SEQ ID NO: 1886222
cguccuucuugggaucaau

SEQ ID NO: 2395231 - RNA, 19 nt, Artificial Sequence
  Description of Artificial Sequence: Synthetic oligonucleotide
  Antisense strand to SEQ ID NO: 2395230
auugaucccaagaaggacg

SEQ ID NO: 2395232 - RNA, 19 nt, Artificial Sequence
  Description of Artificial Sequence: Synthetic oligonucleotide
  Sense strand starting at position 1471 of SEQ ID NO: 1886222
gggaucaauuaacaaggaa

SEQ ID NO: 2395233 - RNA, 19 nt, Artificial Sequence
  Description of Artificial Sequence: Synthetic oligonucleotide
  Antisense strand to SEQ ID NO: 2395232
uuccuuguuaauugauccc

SEQ ID NO: 2395234 - RNA, 19 nt, Artificial Sequence
  Description of Artificial Sequence: Synthetic oligonucleotide
  Sense strand starting at position 1531 of SEQ ID NO: 1886222
aggucagcucccuaaggaa

SEQ ID NO: 2395235 - RNA, 19 nt, Artificial Sequence
  Description of Artificial Sequence: Synthetic oligonucleotide
  Antisense strand to SEQ ID NO: 2395234
uuccuuagggagcugaccu

SEQ ID NO: 2395236 - RNA, 19 nt, Artificial Sequence
  Description of Artificial Sequence: Synthetic oligonucleotide
  Sense strand starting at position 2207 of SEQ ID NO: 1886222
guggacauguguccaaaug

SEQ ID NO: 2395237 - RNA, 19 nt, Artificial Sequence
  Description of Artificial Sequence: Synthetic oligonucleotide
  Antisense strand to SEQ ID NO: 2395236
cauuuggacacauguccac

SEQ ID NO: 2395238 - RNA, 19 nt, Artificial Sequence
  Description of Artificial Sequence: Synthetic oligonucleotide
  Sense strand starting at position 2312 of SEQ ID NO: 1886222
gugaaacacugauguguca

SEQ ID NO: 2395239 - RNA, 19 nt, Artificial Sequence
  Description of Artificial Sequence: Synthetic oligonucleotide
  Antisense strand to SEQ ID NO: 2395238
ugacacaucaguguuucac

SEQ ID NO: 2395240 - RNA, 19 nt, Artificial Sequence
  Description of Artificial Sequence: Synthetic oligonucleotide
  Sense strand starting at position 2319 of SEQ ID NO: 1886222
acugaugugucauggacac

SEQ ID NO: 2395241 - RNA, 19 nt, Artificial Sequence
  Description of Artificial Sequence: Synthetic oligonucleotide
  Antisense strand to SEQ ID NO: 2395240
guguccaugacacaucagu

SEQ ID NO: 2395242 - RNA, 19 nt, Artificial Sequence
  Description of Artificial Sequence: Synthetic oligonucleotide
  Sense strand starting at position 2321 of SEQ ID NO: 1886222
ugaugugucauggacacag

SEQ ID NO: 2395243 - RNA, 19 nt, Artificial Sequence
  Description of Artificial Sequence: Synthetic oligonucleotide
  Antisense strand to SEQ ID NO: 2395242
cuguguccaugacacauca

SEQ ID NO: 2395244 - RNA, 19 nt, Artificial Sequence
  Description of Artificial Sequence: Synthetic oligonucleotide
  Sense strand starting at position 2670 of SEQ ID NO: 1886222
ccucguguguucucugaua

SEQ ID NO: 2395245 - RNA, 19 nt, Artificial Sequence
  Description of Artificial Sequence: Synthetic oligonucleotide
  Antisense strand to SEQ ID NO: 2395244
uaucagagaacacacgagg

SEQ ID NO: 2395246 - RNA, 19 nt, Artificial Sequence
  Description of Artificial Sequence: Synthetic oligonucleotide
  Sense strand starting at position 2672 of SEQ ID NO: 1886222
ucguguguucucugauaug

SEQ ID NO: 2395247 - RNA, 19 nt, Artificial Sequence
  Description of Artificial Sequence: Synthetic oligonucleotide
  Antisense strand to SEQ ID NO: 2395246
cauaucagagaacacacga

SEQ ID NO: 2395248 - RNA, 19 nt, Artificial Sequence
  Description of Artificial Sequence: Synthetic oligonucleotide
  Sense strand starting at position 3051 of SEQ ID NO: 1886222
ugggauggcccauagcuua

SEQ ID NO: 2395249 - RNA, 19 nt, Artificial Sequence
  Description of Artificial Sequence: Synthetic oligonucleotide
  Antisense strand to SEQ ID NO: 2395248
uaagcuaugggccauccca

SEQ ID NO: 2395250 - RNA, 19 nt, Artificial Sequence
  Description of Artificial Sequence: Synthetic oligonucleotide
  Sense strand starting at position 3233 of SEQ ID NO: 1886222
auccuagaggccugacuua

SEQ ID NO: 2395251 - RNA, 19 nt, Artificial Sequence
  Description of Artificial Sequence: Synthetic oligonucleotide
  Antisense strand to SEQ ID NO: 2395250
uaagucaggccucuaggau

SEQ ID NO: 2395252 - RNA, 19 nt, Artificial Sequence
  Description of Artificial Sequence: Synthetic oligonucleotide
  Sense strand starting at position 3245 of SEQ ID NO: 1886222
ugacuuaagcaccgaguuu

SEQ ID NO: 2395253 - RNA, 19 nt, Artificial Sequence
  Description of Artificial Sequence: Synthetic oligonucleotide
  Antisense strand to SEQ ID NO: 2395252
aaacucggugcuuaaguca

SEQ ID NO: 2395254 - RNA, 19 nt, Artificial Sequence
  Description of Artificial Sequence: Synthetic oligonucleotide
  Sense strand starting at position 3356 of SEQ ID NO: 1886222
ggguccgauuccuaaggaa

SEQ ID NO: 2395255 - RNA, 19 nt, Artificial Sequence
  Description of Artificial Sequence: Synthetic oligonucleotide
  Antisense strand to SEQ ID NO: 2395254
uuccuuaggaaucggaccc

SEQ ID NO: 2395256 - RNA, 19 nt, Artificial Sequence
  Description of Artificial Sequence: Synthetic oligonucleotide
  Sense strand starting at position 3411 of SEQ ID NO: 1886222
cgggucaguuccugaggaa

SEQ ID NO: 2395257 - RNA, 19 nt, Artificial Sequence
  Description of Artificial Sequence: Synthetic oligonucleotide
  Antisense strand to SEQ ID NO: 2395256
uuccucaggaacugacccg

SEQ ID NO: 2395258 - RNA, 19 nt, Artificial Sequence
  Description of Artificial Sequence: Synthetic oligonucleotide
  Sense strand starting at position 89 of SEQ ID NO: 1886223
ggauauacucaccacagcu

SEQ ID NO: 2395259 - RNA, 19 nt, Artificial Sequence
  Description of Artificial Sequence: Synthetic oligonucleotide
  Antisense strand to SEQ ID NO: 2395258
agcuguggugaguauaucc

SEQ ID NO: 2395260 - RNA, 19 nt, Artificial Sequence
  Description of Artificial Sequence: Synthetic oligonucleotide
  Sense strand starting at position 295 of SEQ ID NO: 1886223
guaagagauacccacguaa

SEQ ID NO: 2395261 - RNA, 19 nt, Artificial Sequence
  Description of Artificial Sequence: Synthetic oligonucleotide
  Antisense strand to SEQ ID NO: 2395260
uuacguggguaucucuuac

SEQ ID NO: 2395262 - RNA, 19 nt, Artificial Sequence
  Description of Artificial Sequence: Synthetic oligonucleotide
  Sense strand starting at position 297 of SEQ ID NO: 1886223
aagagauacccacguaaug

SEQ ID NO: 2395263 - RNA, 19 nt, Artificial Sequence
  Description of Artificial Sequence: Synthetic oligonucleotide
  Antisense strand to SEQ ID NO: 2395262
cauuacguggguaucucuu

SEQ ID NO: 2395264 - RNA, 19 nt, Artificial Sequence
  Description of Artificial Sequence: Synthetic oligonucleotide
  Sense strand starting at position 333 of SEQ ID NO: 1886223
cgacucaucauggaugcuu

SEQ ID NO: 2395265 - RNA, 19 nt, Artificial Sequence
  Description of Artificial Sequence: Synthetic oligonucleotide
  Antisense strand to SEQ ID NO: 2395264
aagcauccaugaugagucg

SEQ ID NO: 2395266 - RNA, 19 nt, Artificial Sequence
  Description of Artificial Sequence: Synthetic oligonucleotide
  Sense strand starting at position 713 of SEQ ID NO: 1886223
ggugaccacuugucucaga

SEQ ID NO: 2395267 - RNA, 19 nt, Artificial Sequence
  Description of Artificial Sequence: Synthetic oligonucleotide
  Antisense strand to SEQ ID NO: 2395266
ucugagacaaguggucacc

SEQ ID NO: 2395268 - RNA, 19 nt, Artificial Sequence
  Description of Artificial Sequence: Synthetic oligonucleotide
  Sense strand starting at position 714 of SEQ ID NO: 1886223
gugaccacuugucucagaa

SEQ ID NO: 2395269 - RNA, 19 nt, Artificial Sequence
  Description of Artificial Sequence: Synthetic oligonucleotide
  Antisense strand to SEQ ID NO: 2395268
uucugagacaaguggucac

SEQ ID NO: 2395270 - RNA, 19 nt, Artificial Sequence
  Description of Artificial Sequence: Synthetic oligonucleotide
  Sense strand starting at position 716 of SEQ ID NO: 1886223
gaccacuugucucagaaga

SEQ ID NO: 2395271 - RNA, 19 nt, Artificial Sequence
  Description of Artificial Sequence: Synthetic oligonucleotide
  Antisense strand to SEQ ID NO: 2395270
ucuucugagacaagugguc

SEQ ID NO: 2395272 - RNA, 19 nt, Artificial Sequence
  Description of Artificial Sequence: Synthetic oligonucleotide
  Sense strand starting at position 718 of SEQ ID NO: 1886223
ccacuugucucagaagaac

SEQ ID NO: 2395273 - RNA, 19 nt, Artificial Sequence
  Description of Artificial Sequence: Synthetic oligonucleotide
  Antisense strand to SEQ ID NO: 2395272
guucuucugagacaagugg

SEQ ID NO: 2395274 - RNA, 19 nt, Artificial Sequence
  Description of Artificial Sequence: Synthetic oligonucleotide
  Sense strand starting at position 745 of SEQ ID NO: 1886223
gcaaauucccaguauagga

SEQ ID NO: 2395275 - RNA, 19 nt, Artificial Sequence
  Description of Artificial Sequence: Synthetic oligonucleotide
  Antisense strand to SEQ ID NO: 2395274
uccuauacugggaauuugc

SEQ ID NO: 2395276 - RNA, 19 nt, Artificial Sequence
  Description of Artificial Sequence: Synthetic oligonucleotide
  Sense strand starting at position 788 of SEQ ID NO: 1886223
ucagaaugccacuguuaac

SEQ ID NO: 2395277 - RNA, 19 nt, Artificial Sequence
  Description of Artificial Sequence: Synthetic oligonucleotide
  Antisense strand to SEQ ID NO: 2395276
guuaacaguggcauucuga

SEQ ID NO: 2395278 - RNA, 19 nt, Artificial Sequence
  Description of Artificial Sequence: Synthetic oligonucleotide
  Sense strand starting at position 798 of SEQ ID NO: 1886223
acuguuaaccguuacucaa

SEQ ID NO: 2395279 - RNA, 19 nt, Artificial Sequence
  Description of Artificial Sequence: Synthetic oligonucleotide
  Antisense strand to SEQ ID NO: 2395278
uugaguaacgguuaacagu

SEQ ID NO: 2395280 - RNA, 19 nt, Artificial Sequence
  Description of Artificial Sequence: Synthetic oligonucleotide
  Sense strand starting at position 808 of SEQ ID NO: 1886223
guuacucaaacucggagaa

SEQ ID NO: 2395281 - RNA, 19 nt, Artificial Sequence
  Description of Artificial Sequence: Synthetic oligonucleotide
  Antisense strand to SEQ ID NO: 2395280
uucuccgaguuugaguaac

SEQ ID NO: 2395282 - RNA, 19 nt, Artificial Sequence
  Description of Artificial Sequence: Synthetic oligonucleotide
  Sense strand starting at position 809 of SEQ ID NO: 1886223
uuacucaaacucggagaau

SEQ ID NO: 2395283 - RNA, 19 nt, Artificial Sequence
  Description of Artificial Sequence: Synthetic oligonucleotide
  Antisense strand to SEQ ID NO: 2395282
auucuccgaguuugaguaa

SEQ ID NO: 2395284 - RNA, 19 nt, Artificial Sequence
  Description of Artificial Sequence: Synthetic oligonucleotide
  Sense strand starting at position 810 of SEQ ID NO: 1886223
uacucaaacucggagaaug

SEQ ID NO: 2395285 - RNA, 19 nt, Artificial Sequence
  Description of Artificial Sequence: Synthetic oligonucleotide
  Antisense strand to SEQ ID NO: 2395284
cauucuccgaguuugagua

SEQ ID NO: 2395286 - RNA, 19 nt, Artificial Sequence
  Description of Artificial Sequence: Synthetic oligonucleotide
  Sense strand starting at position 822 of SEQ ID NO: 1886223
gagaauggguuacccucaa

SEQ ID NO: 2395287 - RNA, 19 nt, Artificial Sequence
  Description of Artificial Sequence: Synthetic oligonucleotide
  Antisense strand to SEQ ID NO: 2395286
uugaggguaacccauucuc

SEQ ID NO: 2395288 - RNA, 19 nt, Artificial Sequence
  Description of Artificial Sequence: Synthetic oligonucleotide
  Sense strand starting at position 916 of SEQ ID NO: 1886223
ggaucucagccuugacuca

SEQ ID NO: 2395289 - RNA, 19 nt, Artificial Sequence
  Description of Artificial Sequence: Synthetic oligonucleotide
  Antisense strand to SEQ ID NO: 2395288
ugagucaaggcugagaucc

SEQ ID NO: 2395290 - RNA, 19 nt, Artificial Sequence
  Description of Artificial Sequence: Synthetic oligonucleotide
  Sense strand starting at position 1021 of SEQ ID NO: 1886223
ggucacaggugggaugaaa

SEQ ID NO: 2395291 - RNA, 19 nt, Artificial Sequence
  Description of Artificial Sequence: Synthetic oligonucleotide
  Antisense strand to SEQ ID NO: 2395290
uuucaucccaccugugacc

SEQ ID NO: 2395292 - RNA, 19 nt, Artificial Sequence
  Description of Artificial Sequence: Synthetic oligonucleotide
  Sense strand starting at position 1272 of SEQ ID NO: 1886223
aagacauccuccuugggua

SEQ ID NO: 2395293 - RNA, 19 nt, Artificial Sequence
  Description of Artificial Sequence: Synthetic oligonucleotide
  Antisense strand to SEQ ID NO: 2395292
uacccaaggaggaugucuu

SEQ ID NO: 2395294 - RNA, 19 nt, Artificial Sequence
  Description of Artificial Sequence: Synthetic oligonucleotide
  Sense strand starting at position 1273 of SEQ ID NO: 1886223
agacauccuccuuggguaa

SEQ ID NO: 2395295 - RNA, 19 nt, Artificial Sequence
  Description of Artificial Sequence: Synthetic oligonucleotide
  Antisense strand to SEQ ID NO: 2395294
uuacccaaggaggaugucu

SEQ ID NO: 2395296 - RNA, 19 nt, Artificial Sequence
  Description of Artificial Sequence: Synthetic oligonucleotide
  Sense strand starting at position 1275 of SEQ ID NO: 1886223
acauccuccuuggguaaga

SEQ ID NO: 2395297 - RNA, 19 nt, Artificial Sequence
  Description of Artificial Sequence: Synthetic oligonucleotide
  Antisense strand to SEQ ID NO: 2395296
ucuuacccaaggaggaugu

SEQ ID NO: 2395298 - RNA, 19 nt, Artificial Sequence
  Description of Artificial Sequence: Synthetic oligonucleotide
  Sense strand starting at position 1276 of SEQ ID NO: 1886223
cauccuccuuggguaagau

SEQ ID NO: 2395299 - RNA, 19 nt, Artificial Sequence
  Description of Artificial Sequence: Synthetic oligonucleotide
  Antisense strand to SEQ ID NO: 2395298
aucuuacccaaggaggaug

SEQ ID NO: 2395300 - RNA, 19 nt, Artificial Sequence
  Description of Artificial Sequence: Synthetic oligonucleotide
  Sense strand starting at position 1277 of SEQ ID NO: 1886223
auccuccuuggguaagauu

SEQ ID NO: 2395301 - RNA, 19 nt, Artificial Sequence
  Description of Artificial Sequence: Synthetic oligonucleotide
  Antisense strand to SEQ ID NO: 2395300
aaucuuacccaaggaggau

SEQ ID NO: 2395302 - RNA, 19 nt, Artificial Sequence
  Description of Artificial Sequence: Synthetic oligonucleotide
  Sense strand starting at position 1286 of SEQ ID NO: 1886223
ggguaagauucccaaggaa

SEQ ID NO: 2395303 - RNA, 19 nt, Artificial Sequence
  Description of Artificial Sequence: Synthetic oligonucleotide
  Antisense strand to SEQ ID NO: 2395302
uuccuugggaaucuuaccc

SEQ ID NO: 2395304 - RNA, 19 nt, Artificial Sequence
  Description of Artificial Sequence: Synthetic oligonucleotide
  Sense strand starting at position 1483 of SEQ ID NO: 1886223
gaagcuaugcacuguugca

SEQ ID NO: 2395305 - RNA, 19 nt, Artificial Sequence
  Description of Artificial Sequence: Synthetic oligonucleotide
  Antisense strand to SEQ ID NO: 2395304
ugcaacagugcauagcuuc

SEQ ID NO: 2395306 - RNA, 19 nt, Artificial Sequence
  Description of Artificial Sequence: Synthetic oligonucleotide
  Sense strand starting at position 1509 of SEQ ID NO: 1886223
cagucacauggugggaauu

SEQ ID NO: 2395307 - RNA, 19 nt, Artificial Sequence
  Description of Artificial Sequence: Synthetic oligonucleotide
  Antisense strand to SEQ ID NO: 2395306
aauucccaccaugugacug

SEQ ID NO: 2395308 - RNA, 19 nt, Artificial Sequence
  Description of Artificial Sequence: Synthetic oligonucleotide
  Sense strand starting at position 1511 of SEQ ID NO: 1886223
gucacauggugggaauuga

SEQ ID NO: 2395309 - RNA, 19 nt, Artificial Sequence
  Description of Artificial Sequence: Synthetic oligonucleotide
  Antisense strand to SEQ ID NO: 2395308
ucaauucccaccaugugac

SEQ ID NO: 2395310 - RNA, 19 nt, Artificial Sequence
  Description of Artificial Sequence: Synthetic oligonucleotide
  Sense strand starting at position 1886 of SEQ ID NO: 1886223
cccggcauccucugccaaa

SEQ ID NO: 2395311 - RNA, 19 nt, Artificial Sequence
  Description of Artificial Sequence: Synthetic oligonucleotide
  Antisense strand to SEQ ID NO: 2395310
uuuggcagaggaugccggg

SEQ ID NO: 2395312 - RNA, 19 nt, Artificial Sequence
  Description of Artificial Sequence: Synthetic oligonucleotide
  Sense strand starting at position 2162 of SEQ ID NO: 1886223
guggaagucuuccucaagu

SEQ ID NO: 2395313 - RNA, 19 nt, Artificial Sequence
  Description of Artificial Sequence: Synthetic oligonucleotide
  Antisense strand to SEQ ID NO: 2395312
acuugaggaagacuuccac

SEQ ID NO: 2395314 - RNA, 19 nt, Artificial Sequence
  Description of Artificial Sequence: Synthetic oligonucleotide
  Sense strand starting at position 2164 of SEQ ID NO: 1886223
ggaagucuuccucaagucu

SEQ ID NO: 2395315 - RNA, 19 nt, Artificial Sequence
  Description of Artificial Sequence: Synthetic oligonucleotide
  Antisense strand to SEQ ID NO: 2395314
agacuugaggaagacuucc

SEQ ID NO: 2395316 - RNA, 19 nt, Artificial Sequence
  Description of Artificial Sequence: Synthetic oligonucleotide
  Sense strand starting at position 2373 of SEQ ID NO: 1886223
ggucacuggucucagguaa

SEQ ID NO: 2395317 - RNA, 19 nt, Artificial Sequence
  Description of Artificial Sequence: Synthetic oligonucleotide
  Antisense strand to SEQ ID NO: 2395316
uuaccugagaccagugacc

SEQ ID NO: 2395318 - RNA, 19 nt, Artificial Sequence
  Description of Artificial Sequence: Synthetic oligonucleotide
  Sense strand starting at position 2760 of SEQ ID NO: 1886223
guggcucugccagggauaa

SEQ ID NO: 2395319 - RNA, 19 nt, Artificial Sequence
  Description of Artificial Sequence: Synthetic oligonucleotide
  Antisense strand to SEQ ID NO: 2395318
uuaucccuggcagagccac

SEQ ID NO: 2395320 - RNA, 19 nt, Artificial Sequence
  Description of Artificial Sequence: Synthetic oligonucleotide
  Sense strand starting at position 2761 of SEQ ID NO: 1886223
uggcucugccagggauaau

SEQ ID NO: 2395321 - RNA, 19 nt, Artificial Sequence
  Description of Artificial Sequence: Synthetic oligonucleotide
  Antisense strand to SEQ ID NO: 2395320
auuaucccuggcagagcca

SEQ ID NO: 2395322 - RNA, 19 nt, Artificial Sequence
  Description of Artificial Sequence: Synthetic oligonucleotide
  Sense strand starting at position 2762 of SEQ ID NO: 1886223
ggcucugccagggauaaua

SEQ ID NO: 2395323 - RNA, 19 nt, Artificial Sequence
  Description of Artificial Sequence: Synthetic oligonucleotide
  Antisense strand to SEQ ID NO: 2395322
uauuaucccuggcagagcc

SEQ ID NO: 2395324 - RNA, 19 nt, Artificial Sequence
  Description of Artificial Sequence: Synthetic oligonucleotide
  Sense strand starting at position 2812 of SEQ ID NO: 1886223
cuagguucggccuaagugu

SEQ ID NO: 2395325 - RNA, 19 nt, Artificial Sequence
  Description of Artificial Sequence: Synthetic oligonucleotide
  Antisense strand to SEQ ID NO: 2395324
acacuuaggccgaaccuag

SEQ ID NO: 2395326 - RNA, 19 nt, Artificial Sequence
  Description of Artificial Sequence: Synthetic oligonucleotide
  Sense strand starting at position 2955 of SEQ ID NO: 1886223
accagagcucagugcaaga

SEQ ID NO: 2395327 - RNA, 19 nt, Artificial Sequence
  Description of Artificial Sequence: Synthetic oligonucleotide
  Antisense strand to SEQ ID NO: 2395326
ucuugcacugagcucuggu

SEQ ID NO: 2395328 - RNA, 19 nt, Artificial Sequence
  Description of Artificial Sequence: Synthetic oligonucleotide
  Sense strand starting at position 3117 of SEQ ID NO: 1886223
caaccagggccucauguau

SEQ ID NO: 2395329 - RNA, 19 nt, Artificial Sequence
  Description of Artificial Sequence: Synthetic oligonucleotide
  Antisense strand to SEQ ID NO: 2395328
auacaugaggcccugguug

SEQ ID NO: 2395330 - RNA, 19 nt, Artificial Sequence
  Description of Artificial Sequence: Synthetic oligonucleotide
  Sense strand starting at position 3157 of SEQ ID NO: 1886223
gggauacccuuguaaugga

SEQ ID NO: 2395331 - RNA, 19 nt, Artificial Sequence
  Description of Artificial Sequence: Synthetic oligonucleotide
  Antisense strand to SEQ ID NO: 2395330
uccauuacaaggguauccc

SEQ ID NO: 2395332 - RNA, 19 nt, Artificial Sequence
  Description of Artificial Sequence: Synthetic oligonucleotide
  Sense strand starting at position 3171 of SEQ ID NO: 1886223
auggaauccuuacagaaca

SEQ ID NO: 2395333 - RNA, 19 nt, Artificial Sequence
  Description of Artificial Sequence: Synthetic oligonucleotide
  Antisense strand to SEQ ID NO: 2395332
uguucuguaaggauuccau

SEQ ID NO: 2395334 - RNA, 19 nt, Artificial Sequence
  Description of Artificial Sequence: Synthetic oligonucleotide
  Sense strand starting at position 3551 of SEQ ID NO: 1886223
acauucuuucucugaugag

SEQ ID NO: 2395335 - RNA, 19 nt, Artificial Sequence
  Description of Artificial Sequence: Synthetic oligonucleotide
  Antisense strand to SEQ ID NO: 2395334
cucaucagagaaagaaugu

SEQ ID NO: 2395336 - RNA, 19 nt, Artificial Sequence
  Description of Artificial Sequence: Synthetic oligonucleotide
  Sense strand starting at position 3971 of SEQ ID NO: 1886223
gguggcauuccuugaaucu

SEQ ID NO: 2395337 - RNA, 19 nt, Artificial Sequence
  Description of Artificial Sequence: Synthetic oligonucleotide
  Antisense strand to SEQ ID NO: 2395336
agauucaaggaaugccacc

SEQ ID NO: 2395338 - RNA, 19 nt, Artificial Sequence
  Description of Artificial Sequence: Synthetic oligonucleotide
  Sense strand starting at position 259 of SEQ ID NO: 1886224
augcaagucuuccuccagu

SEQ ID NO: 2395339 - RNA, 19 nt, Artificial Sequence
  Description of Artificial Sequence: Synthetic oligonucleotide
  Antisense strand to SEQ ID NO: 2395338
acuggaggaagacuugcau

SEQ ID NO: 2395340 - RNA, 19 nt, Artificial Sequence
  Description of Artificial Sequence: Synthetic oligonucleotide
  Sense strand starting at position 384 of SEQ ID NO: 1886224
ugugaugugauccauguga

SEQ ID NO: 2395341 - RNA, 19 nt, Artificial Sequence
  Description of Artificial Sequence: Synthetic oligonucleotide
  Antisense strand to SEQ ID NO: 2395340
ucacauggaucacaucaca

SEQ ID NO: 2395342 - RNA, 19 nt, Artificial Sequence
  Description of Artificial Sequence: Synthetic oligonucleotide
  Sense strand starting at position 386 of SEQ ID NO: 1886224
ugaugugauccaugugaau

SEQ ID NO: 2395343 - RNA, 19 nt, Artificial Sequence
  Description of Artificial Sequence: Synthetic oligonucleotide
  Antisense strand to SEQ ID NO: 2395342
auucacauggaucacauca

SEQ ID NO: 2395344 - RNA, 19 nt, Artificial Sequence
  Description of Artificial Sequence: Synthetic oligonucleotide
  Sense strand starting at position 397 of SEQ ID NO: 1886224
augugaauuacugagucgu

SEQ ID NO: 2395345 - RNA, 19 nt, Artificial Sequence
  Description of Artificial Sequence: Synthetic oligonucleotide
  Antisense strand to SEQ ID NO: 2395344
acgacucaguaauucacau

SEQ ID NO: 2395346 - RNA, 19 nt, Artificial Sequence
  Description of Artificial Sequence: Synthetic oligonucleotide
  Sense strand starting at position 399 of SEQ ID NO: 1886224
gugaauuacugagucguca

SEQ ID NO: 2395347 - RNA, 19 nt, Artificial Sequence
  Description of Artificial Sequence: Synthetic oligonucleotide
  Antisense strand to SEQ ID NO: 2395346
ugacgacucaguaauucac

SEQ ID NO: 2395348 - RNA, 19 nt, Artificial Sequence
  Description of Artificial Sequence: Synthetic oligonucleotide
  Sense strand starting at position 403 of SEQ ID NO: 1886224
auuacugagucgucacgga

SEQ ID NO: 2395349 - RNA, 19 nt, Artificial Sequence
  Description of Artificial Sequence: Synthetic oligonucleotide
  Antisense strand to SEQ ID NO: 2395348
uccgugacgacucaguaau

SEQ ID NO: 2395350 - RNA, 19 nt, Artificial Sequence
  Description of Artificial Sequence: Synthetic oligonucleotide
  Sense strand starting at position 728 of SEQ ID NO: 1886224
ccaagugugcauuggaaau

SEQ ID NO: 2395351 - RNA, 19 nt, Artificial Sequence
  Description of Artificial Sequence: Synthetic oligonucleotide
  Antisense strand to SEQ ID NO: 2395350
auuuccaaugcacacuugg

SEQ ID NO: 2395352 - RNA, 19 nt, Artificial Sequence
  Description of Artificial Sequence: Synthetic oligonucleotide
  Sense strand starting at position 730 of SEQ ID NO: 1886224
aagugugcauuggaaauca

SEQ ID NO: 2395353 - RNA, 19 nt, Artificial Sequence
  Description of Artificial Sequence: Synthetic oligonucleotide
  Antisense strand to SEQ ID NO: 2395352
ugauuuccaaugcacacuu

SEQ ID NO: 2395354 - RNA, 19 nt, Artificial Sequence
  Description of Artificial Sequence: Synthetic oligonucleotide
  Sense strand starting at position 1365 of SEQ ID NO: 1886224
accagaucaccgcaucuua

SEQ ID NO: 2395355 - RNA, 19 nt, Artificial Sequence
  Description of Artificial Sequence: Synthetic oligonucleotide
  Antisense strand to SEQ ID NO: 2395354
uaagaugcggugaucuggu

SEQ ID NO: 2395356 - RNA, 19 nt, Artificial Sequence
  Description of Artificial Sequence: Synthetic oligonucleotide
  Sense strand starting at position 1461 of SEQ ID NO: 1886224
auggguccuccuuggguua

SEQ ID NO: 2395357 - RNA, 19 nt, Artificial Sequence
  Description of Artificial Sequence: Synthetic oligonucleotide
  Antisense strand to SEQ ID NO: 2395356
uaacccaaggaggacccau

SEQ ID NO: 2395358 - RNA, 19 nt, Artificial Sequence
  Description of Artificial Sequence: Synthetic oligonucleotide
  Sense strand starting at position 1513 of SEQ ID NO: 1886224
uucccucccgggugaaauu

SEQ ID NO: 2395359 - RNA, 19 nt, Artificial Sequence
  Description of Artificial Sequence: Synthetic oligonucleotide
  Antisense strand to SEQ ID NO: 2395358
aauuucacccgggagggaa

SEQ ID NO: 2395360 - RNA, 19 nt, Artificial Sequence
  Description of Artificial Sequence: Synthetic oligonucleotide
  Sense strand starting at position 1591 of SEQ ID NO: 1886224
uggucuggcucaugaccaa

SEQ ID NO: 2395361 - RNA, 19 nt, Artificial Sequence
  Description of Artificial Sequence: Synthetic oligonucleotide
  Antisense strand to SEQ ID NO: 2395360
uuggucaugagccagacca

SEQ ID NO: 2395362 - RNA, 19 nt, Artificial Sequence
  Description of Artificial Sequence: Synthetic oligonucleotide
  Sense strand starting at position 1667 of SEQ ID NO: 1886224
ggcagagcucacugaaaga

SEQ ID NO: 2395363 - RNA, 19 nt, Artificial Sequence
  Description of Artificial Sequence: Synthetic oligonucleotide
  Antisense strand to SEQ ID NO: 2395362
ucuuucagugagcucugcc

SEQ ID NO: 2395364 - RNA, 19 nt, Artificial Sequence
  Description of Artificial Sequence: Synthetic oligonucleotide
  Sense strand starting at position 2045 of SEQ ID NO: 1886224
gccagaugugcucagcaca

SEQ ID NO: 2395365 - RNA, 19 nt, Artificial Sequence
  Description of Artificial Sequence: Synthetic oligonucleotide
  Antisense strand to SEQ ID NO: 2395364
ugugcugagcacaucuggc

SEQ ID NO: 2395366 - RNA, 19 nt, Artificial Sequence
  Description of Artificial Sequence: Synthetic oligonucleotide
  Sense strand starting at position 2136 of SEQ ID NO: 1886224
uggacacugucccaugaaa

SEQ ID NO: 2395367 - RNA, 19 nt, Artificial Sequence
  Description of Artificial Sequence: Synthetic oligonucleotide
  Antisense strand to SEQ ID NO: 2395366
uuucaugggacagugucca

SEQ ID NO: 2395368 - RNA, 19 nt, Artificial Sequence
  Description of Artificial Sequence: Synthetic oligonucleotide
  Sense strand starting at position 2281 of SEQ ID NO: 1886224
cgugaugagauccaugcaa

SEQ ID NO: 2395369 - RNA, 19 nt, Artificial Sequence
  Description of Artificial Sequence: Synthetic oligonucleotide
  Antisense strand to SEQ ID NO: 2395368
uugcauggaucucaucacg

SEQ ID NO: 2395370 - RNA, 19 nt, Artificial Sequence
  Description of Artificial Sequence: Synthetic oligonucleotide
  Sense strand starting at position 2303 of SEQ ID NO: 1886224
auugacuugucaccaaugu

SEQ ID NO: 2395371 - RNA, 19 nt, Artificial Sequence
  Description of Artificial Sequence: Synthetic oligonucleotide
  Antisense strand to SEQ ID NO: 2395370
acauuggugacaagucaau

SEQ ID NO: 2395372 - RNA, 19 nt, Artificial Sequence
  Description of Artificial Sequence: Synthetic oligonucleotide
  Sense strand starting at position 2304 of SEQ ID NO: 1886224
uugacuugucaccaaugua

SEQ ID NO: 2395373 - RNA, 19 nt, Artificial Sequence
  Description of Artificial Sequence: Synthetic oligonucleotide
  Antisense strand to SEQ ID NO: 2395372
uacauuggugacaagucaa

SEQ ID NO: 2395374 - RNA, 19 nt, Artificial Sequence
  Description of Artificial Sequence: Synthetic oligonucleotide
  Sense strand starting at position 2752 of SEQ ID NO: 1886224
uuugcuuggucccaagauc

SEQ ID NO: 2395375 - RNA, 19 nt, Artificial Sequence
  Description of Artificial Sequence: Synthetic oligonucleotide
  Antisense strand to SEQ ID NO: 2395374
gaucuugggaccaagcaaa

SEQ ID NO: 2395376 - RNA, 19 nt, Artificial Sequence
  Description of Artificial Sequence: Synthetic oligonucleotide
  Sense strand starting at position 2816 of SEQ ID NO: 1886224
acaaauucucaguacaggu

SEQ ID NO: 2395377 - RNA, 19 nt, Artificial Sequence
  Description of Artificial Sequence: Synthetic oligonucleotide
  Antisense strand to SEQ ID NO: 2395376
accuguacugagaauuugu

SEQ ID NO: 2395378 - RNA, 19 nt, Artificial Sequence
  Description of Artificial Sequence: Synthetic oligonucleotide
  Sense strand starting at position 3070 of SEQ ID NO: 1886224
ggugcagcauccuugaauc

SEQ ID NO: 2395379 - RNA, 19 nt, Artificial Sequence
  Description of Artificial Sequence: Synthetic oligonucleotide
  Antisense strand to SEQ ID NO: 2395378
gauucaaggaugcugcacc

SEQ ID NO: 2395380 - RNA, 19 nt, Artificial Sequence
  Description of Artificial Sequence: Synthetic oligonucleotide
  Sense strand starting at position 3081 of SEQ ID NO: 1886224
cuugaaucucugcgacuca

SEQ ID NO: 2395381 - RNA, 19 nt, Artificial Sequence
  Description of Artificial Sequence: Synthetic oligonucleotide
  Antisense strand to SEQ ID NO: 2395380
ugagucgcagagauucaag

SEQ ID NO: 2395382 - RNA, 19 nt, Artificial Sequence
  Description of Artificial Sequence: Synthetic oligonucleotide
  Sense strand starting at position 3082 of SEQ ID NO: 1886224
uugaaucucugcgacucaa

SEQ ID NO: 2395383 - RNA, 19 nt, Artificial Sequence
  Description of Artificial Sequence: Synthetic oligonucleotide
  Antisense strand to SEQ ID NO: 2395382
uugagucgcagagauucaa

SEQ ID NO: 2395384 - RNA, 19 nt, Artificial Sequence
  Description of Artificial Sequence: Synthetic oligonucleotide
  Sense strand starting at position 3370 of SEQ ID NO: 1886224
uuggcugucugagacaacu

SEQ ID NO: 2395385 - RNA, 19 nt, Artificial Sequence
  Description of Artificial Sequence: Synthetic oligonucleotide
  Antisense strand to SEQ ID NO: 2395384
aguugucucagacagccaa

SEQ ID NO: 2395386 - RNA, 19 nt, Artificial Sequence
  Description of Artificial Sequence: Synthetic oligonucleotide
  Sense strand starting at position 3885 of SEQ ID NO: 1886224
ggauauggucaucacagcu

SEQ ID NO: 2395387 - RNA, 19 nt, Artificial Sequence
  Description of Artificial Sequence: Synthetic oligonucleotide
  Antisense strand to SEQ ID NO: 2395386
agcugugaugaccauaucc

SEQ ID NO: 2395388 - RNA, 19 nt, Artificial Sequence
  Description of Artificial Sequence: Synthetic oligonucleotide
  Sense strand starting at position 1171 of SEQ ID NO: 1886225
ccauuaagauggcccauua

SEQ ID NO: 2395389 - RNA, 19 nt, Artificial Sequence
  Description of Artificial Sequence: Synthetic oligonucleotide
  Antisense strand to SEQ ID NO: 2395388
uaaugggccaucuuaaugg

SEQ ID NO: 2395390 - RNA, 19 nt, Artificial Sequence
  Description of Artificial Sequence: Synthetic oligonucleotide
  Sense strand starting at position 1288 of SEQ ID NO: 1886225
ggagaacuccagugugagc

SEQ ID NO: 2395391 - RNA, 19 nt, Artificial Sequence
  Description of Artificial Sequence: Synthetic oligonucleotide
  Antisense strand to SEQ ID NO: 2395390
gcucacacuggaguucucc

SEQ ID NO: 2395392 - RNA, 19 nt, Artificial Sequence
  Description of Artificial Sequence: Synthetic oligonucleotide
  Sense strand starting at position 1397 of SEQ ID NO: 1886225
ugcuguauguugggcugaa

SEQ ID NO: 2395393 - RNA, 19 nt, Artificial Sequence
  Description of Artificial Sequence: Synthetic oligonucleotide
  Antisense strand to SEQ ID NO: 2395392
uucagcccaacauacagca

SEQ ID NO: 2395394 - RNA, 19 nt, Artificial Sequence
  Description of Artificial Sequence: Synthetic oligonucleotide
  Sense strand starting at position 1398 of SEQ ID NO: 1886225
gcuguauguugggcugaag

SEQ ID NO: 2395395 - RNA, 19 nt, Artificial Sequence
  Description of Artificial Sequence: Synthetic oligonucleotide
  Antisense strand to SEQ ID NO: 2395394
cuucagcccaacauacagc

SEQ ID NO: 2395396 - RNA, 19 nt, Artificial Sequence
  Description of Artificial Sequence: Synthetic oligonucleotide
  Sense strand starting at position 1401 of SEQ ID NO: 1886225
guauguugggcugaaggaa

SEQ ID NO: 2395397 - RNA, 19 nt, Artificial Sequence
  Description of Artificial Sequence: Synthetic oligonucleotide
  Antisense strand to SEQ ID NO: 2395396
uuccuucagcccaacauac

SEQ ID NO: 2395398 - RNA, 19 nt, Artificial Sequence
  Description of Artificial Sequence: Synthetic oligonucleotide
  Sense strand starting at position 1467 of SEQ ID NO: 1886225
gcgugcuccuagggucaga

SEQ ID NO: 2395399 - RNA, 19 nt, Artificial Sequence
  Description of Artificial Sequence: Synthetic oligonucleotide
  Antisense strand to SEQ ID NO: 2395398
ucugacccuaggagcacgc

SEQ ID NO: 2395400 - RNA, 19 nt, Artificial Sequence
  Description of Artificial Sequence: Synthetic oligonucleotide
  Sense strand starting at position 2257 of SEQ ID NO: 1886225
gggauacccaugugaugga

SEQ ID NO: 2395401 - RNA, 19 nt, Artificial Sequence
  Description of Artificial Sequence: Synthetic oligonucleotide
  Antisense strand to SEQ ID NO: 2395400
uccaucacauggguauccc

SEQ ID NO: 2395402 - RNA, 19 nt, Artificial Sequence
  Description of Artificial Sequence: Synthetic oligonucleotide
  Sense strand starting at position 2691 of SEQ ID NO: 1886225
ggucccacuuggucaauaa

SEQ ID NO: 2395403 - RNA, 19 nt, Artificial Sequence
  Description of Artificial Sequence: Synthetic oligonucleotide
  Antisense strand to SEQ ID NO: 2395402
uuauugaccaagugggacc

SEQ ID NO: 2395404 - RNA, 19 nt, Artificial Sequence
  Description of Artificial Sequence: Synthetic oligonucleotide
  Sense strand starting at position 3234 of SEQ ID NO: 1886225
cgcugaguuucagcuggga

SEQ ID NO: 2395405 - RNA, 19 nt, Artificial Sequence
  Description of Artificial Sequence: Synthetic oligonucleotide
  Antisense strand to SEQ ID NO: 2395404
ucccagcugaaacucagcg

SEQ ID NO: 2395406 - RNA, 19 nt, Artificial Sequence
  Description of Artificial Sequence: Synthetic oligonucleotide
  Sense strand starting at position 3255 of SEQ ID NO: 1886225
ugcucuauguugggcugaa

SEQ ID NO: 2395407 - RNA, 19 nt, Artificial Sequence
  Description of Artificial Sequence: Synthetic oligonucleotide
  Antisense strand to SEQ ID NO: 2395406
uucagcccaacauagagca

SEQ ID NO: 2395408 - RNA, 19 nt, Artificial Sequence
  Description of Artificial Sequence: Synthetic oligonucleotide
  Sense strand starting at position 3256 of SEQ ID NO: 1886225
gcucuauguugggcugaag

SEQ ID NO: 2395409 - RNA, 19 nt, Artificial Sequence
  Description of Artificial Sequence: Synthetic oligonucleotide
  Antisense strand to SEQ ID NO: 2395408
cuucagcccaacauagagc

SEQ ID NO: 2395410 - RNA, 19 nt, Artificial Sequence
  Description of Artificial Sequence: Synthetic oligonucleotide
  Sense strand starting at position 3325 of SEQ ID NO: 1886225
gcaugcuccuagggucaga

SEQ ID NO: 2395411 - RNA, 19 nt, Artificial Sequence
  Description of Artificial Sequence: Synthetic oligonucleotide
  Antisense strand to SEQ ID NO: 2395410
ucugacccuaggagcaugc

SEQ ID NO: 2395412 - RNA, 19 nt, Artificial Sequence
  Description of Artificial Sequence: Synthetic oligonucleotide
  Sense strand starting at position 3864 of SEQ ID NO: 1886225
gaucaaucaccucgugcau

SEQ ID NO: 2395413 - RNA, 19 nt, Artificial Sequence
  Description of Artificial Sequence: Synthetic oligonucleotide
  Antisense strand to SEQ ID NO: 2395412
augcacgaggugauugauc

SEQ ID NO: 2395414 - RNA, 19 nt, Artificial Sequence
  Description of Artificial Sequence: Synthetic oligonucleotide
  Sense strand starting at position 547 of SEQ ID NO: 1886226
ccauguaaacaguaacgau

SEQ ID NO: 2395415 - RNA, 19 nt, Artificial Sequence
  Description of Artificial Sequence: Synthetic oligonucleotide
  Antisense strand to SEQ ID NO: 2395414
aucguuacuguuuacaugg

SEQ ID NO: 2395416 - RNA, 19 nt, Artificial Sequence
  Description of Artificial Sequence: Synthetic oligonucleotide
  Sense strand starting at position 556 of SEQ ID NO: 1886226
caguaacgaucaugaaugu

SEQ ID NO: 2395417 - RNA, 19 nt, Artificial Sequence
  Description of Artificial Sequence: Synthetic oligonucleotide
  Antisense strand to SEQ ID NO: 2395416
acauucaugaucguuacug

SEQ ID NO: 2395418 - RNA, 19 nt, Artificial Sequence
  Description of Artificial Sequence: Synthetic oligonucleotide
  Sense strand starting at position 676 of SEQ ID NO: 1886226
caaguaggcugaccugaau

SEQ ID NO: 2395419 - RNA, 19 nt, Artificial Sequence
  Description of Artificial Sequence: Synthetic oligonucleotide
  Antisense strand to SEQ ID NO: 2395418
auucaggucagccuacuug

SEQ ID NO: 2395420 - RNA, 19 nt, Artificial Sequence
  Description of Artificial Sequence: Synthetic oligonucleotide
  Sense strand starting at position 819 of SEQ ID NO: 1886226
aggccaugcucagucaauc

SEQ ID NO: 2395421 - RNA, 19 nt, Artificial Sequence
  Description of Artificial Sequence: Synthetic oligonucleotide
  Antisense strand to SEQ ID NO: 2395420
gauugacugagcauggccu

SEQ ID NO: 2395422 - RNA, 19 nt, Artificial Sequence
  Description of Artificial Sequence: Synthetic oligonucleotide
  Sense strand starting at position 825 of SEQ ID NO: 1886226
ugcucagucaaucagggaa

SEQ ID NO: 2395423 - RNA, 19 nt, Artificial Sequence
  Description of Artificial Sequence: Synthetic oligonucleotide
  Antisense strand to SEQ ID NO: 2395422
uucccugauugacugagca

SEQ ID NO: 2395424 - RNA, 19 nt, Artificial Sequence
  Description of Artificial Sequence: Synthetic oligonucleotide
  Sense strand starting at position 1008 of SEQ ID NO: 1886226
ugaccuuuagcgggacaca

SEQ ID NO: 2395425 - RNA, 19 nt, Artificial Sequence
  Description of Artificial Sequence: Synthetic oligonucleotide
  Antisense strand to SEQ ID NO: 2395424
ugugucccgcuaaagguca

SEQ ID NO: 2395426 - RNA, 19 nt, Artificial Sequence
  Description of Artificial Sequence: Synthetic oligonucleotide
  Sense strand starting at position 1164 of SEQ ID NO: 1886226
ggcccauugcucuacaggu

SEQ ID NO: 2395427 - RNA, 19 nt, Artificial Sequence
  Description of Artificial Sequence: Synthetic oligonucleotide
  Antisense strand to SEQ ID NO: 2395426
accuguagagcaaugggcc

SEQ ID NO: 2395428 - RNA, 19 nt, Artificial Sequence
  Description of Artificial Sequence: Synthetic oligonucleotide
  Sense strand starting at position 1365 of SEQ ID NO: 1886226
ugacuugugcacugagucu

SEQ ID NO: 2395429 - RNA, 19 nt, Artificial Sequence
  Description of Artificial Sequence: Synthetic oligonucleotide
  Antisense strand to SEQ ID NO: 2395428
agacucagugcacaaguca

SEQ ID NO: 2395430 - RNA, 19 nt, Artificial Sequence
  Description of Artificial Sequence: Synthetic oligonucleotide
  Sense strand starting at position 1398 of SEQ ID NO: 1886226
acugcauugaguugaagga

SEQ ID NO: 2395431 - RNA, 19 nt, Artificial Sequence
  Description of Artificial Sequence: Synthetic oligonucleotide
  Antisense strand to SEQ ID NO: 2395430
uccuucaacucaaugcagu

SEQ ID NO: 2395432 - RNA, 19 nt, Artificial Sequence
  Description of Artificial Sequence: Synthetic oligonucleotide
  Sense strand starting at position 1665 of SEQ ID NO: 1886226
ggcagaagagcucgcugaa

SEQ ID NO: 2395433 - RNA, 19 nt, Artificial Sequence
  Description of Artificial Sequence: Synthetic oligonucleotide
  Antisense strand to SEQ ID NO: 2395432
uucagcgagcucuucugcc

SEQ ID NO: 2395434 - RNA, 19 nt, Artificial Sequence
  Description of Artificial Sequence: Synthetic oligonucleotide
  Sense strand starting at position 1987 of SEQ ID NO: 1886226
gguucucaucaucgaucca

SEQ ID NO: 2395435 - RNA, 19 nt, Artificial Sequence
  Description of Artificial Sequence: Synthetic oligonucleotide
  Antisense strand to SEQ ID NO: 2395434
uggaucgaugaugagaacc

SEQ ID NO: 2395436 - RNA, 19 nt, Artificial Sequence
  Description of Artificial Sequence: Synthetic oligonucleotide
  Sense strand starting at position 2209 of SEQ ID NO: 1886226
aggacauguguccaaccau

SEQ ID NO: 2395437 - RNA, 19 nt, Artificial Sequence
  Description of Artificial Sequence: Synthetic oligonucleotide
  Antisense strand to SEQ ID NO: 2395436
augguuggacacauguccu

SEQ ID NO: 2395438 - RNA, 19 nt, Artificial Sequence
  Description of Artificial Sequence: Synthetic oligonucleotide
  Sense strand starting at position 2314 of SEQ ID NO: 1886226
gggaaacacugauguguca

SEQ ID NO: 2395439 - RNA, 19 nt, Artificial Sequence
  Description of Artificial Sequence: Synthetic oligonucleotide
  Antisense strand to SEQ ID NO: 2395438
ugacacaucaguguuuccc

SEQ ID NO: 2395440 - RNA, 19 nt, Artificial Sequence
  Description of Artificial Sequence: Synthetic oligonucleotide
  Sense strand starting at position 2321 of SEQ ID NO: 1886226
acugaugugucauagauca

SEQ ID NO: 2395441 - RNA, 19 nt, Artificial Sequence
  Description of Artificial Sequence: Synthetic oligonucleotide
  Antisense strand to SEQ ID NO: 2395440
ugaucuaugacacaucagu

SEQ ID NO: 2395442 - RNA, 19 nt, Artificial Sequence
  Description of Artificial Sequence: Synthetic oligonucleotide
  Sense strand starting at position 2490 of SEQ ID NO: 1886226
guaucuggauccuugggua

SEQ ID NO: 2395443 - RNA, 19 nt, Artificial Sequence
  Description of Artificial Sequence: Synthetic oligonucleotide
  Antisense strand to SEQ ID NO: 2395442
uacccaaggauccagauac

SEQ ID NO: 2395444 - RNA, 19 nt, Artificial Sequence
  Description of Artificial Sequence: Synthetic oligonucleotide
  Sense strand starting at position 2682 of SEQ ID NO: 1886226
ucuggugugucccaaucca

SEQ ID NO: 2395445 - RNA, 19 nt, Artificial Sequence
  Description of Artificial Sequence: Synthetic oligonucleotide
  Antisense strand to SEQ ID NO: 2395444
uggauugggacacaccaga

SEQ ID NO: 2395446 - RNA, 19 nt, Artificial Sequence
  Description of Artificial Sequence: Synthetic oligonucleotide
  Sense strand starting at position 2750 of SEQ ID NO: 1886226
ccgggagacauaugguauc

SEQ ID NO: 2395447 - RNA, 19 nt, Artificial Sequence
  Description of Artificial Sequence: Synthetic oligonucleotide
  Antisense strand to SEQ ID NO: 2395446
gauaccauaugucucccgg

SEQ ID NO: 2395448 - RNA, 19 nt, Artificial Sequence
  Description of Artificial Sequence: Synthetic oligonucleotide
  Sense strand starting at position 2763 of SEQ ID NO: 1886226
gguaucuucuccuuucuuu

SEQ ID NO: 2395449 - RNA, 19 nt, Artificial Sequence
  Description of Artificial Sequence: Synthetic oligonucleotide
  Antisense strand to SEQ ID NO: 2395448
aaagaaaggagaagauacc

SEQ ID NO: 2395450 - RNA, 19 nt, Artificial Sequence
  Description of Artificial Sequence: Synthetic oligonucleotide
  Sense strand starting at position 2820 of SEQ ID NO: 1886226
uuguccuaauggcugagaa

SEQ ID NO: 2395451 - RNA, 19 nt, Artificial Sequence
  Description of Artificial Sequence: Synthetic oligonucleotide
  Antisense strand to SEQ ID NO: 2395450
uucucagccauuaggacaa

SEQ ID NO: 2395452 - RNA, 19 nt, Artificial Sequence
  Description of Artificial Sequence: Synthetic oligonucleotide
  Sense strand starting at position 2821 of SEQ ID NO: 1886226
uguccuaauggcugagaag

SEQ ID NO: 2395453 - RNA, 19 nt, Artificial Sequence
  Description of Artificial Sequence: Synthetic oligonucleotide
  Antisense strand to SEQ ID NO: 2395452
cuucucagccauuaggaca

SEQ ID NO: 2395454 - RNA, 19 nt, Artificial Sequence
  Description of Artificial Sequence: Synthetic oligonucleotide
  Sense strand starting at position 3126 of SEQ ID NO: 1886226
cuggguuugcugcaaucca

SEQ ID NO: 2395455 - RNA, 19 nt, Artificial Sequence
  Description of Artificial Sequence: Synthetic oligonucleotide
  Antisense strand to SEQ ID NO: 2395454
uggauugcagcaaacccag

SEQ ID NO: 2395456 - RNA, 19 nt, Artificial Sequence
  Description of Artificial Sequence: Synthetic oligonucleotide
  Sense strand starting at position 3133 of SEQ ID NO: 1886226
ugcugcaauccaugaaucu

SEQ ID NO: 2395457 - RNA, 19 nt, Artificial Sequence
  Description of Artificial Sequence: Synthetic oligonucleotide
  Antisense strand to SEQ ID NO: 2395456
agauucauggauugcagca

SEQ ID NO: 2395458 - RNA, 19 nt, Artificial Sequence
  Description of Artificial Sequence: Synthetic oligonucleotide
  Sense strand starting at position 3254 of SEQ ID NO: 1886226
guggccuggccauguuaga

SEQ ID NO: 2395459 - RNA, 19 nt, Artificial Sequence
  Description of Artificial Sequence: Synthetic oligonucleotide
  Antisense strand to SEQ ID NO: 2395458
ucuaacauggccaggccac

SEQ ID NO: 2395460 - RNA, 19 nt, Artificial Sequence
  Description of Artificial Sequence: Synthetic oligonucleotide
  Sense strand starting at position 3330 of SEQ ID NO: 1886226
cccuuuccugccuggacaa

SEQ ID NO: 2395461 - RNA, 19 nt, Artificial Sequence
  Description of Artificial Sequence: Synthetic oligonucleotide
  Antisense strand to SEQ ID NO: 2395460
uuguccaggcaggaaaggg

SEQ ID NO: 2395462 - RNA, 19 nt, Artificial Sequence
  Description of Artificial Sequence: Synthetic oligonucleotide
  Sense strand starting at position 3387 of SEQ ID NO: 1886226
uaugucugauucccaagga

SEQ ID NO: 2395463 - RNA, 19 nt, Artificial Sequence
  Description of Artificial Sequence: Synthetic oligonucleotide
  Antisense strand to SEQ ID NO: 2395462
uccuugggaaucagacaua

SEQ ID NO: 2395464 - RNA, 19 nt, Artificial Sequence
  Description of Artificial Sequence: Synthetic oligonucleotide
  Sense strand starting at position 3388 of SEQ ID NO: 1886226
augucugauucccaaggaa

SEQ ID NO: 2395465 - RNA, 19 nt, Artificial Sequence
  Description of Artificial Sequence: Synthetic oligonucleotide
  Antisense strand to SEQ ID NO: 2395464
uuccuugggaaucagacau

SEQ ID NO: 2395466 - RNA, 19 nt, Artificial Sequence
  Description of Artificial Sequence: Synthetic oligonucleotide
  Sense strand starting at position 3538 of SEQ ID NO: 1886226
cucaccuaugcucgucaau

SEQ ID NO: 2395467 - RNA, 19 nt, Artificial Sequence
  Description of Artificial Sequence: Synthetic oligonucleotide
  Antisense strand to SEQ ID NO: 2395466
auugacgagcauaggugag

SEQ ID NO: 2395468 - RNA, 19 nt, Artificial Sequence
  Description of Artificial Sequence: Synthetic oligonucleotide
  Sense strand starting at position 3676 of SEQ ID NO: 1886226
gaaagucuggugugccuaa

SEQ ID NO: 2395469 - RNA, 19 nt, Artificial Sequence
  Description of Artificial Sequence: Synthetic oligonucleotide
  Antisense strand to SEQ ID NO: 2395468
uuaggcacaccagacuuuc

SEQ ID NO: 2395470 - RNA, 19 nt, Artificial Sequence
  Description of Artificial Sequence: Synthetic oligonucleotide
  Sense strand starting at position 3683 of SEQ ID NO: 1886226
uggugugccuaauagagga

SEQ ID NO: 2395471 - RNA, 19 nt, Artificial Sequence
  Description of Artificial Sequence: Synthetic oligonucleotide
  Antisense strand to SEQ ID NO: 2395470
uccucuauuaggcacacca

SEQ ID NO: 2395472 - RNA, 19 nt, Artificial Sequence
  Description of Artificial Sequence: Synthetic oligonucleotide
  Sense strand starting at position 257 of SEQ ID NO: 1886227
uggcaagucuuccuccaca

SEQ ID NO: 2395473 - RNA, 19 nt, Artificial Sequence
  Description of Artificial Sequence: Synthetic oligonucleotide
  Antisense strand to SEQ ID NO: 2395472
uguggaggaagacuugcca

SEQ ID NO: 2395474 - RNA, 19 nt, Artificial Sequence
  Description of Artificial Sequence: Synthetic oligonucleotide
  Sense strand starting at position 299 of SEQ ID NO: 1886227
gaagacauguguccaacca

SEQ ID NO: 2395475 - RNA, 19 nt, Artificial Sequence
  Description of Artificial Sequence: Synthetic oligonucleotide
  Antisense strand to SEQ ID NO: 2395474
ugguuggacacaugucuuc

SEQ ID NO: 2395476 - RNA, 19 nt, Artificial Sequence
  Description of Artificial Sequence: Synthetic oligonucleotide
  Sense strand starting at position 320 of SEQ ID NO: 1886227
ggcucagaccucuauacag

SEQ ID NO: 2395477 - RNA, 19 nt, Artificial Sequence
  Description of Artificial Sequence: Synthetic oligonucleotide
  Antisense strand to SEQ ID NO: 2395476
cuguauagaggucugagcc

SEQ ID NO: 2395478 - RNA, 19 nt, Artificial Sequence
  Description of Artificial Sequence: Synthetic oligonucleotide
  Sense strand starting at position 405 of SEQ ID NO: 1886227
gugaaacacugaugugucu

SEQ ID NO: 2395479 - RNA, 19 nt, Artificial Sequence
  Description of Artificial Sequence: Synthetic oligonucleotide
  Antisense strand to SEQ ID NO: 2395478
agacacaucaguguuucac

SEQ ID NO: 2395480 - RNA, 19 nt, Artificial Sequence
  Description of Artificial Sequence: Synthetic oligonucleotide
  Sense strand starting at position 412 of SEQ ID NO: 1886227
acugaugugucucagacgu

SEQ ID NO: 2395481 - RNA, 19 nt, Artificial Sequence
  Description of Artificial Sequence: Synthetic oligonucleotide
  Antisense strand to SEQ ID NO: 2395480
acgucugagacacaucagu

SEQ ID NO: 2395482 - RNA, 19 nt, Artificial Sequence
  Description of Artificial Sequence: Synthetic oligonucleotide
  Sense strand starting at position 884 of SEQ ID NO: 1886227
cggagaugaccucauggcu

SEQ ID NO: 2395483 - RNA, 19 nt, Artificial Sequence
  Description of Artificial Sequence: Synthetic oligonucleotide
  Antisense strand to SEQ ID NO: 2395482
agccaugaggucaucuccg

SEQ ID NO: 2395484 - RNA, 19 nt, Artificial Sequence
  Description of Artificial Sequence: Synthetic oligonucleotide
  Sense strand starting at position 907 of SEQ ID NO: 1886227
agcagucuggacugcaaau

SEQ ID NO: 2395485 - RNA, 19 nt, Artificial Sequence
  Description of Artificial Sequence: Synthetic oligonucleotide
  Antisense strand to SEQ ID NO: 2395484
auuugcaguccagacugcu

SEQ ID NO: 2395486 - RNA, 19 nt, Artificial Sequence
  Description of Artificial Sequence: Synthetic oligonucleotide
  Sense strand starting at position 1090 of SEQ ID NO: 1886227
ggagcuagucuugacccaa

SEQ ID NO: 2395487 - RNA, 19 nt, Artificial Sequence
  Description of Artificial Sequence: Synthetic oligonucleotide
  Antisense strand to SEQ ID NO: 2395486
uugggucaagacuagcucc

SEQ ID NO: 2395488 - RNA, 19 nt, Artificial Sequence
  Description of Artificial Sequence: Synthetic oligonucleotide
  Sense strand starting at position 1188 of SEQ ID NO: 1886227
cauugagggauauggguuu

SEQ ID NO: 2395489 - RNA, 19 nt, Artificial Sequence
  Description of Artificial Sequence: Synthetic oligonucleotide
  Antisense strand to SEQ ID NO: 2395488
aaacccauaucccucaaug

SEQ ID NO: 2395490 - RNA, 19 nt, Artificial Sequence
  Description of Artificial Sequence: Synthetic oligonucleotide
  Sense strand starting at position 1194 of SEQ ID NO: 1886227
gggauauggguuuggugca

SEQ ID NO: 2395491 - RNA, 19 nt, Artificial Sequence
  Description of Artificial Sequence: Synthetic oligonucleotide
  Antisense strand to SEQ ID NO: 2395490
ugcaccaaacccauauccc

SEQ ID NO: 2395492 - RNA, 19 nt, Artificial Sequence
  Description of Artificial Sequence: Synthetic oligonucleotide
  Sense strand starting at position 1195 of SEQ ID NO: 1886227
ggauauggguuuggugcaa

SEQ ID NO: 2395493 - RNA, 19 nt, Artificial Sequence
  Description of Artificial Sequence: Synthetic oligonucleotide
  Antisense strand to SEQ ID NO: 2395492
uugcaccaaacccauaucc

SEQ ID NO: 2395494 - RNA, 19 nt, Artificial Sequence
  Description of Artificial Sequence: Synthetic oligonucleotide
  Sense strand starting at position 1206 of SEQ ID NO: 1886227
uggugcaauccuugaagcu

SEQ ID NO: 2395495 - RNA, 19 nt, Artificial Sequence
  Description of Artificial Sequence: Synthetic oligonucleotide
  Antisense strand to SEQ ID NO: 2395494
agcuucaaggauugcacca

SEQ ID NO: 2395496 - RNA, 19 nt, Artificial Sequence
  Description of Artificial Sequence: Synthetic oligonucleotide
  Sense strand starting at position 1207 of SEQ ID NO: 1886227
ggugcaauccuugaagcuc

SEQ ID NO: 2395497 - RNA, 19 nt, Artificial Sequence
  Description of Artificial Sequence: Synthetic oligonucleotide
  Antisense strand to SEQ ID NO: 2395496
gagcuucaaggauugcacc

SEQ ID NO: 2395498 - RNA, 19 nt, Artificial Sequence
  Description of Artificial Sequence: Synthetic oligonucleotide
  Sense strand starting at position 1281 of SEQ ID NO: 1886227
ccaugagaugucuguggug

SEQ ID NO: 2395499 - RNA, 19 nt, Artificial Sequence
  Description of Artificial Sequence: Synthetic oligonucleotide
  Antisense strand to SEQ ID NO: 2395498
caccacagacaucucaugg

SEQ ID NO: 2395500 - RNA, 19 nt, Artificial Sequence
  Description of Artificial Sequence: Synthetic oligonucleotide
  Sense strand starting at position 1463 of SEQ ID NO: 1886227
gccuccuccuugugucaga

SEQ ID NO: 2395501 - RNA, 19 nt, Artificial Sequence
  Description of Artificial Sequence: Synthetic oligonucleotide
  Antisense strand to SEQ ID NO: 2395500
ucugacacaaggaggaggc

SEQ ID NO: 2395502 - RNA, 19 nt, Artificial Sequence
  Description of Artificial Sequence: Synthetic oligonucleotide
  Sense strand starting at position 1464 of SEQ ID NO: 1886227
ccuccuccuugugucagau

SEQ ID NO: 2395503 - RNA, 19 nt, Artificial Sequence
  Description of Artificial Sequence: Synthetic oligonucleotide
  Antisense strand to SEQ ID NO: 2395502
aucugacacaaggaggagg

SEQ ID NO: 2395504 - RNA, 19 nt, Artificial Sequence
  Description of Artificial Sequence: Synthetic oligonucleotide
  Sense strand starting at position 1474 of SEQ ID NO: 1886227
gugucagauucccaaggaa

SEQ ID NO: 2395505 - RNA, 19 nt, Artificial Sequence
  Description of Artificial Sequence: Synthetic oligonucleotide
  Antisense strand to SEQ ID NO: 2395504
uuccuugggaaucugacac

SEQ ID NO: 2395506 - RNA, 19 nt, Artificial Sequence
  Description of Artificial Sequence: Synthetic oligonucleotide
  Sense strand starting at position 1876 of SEQ ID NO: 1886227
ccuugugauucccagcauc

SEQ ID NO: 2395507 - RNA, 19 nt, Artificial Sequence
  Description of Artificial Sequence: Synthetic oligonucleotide
  Antisense strand to SEQ ID NO: 2395506
gaugcugggaaucacaagg

SEQ ID NO: 2395508 - RNA, 19 nt, Artificial Sequence
  Description of Artificial Sequence: Synthetic oligonucleotide
  Sense strand starting at position 2283 of SEQ ID NO: 1886227
ggacucaugugaugggauc

SEQ ID NO: 2395509 - RNA, 19 nt, Artificial Sequence
  Description of Artificial Sequence: Synthetic oligonucleotide
  Antisense strand to SEQ ID NO: 2395508
gaucccaucacaugagucc

SEQ ID NO: 2395510 - RNA, 19 nt, Artificial Sequence
  Description of Artificial Sequence: Synthetic oligonucleotide
  Sense strand starting at position 2294 of SEQ ID NO: 1886227
augggauccaugugaaacg

SEQ ID NO: 2395511 - RNA, 19 nt, Artificial Sequence
  Description of Artificial Sequence: Synthetic oligonucleotide
  Antisense strand to SEQ ID NO: 2395510
cguuucacauggaucccau

SEQ ID NO: 2395512 - RNA, 19 nt, Artificial Sequence
  Description of Artificial Sequence: Synthetic oligonucleotide
  Sense strand starting at position 2530 of SEQ ID NO: 1886227
caaggaagcuugcucugaa

SEQ ID NO: 2395513 - RNA, 19 nt, Artificial Sequence
  Description of Artificial Sequence: Synthetic oligonucleotide
  Antisense strand to SEQ ID NO: 2395512
uucagagcaagcuuccuug

SEQ ID NO: 2395514 - RNA, 19 nt, Artificial Sequence
  Description of Artificial Sequence: Synthetic oligonucleotide
  Sense strand starting at position 2531 of SEQ ID NO: 1886227
aaggaagcuugcucugaag

SEQ ID NO: 2395515 - RNA, 19 nt, Artificial Sequence
  Description of Artificial Sequence: Synthetic oligonucleotide
  Antisense strand to SEQ ID NO: 2395514
cuucagagcaagcuuccuu

SEQ ID NO: 2395516 - RNA, 19 nt, Artificial Sequence
  Description of Artificial Sequence: Synthetic oligonucleotide
  Sense strand starting at position 2533 of SEQ ID NO: 1886227
ggaagcuugcucugaagcu

SEQ ID NO: 2395517 - RNA, 19 nt, Artificial Sequence
  Description of Artificial Sequence: Synthetic oligonucleotide
  Antisense strand to SEQ ID NO: 2395516
agcuucagagcaagcuucc

SEQ ID NO: 2395518 - RNA, 19 nt, Artificial Sequence
  Description of Artificial Sequence: Synthetic oligonucleotide
  Sense strand starting at position 2534 of SEQ ID NO: 1886227
gaagcuugcucugaagcua

SEQ ID NO: 2395519 - RNA, 19 nt, Artificial Sequence
  Description of Artificial Sequence: Synthetic oligonucleotide
  Antisense strand to SEQ ID NO: 2395518
uagcuucagagcaagcuuc

SEQ ID NO: 2395520 - RNA, 19 nt, Artificial Sequence
  Description of Artificial Sequence: Synthetic oligonucleotide
  Sense strand starting at position 3505 of SEQ ID NO: 1886227
gggucaccaucucgaggaa

SEQ ID NO: 2395521 - RNA, 19 nt, Artificial Sequence
  Description of Artificial Sequence: Synthetic oligonucleotide
  Antisense strand to SEQ ID NO: 2395520
uuccucgagauggugaccc

SEQ ID NO: 2395522 - RNA, 19 nt, Artificial Sequence
  Description of Artificial Sequence: Synthetic oligonucleotide
  Sense strand starting at position 3634 of SEQ ID NO: 1886227
guggaauacuggcccauca

SEQ ID NO: 2395523 - RNA, 19 nt, Artificial Sequence
  Description of Artificial Sequence: Synthetic oligonucleotide
  Antisense strand to SEQ ID NO: 2395522
ugaugggccaguauuccac

SEQ ID NO: 2395524 - RNA, 19 nt, Artificial Sequence
  Description of Artificial Sequence: Synthetic oligonucleotide
  Sense strand starting at position 180 of SEQ ID NO: 1886228
ccaggaagugcccaaucuu

SEQ ID NO: 2395525 - RNA, 19 nt, Artificial Sequence
  Description of Artificial Sequence: Synthetic oligonucleotide
  Antisense strand to SEQ ID NO: 2395524
aagauugggcacuuccugg

SEQ ID NO: 2395526 - RNA, 19 nt, Artificial Sequence
  Description of Artificial Sequence: Synthetic oligonucleotide
  Sense strand starting at position 407 of SEQ ID NO: 1886228
agaacacuggcuugucaca

SEQ ID NO: 2395527 - RNA, 19 nt, Artificial Sequence
  Description of Artificial Sequence: Synthetic oligonucleotide
  Antisense strand to SEQ ID NO: 2395526
ugugacaagccaguguucu

SEQ ID NO: 2395528 - RNA, 19 nt, Artificial Sequence
  Description of Artificial Sequence: Synthetic oligonucleotide
  Sense strand starting at position 409 of SEQ ID NO: 1886228
aacacuggcuugucacaga

SEQ ID NO: 2395529 - RNA, 19 nt, Artificial Sequence
  Description of Artificial Sequence: Synthetic oligonucleotide
  Antisense strand to SEQ ID NO: 2395528
ucugugacaagccaguguu

SEQ ID NO: 2395530 - RNA, 19 nt, Artificial Sequence
  Description of Artificial Sequence: Synthetic oligonucleotide
  Sense strand starting at position 848 of SEQ ID NO: 1886228
gacacauggugacuucuuu

SEQ ID NO: 2395531 - RNA, 19 nt, Artificial Sequence
  Description of Artificial Sequence: Synthetic oligonucleotide
  Antisense strand to SEQ ID NO: 2395530
aaagaagucaccauguguc

SEQ ID NO: 2395532 - RNA, 19 nt, Artificial Sequence
  Description of Artificial Sequence: Synthetic oligonucleotide
  Sense strand starting at position 1055 of SEQ ID NO: 1886228
acugaucccuuggccuaaa

SEQ ID NO: 2395533 - RNA, 19 nt, Artificial Sequence
  Description of Artificial Sequence: Synthetic oligonucleotide
  Antisense strand to SEQ ID NO: 2395532
uuuaggccaagggaucagu

SEQ ID NO: 2395534 - RNA, 19 nt, Artificial Sequence
  Description of Artificial Sequence: Synthetic oligonucleotide
  Sense strand starting at position 1119 of SEQ ID NO: 1886228
agagcucagccuugaccaa

SEQ ID NO: 2395535 - RNA, 19 nt, Artificial Sequence
  Description of Artificial Sequence: Synthetic oligonucleotide
  Antisense strand to SEQ ID NO: 2395534
uuggucaaggcugagcucu

SEQ ID NO: 2395536 - RNA, 19 nt, Artificial Sequence
  Description of Artificial Sequence: Synthetic oligonucleotide
  Sense strand starting at position 1227 of SEQ ID NO: 1886228
ggcuauaaauccuguguga

SEQ ID NO: 2395537 - RNA, 19 nt, Artificial Sequence
  Description of Artificial Sequence: Synthetic oligonucleotide
  Antisense strand to SEQ ID NO: 2395536
ucacacaggauuuauagcc

SEQ ID NO: 2395538 - RNA, 19 nt, Artificial Sequence
  Description of Artificial Sequence: Synthetic oligonucleotide
  Sense strand starting at position 1238 of SEQ ID NO: 1886228
cugugugauccuuaaauau

SEQ ID NO: 2395539 - RNA, 19 nt, Artificial Sequence
  Description of Artificial Sequence: Synthetic oligonucleotide
  Antisense strand to SEQ ID NO: 2395538
auauuuaaggaucacacag

SEQ ID NO: 2395540 - RNA, 19 nt, Artificial Sequence
  Description of Artificial Sequence: Synthetic oligonucleotide
  Sense strand starting at position 1365 of SEQ ID NO: 1886228
gucaguccucgaggccaga

SEQ ID NO: 2395541 - RNA, 19 nt, Artificial Sequence
  Description of Artificial Sequence: Synthetic oligonucleotide
  Antisense strand to SEQ ID NO: 2395540
ucuggccucgaggacugac

SEQ ID NO: 2395542 - RNA, 19 nt, Artificial Sequence
  Description of Artificial Sequence: Synthetic oligonucleotide
  Sense strand starting at position 1414 of SEQ ID NO: 1886228
ccugcaugagauugaagga

SEQ ID NO: 2395543 - RNA, 19 nt, Artificial Sequence
  Description of Artificial Sequence: Synthetic oligonucleotide
  Antisense strand to SEQ ID NO: 2395542
uccuucaaucucaugcagg

SEQ ID NO: 2395544 - RNA, 19 nt, Artificial Sequence
  Description of Artificial Sequence: Synthetic oligonucleotide
  Sense strand starting at position 1861 of SEQ ID NO: 1886228
uuggucauuccagggaacu

SEQ ID NO: 2395545 - RNA, 19 nt, Artificial Sequence
  Description of Artificial Sequence: Synthetic oligonucleotide
  Antisense strand to SEQ ID NO: 2395544
aguucccuggaaugaccaa

SEQ ID NO: 2395546 - RNA, 19 nt, Artificial Sequence
  Description of Artificial Sequence: Synthetic oligonucleotide
  Sense strand starting at position 1862 of SEQ ID NO: 1886228
uggucauuccagggaacuc

SEQ ID NO: 2395547 - RNA, 19 nt, Artificial Sequence
  Description of Artificial Sequence: Synthetic oligonucleotide
  Antisense strand to SEQ ID NO: 2395546
gaguucccuggaaugacca

SEQ ID NO: 2395548 - RNA, 19 nt, Artificial Sequence
  Description of Artificial Sequence: Synthetic oligonucleotide
  Sense strand starting at position 2307 of SEQ ID NO: 1886228
uggucauuuacgcgaggaa

SEQ ID NO: 2395549 - RNA, 19 nt, Artificial Sequence
  Description of Artificial Sequence: Synthetic oligonucleotide
  Antisense strand to SEQ ID NO: 2395548
uuccucgcguaaaugacca

SEQ ID NO: 2395550 - RNA, 19 nt, Artificial Sequence
  Description of Artificial Sequence: Synthetic oligonucleotide
  Sense strand starting at position 2364 of SEQ ID NO: 1886228
gucacaggguucgagcaaa

SEQ ID NO: 2395551 - RNA, 19 nt, Artificial Sequence
  Description of Artificial Sequence: Synthetic oligonucleotide
  Antisense strand to SEQ ID NO: 2395550
uuugcucgaacccugugac

SEQ ID NO: 2395552 - RNA, 19 nt, Artificial Sequence
  Description of Artificial Sequence: Synthetic oligonucleotide
  Sense strand starting at position 2446 of SEQ ID NO: 1886228
gcucgaaucugggcugcau

SEQ ID NO: 2395553 - RNA, 19 nt, Artificial Sequence
  Description of Artificial Sequence: Synthetic oligonucleotide
  Antisense strand to SEQ ID NO: 2395552
augcagcccagauucgagc

SEQ ID NO: 2395554 - RNA, 19 nt, Artificial Sequence
  Description of Artificial Sequence: Synthetic oligonucleotide
  Sense strand starting at position 2793 of SEQ ID NO: 1886228
ucagaaguagccugggcau

SEQ ID NO: 2395555 - RNA, 19 nt, Artificial Sequence
  Description of Artificial Sequence: Synthetic oligonucleotide
  Antisense strand to SEQ ID NO: 2395554
augcccaggcuacuucuga

SEQ ID NO: 2395556 - RNA, 19 nt, Artificial Sequence
  Description of Artificial Sequence: Synthetic oligonucleotide
  Sense strand starting at position 2808 of SEQ ID NO: 1886228
gcaucaaauugccaggaca

SEQ ID NO: 2395557 - RNA, 19 nt, Artificial Sequence
  Description of Artificial Sequence: Synthetic oligonucleotide
  Antisense strand to SEQ ID NO: 2395556
uguccuggcaauuugaugc

SEQ ID NO: 2395558 - RNA, 19 nt, Artificial Sequence
  Description of Artificial Sequence: Synthetic oligonucleotide
  Sense strand starting at position 2876 of SEQ ID NO: 1886228
cuccacuuccgguagggau

SEQ ID NO: 2395559 - RNA, 19 nt, Artificial Sequence
  Description of Artificial Sequence: Synthetic oligonucleotide
  Antisense strand to SEQ ID NO: 2395558
aucccuaccggaaguggag

SEQ ID NO: 2395560 - RNA, 19 nt, Artificial Sequence
  Description of Artificial Sequence: Synthetic oligonucleotide
  Sense strand starting at position 2935 of SEQ ID NO: 1886228
ccacgauucccagggccaa

SEQ ID NO: 2395561 - RNA, 19 nt, Artificial Sequence
  Description of Artificial Sequence: Synthetic oligonucleotide
  Antisense strand to SEQ ID NO: 2395560
uuggcccugggaaucgugg

SEQ ID NO: 2395562 - RNA, 19 nt, Artificial Sequence
  Description of Artificial Sequence: Synthetic oligonucleotide
  Sense strand starting at position 2936 of SEQ ID NO: 1886228
cacgauucccagggccaaa

SEQ ID NO: 2395563 - RNA, 19 nt, Artificial Sequence
  Description of Artificial Sequence: Synthetic oligonucleotide
  Antisense strand to SEQ ID NO: 2395562
uuuggcccugggaaucgug

SEQ ID NO: 2395564 - RNA, 19 nt, Artificial Sequence
  Description of Artificial Sequence: Synthetic oligonucleotide
  Sense strand starting at position 3037 of SEQ ID NO: 1886228
gggauagcccauugcucaa

SEQ ID NO: 2395565 - RNA, 19 nt, Artificial Sequence
  Description of Artificial Sequence: Synthetic oligonucleotide
  Antisense strand to SEQ ID NO: 2395564
uugagcaaugggcuauccc

SEQ ID NO: 2395566 - RNA, 19 nt, Artificial Sequence
  Description of Artificial Sequence: Synthetic oligonucleotide
  Sense strand starting at position 3291 of SEQ ID NO: 1886228
gucaauaaguccugugcga

SEQ ID NO: 2395567 - RNA, 19 nt, Artificial Sequence
  Description of Artificial Sequence: Synthetic oligonucleotide
  Antisense strand to SEQ ID NO: 2395566
ucgcacaggacuuauugac

SEQ ID NO: 2395568 - RNA, 19 nt, Artificial Sequence
  Description of Artificial Sequence: Synthetic oligonucleotide
  Sense strand starting at position 3293 of SEQ ID NO: 1886228
caauaaguccugugcgauc

SEQ ID NO: 2395569 - RNA, 19 nt, Artificial Sequence
  Description of Artificial Sequence: Synthetic oligonucleotide
  Antisense strand to SEQ ID NO: 2395568
gaucgcacaggacuuauug

SEQ ID NO: 2395570 - RNA, 19 nt, Artificial Sequence
  Description of Artificial Sequence: Synthetic oligonucleotide
  Sense strand starting at position 3302 of SEQ ID NO: 1886228
cugugcgauccuuaaaucu

SEQ ID NO: 2395571 - RNA, 19 nt, Artificial Sequence
  Description of Artificial Sequence: Synthetic oligonucleotide
  Antisense strand to SEQ ID NO: 2395570
agauuuaaggaucgcacag

SEQ ID NO: 2395572 - RNA, 19 nt, Artificial Sequence
  Description of Artificial Sequence: Synthetic oligonucleotide
  Sense strand starting at position 3395 of SEQ ID NO: 1886228
acuguauuggguugaagga

SEQ ID NO: 2395573 - RNA, 19 nt, Artificial Sequence
  Description of Artificial Sequence: Synthetic oligonucleotide
  Antisense strand to SEQ ID NO: 2395572
uccuucaacccaauacagu

SEQ ID NO: 2395574 - RNA, 19 nt, Artificial Sequence
  Description of Artificial Sequence: Synthetic oligonucleotide
  Sense strand starting at position 3462 of SEQ ID NO: 1886228
gcguccuucuugggaucaa

SEQ ID NO: 2395575 - RNA, 19 nt, Artificial Sequence
  Description of Artificial Sequence: Synthetic oligonucleotide
  Antisense strand to SEQ ID NO: 2395574
uugaucccaagaaggacgc

SEQ ID NO: 2395576 - RNA, 19 nt, Artificial Sequence
  Description of Artificial Sequence: Synthetic oligonucleotide
  Sense strand starting at position 3463 of SEQ ID NO: 1886228
cguccuucuugggaucaau

SEQ ID NO: 2395577 - RNA, 19 nt, Artificial Sequence
  Description of Artificial Sequence: Synthetic oligonucleotide
  Antisense strand to SEQ ID NO: 2395576
auugaucccaagaaggacg

SEQ ID NO: 2395578 - RNA, 19 nt, Artificial Sequence
  Description of Artificial Sequence: Synthetic oligonucleotide
  Sense strand starting at position 3473 of SEQ ID NO: 1886228
gggaucaauuaacaaggaa

SEQ ID NO: 2395579 - RNA, 19 nt, Artificial Sequence
  Description of Artificial Sequence: Synthetic oligonucleotide
  Antisense strand to SEQ ID NO: 2395578
uuccuuguuaauugauccc

SEQ ID NO: 2395580 - RNA, 19 nt, Artificial Sequence
  Description of Artificial Sequence: Synthetic oligonucleotide
  Sense strand starting at position 3533 of SEQ ID NO: 1886228
aggucagcucccuaaggaa

SEQ ID NO: 2395581 - RNA, 19 nt, Artificial Sequence
  Description of Artificial Sequence: Synthetic oligonucleotide
  Antisense strand to SEQ ID NO: 2395580
uuccuuagggagcugaccu

SEQ ID NO: 2395582 - RNA, 19 nt, Artificial Sequence
  Description of Artificial Sequence: Synthetic oligonucleotide
  Sense strand starting at position 261 of SEQ ID NO: 1886229
gugguucugccagggaacu

SEQ ID NO: 2395583 - RNA, 19 nt, Artificial Sequence
  Description of Artificial Sequence: Synthetic oligonucleotide
  Antisense strand to SEQ ID NO: 2395582
aguucccuggcagaaccac

SEQ ID NO: 2395584 - RNA, 19 nt, Artificial Sequence
  Description of Artificial Sequence: Synthetic oligonucleotide
  Sense strand starting at position 699 of SEQ ID NO: 1886229
gagaaugccugcccaggau

SEQ ID NO: 2395585 - RNA, 19 nt, Artificial Sequence
  Description of Artificial Sequence: Synthetic oligonucleotide
  Antisense strand to SEQ ID NO: 2395584
auccugggcaggcauucuc

SEQ ID NO: 2395586 - RNA, 19 nt, Artificial Sequence
  Description of Artificial Sequence: Synthetic oligonucleotide
  Sense strand starting at position 923 of SEQ ID NO: 1886229
gcaacaaauucccaggaca

SEQ ID NO: 2395587 - RNA, 19 nt, Artificial Sequence
  Description of Artificial Sequence: Synthetic oligonucleotide
  Antisense strand to SEQ ID NO: 2395586
uguccugggaauuuguugc

SEQ ID NO: 2395588 - RNA, 19 nt, Artificial Sequence
  Description of Artificial Sequence: Synthetic oligonucleotide
  Sense strand starting at position 987 of SEQ ID NO: 1886229
cgccacugaccucgaagaa

SEQ ID NO: 2395589 - RNA, 19 nt, Artificial Sequence
  Description of Artificial Sequence: Synthetic oligonucleotide
  Antisense strand to SEQ ID NO: 2395588
uucuucgaggucaguggcg

SEQ ID NO: 2395590 - RNA, 19 nt, Artificial Sequence
  Description of Artificial Sequence: Synthetic oligonucleotide
  Sense strand starting at position 1211 of SEQ ID NO: 1886229
gggcacgauccuugaaucu

SEQ ID NO: 2395591 - RNA, 19 nt, Artificial Sequence
  Description of Artificial Sequence: Synthetic oligonucleotide
  Antisense strand to SEQ ID NO: 2395590
agauucaaggaucgugccc

SEQ ID NO: 2395592 - RNA, 19 nt, Artificial Sequence
  Description of Artificial Sequence: Synthetic oligonucleotide
  Sense strand starting at position 1286 of SEQ ID NO: 1886229
cugagugaucccuguggua

SEQ ID NO: 2395593 - RNA, 19 nt, Artificial Sequence
  Description of Artificial Sequence: Synthetic oligonucleotide
  Antisense strand to SEQ ID NO: 2395592
uaccacagggaucacucag

SEQ ID NO: 2395594 - RNA, 19 nt, Artificial Sequence
  Description of Artificial Sequence: Synthetic oligonucleotide
  Sense strand starting at position 1288 of SEQ ID NO: 1886229
gagugaucccugugguauc

SEQ ID NO: 2395595 - RNA, 19 nt, Artificial Sequence
  Description of Artificial Sequence: Synthetic oligonucleotide
  Antisense strand to SEQ ID NO: 2395594
gauaccacagggaucacuc

SEQ ID NO: 2395596 - RNA, 19 nt, Artificial Sequence
  Description of Artificial Sequence: Synthetic oligonucleotide
  Sense strand starting at position 1340 of SEQ ID NO: 1886229
ggcaguccucaaggacaga

SEQ ID NO: 2395597 - RNA, 19 nt, Artificial Sequence
  Description of Artificial Sequence: Synthetic oligonucleotide
  Antisense strand to SEQ ID NO: 2395596
ucuguccuugaggacugcc

SEQ ID NO: 2395598 - RNA, 19 nt, Artificial Sequence
  Description of Artificial Sequence: Synthetic oligonucleotide
  Sense strand starting at position 1532 of SEQ ID NO: 1886229
ggucgacucccugaggaaa

SEQ ID NO: 2395599 - RNA, 19 nt, Artificial Sequence
  Description of Artificial Sequence: Synthetic oligonucleotide
  Antisense strand to SEQ ID NO: 2395598
uuuccucagggagucgacc

SEQ ID NO: 2395600 - RNA, 19 nt, Artificial Sequence
  Description of Artificial Sequence: Synthetic oligonucleotide
  Sense strand starting at position 1616 of SEQ ID NO: 1886229
gcaggauccacucaccgau

SEQ ID NO: 2395601 - RNA, 19 nt, Artificial Sequence
  Description of Artificial Sequence: Synthetic oligonucleotide
  Antisense strand to SEQ ID NO: 2395600
aucggugaguggauccugc

SEQ ID NO: 2395602 - RNA, 19 nt, Artificial Sequence
  Description of Artificial Sequence: Synthetic oligonucleotide
  Sense strand starting at position 2085 of SEQ ID NO: 1886229
ccaggaagugcccaaucuu

SEQ ID NO: 2395603 - RNA, 19 nt, Artificial Sequence
  Description of Artificial Sequence: Synthetic oligonucleotide
  Antisense strand to SEQ ID NO: 2395602
aagauugggcacuuccugg

SEQ ID NO: 2395604 - RNA, 19 nt, Artificial Sequence
  Description of Artificial Sequence: Synthetic oligonucleotide
  Sense strand starting at position 2312 of SEQ ID NO: 1886229
agaacacuggcuugucaca

SEQ ID NO: 2395605 - RNA, 19 nt, Artificial Sequence
  Description of Artificial Sequence: Synthetic oligonucleotide
  Antisense strand to SEQ ID NO: 2395604
ugugacaagccaguguucu

SEQ ID NO: 2395606 - RNA, 19 nt, Artificial Sequence
  Description of Artificial Sequence: Synthetic oligonucleotide
  Sense strand starting at position 2314 of SEQ ID NO: 1886229
aacacuggcuugucacaga

SEQ ID NO: 2395607 - RNA, 19 nt, Artificial Sequence
  Description of Artificial Sequence: Synthetic oligonucleotide
  Antisense strand to SEQ ID NO: 2395606
ucugugacaagccaguguu

SEQ ID NO: 2395608 - RNA, 19 nt, Artificial Sequence
  Description of Artificial Sequence: Synthetic oligonucleotide
  Sense strand starting at position 2753 of SEQ ID NO: 1886229
gacacauggugacuucuuu

SEQ ID NO: 2395609 - RNA, 19 nt, Artificial Sequence
  Description of Artificial Sequence: Synthetic oligonucleotide
  Antisense strand to SEQ ID NO: 2395608
aaagaagucaccauguguc

SEQ ID NO: 2395610 - RNA, 19 nt, Artificial Sequence
  Description of Artificial Sequence: Synthetic oligonucleotide
  Sense strand starting at position 2960 of SEQ ID NO: 1886229
acugaucccuuggccuaaa

SEQ ID NO: 2395611 - RNA, 19 nt, Artificial Sequence
  Description of Artificial Sequence: Synthetic oligonucleotide
  Antisense strand to SEQ ID NO: 2395610
uuuaggccaagggaucagu

SEQ ID NO: 2395612 - RNA, 19 nt, Artificial Sequence
  Description of Artificial Sequence: Synthetic oligonucleotide
  Sense strand starting at position 3024 of SEQ ID NO: 1886229
agagcucagccuugaccaa

SEQ ID NO: 2395613 - RNA, 19 nt, Artificial Sequence
  Description of Artificial Sequence: Synthetic oligonucleotide
  Antisense strand to SEQ ID NO: 2395612
uuggucaaggcugagcucu

SEQ ID NO: 2395614 - RNA, 19 nt, Artificial Sequence
  Description of Artificial Sequence: Synthetic oligonucleotide
  Sense strand starting at position 3132 of SEQ ID NO: 1886229
ggcuauaaauccuguguga

SEQ ID NO: 2395615 - RNA, 19 nt, Artificial Sequence
  Description of Artificial Sequence: Synthetic oligonucleotide
  Antisense strand to SEQ ID NO: 2395614
ucacacaggauuuauagcc

SEQ ID NO: 2395616 - RNA, 19 nt, Artificial Sequence
  Description of Artificial Sequence: Synthetic oligonucleotide
  Sense strand starting at position 3143 of SEQ ID NO: 1886229
cugugugauccuuaaauau

SEQ ID NO: 2395617 - RNA, 19 nt, Artificial Sequence
  Description of Artificial Sequence: Synthetic oligonucleotide
  Antisense strand to SEQ ID NO: 2395616
auauuuaaggaucacacag

SEQ ID NO: 2395618 - RNA, 19 nt, Artificial Sequence
  Description of Artificial Sequence: Synthetic oligonucleotide
  Sense strand starting at position 3270 of SEQ ID NO: 1886229
gucaguccucgaggccaga

SEQ ID NO: 2395619 - RNA, 19 nt, Artificial Sequence
  Description of Artificial Sequence: Synthetic oligonucleotide
  Antisense strand to SEQ ID NO: 2395618
ucuggccucgaggacugac

SEQ ID NO: 2395620 - RNA, 19 nt, Artificial Sequence
  Description of Artificial Sequence: Synthetic oligonucleotide
  Sense strand starting at position 3319 of SEQ ID NO: 1886229
ccugcaugagauugaagga

SEQ ID NO: 2395621 - RNA, 19 nt, Artificial Sequence
  Description of Artificial Sequence: Synthetic oligonucleotide
  Antisense strand to SEQ ID NO: 2395620
uccuucaaucucaugcagg

SEQ ID NO: 2395622 - RNA, 19 nt, Artificial Sequence
  Description of Artificial Sequence: Synthetic oligonucleotide
  Sense strand starting at position 3766 of SEQ ID NO: 1886229
uuggucauuccagggaacu

SEQ ID NO: 2395623 - RNA, 19 nt, Artificial Sequence
  Description of Artificial Sequence: Synthetic oligonucleotide
  Antisense strand to SEQ ID NO: 2395622
aguucccuggaaugaccaa

SEQ ID NO: 2395624 - RNA, 19 nt, Artificial Sequence
  Description of Artificial Sequence: Synthetic oligonucleotide
  Sense strand starting at position 3767 of SEQ ID NO: 1886229
uggucauuccagggaacuc

SEQ ID NO: 2395625 - RNA, 19 nt, Artificial Sequence
  Description of Artificial Sequence: Synthetic oligonucleotide
  Antisense strand to SEQ ID NO: 2395624
gaguucccuggaaugacca

SEQ ID NO: 2395626 - RNA, 19 nt, Artificial Sequence
  Description of Artificial Sequence: Synthetic oligonucleotide
  Sense strand starting at position 306 of SEQ ID NO: 1886230
ccaugauucccagggccaa

SEQ ID NO: 2395627 - RNA, 19 nt, Artificial Sequence
  Description of Artificial Sequence: Synthetic oligonucleotide
  Antisense strand to SEQ ID NO: 2395626
uuggcccugggaaucaugg

SEQ ID NO: 2395628 - RNA, 19 nt, Artificial Sequence
  Description of Artificial Sequence: Synthetic oligonucleotide
  Sense strand starting at position 407 of SEQ ID NO: 1886230
caggauggccauugcucaa

SEQ ID NO: 2395629 - RNA, 19 nt, Artificial Sequence
  Description of Artificial Sequence: Synthetic oligonucleotide
  Antisense strand to SEQ ID NO: 2395628
uugagcaauggccauccug

SEQ ID NO: 2395630 - RNA, 19 nt, Artificial Sequence
  Description of Artificial Sequence: Synthetic oligonucleotide
  Sense strand starting at position 467 of SEQ ID NO: 1886230
uugaauguucacggccuga

SEQ ID NO: 2395631 - RNA, 19 nt, Artificial Sequence
  Description of Artificial Sequence: Synthetic oligonucleotide
  Antisense strand to SEQ ID NO: 2395630
ucaggccgugaacauucaa

SEQ ID NO: 2395632 - RNA, 19 nt, Artificial Sequence
  Description of Artificial Sequence: Synthetic oligonucleotide
  Sense strand starting at position 647 of SEQ ID NO: 1886230
cugcguuggguugaaagaa

SEQ ID NO: 2395633 - RNA, 19 nt, Artificial Sequence
  Description of Artificial Sequence: Synthetic oligonucleotide
  Antisense strand to SEQ ID NO: 2395632
uucuuucaacccaacgcag

SEQ ID NO: 2395634 - RNA, 19 nt, Artificial Sequence
  Description of Artificial Sequence: Synthetic oligonucleotide
  Sense strand starting at position 705 of SEQ ID NO: 1886230
cagggaagguguccuucuu

SEQ ID NO: 2395635 - RNA, 19 nt, Artificial Sequence
  Description of Artificial Sequence: Synthetic oligonucleotide
  Antisense strand to SEQ ID NO: 2395634
aagaaggacaccuucccug

SEQ ID NO: 2395636 - RNA, 19 nt, Artificial Sequence
  Description of Artificial Sequence: Synthetic oligonucleotide
  Sense strand starting at position 714 of SEQ ID NO: 1886230
uguccuucuugggacugau

SEQ ID NO: 2395637 - RNA, 19 nt, Artificial Sequence
  Description of Artificial Sequence: Synthetic oligonucleotide
  Antisense strand to SEQ ID NO: 2395636
aucagucccaagaaggaca

SEQ ID NO: 2395638 - RNA, 19 nt, Artificial Sequence
  Description of Artificial Sequence: Synthetic oligonucleotide
  Sense strand starting at position 724 of SEQ ID NO: 1886230
gggacugauuuccaaggaa

SEQ ID NO: 2395639 - RNA, 19 nt, Artificial Sequence
  Description of Artificial Sequence: Synthetic oligonucleotide
  Antisense strand to SEQ ID NO: 2395638
uuccuuggaaaucaguccc

SEQ ID NO: 2395640 - RNA, 19 nt, Artificial Sequence
  Description of Artificial Sequence: Synthetic oligonucleotide
  Sense strand starting at position 743 of SEQ ID NO: 1886230
accugcuucccagagaaac

SEQ ID NO: 2395641 - RNA, 19 nt, Artificial Sequence
  Description of Artificial Sequence: Synthetic oligonucleotide
  Antisense strand to SEQ ID NO: 2395640
guuucucugggaagcaggu

SEQ ID NO: 2395642 - RNA, 19 nt, Artificial Sequence
  Description of Artificial Sequence: Synthetic oligonucleotide
  Sense strand starting at position 804 of SEQ ID NO: 1886230
cccucaugacccgaaaggu

SEQ ID NO: 2395643 - RNA, 19 nt, Artificial Sequence
  Description of Artificial Sequence: Synthetic oligonucleotide
  Antisense strand to SEQ ID NO: 2395642
accuuucgggucaugaggg

SEQ ID NO: 2395644 - RNA, 19 nt, Artificial Sequence
  Description of Artificial Sequence: Synthetic oligonucleotide
  Sense strand starting at position 936 of SEQ ID NO: 1886230
acagcaaauuucugagaca

SEQ ID NO: 2395645 - RNA, 19 nt, Artificial Sequence
  Description of Artificial Sequence: Synthetic oligonucleotide
  Antisense strand to SEQ ID NO: 2395644
ugucucagaaauuugcugu

SEQ ID NO: 2395646 - RNA, 19 nt, Artificial Sequence
  Description of Artificial Sequence: Synthetic oligonucleotide
  Sense strand starting at position 1001 of SEQ ID NO: 1886230
gccaccuguccacaaugaa

SEQ ID NO: 2395647 - RNA, 19 nt, Artificial Sequence
  Description of Artificial Sequence: Synthetic oligonucleotide
  Antisense strand to SEQ ID NO: 2395646
uucauuguggacagguggc

SEQ ID NO: 2395648 - RNA, 19 nt, Artificial Sequence
  Description of Artificial Sequence: Synthetic oligonucleotide
  Sense strand starting at position 1180 of SEQ ID NO: 1886230
gcccauaacuuauuagggu

SEQ ID NO: 2395649 - RNA, 19 nt, Artificial Sequence
  Description of Artificial Sequence: Synthetic oligonucleotide
  Antisense strand to SEQ ID NO: 2395648
acccuaauaaguuaugggc

SEQ ID NO: 2395650 - RNA, 19 nt, Artificial Sequence
  Description of Artificial Sequence: Synthetic oligonucleotide
  Sense strand starting at position 1181 of SEQ ID NO: 1886230
cccauaacuuauuaggguu

SEQ ID NO: 2395651 - RNA, 19 nt, Artificial Sequence
  Description of Artificial Sequence: Synthetic oligonucleotide
  Antisense strand to SEQ ID NO: 2395650
aacccuaauaaguuauggg

SEQ ID NO: 2395652 - RNA, 19 nt, Artificial Sequence
  Description of Artificial Sequence: Synthetic oligonucleotide
  Sense strand starting at position 1251 of SEQ ID NO: 1886230
gaccucaugggcugaauua

SEQ ID NO: 2395653 - RNA, 19 nt, Artificial Sequence
  Description of Artificial Sequence: Synthetic oligonucleotide
  Antisense strand to SEQ ID NO: 2395652
uaauucagcccaugagguc

SEQ ID NO: 2395654 - RNA, 19 nt, Artificial Sequence
  Description of Artificial Sequence: Synthetic oligonucleotide
  Sense strand starting at position 1273 of SEQ ID NO: 1886230
acaccucuccaagguugaa

SEQ ID NO: 2395655 - RNA, 19 nt, Artificial Sequence
  Description of Artificial Sequence: Synthetic oligonucleotide
  Antisense strand to SEQ ID NO: 2395654
uucaaccuuggagaggugu

SEQ ID NO: 2395656 - RNA, 19 nt, Artificial Sequence
  Description of Artificial Sequence: Synthetic oligonucleotide
  Sense strand starting at position 1400 of SEQ ID NO: 1886230
ccugcaugagguugagaaa

SEQ ID NO: 2395657 - RNA, 19 nt, Artificial Sequence
  Description of Artificial Sequence: Synthetic oligonucleotide
  Antisense strand to SEQ ID NO: 2395656
uuucucaaccucaugcagg

SEQ ID NO: 2395658 - RNA, 19 nt, Artificial Sequence
  Description of Artificial Sequence: Synthetic oligonucleotide
  Sense strand starting at position 1459 of SEQ ID NO: 1886230
cagggaagguaucuuccuu

SEQ ID NO: 2395659 - RNA, 19 nt, Artificial Sequence
  Description of Artificial Sequence: Synthetic oligonucleotide
  Antisense strand to SEQ ID NO: 2395658
aaggaagauaccuucccug

SEQ ID NO: 2395660 - RNA, 19 nt, Artificial Sequence
  Description of Artificial Sequence: Synthetic oligonucleotide
  Sense strand starting at position 1464 of SEQ ID NO: 1886230
aagguaucuuccuugggua

SEQ ID NO: 2395661 - RNA, 19 nt, Artificial Sequence
  Description of Artificial Sequence: Synthetic oligonucleotide
  Antisense strand to SEQ ID NO: 2395660
uacccaaggaagauaccuu

SEQ ID NO: 2395662 - RNA, 19 nt, Artificial Sequence
  Description of Artificial Sequence: Synthetic oligonucleotide
  Sense strand starting at position 1465 of SEQ ID NO: 1886230
agguaucuuccuuggguau

SEQ ID NO: 2395663 - RNA, 19 nt, Artificial Sequence
  Description of Artificial Sequence: Synthetic oligonucleotide
  Antisense strand to SEQ ID NO: 2395662
auacccaaggaagauaccu

SEQ ID NO: 2395664 - RNA, 19 nt, Artificial Sequence
  Description of Artificial Sequence: Synthetic oligonucleotide
  Sense strand starting at position 1468 of SEQ ID NO: 1886230
uaucuuccuuggguaugau

SEQ ID NO: 2395665 - RNA, 19 nt, Artificial Sequence
  Description of Artificial Sequence: Synthetic oligonucleotide
  Antisense strand to SEQ ID NO: 2395664
aucauacccaaggaagaua

SEQ ID NO: 2395666 - RNA, 19 nt, Artificial Sequence
  Description of Artificial Sequence: Synthetic oligonucleotide
  Sense strand starting at position 1469 of SEQ ID NO: 1886230
aucuuccuuggguaugauu

SEQ ID NO: 2395667 - RNA, 19 nt, Artificial Sequence
  Description of Artificial Sequence: Synthetic oligonucleotide
  Antisense strand to SEQ ID NO: 2395666
aaucauacccaaggaagau

SEQ ID NO: 2395668 - RNA, 19 nt, Artificial Sequence
  Description of Artificial Sequence: Synthetic oligonucleotide
  Sense strand starting at position 1478 of SEQ ID NO: 1886230
ggguaugauuuccaaggaa

SEQ ID NO: 2395669 - RNA, 19 nt, Artificial Sequence
  Description of Artificial Sequence: Synthetic oligonucleotide
  Antisense strand to SEQ ID NO: 2395668
uuccuuggaaaucauaccc

SEQ ID NO: 2395670 - RNA, 19 nt, Artificial Sequence
  Description of Artificial Sequence: Synthetic oligonucleotide
  Sense strand starting at position 1534 of SEQ ID NO: 1886230
gggucagcuccugaggaaa

SEQ ID NO: 2395671 - RNA, 19 nt, Artificial Sequence
  Description of Artificial Sequence: Synthetic oligonucleotide
  Antisense strand to SEQ ID NO: 2395670
uuuccucaggagcugaccc

SEQ ID NO: 2395672 - RNA, 19 nt, Artificial Sequence
  Description of Artificial Sequence: Synthetic oligonucleotide
  Sense strand starting at position 1536 of SEQ ID NO: 1886230
gucagcuccugaggaaacu

SEQ ID NO: 2395673 - RNA, 19 nt, Artificial Sequence
  Description of Artificial Sequence: Synthetic oligonucleotide
  Antisense strand to SEQ ID NO: 2395672
aguuuccucaggagcugac

SEQ ID NO: 2395674 - RNA, 19 nt, Artificial Sequence
  Description of Artificial Sequence: Synthetic oligonucleotide
  Sense strand starting at position 1545 of SEQ ID NO: 1886230
ugaggaaacucuuauggcu

SEQ ID NO: 2395675 - RNA, 19 nt, Artificial Sequence
  Description of Artificial Sequence: Synthetic oligonucleotide
  Antisense strand to SEQ ID NO: 2395674
agccauaagaguuuccuca

SEQ ID NO: 2395676 - RNA, 19 nt, Artificial Sequence
  Description of Artificial Sequence: Synthetic oligonucleotide
  Sense strand starting at position 1547 of SEQ ID NO: 1886230
aggaaacucuuauggcuga

SEQ ID NO: 2395677 - RNA, 19 nt, Artificial Sequence
  Description of Artificial Sequence: Synthetic oligonucleotide
  Antisense strand to SEQ ID NO: 2395676
ucagccauaagaguuuccu

SEQ ID NO: 2395678 - RNA, 19 nt, Artificial Sequence
  Description of Artificial Sequence: Synthetic oligonucleotide
  Sense strand starting at position 1548 of SEQ ID NO: 1886230
ggaaacucuuauggcugaa

SEQ ID NO: 2395679 - RNA, 19 nt, Artificial Sequence
  Description of Artificial Sequence: Synthetic oligonucleotide
  Antisense strand to SEQ ID NO: 2395678
uucagccauaagaguuucc

SEQ ID NO: 2395680 - RNA, 19 nt, Artificial Sequence
  Description of Artificial Sequence: Synthetic oligonucleotide
  Sense strand starting at position 1861 of SEQ ID NO: 1886230
gugguucugccagggaacu

SEQ ID NO: 2395681 - RNA, 19 nt, Artificial Sequence
  Description of Artificial Sequence: Synthetic oligonucleotide
  Antisense strand to SEQ ID NO: 2395680
aguucccuggcagaaccac

SEQ ID NO: 2395682 - RNA, 19 nt, Artificial Sequence
  Description of Artificial Sequence: Synthetic oligonucleotide
  Sense strand starting at position 2299 of SEQ ID NO: 1886230
gagaaugccugcccaggau

SEQ ID NO: 2395683 - RNA, 19 nt, Artificial Sequence
  Description of Artificial Sequence: Synthetic oligonucleotide
  Antisense strand to SEQ ID NO: 2395682
auccugggcaggcauucuc

SEQ ID NO: 2395684 - RNA, 19 nt, Artificial Sequence
  Description of Artificial Sequence: Synthetic oligonucleotide
  Sense strand starting at position 2523 of SEQ ID NO: 1886230
gcaacaaauucccaggaca

SEQ ID NO: 2395685 - RNA, 19 nt, Artificial Sequence
  Description of Artificial Sequence: Synthetic oligonucleotide
  Antisense strand to SEQ ID NO: 2395684
uguccugggaauuuguugc

SEQ ID NO: 2395686 - RNA, 19 nt, Artificial Sequence
  Description of Artificial Sequence: Synthetic oligonucleotide
  Sense strand starting at position 2587 of SEQ ID NO: 1886230
cgccacugaccucgaagaa

SEQ ID NO: 2395687 - RNA, 19 nt, Artificial Sequence
  Description of Artificial Sequence: Synthetic oligonucleotide
  Antisense strand to SEQ ID NO: 2395686
uucuucgaggucaguggcg

SEQ ID NO: 2395688 - RNA, 19 nt, Artificial Sequence
  Description of Artificial Sequence: Synthetic oligonucleotide
  Sense strand starting at position 2811 of SEQ ID NO: 1886230
gggcacgauccuugaaucu

SEQ ID NO: 2395689 - RNA, 19 nt, Artificial Sequence
  Description of Artificial Sequence: Synthetic oligonucleotide
  Antisense strand to SEQ ID NO: 2395688
agauucaaggaucgugccc

SEQ ID NO: 2395690 - RNA, 19 nt, Artificial Sequence
  Description of Artificial Sequence: Synthetic oligonucleotide
  Sense strand starting at position 2886 of SEQ ID NO: 1886230
cugagugaucccuguggua

SEQ ID NO: 2395691 - RNA, 19 nt, Artificial Sequence
  Description of Artificial Sequence: Synthetic oligonucleotide
  Antisense strand to SEQ ID NO: 2395690
uaccacagggaucacucag

SEQ ID NO: 2395692 - RNA, 19 nt, Artificial Sequence
  Description of Artificial Sequence: Synthetic oligonucleotide
  Sense strand starting at position 2888 of SEQ ID NO: 1886230
gagugaucccugugguauc

SEQ ID NO: 2395693 - RNA, 19 nt, Artificial Sequence
  Description of Artificial Sequence: Synthetic oligonucleotide
  Antisense strand to SEQ ID NO: 2395692
gauaccacagggaucacuc

SEQ ID NO: 2395694 - RNA, 19 nt, Artificial Sequence
  Description of Artificial Sequence: Synthetic oligonucleotide
  Sense strand starting at position 2940 of SEQ ID NO: 1886230
ggcaguccucaaggacaga

SEQ ID NO: 2395695 - RNA, 19 nt, Artificial Sequence
  Description of Artificial Sequence: Synthetic oligonucleotide
  Antisense strand to SEQ ID NO: 2395694
ucuguccuugaggacugcc

SEQ ID NO: 2395696 - RNA, 19 nt, Artificial Sequence
  Description of Artificial Sequence: Synthetic oligonucleotide
  Sense strand starting at position 3132 of SEQ ID NO: 1886230
ggucgacucccugaggaaa

SEQ ID NO: 2395697 - RNA, 19 nt, Artificial Sequence
  Description of Artificial Sequence: Synthetic oligonucleotide
  Antisense strand to SEQ ID NO: 2395696
uuuccucagggagucgacc

SEQ ID NO: 2395698 - RNA, 19 nt, Artificial Sequence
  Description of Artificial Sequence: Synthetic oligonucleotide
  Sense strand starting at position 3216 of SEQ ID NO: 1886230
gcaggauccacucaccgau

SEQ ID NO: 2395699 - RNA, 19 nt, Artificial Sequence
  Description of Artificial Sequence: Synthetic oligonucleotide
  Antisense strand to SEQ ID NO: 2395698
aucggugaguggauccugc

SEQ ID NO: 2395700 - RNA, 19 nt, Artificial Sequence
  Description of Artificial Sequence: Synthetic oligonucleotide
  Sense strand starting at position 3685 of SEQ ID NO: 1886230
ccaggaagugcccaaucuu

SEQ ID NO: 2395701 - RNA, 19 nt, Artificial Sequence
  Description of Artificial Sequence: Synthetic oligonucleotide
  Antisense strand to SEQ ID NO: 2395700
aagauugggcacuuccugg

SEQ ID NO: 2395702 - RNA, 19 nt, Artificial Sequence
  Description of Artificial Sequence: Synthetic oligonucleotide
  Sense strand starting at position 3912 of SEQ ID NO: 1886230
agaacacuggcuugucaca

SEQ ID NO: 2395703 - RNA, 19 nt, Artificial Sequence
  Description of Artificial Sequence: Synthetic oligonucleotide
  Antisense strand to SEQ ID NO: 2395702
ugugacaagccaguguucu

SEQ ID NO: 2395704 - RNA, 19 nt, Artificial Sequence
  Description of Artificial Sequence: Synthetic oligonucleotide
  Sense strand starting at position 3914 of SEQ ID NO: 1886230
aacacuggcuugucacaga

SEQ ID NO: 2395705 - RNA, 19 nt, Artificial Sequence
  Description of Artificial Sequence: Synthetic oligonucleotide
  Antisense strand to SEQ ID NO: 2395704
ucugugacaagccaguguu

SEQ ID NO: 2395706 - RNA, 19 nt, Artificial Sequence
  Description of Artificial Sequence: Synthetic oligonucleotide
  Sense strand starting at position 171 of SEQ ID NO: 1886231
cccagaugugcucaccuca

SEQ ID NO: 2395707 - RNA, 19 nt, Artificial Sequence
  Description of Artificial Sequence: Synthetic oligonucleotide
  Antisense strand to SEQ ID NO: 2395706
ugaggugagcacaucuggg

SEQ ID NO: 2395708 - RNA, 19 nt, Artificial Sequence
  Description of Artificial Sequence: Synthetic oligonucleotide
  Sense strand starting at position 186 of SEQ ID NO: 1886231
cucagcucaguguaggaaa

SEQ ID NO: 2395709 - RNA, 19 nt, Artificial Sequence
  Description of Artificial Sequence: Synthetic oligonucleotide
  Antisense strand to SEQ ID NO: 2395708
uuuccuacacugagcugag

SEQ ID NO: 2395710 - RNA, 19 nt, Artificial Sequence
  Description of Artificial Sequence: Synthetic oligonucleotide
  Sense strand starting at position 444 of SEQ ID NO: 1886231
ggccuucccugucagcaaa

SEQ ID NO: 2395711 - RNA, 19 nt, Artificial Sequence
  Description of Artificial Sequence: Synthetic oligonucleotide
  Antisense strand to SEQ ID NO: 2395710
uuugcugacagggaaggcc

SEQ ID NO: 2395712 - RNA, 19 nt, Artificial Sequence
  Description of Artificial Sequence: Synthetic oligonucleotide
  Sense strand starting at position 851 of SEQ ID NO: 1886231
gcuacauaguguccucuuu

SEQ ID NO: 2395713 - RNA, 19 nt, Artificial Sequence
  Description of Artificial Sequence: Synthetic oligonucleotide
  Antisense strand to SEQ ID NO: 2395712
aaagaggacacuauguagc

SEQ ID NO: 2395714 - RNA, 19 nt, Artificial Sequence
  Description of Artificial Sequence: Synthetic oligonucleotide
  Sense strand starting at position 930 of SEQ ID NO: 1886231
gugguaaauuccugggaca

SEQ ID NO: 2395715 - RNA, 19 nt, Artificial Sequence
  Description of Artificial Sequence: Synthetic oligonucleotide
  Antisense strand to SEQ ID NO: 2395714
ugucccaggaauuuaccac

SEQ ID NO: 2395716 - RNA, 19 nt, Artificial Sequence
  Description of Artificial Sequence: Synthetic oligonucleotide
  Sense strand starting at position 931 of SEQ ID NO: 1886231
ugguaaauuccugggacag

SEQ ID NO: 2395717 - RNA, 19 nt, Artificial Sequence
  Description of Artificial Sequence: Synthetic oligonucleotide
  Antisense strand to SEQ ID NO: 2395716
cugucccaggaauuuacca

SEQ ID NO: 2395718 - RNA, 19 nt, Artificial Sequence
  Description of Artificial Sequence: Synthetic oligonucleotide
  Sense strand starting at position 932 of SEQ ID NO: 1886231
gguaaauuccugggacagg

SEQ ID NO: 2395719 - RNA, 19 nt, Artificial Sequence
  Description of Artificial Sequence: Synthetic oligonucleotide
  Antisense strand to SEQ ID NO: 2395718
ccugucccaggaauuuacc

SEQ ID NO: 2395720 - RNA, 19 nt, Artificial Sequence
  Description of Artificial Sequence: Synthetic oligonucleotide
  Sense strand starting at position 933 of SEQ ID NO: 1886231
guaaauuccugggacagga

SEQ ID NO: 2395721 - RNA, 19 nt, Artificial Sequence
  Description of Artificial Sequence: Synthetic oligonucleotide
  Antisense strand to SEQ ID NO: 2395720
uccugucccaggaauuuac

SEQ ID NO: 2395722 - RNA, 19 nt, Artificial Sequence
  Description of Artificial Sequence: Synthetic oligonucleotide
  Sense strand starting at position 1209 of SEQ ID NO: 1886231
ggaugcgauccuugaaucu

SEQ ID NO: 2395723 - RNA, 19 nt, Artificial Sequence
  Description of Artificial Sequence: Synthetic oligonucleotide
  Antisense strand to SEQ ID NO: 2395722
agauucaaggaucgcaucc

SEQ ID NO: 2395724 - RNA, 19 nt, Artificial Sequence
  Description of Artificial Sequence: Synthetic oligonucleotide
  Sense strand starting at position 1407 of SEQ ID NO: 1886231
cccuuuccugucuggacaa

SEQ ID NO: 2395725 - RNA, 19 nt, Artificial Sequence
  Description of Artificial Sequence: Synthetic oligonucleotide
  Antisense strand to SEQ ID NO: 2395724
uuguccagacaggaaaggg

SEQ ID NO: 2395726 - RNA, 19 nt, Artificial Sequence
  Description of Artificial Sequence: Synthetic oligonucleotide
  Sense strand starting at position 1453 of SEQ ID NO: 1886231
ggcauugucuugggucuga

SEQ ID NO: 2395727 - RNA, 19 nt, Artificial Sequence
  Description of Artificial Sequence: Synthetic oligonucleotide
  Antisense strand to SEQ ID NO: 2395726
ucagacccaagacaaugcc

SEQ ID NO: 2395728 - RNA, 19 nt, Artificial Sequence
  Description of Artificial Sequence: Synthetic oligonucleotide
  Sense strand starting at position 1464 of SEQ ID NO: 1886231
gggucugauucccaaggaa

SEQ ID NO: 2395729 - RNA, 19 nt, Artificial Sequence
  Description of Artificial Sequence: Synthetic oligonucleotide
  Antisense strand to SEQ ID NO: 2395728
uuccuugggaaucagaccc

SEQ ID NO: 2395730 - RNA, 19 nt, Artificial Sequence
  Description of Artificial Sequence: Synthetic oligonucleotide
  Sense strand starting at position 1551 of SEQ ID NO: 1886231
ggccuaaagagugaccuuu

SEQ ID NO: 2395731 - RNA, 19 nt, Artificial Sequence
  Description of Artificial Sequence: Synthetic oligonucleotide
  Antisense strand to SEQ ID NO: 2395730
aaaggucacucuuuaggcc

SEQ ID NO: 2395732 - RNA, 19 nt, Artificial Sequence
  Description of Artificial Sequence: Synthetic oligonucleotide
  Sense strand starting at position 1598 of SEQ ID NO: 1886231
ccaugaugccagcagaauc

SEQ ID NO: 2395733 - RNA, 19 nt, Artificial Sequence
  Description of Artificial Sequence: Synthetic oligonucleotide
  Antisense strand to SEQ ID NO: 2395732
gauucugcuggcaucaugg

SEQ ID NO: 2395734 - RNA, 19 nt, Artificial Sequence
  Description of Artificial Sequence: Synthetic oligonucleotide
  Sense strand starting at position 1655 of SEQ ID NO: 1886231
ggcugaagagcucacugaa

SEQ ID NO: 2395735 - RNA, 19 nt, Artificial Sequence
  Description of Artificial Sequence: Synthetic oligonucleotide
  Antisense strand to SEQ ID NO: 2395734
uucagugagcucuucagcc

SEQ ID NO: 2395736 - RNA, 19 nt, Artificial Sequence
  Description of Artificial Sequence: Synthetic oligonucleotide
  Sense strand starting at position 1775 of SEQ ID NO: 1886231
ugggcugccucacauguaa

SEQ ID NO: 2395737 - RNA, 19 nt, Artificial Sequence
  Description of Artificial Sequence: Synthetic oligonucleotide
  Antisense strand to SEQ ID NO: 2395736
uuacaugugaggcagccca

SEQ ID NO: 2395738 - RNA, 19 nt, Artificial Sequence
  Description of Artificial Sequence: Synthetic oligonucleotide
  Sense strand starting at position 2383 of SEQ ID NO: 1886231
gcaggugggucaugggauu

SEQ ID NO: 2395739 - RNA, 19 nt, Artificial Sequence
  Description of Artificial Sequence: Synthetic oligonucleotide
  Antisense strand to SEQ ID NO: 2395738
aaucccaugacccaccugc

SEQ ID NO: 2395740 - RNA, 19 nt, Artificial Sequence
  Description of Artificial Sequence: Synthetic oligonucleotide
  Sense strand starting at position 2961 of SEQ ID NO: 1886231
ccaugauucccagggccaa

SEQ ID NO: 2395741 - RNA, 19 nt, Artificial Sequence
  Description of Artificial Sequence: Synthetic oligonucleotide
  Antisense strand to SEQ ID NO: 2395740
uuggcccugggaaucaugg

SEQ ID NO: 2395742 - RNA, 19 nt, Artificial Sequence
  Description of Artificial Sequence: Synthetic oligonucleotide
  Sense strand starting at position 3062 of SEQ ID NO: 1886231
caggauggccauugcucaa

SEQ ID NO: 2395743 - RNA, 19 nt, Artificial Sequence
  Description of Artificial Sequence: Synthetic oligonucleotide
  Antisense strand to SEQ ID NO: 2395742
uugagcaauggccauccug

SEQ ID NO: 2395744 - RNA, 19 nt, Artificial Sequence
  Description of Artificial Sequence: Synthetic oligonucleotide
  Sense strand starting at position 3122 of SEQ ID NO: 1886231
uugaauguucacggccuga

SEQ ID NO: 2395745 - RNA, 19 nt, Artificial Sequence
  Description of Artificial Sequence: Synthetic oligonucleotide
  Antisense strand to SEQ ID NO: 2395744
ucaggccgugaacauucaa

SEQ ID NO: 2395746 - RNA, 19 nt, Artificial Sequence
  Description of Artificial Sequence: Synthetic oligonucleotide
  Sense strand starting at position 3302 of SEQ ID NO: 1886231
cugcguuggguugaaagaa

SEQ ID NO: 2395747 - RNA, 19 nt, Artificial Sequence
  Description of Artificial Sequence: Synthetic oligonucleotide
  Antisense strand to SEQ ID NO: 2395746
uucuuucaacccaacgcag

SEQ ID NO: 2395748 - RNA, 19 nt, Artificial Sequence
  Description of Artificial Sequence: Synthetic oligonucleotide
  Sense strand starting at position 3360 of SEQ ID NO: 1886231
cagggaagguguccuucuu

SEQ ID NO: 2395749 - RNA, 19 nt, Artificial Sequence
  Description of Artificial Sequence: Synthetic oligonucleotide
  Antisense strand to SEQ ID NO: 2395748
aagaaggacaccuucccug

SEQ ID NO: 2395750 - RNA, 19 nt, Artificial Sequence
  Description of Artificial Sequence: Synthetic oligonucleotide
  Sense strand starting at position 3368 of SEQ ID NO: 1886231
guguccuucuugggacuga

SEQ ID NO: 2395751 - RNA, 19 nt, Artificial Sequence
  Description of Artificial Sequence: Synthetic oligonucleotide
  Antisense strand to SEQ ID NO: 2395750
ucagucccaagaaggacac

SEQ ID NO: 2395752 - RNA, 19 nt, Artificial Sequence
  Description of Artificial Sequence: Synthetic oligonucleotide
  Sense strand starting at position 3369 of SEQ ID NO: 1886231
uguccuucuugggacugau

SEQ ID NO: 2395753 - RNA, 19 nt, Artificial Sequence
  Description of Artificial Sequence: Synthetic oligonucleotide
  Antisense strand to SEQ ID NO: 2395752
aucagucccaagaaggaca

SEQ ID NO: 2395754 - RNA, 19 nt, Artificial Sequence
  Description of Artificial Sequence: Synthetic oligonucleotide
  Sense strand starting at position 3379 of SEQ ID NO: 1886231
gggacugauuuccaaggaa

SEQ ID NO: 2395755 - RNA, 19 nt, Artificial Sequence
  Description of Artificial Sequence: Synthetic oligonucleotide
  Antisense strand to SEQ ID NO: 2395754
uuccuuggaaaucaguccc

SEQ ID NO: 2395756 - RNA, 19 nt, Artificial Sequence
  Description of Artificial Sequence: Synthetic oligonucleotide
  Sense strand starting at position 3398 of SEQ ID NO: 1886231
accugcuucccagagaaac

SEQ ID NO: 2395757 - RNA, 19 nt, Artificial Sequence
  Description of Artificial Sequence: Synthetic oligonucleotide
  Antisense strand to SEQ ID NO: 2395756
guuucucugggaagcaggu

SEQ ID NO: 2395758 - RNA, 19 nt, Artificial Sequence
  Description of Artificial Sequence: Synthetic oligonucleotide
  Sense strand starting at position 3459 of SEQ ID NO: 1886231
cccucaugacccgaaaggu

SEQ ID NO: 2395759 - RNA, 19 nt, Artificial Sequence
  Description of Artificial Sequence: Synthetic oligonucleotide
  Antisense strand to SEQ ID NO: 2395758
accuuucgggucaugaggg

SEQ ID NO: 2395760 - RNA, 19 nt, Artificial Sequence
  Description of Artificial Sequence: Synthetic oligonucleotide
  Sense strand starting at position 3591 of SEQ ID NO: 1886231
acagcaaauuucugagaca

SEQ ID NO: 2395761 - RNA, 19 nt, Artificial Sequence
  Description of Artificial Sequence: Synthetic oligonucleotide
  Antisense strand to SEQ ID NO: 2395760
ugucucagaaauuugcugu

SEQ ID NO: 2395762 - RNA, 19 nt, Artificial Sequence
  Description of Artificial Sequence: Synthetic oligonucleotide
  Sense strand starting at position 3656 of SEQ ID NO: 1886231
gccaccuguccacaaugaa

SEQ ID NO: 2395763 - RNA, 19 nt, Artificial Sequence
  Description of Artificial Sequence: Synthetic oligonucleotide
  Antisense strand to SEQ ID NO: 2395762
uucauuguggacagguggc

SEQ ID NO: 2395764 - RNA, 19 nt, Artificial Sequence
  Description of Artificial Sequence: Synthetic oligonucleotide
  Sense strand starting at position 3762 of SEQ ID NO: 1886231
cagagcuagucuugacuca

SEQ ID NO: 2395765 - RNA, 19 nt, Artificial Sequence
  Description of Artificial Sequence: Synthetic oligonucleotide
  Antisense strand to SEQ ID NO: 2395764
ugagucaagacuagcucug

SEQ ID NO: 2395766 - RNA, 19 nt, Artificial Sequence
  Description of Artificial Sequence: Synthetic oligonucleotide
  Sense strand starting at position 3835 of SEQ ID NO: 1886231
gcccauaacuuauuagggu

SEQ ID NO: 2395767 - RNA, 19 nt, Artificial Sequence
  Description of Artificial Sequence: Synthetic oligonucleotide
  Antisense strand to SEQ ID NO: 2395766
acccuaauaaguuaugggc

SEQ ID NO: 2395768 - RNA, 19 nt, Artificial Sequence
  Description of Artificial Sequence: Synthetic oligonucleotide
  Sense strand starting at position 3836 of SEQ ID NO: 1886231
cccauaacuuauuaggguu

SEQ ID NO: 2395769 - RNA, 19 nt, Artificial Sequence
  Description of Artificial Sequence: Synthetic oligonucleotide
  Antisense strand to SEQ ID NO: 2395768
aacccuaauaaguuauggg

SEQ ID NO: 2395770 - RNA, 19 nt, Artificial Sequence
  Description of Artificial Sequence: Synthetic oligonucleotide
  Sense strand starting at position 3906 of SEQ ID NO: 1886231
gaccucaugggcugaauua

SEQ ID NO: 2395771 - RNA, 19 nt, Artificial Sequence
  Description of Artificial Sequence: Synthetic oligonucleotide
  Antisense strand to SEQ ID NO: 2395770
uaauucagcccaugagguc

SEQ ID NO: 2395772 - RNA, 19 nt, Artificial Sequence
  Description of Artificial Sequence: Synthetic oligonucleotide
  Sense strand starting at position 3928 of SEQ ID NO: 1886231
acaccucuccaagguugaa

SEQ ID NO: 2395773 - RNA, 19 nt, Artificial Sequence
  Description of Artificial Sequence: Synthetic oligonucleotide
  Antisense strand to SEQ ID NO: 2395772
uucaaccuuggagaggugu

SEQ ID NO: 2395774 - RNA, 19 nt, Artificial Sequence
  Description of Artificial Sequence: Synthetic oligonucleotide
  Sense strand starting at position 404 of SEQ ID NO: 1886232
gggauacccaugugaugga

SEQ ID NO: 2395775 - RNA, 19 nt, Artificial Sequence
  Description of Artificial Sequence: Synthetic oligonucleotide
  Antisense strand to SEQ ID NO: 2395774
uccaucacauggguauccc

SEQ ID NO: 2395776 - RNA, 19 nt, Artificial Sequence
  Description of Artificial Sequence: Synthetic oligonucleotide
  Sense strand starting at position 838 of SEQ ID NO: 1886232
ggucccacuuggucaauaa

SEQ ID NO: 2395777 - RNA, 19 nt, Artificial Sequence
  Description of Artificial Sequence: Synthetic oligonucleotide
  Antisense strand to SEQ ID NO: 2395776
uuauugaccaagugggacc

SEQ ID NO: 2395778 - RNA, 19 nt, Artificial Sequence
  Description of Artificial Sequence: Synthetic oligonucleotide
  Sense strand starting at position 1381 of SEQ ID NO: 1886232
cgcugaguuucagcuggga

SEQ ID NO: 2395779 - RNA, 19 nt, Artificial Sequence
  Description of Artificial Sequence: Synthetic oligonucleotide
  Antisense strand to SEQ ID NO: 2395778
ucccagcugaaacucagcg

SEQ ID NO: 2395780 - RNA, 19 nt, Artificial Sequence
  Description of Artificial Sequence: Synthetic oligonucleotide
  Sense strand starting at position 1402 of SEQ ID NO: 1886232
ugcucuauguugggcugaa

SEQ ID NO: 2395781 - RNA, 19 nt, Artificial Sequence
  Description of Artificial Sequence: Synthetic oligonucleotide
  Antisense strand to SEQ ID NO: 2395780
uucagcccaacauagagca

SEQ ID NO: 2395782 - RNA, 19 nt, Artificial Sequence
  Description of Artificial Sequence: Synthetic oligonucleotide
  Sense strand starting at position 1403 of SEQ ID NO: 1886232
gcucuauguugggcugaag

SEQ ID NO: 2395783 - RNA, 19 nt, Artificial Sequence
  Description of Artificial Sequence: Synthetic oligonucleotide
  Antisense strand to SEQ ID NO: 2395782
cuucagcccaacauagagc

SEQ ID NO: 2395784 - RNA, 19 nt, Artificial Sequence
  Description of Artificial Sequence: Synthetic oligonucleotide
  Sense strand starting at position 1472 of SEQ ID NO: 1886232
gcaugcuccuagggucaga

SEQ ID NO: 2395785 - RNA, 19 nt, Artificial Sequence
  Description of Artificial Sequence: Synthetic oligonucleotide
  Antisense strand to SEQ ID NO: 2395784
ucugacccuaggagcaugc

SEQ ID NO: 2395786 - RNA, 19 nt, Artificial Sequence
  Description of Artificial Sequence: Synthetic oligonucleotide
  Sense strand starting at position 2011 of SEQ ID NO: 1886232
gaucaaucaccucgugcau

SEQ ID NO: 2395787 - RNA, 19 nt, Artificial Sequence
  Description of Artificial Sequence: Synthetic oligonucleotide
  Antisense strand to SEQ ID NO: 2395786
augcacgaggugauugauc

SEQ ID NO: 2395788 - RNA, 19 nt, Artificial Sequence
  Description of Artificial Sequence: Synthetic oligonucleotide
  Sense strand starting at position 2268 of SEQ ID NO: 1886232
cuuaucuuccacggacaca

SEQ ID NO: 2395789 - RNA, 19 nt, Artificial Sequence
  Description of Artificial Sequence: Synthetic oligonucleotide
  Antisense strand to SEQ ID NO: 2395788
uguguccguggaagauaag

SEQ ID NO: 2395790 - RNA, 19 nt, Artificial Sequence
  Description of Artificial Sequence: Synthetic oligonucleotide
  Sense strand starting at position 2287 of SEQ ID NO: 1886232
ugugaugagagccauguga

SEQ ID NO: 2395791 - RNA, 19 nt, Artificial Sequence
  Description of Artificial Sequence: Synthetic oligonucleotide
  Antisense strand to SEQ ID NO: 2395790
ucacauggcucucaucaca

SEQ ID NO: 2395792 - RNA, 19 nt, Artificial Sequence
  Description of Artificial Sequence: Synthetic oligonucleotide
  Sense strand starting at position 2289 of SEQ ID NO: 1886232
ugaugagagccaugugaaa

SEQ ID NO: 2395793 - RNA, 19 nt, Artificial Sequence
  Description of Artificial Sequence: Synthetic oligonucleotide
  Antisense strand to SEQ ID NO: 2395792
uuucacauggcucucauca

SEQ ID NO: 2395794 - RNA, 19 nt, Artificial Sequence
  Description of Artificial Sequence: Synthetic oligonucleotide
  Sense strand starting at position 2291 of SEQ ID NO: 1886232
augagagccaugugaaaua

SEQ ID NO: 2395795 - RNA, 19 nt, Artificial Sequence
  Description of Artificial Sequence: Synthetic oligonucleotide
  Antisense strand to SEQ ID NO: 2395794
uauuucacauggcucucau

SEQ ID NO: 2395796 - RNA, 19 nt, Artificial Sequence
  Description of Artificial Sequence: Synthetic oligonucleotide
  Sense strand starting at position 2380 of SEQ ID NO: 1886232
guucauugggcuugggaua

SEQ ID NO: 2395797 - RNA, 19 nt, Artificial Sequence
  Description of Artificial Sequence: Synthetic oligonucleotide
  Antisense strand to SEQ ID NO: 2395796
uaucccaagcccaaugaac

SEQ ID NO: 2395798 - RNA, 19 nt, Artificial Sequence
  Description of Artificial Sequence: Synthetic oligonucleotide
  Sense strand starting at position 2506 of SEQ ID NO: 1886232
ggucauuagccaggucaug

SEQ ID NO: 2395799 - RNA, 19 nt, Artificial Sequence
  Description of Artificial Sequence: Synthetic oligonucleotide
  Antisense strand to SEQ ID NO: 2395798
caugaccuggcuaaugacc

SEQ ID NO: 2395800 - RNA, 19 nt, Artificial Sequence
  Description of Artificial Sequence: Synthetic oligonucleotide
  Sense strand starting at position 2624 of SEQ ID NO: 1886232
cuaagcaugcacuggaaau

SEQ ID NO: 2395801 - RNA, 19 nt, Artificial Sequence
  Description of Artificial Sequence: Synthetic oligonucleotide
  Antisense strand to SEQ ID NO: 2395800
auuuccagugcaugcuuag

SEQ ID NO: 2395802 - RNA, 19 nt, Artificial Sequence
  Description of Artificial Sequence: Synthetic oligonucleotide
  Sense strand starting at position 2638 of SEQ ID NO: 1886232
gaaaucacagcuugaguca

SEQ ID NO: 2395803 - RNA, 19 nt, Artificial Sequence
  Description of Artificial Sequence: Synthetic oligonucleotide
  Antisense strand to SEQ ID NO: 2395802
ugacucaagcugugauuuc

SEQ ID NO: 2395804 - RNA, 19 nt, Artificial Sequence
  Description of Artificial Sequence: Synthetic oligonucleotide
  Sense strand starting at position 2645 of SEQ ID NO: 1886232
cagcuugagucacaugcuu

SEQ ID NO: 2395805 - RNA, 19 nt, Artificial Sequence
  Description of Artificial Sequence: Synthetic oligonucleotide
  Antisense strand to SEQ ID NO: 2395804
aagcaugugacucaagcug

SEQ ID NO: 2395806 - RNA, 19 nt, Artificial Sequence
  Description of Artificial Sequence: Synthetic oligonucleotide
  Sense strand starting at position 2688 of SEQ ID NO: 1886232
cccgcauaucuccgacaca

SEQ ID NO: 2395807 - RNA, 19 nt, Artificial Sequence
  Description of Artificial Sequence: Synthetic oligonucleotide
  Antisense strand to SEQ ID NO: 2395806
ugugucggagauaugcggg

SEQ ID NO: 2395808 - RNA, 19 nt, Artificial Sequence
  Description of Artificial Sequence: Synthetic oligonucleotide
  Sense strand starting at position 2691 of SEQ ID NO: 1886232
gcauaucuccgacacacuu

SEQ ID NO: 2395809 - RNA, 19 nt, Artificial Sequence
  Description of Artificial Sequence: Synthetic oligonucleotide
  Antisense strand to SEQ ID NO: 2395808
aagugugucggagauaugc

SEQ ID NO: 2395810 - RNA, 19 nt, Artificial Sequence
  Description of Artificial Sequence: Synthetic oligonucleotide
  Sense strand starting at position 2707 of SEQ ID NO: 1886232
cuugaacaaucaggagaca

SEQ ID NO: 2395811 - RNA, 19 nt, Artificial Sequence
  Description of Artificial Sequence: Synthetic oligonucleotide
  Antisense strand to SEQ ID NO: 2395810
ugucuccugauuguucaag

SEQ ID NO: 2395812 - RNA, 19 nt, Artificial Sequence
  Description of Artificial Sequence: Synthetic oligonucleotide
  Sense strand starting at position 2814 of SEQ ID NO: 1886232
uaggaaaggucccucgaca

SEQ ID NO: 2395813 - RNA, 19 nt, Artificial Sequence
  Description of Artificial Sequence: Synthetic oligonucleotide
  Antisense strand to SEQ ID NO: 2395812
ugucgagggaccuuuccua

SEQ ID NO: 2395814 - RNA, 19 nt, Artificial Sequence
  Description of Artificial Sequence: Synthetic oligonucleotide
  Sense strand starting at position 2864 of SEQ ID NO: 1886232
uaugacgcuugaucucaga

SEQ ID NO: 2395815 - RNA, 19 nt, Artificial Sequence
  Description of Artificial Sequence: Synthetic oligonucleotide
  Antisense strand to SEQ ID NO: 2395814
ucugagaucaagcgucaua

SEQ ID NO: 2395816 - RNA, 19 nt, Artificial Sequence
  Description of Artificial Sequence: Synthetic oligonucleotide
  Sense strand starting at position 2867 of SEQ ID NO: 1886232
gacgcuugaucucagagau

SEQ ID NO: 2395817 - RNA, 19 nt, Artificial Sequence
  Description of Artificial Sequence: Synthetic oligonucleotide
  Antisense strand to SEQ ID NO: 2395816
aucucugagaucaagcguc

SEQ ID NO: 2395818 - RNA, 19 nt, Artificial Sequence
  Description of Artificial Sequence: Synthetic oligonucleotide
  Sense strand starting at position 2886 of SEQ ID NO: 1886232
aggguaaucuccagcggga

SEQ ID NO: 2395819 - RNA, 19 nt, Artificial Sequence
  Description of Artificial Sequence: Synthetic oligonucleotide
  Antisense strand to SEQ ID NO: 2395818
ucccgcuggagauuacccu

SEQ ID NO: 2395820 - RNA, 19 nt, Artificial Sequence
  Description of Artificial Sequence: Synthetic oligonucleotide
  Sense strand starting at position 2888 of SEQ ID NO: 1886232
gguaaucuccagcgggaug

SEQ ID NO: 2395821 - RNA, 19 nt, Artificial Sequence
  Description of Artificial Sequence: Synthetic oligonucleotide
  Antisense strand to SEQ ID NO: 2395820
caucccgcuggagauuacc

SEQ ID NO: 2395822 - RNA, 19 nt, Artificial Sequence
  Description of Artificial Sequence: Synthetic oligonucleotide
  Sense strand starting at position 2974 of SEQ ID NO: 1886232
agagcucugccuugacuca

SEQ ID NO: 2395823 - RNA, 19 nt, Artificial Sequence
  Description of Artificial Sequence: Synthetic oligonucleotide
  Antisense strand to SEQ ID NO: 2395822
ugagucaaggcagagcucu

SEQ ID NO: 2395824 - RNA, 19 nt, Artificial Sequence
  Description of Artificial Sequence: Synthetic oligonucleotide
  Sense strand starting at position 3038 of SEQ ID NO: 1886232
acuggaauggcccauuacu

SEQ ID NO: 2395825 - RNA, 19 nt, Artificial Sequence
  Description of Artificial Sequence: Synthetic oligonucleotide
  Antisense strand to SEQ ID NO: 2395824
aguaaugggccauuccagu

SEQ ID NO: 2395826 - RNA, 19 nt, Artificial Sequence
  Description of Artificial Sequence: Synthetic oligonucleotide
  Sense strand starting at position 3325 of SEQ ID NO: 1886232
guauccuccuugggucuaa

SEQ ID NO: 2395827 - RNA, 19 nt, Artificial Sequence
  Description of Artificial Sequence: Synthetic oligonucleotide
  Antisense strand to SEQ ID NO: 2395826
uuagacccaaggaggauac

SEQ ID NO: 2395828 - RNA, 19 nt, Artificial Sequence
  Description of Artificial Sequence: Synthetic oligonucleotide
  Sense strand starting at position 3375 of SEQ ID NO: 1886232
gucucucccaggugggaau

SEQ ID NO: 2395829 - RNA, 19 nt, Artificial Sequence
  Description of Artificial Sequence: Synthetic oligonucleotide
  Antisense strand to SEQ ID NO: 2395828
auucccaccugggagagac

SEQ ID NO: 2395830 - RNA, 19 nt, Artificial Sequence
  Description of Artificial Sequence: Synthetic oligonucleotide
  Sense strand starting at position 3756 of SEQ ID NO: 1886232
agugucuucuuccaacaua

SEQ ID NO: 2395831 - RNA, 19 nt, Artificial Sequence
  Description of Artificial Sequence: Synthetic oligonucleotide
  Antisense strand to SEQ ID NO: 2395830
uauguuggaagaagacacu

SEQ ID NO: 2395832 - RNA, 19 nt, Artificial Sequence
  Description of Artificial Sequence: Synthetic oligonucleotide
  Sense strand starting at position 350 of SEQ ID NO: 1886233
accucacuccuguauguga

SEQ ID NO: 2395833 - RNA, 19 nt, Artificial Sequence
  Description of Artificial Sequence: Synthetic oligonucleotide
  Antisense strand to SEQ ID NO: 2395832
ucacauacaggagugaggu

SEQ ID NO: 2395834 - RNA, 19 nt, Artificial Sequence
  Description of Artificial Sequence: Synthetic oligonucleotide
  Sense strand starting at position 423 of SEQ ID NO: 1886233
aucguuugcaugcggaaca

SEQ ID NO: 2395835 - RNA, 19 nt, Artificial Sequence
  Description of Artificial Sequence: Synthetic oligonucleotide
  Antisense strand to SEQ ID NO: 2395834
uguuccgcaugcaaacgau

SEQ ID NO: 2395836 - RNA, 19 nt, Artificial Sequence
  Description of Artificial Sequence: Synthetic oligonucleotide
  Sense strand starting at position 586 of SEQ ID NO: 1886233
ccaacucauucgcaggaaa

SEQ ID NO: 2395837 - RNA, 19 nt, Artificial Sequence
  Description of Artificial Sequence: Synthetic oligonucleotide
  Antisense strand to SEQ ID NO: 2395836
uuuccugcgaaugaguugg

SEQ ID NO: 2395838 - RNA, 19 nt, Artificial Sequence
  Description of Artificial Sequence: Synthetic oligonucleotide
  Sense strand starting at position 657 of SEQ ID NO: 1886233
agccuaucucugugcauag

SEQ ID NO: 2395839 - RNA, 19 nt, Artificial Sequence
  Description of Artificial Sequence: Synthetic oligonucleotide
  Antisense strand to SEQ ID NO: 2395838
cuaugcacagagauaggcu

SEQ ID NO: 2395840 - RNA, 19 nt, Artificial Sequence
  Description of Artificial Sequence: Synthetic oligonucleotide
  Sense strand starting at position 658 of SEQ ID NO: 1886233
gccuaucucugugcauagu

SEQ ID NO: 2395841 - RNA, 19 nt, Artificial Sequence
  Description of Artificial Sequence: Synthetic oligonucleotide
  Antisense strand to SEQ ID NO: 2395840
acuaugcacagagauaggc

SEQ ID NO: 2395842 - RNA, 19 nt, Artificial Sequence
  Description of Artificial Sequence: Synthetic oligonucleotide
  Sense strand starting at position 950 of SEQ ID NO: 1886233
gcaaccauucccgacacuu

SEQ ID NO: 2395843 - RNA, 19 nt, Artificial Sequence
  Description of Artificial Sequence: Synthetic oligonucleotide
  Antisense strand to SEQ ID NO: 2395842
aagugucgggaaugguugc

SEQ ID NO: 2395844 - RNA, 19 nt, Artificial Sequence
  Description of Artificial Sequence: Synthetic oligonucleotide
  Sense strand starting at position 1143 of SEQ ID NO: 1886233
cucgaugaggcccauagaa

SEQ ID NO: 2395845 - RNA, 19 nt, Artificial Sequence
  Description of Artificial Sequence: Synthetic oligonucleotide
  Antisense strand to SEQ ID NO: 2395844
uucuaugggccucaucgag

SEQ ID NO: 2395846 - RNA, 19 nt, Artificial Sequence
  Description of Artificial Sequence: Synthetic oligonucleotide
  Sense strand starting at position 1153 of SEQ ID NO: 1886233
cccauagaauggcucauua

SEQ ID NO: 2395847 - RNA, 19 nt, Artificial Sequence
  Description of Artificial Sequence: Synthetic oligonucleotide
  Antisense strand to SEQ ID NO: 2395846
uaaugagccauucuauggg

SEQ ID NO: 2395848 - RNA, 19 nt, Artificial Sequence
  Description of Artificial Sequence: Synthetic oligonucleotide
  Sense strand starting at position 1207 of SEQ ID NO: 1886233
gggcgcaauccuuaaaucu

SEQ ID NO: 2395849 - RNA, 19 nt, Artificial Sequence
  Description of Artificial Sequence: Synthetic oligonucleotide
  Antisense strand to SEQ ID NO: 2395848
agauuuaaggauugcgccc

SEQ ID NO: 2395850 - RNA, 19 nt, Artificial Sequence
  Description of Artificial Sequence: Synthetic oligonucleotide
  Sense strand starting at position 1376 of SEQ ID NO: 1886233
ggagcuacuaugugugaga

SEQ ID NO: 2395851 - RNA, 19 nt, Artificial Sequence
  Description of Artificial Sequence: Synthetic oligonucleotide
  Antisense strand to SEQ ID NO: 2395850
ucucacacauaguagcucc

SEQ ID NO: 2395852 - RNA, 19 nt, Artificial Sequence
  Description of Artificial Sequence: Synthetic oligonucleotide
  Sense strand starting at position 1378 of SEQ ID NO: 1886233
agcuacuaugugugagacu

SEQ ID NO: 2395853 - RNA, 19 nt, Artificial Sequence
  Description of Artificial Sequence: Synthetic oligonucleotide
  Antisense strand to SEQ ID NO: 2395852
agucucacacauaguagcu

SEQ ID NO: 2395854 - RNA, 19 nt, Artificial Sequence
  Description of Artificial Sequence: Synthetic oligonucleotide
  Sense strand starting at position 1381 of SEQ ID NO: 1886233
uacuaugugugagacugaa

SEQ ID NO: 2395855 - RNA, 19 nt, Artificial Sequence
  Description of Artificial Sequence: Synthetic oligonucleotide
  Antisense strand to SEQ ID NO: 2395854
uucagucucacacauagua

SEQ ID NO: 2395856 - RNA, 19 nt, Artificial Sequence
  Description of Artificial Sequence: Synthetic oligonucleotide
  Sense strand starting at position 1526 of SEQ ID NO: 1886233
agguucgcucccugaggaa

SEQ ID NO: 2395857 - RNA, 19 nt, Artificial Sequence
  Description of Artificial Sequence: Synthetic oligonucleotide
  Antisense strand to SEQ ID NO: 2395856
uuccucagggagcgaaccu

SEQ ID NO: 2395858 - RNA, 19 nt, Artificial Sequence
  Description of Artificial Sequence: Synthetic oligonucleotide
  Sense strand starting at position 1621 of SEQ ID NO: 1886233
cucaccuaugcuggugaau

SEQ ID NO: 2395859 - RNA, 19 nt, Artificial Sequence
  Description of Artificial Sequence: Synthetic oligonucleotide
  Antisense strand to SEQ ID NO: 2395858
auucaccagcauaggugag

SEQ ID NO: 2395860 - RNA, 19 nt, Artificial Sequence
  Description of Artificial Sequence: Synthetic oligonucleotide
  Sense strand starting at position 2043 of SEQ ID NO: 1886233
cccagaugugcucaccuca

SEQ ID NO: 2395861 - RNA, 19 nt, Artificial Sequence
  Description of Artificial Sequence: Synthetic oligonucleotide
  Antisense strand to SEQ ID NO: 2395860
ugaggugagcacaucuggg

SEQ ID NO: 2395862 - RNA, 19 nt, Artificial Sequence
  Description of Artificial Sequence: Synthetic oligonucleotide
  Sense strand starting at position 2058 of SEQ ID NO: 1886233
cucagcucaguguaggaaa

SEQ ID NO: 2395863 - RNA, 19 nt, Artificial Sequence
  Description of Artificial Sequence: Synthetic oligonucleotide
  Antisense strand to SEQ ID NO: 2395862
uuuccuacacugagcugag

SEQ ID NO: 2395864 - RNA, 19 nt, Artificial Sequence
  Description of Artificial Sequence: Synthetic oligonucleotide
  Sense strand starting at position 2316 of SEQ ID NO: 1886233
ggccuucccugucagcaaa

SEQ ID NO: 2395865 - RNA, 19 nt, Artificial Sequence
  Description of Artificial Sequence: Synthetic oligonucleotide
  Antisense strand to SEQ ID NO: 2395864
uuugcugacagggaaggcc

SEQ ID NO: 2395866 - RNA, 19 nt, Artificial Sequence
  Description of Artificial Sequence: Synthetic oligonucleotide
  Sense strand starting at position 2723 of SEQ ID NO: 1886233
gcuacauaguguccucuuu

SEQ ID NO: 2395867 - RNA, 19 nt, Artificial Sequence
  Description of Artificial Sequence: Synthetic oligonucleotide
  Antisense strand to SEQ ID NO: 2395866
aaagaggacacuauguagc

SEQ ID NO: 2395868 - RNA, 19 nt, Artificial Sequence
  Description of Artificial Sequence: Synthetic oligonucleotide
  Sense strand starting at position 2802 of SEQ ID NO: 1886233
gugguaaauuccugggaca

SEQ ID NO: 2395869 - RNA, 19 nt, Artificial Sequence
  Description of Artificial Sequence: Synthetic oligonucleotide
  Antisense strand to SEQ ID NO: 2395868
ugucccaggaauuuaccac

SEQ ID NO: 2395870 - RNA, 19 nt, Artificial Sequence
  Description of Artificial Sequence: Synthetic oligonucleotide
  Sense strand starting at position 2803 of SEQ ID NO: 1886233
ugguaaauuccugggacag

SEQ ID NO: 2395871 - RNA, 19 nt, Artificial Sequence
  Description of Artificial Sequence: Synthetic oligonucleotide
  Antisense strand to SEQ ID NO: 2395870
cugucccaggaauuuacca

SEQ ID NO: 2395872 - RNA, 19 nt, Artificial Sequence
  Description of Artificial Sequence: Synthetic oligonucleotide
  Sense strand starting at position 2804 of SEQ ID NO: 1886233
gguaaauuccugggacagg

SEQ ID NO: 2395873 - RNA, 19 nt, Artificial Sequence
  Description of Artificial Sequence: Synthetic oligonucleotide
  Antisense strand to SEQ ID NO: 2395872
ccugucccaggaauuuacc

SEQ ID NO: 2395874 - RNA, 19 nt, Artificial Sequence
  Description of Artificial Sequence: Synthetic oligonucleotide
  Sense strand starting at position 2805 of SEQ ID NO: 1886233
guaaauuccugggacagga

SEQ ID NO: 2395875 - RNA, 19 nt, Artificial Sequence
  Description of Artificial Sequence: Synthetic oligonucleotide
  Antisense strand to SEQ ID NO: 2395874
uccugucccaggaauuuac

SEQ ID NO: 2395876 - RNA, 19 nt, Artificial Sequence
  Description of Artificial Sequence: Synthetic oligonucleotide
  Sense strand starting at position 3081 of SEQ ID NO: 1886233
ggaugcgauccuugaaucu

SEQ ID NO: 2395877 - RNA, 19 nt, Artificial Sequence
  Description of Artificial Sequence: Synthetic oligonucleotide
  Antisense strand to SEQ ID NO: 2395876
agauucaaggaucgcaucc

SEQ ID NO: 2395878 - RNA, 19 nt, Artificial Sequence
  Description of Artificial Sequence: Synthetic oligonucleotide
  Sense strand starting at position 3279 of SEQ ID NO: 1886233
cccuuuccugucuggacaa

SEQ ID NO: 2395879 - RNA, 19 nt, Artificial Sequence
  Description of Artificial Sequence: Synthetic oligonucleotide
  Antisense strand to SEQ ID NO: 2395878
uuguccagacaggaaaggg

SEQ ID NO: 2395880 - RNA, 19 nt, Artificial Sequence
  Description of Artificial Sequence: Synthetic oligonucleotide
  Sense strand starting at position 3325 of SEQ ID NO: 1886233
ggcauugucuugggucuga

SEQ ID NO: 2395881 - RNA, 19 nt, Artificial Sequence
  Description of Artificial Sequence: Synthetic oligonucleotide
  Antisense strand to SEQ ID NO: 2395880
ucagacccaagacaaugcc

SEQ ID NO: 2395882 - RNA, 19 nt, Artificial Sequence
  Description of Artificial Sequence: Synthetic oligonucleotide
  Sense strand starting at position 3336 of SEQ ID NO: 1886233
gggucugauucccaaggaa

SEQ ID NO: 2395883 - RNA, 19 nt, Artificial Sequence
  Description of Artificial Sequence: Synthetic oligonucleotide
  Antisense strand to SEQ ID NO: 2395882
uuccuugggaaucagaccc

SEQ ID NO: 2395884 - RNA, 19 nt, Artificial Sequence
  Description of Artificial Sequence: Synthetic oligonucleotide
  Sense strand starting at position 3423 of SEQ ID NO: 1886233
ggccuaaagagugaccuuu

SEQ ID NO: 2395885 - RNA, 19 nt, Artificial Sequence
  Description of Artificial Sequence: Synthetic oligonucleotide
  Antisense strand to SEQ ID NO: 2395884
aaaggucacucuuuaggcc

SEQ ID NO: 2395886 - RNA, 19 nt, Artificial Sequence
  Description of Artificial Sequence: Synthetic oligonucleotide
  Sense strand starting at position 3470 of SEQ ID NO: 1886233
ccaugaugccagcagaauc

SEQ ID NO: 2395887 - RNA, 19 nt, Artificial Sequence
  Description of Artificial Sequence: Synthetic oligonucleotide
  Antisense strand to SEQ ID NO: 2395886
gauucugcuggcaucaugg

SEQ ID NO: 2395888 - RNA, 19 nt, Artificial Sequence
  Description of Artificial Sequence: Synthetic oligonucleotide
  Sense strand starting at position 3527 of SEQ ID NO: 1886233
ggcugaagagcucacugaa

SEQ ID NO: 2395889 - RNA, 19 nt, Artificial Sequence
  Description of Artificial Sequence: Synthetic oligonucleotide
  Antisense strand to SEQ ID NO: 2395888
uucagugagcucuucagcc

SEQ ID NO: 2395890 - RNA, 19 nt, Artificial Sequence
  Description of Artificial Sequence: Synthetic oligonucleotide
  Sense strand starting at position 3647 of SEQ ID NO: 1886233
ugggcugccucacauguaa

SEQ ID NO: 2395891 - RNA, 19 nt, Artificial Sequence
  Description of Artificial Sequence: Synthetic oligonucleotide
  Antisense strand to SEQ ID NO: 2395890
uuacaugugaggcagccca

SEQ ID NO: 2395892 - RNA, 19 nt, Artificial Sequence
  Description of Artificial Sequence: Synthetic oligonucleotide
  Sense strand starting at position 412 of SEQ ID NO: 1886234
gggaaacacucacguguca

SEQ ID NO: 2395893 - RNA, 19 nt, Artificial Sequence
  Description of Artificial Sequence: Synthetic oligonucleotide
  Antisense strand to SEQ ID NO: 2395892
ugacacgugaguguuuccc

SEQ ID NO: 2395894 - RNA, 19 nt, Artificial Sequence
  Description of Artificial Sequence: Synthetic oligonucleotide
  Sense strand starting at position 449 of SEQ ID NO: 1886234
ggcccuuccugcuagggaa

SEQ ID NO: 2395895 - RNA, 19 nt, Artificial Sequence
  Description of Artificial Sequence: Synthetic oligonucleotide
  Antisense strand to SEQ ID NO: 2395894
uucccuagcaggaagggcc

SEQ ID NO: 2395896 - RNA, 19 nt, Artificial Sequence
  Description of Artificial Sequence: Synthetic oligonucleotide
  Sense strand starting at position 729 of SEQ ID NO: 1886234
ccaagcaugcacugagaaa

SEQ ID NO: 2395897 - RNA, 19 nt, Artificial Sequence
  Description of Artificial Sequence: Synthetic oligonucleotide
  Antisense strand to SEQ ID NO: 2395896
uuucucagugcaugcuugg

SEQ ID NO: 2395898 - RNA, 19 nt, Artificial Sequence
  Description of Artificial Sequence: Synthetic oligonucleotide
  Sense strand starting at position 832 of SEQ ID NO: 1886234
gggccacacucagcuaauu

SEQ ID NO: 2395899 - RNA, 19 nt, Artificial Sequence
  Description of Artificial Sequence: Synthetic oligonucleotide
  Antisense strand to SEQ ID NO: 2395898
aauuagcugaguguggccc

SEQ ID NO: 2395900 - RNA, 19 nt, Artificial Sequence
  Description of Artificial Sequence: Synthetic oligonucleotide
  Sense strand starting at position 1107 of SEQ ID NO: 1886234
ggagcuagucucgacccaa

SEQ ID NO: 2395901 - RNA, 19 nt, Artificial Sequence
  Description of Artificial Sequence: Synthetic oligonucleotide
  Antisense strand to SEQ ID NO: 2395900
uugggucgagacuagcucc

SEQ ID NO: 2395902 - RNA, 19 nt, Artificial Sequence
  Description of Artificial Sequence: Synthetic oligonucleotide
  Sense strand starting at position 1216 of SEQ ID NO: 1886234
auggguguggugugaucuu

SEQ ID NO: 2395903 - RNA, 19 nt, Artificial Sequence
  Description of Artificial Sequence: Synthetic oligonucleotide
  Antisense strand to SEQ ID NO: 2395902
aagaucacaccacacccau

SEQ ID NO: 2395904 - RNA, 19 nt, Artificial Sequence
  Description of Artificial Sequence: Synthetic oligonucleotide
  Sense strand starting at position 1223 of SEQ ID NO: 1886234
uggugugaucuuugaaucu

SEQ ID NO: 2395905 - RNA, 19 nt, Artificial Sequence
  Description of Artificial Sequence: Synthetic oligonucleotide
  Antisense strand to SEQ ID NO: 2395904
agauucaaagaucacacca

SEQ ID NO: 2395906 - RNA, 19 nt, Artificial Sequence
  Description of Artificial Sequence: Synthetic oligonucleotide
  Sense strand starting at position 1465 of SEQ ID NO: 1886234
gcaucuuacuuggcucaga

SEQ ID NO: 2395907 - RNA, 19 nt, Artificial Sequence
  Description of Artificial Sequence: Synthetic oligonucleotide
  Antisense strand to SEQ ID NO: 2395906
ucugagccaaguaagaugc

SEQ ID NO: 2395908 - RNA, 19 nt, Artificial Sequence
  Description of Artificial Sequence: Synthetic oligonucleotide
  Sense strand starting at position 1581 of SEQ ID NO: 1886234
acccuauggucuggcucau

SEQ ID NO: 2395909 - RNA, 19 nt, Artificial Sequence
  Description of Artificial Sequence: Synthetic oligonucleotide
  Antisense strand to SEQ ID NO: 2395908
augagccagaccauagggu

SEQ ID NO: 2395910 - RNA, 19 nt, Artificial Sequence
  Description of Artificial Sequence: Synthetic oligonucleotide
  Sense strand starting at position 1624 of SEQ ID NO: 1886234
cucaccuaugccgaucaau

SEQ ID NO: 2395911 - RNA, 19 nt, Artificial Sequence
  Description of Artificial Sequence: Synthetic oligonucleotide
  Antisense strand to SEQ ID NO: 2395910
auugaucggcauaggugag

SEQ ID NO: 2395912 - RNA, 19 nt, Artificial Sequence
  Description of Artificial Sequence: Synthetic oligonucleotide
  Sense strand starting at position 1636 of SEQ ID NO: 1886234
gaucaaugccagggagucu

SEQ ID NO: 2395913 - RNA, 19 nt, Artificial Sequence
  Description of Artificial Sequence: Synthetic oligonucleotide
  Antisense strand to SEQ ID NO: 2395912
agacucccuggcauugauc

SEQ ID NO: 2395914 - RNA, 19 nt, Artificial Sequence
  Description of Artificial Sequence: Synthetic oligonucleotide
  Sense strand starting at position 1645 of SEQ ID NO: 1886234
cagggagucuucugggcaa

SEQ ID NO: 2395915 - RNA, 19 nt, Artificial Sequence
  Description of Artificial Sequence: Synthetic oligonucleotide
  Antisense strand to SEQ ID NO: 2395914
uugcccagaagacucccug

SEQ ID NO: 2395916 - RNA, 19 nt, Artificial Sequence
  Description of Artificial Sequence: Synthetic oligonucleotide
  Sense strand starting at position 2225 of SEQ ID NO: 1886234
accucacuccuguauguga

SEQ ID NO: 2395917 - RNA, 19 nt, Artificial Sequence
  Description of Artificial Sequence: Synthetic oligonucleotide
  Antisense strand to SEQ ID NO: 2395916
ucacauacaggagugaggu

SEQ ID NO: 2395918 - RNA, 19 nt, Artificial Sequence
  Description of Artificial Sequence: Synthetic oligonucleotide
  Sense strand starting at position 2298 of SEQ ID NO: 1886234
aucguuugcaugcggaaca

SEQ ID NO: 2395919 - RNA, 19 nt, Artificial Sequence
  Description of Artificial Sequence: Synthetic oligonucleotide
  Antisense strand to SEQ ID NO: 2395918
uguuccgcaugcaaacgau

SEQ ID NO: 2395920 - RNA, 19 nt, Artificial Sequence
  Description of Artificial Sequence: Synthetic oligonucleotide
  Sense strand starting at position 2461 of SEQ ID NO: 1886234
ccaacucauucgcaggaaa

SEQ ID NO: 2395921 - RNA, 19 nt, Artificial Sequence
  Description of Artificial Sequence: Synthetic oligonucleotide
  Antisense strand to SEQ ID NO: 2395920
uuuccugcgaaugaguugg

SEQ ID NO: 2395922 - RNA, 19 nt, Artificial Sequence
  Description of Artificial Sequence: Synthetic oligonucleotide
  Sense strand starting at position 2532 of SEQ ID NO: 1886234
agccuaucucugugcauag

SEQ ID NO: 2395923 - RNA, 19 nt, Artificial Sequence
  Description of Artificial Sequence: Synthetic oligonucleotide
  Antisense strand to SEQ ID NO: 2395922
cuaugcacagagauaggcu

SEQ ID NO: 2395924 - RNA, 19 nt, Artificial Sequence
  Description of Artificial Sequence: Synthetic oligonucleotide
  Sense strand starting at position 2533 of SEQ ID NO: 1886234
gccuaucucugugcauagu

SEQ ID NO: 2395925 - RNA, 19 nt, Artificial Sequence
  Description of Artificial Sequence: Synthetic oligonucleotide
  Antisense strand to SEQ ID NO: 2395924
acuaugcacagagauaggc

SEQ ID NO: 2395926 - RNA, 19 nt, Artificial Sequence
  Description of Artificial Sequence: Synthetic oligonucleotide
  Sense strand starting at position 2825 of SEQ ID NO: 1886234
gcaaccauucccgacacuu

SEQ ID NO: 2395927 - RNA, 19 nt, Artificial Sequence
  Description of Artificial Sequence: Synthetic oligonucleotide
  Antisense strand to SEQ ID NO: 2395926
aagugucgggaaugguugc

SEQ ID NO: 2395928 - RNA, 19 nt, Artificial Sequence
  Description of Artificial Sequence: Synthetic oligonucleotide
  Sense strand starting at position 3018 of SEQ ID NO: 1886234
cucgaugaggcccauagaa

SEQ ID NO: 2395929 - RNA, 19 nt, Artificial Sequence
  Description of Artificial Sequence: Synthetic oligonucleotide
  Antisense strand to SEQ ID NO: 2395928
uucuaugggccucaucgag

SEQ ID NO: 2395930 - RNA, 19 nt, Artificial Sequence
  Description of Artificial Sequence: Synthetic oligonucleotide
  Sense strand starting at position 3028 of SEQ ID NO: 1886234
cccauagaauggcucauua

SEQ ID NO: 2395931 - RNA, 19 nt, Artificial Sequence
  Description of Artificial Sequence: Synthetic oligonucleotide
  Antisense strand to SEQ ID NO: 2395930
uaaugagccauucuauggg

SEQ ID NO: 2395932 - RNA, 19 nt, Artificial Sequence
  Description of Artificial Sequence: Synthetic oligonucleotide
  Sense strand starting at position 3082 of SEQ ID NO: 1886234
gggcgcaauccuuaaaucu

SEQ ID NO: 2395933 - RNA, 19 nt, Artificial Sequence
  Description of Artificial Sequence: Synthetic oligonucleotide
  Antisense strand to SEQ ID NO: 2395932
agauuuaaggauugcgccc

SEQ ID NO: 2395934 - RNA, 19 nt, Artificial Sequence
  Description of Artificial Sequence: Synthetic oligonucleotide
  Sense strand starting at position 3251 of SEQ ID NO: 1886234
ggagcuacuaugugugaga

SEQ ID NO: 2395935 - RNA, 19 nt, Artificial Sequence
  Description of Artificial Sequence: Synthetic oligonucleotide
  Antisense strand to SEQ ID NO: 2395934
ucucacacauaguagcucc

SEQ ID NO: 2395936 - RNA, 19 nt, Artificial Sequence
  Description of Artificial Sequence: Synthetic oligonucleotide
  Sense strand starting at position 3253 of SEQ ID NO: 1886234
agcuacuaugugugagacu

SEQ ID NO: 2395937 - RNA, 19 nt, Artificial Sequence
  Description of Artificial Sequence: Synthetic oligonucleotide
  Antisense strand to SEQ ID NO: 2395936
agucucacacauaguagcu

SEQ ID NO: 2395938 - RNA, 19 nt, Artificial Sequence
  Description of Artificial Sequence: Synthetic oligonucleotide
  Sense strand starting at position 3256 of SEQ ID NO: 1886234
uacuaugugugagacugaa

SEQ ID NO: 2395939 - RNA, 19 nt, Artificial Sequence
  Description of Artificial Sequence: Synthetic oligonucleotide
  Antisense strand to SEQ ID NO: 2395938
uucagucucacacauagua

SEQ ID NO: 2395940 - RNA, 19 nt, Artificial Sequence
  Description of Artificial Sequence: Synthetic oligonucleotide
  Sense strand starting at position 3401 of SEQ ID NO: 1886234
agguucgcucccugaggaa

SEQ ID NO: 2395941 - RNA, 19 nt, Artificial Sequence
  Description of Artificial Sequence: Synthetic oligonucleotide
  Antisense strand to SEQ ID NO: 2395940
uuccucagggagcgaaccu

SEQ ID NO: 2395942 - RNA, 19 nt, Artificial Sequence
  Description of Artificial Sequence: Synthetic oligonucleotide
  Sense strand starting at position 3496 of SEQ ID NO: 1886234
cucaccuaugcuggugaau

SEQ ID NO: 2395943 - RNA, 19 nt, Artificial Sequence
  Description of Artificial Sequence: Synthetic oligonucleotide
  Antisense strand to SEQ ID NO: 2395942
auucaccagcauaggugag

SEQ ID NO: 2395944 - RNA, 19 nt, Artificial Sequence
  Description of Artificial Sequence: Synthetic oligonucleotide
  Sense strand starting at position 3918 of SEQ ID NO: 1886234
cccagaugugcucaccuca

SEQ ID NO: 2395945 - RNA, 19 nt, Artificial Sequence
  Description of Artificial Sequence: Synthetic oligonucleotide
  Antisense strand to SEQ ID NO: 2395944
ugaggugagcacaucuggg

SEQ ID NO: 2395946 - RNA, 19 nt, Artificial Sequence
  Description of Artificial Sequence: Synthetic oligonucleotide
  Sense strand starting at position 3933 of SEQ ID NO: 1886234
cucagcucaguguaggaaa

SEQ ID NO: 2395947 - RNA, 19 nt, Artificial Sequence
  Description of Artificial Sequence: Synthetic oligonucleotide
  Antisense strand to SEQ ID NO: 2395946
uuuccuacacugagcugag

SEQ ID NO: 2395948 - RNA, 19 nt, Artificial Sequence
  Description of Artificial Sequence: Synthetic oligonucleotide
  Sense strand starting at position 64 of SEQ ID NO: 1886235
gggccugacccuugaaucu

SEQ ID NO: 2395949 - RNA, 19 nt, Artificial Sequence
  Description of Artificial Sequence: Synthetic oligonucleotide
  Antisense strand to SEQ ID NO: 2395948
agauucaagggucaggccc

SEQ ID NO: 2395950 - RNA, 19 nt, Artificial Sequence
  Description of Artificial Sequence: Synthetic oligonucleotide
  Sense strand starting at position 73 of SEQ ID NO: 1886235
ccuugaaucuuggccugaa

SEQ ID NO: 2395951 - RNA, 19 nt, Artificial Sequence
  Description of Artificial Sequence: Synthetic oligonucleotide
  Antisense strand to SEQ ID NO: 2395950
uucaggccaagauucaagg

SEQ ID NO: 2395952 - RNA, 19 nt, Artificial Sequence
  Description of Artificial Sequence: Synthetic oligonucleotide
  Sense strand starting at position 74 of SEQ ID NO: 1886235
cuugaaucuuggccugaau

SEQ ID NO: 2395953 - RNA, 19 nt, Artificial Sequence
  Description of Artificial Sequence: Synthetic oligonucleotide
  Antisense strand to SEQ ID NO: 2395952
auucaggccaagauucaag

SEQ ID NO: 2395954 - RNA, 19 nt, Artificial Sequence
  Description of Artificial Sequence: Synthetic oligonucleotide
  Sense strand starting at position 151 of SEQ ID NO: 1886235
gauggagaguuccugcuua

SEQ ID NO: 2395955 - RNA, 19 nt, Artificial Sequence
  Description of Artificial Sequence: Synthetic oligonucleotide
  Antisense strand to SEQ ID NO: 2395954
uaagcaggaacucuccauc

SEQ ID NO: 2395956 - RNA, 19 nt, Artificial Sequence
  Description of Artificial Sequence: Synthetic oligonucleotide
  Sense strand starting at position 155 of SEQ ID NO: 1886235
gagaguuccugcuuaacac

SEQ ID NO: 2395957 - RNA, 19 nt, Artificial Sequence
  Description of Artificial Sequence: Synthetic oligonucleotide
  Antisense strand to SEQ ID NO: 2395956
guguuaagcaggaacucuc

SEQ ID NO: 2395958 - RNA, 19 nt, Artificial Sequence
  Description of Artificial Sequence: Synthetic oligonucleotide
  Sense strand starting at position 202 of SEQ ID NO: 1886235
ccucauguugccugggagu

SEQ ID NO: 2395959 - RNA, 19 nt, Artificial Sequence
  Description of Artificial Sequence: Synthetic oligonucleotide
  Antisense strand to SEQ ID NO: 2395958
acucccaggcaacaugagg

SEQ ID NO: 2395960 - RNA, 19 nt, Artificial Sequence
  Description of Artificial Sequence: Synthetic oligonucleotide
  Sense strand starting at position 240 of SEQ ID NO: 1886235
caccgagucucagcuagaa

SEQ ID NO: 2395961 - RNA, 19 nt, Artificial Sequence
  Description of Artificial Sequence: Synthetic oligonucleotide
  Antisense strand to SEQ ID NO: 2395960
uucuagcugagacucggug

SEQ ID NO: 2395962 - RNA, 19 nt, Artificial Sequence
  Description of Artificial Sequence: Synthetic oligonucleotide
  Sense strand starting at position 342 of SEQ ID NO: 1886235
ggaaccaguuucuauggaa

SEQ ID NO: 2395963 - RNA, 19 nt, Artificial Sequence
  Description of Artificial Sequence: Synthetic oligonucleotide
  Antisense strand to SEQ ID NO: 2395962
uuccauagaaacugguucc

SEQ ID NO: 2395964 - RNA, 19 nt, Artificial Sequence
  Description of Artificial Sequence: Synthetic oligonucleotide
  Sense strand starting at position 345 of SEQ ID NO: 1886235
accaguuucuauggaagac

SEQ ID NO: 2395965 - RNA, 19 nt, Artificial Sequence
  Description of Artificial Sequence: Synthetic oligonucleotide
  Antisense strand to SEQ ID NO: 2395964
gucuuccauagaaacuggu

SEQ ID NO: 2395966 - RNA, 19 nt, Artificial Sequence
  Description of Artificial Sequence: Synthetic oligonucleotide
  Sense strand starting at position 401 of SEQ ID NO: 1886235
aggucagcucccugaggaa

SEQ ID NO: 2395967 - RNA, 19 nt, Artificial Sequence
  Description of Artificial Sequence: Synthetic oligonucleotide
  Antisense strand to SEQ ID NO: 2395966
uuccucagggagcugaccu

SEQ ID NO: 2395968 - RNA, 19 nt, Artificial Sequence
  Description of Artificial Sequence: Synthetic oligonucleotide
  Sense strand starting at position 644 of SEQ ID NO: 1886235
uggguugccucacggacaa

SEQ ID NO: 2395969 - RNA, 19 nt, Artificial Sequence
  Description of Artificial Sequence: Synthetic oligonucleotide
  Antisense strand to SEQ ID NO: 2395968
uuguccgugaggcaaccca

SEQ ID NO: 2395970 - RNA, 19 nt, Artificial Sequence
  Description of Artificial Sequence: Synthetic oligonucleotide
  Sense strand starting at position 754 of SEQ ID NO: 1886235
auccgagaauccucuucca

SEQ ID NO: 2395971 - RNA, 19 nt, Artificial Sequence
  Description of Artificial Sequence: Synthetic oligonucleotide
  Antisense strand to SEQ ID NO: 2395970
uggaagaggauucucggau

SEQ ID NO: 2395972 - RNA, 19 nt, Artificial Sequence
  Description of Artificial Sequence: Synthetic oligonucleotide
  Sense strand starting at position 1172 of SEQ ID NO: 1886235
gugaaacagugacgguaau

SEQ ID NO: 2395973 - RNA, 19 nt, Artificial Sequence
  Description of Artificial Sequence: Synthetic oligonucleotide
  Antisense strand to SEQ ID NO: 2395972
auuaccgucacuguuucac

SEQ ID NO: 2395974 - RNA, 19 nt, Artificial Sequence
  Description of Artificial Sequence: Synthetic oligonucleotide
  Sense strand starting at position 1341 of SEQ ID NO: 1886235
ggcaguccucaaggucaga

SEQ ID NO: 2395975 - RNA, 19 nt, Artificial Sequence
  Description of Artificial Sequence: Synthetic oligonucleotide
  Antisense strand to SEQ ID NO: 2395974
ucugaccuugaggacugcc

SEQ ID NO: 2395976 - RNA, 19 nt, Artificial Sequence
  Description of Artificial Sequence: Synthetic oligonucleotide
  Sense strand starting at position 1468 of SEQ ID NO: 1886235
gggucagauucccuaggaa

SEQ ID NO: 2395977 - RNA, 19 nt, Artificial Sequence
  Description of Artificial Sequence: Synthetic oligonucleotide
  Antisense strand to SEQ ID NO: 2395976
uuccuagggaaucugaccc

SEQ ID NO: 2395978 - RNA, 19 nt, Artificial Sequence
  Description of Artificial Sequence: Synthetic oligonucleotide
  Sense strand starting at position 1545 of SEQ ID NO: 1886235
gaggaaaucuuccuguccu

SEQ ID NO: 2395979 - RNA, 19 nt, Artificial Sequence
  Description of Artificial Sequence: Synthetic oligonucleotide
  Antisense strand to SEQ ID NO: 2395978
aggacaggaagauuuccuc

SEQ ID NO: 2395980 - RNA, 19 nt, Artificial Sequence
  Description of Artificial Sequence: Synthetic oligonucleotide
  Sense strand starting at position 1546 of SEQ ID NO: 1886235
aggaaaucuuccuguccug

SEQ ID NO: 2395981 - RNA, 19 nt, Artificial Sequence
  Description of Artificial Sequence: Synthetic oligonucleotide
  Antisense strand to SEQ ID NO: 2395980
caggacaggaagauuuccu

SEQ ID NO: 2395982 - RNA, 19 nt, Artificial Sequence
  Description of Artificial Sequence: Synthetic oligonucleotide
  Sense strand starting at position 1627 of SEQ ID NO: 1886235
cuuaccuaugcuggucaau

SEQ ID NO: 2395983 - RNA, 19 nt, Artificial Sequence
  Description of Artificial Sequence: Synthetic oligonucleotide
  Antisense strand to SEQ ID NO: 2395982
auugaccagcauagguaag

SEQ ID NO: 2395984 - RNA, 19 nt, Artificial Sequence
  Description of Artificial Sequence: Synthetic oligonucleotide
  Sense strand starting at position 2316 of SEQ ID NO: 1886235
gggaaacacucacguguca

SEQ ID NO: 2395985 - RNA, 19 nt, Artificial Sequence
  Description of Artificial Sequence: Synthetic oligonucleotide
  Antisense strand to SEQ ID NO: 2395984
ugacacgugaguguuuccc

SEQ ID NO: 2395986 - RNA, 19 nt, Artificial Sequence
  Description of Artificial Sequence: Synthetic oligonucleotide
  Sense strand starting at position 2353 of SEQ ID NO: 1886235
ggcccuuccugcuagggaa

SEQ ID NO: 2395987 - RNA, 19 nt, Artificial Sequence
  Description of Artificial Sequence: Synthetic oligonucleotide
  Antisense strand to SEQ ID NO: 2395986
uucccuagcaggaagggcc

SEQ ID NO: 2395988 - RNA, 19 nt, Artificial Sequence
  Description of Artificial Sequence: Synthetic oligonucleotide
  Sense strand starting at position 2633 of SEQ ID NO: 1886235
ccaagcaugcacugagaaa

SEQ ID NO: 2395989 - RNA, 19 nt, Artificial Sequence
  Description of Artificial Sequence: Synthetic oligonucleotide
  Antisense strand to SEQ ID NO: 2395988
uuucucagugcaugcuugg

SEQ ID NO: 2395990 - RNA, 19 nt, Artificial Sequence
  Description of Artificial Sequence: Synthetic oligonucleotide
  Sense strand starting at position 2736 of SEQ ID NO: 1886235
gggccacacucagcuaauu

SEQ ID NO: 2395991 - RNA, 19 nt, Artificial Sequence
  Description of Artificial Sequence: Synthetic oligonucleotide
  Antisense strand to SEQ ID NO: 2395990
aauuagcugaguguggccc

SEQ ID NO: 2395992 - RNA, 19 nt, Artificial Sequence
  Description of Artificial Sequence: Synthetic oligonucleotide
  Sense strand starting at position 3011 of SEQ ID NO: 1886235
ggagcuagucucgacccaa

SEQ ID NO: 2395993 - RNA, 19 nt, Artificial Sequence
  Description of Artificial Sequence: Synthetic oligonucleotide
  Antisense strand to SEQ ID NO: 2395992
uugggucgagacuagcucc

SEQ ID NO: 2395994 - RNA, 19 nt, Artificial Sequence
  Description of Artificial Sequence: Synthetic oligonucleotide
  Sense strand starting at position 3120 of SEQ ID NO: 1886235
auggguguggugugaucuu

SEQ ID NO: 2395995 - RNA, 19 nt, Artificial Sequence
  Description of Artificial Sequence: Synthetic oligonucleotide
  Antisense strand to SEQ ID NO: 2395994
aagaucacaccacacccau

SEQ ID NO: 2395996 - RNA, 19 nt, Artificial Sequence
  Description of Artificial Sequence: Synthetic oligonucleotide
  Sense strand starting at position 3127 of SEQ ID NO: 1886235
uggugugaucuuugaaucu

SEQ ID NO: 2395997 - RNA, 19 nt, Artificial Sequence
  Description of Artificial Sequence: Synthetic oligonucleotide
  Antisense strand to SEQ ID NO: 2395996
agauucaaagaucacacca

SEQ ID NO: 2395998 - RNA, 19 nt, Artificial Sequence
  Description of Artificial Sequence: Synthetic oligonucleotide
  Sense strand starting at position 3369 of SEQ ID NO: 1886235
gcaucuuacuuggcucaga

SEQ ID NO: 2395999 - RNA, 19 nt, Artificial Sequence
  Description of Artificial Sequence: Synthetic oligonucleotide
  Antisense strand to SEQ ID NO: 2395998
ucugagccaaguaagaugc

SEQ ID NO: 2396000 - RNA, 19 nt, Artificial Sequence
  Description of Artificial Sequence: Synthetic oligonucleotide
  Sense strand starting at position 3485 of SEQ ID NO: 1886235
acccuauggucuggcucau

SEQ ID NO: 2396001 - RNA, 19 nt, Artificial Sequence
  Description of Artificial Sequence: Synthetic oligonucleotide
  Antisense strand to SEQ ID NO: 2396000
augagccagaccauagggu

SEQ ID NO: 2396002 - RNA, 19 nt, Artificial Sequence
  Description of Artificial Sequence: Synthetic oligonucleotide
  Sense strand starting at position 3528 of SEQ ID NO: 1886235
cucaccuaugccgaucaau

SEQ ID NO: 2396003 - RNA, 19 nt, Artificial Sequence
  Description of Artificial Sequence: Synthetic oligonucleotide
  Antisense strand to SEQ ID NO: 2396002
auugaucggcauaggugag

SEQ ID NO: 2396004 - RNA, 19 nt, Artificial Sequence
  Description of Artificial Sequence: Synthetic oligonucleotide
  Sense strand starting at position 3540 of SEQ ID NO: 1886235
gaucaaugccagggagucu

SEQ ID NO: 2396005 - RNA, 19 nt, Artificial Sequence
  Description of Artificial Sequence: Synthetic oligonucleotide
  Antisense strand to SEQ ID NO: 2396004
agacucccuggcauugauc

SEQ ID NO: 2396006 - RNA, 19 nt, Artificial Sequence
  Description of Artificial Sequence: Synthetic oligonucleotide
  Sense strand starting at position 3549 of SEQ ID NO: 1886235
cagggagucuucugggcaa

SEQ ID NO: 2396007 - RNA, 19 nt, Artificial Sequence
  Description of Artificial Sequence: Synthetic oligonucleotide
  Antisense strand to SEQ ID NO: 2396006
uugcccagaagacucccug

SEQ ID NO: 2396008 - RNA, 19 nt, Artificial Sequence
  Description of Artificial Sequence: Synthetic oligonucleotide
  Sense strand starting at position 138 of SEQ ID NO: 1886236
ccugguugugcucaccaca

SEQ ID NO: 2396009 - RNA, 19 nt, Artificial Sequence
  Description of Artificial Sequence: Synthetic oligonucleotide
  Antisense strand to SEQ ID NO: 2396008
uguggugagcacaaccagg

SEQ ID NO: 2396010 - RNA, 19 nt, Artificial Sequence
  Description of Artificial Sequence: Synthetic oligonucleotide
  Sense strand starting at position 266 of SEQ ID NO: 1886236
cucaccaucuggugagaua

SEQ ID NO: 2396011 - RNA, 19 nt, Artificial Sequence
  Description of Artificial Sequence: Synthetic oligonucleotide
  Antisense strand to SEQ ID NO: 2396010
uaucucaccagauggugag

SEQ ID NO: 2396012 - RNA, 19 nt, Artificial Sequence
  Description of Artificial Sequence: Synthetic oligonucleotide
  Sense strand starting at position 275 of SEQ ID NO: 1886236
uggugagauagcuggaaga

SEQ ID NO: 2396013 - RNA, 19 nt, Artificial Sequence
  Description of Artificial Sequence: Synthetic oligonucleotide
  Antisense strand to SEQ ID NO: 2396012
ucuuccagcuaucucacca

SEQ ID NO: 2396014 - RNA, 19 nt, Artificial Sequence
  Description of Artificial Sequence: Synthetic oligonucleotide
  Sense strand starting at position 285 of SEQ ID NO: 1886236
gcuggaagauggguccaaa

SEQ ID NO: 2396015 - RNA, 19 nt, Artificial Sequence
  Description of Artificial Sequence: Synthetic oligonucleotide
  Antisense strand to SEQ ID NO: 2396014
uuuggacccaucuuccagc

SEQ ID NO: 2396016 - RNA, 19 nt, Artificial Sequence
  Description of Artificial Sequence: Synthetic oligonucleotide
  Sense strand starting at position 1194 of SEQ ID NO: 1886236
gggccugacccuugaaucu

SEQ ID NO: 2396017 - RNA, 19 nt, Artificial Sequence
  Description of Artificial Sequence: Synthetic oligonucleotide
  Antisense strand to SEQ ID NO: 2396016
agauucaagggucaggccc

SEQ ID NO: 2396018 - RNA, 19 nt, Artificial Sequence
  Description of Artificial Sequence: Synthetic oligonucleotide
  Sense strand starting at position 1203 of SEQ ID NO: 1886236
ccuugaaucuuggccugaa

SEQ ID NO: 2396019 - RNA, 19 nt, Artificial Sequence
  Description of Artificial Sequence: Synthetic oligonucleotide
  Antisense strand to SEQ ID NO: 2396018
uucaggccaagauucaagg

SEQ ID NO: 2396020 - RNA, 19 nt, Artificial Sequence
  Description of Artificial Sequence: Synthetic oligonucleotide
  Sense strand starting at position 1204 of SEQ ID NO: 1886236
cuugaaucuuggccugaau

SEQ ID NO: 2396021 - RNA, 19 nt, Artificial Sequence
  Description of Artificial Sequence: Synthetic oligonucleotide
  Antisense strand to SEQ ID NO: 2396020
auucaggccaagauucaag

SEQ ID NO: 2396022 - RNA, 19 nt, Artificial Sequence
  Description of Artificial Sequence: Synthetic oligonucleotide
  Sense strand starting at position 1281 of SEQ ID NO: 1886236
gauggagaguuccugcuua

SEQ ID NO: 2396023 - RNA, 19 nt, Artificial Sequence
  Description of Artificial Sequence: Synthetic oligonucleotide
  Antisense strand to SEQ ID NO: 2396022
uaagcaggaacucuccauc

SEQ ID NO: 2396024 - RNA, 19 nt, Artificial Sequence
  Description of Artificial Sequence: Synthetic oligonucleotide
  Sense strand starting at position 1285 of SEQ ID NO: 1886236
gagaguuccugcuuaacac

SEQ ID NO: 2396025 - RNA, 19 nt, Artificial Sequence
  Description of Artificial Sequence: Synthetic oligonucleotide
  Antisense strand to SEQ ID NO: 2396024
guguuaagcaggaacucuc

SEQ ID NO: 2396026 - RNA, 19 nt, Artificial Sequence
  Description of Artificial Sequence: Synthetic oligonucleotide
  Sense strand starting at position 1332 of SEQ ID NO: 1886236
ccucauguugccugggagu

SEQ ID NO: 2396027 - RNA, 19 nt, Artificial Sequence
  Description of Artificial Sequence: Synthetic oligonucleotide
  Antisense strand to SEQ ID NO: 2396026
acucccaggcaacaugagg

SEQ ID NO: 2396028 - RNA, 19 nt, Artificial Sequence
  Description of Artificial Sequence: Synthetic oligonucleotide
  Sense strand starting at position 1370 of SEQ ID NO: 1886236
caccgagucucagcuagaa

SEQ ID NO: 2396029 - RNA, 19 nt, Artificial Sequence
  Description of Artificial Sequence: Synthetic oligonucleotide
  Antisense strand to SEQ ID NO: 2396028
uucuagcugagacucggug

SEQ ID NO: 2396030 - RNA, 19 nt, Artificial Sequence
  Description of Artificial Sequence: Synthetic oligonucleotide
  Sense strand starting at position 1472 of SEQ ID NO: 1886236
ggaaccaguuucuauggaa

SEQ ID NO: 2396031 - RNA, 19 nt, Artificial Sequence
  Description of Artificial Sequence: Synthetic oligonucleotide
  Antisense strand to SEQ ID NO: 2396030
uuccauagaaacugguucc

SEQ ID NO: 2396032 - RNA, 19 nt, Artificial Sequence
  Description of Artificial Sequence: Synthetic oligonucleotide
  Sense strand starting at position 1475 of SEQ ID NO: 1886236
accaguuucuauggaagac

SEQ ID NO: 2396033 - RNA, 19 nt, Artificial Sequence
  Description of Artificial Sequence: Synthetic oligonucleotide
  Antisense strand to SEQ ID NO: 2396032
gucuuccauagaaacuggu

SEQ ID NO: 2396034 - RNA, 19 nt, Artificial Sequence
  Description of Artificial Sequence: Synthetic oligonucleotide
  Sense strand starting at position 1531 of SEQ ID NO: 1886236
aggucagcucccugaggaa

SEQ ID NO: 2396035 - RNA, 19 nt, Artificial Sequence
  Description of Artificial Sequence: Synthetic oligonucleotide
  Antisense strand to SEQ ID NO: 2396034
uuccucagggagcugaccu

SEQ ID NO: 2396036 - RNA, 19 nt, Artificial Sequence
  Description of Artificial Sequence: Synthetic oligonucleotide
  Sense strand starting at position 1774 of SEQ ID NO: 1886236
uggguugccucacggacaa

SEQ ID NO: 2396037 - RNA, 19 nt, Artificial Sequence
  Description of Artificial Sequence: Synthetic oligonucleotide
  Antisense strand to SEQ ID NO: 2396036
uuguccgugaggcaaccca

SEQ ID NO: 2396038 - RNA, 19 nt, Artificial Sequence
  Description of Artificial Sequence: Synthetic oligonucleotide
  Sense strand starting at position 1884 of SEQ ID NO: 1886236
auccgagaauccucuucca

SEQ ID NO: 2396039 - RNA, 19 nt, Artificial Sequence
  Description of Artificial Sequence: Synthetic oligonucleotide
  Antisense strand to SEQ ID NO: 2396038
uggaagaggauucucggau

SEQ ID NO: 2396040 - RNA, 19 nt, Artificial Sequence
  Description of Artificial Sequence: Synthetic oligonucleotide
  Sense strand starting at position 2302 of SEQ ID NO: 1886236
gugaaacagugacgguaau

SEQ ID NO: 2396041 - RNA, 19 nt, Artificial Sequence
  Description of Artificial Sequence: Synthetic oligonucleotide
  Antisense strand to SEQ ID NO: 2396040
auuaccgucacuguuucac

SEQ ID NO: 2396042 - RNA, 19 nt, Artificial Sequence
  Description of Artificial Sequence: Synthetic oligonucleotide
  Sense strand starting at position 2471 of SEQ ID NO: 1886236
ggcaguccucaaggucaga

SEQ ID NO: 2396043 - RNA, 19 nt, Artificial Sequence
  Description of Artificial Sequence: Synthetic oligonucleotide
  Antisense strand to SEQ ID NO: 2396042
ucugaccuugaggacugcc

SEQ ID NO: 2396044 - RNA, 19 nt, Artificial Sequence
  Description of Artificial Sequence: Synthetic oligonucleotide
  Sense strand starting at position 2598 of SEQ ID NO: 1886236
gggucagauucccuaggaa

SEQ ID NO: 2396045 - RNA, 19 nt, Artificial Sequence
  Description of Artificial Sequence: Synthetic oligonucleotide
  Antisense strand to SEQ ID NO: 2396044
uuccuagggaaucugaccc

SEQ ID NO: 2396046 - RNA, 19 nt, Artificial Sequence
  Description of Artificial Sequence: Synthetic oligonucleotide
  Sense strand starting at position 2675 of SEQ ID NO: 1886236
gaggaaaucuuccuguccu

SEQ ID NO: 2396047 - RNA, 19 nt, Artificial Sequence
  Description of Artificial Sequence: Synthetic oligonucleotide
  Antisense strand to SEQ ID NO: 2396046
aggacaggaagauuuccuc

SEQ ID NO: 2396048 - RNA, 19 nt, Artificial Sequence
  Description of Artificial Sequence: Synthetic oligonucleotide
  Sense strand starting at position 2676 of SEQ ID NO: 1886236
aggaaaucuuccuguccug

SEQ ID NO: 2396049 - RNA, 19 nt, Artificial Sequence
  Description of Artificial Sequence: Synthetic oligonucleotide
  Antisense strand to SEQ ID NO: 2396048
caggacaggaagauuuccu

SEQ ID NO: 2396050 - RNA, 19 nt, Artificial Sequence
  Description of Artificial Sequence: Synthetic oligonucleotide
  Sense strand starting at position 2757 of SEQ ID NO: 1886236
cuuaccuaugcuggucaau

SEQ ID NO: 2396051 - RNA, 19 nt, Artificial Sequence
  Description of Artificial Sequence: Synthetic oligonucleotide
  Antisense strand to SEQ ID NO: 2396050
auugaccagcauagguaag

SEQ ID NO: 2396052 - RNA, 19 nt, Artificial Sequence
  Description of Artificial Sequence: Synthetic oligonucleotide
  Sense strand starting at position 3446 of SEQ ID NO: 1886236
gggaaacacucacguguca

SEQ ID NO: 2396053 - RNA, 19 nt, Artificial Sequence
  Description of Artificial Sequence: Synthetic oligonucleotide
  Antisense strand to SEQ ID NO: 2396052
ugacacgugaguguuuccc

SEQ ID NO: 2396054 - RNA, 19 nt, Artificial Sequence
  Description of Artificial Sequence: Synthetic oligonucleotide
  Sense strand starting at position 3483 of SEQ ID NO: 1886236
ggcccuuccugcuagggaa

SEQ ID NO: 2396055 - RNA, 19 nt, Artificial Sequence
  Description of Artificial Sequence: Synthetic oligonucleotide
  Antisense strand to SEQ ID NO: 2396054
uucccuagcaggaagggcc

SEQ ID NO: 2396056 - RNA, 19 nt, Artificial Sequence
  Description of Artificial Sequence: Synthetic oligonucleotide
  Sense strand starting at position 3763 of SEQ ID NO: 1886236
ccaagcaugcacugagaaa

SEQ ID NO: 2396057 - RNA, 19 nt, Artificial Sequence
  Description of Artificial Sequence: Synthetic oligonucleotide
  Antisense strand to SEQ ID NO: 2396056
uuucucagugcaugcuugg

SEQ ID NO: 2396058 - RNA, 19 nt, Artificial Sequence
  Description of Artificial Sequence: Synthetic oligonucleotide
  Sense strand starting at position 3866 of SEQ ID NO: 1886236
gggccacacucagcuaauu

SEQ ID NO: 2396059 - RNA, 19 nt, Artificial Sequence
  Description of Artificial Sequence: Synthetic oligonucleotide
  Antisense strand to SEQ ID NO: 2396058
aauuagcugaguguggccc

SEQ ID NO: 2396060 - RNA, 19 nt, Artificial Sequence
  Description of Artificial Sequence: Synthetic oligonucleotide
  Sense strand starting at position 412 of SEQ ID NO: 1886237
gggaaacacucacguguca

SEQ ID NO: 2396061 - RNA, 19 nt, Artificial Sequence
  Description of Artificial Sequence: Synthetic oligonucleotide
  Antisense strand to SEQ ID NO: 2396060
ugacacgugaguguuuccc

SEQ ID NO: 2396062 - RNA, 19 nt, Artificial Sequence
  Description of Artificial Sequence: Synthetic oligonucleotide
  Sense strand starting at position 449 of SEQ ID NO: 1886237
ggcccuuccugcuagggaa

SEQ ID NO: 2396063 - RNA, 19 nt, Artificial Sequence
  Description of Artificial Sequence: Synthetic oligonucleotide
  Antisense strand to SEQ ID NO: 2396062
uucccuagcaggaagggcc

SEQ ID NO: 2396064 - RNA, 19 nt, Artificial Sequence
  Description of Artificial Sequence: Synthetic oligonucleotide
  Sense strand starting at position 729 of SEQ ID NO: 1886237
ccaagcaugcacugagaaa

SEQ ID NO: 2396065 - RNA, 19 nt, Artificial Sequence
  Description of Artificial Sequence: Synthetic oligonucleotide
  Antisense strand to SEQ ID NO: 2396064
uuucucagugcaugcuugg

SEQ ID NO: 2396066 - RNA, 19 nt, Artificial Sequence
  Description of Artificial Sequence: Synthetic oligonucleotide
  Sense strand starting at position 832 of SEQ ID NO: 1886237
gggccacacucagcuaauu

SEQ ID NO: 2396067 - RNA, 19 nt, Artificial Sequence
  Description of Artificial Sequence: Synthetic oligonucleotide
  Antisense strand to SEQ ID NO: 2396066
aauuagcugaguguggccc

SEQ ID NO: 2396068 - RNA, 19 nt, Artificial Sequence
  Description of Artificial Sequence: Synthetic oligonucleotide
  Sense strand starting at position 1107 of SEQ ID NO: 1886237
ggagcuagucucgacccaa

SEQ ID NO: 2396069 - RNA, 19 nt, Artificial Sequence
  Description of Artificial Sequence: Synthetic oligonucleotide
  Antisense strand to SEQ ID NO: 2396068
uugggucgagacuagcucc

SEQ ID NO: 2396070 - RNA, 19 nt, Artificial Sequence
  Description of Artificial Sequence: Synthetic oligonucleotide
  Sense strand starting at position 1216 of SEQ ID NO: 1886237
auggguguggugugaucuu

SEQ ID NO: 2396071 - RNA, 19 nt, Artificial Sequence
  Description of Artificial Sequence: Synthetic oligonucleotide
  Antisense strand to SEQ ID NO: 2396070
aagaucacaccacacccau

SEQ ID NO: 2396072 - RNA, 19 nt, Artificial Sequence
  Description of Artificial Sequence: Synthetic oligonucleotide
  Sense strand starting at position 1223 of SEQ ID NO: 1886237
uggugugaucuuugaaucu

SEQ ID NO: 2396073 - RNA, 19 nt, Artificial Sequence
  Description of Artificial Sequence: Synthetic oligonucleotide
  Antisense strand to SEQ ID NO: 2396072
agauucaaagaucacacca

SEQ ID NO: 2396074 - RNA, 19 nt, Artificial Sequence
  Description of Artificial Sequence: Synthetic oligonucleotide
  Sense strand starting at position 1465 of SEQ ID NO: 1886237
gcaucuuacuuggcucaga

SEQ ID NO: 2396075 - RNA, 19 nt, Artificial Sequence
  Description of Artificial Sequence: Synthetic oligonucleotide
  Antisense strand to SEQ ID NO: 2396074
ucugagccaaguaagaugc

SEQ ID NO: 2396076 - RNA, 19 nt, Artificial Sequence
  Description of Artificial Sequence: Synthetic oligonucleotide
  Sense strand starting at position 1581 of SEQ ID NO: 1886237
acccuauggucuggcucau

SEQ ID NO: 2396077 - RNA, 19 nt, Artificial Sequence
  Description of Artificial Sequence: Synthetic oligonucleotide
  Antisense strand to SEQ ID NO: 2396076
augagccagaccauagggu

SEQ ID NO: 2396078 - RNA, 19 nt, Artificial Sequence
  Description of Artificial Sequence: Synthetic oligonucleotide
  Sense strand starting at position 1624 of SEQ ID NO: 1886237
cucaccuaugccgaucaau

SEQ ID NO: 2396079 - RNA, 19 nt, Artificial Sequence
  Description of Artificial Sequence: Synthetic oligonucleotide
  Antisense strand to SEQ ID NO: 2396078
auugaucggcauaggugag

SEQ ID NO: 2396080 - RNA, 19 nt, Artificial Sequence
  Description of Artificial Sequence: Synthetic oligonucleotide
  Sense strand starting at position 1636 of SEQ ID NO: 1886237
gaucaaugccagggagucu

SEQ ID NO: 2396081 - RNA, 19 nt, Artificial Sequence
  Description of Artificial Sequence: Synthetic oligonucleotide
  Antisense strand to SEQ ID NO: 2396080
agacucccuggcauugauc

SEQ ID NO: 2396082 - RNA, 19 nt, Artificial Sequence
  Description of Artificial Sequence: Synthetic oligonucleotide
  Sense strand starting at position 1645 of SEQ ID NO: 1886237
cagggagucuucugggcaa

SEQ ID NO: 2396083 - RNA, 19 nt, Artificial Sequence
  Description of Artificial Sequence: Synthetic oligonucleotide
  Antisense strand to SEQ ID NO: 2396082
uugcccagaagacucccug

SEQ ID NO: 2396084 - RNA, 19 nt, Artificial Sequence
  Description of Artificial Sequence: Synthetic oligonucleotide
  Sense strand starting at position 2225 of SEQ ID NO: 1886237
accucacuccuguauguga

SEQ ID NO: 2396085 - RNA, 19 nt, Artificial Sequence
  Description of Artificial Sequence: Synthetic oligonucleotide
  Antisense strand to SEQ ID NO: 2396084
ucacauacaggagugaggu

SEQ ID NO: 2396086 - RNA, 19 nt, Artificial Sequence
  Description of Artificial Sequence: Synthetic oligonucleotide
  Sense strand starting at position 2298 of SEQ ID NO: 1886237
aucguuugcaugcggaaca

SEQ ID NO: 2396087 - RNA, 19 nt, Artificial Sequence
  Description of Artificial Sequence: Synthetic oligonucleotide
  Antisense strand to SEQ ID NO: 2396086
uguuccgcaugcaaacgau

SEQ ID NO: 2396088 - RNA, 19 nt, Artificial Sequence
  Description of Artificial Sequence: Synthetic oligonucleotide
  Sense strand starting at position 2461 of SEQ ID NO: 1886237
ccaacucauucgcaggaaa

SEQ ID NO: 2396089 - RNA, 19 nt, Artificial Sequence
  Description of Artificial Sequence: Synthetic oligonucleotide
  Antisense strand to SEQ ID NO: 2396088
uuuccugcgaaugaguugg

SEQ ID NO: 2396090 - RNA, 19 nt, Artificial Sequence
  Description of Artificial Sequence: Synthetic oligonucleotide
  Sense strand starting at position 2532 of SEQ ID NO: 1886237
agccuaucucugugcauag

SEQ ID NO: 2396091 - RNA, 19 nt, Artificial Sequence
  Description of Artificial Sequence: Synthetic oligonucleotide
  Antisense strand to SEQ ID NO: 2396090
cuaugcacagagauaggcu

SEQ ID NO: 2396092 - RNA, 19 nt, Artificial Sequence
  Description of Artificial Sequence: Synthetic oligonucleotide
  Sense strand starting at position 2533 of SEQ ID NO: 1886237
gccuaucucugugcauagu

SEQ ID NO: 2396093 - RNA, 19 nt, Artificial Sequence
  Description of Artificial Sequence: Synthetic oligonucleotide
  Antisense strand to SEQ ID NO: 2396092
acuaugcacagagauaggc

SEQ ID NO: 2396094 - RNA, 19 nt, Artificial Sequence
  Description of Artificial Sequence: Synthetic oligonucleotide
  Sense strand starting at position 2825 of SEQ ID NO: 1886237
gcaaccauucccgacacuu

SEQ ID NO: 2396095 - RNA, 19 nt, Artificial Sequence
  Description of Artificial Sequence: Synthetic oligonucleotide
  Antisense strand to SEQ ID NO: 2396094
aagugucgggaaugguugc

SEQ ID NO: 2396096 - RNA, 19 nt, Artificial Sequence
  Description of Artificial Sequence: Synthetic oligonucleotide
  Sense strand starting at position 3018 of SEQ ID NO: 1886237
cucgaugaggcccauagaa

SEQ ID NO: 2396097 - RNA, 19 nt, Artificial Sequence
  Description of Artificial Sequence: Synthetic oligonucleotide
  Antisense strand to SEQ ID NO: 2396096
uucuaugggccucaucgag

SEQ ID NO: 2396098 - RNA, 19 nt, Artificial Sequence
  Description of Artificial Sequence: Synthetic oligonucleotide
  Sense strand starting at position 3028 of SEQ ID NO: 1886237
cccauagaauggcucauua

SEQ ID NO: 2396099 - RNA, 19 nt, Artificial Sequence
  Description of Artificial Sequence: Synthetic oligonucleotide
  Antisense strand to SEQ ID NO: 2396098
uaaugagccauucuauggg

SEQ ID NO: 2396100 - RNA, 19 nt, Artificial Sequence
  Description of Artificial Sequence: Synthetic oligonucleotide
  Sense strand starting at position 3082 of SEQ ID NO: 1886237
gggcgcaauccuuaaaucu

SEQ ID NO: 2396101 - RNA, 19 nt, Artificial Sequence
  Description of Artificial Sequence: Synthetic oligonucleotide
  Antisense strand to SEQ ID NO: 2396100
agauuuaaggauugcgccc

SEQ ID NO: 2396102 - RNA, 19 nt, Artificial Sequence
  Description of Artificial Sequence: Synthetic oligonucleotide
  Sense strand starting at position 3251 of SEQ ID NO: 1886237
ggagcuacuaugugugaga

SEQ ID NO: 2396103 - RNA, 19 nt, Artificial Sequence
  Description of Artificial Sequence: Synthetic oligonucleotide
  Antisense strand to SEQ ID NO: 2396102
ucucacacauaguagcucc

SEQ ID NO: 2396104 - RNA, 19 nt, Artificial Sequence
  Description of Artificial Sequence: Synthetic oligonucleotide
  Sense strand starting at position 3253 of SEQ ID NO: 1886237
agcuacuaugugugagacu

SEQ ID NO: 2396105 - RNA, 19 nt, Artificial Sequence
  Description of Artificial Sequence: Synthetic oligonucleotide
  Antisense strand to SEQ ID NO: 2396104
agucucacacauaguagcu

SEQ ID NO: 2396106 - RNA, 19 nt, Artificial Sequence
  Description of Artificial Sequence: Synthetic oligonucleotide
  Sense strand starting at position 3256 of SEQ ID NO: 1886237
uacuaugugugagacugaa

SEQ ID NO: 2396107 - RNA, 19 nt, Artificial Sequence
  Description of Artificial Sequence: Synthetic oligonucleotide
  Antisense strand to SEQ ID NO: 2396106
uucagucucacacauagua

SEQ ID NO: 2396108 - RNA, 19 nt, Artificial Sequence
  Description of Artificial Sequence: Synthetic oligonucleotide
  Sense strand starting at position 3401 of SEQ ID NO: 1886237
agguucgcucccugaggaa

SEQ ID NO: 2396109 - RNA, 19 nt, Artificial Sequence
  Description of Artificial Sequence: Synthetic oligonucleotide
  Antisense strand to SEQ ID NO: 2396108
uuccucagggagcgaaccu

SEQ ID NO: 2396110 - RNA, 19 nt, Artificial Sequence
  Description of Artificial Sequence: Synthetic oligonucleotide
  Sense strand starting at position 3496 of SEQ ID NO: 1886237
cucaccuaugcuggugaau

SEQ ID NO: 2396111 - RNA, 19 nt, Artificial Sequence
  Description of Artificial Sequence: Synthetic oligonucleotide
  Antisense strand to SEQ ID NO: 2396110
auucaccagcauaggugag

SEQ ID NO: 2396112 - RNA, 19 nt, Artificial Sequence
  Description of Artificial Sequence: Synthetic oligonucleotide
  Sense strand starting at position 3918 of SEQ ID NO: 1886237
cccagaugugcucaccuca

SEQ ID NO: 2396113 - RNA, 19 nt, Artificial Sequence
  Description of Artificial Sequence: Synthetic oligonucleotide
  Antisense strand to SEQ ID NO: 2396112
ugaggugagcacaucuggg

SEQ ID NO: 2396114 - RNA, 19 nt, Artificial Sequence
  Description of Artificial Sequence: Synthetic oligonucleotide
  Sense strand starting at position 3933 of SEQ ID NO: 1886237
cucagcucaguguaggaaa

SEQ ID NO: 2396115 - RNA, 19 nt, Artificial Sequence
  Description of Artificial Sequence: Synthetic oligonucleotide
  Antisense strand to SEQ ID NO: 2396114
uuuccuacacugagcugag

SEQ ID NO: 2396116 - RNA, 19 nt, Artificial Sequence
  Description of Artificial Sequence: Synthetic oligonucleotide
  Sense strand starting at position 64 of SEQ ID NO: 1886238
gggccugacccuugaaucu

SEQ ID NO: 2396117 - RNA, 19 nt, Artificial Sequence
  Description of Artificial Sequence: Synthetic oligonucleotide
  Antisense strand to SEQ ID NO: 2396116
agauucaagggucaggccc

SEQ ID NO: 2396118 - RNA, 19 nt, Artificial Sequence
  Description of Artificial Sequence: Synthetic oligonucleotide
  Sense strand starting at position 73 of SEQ ID NO: 1886238
ccuugaaucuuggccugaa

SEQ ID NO: 2396119 - RNA, 19 nt, Artificial Sequence
  Description of Artificial Sequence: Synthetic oligonucleotide
  Antisense strand to SEQ ID NO: 2396118
uucaggccaagauucaagg

SEQ ID NO: 2396120 - RNA, 19 nt, Artificial Sequence
  Description of Artificial Sequence: Synthetic oligonucleotide
  Sense strand starting at position 74 of SEQ ID NO: 1886238
cuugaaucuuggccugaau

SEQ ID NO: 2396121 - RNA, 19 nt, Artificial Sequence
  Description of Artificial Sequence: Synthetic oligonucleotide
  Antisense strand to SEQ ID NO: 2396120
auucaggccaagauucaag

SEQ ID NO: 2396122 - RNA, 19 nt, Artificial Sequence
  Description of Artificial Sequence: Synthetic oligonucleotide
  Sense strand starting at position 151 of SEQ ID NO: 1886238
gauggagaguuccugcuua

SEQ ID NO: 2396123 - RNA, 19 nt, Artificial Sequence
  Description of Artificial Sequence: Synthetic oligonucleotide
  Antisense strand to SEQ ID NO: 2396122
uaagcaggaacucuccauc

SEQ ID NO: 2396124 - RNA, 19 nt, Artificial Sequence
  Description of Artificial Sequence: Synthetic oligonucleotide
  Sense strand starting at position 155 of SEQ ID NO: 1886238
gagaguuccugcuuaacac

SEQ ID NO: 2396125 - RNA, 19 nt, Artificial Sequence
  Description of Artificial Sequence: Synthetic oligonucleotide
  Antisense strand to SEQ ID NO: 2396124
guguuaagcaggaacucuc

SEQ ID NO: 2396126 - RNA, 19 nt, Artificial Sequence
  Description of Artificial Sequence: Synthetic oligonucleotide
  Sense strand starting at position 202 of SEQ ID NO: 1886238
ccucauguugccugggagu

SEQ ID NO: 2396127 - RNA, 19 nt, Artificial Sequence
  Description of Artificial Sequence: Synthetic oligonucleotide
  Antisense strand to SEQ ID NO: 2396126
acucccaggcaacaugagg

SEQ ID NO: 2396128 - RNA, 19 nt, Artificial Sequence
  Description of Artificial Sequence: Synthetic oligonucleotide
  Sense strand starting at position 240 of SEQ ID NO: 1886238
caccgagucucagcuagaa

SEQ ID NO: 2396129 - RNA, 19 nt, Artificial Sequence
  Description of Artificial Sequence: Synthetic oligonucleotide
  Antisense strand to SEQ ID NO: 2396128
uucuagcugagacucggug

SEQ ID NO: 2396130 - RNA, 19 nt, Artificial Sequence
  Description of Artificial Sequence: Synthetic oligonucleotide
  Sense strand starting at position 342 of SEQ ID NO: 1886238
ggaaccaguuucuauggaa

SEQ ID NO: 2396131 - RNA, 19 nt, Artificial Sequence
  Description of Artificial Sequence: Synthetic oligonucleotide
  Antisense strand to SEQ ID NO: 2396130
uuccauagaaacugguucc

SEQ ID NO: 2396132 - RNA, 19 nt, Artificial Sequence
  Description of Artificial Sequence: Synthetic oligonucleotide
  Sense strand starting at position 345 of SEQ ID NO: 1886238
accaguuucuauggaagac

SEQ ID NO: 2396133 - RNA, 19 nt, Artificial Sequence
  Description of Artificial Sequence: Synthetic oligonucleotide
  Antisense strand to SEQ ID NO: 2396132
gucuuccauagaaacuggu

SEQ ID NO: 2396134 - RNA, 19 nt, Artificial Sequence
  Description of Artificial Sequence: Synthetic oligonucleotide
  Sense strand starting at position 401 of SEQ ID NO: 1886238
aggucagcucccugaggaa

SEQ ID NO: 2396135 - RNA, 19 nt, Artificial Sequence
  Description of Artificial Sequence: Synthetic oligonucleotide
  Antisense strand to SEQ ID NO: 2396134
uuccucagggagcugaccu

SEQ ID NO: 2396136 - RNA, 19 nt, Artificial Sequence
  Description of Artificial Sequence: Synthetic oligonucleotide
  Sense strand starting at position 644 of SEQ ID NO: 1886238
uggguugccucacggacaa

SEQ ID NO: 2396137 - RNA, 19 nt, Artificial Sequence
  Description of Artificial Sequence: Synthetic oligonucleotide
  Antisense strand to SEQ ID NO: 2396136
uuguccgugaggcaaccca

SEQ ID NO: 2396138 - RNA, 19 nt, Artificial Sequence
  Description of Artificial Sequence: Synthetic oligonucleotide
  Sense strand starting at position 754 of SEQ ID NO: 1886238
auccgagaauccucuucca

SEQ ID NO: 2396139 - RNA, 19 nt, Artificial Sequence
  Description of Artificial Sequence: Synthetic oligonucleotide
  Antisense strand to SEQ ID NO: 2396138
uggaagaggauucucggau

SEQ ID NO: 2396140 - RNA, 19 nt, Artificial Sequence
  Description of Artificial Sequence: Synthetic oligonucleotide
  Sense strand starting at position 1172 of SEQ ID NO: 1886238
gugaaacagugacgguaau

SEQ ID NO: 2396141 - RNA, 19 nt, Artificial Sequence
  Description of Artificial Sequence: Synthetic oligonucleotide
  Antisense strand to SEQ ID NO: 2396140
auuaccgucacuguuucac

SEQ ID NO: 2396142 - RNA, 19 nt, Artificial Sequence
  Description of Artificial Sequence: Synthetic oligonucleotide
  Sense strand starting at position 1341 of SEQ ID NO: 1886238
ggcaguccucaaggucaga

SEQ ID NO: 2396143 - RNA, 19 nt, Artificial Sequence
  Description of Artificial Sequence: Synthetic oligonucleotide
  Antisense strand to SEQ ID NO: 2396142
ucugaccuugaggacugcc

SEQ ID NO: 2396144 - RNA, 19 nt, Artificial Sequence
  Description of Artificial Sequence: Synthetic oligonucleotide
  Sense strand starting at position 1468 of SEQ ID NO: 1886238
gggucagauucccuaggaa

SEQ ID NO: 2396145 - RNA, 19 nt, Artificial Sequence
  Description of Artificial Sequence: Synthetic oligonucleotide
  Antisense strand to SEQ ID NO: 2396144
uuccuagggaaucugaccc

SEQ ID NO: 2396146 - RNA, 19 nt, Artificial Sequence
  Description of Artificial Sequence: Synthetic oligonucleotide
  Sense strand starting at position 1545 of SEQ ID NO: 1886238
gaggaaaucuuccuguccu

SEQ ID NO: 2396147 - RNA, 19 nt, Artificial Sequence
  Description of Artificial Sequence: Synthetic oligonucleotide
  Antisense strand to SEQ ID NO: 2396146
aggacaggaagauuuccuc

SEQ ID NO: 2396148 - RNA, 19 nt, Artificial Sequence
  Description of Artificial Sequence: Synthetic oligonucleotide
  Sense strand starting at position 1546 of SEQ ID NO: 1886238
aggaaaucuuccuguccug

SEQ ID NO: 2396149 - RNA, 19 nt, Artificial Sequence
  Description of Artificial Sequence: Synthetic oligonucleotide
  Antisense strand to SEQ ID NO: 2396148
caggacaggaagauuuccu

SEQ ID NO: 2396150 - RNA, 19 nt, Artificial Sequence
  Description of Artificial Sequence: Synthetic oligonucleotide
  Sense strand starting at position 1627 of SEQ ID NO: 1886238
cuuaccuaugcuggucaau

SEQ ID NO: 2396151 - RNA, 19 nt, Artificial Sequence
  Description of Artificial Sequence: Synthetic oligonucleotide
  Antisense strand to SEQ ID NO: 2396150
auugaccagcauagguaag

SEQ ID NO: 2396152 - RNA, 19 nt, Artificial Sequence
  Description of Artificial Sequence: Synthetic oligonucleotide
  Sense strand starting at position 2316 of SEQ ID NO: 1886238
gggaaacacucacguguca

SEQ ID NO: 2396153 - RNA, 19 nt, Artificial Sequence
  Description of Artificial Sequence: Synthetic oligonucleotide
  Antisense strand to SEQ ID NO: 2396152
ugacacgugaguguuuccc

SEQ ID NO: 2396154 - RNA, 19 nt, Artificial Sequence
  Description of Artificial Sequence: Synthetic oligonucleotide
  Sense strand starting at position 2353 of SEQ ID NO: 1886238
ggcccuuccugcuagggaa

SEQ ID NO: 2396155 - RNA, 19 nt, Artificial Sequence
  Description of Artificial Sequence: Synthetic oligonucleotide
  Antisense strand to SEQ ID NO: 2396154
uucccuagcaggaagggcc

SEQ ID NO: 2396156 - RNA, 19 nt, Artificial Sequence
  Description of Artificial Sequence: Synthetic oligonucleotide
  Sense strand starting at position 2633 of SEQ ID NO: 1886238
ccaagcaugcacugagaaa

SEQ ID NO: 2396157 - RNA, 19 nt, Artificial Sequence
  Description of Artificial Sequence: Synthetic oligonucleotide
  Antisense strand to SEQ ID NO: 2396156
uuucucagugcaugcuugg

SEQ ID NO: 2396158 - RNA, 19 nt, Artificial Sequence
  Description of Artificial Sequence: Synthetic oligonucleotide
  Sense strand starting at position 2736 of SEQ ID NO: 1886238
gggccacacucagcuaauu

SEQ ID NO: 2396159 - RNA, 19 nt, Artificial Sequence
  Description of Artificial Sequence: Synthetic oligonucleotide
  Antisense strand to SEQ ID NO: 2396158
aauuagcugaguguggccc

SEQ ID NO: 2396160 - RNA, 19 nt, Artificial Sequence
  Description of Artificial Sequence: Synthetic oligonucleotide
  Sense strand starting at position 3011 of SEQ ID NO: 1886238
ggagcuagucucgacccaa

SEQ ID NO: 2396161 - RNA, 19 nt, Artificial Sequence
  Description of Artificial Sequence: Synthetic oligonucleotide
  Antisense strand to SEQ ID NO: 2396160
uugggucgagacuagcucc

SEQ ID NO: 2396162 - RNA, 19 nt, Artificial Sequence
  Description of Artificial Sequence: Synthetic oligonucleotide
  Sense strand starting at position 3120 of SEQ ID NO: 1886238
auggguguggugugaucuu

SEQ ID NO: 2396163 - RNA, 19 nt, Artificial Sequence
  Description of Artificial Sequence: Synthetic oligonucleotide
  Antisense strand to SEQ ID NO: 2396162
aagaucacaccacacccau

SEQ ID NO: 2396164 - RNA, 19 nt, Artificial Sequence
  Description of Artificial Sequence: Synthetic oligonucleotide
  Sense strand starting at position 3127 of SEQ ID NO: 1886238
uggugugaucuuugaaucu

SEQ ID NO: 2396165 - RNA, 19 nt, Artificial Sequence
  Description of Artificial Sequence: Synthetic oligonucleotide
  Antisense strand to SEQ ID NO: 2396164
agauucaaagaucacacca

SEQ ID NO: 2396166 - RNA, 19 nt, Artificial Sequence
  Description of Artificial Sequence: Synthetic oligonucleotide
  Sense strand starting at position 3369 of SEQ ID NO: 1886238
gcaucuuacuuggcucaga

SEQ ID NO: 2396167 - RNA, 19 nt, Artificial Sequence
  Description of Artificial Sequence: Synthetic oligonucleotide
  Antisense strand to SEQ ID NO: 2396166
ucugagccaaguaagaugc

SEQ ID NO: 2396168 - RNA, 19 nt, Artificial Sequence
  Description of Artificial Sequence: Synthetic oligonucleotide
  Sense strand starting at position 3485 of SEQ ID NO: 1886238
acccuauggucuggcucau

SEQ ID NO: 2396169 - RNA, 19 nt, Artificial Sequence
  Description of Artificial Sequence: Synthetic oligonucleotide
  Antisense strand to SEQ ID NO: 2396168
augagccagaccauagggu

SEQ ID NO: 2396170 - RNA, 19 nt, Artificial Sequence
  Description of Artificial Sequence: Synthetic oligonucleotide
  Sense strand starting at position 3528 of SEQ ID NO: 1886238
cucaccuaugccgaucaau

SEQ ID NO: 2396171 - RNA, 19 nt, Artificial Sequence
  Description of Artificial Sequence: Synthetic oligonucleotide
  Antisense strand to SEQ ID NO: 2396170
auugaucggcauaggugag

SEQ ID NO: 2396172 - RNA, 19 nt, Artificial Sequence
  Description of Artificial Sequence: Synthetic oligonucleotide
  Sense strand starting at position 3540 of SEQ ID NO: 1886238
gaucaaugccagggagucu

SEQ ID NO: 2396173 - RNA, 19 nt, Artificial Sequence
  Description of Artificial Sequence: Synthetic oligonucleotide
  Antisense strand to SEQ ID NO: 2396172
agacucccuggcauugauc

SEQ ID NO: 2396174 - RNA, 19 nt, Artificial Sequence
  Description of Artificial Sequence: Synthetic oligonucleotide
  Sense strand starting at position 3549 of SEQ ID NO: 1886238
cagggagucuucugggcaa

SEQ ID NO: 2396175 - RNA, 19 nt, Artificial Sequence
  Description of Artificial Sequence: Synthetic oligonucleotide
  Antisense strand to SEQ ID NO: 2396174
uugcccagaagacucccug

SEQ ID NO: 2396176 - RNA, 19 nt, Artificial Sequence
  Description of Artificial Sequence: Synthetic oligonucleotide
  Sense strand starting at position 138 of SEQ ID NO: 1886239
ccugguugugcucaccaca

SEQ ID NO: 2396177 - RNA, 19 nt, Artificial Sequence
  Description of Artificial Sequence: Synthetic oligonucleotide
  Antisense strand to SEQ ID NO: 2396176
uguggugagcacaaccagg

SEQ ID NO: 2396178 - RNA, 19 nt, Artificial Sequence
  Description of Artificial Sequence: Synthetic oligonucleotide
  Sense strand starting at position 266 of SEQ ID NO: 1886239
cucaccaucuggugagaua

SEQ ID NO: 2396179 - RNA, 19 nt, Artificial Sequence
  Description of Artificial Sequence: Synthetic oligonucleotide
  Antisense strand to SEQ ID NO: 2396178
uaucucaccagauggugag

SEQ ID NO: 2396180 - RNA, 19 nt, Artificial Sequence
  Description of Artificial Sequence: Synthetic oligonucleotide
  Sense strand starting at position 275 of SEQ ID NO: 1886239
uggugagauagcuggaaga

SEQ ID NO: 2396181 - RNA, 19 nt, Artificial Sequence
  Description of Artificial Sequence: Synthetic oligonucleotide
  Antisense strand to SEQ ID NO: 2396180
ucuuccagcuaucucacca

SEQ ID NO: 2396182 - RNA, 19 nt, Artificial Sequence
  Description of Artificial Sequence: Synthetic oligonucleotide
  Sense strand starting at position 285 of SEQ ID NO: 1886239
gcuggaagauggguccaaa

SEQ ID NO: 2396183 - RNA, 19 nt, Artificial Sequence
  Description of Artificial Sequence: Synthetic oligonucleotide
  Antisense strand to SEQ ID NO: 2396182
uuuggacccaucuuccagc

SEQ ID NO: 2396184 - RNA, 19 nt, Artificial Sequence
  Description of Artificial Sequence: Synthetic oligonucleotide
  Sense strand starting at position 1194 of SEQ ID NO: 1886239
gggccugacccuugaaucu

SEQ ID NO: 2396185 - RNA, 19 nt, Artificial Sequence
  Description of Artificial Sequence: Synthetic oligonucleotide
  Antisense strand to SEQ ID NO: 2396184
agauucaagggucaggccc

SEQ ID NO: 2396186 - RNA, 19 nt, Artificial Sequence
  Description of Artificial Sequence: Synthetic oligonucleotide
  Sense strand starting at position 1203 of SEQ ID NO: 1886239
ccuugaaucuuggccugaa

SEQ ID NO: 2396187 - RNA, 19 nt, Artificial Sequence
  Description of Artificial Sequence: Synthetic oligonucleotide
  Antisense strand to SEQ ID NO: 2396186
uucaggccaagauucaagg

SEQ ID NO: 2396188 - RNA, 19 nt, Artificial Sequence
  Description of Artificial Sequence: Synthetic oligonucleotide
  Sense strand starting at position 1204 of SEQ ID NO: 1886239
cuugaaucuuggccugaau

SEQ ID NO: 2396189 - RNA, 19 nt, Artificial Sequence
  Description of Artificial Sequence: Synthetic oligonucleotide
  Antisense strand to SEQ ID NO: 2396188
auucaggccaagauucaag

SEQ ID NO: 2396190 - RNA, 19 nt, Artificial Sequence
  Description of Artificial Sequence: Synthetic oligonucleotide
  Sense strand starting at position 1281 of SEQ ID NO: 1886239
gauggagaguuccugcuua

SEQ ID NO: 2396191 - RNA, 19 nt, Artificial Sequence
  Description of Artificial Sequence: Synthetic oligonucleotide
  Antisense strand to SEQ ID NO: 2396190
uaagcaggaacucuccauc

SEQ ID NO: 2396192 - RNA, 19 nt, Artificial Sequence
  Description of Artificial Sequence: Synthetic oligonucleotide
  Sense strand starting at position 1285 of SEQ ID NO: 1886239
gagaguuccugcuuaacac

SEQ ID NO: 2396193 - RNA, 19 nt, Artificial Sequence
  Description of Artificial Sequence: Synthetic oligonucleotide
  Antisense strand to SEQ ID NO: 2396192
guguuaagcaggaacucuc

SEQ ID NO: 2396194 - RNA, 19 nt, Artificial Sequence
  Description of Artificial Sequence: Synthetic oligonucleotide
  Sense strand starting at position 1332 of SEQ ID NO: 1886239
ccucauguugccugggagu

SEQ ID NO: 2396195 - RNA, 19 nt, Artificial Sequence
  Description of Artificial Sequence: Synthetic oligonucleotide
  Antisense strand to SEQ ID NO: 2396194
acucccaggcaacaugagg

SEQ ID NO: 2396196 - RNA, 19 nt, Artificial Sequence
  Description of Artificial Sequence: Synthetic oligonucleotide
  Sense strand starting at position 1370 of SEQ ID NO: 1886239
caccgagucucagcuagaa

SEQ ID NO: 2396197 - RNA, 19 nt, Artificial Sequence
  Description of Artificial Sequence: Synthetic oligonucleotide
  Antisense strand to SEQ ID NO: 2396196
uucuagcugagacucggug

SEQ ID NO: 2396198 - RNA, 19 nt, Artificial Sequence
  Description of Artificial Sequence: Synthetic oligonucleotide
  Sense strand starting at position 1472 of SEQ ID NO: 1886239
ggaaccaguuucuauggaa

SEQ ID NO: 2396199 - RNA, 19 nt, Artificial Sequence
  Description of Artificial Sequence: Synthetic oligonucleotide
  Antisense strand to SEQ ID NO: 2396198
uuccauagaaacugguucc

SEQ ID NO: 2396200 - RNA, 19 nt, Artificial Sequence
  Description of Artificial Sequence: Synthetic oligonucleotide
  Sense strand starting at position 1475 of SEQ ID NO: 1886239
accaguuucuauggaagac

SEQ ID NO: 2396201 - RNA, 19 nt, Artificial Sequence
  Description of Artificial Sequence: Synthetic oligonucleotide
  Antisense strand to SEQ ID NO: 2396200
gucuuccauagaaacuggu

SEQ ID NO: 2396202 - RNA, 19 nt, Artificial Sequence
  Description of Artificial Sequence: Synthetic oligonucleotide
  Sense strand starting at position 1531 of SEQ ID NO: 1886239
aggucagcucccugaggaa

SEQ ID NO: 2396203 - RNA, 19 nt, Artificial Sequence
  Description of Artificial Sequence: Synthetic oligonucleotide
  Antisense strand to SEQ ID NO: 2396202
uuccucagggagcugaccu

SEQ ID NO: 2396204 - RNA, 19 nt, Artificial Sequence
  Description of Artificial Sequence: Synthetic oligonucleotide
  Sense strand starting at position 1774 of SEQ ID NO: 1886239
uggguugccucacggacaa

SEQ ID NO: 2396205 - RNA, 19 nt, Artificial Sequence
  Description of Artificial Sequence: Synthetic oligonucleotide
  Antisense strand to SEQ ID NO: 2396204
uuguccgugaggcaaccca

SEQ ID NO: 2396206 - RNA, 19 nt, Artificial Sequence
  Description of Artificial Sequence: Synthetic oligonucleotide
  Sense strand starting at position 1884 of SEQ ID NO: 1886239
auccgagaauccucuucca

SEQ ID NO: 2396207 - RNA, 19 nt, Artificial Sequence
  Description of Artificial Sequence: Synthetic oligonucleotide
  Antisense strand to SEQ ID NO: 2396206
uggaagaggauucucggau

SEQ ID NO: 2396208 - RNA, 19 nt, Artificial Sequence
  Description of Artificial Sequence: Synthetic oligonucleotide
  Sense strand starting at position 2302 of SEQ ID NO: 1886239
gugaaacagugacgguaau

SEQ ID NO: 2396209 - RNA, 19 nt, Artificial Sequence
  Description of Artificial Sequence: Synthetic oligonucleotide
  Antisense strand to SEQ ID NO: 2396208
auuaccgucacuguuucac

SEQ ID NO: 2396210 - RNA, 19 nt, Artificial Sequence
  Description of Artificial Sequence: Synthetic oligonucleotide
  Sense strand starting at position 2471 of SEQ ID NO: 1886239
ggcaguccucaaggucaga

SEQ ID NO: 2396211 - RNA, 19 nt, Artificial Sequence
  Description of Artificial Sequence: Synthetic oligonucleotide
  Antisense strand to SEQ ID NO: 2396210
ucugaccuugaggacugcc

SEQ ID NO: 2396212 - RNA, 19 nt, Artificial Sequence
  Description of Artificial Sequence: Synthetic oligonucleotide
  Sense strand starting at position 2598 of SEQ ID NO: 1886239
gggucagauucccuaggaa

SEQ ID NO: 2396213 - RNA, 19 nt, Artificial Sequence
  Description of Artificial Sequence: Synthetic oligonucleotide
  Antisense strand to SEQ ID NO: 2396212
uuccuagggaaucugaccc

SEQ ID NO: 2396214 - RNA, 19 nt, Artificial Sequence
  Description of Artificial Sequence: Synthetic oligonucleotide
  Sense strand starting at position 2675 of SEQ ID NO: 1886239
gaggaaaucuuccuguccu

SEQ ID NO: 2396215 - RNA, 19 nt, Artificial Sequence
  Description of Artificial Sequence: Synthetic oligonucleotide
  Antisense strand to SEQ ID NO: 2396214
aggacaggaagauuuccuc

SEQ ID NO: 2396216 - RNA, 19 nt, Artificial Sequence
  Description of Artificial Sequence: Synthetic oligonucleotide
  Sense strand starting at position 2676 of SEQ ID NO: 1886239
aggaaaucuuccuguccug

SEQ ID NO: 2396217 - RNA, 19 nt, Artificial Sequence
  Description of Artificial Sequence: Synthetic oligonucleotide
  Antisense strand to SEQ ID NO: 2396216
caggacaggaagauuuccu

SEQ ID NO: 2396218 - RNA, 19 nt, Artificial Sequence
  Description of Artificial Sequence: Synthetic oligonucleotide
  Sense strand starting at position 2757 of SEQ ID NO: 1886239
cuuaccuaugcuggucaau

SEQ ID NO: 2396219 - RNA, 19 nt, Artificial Sequence
  Description of Artificial Sequence: Synthetic oligonucleotide
  Antisense strand to SEQ ID NO: 2396218
auugaccagcauagguaag

SEQ ID NO: 2396220 - RNA, 19 nt, Artificial Sequence
  Description of Artificial Sequence: Synthetic oligonucleotide
  Sense strand starting at position 3446 of SEQ ID NO: 1886239
gggaaacacucacguguca

SEQ ID NO: 2396221 - RNA, 19 nt, Artificial Sequence
  Description of Artificial Sequence: Synthetic oligonucleotide
  Antisense strand to SEQ ID NO: 2396220
ugacacgugaguguuuccc

SEQ ID NO: 2396222 - RNA, 19 nt, Artificial Sequence
  Description of Artificial Sequence: Synthetic oligonucleotide
  Sense strand starting at position 3483 of SEQ ID NO: 1886239
ggcccuuccugcuagggaa

SEQ ID NO: 2396223 - RNA, 19 nt, Artificial Sequence
  Description of Artificial Sequence: Synthetic oligonucleotide
  Antisense strand to SEQ ID NO: 2396222
uucccuagcaggaagggcc

SEQ ID NO: 2396224 - RNA, 19 nt, Artificial Sequence
  Description of Artificial Sequence: Synthetic oligonucleotide
  Sense strand starting at position 3763 of SEQ ID NO: 1886239
ccaagcaugcacugagaaa

SEQ ID NO: 2396225 - RNA, 19 nt, Artificial Sequence
  Description of Artificial Sequence: Synthetic oligonucleotide
  Antisense strand to SEQ ID NO: 2396224
uuucucagugcaugcuugg

SEQ ID NO: 2396226 - RNA, 19 nt, Artificial Sequence
  Description of Artificial Sequence: Synthetic oligonucleotide
  Sense strand starting at position 3866 of SEQ ID NO: 1886239
gggccacacucagcuaauu

SEQ ID NO: 2396227 - RNA, 19 nt, Artificial Sequence
  Description of Artificial Sequence: Synthetic oligonucleotide
  Antisense strand to SEQ ID NO: 2396226
aauuagcugaguguggccc

SEQ ID NO: 2396228 - RNA, 19 nt, Artificial Sequence
  Description of Artificial Sequence: Synthetic oligonucleotide
  Sense strand starting at position 412 of SEQ ID NO: 1886240
gggaaacacucacguguca

SEQ ID NO: 2396229 - RNA, 19 nt, Artificial Sequence
  Description of Artificial Sequence: Synthetic oligonucleotide
  Antisense strand to SEQ ID NO: 2396228
ugacacgugaguguuuccc

SEQ ID NO: 2396230 - RNA, 19 nt, Artificial Sequence
  Description of Artificial Sequence: Synthetic oligonucleotide
  Sense strand starting at position 449 of SEQ ID NO: 1886240
ggcccuuccugcuagggaa

SEQ ID NO: 2396231 - RNA, 19 nt, Artificial Sequence
  Description of Artificial Sequence: Synthetic oligonucleotide
  Antisense strand to SEQ ID NO: 2396230
uucccuagcaggaagggcc

SEQ ID NO: 2396232 - RNA, 19 nt, Artificial Sequence
  Description of Artificial Sequence: Synthetic oligonucleotide
  Sense strand starting at position 729 of SEQ ID NO: 1886240
ccaagcaugcacugagaaa

SEQ ID NO: 2396233 - RNA, 19 nt, Artificial Sequence
  Description of Artificial Sequence: Synthetic oligonucleotide
  Antisense strand to SEQ ID NO: 2396232
uuucucagugcaugcuugg

SEQ ID NO: 2396234 - RNA, 19 nt, Artificial Sequence
  Description of Artificial Sequence: Synthetic oligonucleotide
  Sense strand starting at position 832 of SEQ ID NO: 1886240
gggccacacucagcuaauu

SEQ ID NO: 2396235 - RNA, 19 nt, Artificial Sequence
  Description of Artificial Sequence: Synthetic oligonucleotide
  Antisense strand to SEQ ID NO: 2396234
aauuagcugaguguggccc

SEQ ID NO: 2396236 - RNA, 19 nt, Artificial Sequence
  Description of Artificial Sequence: Synthetic oligonucleotide
  Sense strand starting at position 1107 of SEQ ID NO: 1886240
ggagcuagucucgacccaa

SEQ ID NO: 2396237 - RNA, 19 nt, Artificial Sequence
  Description of Artificial Sequence: Synthetic oligonucleotide
  Antisense strand to SEQ ID NO: 2396236
uugggucgagacuagcucc

SEQ ID NO: 2396238 - RNA, 19 nt, Artificial Sequence
  Description of Artificial Sequence: Synthetic oligonucleotide
  Sense strand starting at position 1216 of SEQ ID NO: 1886240
auggguguggugugaucuu

SEQ ID NO: 2396239 - RNA, 19 nt, Artificial Sequence
  Description of Artificial Sequence: Synthetic oligonucleotide
  Antisense strand to SEQ ID NO: 2396238
aagaucacaccacacccau

SEQ ID NO: 2396240 - RNA, 19 nt, Artificial Sequence
  Description of Artificial Sequence: Synthetic oligonucleotide
  Sense strand starting at position 1223 of SEQ ID NO: 1886240
uggugugaucuuugaaucu

SEQ ID NO: 2396241 - RNA, 19 nt, Artificial Sequence
  Description of Artificial Sequence: Synthetic oligonucleotide
  Antisense strand to SEQ ID NO: 2396240
agauucaaagaucacacca

SEQ ID NO: 2396242 - RNA, 19 nt, Artificial Sequence
  Description of Artificial Sequence: Synthetic oligonucleotide
  Sense strand starting at position 1465 of SEQ ID NO: 1886240
gcaucuuacuuggcucaga

SEQ ID NO: 2396243 - RNA, 19 nt, Artificial Sequence
  Description of Artificial Sequence: Synthetic oligonucleotide
  Antisense strand to SEQ ID NO: 2396242
ucugagccaaguaagaugc

SEQ ID NO: 2396244 - RNA, 19 nt, Artificial Sequence
  Description of Artificial Sequence: Synthetic oligonucleotide
  Sense strand starting at position 1581 of SEQ ID NO: 1886240
acccuauggucuggcucau

SEQ ID NO: 2396245 - RNA, 19 nt, Artificial Sequence
  Description of Artificial Sequence: Synthetic oligonucleotide
  Antisense strand to SEQ ID NO: 2396244
augagccagaccauagggu

SEQ ID NO: 2396246 - RNA, 19 nt, Artificial Sequence
  Description of Artificial Sequence: Synthetic oligonucleotide
  Sense strand starting at position 1624 of SEQ ID NO: 1886240
cucaccuaugccgaucaau

SEQ ID NO: 2396247 - RNA, 19 nt, Artificial Sequence
  Description of Artificial Sequence: Synthetic oligonucleotide
  Antisense strand to SEQ ID NO: 2396246
auugaucggcauaggugag

SEQ ID NO: 2396248 - RNA, 19 nt, Artificial Sequence
  Description of Artificial Sequence: Synthetic oligonucleotide
  Sense strand starting at position 1636 of SEQ ID NO: 1886240
gaucaaugccagggagucu

SEQ ID NO: 2396249 - RNA, 19 nt, Artificial Sequence
  Description of Artificial Sequence: Synthetic oligonucleotide
  Antisense strand to SEQ ID NO: 2396248
agacucccuggcauugauc

SEQ ID NO: 2396250 - RNA, 19 nt, Artificial Sequence
  Description of Artificial Sequence: Synthetic oligonucleotide
  Sense strand starting at position 1645 of SEQ ID NO: 1886240
cagggagucuucugggcaa

SEQ ID NO: 2396251 - RNA, 19 nt, Artificial Sequence
  Description of Artificial Sequence: Synthetic oligonucleotide
  Antisense strand to SEQ ID NO: 2396250
uugcccagaagacucccug

SEQ ID NO: 2396252 - RNA, 19 nt, Artificial Sequence
  Description of Artificial Sequence: Synthetic oligonucleotide
  Sense strand starting at position 2225 of SEQ ID NO: 1886240
accucacuccuguauguga

SEQ ID NO: 2396253 - RNA, 19 nt, Artificial Sequence
  Description of Artificial Sequence: Synthetic oligonucleotide
  Antisense strand to SEQ ID NO: 2396252
ucacauacaggagugaggu

SEQ ID NO: 2396254 - RNA, 19 nt, Artificial Sequence
  Description of Artificial Sequence: Synthetic oligonucleotide
  Sense strand starting at position 2298 of SEQ ID NO: 1886240
aucguuugcaugcggaaca

SEQ ID NO: 2396255 - RNA, 19 nt, Artificial Sequence
  Description of Artificial Sequence: Synthetic oligonucleotide
  Antisense strand to SEQ ID NO: 2396254
uguuccgcaugcaaacgau

SEQ ID NO: 2396256 - RNA, 19 nt, Artificial Sequence
  Description of Artificial Sequence: Synthetic oligonucleotide
  Sense strand starting at position 2461 of SEQ ID NO: 1886240
ccaacucauucgcaggaaa

SEQ ID NO: 2396257 - RNA, 19 nt, Artificial Sequence
  Description of Artificial Sequence: Synthetic oligonucleotide
  Antisense strand to SEQ ID NO: 2396256
uuuccugcgaaugaguugg

SEQ ID NO: 2396258 - RNA, 19 nt, Artificial Sequence
  Description of Artificial Sequence: Synthetic oligonucleotide
  Sense strand starting at position 2532 of SEQ ID NO: 1886240
agccuaucucugugcauag

SEQ ID NO: 2396259 - RNA, 19 nt, Artificial Sequence
  Description of Artificial Sequence: Synthetic oligonucleotide
  Antisense strand to SEQ ID NO: 2396258
cuaugcacagagauaggcu

SEQ ID NO: 2396260 - RNA, 19 nt, Artificial Sequence
  Description of Artificial Sequence: Synthetic oligonucleotide
  Sense strand starting at position 2533 of SEQ ID NO: 1886240
gccuaucucugugcauagu

SEQ ID NO: 2396261 - RNA, 19 nt, Artificial Sequence
  Description of Artificial Sequence: Synthetic oligonucleotide
  Antisense strand to SEQ ID NO: 2396260
acuaugcacagagauaggc

SEQ ID NO: 2396262 - RNA, 19 nt, Artificial Sequence
  Description of Artificial Sequence: Synthetic oligonucleotide
  Sense strand starting at position 2825 of SEQ ID NO: 1886240
gcaaccauucccgacacuu

SEQ ID NO: 2396263 - RNA, 19 nt, Artificial Sequence
  Description of Artificial Sequence: Synthetic oligonucleotide
  Antisense strand to SEQ ID NO: 2396262
aagugucgggaaugguugc

SEQ ID NO: 2396264 - RNA, 19 nt, Artificial Sequence
  Description of Artificial Sequence: Synthetic oligonucleotide
  Sense strand starting at position 3018 of SEQ ID NO: 1886240
cucgaugaggcccauagaa

SEQ ID NO: 2396265 - RNA, 19 nt, Artificial Sequence
  Description of Artificial Sequence: Synthetic oligonucleotide
  Antisense strand to SEQ ID NO: 2396264
uucuaugggccucaucgag

SEQ ID NO: 2396266 - RNA, 19 nt, Artificial Sequence
  Description of Artificial Sequence: Synthetic oligonucleotide
  Sense strand starting at position 3028 of SEQ ID NO: 1886240
cccauagaauggcucauua

SEQ ID NO: 2396267 - RNA, 19 nt, Artificial Sequence
  Description of Artificial Sequence: Synthetic oligonucleotide
  Antisense strand to SEQ ID NO: 2396266
uaaugagccauucuauggg

SEQ ID NO: 2396268 - RNA, 19 nt, Artificial Sequence
  Description of Artificial Sequence: Synthetic oligonucleotide
  Sense strand starting at position 3082 of SEQ ID NO: 1886240
gggcgcaauccuuaaaucu

SEQ ID NO: 2396269 - RNA, 19 nt, Artificial Sequence
  Description of Artificial Sequence: Synthetic oligonucleotide
  Antisense strand to SEQ ID NO: 2396268
agauuuaaggauugcgccc

SEQ ID NO: 2396270 - RNA, 19 nt, Artificial Sequence
  Description of Artificial Sequence: Synthetic oligonucleotide
  Sense strand starting at position 3251 of SEQ ID NO: 1886240
ggagcuacuaugugugaga

SEQ ID NO: 2396271 - RNA, 19 nt, Artificial Sequence
  Description of Artificial Sequence: Synthetic oligonucleotide
  Antisense strand to SEQ ID NO: 2396270
ucucacacauaguagcucc

SEQ ID NO: 2396272 - RNA, 19 nt, Artificial Sequence
  Description of Artificial Sequence: Synthetic oligonucleotide
  Sense strand starting at position 3253 of SEQ ID NO: 1886240
agcuacuaugugugagacu

SEQ ID NO: 2396273 - RNA, 19 nt, Artificial Sequence
  Description of Artificial Sequence: Synthetic oligonucleotide
  Antisense strand to SEQ ID NO: 2396272
agucucacacauaguagcu

SEQ ID NO: 2396274 - RNA, 19 nt, Artificial Sequence
  Description of Artificial Sequence: Synthetic oligonucleotide
  Sense strand starting at position 3256 of SEQ ID NO: 1886240
uacuaugugugagacugaa

SEQ ID NO: 2396275 - RNA, 19 nt, Artificial Sequence
  Description of Artificial Sequence: Synthetic oligonucleotide
  Antisense strand to SEQ ID NO: 2396274
uucagucucacacauagua

SEQ ID NO: 2396276 - RNA, 19 nt, Artificial Sequence
  Description of Artificial Sequence: Synthetic oligonucleotide
  Sense strand starting at position 3401 of SEQ ID NO: 1886240
agguucgcucccugaggaa

SEQ ID NO: 2396277 - RNA, 19 nt, Artificial Sequence
  Description of Artificial Sequence: Synthetic oligonucleotide
  Antisense strand to SEQ ID NO: 2396276
uuccucagggagcgaaccu

SEQ ID NO: 2396278 - RNA, 19 nt, Artificial Sequence
  Description of Artificial Sequence: Synthetic oligonucleotide
  Sense strand starting at position 3496 of SEQ ID NO: 1886240
cucaccuaugcuggugaau

SEQ ID NO: 2396279 - RNA, 19 nt, Artificial Sequence
  Description of Artificial Sequence: Synthetic oligonucleotide
  Antisense strand to SEQ ID NO: 2396278
auucaccagcauaggugag

SEQ ID NO: 2396280 - RNA, 19 nt, Artificial Sequence
  Description of Artificial Sequence: Synthetic oligonucleotide
  Sense strand starting at position 3918 of SEQ ID NO: 1886240
cccagaugugcucaccuca

SEQ ID NO: 2396281 - RNA, 19 nt, Artificial Sequence
  Description of Artificial Sequence: Synthetic oligonucleotide
  Antisense strand to SEQ ID NO: 2396280
ugaggugagcacaucuggg

SEQ ID NO: 2396282 - RNA, 19 nt, Artificial Sequence
  Description of Artificial Sequence: Synthetic oligonucleotide
  Sense strand starting at position 3933 of SEQ ID NO: 1886240
cucagcucaguguaggaaa

SEQ ID NO: 2396283 - RNA, 19 nt, Artificial Sequence
  Description of Artificial Sequence: Synthetic oligonucleotide
  Antisense strand to SEQ ID NO: 2396282
uuuccuacacugagcugag

SEQ ID NO: 2396284 - RNA, 19 nt, Artificial Sequence
  Description of Artificial Sequence: Synthetic oligonucleotide
  Sense strand starting at position 64 of SEQ ID NO: 1886241
gggccugacccuugaaucu

SEQ ID NO: 2396285 - RNA, 19 nt, Artificial Sequence
  Description of Artificial Sequence: Synthetic oligonucleotide
  Antisense strand to SEQ ID NO: 2396284
agauucaagggucaggccc

SEQ ID NO: 2396286 - RNA, 19 nt, Artificial Sequence
  Description of Artificial Sequence: Synthetic oligonucleotide
  Sense strand starting at position 73 of SEQ ID NO: 1886241
ccuugaaucuuggccugaa

SEQ ID NO: 2396287 - RNA, 19 nt, Artificial Sequence
  Description of Artificial Sequence: Synthetic oligonucleotide
  Antisense strand to SEQ ID NO: 2396286
uucaggccaagauucaagg

SEQ ID NO: 2396288 - RNA, 19 nt, Artificial Sequence
  Description of Artificial Sequence: Synthetic oligonucleotide
  Sense strand starting at position 74 of SEQ ID NO: 1886241
cuugaaucuuggccugaau

SEQ ID NO: 2396289 - RNA, 19 nt, Artificial Sequence
  Description of Artificial Sequence: Synthetic oligonucleotide
  Antisense strand to SEQ ID NO: 2396288
auucaggccaagauucaag

SEQ ID NO: 2396290 - RNA, 19 nt, Artificial Sequence
  Description of Artificial Sequence: Synthetic oligonucleotide
  Sense strand starting at position 151 of SEQ ID NO: 1886241
gauggagaguuccugcuua

SEQ ID NO: 2396291 - RNA, 19 nt, Artificial Sequence
  Description of Artificial Sequence: Synthetic oligonucleotide
  Antisense strand to SEQ ID NO: 2396290
uaagcaggaacucuccauc

SEQ ID NO: 2396292 - RNA, 19 nt, Artificial Sequence
  Description of Artificial Sequence: Synthetic oligonucleotide
  Sense strand starting at position 155 of SEQ ID NO: 1886241
gagaguuccugcuuaacac

SEQ ID NO: 2396293 - RNA, 19 nt, Artificial Sequence
  Description of Artificial Sequence: Synthetic oligonucleotide
  Antisense strand to SEQ ID NO: 2396292
guguuaagcaggaacucuc

SEQ ID NO: 2396294 - RNA, 19 nt, Artificial Sequence
  Description of Artificial Sequence: Synthetic oligonucleotide
  Sense strand starting at position 202 of SEQ ID NO: 1886241
ccucauguugccugggagu

SEQ ID NO: 2396295 - RNA, 19 nt, Artificial Sequence
  Description of Artificial Sequence: Synthetic oligonucleotide
  Antisense strand to SEQ ID NO: 2396294
acucccaggcaacaugagg

SEQ ID NO: 2396296 - RNA, 19 nt, Artificial Sequence
  Description of Artificial Sequence: Synthetic oligonucleotide
  Sense strand starting at position 240 of SEQ ID NO: 1886241
caccgagucucagcuagaa

SEQ ID NO: 2396297 - RNA, 19 nt, Artificial Sequence
  Description of Artificial Sequence: Synthetic oligonucleotide
  Antisense strand to SEQ ID NO: 2396296
uucuagcugagacucggug

SEQ ID NO: 2396298 - RNA, 19 nt, Artificial Sequence
  Description of Artificial Sequence: Synthetic oligonucleotide
  Sense strand starting at position 342 of SEQ ID NO: 1886241
ggaaccaguuucuauggaa

SEQ ID NO: 2396299 - RNA, 19 nt, Artificial Sequence
  Description of Artificial Sequence: Synthetic oligonucleotide
  Antisense strand to SEQ ID NO: 2396298
uuccauagaaacugguucc

SEQ ID NO: 2396300 - RNA, 19 nt, Artificial Sequence
  Description of Artificial Sequence: Synthetic oligonucleotide
  Sense strand starting at position 345 of SEQ ID NO: 1886241
accaguuucuauggaagac

SEQ ID NO: 2396301 - RNA, 19 nt, Artificial Sequence
  Description of Artificial Sequence: Synthetic oligonucleotide
  Antisense strand to SEQ ID NO: 2396300
gucuuccauagaaacuggu

SEQ ID NO: 2396302 - RNA, 19 nt, Artificial Sequence
  Description of Artificial Sequence: Synthetic oligonucleotide
  Sense strand starting at position 401 of SEQ ID NO: 1886241
aggucagcucccugaggaa

SEQ ID NO: 2396303 - RNA, 19 nt, Artificial Sequence
  Description of Artificial Sequence: Synthetic oligonucleotide
  Antisense strand to SEQ ID NO: 2396302
uuccucagggagcugaccu

SEQ ID NO: 2396304 - RNA, 19 nt, Artificial Sequence
  Description of Artificial Sequence: Synthetic oligonucleotide
  Sense strand starting at position 644 of SEQ ID NO: 1886241
uggguugccucacggacaa

SEQ ID NO: 2396305 - RNA, 19 nt, Artificial Sequence
  Description of Artificial Sequence: Synthetic oligonucleotide
  Antisense strand to SEQ ID NO: 2396304
uuguccgugaggcaaccca

SEQ ID NO: 2396306 - RNA, 19 nt, Artificial Sequence
  Description of Artificial Sequence: Synthetic oligonucleotide
  Sense strand starting at position 754 of SEQ ID NO: 1886241
auccgagaauccucuucca

SEQ ID NO: 2396307 - RNA, 19 nt, Artificial Sequence
  Description of Artificial Sequence: Synthetic oligonucleotide
  Antisense strand to SEQ ID NO: 2396306
uggaagaggauucucggau

SEQ ID NO: 2396308 - RNA, 19 nt, Artificial Sequence
  Description of Artificial Sequence: Synthetic oligonucleotide
  Sense strand starting at position 1172 of SEQ ID NO: 1886241
gugaaacagugacgguaau

SEQ ID NO: 2396309 - RNA, 19 nt, Artificial Sequence
  Description of Artificial Sequence: Synthetic oligonucleotide
  Antisense strand to SEQ ID NO: 2396308
auuaccgucacuguuucac

SEQ ID NO: 2396310 - RNA, 19 nt, Artificial Sequence
  Description of Artificial Sequence: Synthetic oligonucleotide
  Sense strand starting at position 1341 of SEQ ID NO: 1886241
ggcaguccucaaggucaga

SEQ ID NO: 2396311 - RNA, 19 nt, Artificial Sequence
  Description of Artificial Sequence: Synthetic oligonucleotide
  Antisense strand to SEQ ID NO: 2396310
ucugaccuugaggacugcc

SEQ ID NO: 2396312 - RNA, 19 nt, Artificial Sequence
  Description of Artificial Sequence: Synthetic oligonucleotide
  Sense strand starting at position 1468 of SEQ ID NO: 1886241
gggucagauucccuaggaa

SEQ ID NO: 2396313 - RNA, 19 nt, Artificial Sequence
  Description of Artificial Sequence: Synthetic oligonucleotide
  Antisense strand to SEQ ID NO: 2396312
uuccuagggaaucugaccc

SEQ ID NO: 2396314 - RNA, 19 nt, Artificial Sequence
  Description of Artificial Sequence: Synthetic oligonucleotide
  Sense strand starting at position 1545 of SEQ ID NO: 1886241
gaggaaaucuuccuguccu

SEQ ID NO: 2396315 - RNA, 19 nt, Artificial Sequence
  Description of Artificial Sequence: Synthetic oligonucleotide
  Antisense strand to SEQ ID NO: 2396314
aggacaggaagauuuccuc

SEQ ID NO: 2396316 - RNA, 19 nt, Artificial Sequence
  Description of Artificial Sequence: Synthetic oligonucleotide
  Sense strand starting at position 1546 of SEQ ID NO: 1886241
aggaaaucuuccuguccug

SEQ ID NO: 2396317 - RNA, 19 nt, Artificial Sequence
  Description of Artificial Sequence: Synthetic oligonucleotide
  Antisense strand to SEQ ID NO: 2396316
caggacaggaagauuuccu

SEQ ID NO: 2396318 - RNA, 19 nt, Artificial Sequence
  Description of Artificial Sequence: Synthetic oligonucleotide
  Sense strand starting at position 1627 of SEQ ID NO: 1886241
cuuaccuaugcuggucaau

SEQ ID NO: 2396319 - RNA, 19 nt, Artificial Sequence
  Description of Artificial Sequence: Synthetic oligonucleotide
  Antisense strand to SEQ ID NO: 2396318
auugaccagcauagguaag

SEQ ID NO: 2396320 - RNA, 19 nt, Artificial Sequence
  Description of Artificial Sequence: Synthetic oligonucleotide
  Sense strand starting at position 2316 of SEQ ID NO: 1886241
gggaaacacucacguguca

SEQ ID NO: 2396321 - RNA, 19 nt, Artificial Sequence
  Description of Artificial Sequence: Synthetic oligonucleotide
  Antisense strand to SEQ ID NO: 2396320
ugacacgugaguguuuccc

SEQ ID NO: 2396322 - RNA, 19 nt, Artificial Sequence
  Description of Artificial Sequence: Synthetic oligonucleotide
  Sense strand starting at position 2353 of SEQ ID NO: 1886241
ggcccuuccugcuagggaa

SEQ ID NO: 2396323 - RNA, 19 nt, Artificial Sequence
  Description of Artificial Sequence: Synthetic oligonucleotide
  Antisense strand to SEQ ID NO: 2396322
uucccuagcaggaagggcc

SEQ ID NO: 2396324 - RNA, 19 nt, Artificial Sequence
  Description of Artificial Sequence: Synthetic oligonucleotide
  Sense strand starting at position 2633 of SEQ ID NO: 1886241
ccaagcaugcacugagaaa

SEQ ID NO: 2396325 - RNA, 19 nt, Artificial Sequence
  Description of Artificial Sequence: Synthetic oligonucleotide
  Antisense strand to SEQ ID NO: 2396324
uuucucagugcaugcuugg

SEQ ID NO: 2396326 - RNA, 19 nt, Artificial Sequence
  Description of Artificial Sequence: Synthetic oligonucleotide
  Sense strand starting at position 2736 of SEQ ID NO: 1886241
gggccacacucagcuaauu

SEQ ID NO: 2396327 - RNA, 19 nt, Artificial Sequence
  Description of Artificial Sequence: Synthetic oligonucleotide
  Antisense strand to SEQ ID NO: 2396326
aauuagcugaguguggccc

SEQ ID NO: 2396328 - RNA, 19 nt, Artificial Sequence
  Description of Artificial Sequence: Synthetic oligonucleotide
  Sense strand starting at position 3011 of SEQ ID NO: 1886241
ggagcuagucucgacccaa

SEQ ID NO: 2396329 - RNA, 19 nt, Artificial Sequence
  Description of Artificial Sequence: Synthetic oligonucleotide
  Antisense strand to SEQ ID NO: 2396328
uugggucgagacuagcucc

SEQ ID NO: 2396330 - RNA, 19 nt, Artificial Sequence
  Description of Artificial Sequence: Synthetic oligonucleotide
  Sense strand starting at position 3120 of SEQ ID NO: 1886241
auggguguggugugaucuu

SEQ ID NO: 2396331 - RNA, 19 nt, Artificial Sequence
  Description of Artificial Sequence: Synthetic oligonucleotide
  Antisense strand to SEQ ID NO: 2396330
aagaucacaccacacccau

SEQ ID NO: 2396332 - RNA, 19 nt, Artificial Sequence
  Description of Artificial Sequence: Synthetic oligonucleotide
  Sense strand starting at position 3127 of SEQ ID NO: 1886241
uggugugaucuuugaaucu

SEQ ID NO: 2396333 - RNA, 19 nt, Artificial Sequence
  Description of Artificial Sequence: Synthetic oligonucleotide
  Antisense strand to SEQ ID NO: 2396332
agauucaaagaucacacca

SEQ ID NO: 2396334 - RNA, 19 nt, Artificial Sequence
  Description of Artificial Sequence: Synthetic oligonucleotide
  Sense strand starting at position 3369 of SEQ ID NO: 1886241
gcaucuuacuuggcucaga

SEQ ID NO: 2396335 - RNA, 19 nt, Artificial Sequence
  Description of Artificial Sequence: Synthetic oligonucleotide
  Antisense strand to SEQ ID NO: 2396334
ucugagccaaguaagaugc

SEQ ID NO: 2396336 - RNA, 19 nt, Artificial Sequence
  Description of Artificial Sequence: Synthetic oligonucleotide
  Sense strand starting at position 3485 of SEQ ID NO: 1886241
acccuauggucuggcucau

SEQ ID NO: 2396337 - RNA, 19 nt, Artificial Sequence
  Description of Artificial Sequence: Synthetic oligonucleotide
  Antisense strand to SEQ ID NO: 2396336
augagccagaccauagggu

SEQ ID NO: 2396338 - RNA, 19 nt, Artificial Sequence
  Description of Artificial Sequence: Synthetic oligonucleotide
  Sense strand starting at position 3528 of SEQ ID NO: 1886241
cucaccuaugccgaucaau

SEQ ID NO: 2396339 - RNA, 19 nt, Artificial Sequence
  Description of Artificial Sequence: Synthetic oligonucleotide
  Antisense strand to SEQ ID NO: 2396338
auugaucggcauaggugag

SEQ ID NO: 2396340 - RNA, 19 nt, Artificial Sequence
  Description of Artificial Sequence: Synthetic oligonucleotide
  Sense strand starting at position 3540 of SEQ ID NO: 1886241
gaucaaugccagggagucu

SEQ ID NO: 2396341 - RNA, 19 nt, Artificial Sequence
  Description of Artificial Sequence: Synthetic oligonucleotide
  Antisense strand to SEQ ID NO: 2396340
agacucccuggcauugauc

SEQ ID NO: 2396342 - RNA, 19 nt, Artificial Sequence
  Description of Artificial Sequence: Synthetic oligonucleotide
  Sense strand starting at position 3549 of SEQ ID NO: 1886241
cagggagucuucugggcaa

SEQ ID NO: 2396343 - RNA, 19 nt, Artificial Sequence
  Description of Artificial Sequence: Synthetic oligonucleotide
  Antisense strand to SEQ ID NO: 2396342
uugcccagaagacucccug

SEQ ID NO: 2396344 - RNA, 19 nt, Artificial Sequence
  Description of Artificial Sequence: Synthetic oligonucleotide
  Sense strand starting at position 138 of SEQ ID NO: 1886242
ccugguugugcucaccaca

SEQ ID NO: 2396345 - RNA, 19 nt, Artificial Sequence
  Description of Artificial Sequence: Synthetic oligonucleotide
  Antisense strand to SEQ ID NO: 2396344
uguggugagcacaaccagg

SEQ ID NO: 2396346 - RNA, 19 nt, Artificial Sequence
  Description of Artificial Sequence: Synthetic oligonucleotide
  Sense strand starting at position 266 of SEQ ID NO: 1886242
cucaccaucuggugagaua

SEQ ID NO: 2396347 - RNA, 19 nt, Artificial Sequence
  Description of Artificial Sequence: Synthetic oligonucleotide
  Antisense strand to SEQ ID NO: 2396346
uaucucaccagauggugag

SEQ ID NO: 2396348 - RNA, 19 nt, Artificial Sequence
  Description of Artificial Sequence: Synthetic oligonucleotide
  Sense strand starting at position 275 of SEQ ID NO: 1886242
uggugagauagcuggaaga

SEQ ID NO: 2396349 - RNA, 19 nt, Artificial Sequence
  Description of Artificial Sequence: Synthetic oligonucleotide
  Antisense strand to SEQ ID NO: 2396348
ucuuccagcuaucucacca

SEQ ID NO: 2396350 - RNA, 19 nt, Artificial Sequence
  Description of Artificial Sequence: Synthetic oligonucleotide
  Sense strand starting at position 285 of SEQ ID NO: 1886242
gcuggaagauggguccaaa

SEQ ID NO: 2396351 - RNA, 19 nt, Artificial Sequence
  Description of Artificial Sequence: Synthetic oligonucleotide
  Antisense strand to SEQ ID NO: 2396350
uuuggacccaucuuccagc

SEQ ID NO: 2396352 - RNA, 19 nt, Artificial Sequence
  Description of Artificial Sequence: Synthetic oligonucleotide
  Sense strand starting at position 1194 of SEQ ID NO: 1886242
gggccugacccuugaaucu

SEQ ID NO: 2396353 - RNA, 19 nt, Artificial Sequence
  Description of Artificial Sequence: Synthetic oligonucleotide
  Antisense strand to SEQ ID NO: 2396352
agauucaagggucaggccc

SEQ ID NO: 2396354 - RNA, 19 nt, Artificial Sequence
  Description of Artificial Sequence: Synthetic oligonucleotide
  Sense strand starting at position 1203 of SEQ ID NO: 1886242
ccuugaaucuuggccugaa

SEQ ID NO: 2396355 - RNA, 19 nt, Artificial Sequence
  Description of Artificial Sequence: Synthetic oligonucleotide
  Antisense strand to SEQ ID NO: 2396354
uucaggccaagauucaagg

SEQ ID NO: 2396356 - RNA, 19 nt, Artificial Sequence
  Description of Artificial Sequence: Synthetic oligonucleotide
  Sense strand starting at position 1204 of SEQ ID NO: 1886242
cuugaaucuuggccugaau

SEQ ID NO: 2396357 - RNA, 19 nt, Artificial Sequence
  Description of Artificial Sequence: Synthetic oligonucleotide
  Antisense strand to SEQ ID NO: 2396356
auucaggccaagauucaag

SEQ ID NO: 2396358 - RNA, 19 nt, Artificial Sequence
  Description of Artificial Sequence: Synthetic oligonucleotide
  Sense strand starting at position 1281 of SEQ ID NO: 1886242
gauggagaguuccugcuua

SEQ ID NO: 2396359 - RNA, 19 nt, Artificial Sequence
  Description of Artificial Sequence: Synthetic oligonucleotide
  Antisense strand to SEQ ID NO: 2396358
uaagcaggaacucuccauc

SEQ ID NO: 2396360 - RNA, 19 nt, Artificial Sequence
  Description of Artificial Sequence: Synthetic oligonucleotide
  Sense strand starting at position 1285 of SEQ ID NO: 1886242
gagaguuccugcuuaacac

SEQ ID NO: 2396361 - RNA, 19 nt, Artificial Sequence
  Description of Artificial Sequence: Synthetic oligonucleotide
  Antisense strand to SEQ ID NO: 2396360
guguuaagcaggaacucuc

SEQ ID NO: 2396362 - RNA, 19 nt, Artificial Sequence
  Description of Artificial Sequence: Synthetic oligonucleotide
  Sense strand starting at position 1332 of SEQ ID NO: 1886242
ccucauguugccugggagu

SEQ ID NO: 2396363 - RNA, 19 nt, Artificial Sequence
  Description of Artificial Sequence: Synthetic oligonucleotide
  Antisense strand to SEQ ID NO: 2396362
acucccaggcaacaugagg

SEQ ID NO: 2396364 - RNA, 19 nt, Artificial Sequence
  Description of Artificial Sequence: Synthetic oligonucleotide
  Sense strand starting at position 1370 of SEQ ID NO: 1886242
caccgagucucagcuagaa

SEQ ID NO: 2396365 - RNA, 19 nt, Artificial Sequence
  Description of Artificial Sequence: Synthetic oligonucleotide
  Antisense strand to SEQ ID NO: 2396364
uucuagcugagacucggug

SEQ ID NO: 2396366 - RNA, 19 nt, Artificial Sequence
  Description of Artificial Sequence: Synthetic oligonucleotide
  Sense strand starting at position 1472 of SEQ ID NO: 1886242
ggaaccaguuucuauggaa

SEQ ID NO: 2396367 - RNA, 19 nt, Artificial Sequence
  Description of Artificial Sequence: Synthetic oligonucleotide
  Antisense strand to SEQ ID NO: 2396366
uuccauagaaacugguucc

SEQ ID NO: 2396368 - RNA, 19 nt, Artificial Sequence
  Description of Artificial Sequence: Synthetic oligonucleotide
  Sense strand starting at position 1475 of SEQ ID NO: 1886242
accaguuucuauggaagac

SEQ ID NO: 2396369 - RNA, 19 nt, Artificial Sequence
  Description of Artificial Sequence: Synthetic oligonucleotide
  Antisense strand to SEQ ID NO: 2396368
gucuuccauagaaacuggu

SEQ ID NO: 2396370 - RNA, 19 nt, Artificial Sequence
  Description of Artificial Sequence: Synthetic oligonucleotide
  Sense strand starting at position 1531 of SEQ ID NO: 1886242
aggucagcucccugaggaa

SEQ ID NO: 2396371 - RNA, 19 nt, Artificial Sequence
  Description of Artificial Sequence: Synthetic oligonucleotide
  Antisense strand to SEQ ID NO: 2396370
uuccucagggagcugaccu

SEQ ID NO: 2396372 - RNA, 19 nt, Artificial Sequence
  Description of Artificial Sequence: Synthetic oligonucleotide
  Sense strand starting at position 1774 of SEQ ID NO: 1886242
uggguugccucacggacaa

SEQ ID NO: 2396373 - RNA, 19 nt, Artificial Sequence
  Description of Artificial Sequence: Synthetic oligonucleotide
  Antisense strand to SEQ ID NO: 2396372
uuguccgugaggcaaccca

SEQ ID NO: 2396374 - RNA, 19 nt, Artificial Sequence
  Description of Artificial Sequence: Synthetic oligonucleotide
  Sense strand starting at position 1884 of SEQ ID NO: 1886242
auccgagaauccucuucca

SEQ ID NO: 2396375 - RNA, 19 nt, Artificial Sequence
  Description of Artificial Sequence: Synthetic oligonucleotide
  Antisense strand to SEQ ID NO: 2396374
uggaagaggauucucggau

SEQ ID NO: 2396376 - RNA, 19 nt, Artificial Sequence
  Description of Artificial Sequence: Synthetic oligonucleotide
  Sense strand starting at position 2302 of SEQ ID NO: 1886242
gugaaacagugacgguaau

SEQ ID NO: 2396377 - RNA, 19 nt, Artificial Sequence
  Description of Artificial Sequence: Synthetic oligonucleotide
  Antisense strand to SEQ ID NO: 2396376
auuaccgucacuguuucac

SEQ ID NO: 2396378 - RNA, 19 nt, Artificial Sequence
  Description of Artificial Sequence: Synthetic oligonucleotide
  Sense strand starting at position 2471 of SEQ ID NO: 1886242
ggcaguccucaaggucaga

SEQ ID NO: 2396379 - RNA, 19 nt, Artificial Sequence
  Description of Artificial Sequence: Synthetic oligonucleotide
  Antisense strand to SEQ ID NO: 2396378
ucugaccuugaggacugcc

SEQ ID NO: 2396380 - RNA, 19 nt, Artificial Sequence
  Description of Artificial Sequence: Synthetic oligonucleotide
  Sense strand starting at position 2598 of SEQ ID NO: 1886242
gggucagauucccuaggaa

SEQ ID NO: 2396381 - RNA, 19 nt, Artificial Sequence
  Description of Artificial Sequence: Synthetic oligonucleotide
  Antisense strand to SEQ ID NO: 2396380
uuccuagggaaucugaccc

SEQ ID NO: 2396382 - RNA, 19 nt, Artificial Sequence
  Description of Artificial Sequence: Synthetic oligonucleotide
  Sense strand starting at position 2675 of SEQ ID NO: 1886242
gaggaaaucuuccuguccu

SEQ ID NO: 2396383 - RNA, 19 nt, Artificial Sequence
  Description of Artificial Sequence: Synthetic oligonucleotide
  Antisense strand to SEQ ID NO: 2396382
aggacaggaagauuuccuc

SEQ ID NO: 2396384 - RNA, 19 nt, Artificial Sequence
  Description of Artificial Sequence: Synthetic oligonucleotide
  Sense strand starting at position 2676 of SEQ ID NO: 1886242
aggaaaucuuccuguccug

SEQ ID NO: 2396385 - RNA, 19 nt, Artificial Sequence
  Description of Artificial Sequence: Synthetic oligonucleotide
  Antisense strand to SEQ ID NO: 2396384
caggacaggaagauuuccu

SEQ ID NO: 2396386 - RNA, 19 nt, Artificial Sequence
  Description of Artificial Sequence: Synthetic oligonucleotide
  Sense strand starting at position 2757 of SEQ ID NO: 1886242
cuuaccuaugcuggucaau

SEQ ID NO: 2396387 - RNA, 19 nt, Artificial Sequence
  Description of Artificial Sequence: Synthetic oligonucleotide
  Antisense strand to SEQ ID NO: 2396386
auugaccagcauagguaag

SEQ ID NO: 2396388 - RNA, 19 nt, Artificial Sequence
  Description of Artificial Sequence: Synthetic oligonucleotide
  Sense strand starting at position 3446 of SEQ ID NO: 1886242
gggaaacacucacguguca

SEQ ID NO: 2396389 - RNA, 19 nt, Artificial Sequence
  Description of Artificial Sequence: Synthetic oligonucleotide
  Antisense strand to SEQ ID NO: 2396388
ugacacgugaguguuuccc

SEQ ID NO: 2396390 - RNA, 19 nt, Artificial Sequence
  Description of Artificial Sequence: Synthetic oligonucleotide
  Sense strand starting at position 3483 of SEQ ID NO: 1886242
ggcccuuccugcuagggaa

SEQ ID NO: 2396391 - RNA, 19 nt, Artificial Sequence
  Description of Artificial Sequence: Synthetic oligonucleotide
  Antisense strand to SEQ ID NO: 2396390
uucccuagcaggaagggcc

SEQ ID NO: 2396392 - RNA, 19 nt, Artificial Sequence
  Description of Artificial Sequence: Synthetic oligonucleotide
  Sense strand starting at position 3763 of SEQ ID NO: 1886242
ccaagcaugcacugagaaa

SEQ ID NO: 2396393 - RNA, 19 nt, Artificial Sequence
  Description of Artificial Sequence: Synthetic oligonucleotide
  Antisense strand to SEQ ID NO: 2396392
uuucucagugcaugcuugg

SEQ ID NO: 2396394 - RNA, 19 nt, Artificial Sequence
  Description of Artificial Sequence: Synthetic oligonucleotide
  Sense strand starting at position 3866 of SEQ ID NO: 1886242
gggccacacucagcuaauu

SEQ ID NO: 2396395 - RNA, 19 nt, Artificial Sequence
  Description of Artificial Sequence: Synthetic oligonucleotide
  Antisense strand to SEQ ID NO: 2396394
aauuagcugaguguggccc

SEQ ID NO: 2396396 - RNA, 19 nt, Artificial Sequence
  Description of Artificial Sequence: Synthetic oligonucleotide
  Sense strand starting at position 723 of SEQ ID NO: 1886243
aaggaccuacguugaauua

SEQ ID NO: 2396397 - RNA, 19 nt, Artificial Sequence
  Description of Artificial Sequence: Synthetic oligonucleotide
  Antisense strand to SEQ ID NO: 2396396
uaauucaacguagguccuu

SEQ ID NO: 2396398 - RNA, 19 nt, Artificial Sequence
  Description of Artificial Sequence: Synthetic oligonucleotide
  Sense strand starting at position 724 of SEQ ID NO: 1886243
aggaccuacguugaauuau

SEQ ID NO: 2396399 - RNA, 19 nt, Artificial Sequence
  Description of Artificial Sequence: Synthetic oligonucleotide
  Antisense strand to SEQ ID NO: 2396398
auaauucaacguagguccu

SEQ ID NO: 2396400 - RNA, 19 nt, Artificial Sequence
  Description of Artificial Sequence: Synthetic oligonucleotide
  Sense strand starting at position 993 of SEQ ID NO: 1886243
augugaaacagugauaguc

SEQ ID NO: 2396401 - RNA, 19 nt, Artificial Sequence
  Description of Artificial Sequence: Synthetic oligonucleotide
  Antisense strand to SEQ ID NO: 2396400
gacuaucacuguuucacau

SEQ ID NO: 2396402 - RNA, 19 nt, Artificial Sequence
  Description of Artificial Sequence: Synthetic oligonucleotide
  Sense strand starting at position 995 of SEQ ID NO: 1886243
gugaaacagugauagucau

SEQ ID NO: 2396403 - RNA, 19 nt, Artificial Sequence
  Description of Artificial Sequence: Synthetic oligonucleotide
  Antisense strand to SEQ ID NO: 2396402
augacuaucacuguuucac

SEQ ID NO: 2396404 - RNA, 19 nt, Artificial Sequence
  Description of Artificial Sequence: Synthetic oligonucleotide
  Sense strand starting at position 1001 of SEQ ID NO: 1886243
cagugauagucauggacgu

SEQ ID NO: 2396405 - RNA, 19 nt, Artificial Sequence
  Description of Artificial Sequence: Synthetic oligonucleotide
  Antisense strand to SEQ ID NO: 2396404
acguccaugacuaucacug

SEQ ID NO: 2396406 - RNA, 19 nt, Artificial Sequence
  Description of Artificial Sequence: Synthetic oligonucleotide
  Sense strand starting at position 1312 of SEQ ID NO: 1886243
ccaagcaugcacuggaaau

SEQ ID NO: 2396407 - RNA, 19 nt, Artificial Sequence
  Description of Artificial Sequence: Synthetic oligonucleotide
  Antisense strand to SEQ ID NO: 2396406
auuuccagugcaugcuugg

SEQ ID NO: 2396408 - RNA, 19 nt, Artificial Sequence
  Description of Artificial Sequence: Synthetic oligonucleotide
  Sense strand starting at position 1507 of SEQ ID NO: 1886243
ggugguucuccuggagaac

SEQ ID NO: 2396409 - RNA, 19 nt, Artificial Sequence
  Description of Artificial Sequence: Synthetic oligonucleotide
  Antisense strand to SEQ ID NO: 2396408
guucuccaggagaaccacc

SEQ ID NO: 2396410 - RNA, 19 nt, Artificial Sequence
  Description of Artificial Sequence: Synthetic oligonucleotide
  Sense strand starting at position 1627 of SEQ ID NO: 1886243
gcaggauccgcucaccuau

SEQ ID NO: 2396411 - RNA, 19 nt, Artificial Sequence
  Description of Artificial Sequence: Synthetic oligonucleotide
  Antisense strand to SEQ ID NO: 2396410
auaggugagcggauccugc

SEQ ID NO: 2396412 - RNA, 19 nt, Artificial Sequence
  Description of Artificial Sequence: Synthetic oligonucleotide
  Sense strand starting at position 2201 of SEQ ID NO: 1886243
gaagacauguguccaaaca

SEQ ID NO: 2396413 - RNA, 19 nt, Artificial Sequence
  Description of Artificial Sequence: Synthetic oligonucleotide
  Antisense strand to SEQ ID NO: 2396412
uguuuggacacaugucuuc

SEQ ID NO: 2396414 - RNA, 19 nt, Artificial Sequence
  Description of Artificial Sequence: Synthetic oligonucleotide
  Sense strand starting at position 2321 of SEQ ID NO: 1886243
gcaggagacgcuugguacu

SEQ ID NO: 2396415 - RNA, 19 nt, Artificial Sequence
  Description of Artificial Sequence: Synthetic oligonucleotide
  Antisense strand to SEQ ID NO: 2396414
aguaccaagcgucuccugc

SEQ ID NO: 2396416 - RNA, 19 nt, Artificial Sequence
  Description of Artificial Sequence: Synthetic oligonucleotide
  Sense strand starting at position 2630 of SEQ ID NO: 1886243
cagaguucucuccaagugu

SEQ ID NO: 2396417 - RNA, 19 nt, Artificial Sequence
  Description of Artificial Sequence: Synthetic oligonucleotide
  Antisense strand to SEQ ID NO: 2396416
acacuuggagagaacucug

SEQ ID NO: 2396418 - RNA, 19 nt, Artificial Sequence
  Description of Artificial Sequence: Synthetic oligonucleotide
  Sense strand starting at position 2634 of SEQ ID NO: 1886243
guucucuccaagugugcau

SEQ ID NO: 2396419 - RNA, 19 nt, Artificial Sequence
  Description of Artificial Sequence: Synthetic oligonucleotide
  Antisense strand to SEQ ID NO: 2396418
augcacacuuggagagaac

SEQ ID NO: 2396420 - RNA, 19 nt, Artificial Sequence
  Description of Artificial Sequence: Synthetic oligonucleotide
  Sense strand starting at position 2641 of SEQ ID NO: 1886243
ccaagugugcaugggaaau

SEQ ID NO: 2396421 - RNA, 19 nt, Artificial Sequence
  Description of Artificial Sequence: Synthetic oligonucleotide
  Antisense strand to SEQ ID NO: 2396420
auuucccaugcacacuugg

SEQ ID NO: 2396422 - RNA, 19 nt, Artificial Sequence
  Description of Artificial Sequence: Synthetic oligonucleotide
  Sense strand starting at position 2813 of SEQ ID NO: 1886243
ggugaguccguggaucaga

SEQ ID NO: 2396423 - RNA, 19 nt, Artificial Sequence
  Description of Artificial Sequence: Synthetic oligonucleotide
  Antisense strand to SEQ ID NO: 2396422
ucugauccacggacucacc

SEQ ID NO: 2396424 - RNA, 19 nt, Artificial Sequence
  Description of Artificial Sequence: Synthetic oligonucleotide
  Sense strand starting at position 2842 of SEQ ID NO: 1886243
gaggcaaauucccuggaca

SEQ ID NO: 2396425 - RNA, 19 nt, Artificial Sequence
  Description of Artificial Sequence: Synthetic oligonucleotide
  Antisense strand to SEQ ID NO: 2396424
uguccagggaauuugccuc

SEQ ID NO: 2396426 - RNA, 19 nt, Artificial Sequence
  Description of Artificial Sequence: Synthetic oligonucleotide
  Sense strand starting at position 2876 of SEQ ID NO: 1886243
ggccuucccagcuaaggau

SEQ ID NO: 2396427 - RNA, 19 nt, Artificial Sequence
  Description of Artificial Sequence: Synthetic oligonucleotide
  Antisense strand to SEQ ID NO: 2396426
auccuuagcugggaaggcc

SEQ ID NO: 2396428 - RNA, 19 nt, Artificial Sequence
  Description of Artificial Sequence: Synthetic oligonucleotide
  Sense strand starting at position 2907 of SEQ ID NO: 1886243
gcuaguugcccacagggaa

SEQ ID NO: 2396429 - RNA, 19 nt, Artificial Sequence
  Description of Artificial Sequence: Synthetic oligonucleotide
  Antisense strand to SEQ ID NO: 2396428
uucccugugggcaacuagc

SEQ ID NO: 2396430 - RNA, 19 nt, Artificial Sequence
  Description of Artificial Sequence: Synthetic oligonucleotide
  Sense strand starting at position 3354 of SEQ ID NO: 1886243
acugcagggcuuuagagaa

SEQ ID NO: 2396431 - RNA, 19 nt, Artificial Sequence
  Description of Artificial Sequence: Synthetic oligonucleotide
  Antisense strand to SEQ ID NO: 2396430
uucucuaaagcccugcagu

SEQ ID NO: 2396432 - RNA, 19 nt, Artificial Sequence
  Description of Artificial Sequence: Synthetic oligonucleotide
  Sense strand starting at position 3372 of SEQ ID NO: 1886243
agauauccuccuuggguca

SEQ ID NO: 2396433 - RNA, 19 nt, Artificial Sequence
  Description of Artificial Sequence: Synthetic oligonucleotide
  Antisense strand to SEQ ID NO: 2396432
ugacccaaggaggauaucu

SEQ ID NO: 2396434 - RNA, 19 nt, Artificial Sequence
  Description of Artificial Sequence: Synthetic oligonucleotide
  Sense strand starting at position 3385 of SEQ ID NO: 1886243
gggucagacucccaaggaa

SEQ ID NO: 2396435 - RNA, 19 nt, Artificial Sequence
  Description of Artificial Sequence: Synthetic oligonucleotide
  Antisense strand to SEQ ID NO: 2396434
uuccuugggagucugaccc

SEQ ID NO: 2396436 - RNA, 19 nt, Artificial Sequence
  Description of Artificial Sequence: Synthetic oligonucleotide
  Sense strand starting at position 3702 of SEQ ID NO: 1886243
guugcucagagauaggcuu

SEQ ID NO: 2396437 - RNA, 19 nt, Artificial Sequence
  Description of Artificial Sequence: Synthetic oligonucleotide
  Antisense strand to SEQ ID NO: 2396436
aagccuaucucugagcaac

SEQ ID NO: 2396438 - RNA, 19 nt, Artificial Sequence
  Description of Artificial Sequence: Synthetic oligonucleotide
  Sense strand starting at position 3752 of SEQ ID NO: 1886243
aggucugcagcccgaaaua

SEQ ID NO: 2396439 - RNA, 19 nt, Artificial Sequence
  Description of Artificial Sequence: Synthetic oligonucleotide
  Antisense strand to SEQ ID NO: 2396438
uauuucgggcugcagaccu

SEQ ID NO: 2396440 - RNA, 19 nt, Artificial Sequence
  Description of Artificial Sequence: Synthetic oligonucleotide
  Sense strand starting at position 343 of SEQ ID NO: 1886244
gcaagucuuccuccgagcu

SEQ ID NO: 2396441 - RNA, 19 nt, Artificial Sequence
  Description of Artificial Sequence: Synthetic oligonucleotide
  Antisense strand to SEQ ID NO: 2396440
agcucggaggaagacuugc

SEQ ID NO: 2396442 - RNA, 19 nt, Artificial Sequence
  Description of Artificial Sequence: Synthetic oligonucleotide
  Sense strand starting at position 345 of SEQ ID NO: 1886244
aagucuuccuccgagcuca

SEQ ID NO: 2396443 - RNA, 19 nt, Artificial Sequence
  Description of Artificial Sequence: Synthetic oligonucleotide
  Antisense strand to SEQ ID NO: 2396442
ugagcucggaggaagacuu

SEQ ID NO: 2396444 - RNA, 19 nt, Artificial Sequence
  Description of Artificial Sequence: Synthetic oligonucleotide
  Sense strand starting at position 377 of SEQ ID NO: 1886244
gaggacacauguccaagua

SEQ ID NO: 2396445 - RNA, 19 nt, Artificial Sequence
  Description of Artificial Sequence: Synthetic oligonucleotide
  Antisense strand to SEQ ID NO: 2396444
uacuuggacauguguccuc

SEQ ID NO: 2396446 - RNA, 19 nt, Artificial Sequence
  Description of Artificial Sequence: Synthetic oligonucleotide
  Sense strand starting at position 390 of SEQ ID NO: 1886244
caaguaaggccucaugcuu

SEQ ID NO: 2396447 - RNA, 19 nt, Artificial Sequence
  Description of Artificial Sequence: Synthetic oligonucleotide
  Antisense strand to SEQ ID NO: 2396446
aagcaugaggccuuacuug

SEQ ID NO: 2396448 - RNA, 19 nt, Artificial Sequence
  Description of Artificial Sequence: Synthetic oligonucleotide
  Sense strand starting at position 430 of SEQ ID NO: 1886244
gggauauccaugugauagg

SEQ ID NO: 2396449 - RNA, 19 nt, Artificial Sequence
  Description of Artificial Sequence: Synthetic oligonucleotide
  Antisense strand to SEQ ID NO: 2396448
ccuaucacauggauauccc

SEQ ID NO: 2396450 - RNA, 19 nt, Artificial Sequence
  Description of Artificial Sequence: Synthetic oligonucleotide
  Sense strand starting at position 431 of SEQ ID NO: 1886244
ggauauccaugugauagga

SEQ ID NO: 2396451 - RNA, 19 nt, Artificial Sequence
  Description of Artificial Sequence: Synthetic oligonucleotide
  Antisense strand to SEQ ID NO: 2396450
uccuaucacauggauaucc

SEQ ID NO: 2396452 - RNA, 19 nt, Artificial Sequence
  Description of Artificial Sequence: Synthetic oligonucleotide
  Sense strand starting at position 464 of SEQ ID NO: 1886244
ugaugugucacggagacaa

SEQ ID NO: 2396453 - RNA, 19 nt, Artificial Sequence
  Description of Artificial Sequence: Synthetic oligonucleotide
  Antisense strand to SEQ ID NO: 2396452
uugucuccgugacacauca

SEQ ID NO: 2396454 - RNA, 19 nt, Artificial Sequence
  Description of Artificial Sequence: Synthetic oligonucleotide
  Sense strand starting at position 536 of SEQ ID NO: 1886244
gugggucacuggucucaca

SEQ ID NO: 2396455 - RNA, 19 nt, Artificial Sequence
  Description of Artificial Sequence: Synthetic oligonucleotide
  Antisense strand to SEQ ID NO: 2396454
ugugagaccagugacccac

SEQ ID NO: 2396456 - RNA, 19 nt, Artificial Sequence
  Description of Artificial Sequence: Synthetic oligonucleotide
  Sense strand starting at position 539 of SEQ ID NO: 1886244
ggucacuggucucacacaa

SEQ ID NO: 2396457 - RNA, 19 nt, Artificial Sequence
  Description of Artificial Sequence: Synthetic oligonucleotide
  Antisense strand to SEQ ID NO: 2396456
uugugugagaccagugacc

SEQ ID NO: 2396458 - RNA, 19 nt, Artificial Sequence
  Description of Artificial Sequence: Synthetic oligonucleotide
  Sense strand starting at position 796 of SEQ ID NO: 1886244
cuauguacuuucuuugaua

SEQ ID NO: 2396459 - RNA, 19 nt, Artificial Sequence
  Description of Artificial Sequence: Synthetic oligonucleotide
  Antisense strand to SEQ ID NO: 2396458
uaucaaagaaaguacauag

SEQ ID NO: 2396460 - RNA, 19 nt, Artificial Sequence
  Description of Artificial Sequence: Synthetic oligonucleotide
  Sense strand starting at position 798 of SEQ ID NO: 1886244
auguacuuucuuugauaca

SEQ ID NO: 2396461 - RNA, 19 nt, Artificial Sequence
  Description of Artificial Sequence: Synthetic oligonucleotide
  Antisense strand to SEQ ID NO: 2396460
uguaucaaagaaaguacau

SEQ ID NO: 2396462 - RNA, 19 nt, Artificial Sequence
  Description of Artificial Sequence: Synthetic oligonucleotide
  Sense strand starting at position 799 of SEQ ID NO: 1886244
uguacuuucuuugauacau

SEQ ID NO: 2396463 - RNA, 19 nt, Artificial Sequence
  Description of Artificial Sequence: Synthetic oligonucleotide
  Antisense strand to SEQ ID NO: 2396462
auguaucaaagaaaguaca

SEQ ID NO: 2396464 - RNA, 19 nt, Artificial Sequence
  Description of Artificial Sequence: Synthetic oligonucleotide
  Sense strand starting at position 931 of SEQ ID NO: 1886244
gugaccucaugucucagaa

SEQ ID NO: 2396465 - RNA, 19 nt, Artificial Sequence
  Description of Artificial Sequence: Synthetic oligonucleotide
  Antisense strand to SEQ ID NO: 2396464
uucugagacaugaggucac

SEQ ID NO: 2396466 - RNA, 19 nt, Artificial Sequence
  Description of Artificial Sequence: Synthetic oligonucleotide
  Sense strand starting at position 971 of SEQ ID NO: 1886244
caggacagguugcucaaua

SEQ ID NO: 2396467 - RNA, 19 nt, Artificial Sequence
  Description of Artificial Sequence: Synthetic oligonucleotide
  Antisense strand to SEQ ID NO: 2396466
uauugagcaaccuguccug

SEQ ID NO: 2396468 - RNA, 19 nt, Artificial Sequence
  Description of Artificial Sequence: Synthetic oligonucleotide
  Sense strand starting at position 1237 of SEQ ID NO: 1886244
ggccauggguguccuugaa

SEQ ID NO: 2396469 - RNA, 19 nt, Artificial Sequence
  Description of Artificial Sequence: Synthetic oligonucleotide
  Antisense strand to SEQ ID NO: 2396468
uucaaggacacccauggcc

SEQ ID NO: 2396470 - RNA, 19 nt, Artificial Sequence
  Description of Artificial Sequence: Synthetic oligonucleotide
  Sense strand starting at position 1241 of SEQ ID NO: 1886244
auggguguccuugaaacuc

SEQ ID NO: 2396471 - RNA, 19 nt, Artificial Sequence
  Description of Artificial Sequence: Synthetic oligonucleotide
  Antisense strand to SEQ ID NO: 2396470
gaguuucaaggacacccau

SEQ ID NO: 2396472 - RNA, 19 nt, Artificial Sequence
  Description of Artificial Sequence: Synthetic oligonucleotide
  Sense strand starting at position 1400 of SEQ ID NO: 1886244
ccugcuuggugcugaauga

SEQ ID NO: 2396473 - RNA, 19 nt, Artificial Sequence
  Description of Artificial Sequence: Synthetic oligonucleotide
  Antisense strand to SEQ ID NO: 2396472
ucauucagcaccaagcagg

SEQ ID NO: 2396474 - RNA, 19 nt, Artificial Sequence
  Description of Artificial Sequence: Synthetic oligonucleotide
  Sense strand starting at position 1401 of SEQ ID NO: 1886244
cugcuuggugcugaaugaa

SEQ ID NO: 2396475 - RNA, 19 nt, Artificial Sequence
  Description of Artificial Sequence: Synthetic oligonucleotide
  Antisense strand to SEQ ID NO: 2396474
uucauucagcaccaagcag

SEQ ID NO: 2396476 - RNA, 19 nt, Artificial Sequence
  Description of Artificial Sequence: Synthetic oligonucleotide
  Sense strand starting at position 1478 of SEQ ID NO: 1886244
ggguccgauucccaaggaa

SEQ ID NO: 2396477 - RNA, 19 nt, Artificial Sequence
  Description of Artificial Sequence: Synthetic oligonucleotide
  Antisense strand to SEQ ID NO: 2396476
uuccuugggaaucggaccc

SEQ ID NO: 2396478 - RNA, 19 nt, Artificial Sequence
  Description of Artificial Sequence: Synthetic oligonucleotide
  Sense strand starting at position 1499 of SEQ ID NO: 1886244
ggcccuucuggauaacuca

SEQ ID NO: 2396479 - RNA, 19 nt, Artificial Sequence
  Description of Artificial Sequence: Synthetic oligonucleotide
  Antisense strand to SEQ ID NO: 2396478
ugaguuauccagaagggcc

SEQ ID NO: 2396480 - RNA, 19 nt, Artificial Sequence
  Description of Artificial Sequence: Synthetic oligonucleotide
  Sense strand starting at position 1835 of SEQ ID NO: 1886244
ccucgaguucucuagucca

SEQ ID NO: 2396481 - RNA, 19 nt, Artificial Sequence
  Description of Artificial Sequence: Synthetic oligonucleotide
  Antisense strand to SEQ ID NO: 2396480
uggacuagagaacucgagg

SEQ ID NO: 2396482 - RNA, 19 nt, Artificial Sequence
  Description of Artificial Sequence: Synthetic oligonucleotide
  Sense strand starting at position 2043 of SEQ ID NO: 1886244
ccugguugugcucaccaca

SEQ ID NO: 2396483 - RNA, 19 nt, Artificial Sequence
  Description of Artificial Sequence: Synthetic oligonucleotide
  Antisense strand to SEQ ID NO: 2396482
uguggugagcacaaccagg

SEQ ID NO: 2396484 - RNA, 19 nt, Artificial Sequence
  Description of Artificial Sequence: Synthetic oligonucleotide
  Sense strand starting at position 2171 of SEQ ID NO: 1886244
cucaccaucuggugagaua

SEQ ID NO: 2396485 - RNA, 19 nt, Artificial Sequence
  Description of Artificial Sequence: Synthetic oligonucleotide
  Antisense strand to SEQ ID NO: 2396484
uaucucaccagauggugag

SEQ ID NO: 2396486 - RNA, 19 nt, Artificial Sequence
  Description of Artificial Sequence: Synthetic oligonucleotide
  Sense strand starting at position 2180 of SEQ ID NO: 1886244
uggugagauagcuggaaga

SEQ ID NO: 2396487 - RNA, 19 nt, Artificial Sequence
  Description of Artificial Sequence: Synthetic oligonucleotide
  Antisense strand to SEQ ID NO: 2396486
ucuuccagcuaucucacca

SEQ ID NO: 2396488 - RNA, 19 nt, Artificial Sequence
  Description of Artificial Sequence: Synthetic oligonucleotide
  Sense strand starting at position 2190 of SEQ ID NO: 1886244
gcuggaagauggguccaaa

SEQ ID NO: 2396489 - RNA, 19 nt, Artificial Sequence
  Description of Artificial Sequence: Synthetic oligonucleotide
  Antisense strand to SEQ ID NO: 2396488
uuuggacccaucuuccagc

SEQ ID NO: 2396490 - RNA, 19 nt, Artificial Sequence
  Description of Artificial Sequence: Synthetic oligonucleotide
  Sense strand starting at position 3099 of SEQ ID NO: 1886244
gggccugacccuugaaucu

SEQ ID NO: 2396491 - RNA, 19 nt, Artificial Sequence
  Description of Artificial Sequence: Synthetic oligonucleotide
  Antisense strand to SEQ ID NO: 2396490
agauucaagggucaggccc

SEQ ID NO: 2396492 - RNA, 19 nt, Artificial Sequence
  Description of Artificial Sequence: Synthetic oligonucleotide
  Sense strand starting at position 3108 of SEQ ID NO: 1886244
ccuugaaucuuggccugaa

SEQ ID NO: 2396493 - RNA, 19 nt, Artificial Sequence
  Description of Artificial Sequence: Synthetic oligonucleotide
  Antisense strand to SEQ ID NO: 2396492
uucaggccaagauucaagg

SEQ ID NO: 2396494 - RNA, 19 nt, Artificial Sequence
  Description of Artificial Sequence: Synthetic oligonucleotide
  Sense strand starting at position 3109 of SEQ ID NO: 1886244
cuugaaucuuggccugaau

SEQ ID NO: 2396495 - RNA, 19 nt, Artificial Sequence
  Description of Artificial Sequence: Synthetic oligonucleotide
  Antisense strand to SEQ ID NO: 2396494
auucaggccaagauucaag

SEQ ID NO: 2396496 - RNA, 19 nt, Artificial Sequence
  Description of Artificial Sequence: Synthetic oligonucleotide
  Sense strand starting at position 3186 of SEQ ID NO: 1886244
gauggagaguuccugcuua

SEQ ID NO: 2396497 - RNA, 19 nt, Artificial Sequence
  Description of Artificial Sequence: Synthetic oligonucleotide
  Antisense strand to SEQ ID NO: 2396496
uaagcaggaacucuccauc

SEQ ID NO: 2396498 - RNA, 19 nt, Artificial Sequence
  Description of Artificial Sequence: Synthetic oligonucleotide
  Sense strand starting at position 3190 of SEQ ID NO: 1886244
gagaguuccugcuuaacac

SEQ ID NO: 2396499 - RNA, 19 nt, Artificial Sequence
  Description of Artificial Sequence: Synthetic oligonucleotide
  Antisense strand to SEQ ID NO: 2396498
guguuaagcaggaacucuc

SEQ ID NO: 2396500 - RNA, 19 nt, Artificial Sequence
  Description of Artificial Sequence: Synthetic oligonucleotide
  Sense strand starting at position 3237 of SEQ ID NO: 1886244
ccucauguugccugggagu

SEQ ID NO: 2396501 - RNA, 19 nt, Artificial Sequence
  Description of Artificial Sequence: Synthetic oligonucleotide
  Antisense strand to SEQ ID NO: 2396500
acucccaggcaacaugagg

SEQ ID NO: 2396502 - RNA, 19 nt, Artificial Sequence
  Description of Artificial Sequence: Synthetic oligonucleotide
  Sense strand starting at position 3275 of SEQ ID NO: 1886244
caccgagucucagcuagaa

SEQ ID NO: 2396503 - RNA, 19 nt, Artificial Sequence
  Description of Artificial Sequence: Synthetic oligonucleotide
  Antisense strand to SEQ ID NO: 2396502
uucuagcugagacucggug

SEQ ID NO: 2396504 - RNA, 19 nt, Artificial Sequence
  Description of Artificial Sequence: Synthetic oligonucleotide
  Sense strand starting at position 3377 of SEQ ID NO: 1886244
ggaaccaguuucuauggaa

SEQ ID NO: 2396505 - RNA, 19 nt, Artificial Sequence
  Description of Artificial Sequence: Synthetic oligonucleotide
  Antisense strand to SEQ ID NO: 2396504
uuccauagaaacugguucc

SEQ ID NO: 2396506 - RNA, 19 nt, Artificial Sequence
  Description of Artificial Sequence: Synthetic oligonucleotide
  Sense strand starting at position 3380 of SEQ ID NO: 1886244
accaguuucuauggaagac

SEQ ID NO: 2396507 - RNA, 19 nt, Artificial Sequence
  Description of Artificial Sequence: Synthetic oligonucleotide
  Antisense strand to SEQ ID NO: 2396506
gucuuccauagaaacuggu

SEQ ID NO: 2396508 - RNA, 19 nt, Artificial Sequence
  Description of Artificial Sequence: Synthetic oligonucleotide
  Sense strand starting at position 3436 of SEQ ID NO: 1886244
aggucagcucccugaggaa

SEQ ID NO: 2396509 - RNA, 19 nt, Artificial Sequence
  Description of Artificial Sequence: Synthetic oligonucleotide
  Antisense strand to SEQ ID NO: 2396508
uuccucagggagcugaccu

SEQ ID NO: 2396510 - RNA, 19 nt, Artificial Sequence
  Description of Artificial Sequence: Synthetic oligonucleotide
  Sense strand starting at position 3679 of SEQ ID NO: 1886244
uggguugccucacggacaa

SEQ ID NO: 2396511 - RNA, 19 nt, Artificial Sequence
  Description of Artificial Sequence: Synthetic oligonucleotide
  Antisense strand to SEQ ID NO: 2396510
uuguccgugaggcaaccca

SEQ ID NO: 2396512 - RNA, 19 nt, Artificial Sequence
  Description of Artificial Sequence: Synthetic oligonucleotide
  Sense strand starting at position 3789 of SEQ ID NO: 1886244
auccgagaauccucuucca

SEQ ID NO: 2396513 - RNA, 19 nt, Artificial Sequence
  Description of Artificial Sequence: Synthetic oligonucleotide
  Antisense strand to SEQ ID NO: 2396512
uggaagaggauucucggau

SEQ ID NO: 2396514 - RNA, 19 nt, Artificial Sequence
  Description of Artificial Sequence: Synthetic oligonucleotide
  Sense strand starting at position 343 of SEQ ID NO: 1886245
gcaagucuuccuccgagcu

SEQ ID NO: 2396515 - RNA, 19 nt, Artificial Sequence
  Description of Artificial Sequence: Synthetic oligonucleotide
  Antisense strand to SEQ ID NO: 2396514
agcucggaggaagacuugc

SEQ ID NO: 2396516 - RNA, 19 nt, Artificial Sequence
  Description of Artificial Sequence: Synthetic oligonucleotide
  Sense strand starting at position 345 of SEQ ID NO: 1886245
aagucuuccuccgagcuca

SEQ ID NO: 2396517 - RNA, 19 nt, Artificial Sequence
  Description of Artificial Sequence: Synthetic oligonucleotide
  Antisense strand to SEQ ID NO: 2396516
ugagcucggaggaagacuu

SEQ ID NO: 2396518 - RNA, 19 nt, Artificial Sequence
  Description of Artificial Sequence: Synthetic oligonucleotide
  Sense strand starting at position 377 of SEQ ID NO: 1886245
gaggacacauguccaagua

SEQ ID NO: 2396519 - RNA, 19 nt, Artificial Sequence
  Description of Artificial Sequence: Synthetic oligonucleotide
  Antisense strand to SEQ ID NO: 2396518
uacuuggacauguguccuc

SEQ ID NO: 2396520 - RNA, 19 nt, Artificial Sequence
  Description of Artificial Sequence: Synthetic oligonucleotide
  Sense strand starting at position 390 of SEQ ID NO: 1886245
caaguaaggccucaugcuu

SEQ ID NO: 2396521 - RNA, 19 nt, Artificial Sequence
  Description of Artificial Sequence: Synthetic oligonucleotide
  Antisense strand to SEQ ID NO: 2396520
aagcaugaggccuuacuug

SEQ ID NO: 2396522 - RNA, 19 nt, Artificial Sequence
  Description of Artificial Sequence: Synthetic oligonucleotide
  Sense strand starting at position 430 of SEQ ID NO: 1886245
gggauauccaugugauagg

SEQ ID NO: 2396523 - RNA, 19 nt, Artificial Sequence
  Description of Artificial Sequence: Synthetic oligonucleotide
  Antisense strand to SEQ ID NO: 2396522
ccuaucacauggauauccc

SEQ ID NO: 2396524 - RNA, 19 nt, Artificial Sequence
  Description of Artificial Sequence: Synthetic oligonucleotide
  Sense strand starting at position 431 of SEQ ID NO: 1886245
ggauauccaugugauagga

SEQ ID NO: 2396525 - RNA, 19 nt, Artificial Sequence
  Description of Artificial Sequence: Synthetic oligonucleotide
  Antisense strand to SEQ ID NO: 2396524
uccuaucacauggauaucc

SEQ ID NO: 2396526 - RNA, 19 nt, Artificial Sequence
  Description of Artificial Sequence: Synthetic oligonucleotide
  Sense strand starting at position 464 of SEQ ID NO: 1886245
ugaugugucacggagacaa

SEQ ID NO: 2396527 - RNA, 19 nt, Artificial Sequence
  Description of Artificial Sequence: Synthetic oligonucleotide
  Antisense strand to SEQ ID NO: 2396526
uugucuccgugacacauca

SEQ ID NO: 2396528 - RNA, 19 nt, Artificial Sequence
  Description of Artificial Sequence: Synthetic oligonucleotide
  Sense strand starting at position 536 of SEQ ID NO: 1886245
gugggucacuggucucaca

SEQ ID NO: 2396529 - RNA, 19 nt, Artificial Sequence
  Description of Artificial Sequence: Synthetic oligonucleotide
  Antisense strand to SEQ ID NO: 2396528
ugugagaccagugacccac

SEQ ID NO: 2396530 - RNA, 19 nt, Artificial Sequence
  Description of Artificial Sequence: Synthetic oligonucleotide
  Sense strand starting at position 539 of SEQ ID NO: 1886245
ggucacuggucucacacaa

SEQ ID NO: 2396531 - RNA, 19 nt, Artificial Sequence
  Description of Artificial Sequence: Synthetic oligonucleotide
  Antisense strand to SEQ ID NO: 2396530
uugugugagaccagugacc

SEQ ID NO: 2396532 - RNA, 19 nt, Artificial Sequence
  Description of Artificial Sequence: Synthetic oligonucleotide
  Sense strand starting at position 796 of SEQ ID NO: 1886245
cuauguacuuucuuugaua

SEQ ID NO: 2396533 - RNA, 19 nt, Artificial Sequence
  Description of Artificial Sequence: Synthetic oligonucleotide
  Antisense strand to SEQ ID NO: 2396532
uaucaaagaaaguacauag

SEQ ID NO: 2396534 - RNA, 19 nt, Artificial Sequence
  Description of Artificial Sequence: Synthetic oligonucleotide
  Sense strand starting at position 798 of SEQ ID NO: 1886245
auguacuuucuuugauaca

SEQ ID NO: 2396535 - RNA, 19 nt, Artificial Sequence
  Description of Artificial Sequence: Synthetic oligonucleotide
  Antisense strand to SEQ ID NO: 2396534
uguaucaaagaaaguacau

SEQ ID NO: 2396536 - RNA, 19 nt, Artificial Sequence
  Description of Artificial Sequence: Synthetic oligonucleotide
  Sense strand starting at position 799 of SEQ ID NO: 1886245
uguacuuucuuugauacau

SEQ ID NO: 2396537 - RNA, 19 nt, Artificial Sequence
  Description of Artificial Sequence: Synthetic oligonucleotide
  Antisense strand to SEQ ID NO: 2396536
auguaucaaagaaaguaca

SEQ ID NO: 2396538 - RNA, 19 nt, Artificial Sequence
  Description of Artificial Sequence: Synthetic oligonucleotide
  Sense strand starting at position 931 of SEQ ID NO: 1886245
gugaccucaugucucagaa

SEQ ID NO: 2396539 - RNA, 19 nt, Artificial Sequence
  Description of Artificial Sequence: Synthetic oligonucleotide
  Antisense strand to SEQ ID NO: 2396538
uucugagacaugaggucac

SEQ ID NO: 2396540 - RNA, 19 nt, Artificial Sequence
  Description of Artificial Sequence: Synthetic oligonucleotide
  Sense strand starting at position 971 of SEQ ID NO: 1886245
caggacagguugcucaaua

SEQ ID NO: 2396541 - RNA, 19 nt, Artificial Sequence
  Description of Artificial Sequence: Synthetic oligonucleotide
  Antisense strand to SEQ ID NO: 2396540
uauugagcaaccuguccug

SEQ ID NO: 2396542 - RNA, 19 nt, Artificial Sequence
  Description of Artificial Sequence: Synthetic oligonucleotide
  Sense strand starting at position 1237 of SEQ ID NO: 1886245
ggccauggguguccuugaa

SEQ ID NO: 2396543 - RNA, 19 nt, Artificial Sequence
  Description of Artificial Sequence: Synthetic oligonucleotide
  Antisense strand to SEQ ID NO: 2396542
uucaaggacacccauggcc

SEQ ID NO: 2396544 - RNA, 19 nt, Artificial Sequence
  Description of Artificial Sequence: Synthetic oligonucleotide
  Sense strand starting at position 1241 of SEQ ID NO: 1886245
auggguguccuugaaacuc

SEQ ID NO: 2396545 - RNA, 19 nt, Artificial Sequence
  Description of Artificial Sequence: Synthetic oligonucleotide
  Antisense strand to SEQ ID NO: 2396544
gaguuucaaggacacccau

SEQ ID NO: 2396546 - RNA, 19 nt, Artificial Sequence
  Description of Artificial Sequence: Synthetic oligonucleotide
  Sense strand starting at position 1400 of SEQ ID NO: 1886245
ccugcuuggugcugaauga

SEQ ID NO: 2396547 - RNA, 19 nt, Artificial Sequence
  Description of Artificial Sequence: Synthetic oligonucleotide
  Antisense strand to SEQ ID NO: 2396546
ucauucagcaccaagcagg

SEQ ID NO: 2396548 - RNA, 19 nt, Artificial Sequence
  Description of Artificial Sequence: Synthetic oligonucleotide
  Sense strand starting at position 1401 of SEQ ID NO: 1886245
cugcuuggugcugaaugaa

SEQ ID NO: 2396549 - RNA, 19 nt, Artificial Sequence
  Description of Artificial Sequence: Synthetic oligonucleotide
  Antisense strand to SEQ ID NO: 2396548
uucauucagcaccaagcag

SEQ ID NO: 2396550 - RNA, 19 nt, Artificial Sequence
  Description of Artificial Sequence: Synthetic oligonucleotide
  Sense strand starting at position 1478 of SEQ ID NO: 1886245
ggguccgauucccaaggaa

SEQ ID NO: 2396551 - RNA, 19 nt, Artificial Sequence
  Description of Artificial Sequence: Synthetic oligonucleotide
  Antisense strand to SEQ ID NO: 2396550
uuccuugggaaucggaccc

SEQ ID NO: 2396552 - RNA, 19 nt, Artificial Sequence
  Description of Artificial Sequence: Synthetic oligonucleotide
  Sense strand starting at position 1499 of SEQ ID NO: 1886245
ggcccuucuggauaacuca

SEQ ID NO: 2396553 - RNA, 19 nt, Artificial Sequence
  Description of Artificial Sequence: Synthetic oligonucleotide
  Antisense strand to SEQ ID NO: 2396552
ugaguuauccagaagggcc

SEQ ID NO: 2396554 - RNA, 19 nt, Artificial Sequence
  Description of Artificial Sequence: Synthetic oligonucleotide
  Sense strand starting at position 1835 of SEQ ID NO: 1886245
ccucgaguucucuagucca

SEQ ID NO: 2396555 - RNA, 19 nt, Artificial Sequence
  Description of Artificial Sequence: Synthetic oligonucleotide
  Antisense strand to SEQ ID NO: 2396554
uggacuagagaacucgagg

SEQ ID NO: 2396556 - RNA, 19 nt, Artificial Sequence
  Description of Artificial Sequence: Synthetic oligonucleotide
  Sense strand starting at position 2043 of SEQ ID NO: 1886245
ccugguugugcucaccaca

SEQ ID NO: 2396557 - RNA, 19 nt, Artificial Sequence
  Description of Artificial Sequence: Synthetic oligonucleotide
  Antisense strand to SEQ ID NO: 2396556
uguggugagcacaaccagg

SEQ ID NO: 2396558 - RNA, 19 nt, Artificial Sequence
  Description of Artificial Sequence: Synthetic oligonucleotide
  Sense strand starting at position 2171 of SEQ ID NO: 1886245
cucaccaucuggugagaua

SEQ ID NO: 2396559 - RNA, 19 nt, Artificial Sequence
  Description of Artificial Sequence: Synthetic oligonucleotide
  Antisense strand to SEQ ID NO: 2396558
uaucucaccagauggugag

SEQ ID NO: 2396560 - RNA, 19 nt, Artificial Sequence
  Description of Artificial Sequence: Synthetic oligonucleotide
  Sense strand starting at position 2180 of SEQ ID NO: 1886245
uggugagauagcuggaaga

SEQ ID NO: 2396561 - RNA, 19 nt, Artificial Sequence
  Description of Artificial Sequence: Synthetic oligonucleotide
  Antisense strand to SEQ ID NO: 2396560
ucuuccagcuaucucacca

SEQ ID NO: 2396562 - RNA, 19 nt, Artificial Sequence
  Description of Artificial Sequence: Synthetic oligonucleotide
  Sense strand starting at position 2190 of SEQ ID NO: 1886245
gcuggaagauggguccaaa

SEQ ID NO: 2396563 - RNA, 19 nt, Artificial Sequence
  Description of Artificial Sequence: Synthetic oligonucleotide
  Antisense strand to SEQ ID NO: 2396562
uuuggacccaucuuccagc

SEQ ID NO: 2396564 - RNA, 19 nt, Artificial Sequence
  Description of Artificial Sequence: Synthetic oligonucleotide
  Sense strand starting at position 3099 of SEQ ID NO: 1886245
gggccugacccuugaaucu

SEQ ID NO: 2396565 - RNA, 19 nt, Artificial Sequence
  Description of Artificial Sequence: Synthetic oligonucleotide
  Antisense strand to SEQ ID NO: 2396564
agauucaagggucaggccc

SEQ ID NO: 2396566 - RNA, 19 nt, Artificial Sequence
  Description of Artificial Sequence: Synthetic oligonucleotide
  Sense strand starting at position 3108 of SEQ ID NO: 1886245
ccuugaaucuuggccugaa

SEQ ID NO: 2396567 - RNA, 19 nt, Artificial Sequence
  Description of Artificial Sequence: Synthetic oligonucleotide
  Antisense strand to SEQ ID NO: 2396566
uucaggccaagauucaagg

SEQ ID NO: 2396568 - RNA, 19 nt, Artificial Sequence
  Description of Artificial Sequence: Synthetic oligonucleotide
  Sense strand starting at position 3109 of SEQ ID NO: 1886245
cuugaaucuuggccugaau

SEQ ID NO: 2396569 - RNA, 19 nt, Artificial Sequence
  Description of Artificial Sequence: Synthetic oligonucleotide
  Antisense strand to SEQ ID NO: 2396568
auucaggccaagauucaag

SEQ ID NO: 2396570 - RNA, 19 nt, Artificial Sequence
  Description of Artificial Sequence: Synthetic oligonucleotide
  Sense strand starting at position 3186 of SEQ ID NO: 1886245
gauggagaguuccugcuua

SEQ ID NO: 2396571 - RNA, 19 nt, Artificial Sequence
  Description of Artificial Sequence: Synthetic oligonucleotide
  Antisense strand to SEQ ID NO: 2396570
uaagcaggaacucuccauc

SEQ ID NO: 2396572 - RNA, 19 nt, Artificial Sequence
  Description of Artificial Sequence: Synthetic oligonucleotide
  Sense strand starting at position 3190 of SEQ ID NO: 1886245
gagaguuccugcuuaacac

SEQ ID NO: 2396573 - RNA, 19 nt, Artificial Sequence
  Description of Artificial Sequence: Synthetic oligonucleotide
  Antisense strand to SEQ ID NO: 2396572
guguuaagcaggaacucuc

SEQ ID NO: 2396574 - RNA, 19 nt, Artificial Sequence
  Description of Artificial Sequence: Synthetic oligonucleotide
  Sense strand starting at position 3237 of SEQ ID NO: 1886245
ccucauguugccugggagu

SEQ ID NO: 2396575 - RNA, 19 nt, Artificial Sequence
  Description of Artificial Sequence: Synthetic oligonucleotide
  Antisense strand to SEQ ID NO: 2396574
acucccaggcaacaugagg

SEQ ID NO: 2396576 - RNA, 19 nt, Artificial Sequence
  Description of Artificial Sequence: Synthetic oligonucleotide
  Sense strand starting at position 3275 of SEQ ID NO: 1886245
caccgagucucagcuagaa

SEQ ID NO: 2396577 - RNA, 19 nt, Artificial Sequence
  Description of Artificial Sequence: Synthetic oligonucleotide
  Antisense strand to SEQ ID NO: 2396576
uucuagcugagacucggug

SEQ ID NO: 2396578 - RNA, 19 nt, Artificial Sequence
  Description of Artificial Sequence: Synthetic oligonucleotide
  Sense strand starting at position 3377 of SEQ ID NO: 1886245
ggaaccaguuucuauggaa

SEQ ID NO: 2396579 - RNA, 19 nt, Artificial Sequence
  Description of Artificial Sequence: Synthetic oligonucleotide
  Antisense strand to SEQ ID NO: 2396578
uuccauagaaacugguucc

SEQ ID NO: 2396580 - RNA, 19 nt, Artificial Sequence
  Description of Artificial Sequence: Synthetic oligonucleotide
  Sense strand starting at position 3380 of SEQ ID NO: 1886245
accaguuucuauggaagac

SEQ ID NO: 2396581 - RNA, 19 nt, Artificial Sequence
  Description of Artificial Sequence: Synthetic oligonucleotide
  Antisense strand to SEQ ID NO: 2396580
gucuuccauagaaacuggu

SEQ ID NO: 2396582 - RNA, 19 nt, Artificial Sequence
  Description of Artificial Sequence: Synthetic oligonucleotide
  Sense strand starting at position 3436 of SEQ ID NO: 1886245
aggucagcucccugaggaa

SEQ ID NO: 2396583 - RNA, 19 nt, Artificial Sequence
  Description of Artificial Sequence: Synthetic oligonucleotide
  Antisense strand to SEQ ID NO: 2396582
uuccucagggagcugaccu

SEQ ID NO: 2396584 - RNA, 19 nt, Artificial Sequence
  Description of Artificial Sequence: Synthetic oligonucleotide
  Sense strand starting at position 3679 of SEQ ID NO: 1886245
uggguugccucacggacaa

SEQ ID NO: 2396585 - RNA, 19 nt, Artificial Sequence
  Description of Artificial Sequence: Synthetic oligonucleotide
  Antisense strand to SEQ ID NO: 2396584
uuguccgugaggcaaccca

SEQ ID NO: 2396586 - RNA, 19 nt, Artificial Sequence
  Description of Artificial Sequence: Synthetic oligonucleotide
  Sense strand starting at position 3789 of SEQ ID NO: 1886245
auccgagaauccucuucca

SEQ ID NO: 2396587 - RNA, 19 nt, Artificial Sequence
  Description of Artificial Sequence: Synthetic oligonucleotide
  Antisense strand to SEQ ID NO: 2396586
uggaagaggauucucggau

SEQ ID NO: 2396588 - RNA, 19 nt, Artificial Sequence
  Description of Artificial Sequence: Synthetic oligonucleotide
  Sense strand starting at position 25 of SEQ ID NO: 1886246
agugucuucuuccaacaua

SEQ ID NO: 2396589 - RNA, 19 nt, Artificial Sequence
  Description of Artificial Sequence: Synthetic oligonucleotide
  Antisense strand to SEQ ID NO: 2396588
uauguuggaagaagacacu

SEQ ID NO: 2396590 - RNA, 19 nt, Artificial Sequence
  Description of Artificial Sequence: Synthetic oligonucleotide
  Sense strand starting at position 361 of SEQ ID NO: 1886246
gggccucacguaugagcaa

SEQ ID NO: 2396591 - RNA, 19 nt, Artificial Sequence
  Description of Artificial Sequence: Synthetic oligonucleotide
  Antisense strand to SEQ ID NO: 2396590
uugcucauacgugaggccc

SEQ ID NO: 2396592 - RNA, 19 nt, Artificial Sequence
  Description of Artificial Sequence: Synthetic oligonucleotide
  Sense strand starting at position 395 of SEQ ID NO: 1886246
gggauacccacgugaugga

SEQ ID NO: 2396593 - RNA, 19 nt, Artificial Sequence
  Description of Artificial Sequence: Synthetic oligonucleotide
  Antisense strand to SEQ ID NO: 2396592
uccaucacguggguauccc

SEQ ID NO: 2396594 - RNA, 19 nt, Artificial Sequence
  Description of Artificial Sequence: Synthetic oligonucleotide
  Sense strand starting at position 513 of SEQ ID NO: 1886246
gcaagaugccugggcuguu

SEQ ID NO: 2396595 - RNA, 19 nt, Artificial Sequence
  Description of Artificial Sequence: Synthetic oligonucleotide
  Antisense strand to SEQ ID NO: 2396594
aacagcccaggcaucuugc

SEQ ID NO: 2396596 - RNA, 19 nt, Artificial Sequence
  Description of Artificial Sequence: Synthetic oligonucleotide
  Sense strand starting at position 800 of SEQ ID NO: 1886246
ggguccucaucuugcguua

SEQ ID NO: 2396597 - RNA, 19 nt, Artificial Sequence
  Description of Artificial Sequence: Synthetic oligonucleotide
  Antisense strand to SEQ ID NO: 2396596
uaacgcaagaugaggaccc

SEQ ID NO: 2396598 - RNA, 19 nt, Artificial Sequence
  Description of Artificial Sequence: Synthetic oligonucleotide
  Sense strand starting at position 802 of SEQ ID NO: 1886246
guccucaucuugcguuaca

SEQ ID NO: 2396599 - RNA, 19 nt, Artificial Sequence
  Description of Artificial Sequence: Synthetic oligonucleotide
  Antisense strand to SEQ ID NO: 2396598
uguaacgcaagaugaggac

SEQ ID NO: 2396600 - RNA, 19 nt, Artificial Sequence
  Description of Artificial Sequence: Synthetic oligonucleotide
  Sense strand starting at position 839 of SEQ ID NO: 1886246
aggccacacuuggucaaua

SEQ ID NO: 2396601 - RNA, 19 nt, Artificial Sequence
  Description of Artificial Sequence: Synthetic oligonucleotide
  Antisense strand to SEQ ID NO: 2396600
uauugaccaaguguggccu

SEQ ID NO: 2396602 - RNA, 19 nt, Artificial Sequence
  Description of Artificial Sequence: Synthetic oligonucleotide
  Sense strand starting at position 840 of SEQ ID NO: 1886246
ggccacacuuggucaauaa

SEQ ID NO: 2396603 - RNA, 19 nt, Artificial Sequence
  Description of Artificial Sequence: Synthetic oligonucleotide
  Antisense strand to SEQ ID NO: 2396602
uuauugaccaaguguggcc

SEQ ID NO: 2396604 - RNA, 19 nt, Artificial Sequence
  Description of Artificial Sequence: Synthetic oligonucleotide
  Sense strand starting at position 1373 of SEQ ID NO: 1886246
ugaccagccuuccgaguuu

SEQ ID NO: 2396605 - RNA, 19 nt, Artificial Sequence
  Description of Artificial Sequence: Synthetic oligonucleotide
  Antisense strand to SEQ ID NO: 2396604
aaacucggaaggcugguca

SEQ ID NO: 2396606 - RNA, 19 nt, Artificial Sequence
  Description of Artificial Sequence: Synthetic oligonucleotide
  Sense strand starting at position 1404 of SEQ ID NO: 1886246
gcgcuauguugggcugaag

SEQ ID NO: 2396607 - RNA, 19 nt, Artificial Sequence
  Description of Artificial Sequence: Synthetic oligonucleotide
  Antisense strand to SEQ ID NO: 2396606
cuucagcccaacauagcgc

SEQ ID NO: 2396608 - RNA, 19 nt, Artificial Sequence
  Description of Artificial Sequence: Synthetic oligonucleotide
  Sense strand starting at position 1464 of SEQ ID NO: 1886246
ucaagaaaugcgugcuccu

SEQ ID NO: 2396609 - RNA, 19 nt, Artificial Sequence
  Description of Artificial Sequence: Synthetic oligonucleotide
  Antisense strand to SEQ ID NO: 2396608
aggagcacgcauuucuuga

SEQ ID NO: 2396610 - RNA, 19 nt, Artificial Sequence
  Description of Artificial Sequence: Synthetic oligonucleotide
  Sense strand starting at position 1473 of SEQ ID NO: 1886246
gcgugcuccuaggaucaga

SEQ ID NO: 2396611 - RNA, 19 nt, Artificial Sequence
  Description of Artificial Sequence: Synthetic oligonucleotide
  Antisense strand to SEQ ID NO: 2396610
ucugauccuaggagcacgc

SEQ ID NO: 2396612 - RNA, 19 nt, Artificial Sequence
  Description of Artificial Sequence: Synthetic oligonucleotide
  Sense strand starting at position 2291 of SEQ ID NO: 1886246
ugagauccaugugaaauac

SEQ ID NO: 2396613 - RNA, 19 nt, Artificial Sequence
  Description of Artificial Sequence: Synthetic oligonucleotide
  Antisense strand to SEQ ID NO: 2396612
guauuucacauggaucuca

SEQ ID NO: 2396614 - RNA, 19 nt, Artificial Sequence
  Description of Artificial Sequence: Synthetic oligonucleotide
  Sense strand starting at position 2308 of SEQ ID NO: 1886246
acugacuugucacugacau

SEQ ID NO: 2396615 - RNA, 19 nt, Artificial Sequence
  Description of Artificial Sequence: Synthetic oligonucleotide
  Antisense strand to SEQ ID NO: 2396614
augucagugacaagucagu

SEQ ID NO: 2396616 - RNA, 19 nt, Artificial Sequence
  Description of Artificial Sequence: Synthetic oligonucleotide
  Sense strand starting at position 2309 of SEQ ID NO: 1886246
cugacuugucacugacaug

SEQ ID NO: 2396617 - RNA, 19 nt, Artificial Sequence
  Description of Artificial Sequence: Synthetic oligonucleotide
  Antisense strand to SEQ ID NO: 2396616
caugucagugacaagucag

SEQ ID NO: 2396618 - RNA, 19 nt, Artificial Sequence
  Description of Artificial Sequence: Synthetic oligonucleotide
  Sense strand starting at position 2605 of SEQ ID NO: 1886246
cuaagcauguacuggaaau

SEQ ID NO: 2396619 - RNA, 19 nt, Artificial Sequence
  Description of Artificial Sequence: Synthetic oligonucleotide
  Antisense strand to SEQ ID NO: 2396618
auuuccaguacaugcuuag

SEQ ID NO: 2396620 - RNA, 19 nt, Artificial Sequence
  Description of Artificial Sequence: Synthetic oligonucleotide
  Sense strand starting at position 2778 of SEQ ID NO: 1886246
gugauaccauggcucagaa

SEQ ID NO: 2396621 - RNA, 19 nt, Artificial Sequence
  Description of Artificial Sequence: Synthetic oligonucleotide
  Antisense strand to SEQ ID NO: 2396620
uucugagccaugguaucac

SEQ ID NO: 2396622 - RNA, 19 nt, Artificial Sequence
  Description of Artificial Sequence: Synthetic oligonucleotide
  Sense strand starting at position 2858 of SEQ ID NO: 1886246
ggccacccuucgugacauu

SEQ ID NO: 2396623 - RNA, 19 nt, Artificial Sequence
  Description of Artificial Sequence: Synthetic oligonucleotide
  Antisense strand to SEQ ID NO: 2396622
aaugucacgaaggguggcc

SEQ ID NO: 2396624 - RNA, 19 nt, Artificial Sequence
  Description of Artificial Sequence: Synthetic oligonucleotide
  Sense strand starting at position 3049 of SEQ ID NO: 1886246
cccauugcucaauagggau

SEQ ID NO: 2396625 - RNA, 19 nt, Artificial Sequence
  Description of Artificial Sequence: Synthetic oligonucleotide
  Antisense strand to SEQ ID NO: 2396624
aucccuauugagcaauggg

SEQ ID NO: 2396626 - RNA, 19 nt, Artificial Sequence
  Description of Artificial Sequence: Synthetic oligonucleotide
  Sense strand starting at position 3100 of SEQ ID NO: 1886246
ccuugaaucuccgugacca

SEQ ID NO: 2396627 - RNA, 19 nt, Artificial Sequence
  Description of Artificial Sequence: Synthetic oligonucleotide
  Antisense strand to SEQ ID NO: 2396626
uggucacggagauucaagg

SEQ ID NO: 2396628 - RNA, 19 nt, Artificial Sequence
  Description of Artificial Sequence: Synthetic oligonucleotide
  Sense strand starting at position 3101 of SEQ ID NO: 1886246
cuugaaucuccgugaccaa

SEQ ID NO: 2396629 - RNA, 19 nt, Artificial Sequence
  Description of Artificial Sequence: Synthetic oligonucleotide
  Antisense strand to SEQ ID NO: 2396628
uuggucacggagauucaag

SEQ ID NO: 2396630 - RNA, 19 nt, Artificial Sequence
  Description of Artificial Sequence: Synthetic oligonucleotide
  Sense strand starting at position 3102 of SEQ ID NO: 1886246
uugaaucuccgugaccaaa

SEQ ID NO: 2396631 - RNA, 19 nt, Artificial Sequence
  Description of Artificial Sequence: Synthetic oligonucleotide
  Antisense strand to SEQ ID NO: 2396630
uuuggucacggagauucaa

SEQ ID NO: 2396632 - RNA, 19 nt, Artificial Sequence
  Description of Artificial Sequence: Synthetic oligonucleotide
  Sense strand starting at position 3212 of SEQ ID NO: 1886246
ggcaguccuggagaccuua

SEQ ID NO: 2396633 - RNA, 19 nt, Artificial Sequence
  Description of Artificial Sequence: Synthetic oligonucleotide
  Antisense strand to SEQ ID NO: 2396632
uaaggucuccaggacugcc

SEQ ID NO: 2396634 - RNA, 19 nt, Artificial Sequence
  Description of Artificial Sequence: Synthetic oligonucleotide
  Sense strand starting at position 3457 of SEQ ID NO: 1886246
cggucuagcucaugaccaa

SEQ ID NO: 2396635 - RNA, 19 nt, Artificial Sequence
  Description of Artificial Sequence: Synthetic oligonucleotide
  Antisense strand to SEQ ID NO: 2396634
uuggucaugagcuagaccg

SEQ ID NO: 2396636 - RNA, 19 nt, Artificial Sequence
  Description of Artificial Sequence: Synthetic oligonucleotide
  Sense strand starting at position 3458 of SEQ ID NO: 1886246
ggucuagcucaugaccaau

SEQ ID NO: 2396637 - RNA, 19 nt, Artificial Sequence
  Description of Artificial Sequence: Synthetic oligonucleotide
  Antisense strand to SEQ ID NO: 2396636
auuggucaugagcuagacc

SEQ ID NO: 2396638 - RNA, 19 nt, Artificial Sequence
  Description of Artificial Sequence: Synthetic oligonucleotide
  Sense strand starting at position 3927 of SEQ ID NO: 1886246
cagcuuagugcagaagacu

SEQ ID NO: 2396639 - RNA, 19 nt, Artificial Sequence
  Description of Artificial Sequence: Synthetic oligonucleotide
  Antisense strand to SEQ ID NO: 2396638
agucuucugcacuaagcug

SEQ ID NO: 2396640 - RNA, 19 nt, Artificial Sequence
  Description of Artificial Sequence: Synthetic oligonucleotide
  Sense strand starting at position 404 of SEQ ID NO: 1886247
gggauacccaugugaugga

SEQ ID NO: 2396641 - RNA, 19 nt, Artificial Sequence
  Description of Artificial Sequence: Synthetic oligonucleotide
  Antisense strand to SEQ ID NO: 2396640
uccaucacauggguauccc

SEQ ID NO: 2396642 - RNA, 19 nt, Artificial Sequence
  Description of Artificial Sequence: Synthetic oligonucleotide
  Sense strand starting at position 838 of SEQ ID NO: 1886247
ggucccacuuggucaauaa

SEQ ID NO: 2396643 - RNA, 19 nt, Artificial Sequence
  Description of Artificial Sequence: Synthetic oligonucleotide
  Antisense strand to SEQ ID NO: 2396642
uuauugaccaagugggacc

SEQ ID NO: 2396644 - RNA, 19 nt, Artificial Sequence
  Description of Artificial Sequence: Synthetic oligonucleotide
  Sense strand starting at position 1381 of SEQ ID NO: 1886247
cgcugaguuucagcuggga

SEQ ID NO: 2396645 - RNA, 19 nt, Artificial Sequence
  Description of Artificial Sequence: Synthetic oligonucleotide
  Antisense strand to SEQ ID NO: 2396644
ucccagcugaaacucagcg

SEQ ID NO: 2396646 - RNA, 19 nt, Artificial Sequence
  Description of Artificial Sequence: Synthetic oligonucleotide
  Sense strand starting at position 1402 of SEQ ID NO: 1886247
ugcucuauguugggcugaa

SEQ ID NO: 2396647 - RNA, 19 nt, Artificial Sequence
  Description of Artificial Sequence: Synthetic oligonucleotide
  Antisense strand to SEQ ID NO: 2396646
uucagcccaacauagagca

SEQ ID NO: 2396648 - RNA, 19 nt, Artificial Sequence
  Description of Artificial Sequence: Synthetic oligonucleotide
  Sense strand starting at position 1403 of SEQ ID NO: 1886247
gcucuauguugggcugaag

SEQ ID NO: 2396649 - RNA, 19 nt, Artificial Sequence
  Description of Artificial Sequence: Synthetic oligonucleotide
  Antisense strand to SEQ ID NO: 2396648
cuucagcccaacauagagc

SEQ ID NO: 2396650 - RNA, 19 nt, Artificial Sequence
  Description of Artificial Sequence: Synthetic oligonucleotide
  Sense strand starting at position 1472 of SEQ ID NO: 1886247
gcaugcuccuagggucaga

SEQ ID NO: 2396651 - RNA, 19 nt, Artificial Sequence
  Description of Artificial Sequence: Synthetic oligonucleotide
  Antisense strand to SEQ ID NO: 2396650
ucugacccuaggagcaugc

SEQ ID NO: 2396652 - RNA, 19 nt, Artificial Sequence
  Description of Artificial Sequence: Synthetic oligonucleotide
  Sense strand starting at position 2011 of SEQ ID NO: 1886247
gaucaaucaccucgugcau

SEQ ID NO: 2396653 - RNA, 19 nt, Artificial Sequence
  Description of Artificial Sequence: Synthetic oligonucleotide
  Antisense strand to SEQ ID NO: 2396652
augcacgaggugauugauc

SEQ ID NO: 2396654 - RNA, 19 nt, Artificial Sequence
  Description of Artificial Sequence: Synthetic oligonucleotide
  Sense strand starting at position 2268 of SEQ ID NO: 1886247
cuuaucuuccacggacaca

SEQ ID NO: 2396655 - RNA, 19 nt, Artificial Sequence
  Description of Artificial Sequence: Synthetic oligonucleotide
  Antisense strand to SEQ ID NO: 2396654
uguguccguggaagauaag

SEQ ID NO: 2396656 - RNA, 19 nt, Artificial Sequence
  Description of Artificial Sequence: Synthetic oligonucleotide
  Sense strand starting at position 2287 of SEQ ID NO: 1886247
ugugaugagagccauguga

SEQ ID NO: 2396657 - RNA, 19 nt, Artificial Sequence
  Description of Artificial Sequence: Synthetic oligonucleotide
  Antisense strand to SEQ ID NO: 2396656
ucacauggcucucaucaca

SEQ ID NO: 2396658 - RNA, 19 nt, Artificial Sequence
  Description of Artificial Sequence: Synthetic oligonucleotide
  Sense strand starting at position 2289 of SEQ ID NO: 1886247
ugaugagagccaugugaaa

SEQ ID NO: 2396659 - RNA, 19 nt, Artificial Sequence
  Description of Artificial Sequence: Synthetic oligonucleotide
  Antisense strand to SEQ ID NO: 2396658
uuucacauggcucucauca

SEQ ID NO: 2396660 - RNA, 19 nt, Artificial Sequence
  Description of Artificial Sequence: Synthetic oligonucleotide
  Sense strand starting at position 2291 of SEQ ID NO: 1886247
augagagccaugugaaaua

SEQ ID NO: 2396661 - RNA, 19 nt, Artificial Sequence
  Description of Artificial Sequence: Synthetic oligonucleotide
  Antisense strand to SEQ ID NO: 2396660
uauuucacauggcucucau

SEQ ID NO: 2396662 - RNA, 19 nt, Artificial Sequence
  Description of Artificial Sequence: Synthetic oligonucleotide
  Sense strand starting at position 2380 of SEQ ID NO: 1886247
guucauugggcuugggaua

SEQ ID NO: 2396663 - RNA, 19 nt, Artificial Sequence
  Description of Artificial Sequence: Synthetic oligonucleotide
  Antisense strand to SEQ ID NO: 2396662
uaucccaagcccaaugaac

SEQ ID NO: 2396664 - RNA, 19 nt, Artificial Sequence
  Description of Artificial Sequence: Synthetic oligonucleotide
  Sense strand starting at position 2506 of SEQ ID NO: 1886247
ggucauuagccaggucaug

SEQ ID NO: 2396665 - RNA, 19 nt, Artificial Sequence
  Description of Artificial Sequence: Synthetic oligonucleotide
  Antisense strand to SEQ ID NO: 2396664
caugaccuggcuaaugacc

SEQ ID NO: 2396666 - RNA, 19 nt, Artificial Sequence
  Description of Artificial Sequence: Synthetic oligonucleotide
  Sense strand starting at position 2624 of SEQ ID NO: 1886247
cuaagcaugcacuggaaau

SEQ ID NO: 2396667 - RNA, 19 nt, Artificial Sequence
  Description of Artificial Sequence: Synthetic oligonucleotide
  Antisense strand to SEQ ID NO: 2396666
auuuccagugcaugcuuag

SEQ ID NO: 2396668 - RNA, 19 nt, Artificial Sequence
  Description of Artificial Sequence: Synthetic oligonucleotide
  Sense strand starting at position 2638 of SEQ ID NO: 1886247
gaaaucacagcuugaguca

SEQ ID NO: 2396669 - RNA, 19 nt, Artificial Sequence
  Description of Artificial Sequence: Synthetic oligonucleotide
  Antisense strand to SEQ ID NO: 2396668
ugacucaagcugugauuuc

SEQ ID NO: 2396670 - RNA, 19 nt, Artificial Sequence
  Description of Artificial Sequence: Synthetic oligonucleotide
  Sense strand starting at position 2645 of SEQ ID NO: 1886247
cagcuugagucacaugcuu

SEQ ID NO: 2396671 - RNA, 19 nt, Artificial Sequence
  Description of Artificial Sequence: Synthetic oligonucleotide
  Antisense strand to SEQ ID NO: 2396670
aagcaugugacucaagcug

SEQ ID NO: 2396672 - RNA, 19 nt, Artificial Sequence
  Description of Artificial Sequence: Synthetic oligonucleotide
  Sense strand starting at position 2688 of SEQ ID NO: 1886247
cccgcauaucuccgacaca

SEQ ID NO: 2396673 - RNA, 19 nt, Artificial Sequence
  Description of Artificial Sequence: Synthetic oligonucleotide
  Antisense strand to SEQ ID NO: 2396672
ugugucggagauaugcggg

SEQ ID NO: 2396674 - RNA, 19 nt, Artificial Sequence
  Description of Artificial Sequence: Synthetic oligonucleotide
  Sense strand starting at position 2691 of SEQ ID NO: 1886247
gcauaucuccgacacacuu

SEQ ID NO: 2396675 - RNA, 19 nt, Artificial Sequence
  Description of Artificial Sequence: Synthetic oligonucleotide
  Antisense strand to SEQ ID NO: 2396674
aagugugucggagauaugc

SEQ ID NO: 2396676 - RNA, 19 nt, Artificial Sequence
  Description of Artificial Sequence: Synthetic oligonucleotide
  Sense strand starting at position 2707 of SEQ ID NO: 1886247
cuugaacaaucaggagaca

SEQ ID NO: 2396677 - RNA, 19 nt, Artificial Sequence
  Description of Artificial Sequence: Synthetic oligonucleotide
  Antisense strand to SEQ ID NO: 2396676
ugucuccugauuguucaag

SEQ ID NO: 2396678 - RNA, 19 nt, Artificial Sequence
  Description of Artificial Sequence: Synthetic oligonucleotide
  Sense strand starting at position 2814 of SEQ ID NO: 1886247
uaggaaaggucccucgaca

SEQ ID NO: 2396679 - RNA, 19 nt, Artificial Sequence
  Description of Artificial Sequence: Synthetic oligonucleotide
  Antisense strand to SEQ ID NO: 2396678
ugucgagggaccuuuccua

SEQ ID NO: 2396680 - RNA, 19 nt, Artificial Sequence
  Description of Artificial Sequence: Synthetic oligonucleotide
  Sense strand starting at position 2864 of SEQ ID NO: 1886247
uaugacgcuugaucucaga

SEQ ID NO: 2396681 - RNA, 19 nt, Artificial Sequence
  Description of Artificial Sequence: Synthetic oligonucleotide
  Antisense strand to SEQ ID NO: 2396680
ucugagaucaagcgucaua

SEQ ID NO: 2396682 - RNA, 19 nt, Artificial Sequence
  Description of Artificial Sequence: Synthetic oligonucleotide
  Sense strand starting at position 2867 of SEQ ID NO: 1886247
gacgcuugaucucagagau

SEQ ID NO: 2396683 - RNA, 19 nt, Artificial Sequence
  Description of Artificial Sequence: Synthetic oligonucleotide
  Antisense strand to SEQ ID NO: 2396682
aucucugagaucaagcguc

SEQ ID NO: 2396684 - RNA, 19 nt, Artificial Sequence
  Description of Artificial Sequence: Synthetic oligonucleotide
  Sense strand starting at position 2886 of SEQ ID NO: 1886247
aggguaaucuccagcggga

SEQ ID NO: 2396685 - RNA, 19 nt, Artificial Sequence
  Description of Artificial Sequence: Synthetic oligonucleotide
  Antisense strand to SEQ ID NO: 2396684
ucccgcuggagauuacccu

SEQ ID NO: 2396686 - RNA, 19 nt, Artificial Sequence
  Description of Artificial Sequence: Synthetic oligonucleotide
  Sense strand starting at position 2888 of SEQ ID NO: 1886247
gguaaucuccagcgggaug

SEQ ID NO: 2396687 - RNA, 19 nt, Artificial Sequence
  Description of Artificial Sequence: Synthetic oligonucleotide
  Antisense strand to SEQ ID NO: 2396686
caucccgcuggagauuacc

SEQ ID NO: 2396688 - RNA, 19 nt, Artificial Sequence
  Description of Artificial Sequence: Synthetic oligonucleotide
  Sense strand starting at position 2974 of SEQ ID NO: 1886247
agagcucugccuugacuca

SEQ ID NO: 2396689 - RNA, 19 nt, Artificial Sequence
  Description of Artificial Sequence: Synthetic oligonucleotide
  Antisense strand to SEQ ID NO: 2396688
ugagucaaggcagagcucu

SEQ ID NO: 2396690 - RNA, 19 nt, Artificial Sequence
  Description of Artificial Sequence: Synthetic oligonucleotide
  Sense strand starting at position 3038 of SEQ ID NO: 1886247
acuggaauggcccauuacu

SEQ ID NO: 2396691 - RNA, 19 nt, Artificial Sequence
  Description of Artificial Sequence: Synthetic oligonucleotide
  Antisense strand to SEQ ID NO: 2396690
aguaaugggccauuccagu

SEQ ID NO: 2396692 - RNA, 19 nt, Artificial Sequence
  Description of Artificial Sequence: Synthetic oligonucleotide
  Sense strand starting at position 3325 of SEQ ID NO: 1886247
guauccuccuugggucuaa

SEQ ID NO: 2396693 - RNA, 19 nt, Artificial Sequence
  Description of Artificial Sequence: Synthetic oligonucleotide
  Antisense strand to SEQ ID NO: 2396692
uuagacccaaggaggauac

SEQ ID NO: 2396694 - RNA, 19 nt, Artificial Sequence
  Description of Artificial Sequence: Synthetic oligonucleotide
  Sense strand starting at position 3375 of SEQ ID NO: 1886247
gucucucccaggugggaau

SEQ ID NO: 2396695 - RNA, 19 nt, Artificial Sequence
  Description of Artificial Sequence: Synthetic oligonucleotide
  Antisense strand to SEQ ID NO: 2396694
auucccaccugggagagac

SEQ ID NO: 2396696 - RNA, 19 nt, Artificial Sequence
  Description of Artificial Sequence: Synthetic oligonucleotide
  Sense strand starting at position 3756 of SEQ ID NO: 1886247
agugucuucuuccaacaua

SEQ ID NO: 2396697 - RNA, 19 nt, Artificial Sequence
  Description of Artificial Sequence: Synthetic oligonucleotide
  Antisense strand to SEQ ID NO: 2396696
uauguuggaagaagacacu

SEQ ID NO: 2396698 - RNA, 19 nt, Artificial Sequence
  Description of Artificial Sequence: Synthetic oligonucleotide
  Sense strand starting at position 272 of SEQ ID NO: 1886248
guccauugguccugaugca

SEQ ID NO: 2396699 - RNA, 19 nt, Artificial Sequence
  Description of Artificial Sequence: Synthetic oligonucleotide
  Antisense strand to SEQ ID NO: 2396698
ugcaucaggaccaauggac

SEQ ID NO: 2396700 - RNA, 19 nt, Artificial Sequence
  Description of Artificial Sequence: Synthetic oligonucleotide
  Sense strand starting at position 273 of SEQ ID NO: 1886248
uccauugguccugaugcaa

SEQ ID NO: 2396701 - RNA, 19 nt, Artificial Sequence
  Description of Artificial Sequence: Synthetic oligonucleotide
  Antisense strand to SEQ ID NO: 2396700
uugcaucaggaccaaugga

SEQ ID NO: 2396702 - RNA, 19 nt, Artificial Sequence
  Description of Artificial Sequence: Synthetic oligonucleotide
  Sense strand starting at position 413 of SEQ ID NO: 1886248
cugaccugucacggauaca

SEQ ID NO: 2396703 - RNA, 19 nt, Artificial Sequence
  Description of Artificial Sequence: Synthetic oligonucleotide
  Antisense strand to SEQ ID NO: 2396702
uguauccgugacaggucag

SEQ ID NO: 2396704 - RNA, 19 nt, Artificial Sequence
  Description of Artificial Sequence: Synthetic oligonucleotide
  Sense strand starting at position 744 of SEQ ID NO: 1886248
gaaaucacagccuggagua

SEQ ID NO: 2396705 - RNA, 19 nt, Artificial Sequence
  Description of Artificial Sequence: Synthetic oligonucleotide
  Antisense strand to SEQ ID NO: 2396704
uacuccaggcugugauuuc

SEQ ID NO: 2396706 - RNA, 19 nt, Artificial Sequence
  Description of Artificial Sequence: Synthetic oligonucleotide
  Sense strand starting at position 929 of SEQ ID NO: 1886248
ggcagcaaauucucaggau

SEQ ID NO: 2396707 - RNA, 19 nt, Artificial Sequence
  Description of Artificial Sequence: Synthetic oligonucleotide
  Antisense strand to SEQ ID NO: 2396706
auccugagaauuugcugcc

SEQ ID NO: 2396708 - RNA, 19 nt, Artificial Sequence
  Description of Artificial Sequence: Synthetic oligonucleotide
  Sense strand starting at position 1040 of SEQ ID NO: 1886248
gucgacuuggccuaaagcu

SEQ ID NO: 2396709 - RNA, 19 nt, Artificial Sequence
  Description of Artificial Sequence: Synthetic oligonucleotide
  Antisense strand to SEQ ID NO: 2396708
agcuuuaggccaagucgac

SEQ ID NO: 2396710 - RNA, 19 nt, Artificial Sequence
  Description of Artificial Sequence: Synthetic oligonucleotide
  Sense strand starting at position 1168 of SEQ ID NO: 1886248
ugggaugguccauagcuca

SEQ ID NO: 2396711 - RNA, 19 nt, Artificial Sequence
  Description of Artificial Sequence: Synthetic oligonucleotide
  Antisense strand to SEQ ID NO: 2396710
ugagcuauggaccauccca

SEQ ID NO: 2396712 - RNA, 19 nt, Artificial Sequence
  Description of Artificial Sequence: Synthetic oligonucleotide
  Sense strand starting at position 1206 of SEQ ID NO: 1886248
gggacauaguuggguacaa

SEQ ID NO: 2396713 - RNA, 19 nt, Artificial Sequence
  Description of Artificial Sequence: Synthetic oligonucleotide
  Antisense strand to SEQ ID NO: 2396712
uuguacccaacuauguccc

SEQ ID NO: 2396714 - RNA, 19 nt, Artificial Sequence
  Description of Artificial Sequence: Synthetic oligonucleotide
  Sense strand starting at position 1207 of SEQ ID NO: 1886248
ggacauaguuggguacaau

SEQ ID NO: 2396715 - RNA, 19 nt, Artificial Sequence
  Description of Artificial Sequence: Synthetic oligonucleotide
  Antisense strand to SEQ ID NO: 2396714
auuguacccaacuaugucc

SEQ ID NO: 2396716 - RNA, 19 nt, Artificial Sequence
  Description of Artificial Sequence: Synthetic oligonucleotide
  Sense strand starting at position 1216 of SEQ ID NO: 1886248
uggguacaauccuugaauc

SEQ ID NO: 2396717 - RNA, 19 nt, Artificial Sequence
  Description of Artificial Sequence: Synthetic oligonucleotide
  Antisense strand to SEQ ID NO: 2396716
gauucaaggauuguaccca

SEQ ID NO: 2396718 - RNA, 19 nt, Artificial Sequence
  Description of Artificial Sequence: Synthetic oligonucleotide
  Sense strand starting at position 1217 of SEQ ID NO: 1886248
ggguacaauccuugaaucu

SEQ ID NO: 2396719 - RNA, 19 nt, Artificial Sequence
  Description of Artificial Sequence: Synthetic oligonucleotide
  Antisense strand to SEQ ID NO: 2396718
agauucaaggauuguaccc

SEQ ID NO: 2396720 - RNA, 19 nt, Artificial Sequence
  Description of Artificial Sequence: Synthetic oligonucleotide
  Sense strand starting at position 1218 of SEQ ID NO: 1886248
gguacaauccuugaaucuc

SEQ ID NO: 2396721 - RNA, 19 nt, Artificial Sequence
  Description of Artificial Sequence: Synthetic oligonucleotide
  Antisense strand to SEQ ID NO: 2396720
gagauucaaggauuguacc

SEQ ID NO: 2396722 - RNA, 19 nt, Artificial Sequence
  Description of Artificial Sequence: Synthetic oligonucleotide
  Sense strand starting at position 1461 of SEQ ID NO: 1886248
gcaacaucuuggguccagu

SEQ ID NO: 2396723 - RNA, 19 nt, Artificial Sequence
  Description of Artificial Sequence: Synthetic oligonucleotide
  Antisense strand to SEQ ID NO: 2396722
acuggacccaagauguugc

SEQ ID NO: 2396724 - RNA, 19 nt, Artificial Sequence
  Description of Artificial Sequence: Synthetic oligonucleotide
  Sense strand starting at position 1545 of SEQ ID NO: 1886248
aggaaacccuccuguccua

SEQ ID NO: 2396725 - RNA, 19 nt, Artificial Sequence
  Description of Artificial Sequence: Synthetic oligonucleotide
  Antisense strand to SEQ ID NO: 2396724
uaggacaggaggguuuccu

SEQ ID NO: 2396726 - RNA, 19 nt, Artificial Sequence
  Description of Artificial Sequence: Synthetic oligonucleotide
  Sense strand starting at position 1594 of SEQ ID NO: 1886248
ugacucauggcccaugaca

SEQ ID NO: 2396727 - RNA, 19 nt, Artificial Sequence
  Description of Artificial Sequence: Synthetic oligonucleotide
  Antisense strand to SEQ ID NO: 2396726
ugucaugggccaugaguca

SEQ ID NO: 2396728 - RNA, 19 nt, Artificial Sequence
  Description of Artificial Sequence: Synthetic oligonucleotide
  Sense strand starting at position 1653 of SEQ ID NO: 1886248
gcccuucugagcugaagag

SEQ ID NO: 2396729 - RNA, 19 nt, Artificial Sequence
  Description of Artificial Sequence: Synthetic oligonucleotide
  Antisense strand to SEQ ID NO: 2396728
cucuucagcucagaagggc

SEQ ID NO: 2396730 - RNA, 19 nt, Artificial Sequence
  Description of Artificial Sequence: Synthetic oligonucleotide
  Sense strand starting at position 1662 of SEQ ID NO: 1886248
agcugaagagcucacugaa

SEQ ID NO: 2396731 - RNA, 19 nt, Artificial Sequence
  Description of Artificial Sequence: Synthetic oligonucleotide
  Antisense strand to SEQ ID NO: 2396730
uucagugagcucuucagcu

SEQ ID NO: 2396732 - RNA, 19 nt, Artificial Sequence
  Description of Artificial Sequence: Synthetic oligonucleotide
  Sense strand starting at position 1775 of SEQ ID NO: 1886248
cugugcuucacggaggagu

SEQ ID NO: 2396733 - RNA, 19 nt, Artificial Sequence
  Description of Artificial Sequence: Synthetic oligonucleotide
  Antisense strand to SEQ ID NO: 2396732
acuccuccgugaagcacag

SEQ ID NO: 2396734 - RNA, 19 nt, Artificial Sequence
  Description of Artificial Sequence: Synthetic oligonucleotide
  Sense strand starting at position 1803 of SEQ ID NO: 1886248
ggguugggucccugugaga

SEQ ID NO: 2396735 - RNA, 19 nt, Artificial Sequence
  Description of Artificial Sequence: Synthetic oligonucleotide
  Antisense strand to SEQ ID NO: 2396734
ucucacagggacccaaccc

SEQ ID NO: 2396736 - RNA, 19 nt, Artificial Sequence
  Description of Artificial Sequence: Synthetic oligonucleotide
  Sense strand starting at position 1866 of SEQ ID NO: 1886248
cugccaggguccuugugau

SEQ ID NO: 2396737 - RNA, 19 nt, Artificial Sequence
  Description of Artificial Sequence: Synthetic oligonucleotide
  Antisense strand to SEQ ID NO: 2396736
aucacaaggacccuggcag

SEQ ID NO: 2396738 - RNA, 19 nt, Artificial Sequence
  Description of Artificial Sequence: Synthetic oligonucleotide
  Sense strand starting at position 2227 of SEQ ID NO: 1886248
augaaauacugaccuguca

SEQ ID NO: 2396739 - RNA, 19 nt, Artificial Sequence
  Description of Artificial Sequence: Synthetic oligonucleotide
  Antisense strand to SEQ ID NO: 2396738
ugacaggucaguauuucau

SEQ ID NO: 2396740 - RNA, 19 nt, Artificial Sequence
  Description of Artificial Sequence: Synthetic oligonucleotide
  Sense strand starting at position 2235 of SEQ ID NO: 1886248
cugaccugucauggacaca

SEQ ID NO: 2396741 - RNA, 19 nt, Artificial Sequence
  Description of Artificial Sequence: Synthetic oligonucleotide
  Antisense strand to SEQ ID NO: 2396740
uguguccaugacaggucag

SEQ ID NO: 2396742 - RNA, 19 nt, Artificial Sequence
  Description of Artificial Sequence: Synthetic oligonucleotide
  Sense strand starting at position 2320 of SEQ ID NO: 1886248
gcaagaugccugggaugug

SEQ ID NO: 2396743 - RNA, 19 nt, Artificial Sequence
  Description of Artificial Sequence: Synthetic oligonucleotide
  Antisense strand to SEQ ID NO: 2396742
cacaucccaggcaucuugc

SEQ ID NO: 2396744 - RNA, 19 nt, Artificial Sequence
  Description of Artificial Sequence: Synthetic oligonucleotide
  Sense strand starting at position 2549 of SEQ ID NO: 1886248
ccaagugcgcaucagaaau

SEQ ID NO: 2396745 - RNA, 19 nt, Artificial Sequence
  Description of Artificial Sequence: Synthetic oligonucleotide
  Antisense strand to SEQ ID NO: 2396744
auuucugaugcgcacuugg

SEQ ID NO: 2396746 - RNA, 19 nt, Artificial Sequence
  Description of Artificial Sequence: Synthetic oligonucleotide
  Sense strand starting at position 2802 of SEQ ID NO: 1886248
ggccaugcauccugacacu

SEQ ID NO: 2396747 - RNA, 19 nt, Artificial Sequence
  Description of Artificial Sequence: Synthetic oligonucleotide
  Antisense strand to SEQ ID NO: 2396746
agugucaggaugcauggcc

SEQ ID NO: 2396748 - RNA, 19 nt, Artificial Sequence
  Description of Artificial Sequence: Synthetic oligonucleotide
  Sense strand starting at position 2808 of SEQ ID NO: 1886248
gcauccugacacugaaacu

SEQ ID NO: 2396749 - RNA, 19 nt, Artificial Sequence
  Description of Artificial Sequence: Synthetic oligonucleotide
  Antisense strand to SEQ ID NO: 2396748
aguuucagugucaggaugc

SEQ ID NO: 2396750 - RNA, 19 nt, Artificial Sequence
  Description of Artificial Sequence: Synthetic oligonucleotide
  Sense strand starting at position 3038 of SEQ ID NO: 1886248
gggcgcgauccuugaaaca

SEQ ID NO: 2396751 - RNA, 19 nt, Artificial Sequence
  Description of Artificial Sequence: Synthetic oligonucleotide
  Antisense strand to SEQ ID NO: 2396750
uguuucaaggaucgcgccc

SEQ ID NO: 2396752 - RNA, 19 nt, Artificial Sequence
  Description of Artificial Sequence: Synthetic oligonucleotide
  Sense strand starting at position 3181 of SEQ ID NO: 1886248
ggcaguucuugaggccuga

SEQ ID NO: 2396753 - RNA, 19 nt, Artificial Sequence
  Description of Artificial Sequence: Synthetic oligonucleotide
  Antisense strand to SEQ ID NO: 2396752
ucaggccucaagaacugcc

SEQ ID NO: 2396754 - RNA, 19 nt, Artificial Sequence
  Description of Artificial Sequence: Synthetic oligonucleotide
  Sense strand starting at position 3252 of SEQ ID NO: 1886248
acccuuugcugcuugaaac

SEQ ID NO: 2396755 - RNA, 19 nt, Artificial Sequence
  Description of Artificial Sequence: Synthetic oligonucleotide
  Antisense strand to SEQ ID NO: 2396754
guuucaagcagcaaagggu

SEQ ID NO: 2396756 - RNA, 19 nt, Artificial Sequence
  Description of Artificial Sequence: Synthetic oligonucleotide
  Sense strand starting at position 3253 of SEQ ID NO: 1886248
cccuuugcugcuugaaaca

SEQ ID NO: 2396757 - RNA, 19 nt, Artificial Sequence
  Description of Artificial Sequence: Synthetic oligonucleotide
  Antisense strand to SEQ ID NO: 2396756
uguuucaagcagcaaaggg

SEQ ID NO: 2396758 - RNA, 19 nt, Artificial Sequence
  Description of Artificial Sequence: Synthetic oligonucleotide
  Sense strand starting at position 3296 of SEQ ID NO: 1886248
gaagauguccuccaugggu

SEQ ID NO: 2396759 - RNA, 19 nt, Artificial Sequence
  Description of Artificial Sequence: Synthetic oligonucleotide
  Antisense strand to SEQ ID NO: 2396758
acccauggaggacaucuuc

SEQ ID NO: 2396760 - RNA, 19 nt, Artificial Sequence
  Description of Artificial Sequence: Synthetic oligonucleotide
  Sense strand starting at position 126 of SEQ ID NO: 1886249
auauaagguucucgacacu

SEQ ID NO: 2396761 - RNA, 19 nt, Artificial Sequence
  Description of Artificial Sequence: Synthetic oligonucleotide
  Antisense strand to SEQ ID NO: 2396760
agugucgagaaccuuauau

SEQ ID NO: 2396762 - RNA, 19 nt, Artificial Sequence
  Description of Artificial Sequence: Synthetic oligonucleotide
  Sense strand starting at position 183 of SEQ ID NO: 1886249
ccagcaggaccaugauaua

SEQ ID NO: 2396763 - RNA, 19 nt, Artificial Sequence
  Description of Artificial Sequence: Synthetic oligonucleotide
  Antisense strand to SEQ ID NO: 2396762
uauaucaugguccugcugg

SEQ ID NO: 2396764 - RNA, 19 nt, Artificial Sequence
  Description of Artificial Sequence: Synthetic oligonucleotide
  Sense strand starting at position 411 of SEQ ID NO: 1886249
auggguucuauguggaaca

SEQ ID NO: 2396765 - RNA, 19 nt, Artificial Sequence
  Description of Artificial Sequence: Synthetic oligonucleotide
  Antisense strand to SEQ ID NO: 2396764
uguuccacauagaacccau

SEQ ID NO: 2396766 - RNA, 19 nt, Artificial Sequence
  Description of Artificial Sequence: Synthetic oligonucleotide
  Sense strand starting at position 577 of SEQ ID NO: 1886249
ccugcaugaucccaggguu

SEQ ID NO: 2396767 - RNA, 19 nt, Artificial Sequence
  Description of Artificial Sequence: Synthetic oligonucleotide
  Antisense strand to SEQ ID NO: 2396766
aacccugggaucaugcagg

SEQ ID NO: 2396768 - RNA, 19 nt, Artificial Sequence
  Description of Artificial Sequence: Synthetic oligonucleotide
  Sense strand starting at position 868 of SEQ ID NO: 1886249
gguaucuucucguuuccuu

SEQ ID NO: 2396769 - RNA, 19 nt, Artificial Sequence
  Description of Artificial Sequence: Synthetic oligonucleotide
  Antisense strand to SEQ ID NO: 2396768
aaggaaacgagaagauacc

SEQ ID NO: 2396770 - RNA, 19 nt, Artificial Sequence
  Description of Artificial Sequence: Synthetic oligonucleotide
  Sense strand starting at position 938 of SEQ ID NO: 1886249
guggcaaauucccgguaca

SEQ ID NO: 2396771 - RNA, 19 nt, Artificial Sequence
  Description of Artificial Sequence: Synthetic oligonucleotide
  Antisense strand to SEQ ID NO: 2396770
uguaccgggaauuugccac

SEQ ID NO: 2396772 - RNA, 19 nt, Artificial Sequence
  Description of Artificial Sequence: Synthetic oligonucleotide
  Sense strand starting at position 939 of SEQ ID NO: 1886249
uggcaaauucccgguacaa

SEQ ID NO: 2396773 - RNA, 19 nt, Artificial Sequence
  Description of Artificial Sequence: Synthetic oligonucleotide
  Antisense strand to SEQ ID NO: 2396772
uuguaccgggaauuugcca

SEQ ID NO: 2396774 - RNA, 19 nt, Artificial Sequence
  Description of Artificial Sequence: Synthetic oligonucleotide
  Sense strand starting at position 941 of SEQ ID NO: 1886249
gcaaauucccgguacaaca

SEQ ID NO: 2396775 - RNA, 19 nt, Artificial Sequence
  Description of Artificial Sequence: Synthetic oligonucleotide
  Antisense strand to SEQ ID NO: 2396774
uguuguaccgggaauuugc

SEQ ID NO: 2396776 - RNA, 19 nt, Artificial Sequence
  Description of Artificial Sequence: Synthetic oligonucleotide
  Sense strand starting at position 984 of SEQ ID NO: 1886249
ucagaaugccacuguuacu

SEQ ID NO: 2396777 - RNA, 19 nt, Artificial Sequence
  Description of Artificial Sequence: Synthetic oligonucleotide
  Antisense strand to SEQ ID NO: 2396776
aguaacaguggcauucuga

SEQ ID NO: 2396778 - RNA, 19 nt, Artificial Sequence
  Description of Artificial Sequence: Synthetic oligonucleotide
  Sense strand starting at position 1427 of SEQ ID NO: 1886249
cuuugcuaucuggaccauu

SEQ ID NO: 2396779 - RNA, 19 nt, Artificial Sequence
  Description of Artificial Sequence: Synthetic oligonucleotide
  Antisense strand to SEQ ID NO: 2396778
aaugguccagauagcaaag

SEQ ID NO: 2396780 - RNA, 19 nt, Artificial Sequence
  Description of Artificial Sequence: Synthetic oligonucleotide
  Sense strand starting at position 1444 of SEQ ID NO: 1886249
uugucauuccugcagaucu

SEQ ID NO: 2396781 - RNA, 19 nt, Artificial Sequence
  Description of Artificial Sequence: Synthetic oligonucleotide
  Antisense strand to SEQ ID NO: 2396780
agaucugcaggaaugacaa

SEQ ID NO: 2396782 - RNA, 19 nt, Artificial Sequence
  Description of Artificial Sequence: Synthetic oligonucleotide
  Sense strand starting at position 1469 of SEQ ID NO: 1886249
aaggcauccuccucaggua

SEQ ID NO: 2396783 - RNA, 19 nt, Artificial Sequence
  Description of Artificial Sequence: Synthetic oligonucleotide
  Antisense strand to SEQ ID NO: 2396782
uaccugaggaggaugccuu

SEQ ID NO: 2396784 - RNA, 19 nt, Artificial Sequence
  Description of Artificial Sequence: Synthetic oligonucleotide
  Sense strand starting at position 1470 of SEQ ID NO: 1886249
aggcauccuccucagguaa

SEQ ID NO: 2396785 - RNA, 19 nt, Artificial Sequence
  Description of Artificial Sequence: Synthetic oligonucleotide
  Antisense strand to SEQ ID NO: 2396784
uuaccugaggaggaugccu

SEQ ID NO: 2396786 - RNA, 19 nt, Artificial Sequence
  Description of Artificial Sequence: Synthetic oligonucleotide
  Sense strand starting at position 1472 of SEQ ID NO: 1886249
gcauccuccucagguaaga

SEQ ID NO: 2396787 - RNA, 19 nt, Artificial Sequence
  Description of Artificial Sequence: Synthetic oligonucleotide
  Antisense strand to SEQ ID NO: 2396786
ucuuaccugaggaggaugc

SEQ ID NO: 2396788 - RNA, 19 nt, Artificial Sequence
  Description of Artificial Sequence: Synthetic oligonucleotide
  Sense strand starting at position 1483 of SEQ ID NO: 1886249
agguaagauucccaaggaa

SEQ ID NO: 2396789 - RNA, 19 nt, Artificial Sequence
  Description of Artificial Sequence: Synthetic oligonucleotide
  Antisense strand to SEQ ID NO: 2396788
uuccuugggaaucuuaccu

SEQ ID NO: 2396790 - RNA, 19 nt, Artificial Sequence
  Description of Artificial Sequence: Synthetic oligonucleotide
  Sense strand starting at position 1576 of SEQ ID NO: 1886249
aagucugacccucagugaa

SEQ ID NO: 2396791 - RNA, 19 nt, Artificial Sequence
  Description of Artificial Sequence: Synthetic oligonucleotide
  Antisense strand to SEQ ID NO: 2396790
uucacugagggucagacuu

SEQ ID NO: 2396792 - RNA, 19 nt, Artificial Sequence
  Description of Artificial Sequence: Synthetic oligonucleotide
  Sense strand starting at position 2150 of SEQ ID NO: 1886249
guccauugguccugaugca

SEQ ID NO: 2396793 - RNA, 19 nt, Artificial Sequence
  Description of Artificial Sequence: Synthetic oligonucleotide
  Antisense strand to SEQ ID NO: 2396792
ugcaucaggaccaauggac

SEQ ID NO: 2396794 - RNA, 19 nt, Artificial Sequence
  Description of Artificial Sequence: Synthetic oligonucleotide
  Sense strand starting at position 2151 of SEQ ID NO: 1886249
uccauugguccugaugcaa

SEQ ID NO: 2396795 - RNA, 19 nt, Artificial Sequence
  Description of Artificial Sequence: Synthetic oligonucleotide
  Antisense strand to SEQ ID NO: 2396794
uugcaucaggaccaaugga

SEQ ID NO: 2396796 - RNA, 19 nt, Artificial Sequence
  Description of Artificial Sequence: Synthetic oligonucleotide
  Sense strand starting at position 2291 of SEQ ID NO: 1886249
cugaccugucacggauaca

SEQ ID NO: 2396797 - RNA, 19 nt, Artificial Sequence
  Description of Artificial Sequence: Synthetic oligonucleotide
  Antisense strand to SEQ ID NO: 2396796
uguauccgugacaggucag

SEQ ID NO: 2396798 - RNA, 19 nt, Artificial Sequence
  Description of Artificial Sequence: Synthetic oligonucleotide
  Sense strand starting at position 2622 of SEQ ID NO: 1886249
gaaaucacagccuggagua

SEQ ID NO: 2396799 - RNA, 19 nt, Artificial Sequence
  Description of Artificial Sequence: Synthetic oligonucleotide
  Antisense strand to SEQ ID NO: 2396798
uacuccaggcugugauuuc

SEQ ID NO: 2396800 - RNA, 19 nt, Artificial Sequence
  Description of Artificial Sequence: Synthetic oligonucleotide
  Sense strand starting at position 2807 of SEQ ID NO: 1886249
ggcagcaaauucucaggau

SEQ ID NO: 2396801 - RNA, 19 nt, Artificial Sequence
  Description of Artificial Sequence: Synthetic oligonucleotide
  Antisense strand to SEQ ID NO: 2396800
auccugagaauuugcugcc

SEQ ID NO: 2396802 - RNA, 19 nt, Artificial Sequence
  Description of Artificial Sequence: Synthetic oligonucleotide
  Sense strand starting at position 2918 of SEQ ID NO: 1886249
gucgacuuggccuaaagcu

SEQ ID NO: 2396803 - RNA, 19 nt, Artificial Sequence
  Description of Artificial Sequence: Synthetic oligonucleotide
  Antisense strand to SEQ ID NO: 2396802
agcuuuaggccaagucgac

SEQ ID NO: 2396804 - RNA, 19 nt, Artificial Sequence
  Description of Artificial Sequence: Synthetic oligonucleotide
  Sense strand starting at position 3046 of SEQ ID NO: 1886249
ugggaugguccauagcuca

SEQ ID NO: 2396805 - RNA, 19 nt, Artificial Sequence
  Description of Artificial Sequence: Synthetic oligonucleotide
  Antisense strand to SEQ ID NO: 2396804
ugagcuauggaccauccca

SEQ ID NO: 2396806 - RNA, 19 nt, Artificial Sequence
  Description of Artificial Sequence: Synthetic oligonucleotide
  Sense strand starting at position 3084 of SEQ ID NO: 1886249
gggacauaguuggguacaa

SEQ ID NO: 2396807 - RNA, 19 nt, Artificial Sequence
  Description of Artificial Sequence: Synthetic oligonucleotide
  Antisense strand to SEQ ID NO: 2396806
uuguacccaacuauguccc

SEQ ID NO: 2396808 - RNA, 19 nt, Artificial Sequence
  Description of Artificial Sequence: Synthetic oligonucleotide
  Sense strand starting at position 3085 of SEQ ID NO: 1886249
ggacauaguuggguacaau

SEQ ID NO: 2396809 - RNA, 19 nt, Artificial Sequence
  Description of Artificial Sequence: Synthetic oligonucleotide
  Antisense strand to SEQ ID NO: 2396808
auuguacccaacuaugucc

SEQ ID NO: 2396810 - RNA, 19 nt, Artificial Sequence
  Description of Artificial Sequence: Synthetic oligonucleotide
  Sense strand starting at position 3094 of SEQ ID NO: 1886249
uggguacaauccuugaauc

SEQ ID NO: 2396811 - RNA, 19 nt, Artificial Sequence
  Description of Artificial Sequence: Synthetic oligonucleotide
  Antisense strand to SEQ ID NO: 2396810
gauucaaggauuguaccca

SEQ ID NO: 2396812 - RNA, 19 nt, Artificial Sequence
  Description of Artificial Sequence: Synthetic oligonucleotide
  Sense strand starting at position 3095 of SEQ ID NO: 1886249
ggguacaauccuugaaucu

SEQ ID NO: 2396813 - RNA, 19 nt, Artificial Sequence
  Description of Artificial Sequence: Synthetic oligonucleotide
  Antisense strand to SEQ ID NO: 2396812
agauucaaggauuguaccc

SEQ ID NO: 2396814 - RNA, 19 nt, Artificial Sequence
  Description of Artificial Sequence: Synthetic oligonucleotide
  Sense strand starting at position 3096 of SEQ ID NO: 1886249
gguacaauccuugaaucuc

SEQ ID NO: 2396815 - RNA, 19 nt, Artificial Sequence
  Description of Artificial Sequence: Synthetic oligonucleotide
  Antisense strand to SEQ ID NO: 2396814
gagauucaaggauuguacc

SEQ ID NO: 2396816 - RNA, 19 nt, Artificial Sequence
  Description of Artificial Sequence: Synthetic oligonucleotide
  Sense strand starting at position 3339 of SEQ ID NO: 1886249
gcaacaucuuggguccagu

SEQ ID NO: 2396817 - RNA, 19 nt, Artificial Sequence
  Description of Artificial Sequence: Synthetic oligonucleotide
  Antisense strand to SEQ ID NO: 2396816
acuggacccaagauguugc

SEQ ID NO: 2396818 - RNA, 19 nt, Artificial Sequence
  Description of Artificial Sequence: Synthetic oligonucleotide
  Sense strand starting at position 3423 of SEQ ID NO: 1886249
aggaaacccuccuguccua

SEQ ID NO: 2396819 - RNA, 19 nt, Artificial Sequence
  Description of Artificial Sequence: Synthetic oligonucleotide
  Antisense strand to SEQ ID NO: 2396818
uaggacaggaggguuuccu

SEQ ID NO: 2396820 - RNA, 19 nt, Artificial Sequence
  Description of Artificial Sequence: Synthetic oligonucleotide
  Sense strand starting at position 3472 of SEQ ID NO: 1886249
ugacucauggcccaugaca

SEQ ID NO: 2396821 - RNA, 19 nt, Artificial Sequence
  Description of Artificial Sequence: Synthetic oligonucleotide
  Antisense strand to SEQ ID NO: 2396820
ugucaugggccaugaguca

SEQ ID NO: 2396822 - RNA, 19 nt, Artificial Sequence
  Description of Artificial Sequence: Synthetic oligonucleotide
  Sense strand starting at position 3531 of SEQ ID NO: 1886249
gcccuucugagcugaagag

SEQ ID NO: 2396823 - RNA, 19 nt, Artificial Sequence
  Description of Artificial Sequence: Synthetic oligonucleotide
  Antisense strand to SEQ ID NO: 2396822
cucuucagcucagaagggc

SEQ ID NO: 2396824 - RNA, 19 nt, Artificial Sequence
  Description of Artificial Sequence: Synthetic oligonucleotide
  Sense strand starting at position 3540 of SEQ ID NO: 1886249
agcugaagagcucacugaa

SEQ ID NO: 2396825 - RNA, 19 nt, Artificial Sequence
  Description of Artificial Sequence: Synthetic oligonucleotide
  Antisense strand to SEQ ID NO: 2396824
uucagugagcucuucagcu

SEQ ID NO: 2396826 - RNA, 19 nt, Artificial Sequence
  Description of Artificial Sequence: Synthetic oligonucleotide
  Sense strand starting at position 3653 of SEQ ID NO: 1886249
cugugcuucacggaggagu

SEQ ID NO: 2396827 - RNA, 19 nt, Artificial Sequence
  Description of Artificial Sequence: Synthetic oligonucleotide
  Antisense strand to SEQ ID NO: 2396826
acuccuccgugaagcacag

SEQ ID NO: 2396828 - RNA, 19 nt, Artificial Sequence
  Description of Artificial Sequence: Synthetic oligonucleotide
  Sense strand starting at position 3681 of SEQ ID NO: 1886249
ggguugggucccugugaga

SEQ ID NO: 2396829 - RNA, 19 nt, Artificial Sequence
  Description of Artificial Sequence: Synthetic oligonucleotide
  Antisense strand to SEQ ID NO: 2396828
ucucacagggacccaaccc

SEQ ID NO: 2396830 - RNA, 19 nt, Artificial Sequence
  Description of Artificial Sequence: Synthetic oligonucleotide
  Sense strand starting at position 3744 of SEQ ID NO: 1886249
cugccaggguccuugugau

SEQ ID NO: 2396831 - RNA, 19 nt, Artificial Sequence
  Description of Artificial Sequence: Synthetic oligonucleotide
  Antisense strand to SEQ ID NO: 2396830
aucacaaggacccuggcag

SEQ ID NO: 2396832 - RNA, 19 nt, Artificial Sequence
  Description of Artificial Sequence: Synthetic oligonucleotide
  Sense strand starting at position 321 of SEQ ID NO: 1886250
gaagacaaguguccaaacu

SEQ ID NO: 2396833 - RNA, 19 nt, Artificial Sequence
  Description of Artificial Sequence: Synthetic oligonucleotide
  Antisense strand to SEQ ID NO: 2396832
aguuuggacacuugucuuc

SEQ ID NO: 2396834 - RNA, 19 nt, Artificial Sequence
  Description of Artificial Sequence: Synthetic oligonucleotide
  Sense strand starting at position 676 of SEQ ID NO: 1886250
cgcugaagaccugguaguu

SEQ ID NO: 2396835 - RNA, 19 nt, Artificial Sequence
  Description of Artificial Sequence: Synthetic oligonucleotide
  Antisense strand to SEQ ID NO: 2396834
aacuaccaggucuucagcg

SEQ ID NO: 2396836 - RNA, 19 nt, Artificial Sequence
  Description of Artificial Sequence: Synthetic oligonucleotide
  Sense strand starting at position 754 of SEQ ID NO: 1886250
gaaaucauagccuggaguu

SEQ ID NO: 2396837 - RNA, 19 nt, Artificial Sequence
  Description of Artificial Sequence: Synthetic oligonucleotide
  Antisense strand to SEQ ID NO: 2396836
aacuccaggcuaugauuuc

SEQ ID NO: 2396838 - RNA, 19 nt, Artificial Sequence
  Description of Artificial Sequence: Synthetic oligonucleotide
  Sense strand starting at position 755 of SEQ ID NO: 1886250
aaaucauagccuggaguug

SEQ ID NO: 2396839 - RNA, 19 nt, Artificial Sequence
  Description of Artificial Sequence: Synthetic oligonucleotide
  Antisense strand to SEQ ID NO: 2396838
caacuccaggcuaugauuu

SEQ ID NO: 2396840 - RNA, 19 nt, Artificial Sequence
  Description of Artificial Sequence: Synthetic oligonucleotide
  Sense strand starting at position 927 of SEQ ID NO: 1886250
gaagaagcuugagugacaa

SEQ ID NO: 2396841 - RNA, 19 nt, Artificial Sequence
  Description of Artificial Sequence: Synthetic oligonucleotide
  Antisense strand to SEQ ID NO: 2396840
uugucacucaagcuucuuc

SEQ ID NO: 2396842 - RNA, 19 nt, Artificial Sequence
  Description of Artificial Sequence: Synthetic oligonucleotide
  Sense strand starting at position 939 of SEQ ID NO: 1886250
gugacaaauucccaggaca

SEQ ID NO: 2396843 - RNA, 19 nt, Artificial Sequence
  Description of Artificial Sequence: Synthetic oligonucleotide
  Antisense strand to SEQ ID NO: 2396842
uguccugggaauuugucac

SEQ ID NO: 2396844 - RNA, 19 nt, Artificial Sequence
  Description of Artificial Sequence: Synthetic oligonucleotide
  Sense strand starting at position 1001 of SEQ ID NO: 1886250
ccagacauuugauguugga

SEQ ID NO: 2396845 - RNA, 19 nt, Artificial Sequence
  Description of Artificial Sequence: Synthetic oligonucleotide
  Antisense strand to SEQ ID NO: 2396844
uccaacaucaaaugucugg

SEQ ID NO: 2396846 - RNA, 19 nt, Artificial Sequence
  Description of Artificial Sequence: Synthetic oligonucleotide
  Sense strand starting at position 1227 of SEQ ID NO: 1886250
gggugcgauccuugaaucu

SEQ ID NO: 2396847 - RNA, 19 nt, Artificial Sequence
  Description of Artificial Sequence: Synthetic oligonucleotide
  Antisense strand to SEQ ID NO: 2396846
agauucaaggaucgcaccc

SEQ ID NO: 2396848 - RNA, 19 nt, Artificial Sequence
  Description of Artificial Sequence: Synthetic oligonucleotide
  Sense strand starting at position 1353 of SEQ ID NO: 1886250
ugggcaauccuugaggucu

SEQ ID NO: 2396849 - RNA, 19 nt, Artificial Sequence
  Description of Artificial Sequence: Synthetic oligonucleotide
  Antisense strand to SEQ ID NO: 2396848
agaccucaaggauugccca

SEQ ID NO: 2396850 - RNA, 19 nt, Artificial Sequence
  Description of Artificial Sequence: Synthetic oligonucleotide
  Sense strand starting at position 1355 of SEQ ID NO: 1886250
ggcaauccuugaggucuga

SEQ ID NO: 2396851 - RNA, 19 nt, Artificial Sequence
  Description of Artificial Sequence: Synthetic oligonucleotide
  Antisense strand to SEQ ID NO: 2396850
ucagaccucaaggauugcc

SEQ ID NO: 2396852 - RNA, 19 nt, Artificial Sequence
  Description of Artificial Sequence: Synthetic oligonucleotide
  Sense strand starting at position 1380 of SEQ ID NO: 1886250
caccgauucucagcuagga

SEQ ID NO: 2396853 - RNA, 19 nt, Artificial Sequence
  Description of Artificial Sequence: Synthetic oligonucleotide
  Antisense strand to SEQ ID NO: 2396852
uccuagcugagaaucggug

SEQ ID NO: 2396854 - RNA, 19 nt, Artificial Sequence
  Description of Artificial Sequence: Synthetic oligonucleotide
  Sense strand starting at position 1846 of SEQ ID NO: 1886250
ccuugaagucuccagccua

SEQ ID NO: 2396855 - RNA, 19 nt, Artificial Sequence
  Description of Artificial Sequence: Synthetic oligonucleotide
  Antisense strand to SEQ ID NO: 2396854
uaggcuggagacuucaagg

SEQ ID NO: 2396856 - RNA, 19 nt, Artificial Sequence
  Description of Artificial Sequence: Synthetic oligonucleotide
  Sense strand starting at position 1989 of SEQ ID NO: 1886250
auauaagguucucgacacu

SEQ ID NO: 2396857 - RNA, 19 nt, Artificial Sequence
  Description of Artificial Sequence: Synthetic oligonucleotide
  Antisense strand to SEQ ID NO: 2396856
agugucgagaaccuuauau

SEQ ID NO: 2396858 - RNA, 19 nt, Artificial Sequence
  Description of Artificial Sequence: Synthetic oligonucleotide
  Sense strand starting at position 2046 of SEQ ID NO: 1886250
ccagcaggaccaugauaua

SEQ ID NO: 2396859 - RNA, 19 nt, Artificial Sequence
  Description of Artificial Sequence: Synthetic oligonucleotide
  Antisense strand to SEQ ID NO: 2396858
uauaucaugguccugcugg

SEQ ID NO: 2396860 - RNA, 19 nt, Artificial Sequence
  Description of Artificial Sequence: Synthetic oligonucleotide
  Sense strand starting at position 2274 of SEQ ID NO: 1886250
auggguucuauguggaaca

SEQ ID NO: 2396861 - RNA, 19 nt, Artificial Sequence
  Description of Artificial Sequence: Synthetic oligonucleotide
  Antisense strand to SEQ ID NO: 2396860
uguuccacauagaacccau

SEQ ID NO: 2396862 - RNA, 19 nt, Artificial Sequence
  Description of Artificial Sequence: Synthetic oligonucleotide
  Sense strand starting at position 2440 of SEQ ID NO: 1886250
ccugcaugaucccaggguu

SEQ ID NO: 2396863 - RNA, 19 nt, Artificial Sequence
  Description of Artificial Sequence: Synthetic oligonucleotide
  Antisense strand to SEQ ID NO: 2396862
aacccugggaucaugcagg

SEQ ID NO: 2396864 - RNA, 19 nt, Artificial Sequence
  Description of Artificial Sequence: Synthetic oligonucleotide
  Sense strand starting at position 2731 of SEQ ID NO: 1886250
gguaucuucucguuuccuu

SEQ ID NO: 2396865 - RNA, 19 nt, Artificial Sequence
  Description of Artificial Sequence: Synthetic oligonucleotide
  Antisense strand to SEQ ID NO: 2396864
aaggaaacgagaagauacc

SEQ ID NO: 2396866 - RNA, 19 nt, Artificial Sequence
  Description of Artificial Sequence: Synthetic oligonucleotide
  Sense strand starting at position 2801 of SEQ ID NO: 1886250
guggcaaauucccgguaca

SEQ ID NO: 2396867 - RNA, 19 nt, Artificial Sequence
  Description of Artificial Sequence: Synthetic oligonucleotide
  Antisense strand to SEQ ID NO: 2396866
uguaccgggaauuugccac

SEQ ID NO: 2396868 - RNA, 19 nt, Artificial Sequence
  Description of Artificial Sequence: Synthetic oligonucleotide
  Sense strand starting at position 2802 of SEQ ID NO: 1886250
uggcaaauucccgguacaa

SEQ ID NO: 2396869 - RNA, 19 nt, Artificial Sequence
  Description of Artificial Sequence: Synthetic oligonucleotide
  Antisense strand to SEQ ID NO: 2396868
uuguaccgggaauuugcca

SEQ ID NO: 2396870 - RNA, 19 nt, Artificial Sequence
  Description of Artificial Sequence: Synthetic oligonucleotide
  Sense strand starting at position 2804 of SEQ ID NO: 1886250
gcaaauucccgguacaaca

SEQ ID NO: 2396871 - RNA, 19 nt, Artificial Sequence
  Description of Artificial Sequence: Synthetic oligonucleotide
  Antisense strand to SEQ ID NO: 2396870
uguuguaccgggaauuugc

SEQ ID NO: 2396872 - RNA, 19 nt, Artificial Sequence
  Description of Artificial Sequence: Synthetic oligonucleotide
  Sense strand starting at position 2847 of SEQ ID NO: 1886250
ucagaaugccacuguuacu

SEQ ID NO: 2396873 - RNA, 19 nt, Artificial Sequence
  Description of Artificial Sequence: Synthetic oligonucleotide
  Antisense strand to SEQ ID NO: 2396872
aguaacaguggcauucuga

SEQ ID NO: 2396874 - RNA, 19 nt, Artificial Sequence
  Description of Artificial Sequence: Synthetic oligonucleotide
  Sense strand starting at position 3290 of SEQ ID NO: 1886250
cuuugcuaucuggaccauu

SEQ ID NO: 2396875 - RNA, 19 nt, Artificial Sequence
  Description of Artificial Sequence: Synthetic oligonucleotide
  Antisense strand to SEQ ID NO: 2396874
aaugguccagauagcaaag

SEQ ID NO: 2396876 - RNA, 19 nt, Artificial Sequence
  Description of Artificial Sequence: Synthetic oligonucleotide
  Sense strand starting at position 3307 of SEQ ID NO: 1886250
uugucauuccugcagaucu

SEQ ID NO: 2396877 - RNA, 19 nt, Artificial Sequence
  Description of Artificial Sequence: Synthetic oligonucleotide
  Antisense strand to SEQ ID NO: 2396876
agaucugcaggaaugacaa

SEQ ID NO: 2396878 - RNA, 19 nt, Artificial Sequence
  Description of Artificial Sequence: Synthetic oligonucleotide
  Sense strand starting at position 3332 of SEQ ID NO: 1886250
aaggcauccuccucaggua

SEQ ID NO: 2396879 - RNA, 19 nt, Artificial Sequence
  Description of Artificial Sequence: Synthetic oligonucleotide
  Antisense strand to SEQ ID NO: 2396878
uaccugaggaggaugccuu

SEQ ID NO: 2396880 - RNA, 19 nt, Artificial Sequence
  Description of Artificial Sequence: Synthetic oligonucleotide
  Sense strand starting at position 3333 of SEQ ID NO: 1886250
aggcauccuccucagguaa

SEQ ID NO: 2396881 - RNA, 19 nt, Artificial Sequence
  Description of Artificial Sequence: Synthetic oligonucleotide
  Antisense strand to SEQ ID NO: 2396880
uuaccugaggaggaugccu

SEQ ID NO: 2396882 - RNA, 19 nt, Artificial Sequence
  Description of Artificial Sequence: Synthetic oligonucleotide
  Sense strand starting at position 3335 of SEQ ID NO: 1886250
gcauccuccucagguaaga

SEQ ID NO: 2396883 - RNA, 19 nt, Artificial Sequence
  Description of Artificial Sequence: Synthetic oligonucleotide
  Antisense strand to SEQ ID NO: 2396882
ucuuaccugaggaggaugc

SEQ ID NO: 2396884 - RNA, 19 nt, Artificial Sequence
  Description of Artificial Sequence: Synthetic oligonucleotide
  Sense strand starting at position 3346 of SEQ ID NO: 1886250
agguaagauucccaaggaa

SEQ ID NO: 2396885 - RNA, 19 nt, Artificial Sequence
  Description of Artificial Sequence: Synthetic oligonucleotide
  Antisense strand to SEQ ID NO: 2396884
uuccuugggaaucuuaccu

SEQ ID NO: 2396886 - RNA, 19 nt, Artificial Sequence
  Description of Artificial Sequence: Synthetic oligonucleotide
  Sense strand starting at position 3439 of SEQ ID NO: 1886250
aagucugacccucagugaa

SEQ ID NO: 2396887 - RNA, 19 nt, Artificial Sequence
  Description of Artificial Sequence: Synthetic oligonucleotide
  Antisense strand to SEQ ID NO: 2396886
uucacugagggucagacuu

SEQ ID NO: 2396888 - RNA, 19 nt, Artificial Sequence
  Description of Artificial Sequence: Synthetic oligonucleotide
  Sense strand starting at position 121 of SEQ ID NO: 1886251
uggcccuguucucaucauu

SEQ ID NO: 2396889 - RNA, 19 nt, Artificial Sequence
  Description of Artificial Sequence: Synthetic oligonucleotide
  Antisense strand to SEQ ID NO: 2396888
aaugaugagaacagggcca

SEQ ID NO: 2396890 - RNA, 19 nt, Artificial Sequence
  Description of Artificial Sequence: Synthetic oligonucleotide
  Sense strand starting at position 519 of SEQ ID NO: 1886251
gcaagaugccuaggcugua

SEQ ID NO: 2396891 - RNA, 19 nt, Artificial Sequence
  Description of Artificial Sequence: Synthetic oligonucleotide
  Antisense strand to SEQ ID NO: 2396890
uacagccuaggcaucuugc

SEQ ID NO: 2396892 - RNA, 19 nt, Artificial Sequence
  Description of Artificial Sequence: Synthetic oligonucleotide
  Sense strand starting at position 944 of SEQ ID NO: 1886251
guggcaaauucccuugaca

SEQ ID NO: 2396893 - RNA, 19 nt, Artificial Sequence
  Description of Artificial Sequence: Synthetic oligonucleotide
  Antisense strand to SEQ ID NO: 2396892
ugucaagggaauuugccac

SEQ ID NO: 2396894 - RNA, 19 nt, Artificial Sequence
  Description of Artificial Sequence: Synthetic oligonucleotide
  Sense strand starting at position 946 of SEQ ID NO: 1886251
ggcaaauucccuugacagc

SEQ ID NO: 2396895 - RNA, 19 nt, Artificial Sequence
  Description of Artificial Sequence: Synthetic oligonucleotide
  Antisense strand to SEQ ID NO: 2396894
gcugucaagggaauuugcc

SEQ ID NO: 2396896 - RNA, 19 nt, Artificial Sequence
  Description of Artificial Sequence: Synthetic oligonucleotide
  Sense strand starting at position 947 of SEQ ID NO: 1886251
gcaaauucccuugacagca

SEQ ID NO: 2396897 - RNA, 19 nt, Artificial Sequence
  Description of Artificial Sequence: Synthetic oligonucleotide
  Antisense strand to SEQ ID NO: 2396896
ugcugucaagggaauuugc

SEQ ID NO: 2396898 - RNA, 19 nt, Artificial Sequence
  Description of Artificial Sequence: Synthetic oligonucleotide
  Sense strand starting at position 1099 of SEQ ID NO: 1886251
gagcucagucuugacccaa

SEQ ID NO: 2396899 - RNA, 19 nt, Artificial Sequence
  Description of Artificial Sequence: Synthetic oligonucleotide
  Antisense strand to SEQ ID NO: 2396898
uugggucaagacugagcuc

SEQ ID NO: 2396900 - RNA, 19 nt, Artificial Sequence
  Description of Artificial Sequence: Synthetic oligonucleotide
  Sense strand starting at position 1215 of SEQ ID NO: 1886251
ggagcauuccuugaaucuu

SEQ ID NO: 2396901 - RNA, 19 nt, Artificial Sequence
  Description of Artificial Sequence: Synthetic oligonucleotide
  Antisense strand to SEQ ID NO: 2396900
aagauucaaggaaugcucc

SEQ ID NO: 2396902 - RNA, 19 nt, Artificial Sequence
  Description of Artificial Sequence: Synthetic oligonucleotide
  Sense strand starting at position 1280 of SEQ ID NO: 1886251
agagaacuccaguguaacc

SEQ ID NO: 2396903 - RNA, 19 nt, Artificial Sequence
  Description of Artificial Sequence: Synthetic oligonucleotide
  Antisense strand to SEQ ID NO: 2396902
gguuacacuggaguucucu

SEQ ID NO: 2396904 - RNA, 19 nt, Artificial Sequence
  Description of Artificial Sequence: Synthetic oligonucleotide
  Sense strand starting at position 1346 of SEQ ID NO: 1886251
gacaguacuccaggccuga

SEQ ID NO: 2396905 - RNA, 19 nt, Artificial Sequence
  Description of Artificial Sequence: Synthetic oligonucleotide
  Antisense strand to SEQ ID NO: 2396904
ucaggccuggaguacuguc

SEQ ID NO: 2396906 - RNA, 19 nt, Artificial Sequence
  Description of Artificial Sequence: Synthetic oligonucleotide
  Sense strand starting at position 1362 of SEQ ID NO: 1886251
ugagcuguccaccgaguuu

SEQ ID NO: 2396907 - RNA, 19 nt, Artificial Sequence
  Description of Artificial Sequence: Synthetic oligonucleotide
  Antisense strand to SEQ ID NO: 2396906
aaacucgguggacagcuca

SEQ ID NO: 2396908 - RNA, 19 nt, Artificial Sequence
  Description of Artificial Sequence: Synthetic oligonucleotide
  Sense strand starting at position 1460 of SEQ ID NO: 1886251
agaugugcuccuuggguca

SEQ ID NO: 2396909 - RNA, 19 nt, Artificial Sequence
  Description of Artificial Sequence: Synthetic oligonucleotide
  Antisense strand to SEQ ID NO: 2396908
ugacccaaggagcacaucu

SEQ ID NO: 2396910 - RNA, 19 nt, Artificial Sequence
  Description of Artificial Sequence: Synthetic oligonucleotide
  Sense strand starting at position 1462 of SEQ ID NO: 1886251
augugcuccuugggucaga

SEQ ID NO: 2396911 - RNA, 19 nt, Artificial Sequence
  Description of Artificial Sequence: Synthetic oligonucleotide
  Antisense strand to SEQ ID NO: 2396910
ucugacccaaggagcacau

SEQ ID NO: 2396912 - RNA, 19 nt, Artificial Sequence
  Description of Artificial Sequence: Synthetic oligonucleotide
  Sense strand starting at position 2203 of SEQ ID NO: 1886251
gaagacaaguguccaaacu

SEQ ID NO: 2396913 - RNA, 19 nt, Artificial Sequence
  Description of Artificial Sequence: Synthetic oligonucleotide
  Antisense strand to SEQ ID NO: 2396912
aguuuggacacuugucuuc

SEQ ID NO: 2396914 - RNA, 19 nt, Artificial Sequence
  Description of Artificial Sequence: Synthetic oligonucleotide
  Sense strand starting at position 2558 of SEQ ID NO: 1886251
cgcugaagaccugguaguu

SEQ ID NO: 2396915 - RNA, 19 nt, Artificial Sequence
  Description of Artificial Sequence: Synthetic oligonucleotide
  Antisense strand to SEQ ID NO: 2396914
aacuaccaggucuucagcg

SEQ ID NO: 2396916 - RNA, 19 nt, Artificial Sequence
  Description of Artificial Sequence: Synthetic oligonucleotide
  Sense strand starting at position 2636 of SEQ ID NO: 1886251
gaaaucauagccuggaguu

SEQ ID NO: 2396917 - RNA, 19 nt, Artificial Sequence
  Description of Artificial Sequence: Synthetic oligonucleotide
  Antisense strand to SEQ ID NO: 2396916
aacuccaggcuaugauuuc

SEQ ID NO: 2396918 - RNA, 19 nt, Artificial Sequence
  Description of Artificial Sequence: Synthetic oligonucleotide
  Sense strand starting at position 2637 of SEQ ID NO: 1886251
aaaucauagccuggaguug

SEQ ID NO: 2396919 - RNA, 19 nt, Artificial Sequence
  Description of Artificial Sequence: Synthetic oligonucleotide
  Antisense strand to SEQ ID NO: 2396918
caacuccaggcuaugauuu

SEQ ID NO: 2396920 - RNA, 19 nt, Artificial Sequence
  Description of Artificial Sequence: Synthetic oligonucleotide
  Sense strand starting at position 2809 of SEQ ID NO: 1886251
gaagaagcuugagugacaa

SEQ ID NO: 2396921 - RNA, 19 nt, Artificial Sequence
  Description of Artificial Sequence: Synthetic oligonucleotide
  Antisense strand to SEQ ID NO: 2396920
uugucacucaagcuucuuc

SEQ ID NO: 2396922 - RNA, 19 nt, Artificial Sequence
  Description of Artificial Sequence: Synthetic oligonucleotide
  Sense strand starting at position 2821 of SEQ ID NO: 1886251
gugacaaauucccaggaca

SEQ ID NO: 2396923 - RNA, 19 nt, Artificial Sequence
  Description of Artificial Sequence: Synthetic oligonucleotide
  Antisense strand to SEQ ID NO: 2396922
uguccugggaauuugucac

SEQ ID NO: 2396924 - RNA, 19 nt, Artificial Sequence
  Description of Artificial Sequence: Synthetic oligonucleotide
  Sense strand starting at position 2883 of SEQ ID NO: 1886251
ccagacauuugauguugga

SEQ ID NO: 2396925 - RNA, 19 nt, Artificial Sequence
  Description of Artificial Sequence: Synthetic oligonucleotide
  Antisense strand to SEQ ID NO: 2396924
uccaacaucaaaugucugg

SEQ ID NO: 2396926 - RNA, 19 nt, Artificial Sequence
  Description of Artificial Sequence: Synthetic oligonucleotide
  Sense strand starting at position 3109 of SEQ ID NO: 1886251
gggugcgauccuugaaucu

SEQ ID NO: 2396927 - RNA, 19 nt, Artificial Sequence
  Description of Artificial Sequence: Synthetic oligonucleotide
  Antisense strand to SEQ ID NO: 2396926
agauucaaggaucgcaccc

SEQ ID NO: 2396928 - RNA, 19 nt, Artificial Sequence
  Description of Artificial Sequence: Synthetic oligonucleotide
  Sense strand starting at position 3235 of SEQ ID NO: 1886251
ugggcaauccuugaggucu

SEQ ID NO: 2396929 - RNA, 19 nt, Artificial Sequence
  Description of Artificial Sequence: Synthetic oligonucleotide
  Antisense strand to SEQ ID NO: 2396928
agaccucaaggauugccca

SEQ ID NO: 2396930 - RNA, 19 nt, Artificial Sequence
  Description of Artificial Sequence: Synthetic oligonucleotide
  Sense strand starting at position 3237 of SEQ ID NO: 1886251
ggcaauccuugaggucuga

SEQ ID NO: 2396931 - RNA, 19 nt, Artificial Sequence
  Description of Artificial Sequence: Synthetic oligonucleotide
  Antisense strand to SEQ ID NO: 2396930
ucagaccucaaggauugcc

SEQ ID NO: 2396932 - RNA, 19 nt, Artificial Sequence
  Description of Artificial Sequence: Synthetic oligonucleotide
  Sense strand starting at position 3262 of SEQ ID NO: 1886251
caccgauucucagcuagga

SEQ ID NO: 2396933 - RNA, 19 nt, Artificial Sequence
  Description of Artificial Sequence: Synthetic oligonucleotide
  Antisense strand to SEQ ID NO: 2396932
uccuagcugagaaucggug

SEQ ID NO: 2396934 - RNA, 19 nt, Artificial Sequence
  Description of Artificial Sequence: Synthetic oligonucleotide
  Sense strand starting at position 3728 of SEQ ID NO: 1886251
ccuugaagucuccagccua

SEQ ID NO: 2396935 - RNA, 19 nt, Artificial Sequence
  Description of Artificial Sequence: Synthetic oligonucleotide
  Antisense strand to SEQ ID NO: 2396934
uaggcuggagacuucaagg

SEQ ID NO: 2396936 - RNA, 19 nt, Artificial Sequence
  Description of Artificial Sequence: Synthetic oligonucleotide
  Sense strand starting at position 3871 of SEQ ID NO: 1886251
auauaagguucucgacacu

SEQ ID NO: 2396937 - RNA, 19 nt, Artificial Sequence
  Description of Artificial Sequence: Synthetic oligonucleotide
  Antisense strand to SEQ ID NO: 2396936
agugucgagaaccuuauau

SEQ ID NO: 2396938 - RNA, 19 nt, Artificial Sequence
  Description of Artificial Sequence: Synthetic oligonucleotide
  Sense strand starting at position 3928 of SEQ ID NO: 1886251
ccagcaggaccaugauaua

SEQ ID NO: 2396939 - RNA, 19 nt, Artificial Sequence
  Description of Artificial Sequence: Synthetic oligonucleotide
  Antisense strand to SEQ ID NO: 2396938
uauaucaugguccugcugg

SEQ ID NO: 2396940 - RNA, 19 nt, Artificial Sequence
  Description of Artificial Sequence: Synthetic oligonucleotide
  Sense strand starting at position 195 of SEQ ID NO: 1886252
agccgagcauuccaggaaa

SEQ ID NO: 2396941 - RNA, 19 nt, Artificial Sequence
  Description of Artificial Sequence: Synthetic oligonucleotide
  Antisense strand to SEQ ID NO: 2396940
uuuccuggaaugcucggcu

SEQ ID NO: 2396942 - RNA, 19 nt, Artificial Sequence
  Description of Artificial Sequence: Synthetic oligonucleotide
  Sense strand starting at position 324 of SEQ ID NO: 1886252
gaugauauguguccaaacu

SEQ ID NO: 2396943 - RNA, 19 nt, Artificial Sequence
  Description of Artificial Sequence: Synthetic oligonucleotide
  Antisense strand to SEQ ID NO: 2396942
aguuuggacacauaucauc

SEQ ID NO: 2396944 - RNA, 19 nt, Artificial Sequence
  Description of Artificial Sequence: Synthetic oligonucleotide
  Sense strand starting at position 325 of SEQ ID NO: 1886252
augauauguguccaaacug

SEQ ID NO: 2396945 - RNA, 19 nt, Artificial Sequence
  Description of Artificial Sequence: Synthetic oligonucleotide
  Antisense strand to SEQ ID NO: 2396944
caguuuggacacauaucau

SEQ ID NO: 2396946 - RNA, 19 nt, Artificial Sequence
  Description of Artificial Sequence: Synthetic oligonucleotide
  Sense strand starting at position 398 of SEQ ID NO: 1886252
acggacacauguuaugaga

SEQ ID NO: 2396947 - RNA, 19 nt, Artificial Sequence
  Description of Artificial Sequence: Synthetic oligonucleotide
  Antisense strand to SEQ ID NO: 2396946
ucucauaacauguguccgu

SEQ ID NO: 2396948 - RNA, 19 nt, Artificial Sequence
  Description of Artificial Sequence: Synthetic oligonucleotide
  Sense strand starting at position 400 of SEQ ID NO: 1886252
ggacacauguuaugagauc

SEQ ID NO: 2396949 - RNA, 19 nt, Artificial Sequence
  Description of Artificial Sequence: Synthetic oligonucleotide
  Antisense strand to SEQ ID NO: 2396948
gaucucauaacaugugucc

SEQ ID NO: 2396950 - RNA, 19 nt, Artificial Sequence
  Description of Artificial Sequence: Synthetic oligonucleotide
  Sense strand starting at position 407 of SEQ ID NO: 1886252
uguuaugagauccauguga

SEQ ID NO: 2396951 - RNA, 19 nt, Artificial Sequence
  Description of Artificial Sequence: Synthetic oligonucleotide
  Antisense strand to SEQ ID NO: 2396950
ucacauggaucucauaaca

SEQ ID NO: 2396952 - RNA, 19 nt, Artificial Sequence
  Description of Artificial Sequence: Synthetic oligonucleotide
  Sense strand starting at position 409 of SEQ ID NO: 1886252
uuaugagauccaugugaag

SEQ ID NO: 2396953 - RNA, 19 nt, Artificial Sequence
  Description of Artificial Sequence: Synthetic oligonucleotide
  Antisense strand to SEQ ID NO: 2396952
cuucacauggaucucauaa

SEQ ID NO: 2396954 - RNA, 19 nt, Artificial Sequence
  Description of Artificial Sequence: Synthetic oligonucleotide
  Sense strand starting at position 411 of SEQ ID NO: 1886252
augagauccaugugaagua

SEQ ID NO: 2396955 - RNA, 19 nt, Artificial Sequence
  Description of Artificial Sequence: Synthetic oligonucleotide
  Antisense strand to SEQ ID NO: 2396954
uacuucacauggaucucau

SEQ ID NO: 2396956 - RNA, 19 nt, Artificial Sequence
  Description of Artificial Sequence: Synthetic oligonucleotide
  Sense strand starting at position 426 of SEQ ID NO: 1886252
aguacuaacucgucaccaa

SEQ ID NO: 2396957 - RNA, 19 nt, Artificial Sequence
  Description of Artificial Sequence: Synthetic oligonucleotide
  Antisense strand to SEQ ID NO: 2396956
uuggugacgaguuaguacu

SEQ ID NO: 2396958 - RNA, 19 nt, Artificial Sequence
  Description of Artificial Sequence: Synthetic oligonucleotide
  Sense strand starting at position 427 of SEQ ID NO: 1886252
guacuaacucgucaccaau

SEQ ID NO: 2396959 - RNA, 19 nt, Artificial Sequence
  Description of Artificial Sequence: Synthetic oligonucleotide
  Antisense strand to SEQ ID NO: 2396958
auuggugacgaguuaguac

SEQ ID NO: 2396960 - RNA, 19 nt, Artificial Sequence
  Description of Artificial Sequence: Synthetic oligonucleotide
  Sense strand starting at position 713 of SEQ ID NO: 1886252
gcguguugggcacacauca

SEQ ID NO: 2396961 - RNA, 19 nt, Artificial Sequence
  Description of Artificial Sequence: Synthetic oligonucleotide
  Antisense strand to SEQ ID NO: 2396960
ugaugugugcccaacacgc

SEQ ID NO: 2396962 - RNA, 19 nt, Artificial Sequence
  Description of Artificial Sequence: Synthetic oligonucleotide
  Sense strand starting at position 743 of SEQ ID NO: 1886252
ccaagugugcacggaaauc

SEQ ID NO: 2396963 - RNA, 19 nt, Artificial Sequence
  Description of Artificial Sequence: Synthetic oligonucleotide
  Antisense strand to SEQ ID NO: 2396962
gauuuccgugcacacuugg

SEQ ID NO: 2396964 - RNA, 19 nt, Artificial Sequence
  Description of Artificial Sequence: Synthetic oligonucleotide
  Sense strand starting at position 932 of SEQ ID NO: 1886252
gaagcagccugagcaauaa

SEQ ID NO: 2396965 - RNA, 19 nt, Artificial Sequence
  Description of Artificial Sequence: Synthetic oligonucleotide
  Antisense strand to SEQ ID NO: 2396964
uuauugcucaggcugcuuc

SEQ ID NO: 2396966 - RNA, 19 nt, Artificial Sequence
  Description of Artificial Sequence: Synthetic oligonucleotide
  Sense strand starting at position 1111 of SEQ ID NO: 1886252
uggccagagcucuaccuua

SEQ ID NO: 2396967 - RNA, 19 nt, Artificial Sequence
  Description of Artificial Sequence: Synthetic oligonucleotide
  Antisense strand to SEQ ID NO: 2396966
uaagguagagcucuggcca

SEQ ID NO: 2396968 - RNA, 19 nt, Artificial Sequence
  Description of Artificial Sequence: Synthetic oligonucleotide
  Sense strand starting at position 1232 of SEQ ID NO: 1886252
gggcacuauccuugaaucu

SEQ ID NO: 2396969 - RNA, 19 nt, Artificial Sequence
  Description of Artificial Sequence: Synthetic oligonucleotide
  Antisense strand to SEQ ID NO: 2396968
agauucaaggauagugccc

SEQ ID NO: 2396970 - RNA, 19 nt, Artificial Sequence
  Description of Artificial Sequence: Synthetic oligonucleotide
  Sense strand starting at position 1406 of SEQ ID NO: 1886252
uguccuauguuaggcagaa

SEQ ID NO: 2396971 - RNA, 19 nt, Artificial Sequence
  Description of Artificial Sequence: Synthetic oligonucleotide
  Antisense strand to SEQ ID NO: 2396970
uucugccuaacauaggaca

SEQ ID NO: 2396972 - RNA, 19 nt, Artificial Sequence
  Description of Artificial Sequence: Synthetic oligonucleotide
  Sense strand starting at position 1407 of SEQ ID NO: 1886252
guccuauguuaggcagaag

SEQ ID NO: 2396973 - RNA, 19 nt, Artificial Sequence
  Description of Artificial Sequence: Synthetic oligonucleotide
  Antisense strand to SEQ ID NO: 2396972
cuucugccuaacauaggac

SEQ ID NO: 2396974 - RNA, 19 nt, Artificial Sequence
  Description of Artificial Sequence: Synthetic oligonucleotide
  Sense strand starting at position 1468 of SEQ ID NO: 1886252
cagagaagguguccuccuu

SEQ ID NO: 2396975 - RNA, 19 nt, Artificial Sequence
  Description of Artificial Sequence: Synthetic oligonucleotide
  Antisense strand to SEQ ID NO: 2396974
aaggaggacaccuucucug

SEQ ID NO: 2396976 - RNA, 19 nt, Artificial Sequence
  Description of Artificial Sequence: Synthetic oligonucleotide
  Sense strand starting at position 1516 of SEQ ID NO: 1886252
ggagaaccuuuccgucuca

SEQ ID NO: 2396977 - RNA, 19 nt, Artificial Sequence
  Description of Artificial Sequence: Synthetic oligonucleotide
  Antisense strand to SEQ ID NO: 2396976
ugagacggaaagguucucc

SEQ ID NO: 2396978 - RNA, 19 nt, Artificial Sequence
  Description of Artificial Sequence: Synthetic oligonucleotide
  Sense strand starting at position 1525 of SEQ ID NO: 1886252
uuccgucucagguggaaau

SEQ ID NO: 2396979 - RNA, 19 nt, Artificial Sequence
  Description of Artificial Sequence: Synthetic oligonucleotide
  Antisense strand to SEQ ID NO: 2396978
auuuccaccugagacggaa

SEQ ID NO: 2396980 - RNA, 19 nt, Artificial Sequence
  Description of Artificial Sequence: Synthetic oligonucleotide
  Sense strand starting at position 1526 of SEQ ID NO: 1886252
uccgucucagguggaaauu

SEQ ID NO: 2396981 - RNA, 19 nt, Artificial Sequence
  Description of Artificial Sequence: Synthetic oligonucleotide
  Antisense strand to SEQ ID NO: 2396980
aauuuccaccugagacgga

SEQ ID NO: 2396982 - RNA, 19 nt, Artificial Sequence
  Description of Artificial Sequence: Synthetic oligonucleotide
  Sense strand starting at position 1545 of SEQ ID NO: 1886252
caggucagcucccugagaa

SEQ ID NO: 2396983 - RNA, 19 nt, Artificial Sequence
  Description of Artificial Sequence: Synthetic oligonucleotide
  Antisense strand to SEQ ID NO: 2396982
uucucagggagcugaccug

SEQ ID NO: 2396984 - RNA, 19 nt, Artificial Sequence
  Description of Artificial Sequence: Synthetic oligonucleotide
  Sense strand starting at position 1546 of SEQ ID NO: 1886252
aggucagcucccugagaaa

SEQ ID NO: 2396985 - RNA, 19 nt, Artificial Sequence
  Description of Artificial Sequence: Synthetic oligonucleotide
  Antisense strand to SEQ ID NO: 2396984
uuucucagggagcugaccu

SEQ ID NO: 2396986 - RNA, 19 nt, Artificial Sequence
  Description of Artificial Sequence: Synthetic oligonucleotide
  Sense strand starting at position 1598 of SEQ ID NO: 1886252
cccauauggucuggcucau

SEQ ID NO: 2396987 - RNA, 19 nt, Artificial Sequence
  Description of Artificial Sequence: Synthetic oligonucleotide
  Antisense strand to SEQ ID NO: 2396986
augagccagaccauauggg

SEQ ID NO: 2396988 - RNA, 19 nt, Artificial Sequence
  Description of Artificial Sequence: Synthetic oligonucleotide
  Sense strand starting at position 1607 of SEQ ID NO: 1886252
ucuggcucaugauccauaa

SEQ ID NO: 2396989 - RNA, 19 nt, Artificial Sequence
  Description of Artificial Sequence: Synthetic oligonucleotide
  Antisense strand to SEQ ID NO: 2396988
uuauggaucaugagccaga

SEQ ID NO: 2396990 - RNA, 19 nt, Artificial Sequence
  Description of Artificial Sequence: Synthetic oligonucleotide
  Sense strand starting at position 1667 of SEQ ID NO: 1886252
ggcccuccuaggugaaaga

SEQ ID NO: 2396991 - RNA, 19 nt, Artificial Sequence
  Description of Artificial Sequence: Synthetic oligonucleotide
  Antisense strand to SEQ ID NO: 2396990
ucuuucaccuaggagggcc

SEQ ID NO: 2396992 - RNA, 19 nt, Artificial Sequence
  Description of Artificial Sequence: Synthetic oligonucleotide
  Sense strand starting at position 2046 of SEQ ID NO: 1886252
ggauguacucaucacagcu

SEQ ID NO: 2396993 - RNA, 19 nt, Artificial Sequence
  Description of Artificial Sequence: Synthetic oligonucleotide
  Antisense strand to SEQ ID NO: 2396992
agcugugaugaguacaucc

SEQ ID NO: 2396994 - RNA, 19 nt, Artificial Sequence
  Description of Artificial Sequence: Synthetic oligonucleotide
  Sense strand starting at position 2265 of SEQ ID NO: 1886252
ggacacaugugaugagauc

SEQ ID NO: 2396995 - RNA, 19 nt, Artificial Sequence
  Description of Artificial Sequence: Synthetic oligonucleotide
  Antisense strand to SEQ ID NO: 2396994
gaucucaucacaugugucc

SEQ ID NO: 2396996 - RNA, 19 nt, Artificial Sequence
  Description of Artificial Sequence: Synthetic oligonucleotide
  Sense strand starting at position 2272 of SEQ ID NO: 1886252
ugugaugagauccaugcga

SEQ ID NO: 2396997 - RNA, 19 nt, Artificial Sequence
  Description of Artificial Sequence: Synthetic oligonucleotide
  Antisense strand to SEQ ID NO: 2396996
ucgcauggaucucaucaca

SEQ ID NO: 2396998 - RNA, 19 nt, Artificial Sequence
  Description of Artificial Sequence: Synthetic oligonucleotide
  Sense strand starting at position 2274 of SEQ ID NO: 1886252
ugaugagauccaugcgaaa

SEQ ID NO: 2396999 - RNA, 19 nt, Artificial Sequence
  Description of Artificial Sequence: Synthetic oligonucleotide
  Antisense strand to SEQ ID NO: 2396998
uuucgcauggaucucauca

SEQ ID NO: 2397000 - RNA, 19 nt, Artificial Sequence
  Description of Artificial Sequence: Synthetic oligonucleotide
  Sense strand starting at position 2276 of SEQ ID NO: 1886252
augagauccaugcgaaaua

SEQ ID NO: 2397001 - RNA, 19 nt, Artificial Sequence
  Description of Artificial Sequence: Synthetic oligonucleotide
  Antisense strand to SEQ ID NO: 2397000
uauuucgcauggaucucau

SEQ ID NO: 2397002 - RNA, 19 nt, Artificial Sequence
  Description of Artificial Sequence: Synthetic oligonucleotide
  Sense strand starting at position 2287 of SEQ ID NO: 1886252
gcgaaauacugacucauca

SEQ ID NO: 2397003 - RNA, 19 nt, Artificial Sequence
  Description of Artificial Sequence: Synthetic oligonucleotide
  Antisense strand to SEQ ID NO: 2397002
ugaugagucaguauuucgc

SEQ ID NO: 2397004 - RNA, 19 nt, Artificial Sequence
  Description of Artificial Sequence: Synthetic oligonucleotide
  Sense strand starting at position 2743 of SEQ ID NO: 1886252
uuugcuuggucccaagacu

SEQ ID NO: 2397005 - RNA, 19 nt, Artificial Sequence
  Description of Artificial Sequence: Synthetic oligonucleotide
  Antisense strand to SEQ ID NO: 2397004
agucuugggaccaagcaaa

SEQ ID NO: 2397006 - RNA, 19 nt, Artificial Sequence
  Description of Artificial Sequence: Synthetic oligonucleotide
  Sense strand starting at position 3075 of SEQ ID NO: 1886252
agagcaggauccuugaauc

SEQ ID NO: 2397007 - RNA, 19 nt, Artificial Sequence
  Description of Artificial Sequence: Synthetic oligonucleotide
  Antisense strand to SEQ ID NO: 2397006
gauucaaggauccugcucu

SEQ ID NO: 2397008 - RNA, 19 nt, Artificial Sequence
  Description of Artificial Sequence: Synthetic oligonucleotide
  Sense strand starting at position 3197 of SEQ ID NO: 1886252
uggcccuguucucaucauu

SEQ ID NO: 2397009 - RNA, 19 nt, Artificial Sequence
  Description of Artificial Sequence: Synthetic oligonucleotide
  Antisense strand to SEQ ID NO: 2397008
aaugaugagaacagggcca

SEQ ID NO: 2397010 - RNA, 19 nt, Artificial Sequence
  Description of Artificial Sequence: Synthetic oligonucleotide
  Sense strand starting at position 3595 of SEQ ID NO: 1886252
gcaagaugccuaggcugua

SEQ ID NO: 2397011 - RNA, 19 nt, Artificial Sequence
  Description of Artificial Sequence: Synthetic oligonucleotide
  Antisense strand to SEQ ID NO: 2397010
uacagccuaggcaucuugc

SEQ ID NO: 2397012 - RNA, 19 nt, Artificial Sequence
  Description of Artificial Sequence: Synthetic oligonucleotide
  Sense strand starting at position 17 of SEQ ID NO: 1886253
guggcucugccagggauaa

SEQ ID NO: 2397013 - RNA, 19 nt, Artificial Sequence
  Description of Artificial Sequence: Synthetic oligonucleotide
  Antisense strand to SEQ ID NO: 2397012
uuaucccuggcagagccac

SEQ ID NO: 2397014 - RNA, 19 nt, Artificial Sequence
  Description of Artificial Sequence: Synthetic oligonucleotide
  Sense strand starting at position 18 of SEQ ID NO: 1886253
uggcucugccagggauaau

SEQ ID NO: 2397015 - RNA, 19 nt, Artificial Sequence
  Description of Artificial Sequence: Synthetic oligonucleotide
  Antisense strand to SEQ ID NO: 2397014
auuaucccuggcagagcca

SEQ ID NO: 2397016 - RNA, 19 nt, Artificial Sequence
  Description of Artificial Sequence: Synthetic oligonucleotide
  Sense strand starting at position 19 of SEQ ID NO: 1886253
ggcucugccagggauaaua

SEQ ID NO: 2397017 - RNA, 19 nt, Artificial Sequence
  Description of Artificial Sequence: Synthetic oligonucleotide
  Antisense strand to SEQ ID NO: 2397016
uauuaucccuggcagagcc

SEQ ID NO: 2397018 - RNA, 19 nt, Artificial Sequence
  Description of Artificial Sequence: Synthetic oligonucleotide
  Sense strand starting at position 69 of SEQ ID NO: 1886253
cuagguucggccuaagugu

SEQ ID NO: 2397019 - RNA, 19 nt, Artificial Sequence
  Description of Artificial Sequence: Synthetic oligonucleotide
  Antisense strand to SEQ ID NO: 2397018
acacuuaggccgaaccuag

SEQ ID NO: 2397020 - RNA, 19 nt, Artificial Sequence
  Description of Artificial Sequence: Synthetic oligonucleotide
  Sense strand starting at position 212 of SEQ ID NO: 1886253
accagagcucagugcaaga

SEQ ID NO: 2397021 - RNA, 19 nt, Artificial Sequence
  Description of Artificial Sequence: Synthetic oligonucleotide
  Antisense strand to SEQ ID NO: 2397020
ucuugcacugagcucuggu

SEQ ID NO: 2397022 - RNA, 19 nt, Artificial Sequence
  Description of Artificial Sequence: Synthetic oligonucleotide
  Sense strand starting at position 374 of SEQ ID NO: 1886253
caaccagggccucauguau

SEQ ID NO: 2397023 - RNA, 19 nt, Artificial Sequence
  Description of Artificial Sequence: Synthetic oligonucleotide
  Antisense strand to SEQ ID NO: 2397022
auacaugaggcccugguug

SEQ ID NO: 2397024 - RNA, 19 nt, Artificial Sequence
  Description of Artificial Sequence: Synthetic oligonucleotide
  Sense strand starting at position 428 of SEQ ID NO: 1886253
auggaauccuuacagaaca

SEQ ID NO: 2397025 - RNA, 19 nt, Artificial Sequence
  Description of Artificial Sequence: Synthetic oligonucleotide
  Antisense strand to SEQ ID NO: 2397024
uguucuguaaggauuccau

SEQ ID NO: 2397026 - RNA, 19 nt, Artificial Sequence
  Description of Artificial Sequence: Synthetic oligonucleotide
  Sense strand starting at position 808 of SEQ ID NO: 1886253
acauucuuucucugaugag

SEQ ID NO: 2397027 - RNA, 19 nt, Artificial Sequence
  Description of Artificial Sequence: Synthetic oligonucleotide
  Antisense strand to SEQ ID NO: 2397026
cucaucagagaaagaaugu

SEQ ID NO: 2397028 - RNA, 19 nt, Artificial Sequence
  Description of Artificial Sequence: Synthetic oligonucleotide
  Sense strand starting at position 1228 of SEQ ID NO: 1886253
gguggcauuccuugaaucu

SEQ ID NO: 2397029 - RNA, 19 nt, Artificial Sequence
  Description of Artificial Sequence: Synthetic oligonucleotide
  Antisense strand to SEQ ID NO: 2397028
agauucaaggaaugccacc

SEQ ID NO: 2397030 - RNA, 19 nt, Artificial Sequence
  Description of Artificial Sequence: Synthetic oligonucleotide
  Sense strand starting at position 1392 of SEQ ID NO: 1886253
ugggaacugcccuacguua

SEQ ID NO: 2397031 - RNA, 19 nt, Artificial Sequence
  Description of Artificial Sequence: Synthetic oligonucleotide
  Antisense strand to SEQ ID NO: 2397030
uaacguagggcaguuccca

SEQ ID NO: 2397032 - RNA, 19 nt, Artificial Sequence
  Description of Artificial Sequence: Synthetic oligonucleotide
  Sense strand starting at position 1403 of SEQ ID NO: 1886253
cuacguuagguugaaggaa

SEQ ID NO: 2397033 - RNA, 19 nt, Artificial Sequence
  Description of Artificial Sequence: Synthetic oligonucleotide
  Antisense strand to SEQ ID NO: 2397032
uuccuucaaccuaacguag

SEQ ID NO: 2397034 - RNA, 19 nt, Artificial Sequence
  Description of Artificial Sequence: Synthetic oligonucleotide
  Sense strand starting at position 1460 of SEQ ID NO: 1886253
caggaaaugugugcuccua

SEQ ID NO: 2397035 - RNA, 19 nt, Artificial Sequence
  Description of Artificial Sequence: Synthetic oligonucleotide
  Antisense strand to SEQ ID NO: 2397034
uaggagcacacauuuccug

SEQ ID NO: 2397036 - RNA, 19 nt, Artificial Sequence
  Description of Artificial Sequence: Synthetic oligonucleotide
  Sense strand starting at position 1479 of SEQ ID NO: 1886253
gggucagauucccaagaag

SEQ ID NO: 2397037 - RNA, 19 nt, Artificial Sequence
  Description of Artificial Sequence: Synthetic oligonucleotide
  Antisense strand to SEQ ID NO: 2397036
cuucuugggaaucugaccc

SEQ ID NO: 2397038 - RNA, 19 nt, Artificial Sequence
  Description of Artificial Sequence: Synthetic oligonucleotide
  Sense strand starting at position 1516 of SEQ ID NO: 1886253
caucccucccggugaguaa

SEQ ID NO: 2397039 - RNA, 19 nt, Artificial Sequence
  Description of Artificial Sequence: Synthetic oligonucleotide
  Antisense strand to SEQ ID NO: 2397038
uuacucaccgggagggaug

SEQ ID NO: 2397040 - RNA, 19 nt, Artificial Sequence
  Description of Artificial Sequence: Synthetic oligonucleotide
  Sense strand starting at position 1517 of SEQ ID NO: 1886253
aucccucccggugaguaau

SEQ ID NO: 2397041 - RNA, 19 nt, Artificial Sequence
  Description of Artificial Sequence: Synthetic oligonucleotide
  Antisense strand to SEQ ID NO: 2397040
auuacucaccgggagggau

SEQ ID NO: 2397042 - RNA, 19 nt, Artificial Sequence
  Description of Artificial Sequence: Synthetic oligonucleotide
  Sense strand starting at position 1535 of SEQ ID NO: 1886253
ucgguuggcucccugagaa

SEQ ID NO: 2397043 - RNA, 19 nt, Artificial Sequence
  Description of Artificial Sequence: Synthetic oligonucleotide
  Antisense strand to SEQ ID NO: 2397042
uucucagggagccaaccga

SEQ ID NO: 2397044 - RNA, 19 nt, Artificial Sequence
  Description of Artificial Sequence: Synthetic oligonucleotide
  Sense strand starting at position 1726 of SEQ ID NO: 1886253
uugcccugucccuggagaa

SEQ ID NO: 2397045 - RNA, 19 nt, Artificial Sequence
  Description of Artificial Sequence: Synthetic oligonucleotide
  Antisense strand to SEQ ID NO: 2397044
uucuccagggacagggcaa

SEQ ID NO: 2397046 - RNA, 19 nt, Artificial Sequence
  Description of Artificial Sequence: Synthetic oligonucleotide
  Sense strand starting at position 1859 of SEQ ID NO: 1886253
aaauaaguguggucuagcu

SEQ ID NO: 2397047 - RNA, 19 nt, Artificial Sequence
  Description of Artificial Sequence: Synthetic oligonucleotide
  Antisense strand to SEQ ID NO: 2397046
agcuagaccacacuuauuu

SEQ ID NO: 2397048 - RNA, 19 nt, Artificial Sequence
  Description of Artificial Sequence: Synthetic oligonucleotide
  Sense strand starting at position 1885 of SEQ ID NO: 1886253
uugggaucccugcaucauc

SEQ ID NO: 2397049 - RNA, 19 nt, Artificial Sequence
  Description of Artificial Sequence: Synthetic oligonucleotide
  Antisense strand to SEQ ID NO: 2397048
gaugaugcagggaucccaa

SEQ ID NO: 2397050 - RNA, 19 nt, Artificial Sequence
  Description of Artificial Sequence: Synthetic oligonucleotide
  Sense strand starting at position 2210 of SEQ ID NO: 1886253
gaugauauguguccaaacu

SEQ ID NO: 2397051 - RNA, 19 nt, Artificial Sequence
  Description of Artificial Sequence: Synthetic oligonucleotide
  Antisense strand to SEQ ID NO: 2397050
aguuuggacacauaucauc

SEQ ID NO: 2397052 - RNA, 19 nt, Artificial Sequence
  Description of Artificial Sequence: Synthetic oligonucleotide
  Sense strand starting at position 2211 of SEQ ID NO: 1886253
augauauguguccaaacug

SEQ ID NO: 2397053 - RNA, 19 nt, Artificial Sequence
  Description of Artificial Sequence: Synthetic oligonucleotide
  Antisense strand to SEQ ID NO: 2397052
caguuuggacacauaucau

SEQ ID NO: 2397054 - RNA, 19 nt, Artificial Sequence
  Description of Artificial Sequence: Synthetic oligonucleotide
  Sense strand starting at position 2293 of SEQ ID NO: 1886253
uguuaugagauccauguga

SEQ ID NO: 2397055 - RNA, 19 nt, Artificial Sequence
  Description of Artificial Sequence: Synthetic oligonucleotide
  Antisense strand to SEQ ID NO: 2397054
ucacauggaucucauaaca

SEQ ID NO: 2397056 - RNA, 19 nt, Artificial Sequence
  Description of Artificial Sequence: Synthetic oligonucleotide
  Sense strand starting at position 2295 of SEQ ID NO: 1886253
uuaugagauccaugugaag

SEQ ID NO: 2397057 - RNA, 19 nt, Artificial Sequence
  Description of Artificial Sequence: Synthetic oligonucleotide
  Antisense strand to SEQ ID NO: 2397056
cuucacauggaucucauaa

SEQ ID NO: 2397058 - RNA, 19 nt, Artificial Sequence
  Description of Artificial Sequence: Synthetic oligonucleotide
  Sense strand starting at position 2297 of SEQ ID NO: 1886253
augagauccaugugaagua

SEQ ID NO: 2397059 - RNA, 19 nt, Artificial Sequence
  Description of Artificial Sequence: Synthetic oligonucleotide
  Antisense strand to SEQ ID NO: 2397058
uacuucacauggaucucau

SEQ ID NO: 2397060 - RNA, 19 nt, Artificial Sequence
  Description of Artificial Sequence: Synthetic oligonucleotide
  Sense strand starting at position 2312 of SEQ ID NO: 1886253
aguacuaacucgucaccaa

SEQ ID NO: 2397061 - RNA, 19 nt, Artificial Sequence
  Description of Artificial Sequence: Synthetic oligonucleotide
  Antisense strand to SEQ ID NO: 2397060
uuggugacgaguuaguacu

SEQ ID NO: 2397062 - RNA, 19 nt, Artificial Sequence
  Description of Artificial Sequence: Synthetic oligonucleotide
  Sense strand starting at position 2313 of SEQ ID NO: 1886253
guacuaacucgucaccaau

SEQ ID NO: 2397063 - RNA, 19 nt, Artificial Sequence
  Description of Artificial Sequence: Synthetic oligonucleotide
  Antisense strand to SEQ ID NO: 2397062
auuggugacgaguuaguac

SEQ ID NO: 2397064 - RNA, 19 nt, Artificial Sequence
  Description of Artificial Sequence: Synthetic oligonucleotide
  Sense strand starting at position 2599 of SEQ ID NO: 1886253
gcguguugggcacacauca

SEQ ID NO: 2397065 - RNA, 19 nt, Artificial Sequence
  Description of Artificial Sequence: Synthetic oligonucleotide
  Antisense strand to SEQ ID NO: 2397064
ugaugugugcccaacacgc

SEQ ID NO: 2397066 - RNA, 19 nt, Artificial Sequence
  Description of Artificial Sequence: Synthetic oligonucleotide
  Sense strand starting at position 2629 of SEQ ID NO: 1886253
ccaagugugcacggaaauc

SEQ ID NO: 2397067 - RNA, 19 nt, Artificial Sequence
  Description of Artificial Sequence: Synthetic oligonucleotide
  Antisense strand to SEQ ID NO: 2397066
gauuuccgugcacacuugg

SEQ ID NO: 2397068 - RNA, 19 nt, Artificial Sequence
  Description of Artificial Sequence: Synthetic oligonucleotide
  Sense strand starting at position 2818 of SEQ ID NO: 1886253
gaagcagccugagcaauaa

SEQ ID NO: 2397069 - RNA, 19 nt, Artificial Sequence
  Description of Artificial Sequence: Synthetic oligonucleotide
  Antisense strand to SEQ ID NO: 2397068
uuauugcucaggcugcuuc

SEQ ID NO: 2397070 - RNA, 19 nt, Artificial Sequence
  Description of Artificial Sequence: Synthetic oligonucleotide
  Sense strand starting at position 2997 of SEQ ID NO: 1886253
uggccagagcucuaccuua

SEQ ID NO: 2397071 - RNA, 19 nt, Artificial Sequence
  Description of Artificial Sequence: Synthetic oligonucleotide
  Antisense strand to SEQ ID NO: 2397070
uaagguagagcucuggcca

SEQ ID NO: 2397072 - RNA, 19 nt, Artificial Sequence
  Description of Artificial Sequence: Synthetic oligonucleotide
  Sense strand starting at position 3118 of SEQ ID NO: 1886253
gggcacuauccuugaaucu

SEQ ID NO: 2397073 - RNA, 19 nt, Artificial Sequence
  Description of Artificial Sequence: Synthetic oligonucleotide
  Antisense strand to SEQ ID NO: 2397072
agauucaaggauagugccc

SEQ ID NO: 2397074 - RNA, 19 nt, Artificial Sequence
  Description of Artificial Sequence: Synthetic oligonucleotide
  Sense strand starting at position 3293 of SEQ ID NO: 1886253
guccuauguuaggcagaag

SEQ ID NO: 2397075 - RNA, 19 nt, Artificial Sequence
  Description of Artificial Sequence: Synthetic oligonucleotide
  Antisense strand to SEQ ID NO: 2397074
cuucugccuaacauaggac

SEQ ID NO: 2397076 - RNA, 19 nt, Artificial Sequence
  Description of Artificial Sequence: Synthetic oligonucleotide
  Sense strand starting at position 3354 of SEQ ID NO: 1886253
cagagaagguguccuccuu

SEQ ID NO: 2397077 - RNA, 19 nt, Artificial Sequence
  Description of Artificial Sequence: Synthetic oligonucleotide
  Antisense strand to SEQ ID NO: 2397076
aaggaggacaccuucucug

SEQ ID NO: 2397078 - RNA, 19 nt, Artificial Sequence
  Description of Artificial Sequence: Synthetic oligonucleotide
  Sense strand starting at position 3411 of SEQ ID NO: 1886253
uuccgucucagguggaaau

SEQ ID NO: 2397079 - RNA, 19 nt, Artificial Sequence
  Description of Artificial Sequence: Synthetic oligonucleotide
  Antisense strand to SEQ ID NO: 2397078
auuuccaccugagacggaa

SEQ ID NO: 2397080 - RNA, 19 nt, Artificial Sequence
  Description of Artificial Sequence: Synthetic oligonucleotide
  Sense strand starting at position 3412 of SEQ ID NO: 1886253
uccgucucagguggaaauu

SEQ ID NO: 2397081 - RNA, 19 nt, Artificial Sequence
  Description of Artificial Sequence: Synthetic oligonucleotide
  Antisense strand to SEQ ID NO: 2397080
aauuuccaccugagacgga

SEQ ID NO: 2397082 - RNA, 19 nt, Artificial Sequence
  Description of Artificial Sequence: Synthetic oligonucleotide
  Sense strand starting at position 3431 of SEQ ID NO: 1886253
caggucagcucccugagaa

SEQ ID NO: 2397083 - RNA, 19 nt, Artificial Sequence
  Description of Artificial Sequence: Synthetic oligonucleotide
  Antisense strand to SEQ ID NO: 2397082
uucucagggagcugaccug

SEQ ID NO: 2397084 - RNA, 19 nt, Artificial Sequence
  Description of Artificial Sequence: Synthetic oligonucleotide
  Sense strand starting at position 3432 of SEQ ID NO: 1886253
aggucagcucccugagaaa

SEQ ID NO: 2397085 - RNA, 19 nt, Artificial Sequence
  Description of Artificial Sequence: Synthetic oligonucleotide
  Antisense strand to SEQ ID NO: 2397084
uuucucagggagcugaccu

SEQ ID NO: 2397086 - RNA, 19 nt, Artificial Sequence
  Description of Artificial Sequence: Synthetic oligonucleotide
  Sense strand starting at position 3493 of SEQ ID NO: 1886253
ucuggcucaugauccauaa

SEQ ID NO: 2397087 - RNA, 19 nt, Artificial Sequence
  Description of Artificial Sequence: Synthetic oligonucleotide
  Antisense strand to SEQ ID NO: 2397086
uuauggaucaugagccaga

SEQ ID NO: 2397088 - RNA, 19 nt, Artificial Sequence
  Description of Artificial Sequence: Synthetic oligonucleotide
  Sense strand starting at position 3553 of SEQ ID NO: 1886253
ggcccuccuaggugaaaga

SEQ ID NO: 2397089 - RNA, 19 nt, Artificial Sequence
  Description of Artificial Sequence: Synthetic oligonucleotide
  Antisense strand to SEQ ID NO: 2397088
ucuuucaccuaggagggcc

SEQ ID NO: 2397090 - RNA, 19 nt, Artificial Sequence
  Description of Artificial Sequence: Synthetic oligonucleotide
  Sense strand starting at position 3932 of SEQ ID NO: 1886253
ggauguacucaucacagcu

SEQ ID NO: 2397091 - RNA, 19 nt, Artificial Sequence
  Description of Artificial Sequence: Synthetic oligonucleotide
  Antisense strand to SEQ ID NO: 2397090
agcugugaugaguacaucc

SEQ ID NO: 2397092 - RNA, 19 nt, Artificial Sequence
  Description of Artificial Sequence: Synthetic oligonucleotide
  Sense strand starting at position 24 of SEQ ID NO: 1886254
ggaucucagccuugacuca

SEQ ID NO: 2397093 - RNA, 19 nt, Artificial Sequence
  Description of Artificial Sequence: Synthetic oligonucleotide
  Antisense strand to SEQ ID NO: 2397092
ugagucaaggcugagaucc

SEQ ID NO: 2397094 - RNA, 19 nt, Artificial Sequence
  Description of Artificial Sequence: Synthetic oligonucleotide
  Sense strand starting at position 129 of SEQ ID NO: 1886254
ggucacaggugggaugaaa

SEQ ID NO: 2397095 - RNA, 19 nt, Artificial Sequence
  Description of Artificial Sequence: Synthetic oligonucleotide
  Antisense strand to SEQ ID NO: 2397094
uuucaucccaccugugacc

SEQ ID NO: 2397096 - RNA, 19 nt, Artificial Sequence
  Description of Artificial Sequence: Synthetic oligonucleotide
  Sense strand starting at position 380 of SEQ ID NO: 1886254
aagacauccuccuugggua

SEQ ID NO: 2397097 - RNA, 19 nt, Artificial Sequence
  Description of Artificial Sequence: Synthetic oligonucleotide
  Antisense strand to SEQ ID NO: 2397096
uacccaaggaggaugucuu

SEQ ID NO: 2397098 - RNA, 19 nt, Artificial Sequence
  Description of Artificial Sequence: Synthetic oligonucleotide
  Sense strand starting at position 381 of SEQ ID NO: 1886254
agacauccuccuuggguaa

SEQ ID NO: 2397099 - RNA, 19 nt, Artificial Sequence
  Description of Artificial Sequence: Synthetic oligonucleotide
  Antisense strand to SEQ ID NO: 2397098
uuacccaaggaggaugucu

SEQ ID NO: 2397100 - RNA, 19 nt, Artificial Sequence
  Description of Artificial Sequence: Synthetic oligonucleotide
  Sense strand starting at position 383 of SEQ ID NO: 1886254
acauccuccuuggguaaga

SEQ ID NO: 2397101 - RNA, 19 nt, Artificial Sequence
  Description of Artificial Sequence: Synthetic oligonucleotide
  Antisense strand to SEQ ID NO: 2397100
ucuuacccaaggaggaugu

SEQ ID NO: 2397102 - RNA, 19 nt, Artificial Sequence
  Description of Artificial Sequence: Synthetic oligonucleotide
  Sense strand starting at position 384 of SEQ ID NO: 1886254
cauccuccuuggguaagau

SEQ ID NO: 2397103 - RNA, 19 nt, Artificial Sequence
  Description of Artificial Sequence: Synthetic oligonucleotide
  Antisense strand to SEQ ID NO: 2397102
aucuuacccaaggaggaug

SEQ ID NO: 2397104 - RNA, 19 nt, Artificial Sequence
  Description of Artificial Sequence: Synthetic oligonucleotide
  Sense strand starting at position 385 of SEQ ID NO: 1886254
auccuccuuggguaagauu

SEQ ID NO: 2397105 - RNA, 19 nt, Artificial Sequence
  Description of Artificial Sequence: Synthetic oligonucleotide
  Antisense strand to SEQ ID NO: 2397104
aaucuuacccaaggaggau

SEQ ID NO: 2397106 - RNA, 19 nt, Artificial Sequence
  Description of Artificial Sequence: Synthetic oligonucleotide
  Sense strand starting at position 394 of SEQ ID NO: 1886254
ggguaagauucccaaggaa

SEQ ID NO: 2397107 - RNA, 19 nt, Artificial Sequence
  Description of Artificial Sequence: Synthetic oligonucleotide
  Antisense strand to SEQ ID NO: 2397106
uuccuugggaaucuuaccc

SEQ ID NO: 2397108 - RNA, 19 nt, Artificial Sequence
  Description of Artificial Sequence: Synthetic oligonucleotide
  Sense strand starting at position 524 of SEQ ID NO: 1886254
cccugugacuacuaggcau

SEQ ID NO: 2397109 - RNA, 19 nt, Artificial Sequence
  Description of Artificial Sequence: Synthetic oligonucleotide
  Antisense strand to SEQ ID NO: 2397108
augccuaguagucacaggg

SEQ ID NO: 2397110 - RNA, 19 nt, Artificial Sequence
  Description of Artificial Sequence: Synthetic oligonucleotide
  Sense strand starting at position 579 of SEQ ID NO: 1886254
gaggguagcucggaagcua

SEQ ID NO: 2397111 - RNA, 19 nt, Artificial Sequence
  Description of Artificial Sequence: Synthetic oligonucleotide
  Antisense strand to SEQ ID NO: 2397110
uagcuuccgagcuacccuc

SEQ ID NO: 2397112 - RNA, 19 nt, Artificial Sequence
  Description of Artificial Sequence: Synthetic oligonucleotide
  Sense strand starting at position 617 of SEQ ID NO: 1886254
cagucacauggugggaauu

SEQ ID NO: 2397113 - RNA, 19 nt, Artificial Sequence
  Description of Artificial Sequence: Synthetic oligonucleotide
  Antisense strand to SEQ ID NO: 2397112
aauucccaccaugugacug

SEQ ID NO: 2397114 - RNA, 19 nt, Artificial Sequence
  Description of Artificial Sequence: Synthetic oligonucleotide
  Sense strand starting at position 619 of SEQ ID NO: 1886254
gucacauggugggaauuga

SEQ ID NO: 2397115 - RNA, 19 nt, Artificial Sequence
  Description of Artificial Sequence: Synthetic oligonucleotide
  Antisense strand to SEQ ID NO: 2397114
ucaauucccaccaugugac

SEQ ID NO: 2397116 - RNA, 19 nt, Artificial Sequence
  Description of Artificial Sequence: Synthetic oligonucleotide
  Sense strand starting at position 994 of SEQ ID NO: 1886254
cccggcauccucugccaaa

SEQ ID NO: 2397117 - RNA, 19 nt, Artificial Sequence
  Description of Artificial Sequence: Synthetic oligonucleotide
  Antisense strand to SEQ ID NO: 2397116
uuuggcagaggaugccggg

SEQ ID NO: 2397118 - RNA, 19 nt, Artificial Sequence
  Description of Artificial Sequence: Synthetic oligonucleotide
  Sense strand starting at position 1270 of SEQ ID NO: 1886254
guggaagucuuccucaagu

SEQ ID NO: 2397119 - RNA, 19 nt, Artificial Sequence
  Description of Artificial Sequence: Synthetic oligonucleotide
  Antisense strand to SEQ ID NO: 2397118
acuugaggaagacuuccac

SEQ ID NO: 2397120 - RNA, 19 nt, Artificial Sequence
  Description of Artificial Sequence: Synthetic oligonucleotide
  Sense strand starting at position 1272 of SEQ ID NO: 1886254
ggaagucuuccucaagucu

SEQ ID NO: 2397121 - RNA, 19 nt, Artificial Sequence
  Description of Artificial Sequence: Synthetic oligonucleotide
  Antisense strand to SEQ ID NO: 2397120
agacuugaggaagacuucc

SEQ ID NO: 2397122 - RNA, 19 nt, Artificial Sequence
  Description of Artificial Sequence: Synthetic oligonucleotide
  Sense strand starting at position 1481 of SEQ ID NO: 1886254
ggucacuggucucagguaa

SEQ ID NO: 2397123 - RNA, 19 nt, Artificial Sequence
  Description of Artificial Sequence: Synthetic oligonucleotide
  Antisense strand to SEQ ID NO: 2397122
uuaccugagaccagugacc

SEQ ID NO: 2397124 - RNA, 19 nt, Artificial Sequence
  Description of Artificial Sequence: Synthetic oligonucleotide
  Sense strand starting at position 1868 of SEQ ID NO: 1886254
guggcucugccagggauaa

SEQ ID NO: 2397125 - RNA, 19 nt, Artificial Sequence
  Description of Artificial Sequence: Synthetic oligonucleotide
  Antisense strand to SEQ ID NO: 2397124
uuaucccuggcagagccac

SEQ ID NO: 2397126 - RNA, 19 nt, Artificial Sequence
  Description of Artificial Sequence: Synthetic oligonucleotide
  Sense strand starting at position 1869 of SEQ ID NO: 1886254
uggcucugccagggauaau

SEQ ID NO: 2397127 - RNA, 19 nt, Artificial Sequence
  Description of Artificial Sequence: Synthetic oligonucleotide
  Antisense strand to SEQ ID NO: 2397126
auuaucccuggcagagcca

SEQ ID NO: 2397128 - RNA, 19 nt, Artificial Sequence
  Description of Artificial Sequence: Synthetic oligonucleotide
  Sense strand starting at position 1870 of SEQ ID NO: 1886254
ggcucugccagggauaaua

SEQ ID NO: 2397129 - RNA, 19 nt, Artificial Sequence
  Description of Artificial Sequence: Synthetic oligonucleotide
  Antisense strand to SEQ ID NO: 2397128
uauuaucccuggcagagcc

SEQ ID NO: 2397130 - RNA, 19 nt, Artificial Sequence
  Description of Artificial Sequence: Synthetic oligonucleotide
  Sense strand starting at position 1920 of SEQ ID NO: 1886254
cuagguucggccuaagugu

SEQ ID NO: 2397131 - RNA, 19 nt, Artificial Sequence
  Description of Artificial Sequence: Synthetic oligonucleotide
  Antisense strand to SEQ ID NO: 2397130
acacuuaggccgaaccuag

SEQ ID NO: 2397132 - RNA, 19 nt, Artificial Sequence
  Description of Artificial Sequence: Synthetic oligonucleotide
  Sense strand starting at position 2063 of SEQ ID NO: 1886254
accagagcucagugcaaga

SEQ ID NO: 2397133 - RNA, 19 nt, Artificial Sequence
  Description of Artificial Sequence: Synthetic oligonucleotide
  Antisense strand to SEQ ID NO: 2397132
ucuugcacugagcucuggu

SEQ ID NO: 2397134 - RNA, 19 nt, Artificial Sequence
  Description of Artificial Sequence: Synthetic oligonucleotide
  Sense strand starting at position 2225 of SEQ ID NO: 1886254
caaccagggccucauguau

SEQ ID NO: 2397135 - RNA, 19 nt, Artificial Sequence
  Description of Artificial Sequence: Synthetic oligonucleotide
  Antisense strand to SEQ ID NO: 2397134
auacaugaggcccugguug

SEQ ID NO: 2397136 - RNA, 19 nt, Artificial Sequence
  Description of Artificial Sequence: Synthetic oligonucleotide
  Sense strand starting at position 2232 of SEQ ID NO: 1886254
ggccucauguaucaaugua

SEQ ID NO: 2397137 - RNA, 19 nt, Artificial Sequence
  Description of Artificial Sequence: Synthetic oligonucleotide
  Antisense strand to SEQ ID NO: 2397136
uacauugauacaugaggcc

SEQ ID NO: 2397138 - RNA, 19 nt, Artificial Sequence
  Description of Artificial Sequence: Synthetic oligonucleotide
  Sense strand starting at position 2240 of SEQ ID NO: 1886254
guaucaauguagggaaggu

SEQ ID NO: 2397139 - RNA, 19 nt, Artificial Sequence
  Description of Artificial Sequence: Synthetic oligonucleotide
  Antisense strand to SEQ ID NO: 2397138
accuucccuacauugauac

SEQ ID NO: 2397140 - RNA, 19 nt, Artificial Sequence
  Description of Artificial Sequence: Synthetic oligonucleotide
  Sense strand starting at position 2265 of SEQ ID NO: 1886254
gggauacccuuguaaugga

SEQ ID NO: 2397141 - RNA, 19 nt, Artificial Sequence
  Description of Artificial Sequence: Synthetic oligonucleotide
  Antisense strand to SEQ ID NO: 2397140
uccauuacaaggguauccc

SEQ ID NO: 2397142 - RNA, 19 nt, Artificial Sequence
  Description of Artificial Sequence: Synthetic oligonucleotide
  Sense strand starting at position 2279 of SEQ ID NO: 1886254
auggaauccuuacagaaca

SEQ ID NO: 2397143 - RNA, 19 nt, Artificial Sequence
  Description of Artificial Sequence: Synthetic oligonucleotide
  Antisense strand to SEQ ID NO: 2397142
uguucuguaaggauuccau

SEQ ID NO: 2397144 - RNA, 19 nt, Artificial Sequence
  Description of Artificial Sequence: Synthetic oligonucleotide
  Sense strand starting at position 2659 of SEQ ID NO: 1886254
acauucuuucucugaugag

SEQ ID NO: 2397145 - RNA, 19 nt, Artificial Sequence
  Description of Artificial Sequence: Synthetic oligonucleotide
  Antisense strand to SEQ ID NO: 2397144
cucaucagagaaagaaugu

SEQ ID NO: 2397146 - RNA, 19 nt, Artificial Sequence
  Description of Artificial Sequence: Synthetic oligonucleotide
  Sense strand starting at position 3079 of SEQ ID NO: 1886254
gguggcauuccuugaaucu

SEQ ID NO: 2397147 - RNA, 19 nt, Artificial Sequence
  Description of Artificial Sequence: Synthetic oligonucleotide
  Antisense strand to SEQ ID NO: 2397146
agauucaaggaaugccacc

SEQ ID NO: 2397148 - RNA, 19 nt, Artificial Sequence
  Description of Artificial Sequence: Synthetic oligonucleotide
  Sense strand starting at position 3243 of SEQ ID NO: 1886254
ugggaacugcccuacguua

SEQ ID NO: 2397149 - RNA, 19 nt, Artificial Sequence
  Description of Artificial Sequence: Synthetic oligonucleotide
  Antisense strand to SEQ ID NO: 2397148
uaacguagggcaguuccca

SEQ ID NO: 2397150 - RNA, 19 nt, Artificial Sequence
  Description of Artificial Sequence: Synthetic oligonucleotide
  Sense strand starting at position 3254 of SEQ ID NO: 1886254
cuacguuagguugaaggaa

SEQ ID NO: 2397151 - RNA, 19 nt, Artificial Sequence
  Description of Artificial Sequence: Synthetic oligonucleotide
  Antisense strand to SEQ ID NO: 2397150
uuccuucaaccuaacguag

SEQ ID NO: 2397152 - RNA, 19 nt, Artificial Sequence
  Description of Artificial Sequence: Synthetic oligonucleotide
  Sense strand starting at position 3311 of SEQ ID NO: 1886254
caggaaaugugugcuccua

SEQ ID NO: 2397153 - RNA, 19 nt, Artificial Sequence
  Description of Artificial Sequence: Synthetic oligonucleotide
  Antisense strand to SEQ ID NO: 2397152
uaggagcacacauuuccug

SEQ ID NO: 2397154 - RNA, 19 nt, Artificial Sequence
  Description of Artificial Sequence: Synthetic oligonucleotide
  Sense strand starting at position 3330 of SEQ ID NO: 1886254
gggucagauucccaagaag

SEQ ID NO: 2397155 - RNA, 19 nt, Artificial Sequence
  Description of Artificial Sequence: Synthetic oligonucleotide
  Antisense strand to SEQ ID NO: 2397154
cuucuugggaaucugaccc

SEQ ID NO: 2397156 - RNA, 19 nt, Artificial Sequence
  Description of Artificial Sequence: Synthetic oligonucleotide
  Sense strand starting at position 3367 of SEQ ID NO: 1886254
caucccucccggugaguaa

SEQ ID NO: 2397157 - RNA, 19 nt, Artificial Sequence
  Description of Artificial Sequence: Synthetic oligonucleotide
  Antisense strand to SEQ ID NO: 2397156
uuacucaccgggagggaug

SEQ ID NO: 2397158 - RNA, 19 nt, Artificial Sequence
  Description of Artificial Sequence: Synthetic oligonucleotide
  Sense strand starting at position 3368 of SEQ ID NO: 1886254
aucccucccggugaguaau

SEQ ID NO: 2397159 - RNA, 19 nt, Artificial Sequence
  Description of Artificial Sequence: Synthetic oligonucleotide
  Antisense strand to SEQ ID NO: 2397158
auuacucaccgggagggau

SEQ ID NO: 2397160 - RNA, 19 nt, Artificial Sequence
  Description of Artificial Sequence: Synthetic oligonucleotide
  Sense strand starting at position 3377 of SEQ ID NO: 1886254
ggugaguaaucgguuggcu

SEQ ID NO: 2397161 - RNA, 19 nt, Artificial Sequence
  Description of Artificial Sequence: Synthetic oligonucleotide
  Antisense strand to SEQ ID NO: 2397160
agccaaccgauuacucacc

SEQ ID NO: 2397162 - RNA, 19 nt, Artificial Sequence
  Description of Artificial Sequence: Synthetic oligonucleotide
  Sense strand starting at position 3386 of SEQ ID NO: 1886254
ucgguuggcucccugagaa

SEQ ID NO: 2397163 - RNA, 19 nt, Artificial Sequence
  Description of Artificial Sequence: Synthetic oligonucleotide
  Antisense strand to SEQ ID NO: 2397162
uucucagggagccaaccga

SEQ ID NO: 2397164 - RNA, 19 nt, Artificial Sequence
  Description of Artificial Sequence: Synthetic oligonucleotide
  Sense strand starting at position 3577 of SEQ ID NO: 1886254
uugcccugucccuggagaa

SEQ ID NO: 2397165 - RNA, 19 nt, Artificial Sequence
  Description of Artificial Sequence: Synthetic oligonucleotide
  Antisense strand to SEQ ID NO: 2397164
uucuccagggacagggcaa

SEQ ID NO: 2397166 - RNA, 19 nt, Artificial Sequence
  Description of Artificial Sequence: Synthetic oligonucleotide
  Sense strand starting at position 3710 of SEQ ID NO: 1886254
aaauaaguguggucuagcu

SEQ ID NO: 2397167 - RNA, 19 nt, Artificial Sequence
  Description of Artificial Sequence: Synthetic oligonucleotide
  Antisense strand to SEQ ID NO: 2397166
agcuagaccacacuuauuu

SEQ ID NO: 2397168 - RNA, 19 nt, Artificial Sequence
  Description of Artificial Sequence: Synthetic oligonucleotide
  Sense strand starting at position 3736 of SEQ ID NO: 1886254
uugggaucccugcaucauc

SEQ ID NO: 2397169 - RNA, 19 nt, Artificial Sequence
  Description of Artificial Sequence: Synthetic oligonucleotide
  Antisense strand to SEQ ID NO: 2397168
gaugaugcagggaucccaa

SEQ ID NO: 2397170 - RNA, 19 nt, Artificial Sequence
  Description of Artificial Sequence: Synthetic oligonucleotide
  Sense strand starting at position 3932 of SEQ ID NO: 1886254
agccgagcauuccaggaaa

SEQ ID NO: 2397171 - RNA, 19 nt, Artificial Sequence
  Description of Artificial Sequence: Synthetic oligonucleotide
  Antisense strand to SEQ ID NO: 2397170
uuuccuggaaugcucggcu

SEQ ID NO: 2397172 - RNA, 19 nt, Artificial Sequence
  Description of Artificial Sequence: Synthetic oligonucleotide
  Sense strand starting at position 305 of SEQ ID NO: 1886255
uggucauuuacgcgaggaa

SEQ ID NO: 2397173 - RNA, 19 nt, Artificial Sequence
  Description of Artificial Sequence: Synthetic oligonucleotide
  Antisense strand to SEQ ID NO: 2397172
uuccucgcguaaaugacca

SEQ ID NO: 2397174 - RNA, 19 nt, Artificial Sequence
  Description of Artificial Sequence: Synthetic oligonucleotide
  Sense strand starting at position 362 of SEQ ID NO: 1886255
gucacaggguucgagcaaa

SEQ ID NO: 2397175 - RNA, 19 nt, Artificial Sequence
  Description of Artificial Sequence: Synthetic oligonucleotide
  Antisense strand to SEQ ID NO: 2397174
uuugcucgaacccugugac

SEQ ID NO: 2397176 - RNA, 19 nt, Artificial Sequence
  Description of Artificial Sequence: Synthetic oligonucleotide
  Sense strand starting at position 444 of SEQ ID NO: 1886255
gcucgaaucugggcugcau

SEQ ID NO: 2397177 - RNA, 19 nt, Artificial Sequence
  Description of Artificial Sequence: Synthetic oligonucleotide
  Antisense strand to SEQ ID NO: 2397176
augcagcccagauucgagc

SEQ ID NO: 2397178 - RNA, 19 nt, Artificial Sequence
  Description of Artificial Sequence: Synthetic oligonucleotide
  Sense strand starting at position 791 of SEQ ID NO: 1886255
ucagaaguagccugggcau

SEQ ID NO: 2397179 - RNA, 19 nt, Artificial Sequence
  Description of Artificial Sequence: Synthetic oligonucleotide
  Antisense strand to SEQ ID NO: 2397178
augcccaggcuacuucuga

SEQ ID NO: 2397180 - RNA, 19 nt, Artificial Sequence
  Description of Artificial Sequence: Synthetic oligonucleotide
  Sense strand starting at position 806 of SEQ ID NO: 1886255
gcaucaaauugccaggaca

SEQ ID NO: 2397181 - RNA, 19 nt, Artificial Sequence
  Description of Artificial Sequence: Synthetic oligonucleotide
  Antisense strand to SEQ ID NO: 2397180
uguccuggcaauuugaugc

SEQ ID NO: 2397182 - RNA, 19 nt, Artificial Sequence
  Description of Artificial Sequence: Synthetic oligonucleotide
  Sense strand starting at position 874 of SEQ ID NO: 1886255
cuccacuuccgguagggau

SEQ ID NO: 2397183 - RNA, 19 nt, Artificial Sequence
  Description of Artificial Sequence: Synthetic oligonucleotide
  Antisense strand to SEQ ID NO: 2397182
aucccuaccggaaguggag

SEQ ID NO: 2397184 - RNA, 19 nt, Artificial Sequence
  Description of Artificial Sequence: Synthetic oligonucleotide
  Sense strand starting at position 933 of SEQ ID NO: 1886255
ccacgauucccagggccaa

SEQ ID NO: 2397185 - RNA, 19 nt, Artificial Sequence
  Description of Artificial Sequence: Synthetic oligonucleotide
  Antisense strand to SEQ ID NO: 2397184
uuggcccugggaaucgugg

SEQ ID NO: 2397186 - RNA, 19 nt, Artificial Sequence
  Description of Artificial Sequence: Synthetic oligonucleotide
  Sense strand starting at position 934 of SEQ ID NO: 1886255
cacgauucccagggccaaa

SEQ ID NO: 2397187 - RNA, 19 nt, Artificial Sequence
  Description of Artificial Sequence: Synthetic oligonucleotide
  Antisense strand to SEQ ID NO: 2397186
uuuggcccugggaaucgug

SEQ ID NO: 2397188 - RNA, 19 nt, Artificial Sequence
  Description of Artificial Sequence: Synthetic oligonucleotide
  Sense strand starting at position 1035 of SEQ ID NO: 1886255
gggauagcccauugcucaa

SEQ ID NO: 2397189 - RNA, 19 nt, Artificial Sequence
  Description of Artificial Sequence: Synthetic oligonucleotide
  Antisense strand to SEQ ID NO: 2397188
uugagcaaugggcuauccc

SEQ ID NO: 2397190 - RNA, 19 nt, Artificial Sequence
  Description of Artificial Sequence: Synthetic oligonucleotide
  Sense strand starting at position 1289 of SEQ ID NO: 1886255
gucaauaaguccugugcga

SEQ ID NO: 2397191 - RNA, 19 nt, Artificial Sequence
  Description of Artificial Sequence: Synthetic oligonucleotide
  Antisense strand to SEQ ID NO: 2397190
ucgcacaggacuuauugac

SEQ ID NO: 2397192 - RNA, 19 nt, Artificial Sequence
  Description of Artificial Sequence: Synthetic oligonucleotide
  Sense strand starting at position 1291 of SEQ ID NO: 1886255
caauaaguccugugcgauc

SEQ ID NO: 2397193 - RNA, 19 nt, Artificial Sequence
  Description of Artificial Sequence: Synthetic oligonucleotide
  Antisense strand to SEQ ID NO: 2397192
gaucgcacaggacuuauug

SEQ ID NO: 2397194 - RNA, 19 nt, Artificial Sequence
  Description of Artificial Sequence: Synthetic oligonucleotide
  Sense strand starting at position 1300 of SEQ ID NO: 1886255
cugugcgauccuuaaaucu

SEQ ID NO: 2397195 - RNA, 19 nt, Artificial Sequence
  Description of Artificial Sequence: Synthetic oligonucleotide
  Antisense strand to SEQ ID NO: 2397194
agauuuaaggaucgcacag

SEQ ID NO: 2397196 - RNA, 19 nt, Artificial Sequence
  Description of Artificial Sequence: Synthetic oligonucleotide
  Sense strand starting at position 1393 of SEQ ID NO: 1886255
acuguauuggguugaagga

SEQ ID NO: 2397197 - RNA, 19 nt, Artificial Sequence
  Description of Artificial Sequence: Synthetic oligonucleotide
  Antisense strand to SEQ ID NO: 2397196
uccuucaacccaauacagu

SEQ ID NO: 2397198 - RNA, 19 nt, Artificial Sequence
  Description of Artificial Sequence: Synthetic oligonucleotide
  Sense strand starting at position 1460 of SEQ ID NO: 1886255
gcguccuucuugggaucaa

SEQ ID NO: 2397199 - RNA, 19 nt, Artificial Sequence
  Description of Artificial Sequence: Synthetic oligonucleotide
  Antisense strand to SEQ ID NO: 2397198
uugaucccaagaaggacgc

SEQ ID NO: 2397200 - RNA, 19 nt, Artificial Sequence
  Description of Artificial Sequence: Synthetic oligonucleotide
  Sense strand starting at position 1461 of SEQ ID NO: 1886255
cguccuucuugggaucaau

SEQ ID NO: 2397201 - RNA, 19 nt, Artificial Sequence
  Description of Artificial Sequence: Synthetic oligonucleotide
  Antisense strand to SEQ ID NO: 2397200
auugaucccaagaaggacg

SEQ ID NO: 2397202 - RNA, 19 nt, Artificial Sequence
  Description of Artificial Sequence: Synthetic oligonucleotide
  Sense strand starting at position 1471 of SEQ ID NO: 1886255
gggaucaauuaacaaggaa

SEQ ID NO: 2397203 - RNA, 19 nt, Artificial Sequence
  Description of Artificial Sequence: Synthetic oligonucleotide
  Antisense strand to SEQ ID NO: 2397202
uuccuuguuaauugauccc

SEQ ID NO: 2397204 - RNA, 19 nt, Artificial Sequence
  Description of Artificial Sequence: Synthetic oligonucleotide
  Sense strand starting at position 1531 of SEQ ID NO: 1886255
aggucagcucccuaaggaa

SEQ ID NO: 2397205 - RNA, 19 nt, Artificial Sequence
  Description of Artificial Sequence: Synthetic oligonucleotide
  Antisense strand to SEQ ID NO: 2397204
uuccuuagggagcugaccu

SEQ ID NO: 2397206 - RNA, 19 nt, Artificial Sequence
  Description of Artificial Sequence: Synthetic oligonucleotide
  Sense strand starting at position 2207 of SEQ ID NO: 1886255
guggacauguguccaaaug

SEQ ID NO: 2397207 - RNA, 19 nt, Artificial Sequence
  Description of Artificial Sequence: Synthetic oligonucleotide
  Antisense strand to SEQ ID NO: 2397206
cauuuggacacauguccac

SEQ ID NO: 2397208 - RNA, 19 nt, Artificial Sequence
  Description of Artificial Sequence: Synthetic oligonucleotide
  Sense strand starting at position 2312 of SEQ ID NO: 1886255
gugaaacacugauguguca

SEQ ID NO: 2397209 - RNA, 19 nt, Artificial Sequence
  Description of Artificial Sequence: Synthetic oligonucleotide
  Antisense strand to SEQ ID NO: 2397208
ugacacaucaguguuucac

SEQ ID NO: 2397210 - RNA, 19 nt, Artificial Sequence
  Description of Artificial Sequence: Synthetic oligonucleotide
  Sense strand starting at position 2319 of SEQ ID NO: 1886255
acugaugugucauggacac

SEQ ID NO: 2397211 - RNA, 19 nt, Artificial Sequence
  Description of Artificial Sequence: Synthetic oligonucleotide
  Antisense strand to SEQ ID NO: 2397210
guguccaugacacaucagu

SEQ ID NO: 2397212 - RNA, 19 nt, Artificial Sequence
  Description of Artificial Sequence: Synthetic oligonucleotide
  Sense strand starting at position 2321 of SEQ ID NO: 1886255
ugaugugucauggacacag

SEQ ID NO: 2397213 - RNA, 19 nt, Artificial Sequence
  Description of Artificial Sequence: Synthetic oligonucleotide
  Antisense strand to SEQ ID NO: 2397212
cuguguccaugacacauca

SEQ ID NO: 2397214 - RNA, 19 nt, Artificial Sequence
  Description of Artificial Sequence: Synthetic oligonucleotide
  Sense strand starting at position 2670 of SEQ ID NO: 1886255
ccucguguguucucugaua

SEQ ID NO: 2397215 - RNA, 19 nt, Artificial Sequence
  Description of Artificial Sequence: Synthetic oligonucleotide
  Antisense strand to SEQ ID NO: 2397214
uaucagagaacacacgagg

SEQ ID NO: 2397216 - RNA, 19 nt, Artificial Sequence
  Description of Artificial Sequence: Synthetic oligonucleotide
  Sense strand starting at position 2672 of SEQ ID NO: 1886255
ucguguguucucugauaug

SEQ ID NO: 2397217 - RNA, 19 nt, Artificial Sequence
  Description of Artificial Sequence: Synthetic oligonucleotide
  Antisense strand to SEQ ID NO: 2397216
cauaucagagaacacacga

SEQ ID NO: 2397218 - RNA, 19 nt, Artificial Sequence
  Description of Artificial Sequence: Synthetic oligonucleotide
  Sense strand starting at position 3051 of SEQ ID NO: 1886255
ugggauggcccauagcuua

SEQ ID NO: 2397219 - RNA, 19 nt, Artificial Sequence
  Description of Artificial Sequence: Synthetic oligonucleotide
  Antisense strand to SEQ ID NO: 2397218
uaagcuaugggccauccca

SEQ ID NO: 2397220 - RNA, 19 nt, Artificial Sequence
  Description of Artificial Sequence: Synthetic oligonucleotide
  Sense strand starting at position 3233 of SEQ ID NO: 1886255
auccuagaggccugacuua

SEQ ID NO: 2397221 - RNA, 19 nt, Artificial Sequence
  Description of Artificial Sequence: Synthetic oligonucleotide
  Antisense strand to SEQ ID NO: 2397220
uaagucaggccucuaggau

SEQ ID NO: 2397222 - RNA, 19 nt, Artificial Sequence
  Description of Artificial Sequence: Synthetic oligonucleotide
  Sense strand starting at position 3245 of SEQ ID NO: 1886255
ugacuuaagcaccgaguuu

SEQ ID NO: 2397223 - RNA, 19 nt, Artificial Sequence
  Description of Artificial Sequence: Synthetic oligonucleotide
  Antisense strand to SEQ ID NO: 2397222
aaacucggugcuuaaguca

SEQ ID NO: 2397224 - RNA, 19 nt, Artificial Sequence
  Description of Artificial Sequence: Synthetic oligonucleotide
  Sense strand starting at position 3356 of SEQ ID NO: 1886255
ggguccgauuccuaaggaa

SEQ ID NO: 2397225 - RNA, 19 nt, Artificial Sequence
  Description of Artificial Sequence: Synthetic oligonucleotide
  Antisense strand to SEQ ID NO: 2397224
uuccuuaggaaucggaccc

SEQ ID NO: 2397226 - RNA, 19 nt, Artificial Sequence
  Description of Artificial Sequence: Synthetic oligonucleotide
  Sense strand starting at position 3411 of SEQ ID NO: 1886255
cgggucaguuccugaggaa

SEQ ID NO: 2397227 - RNA, 19 nt, Artificial Sequence
  Description of Artificial Sequence: Synthetic oligonucleotide
  Antisense strand to SEQ ID NO: 2397226
uuccucaggaacugacccg

SEQ ID NO: 2397228 - RNA, 19 nt, Artificial Sequence
  Description of Artificial Sequence: Synthetic oligonucleotide
  Sense strand starting at position 89 of SEQ ID NO: 1886256
ggauauacucaccacagcu

SEQ ID NO: 2397229 - RNA, 19 nt, Artificial Sequence
  Description of Artificial Sequence: Synthetic oligonucleotide
  Antisense strand to SEQ ID NO: 2397228
agcuguggugaguauaucc

SEQ ID NO: 2397230 - RNA, 19 nt, Artificial Sequence
  Description of Artificial Sequence: Synthetic oligonucleotide
  Sense strand starting at position 295 of SEQ ID NO: 1886256
guaagagauacccacguaa

SEQ ID NO: 2397231 - RNA, 19 nt, Artificial Sequence
  Description of Artificial Sequence: Synthetic oligonucleotide
  Antisense strand to SEQ ID NO: 2397230
uuacguggguaucucuuac

SEQ ID NO: 2397232 - RNA, 19 nt, Artificial Sequence
  Description of Artificial Sequence: Synthetic oligonucleotide
  Sense strand starting at position 297 of SEQ ID NO: 1886256
aagagauacccacguaaug

SEQ ID NO: 2397233 - RNA, 19 nt, Artificial Sequence
  Description of Artificial Sequence: Synthetic oligonucleotide
  Antisense strand to SEQ ID NO: 2397232
cauuacguggguaucucuu

SEQ ID NO: 2397234 - RNA, 19 nt, Artificial Sequence
  Description of Artificial Sequence: Synthetic oligonucleotide
  Sense strand starting at position 333 of SEQ ID NO: 1886256
cgacucaucauggaugcuu

SEQ ID NO: 2397235 - RNA, 19 nt, Artificial Sequence
  Description of Artificial Sequence: Synthetic oligonucleotide
  Antisense strand to SEQ ID NO: 2397234
aagcauccaugaugagucg

SEQ ID NO: 2397236 - RNA, 19 nt, Artificial Sequence
  Description of Artificial Sequence: Synthetic oligonucleotide
  Sense strand starting at position 713 of SEQ ID NO: 1886256
ggugaccacuugucucaga

SEQ ID NO: 2397237 - RNA, 19 nt, Artificial Sequence
  Description of Artificial Sequence: Synthetic oligonucleotide
  Antisense strand to SEQ ID NO: 2397236
ucugagacaaguggucacc

SEQ ID NO: 2397238 - RNA, 19 nt, Artificial Sequence
  Description of Artificial Sequence: Synthetic oligonucleotide
  Sense strand starting at position 714 of SEQ ID NO: 1886256
gugaccacuugucucagaa

SEQ ID NO: 2397239 - RNA, 19 nt, Artificial Sequence
  Description of Artificial Sequence: Synthetic oligonucleotide
  Antisense strand to SEQ ID NO: 2397238
uucugagacaaguggucac

SEQ ID NO: 2397240 - RNA, 19 nt, Artificial Sequence
  Description of Artificial Sequence: Synthetic oligonucleotide
  Sense strand starting at position 716 of SEQ ID NO: 1886256
gaccacuugucucagaaga

SEQ ID NO: 2397241 - RNA, 19 nt, Artificial Sequence
  Description of Artificial Sequence: Synthetic oligonucleotide
  Antisense strand to SEQ ID NO: 2397240
ucuucugagacaagugguc

SEQ ID NO: 2397242 - RNA, 19 nt, Artificial Sequence
  Description of Artificial Sequence: Synthetic oligonucleotide
  Sense strand starting at position 718 of SEQ ID NO: 1886256
ccacuugucucagaagaac

SEQ ID NO: 2397243 - RNA, 19 nt, Artificial Sequence
  Description of Artificial Sequence: Synthetic oligonucleotide
  Antisense strand to SEQ ID NO: 2397242
guucuucugagacaagugg

SEQ ID NO: 2397244 - RNA, 19 nt, Artificial Sequence
  Description of Artificial Sequence: Synthetic oligonucleotide
  Sense strand starting at position 745 of SEQ ID NO: 1886256
gcaaauucccaguauagga

SEQ ID NO: 2397245 - RNA, 19 nt, Artificial Sequence
  Description of Artificial Sequence: Synthetic oligonucleotide
  Antisense strand to SEQ ID NO: 2397244
uccuauacugggaauuugc

SEQ ID NO: 2397246 - RNA, 19 nt, Artificial Sequence
  Description of Artificial Sequence: Synthetic oligonucleotide
  Sense strand starting at position 788 of SEQ ID NO: 1886256
ucagaaugccacuguuaac

SEQ ID NO: 2397247 - RNA, 19 nt, Artificial Sequence
  Description of Artificial Sequence: Synthetic oligonucleotide
  Antisense strand to SEQ ID NO: 2397246
guuaacaguggcauucuga

SEQ ID NO: 2397248 - RNA, 19 nt, Artificial Sequence
  Description of Artificial Sequence: Synthetic oligonucleotide
  Sense strand starting at position 798 of SEQ ID NO: 1886256
acuguuaaccguuacucaa

SEQ ID NO: 2397249 - RNA, 19 nt, Artificial Sequence
  Description of Artificial Sequence: Synthetic oligonucleotide
  Antisense strand to SEQ ID NO: 2397248
uugaguaacgguuaacagu

SEQ ID NO: 2397250 - RNA, 19 nt, Artificial Sequence
  Description of Artificial Sequence: Synthetic oligonucleotide
  Sense strand starting at position 808 of SEQ ID NO: 1886256
guuacucaaacucggagaa

SEQ ID NO: 2397251 - RNA, 19 nt, Artificial Sequence
  Description of Artificial Sequence: Synthetic oligonucleotide
  Antisense strand to SEQ ID NO: 2397250
uucuccgaguuugaguaac

SEQ ID NO: 2397252 - RNA, 19 nt, Artificial Sequence
  Description of Artificial Sequence: Synthetic oligonucleotide
  Sense strand starting at position 809 of SEQ ID NO: 1886256
uuacucaaacucggagaau

SEQ ID NO: 2397253 - RNA, 19 nt, Artificial Sequence
  Description of Artificial Sequence: Synthetic oligonucleotide
  Antisense strand to SEQ ID NO: 2397252
auucuccgaguuugaguaa

SEQ ID NO: 2397254 - RNA, 19 nt, Artificial Sequence
  Description of Artificial Sequence: Synthetic oligonucleotide
  Sense strand starting at position 810 of SEQ ID NO: 1886256
uacucaaacucggagaaug

SEQ ID NO: 2397255 - RNA, 19 nt, Artificial Sequence
  Description of Artificial Sequence: Synthetic oligonucleotide
  Antisense strand to SEQ ID NO: 2397254
cauucuccgaguuugagua

SEQ ID NO: 2397256 - RNA, 19 nt, Artificial Sequence
  Description of Artificial Sequence: Synthetic oligonucleotide
  Sense strand starting at position 822 of SEQ ID NO: 1886256
gagaauggguuacccucaa

SEQ ID NO: 2397257 - RNA, 19 nt, Artificial Sequence
  Description of Artificial Sequence: Synthetic oligonucleotide
  Antisense strand to SEQ ID NO: 2397256
uugaggguaacccauucuc

SEQ ID NO: 2397258 - RNA, 19 nt, Artificial Sequence
  Description of Artificial Sequence: Synthetic oligonucleotide
  Sense strand starting at position 916 of SEQ ID NO: 1886256
ggaucucagccuugacuca

SEQ ID NO: 2397259 - RNA, 19 nt, Artificial Sequence
  Description of Artificial Sequence: Synthetic oligonucleotide
  Antisense strand to SEQ ID NO: 2397258
ugagucaaggcugagaucc

SEQ ID NO: 2397260 - RNA, 19 nt, Artificial Sequence
  Description of Artificial Sequence: Synthetic oligonucleotide
  Sense strand starting at position 1021 of SEQ ID NO: 1886256
ggucacaggugggaugaaa

SEQ ID NO: 2397261 - RNA, 19 nt, Artificial Sequence
  Description of Artificial Sequence: Synthetic oligonucleotide
  Antisense strand to SEQ ID NO: 2397260
uuucaucccaccugugacc

SEQ ID NO: 2397262 - RNA, 19 nt, Artificial Sequence
  Description of Artificial Sequence: Synthetic oligonucleotide
  Sense strand starting at position 1272 of SEQ ID NO: 1886256
aagacauccuccuugggua

SEQ ID NO: 2397263 - RNA, 19 nt, Artificial Sequence
  Description of Artificial Sequence: Synthetic oligonucleotide
  Antisense strand to SEQ ID NO: 2397262
uacccaaggaggaugucuu

SEQ ID NO: 2397264 - RNA, 19 nt, Artificial Sequence
  Description of Artificial Sequence: Synthetic oligonucleotide
  Sense strand starting at position 1273 of SEQ ID NO: 1886256
agacauccuccuuggguaa

SEQ ID NO: 2397265 - RNA, 19 nt, Artificial Sequence
  Description of Artificial Sequence: Synthetic oligonucleotide
  Antisense strand to SEQ ID NO: 2397264
uuacccaaggaggaugucu

SEQ ID NO: 2397266 - RNA, 19 nt, Artificial Sequence
  Description of Artificial Sequence: Synthetic oligonucleotide
  Sense strand starting at position 1275 of SEQ ID NO: 1886256
acauccuccuuggguaaga

SEQ ID NO: 2397267 - RNA, 19 nt, Artificial Sequence
  Description of Artificial Sequence: Synthetic oligonucleotide
  Antisense strand to SEQ ID NO: 2397266
ucuuacccaaggaggaugu

SEQ ID NO: 2397268 - RNA, 19 nt, Artificial Sequence
  Description of Artificial Sequence: Synthetic oligonucleotide
  Sense strand starting at position 1276 of SEQ ID NO: 1886256
cauccuccuuggguaagau

SEQ ID NO: 2397269 - RNA, 19 nt, Artificial Sequence
  Description of Artificial Sequence: Synthetic oligonucleotide
  Antisense strand to SEQ ID NO: 2397268
aucuuacccaaggaggaug

SEQ ID NO: 2397270 - RNA, 19 nt, Artificial Sequence
  Description of Artificial Sequence: Synthetic oligonucleotide
  Sense strand starting at position 1277 of SEQ ID NO: 1886256
auccuccuuggguaagauu

SEQ ID NO: 2397271 - RNA, 19 nt, Artificial Sequence
  Description of Artificial Sequence: Synthetic oligonucleotide
  Antisense strand to SEQ ID NO: 2397270
aaucuuacccaaggaggau

SEQ ID NO: 2397272 - RNA, 19 nt, Artificial Sequence
  Description of Artificial Sequence: Synthetic oligonucleotide
  Sense strand starting at position 1286 of SEQ ID NO: 1886256
ggguaagauucccaaggaa

SEQ ID NO: 2397273 - RNA, 19 nt, Artificial Sequence
  Description of Artificial Sequence: Synthetic oligonucleotide
  Antisense strand to SEQ ID NO: 2397272
uuccuugggaaucuuaccc

SEQ ID NO: 2397274 - RNA, 19 nt, Artificial Sequence
  Description of Artificial Sequence: Synthetic oligonucleotide
  Sense strand starting at position 1483 of SEQ ID NO: 1886256
gaagcuaugcacuguugca

SEQ ID NO: 2397275 - RNA, 19 nt, Artificial Sequence
  Description of Artificial Sequence: Synthetic oligonucleotide
  Antisense strand to SEQ ID NO: 2397274
ugcaacagugcauagcuuc

SEQ ID NO: 2397276 - RNA, 19 nt, Artificial Sequence
  Description of Artificial Sequence: Synthetic oligonucleotide
  Sense strand starting at position 1509 of SEQ ID NO: 1886256
cagucacauggugggaauu

SEQ ID NO: 2397277 - RNA, 19 nt, Artificial Sequence
  Description of Artificial Sequence: Synthetic oligonucleotide
  Antisense strand to SEQ ID NO: 2397276
aauucccaccaugugacug

SEQ ID NO: 2397278 - RNA, 19 nt, Artificial Sequence
  Description of Artificial Sequence: Synthetic oligonucleotide
  Sense strand starting at position 1511 of SEQ ID NO: 1886256
gucacauggugggaauuga

SEQ ID NO: 2397279 - RNA, 19 nt, Artificial Sequence
  Description of Artificial Sequence: Synthetic oligonucleotide
  Antisense strand to SEQ ID NO: 2397278
ucaauucccaccaugugac

SEQ ID NO: 2397280 - RNA, 19 nt, Artificial Sequence
  Description of Artificial Sequence: Synthetic oligonucleotide
  Sense strand starting at position 1886 of SEQ ID NO: 1886256
cccggcauccucugccaaa

SEQ ID NO: 2397281 - RNA, 19 nt, Artificial Sequence
  Description of Artificial Sequence: Synthetic oligonucleotide
  Antisense strand to SEQ ID NO: 2397280
uuuggcagaggaugccggg

SEQ ID NO: 2397282 - RNA, 19 nt, Artificial Sequence
  Description of Artificial Sequence: Synthetic oligonucleotide
  Sense strand starting at position 2162 of SEQ ID NO: 1886256
guggaagucuuccucaagu

SEQ ID NO: 2397283 - RNA, 19 nt, Artificial Sequence
  Description of Artificial Sequence: Synthetic oligonucleotide
  Antisense strand to SEQ ID NO: 2397282
acuugaggaagacuuccac

SEQ ID NO: 2397284 - RNA, 19 nt, Artificial Sequence
  Description of Artificial Sequence: Synthetic oligonucleotide
  Sense strand starting at position 2164 of SEQ ID NO: 1886256
ggaagucuuccucaagucu

SEQ ID NO: 2397285 - RNA, 19 nt, Artificial Sequence
  Description of Artificial Sequence: Synthetic oligonucleotide
  Antisense strand to SEQ ID NO: 2397284
agacuugaggaagacuucc

SEQ ID NO: 2397286 - RNA, 19 nt, Artificial Sequence
  Description of Artificial Sequence: Synthetic oligonucleotide
  Sense strand starting at position 2373 of SEQ ID NO: 1886256
ggucacuggucucagguaa

SEQ ID NO: 2397287 - RNA, 19 nt, Artificial Sequence
  Description of Artificial Sequence: Synthetic oligonucleotide
  Antisense strand to SEQ ID NO: 2397286
uuaccugagaccagugacc

SEQ ID NO: 2397288 - RNA, 19 nt, Artificial Sequence
  Description of Artificial Sequence: Synthetic oligonucleotide
  Sense strand starting at position 2760 of SEQ ID NO: 1886256
guggcucugccagggauaa

SEQ ID NO: 2397289 - RNA, 19 nt, Artificial Sequence
  Description of Artificial Sequence: Synthetic oligonucleotide
  Antisense strand to SEQ ID NO: 2397288
uuaucccuggcagagccac

SEQ ID NO: 2397290 - RNA, 19 nt, Artificial Sequence
  Description of Artificial Sequence: Synthetic oligonucleotide
  Sense strand starting at position 2761 of SEQ ID NO: 1886256
uggcucugccagggauaau

SEQ ID NO: 2397291 - RNA, 19 nt, Artificial Sequence
  Description of Artificial Sequence: Synthetic oligonucleotide
  Antisense strand to SEQ ID NO: 2397290
auuaucccuggcagagcca

SEQ ID NO: 2397292 - RNA, 19 nt, Artificial Sequence
  Description of Artificial Sequence: Synthetic oligonucleotide
  Sense strand starting at position 2762 of SEQ ID NO: 1886256
ggcucugccagggauaaua

SEQ ID NO: 2397293 - RNA, 19 nt, Artificial Sequence
  Description of Artificial Sequence: Synthetic oligonucleotide
  Antisense strand to SEQ ID NO: 2397292
uauuaucccuggcagagcc

SEQ ID NO: 2397294 - RNA, 19 nt, Artificial Sequence
  Description of Artificial Sequence: Synthetic oligonucleotide
  Sense strand starting at position 2812 of SEQ ID NO: 1886256
cuagguucggccuaagugu

SEQ ID NO: 2397295 - RNA, 19 nt, Artificial Sequence
  Description of Artificial Sequence: Synthetic oligonucleotide
  Antisense strand to SEQ ID NO: 2397294
acacuuaggccgaaccuag

SEQ ID NO: 2397296 - RNA, 19 nt, Artificial Sequence
  Description of Artificial Sequence: Synthetic oligonucleotide
  Sense strand starting at position 2955 of SEQ ID NO: 1886256
accagagcucagugcaaga

SEQ ID NO: 2397297 - RNA, 19 nt, Artificial Sequence
  Description of Artificial Sequence: Synthetic oligonucleotide
  Antisense strand to SEQ ID NO: 2397296
ucuugcacugagcucuggu

SEQ ID NO: 2397298 - RNA, 19 nt, Artificial Sequence
  Description of Artificial Sequence: Synthetic oligonucleotide
  Sense strand starting at position 3117 of SEQ ID NO: 1886256
caaccagggccucauguau

SEQ ID NO: 2397299 - RNA, 19 nt, Artificial Sequence
  Description of Artificial Sequence: Synthetic oligonucleotide
  Antisense strand to SEQ ID NO: 2397298
auacaugaggcccugguug

SEQ ID NO: 2397300 - RNA, 19 nt, Artificial Sequence
  Description of Artificial Sequence: Synthetic oligonucleotide
  Sense strand starting at position 3157 of SEQ ID NO: 1886256
gggauacccuuguaaugga

SEQ ID NO: 2397301 - RNA, 19 nt, Artificial Sequence
  Description of Artificial Sequence: Synthetic oligonucleotide
  Antisense strand to SEQ ID NO: 2397300
uccauuacaaggguauccc

SEQ ID NO: 2397302 - RNA, 19 nt, Artificial Sequence
  Description of Artificial Sequence: Synthetic oligonucleotide
  Sense strand starting at position 3171 of SEQ ID NO: 1886256
auggaauccuuacagaaca

SEQ ID NO: 2397303 - RNA, 19 nt, Artificial Sequence
  Description of Artificial Sequence: Synthetic oligonucleotide
  Antisense strand to SEQ ID NO: 2397302
uguucuguaaggauuccau

SEQ ID NO: 2397304 - RNA, 19 nt, Artificial Sequence
  Description of Artificial Sequence: Synthetic oligonucleotide
  Sense strand starting at position 3551 of SEQ ID NO: 1886256
acauucuuucucugaugag

SEQ ID NO: 2397305 - RNA, 19 nt, Artificial Sequence
  Description of Artificial Sequence: Synthetic oligonucleotide
  Antisense strand to SEQ ID NO: 2397304
cucaucagagaaagaaugu

SEQ ID NO: 2397306 - RNA, 19 nt, Artificial Sequence
  Description of Artificial Sequence: Synthetic oligonucleotide
  Sense strand starting at position 3971 of SEQ ID NO: 1886256
gguggcauuccuugaaucu

SEQ ID NO: 2397307 - RNA, 19 nt, Artificial Sequence
  Description of Artificial Sequence: Synthetic oligonucleotide
  Antisense strand to SEQ ID NO: 2397306
agauucaaggaaugccacc

SEQ ID NO: 2397308 - RNA, 19 nt, Artificial Sequence
  Description of Artificial Sequence: Synthetic oligonucleotide
  Sense strand starting at position 259 of SEQ ID NO: 1886257
augcaagucuuccuccagu

SEQ ID NO: 2397309 - RNA, 19 nt, Artificial Sequence
  Description of Artificial Sequence: Synthetic oligonucleotide
  Antisense strand to SEQ ID NO: 2397308
acuggaggaagacuugcau

SEQ ID NO: 2397310 - RNA, 19 nt, Artificial Sequence
  Description of Artificial Sequence: Synthetic oligonucleotide
  Sense strand starting at position 384 of SEQ ID NO: 1886257
ugugaugugauccauguga

SEQ ID NO: 2397311 - RNA, 19 nt, Artificial Sequence
  Description of Artificial Sequence: Synthetic oligonucleotide
  Antisense strand to SEQ ID NO: 2397310
ucacauggaucacaucaca

SEQ ID NO: 2397312 - RNA, 19 nt, Artificial Sequence
  Description of Artificial Sequence: Synthetic oligonucleotide
  Sense strand starting at position 386 of SEQ ID NO: 1886257
ugaugugauccaugugaau

SEQ ID NO: 2397313 - RNA, 19 nt, Artificial Sequence
  Description of Artificial Sequence: Synthetic oligonucleotide
  Antisense strand to SEQ ID NO: 2397312
auucacauggaucacauca

SEQ ID NO: 2397314 - RNA, 19 nt, Artificial Sequence
  Description of Artificial Sequence: Synthetic oligonucleotide
  Sense strand starting at position 397 of SEQ ID NO: 1886257
augugaauuacugagucgu

SEQ ID NO: 2397315 - RNA, 19 nt, Artificial Sequence
  Description of Artificial Sequence: Synthetic oligonucleotide
  Antisense strand to SEQ ID NO: 2397314
acgacucaguaauucacau

SEQ ID NO: 2397316 - RNA, 19 nt, Artificial Sequence
  Description of Artificial Sequence: Synthetic oligonucleotide
  Sense strand starting at position 399 of SEQ ID NO: 1886257
gugaauuacugagucguca

SEQ ID NO: 2397317 - RNA, 19 nt, Artificial Sequence
  Description of Artificial Sequence: Synthetic oligonucleotide
  Antisense strand to SEQ ID NO: 2397316
ugacgacucaguaauucac

SEQ ID NO: 2397318 - RNA, 19 nt, Artificial Sequence
  Description of Artificial Sequence: Synthetic oligonucleotide
  Sense strand starting at position 403 of SEQ ID NO: 1886257
auuacugagucgucacgga

SEQ ID NO: 2397319 - RNA, 19 nt, Artificial Sequence
  Description of Artificial Sequence: Synthetic oligonucleotide
  Antisense strand to SEQ ID NO: 2397318
uccgugacgacucaguaau

SEQ ID NO: 2397320 - RNA, 19 nt, Artificial Sequence
  Description of Artificial Sequence: Synthetic oligonucleotide
  Sense strand starting at position 728 of SEQ ID NO: 1886257
ccaagugugcauuggaaau

SEQ ID NO: 2397321 - RNA, 19 nt, Artificial Sequence
  Description of Artificial Sequence: Synthetic oligonucleotide
  Antisense strand to SEQ ID NO: 2397320
auuuccaaugcacacuugg

SEQ ID NO: 2397322 - RNA, 19 nt, Artificial Sequence
  Description of Artificial Sequence: Synthetic oligonucleotide
  Sense strand starting at position 730 of SEQ ID NO: 1886257
aagugugcauuggaaauca

SEQ ID NO: 2397323 - RNA, 19 nt, Artificial Sequence
  Description of Artificial Sequence: Synthetic oligonucleotide
  Antisense strand to SEQ ID NO: 2397322
ugauuuccaaugcacacuu

SEQ ID NO: 2397324 - RNA, 19 nt, Artificial Sequence
  Description of Artificial Sequence: Synthetic oligonucleotide
  Sense strand starting at position 1365 of SEQ ID NO: 1886257
accagaucaccgcaucuua

SEQ ID NO: 2397325 - RNA, 19 nt, Artificial Sequence
  Description of Artificial Sequence: Synthetic oligonucleotide
  Antisense strand to SEQ ID NO: 2397324
uaagaugcggugaucuggu

SEQ ID NO: 2397326 - RNA, 19 nt, Artificial Sequence
  Description of Artificial Sequence: Synthetic oligonucleotide
  Sense strand starting at position 1461 of SEQ ID NO: 1886257
auggguccuccuuggguua

SEQ ID NO: 2397327 - RNA, 19 nt, Artificial Sequence
  Description of Artificial Sequence: Synthetic oligonucleotide
  Antisense strand to SEQ ID NO: 2397326
uaacccaaggaggacccau

SEQ ID NO: 2397328 - RNA, 19 nt, Artificial Sequence
  Description of Artificial Sequence: Synthetic oligonucleotide
  Sense strand starting at position 1513 of SEQ ID NO: 1886257
uucccucccgggugaaauu

SEQ ID NO: 2397329 - RNA, 19 nt, Artificial Sequence
  Description of Artificial Sequence: Synthetic oligonucleotide
  Antisense strand to SEQ ID NO: 2397328
aauuucacccgggagggaa

SEQ ID NO: 2397330 - RNA, 19 nt, Artificial Sequence
  Description of Artificial Sequence: Synthetic oligonucleotide
  Sense strand starting at position 1591 of SEQ ID NO: 1886257
uggucuggcucaugaccaa

SEQ ID NO: 2397331 - RNA, 19 nt, Artificial Sequence
  Description of Artificial Sequence: Synthetic oligonucleotide
  Antisense strand to SEQ ID NO: 2397330
uuggucaugagccagacca

SEQ ID NO: 2397332 - RNA, 19 nt, Artificial Sequence
  Description of Artificial Sequence: Synthetic oligonucleotide
  Sense strand starting at position 1667 of SEQ ID NO: 1886257
ggcagagcucacugaaaga

SEQ ID NO: 2397333 - RNA, 19 nt, Artificial Sequence
  Description of Artificial Sequence: Synthetic oligonucleotide
  Antisense strand to SEQ ID NO: 2397332
ucuuucagugagcucugcc

SEQ ID NO: 2397334 - RNA, 19 nt, Artificial Sequence
  Description of Artificial Sequence: Synthetic oligonucleotide
  Sense strand starting at position 2045 of SEQ ID NO: 1886257
gccagaugugcucagcaca

SEQ ID NO: 2397335 - RNA, 19 nt, Artificial Sequence
  Description of Artificial Sequence: Synthetic oligonucleotide
  Antisense strand to SEQ ID NO: 2397334
ugugcugagcacaucuggc

SEQ ID NO: 2397336 - RNA, 19 nt, Artificial Sequence
  Description of Artificial Sequence: Synthetic oligonucleotide
  Sense strand starting at position 2136 of SEQ ID NO: 1886257
uggacacugucccaugaaa

SEQ ID NO: 2397337 - RNA, 19 nt, Artificial Sequence
  Description of Artificial Sequence: Synthetic oligonucleotide
  Antisense strand to SEQ ID NO: 2397336
uuucaugggacagugucca

SEQ ID NO: 2397338 - RNA, 19 nt, Artificial Sequence
  Description of Artificial Sequence: Synthetic oligonucleotide
  Sense strand starting at position 2281 of SEQ ID NO: 1886257
cgugaugagauccaugcaa

SEQ ID NO: 2397339 - RNA, 19 nt, Artificial Sequence
  Description of Artificial Sequence: Synthetic oligonucleotide
  Antisense strand to SEQ ID NO: 2397338
uugcauggaucucaucacg

SEQ ID NO: 2397340 - RNA, 19 nt, Artificial Sequence
  Description of Artificial Sequence: Synthetic oligonucleotide
  Sense strand starting at position 2303 of SEQ ID NO: 1886257
auugacuugucaccaaugu

SEQ ID NO: 2397341 - RNA, 19 nt, Artificial Sequence
  Description of Artificial Sequence: Synthetic oligonucleotide
  Antisense strand to SEQ ID NO: 2397340
acauuggugacaagucaau

SEQ ID NO: 2397342 - RNA, 19 nt, Artificial Sequence
  Description of Artificial Sequence: Synthetic oligonucleotide
  Sense strand starting at position 2304 of SEQ ID NO: 1886257
uugacuugucaccaaugua

SEQ ID NO: 2397343 - RNA, 19 nt, Artificial Sequence
  Description of Artificial Sequence: Synthetic oligonucleotide
  Antisense strand to SEQ ID NO: 2397342
uacauuggugacaagucaa

SEQ ID NO: 2397344 - RNA, 19 nt, Artificial Sequence
  Description of Artificial Sequence: Synthetic oligonucleotide
  Sense strand starting at position 2752 of SEQ ID NO: 1886257
uuugcuuggucccaagauc

SEQ ID NO: 2397345 - RNA, 19 nt, Artificial Sequence
  Description of Artificial Sequence: Synthetic oligonucleotide
  Antisense strand to SEQ ID NO: 2397344
gaucuugggaccaagcaaa

SEQ ID NO: 2397346 - RNA, 19 nt, Artificial Sequence
  Description of Artificial Sequence: Synthetic oligonucleotide
  Sense strand starting at position 2816 of SEQ ID NO: 1886257
acaaauucucaguacaggu

SEQ ID NO: 2397347 - RNA, 19 nt, Artificial Sequence
  Description of Artificial Sequence: Synthetic oligonucleotide
  Antisense strand to SEQ ID NO: 2397346
accuguacugagaauuugu

SEQ ID NO: 2397348 - RNA, 19 nt, Artificial Sequence
  Description of Artificial Sequence: Synthetic oligonucleotide
  Sense strand starting at position 3070 of SEQ ID NO: 1886257
ggugcagcauccuugaauc

SEQ ID NO: 2397349 - RNA, 19 nt, Artificial Sequence
  Description of Artificial Sequence: Synthetic oligonucleotide
  Antisense strand to SEQ ID NO: 2397348
gauucaaggaugcugcacc

SEQ ID NO: 2397350 - RNA, 19 nt, Artificial Sequence
  Description of Artificial Sequence: Synthetic oligonucleotide
  Sense strand starting at position 3081 of SEQ ID NO: 1886257
cuugaaucucugcgacuca

SEQ ID NO: 2397351 - RNA, 19 nt, Artificial Sequence
  Description of Artificial Sequence: Synthetic oligonucleotide
  Antisense strand to SEQ ID NO: 2397350
ugagucgcagagauucaag

SEQ ID NO: 2397352 - RNA, 19 nt, Artificial Sequence
  Description of Artificial Sequence: Synthetic oligonucleotide
  Sense strand starting at position 3082 of SEQ ID NO: 1886257
uugaaucucugcgacucaa

SEQ ID NO: 2397353 - RNA, 19 nt, Artificial Sequence
  Description of Artificial Sequence: Synthetic oligonucleotide
  Antisense strand to SEQ ID NO: 2397352
uugagucgcagagauucaa

SEQ ID NO: 2397354 - RNA, 19 nt, Artificial Sequence
  Description of Artificial Sequence: Synthetic oligonucleotide
  Sense strand starting at position 3370 of SEQ ID NO: 1886257
uuggcugucugagacaacu

SEQ ID NO: 2397355 - RNA, 19 nt, Artificial Sequence
  Description of Artificial Sequence: Synthetic oligonucleotide
  Antisense strand to SEQ ID NO: 2397354
aguugucucagacagccaa

SEQ ID NO: 2397356 - RNA, 19 nt, Artificial Sequence
  Description of Artificial Sequence: Synthetic oligonucleotide
  Sense strand starting at position 3885 of SEQ ID NO: 1886257
ggauauggucaucacagcu

SEQ ID NO: 2397357 - RNA, 19 nt, Artificial Sequence
  Description of Artificial Sequence: Synthetic oligonucleotide
  Antisense strand to SEQ ID NO: 2397356
agcugugaugaccauaucc

SEQ ID NO: 2397358 - RNA, 19 nt, Artificial Sequence
  Description of Artificial Sequence: Synthetic oligonucleotide
  Sense strand starting at position 1171 of SEQ ID NO: 1886258
ccauuaagauggcccauua

SEQ ID NO: 2397359 - RNA, 19 nt, Artificial Sequence
  Description of Artificial Sequence: Synthetic oligonucleotide
  Antisense strand to SEQ ID NO: 2397358
uaaugggccaucuuaaugg

SEQ ID NO: 2397360 - RNA, 19 nt, Artificial Sequence
  Description of Artificial Sequence: Synthetic oligonucleotide
  Sense strand starting at position 1288 of SEQ ID NO: 1886258
ggagaacuccagugugagc

SEQ ID NO: 2397361 - RNA, 19 nt, Artificial Sequence
  Description of Artificial Sequence: Synthetic oligonucleotide
  Antisense strand to SEQ ID NO: 2397360
gcucacacuggaguucucc

SEQ ID NO: 2397362 - RNA, 19 nt, Artificial Sequence
  Description of Artificial Sequence: Synthetic oligonucleotide
  Sense strand starting at position 1397 of SEQ ID NO: 1886258
ugcuguauguugggcugaa

SEQ ID NO: 2397363 - RNA, 19 nt, Artificial Sequence
  Description of Artificial Sequence: Synthetic oligonucleotide
  Antisense strand to SEQ ID NO: 2397362
uucagcccaacauacagca

SEQ ID NO: 2397364 - RNA, 19 nt, Artificial Sequence
  Description of Artificial Sequence: Synthetic oligonucleotide
  Sense strand starting at position 1398 of SEQ ID NO: 1886258
gcuguauguugggcugaag

SEQ ID NO: 2397365 - RNA, 19 nt, Artificial Sequence
  Description of Artificial Sequence: Synthetic oligonucleotide
  Antisense strand to SEQ ID NO: 2397364
cuucagcccaacauacagc

SEQ ID NO: 2397366 - RNA, 19 nt, Artificial Sequence
  Description of Artificial Sequence: Synthetic oligonucleotide
  Sense strand starting at position 1401 of SEQ ID NO: 1886258
guauguugggcugaaggaa

SEQ ID NO: 2397367 - RNA, 19 nt, Artificial Sequence
  Description of Artificial Sequence: Synthetic oligonucleotide
  Antisense strand to SEQ ID NO: 2397366
uuccuucagcccaacauac

SEQ ID NO: 2397368 - RNA, 19 nt, Artificial Sequence
  Description of Artificial Sequence: Synthetic oligonucleotide
  Sense strand starting at position 1467 of SEQ ID NO: 1886258
gcgugcuccuagggucaga

SEQ ID NO: 2397369 - RNA, 19 nt, Artificial Sequence
  Description of Artificial Sequence: Synthetic oligonucleotide
  Antisense strand to SEQ ID NO: 2397368
ucugacccuaggagcacgc

SEQ ID NO: 2397370 - RNA, 19 nt, Artificial Sequence
  Description of Artificial Sequence: Synthetic oligonucleotide
  Sense strand starting at position 2257 of SEQ ID NO: 1886258
gggauacccaugugaugga

SEQ ID NO: 2397371 - RNA, 19 nt, Artificial Sequence
  Description of Artificial Sequence: Synthetic oligonucleotide
  Antisense strand to SEQ ID NO: 2397370
uccaucacauggguauccc

SEQ ID NO: 2397372 - RNA, 19 nt, Artificial Sequence
  Description of Artificial Sequence: Synthetic oligonucleotide
  Sense strand starting at position 2691 of SEQ ID NO: 1886258
ggucccacuuggucaauaa

SEQ ID NO: 2397373 - RNA, 19 nt, Artificial Sequence
  Description of Artificial Sequence: Synthetic oligonucleotide
  Antisense strand to SEQ ID NO: 2397372
uuauugaccaagugggacc

SEQ ID NO: 2397374 - RNA, 19 nt, Artificial Sequence
  Description of Artificial Sequence: Synthetic oligonucleotide
  Sense strand starting at position 3234 of SEQ ID NO: 1886258
cgcugaguuucagcuggga

SEQ ID NO: 2397375 - RNA, 19 nt, Artificial Sequence
  Description of Artificial Sequence: Synthetic oligonucleotide
  Antisense strand to SEQ ID NO: 2397374
ucccagcugaaacucagcg

SEQ ID NO: 2397376 - RNA, 19 nt, Artificial Sequence
  Description of Artificial Sequence: Synthetic oligonucleotide
  Sense strand starting at position 3255 of SEQ ID NO: 1886258
ugcucuauguugggcugaa

SEQ ID NO: 2397377 - RNA, 19 nt, Artificial Sequence
  Description of Artificial Sequence: Synthetic oligonucleotide
  Antisense strand to SEQ ID NO: 2397376
uucagcccaacauagagca

SEQ ID NO: 2397378 - RNA, 19 nt, Artificial Sequence
  Description of Artificial Sequence: Synthetic oligonucleotide
  Sense strand starting at position 3256 of SEQ ID NO: 1886258
gcucuauguugggcugaag

SEQ ID NO: 2397379 - RNA, 19 nt, Artificial Sequence
  Description of Artificial Sequence: Synthetic oligonucleotide
  Antisense strand to SEQ ID NO: 2397378
cuucagcccaacauagagc

SEQ ID NO: 2397380 - RNA, 19 nt, Artificial Sequence
  Description of Artificial Sequence: Synthetic oligonucleotide
  Sense strand starting at position 3325 of SEQ ID NO: 1886258
gcaugcuccuagggucaga

SEQ ID NO: 2397381 - RNA, 19 nt, Artificial Sequence
  Description of Artificial Sequence: Synthetic oligonucleotide
  Antisense strand to SEQ ID NO: 2397380
ucugacccuaggagcaugc

SEQ ID NO: 2397382 - RNA, 19 nt, Artificial Sequence
  Description of Artificial Sequence: Synthetic oligonucleotide
  Sense strand starting at position 3864 of SEQ ID NO: 1886258
gaucaaucaccucgugcau

SEQ ID NO: 2397383 - RNA, 19 nt, Artificial Sequence
  Description of Artificial Sequence: Synthetic oligonucleotide
  Antisense strand to SEQ ID NO: 2397382
augcacgaggugauugauc

SEQ ID NO: 2397384 - RNA, 19 nt, Artificial Sequence
  Description of Artificial Sequence: Synthetic oligonucleotide
  Sense strand starting at position 189 of SEQ ID NO: 1886259
gcccgaguuucagugcaau

SEQ ID NO: 2397385 - RNA, 19 nt, Artificial Sequence
  Description of Artificial Sequence: Synthetic oligonucleotide
  Antisense strand to SEQ ID NO: 2397384
auugcacugaaacucgggc

SEQ ID NO: 2397386 - RNA, 19 nt, Artificial Sequence
  Description of Artificial Sequence: Synthetic oligonucleotide
  Sense strand starting at position 274 of SEQ ID NO: 1886259
gggucaccaucucaaggaa

SEQ ID NO: 2397387 - RNA, 19 nt, Artificial Sequence
  Description of Artificial Sequence: Synthetic oligonucleotide
  Antisense strand to SEQ ID NO: 2397386
uuccuugagauggugaccc

SEQ ID NO: 2397388 - RNA, 19 nt, Artificial Sequence
  Description of Artificial Sequence: Synthetic oligonucleotide
  Sense strand starting at position 404 of SEQ ID NO: 1886259
guggaauacuuacccauca

SEQ ID NO: 2397389 - RNA, 19 nt, Artificial Sequence
  Description of Artificial Sequence: Synthetic oligonucleotide
  Antisense strand to SEQ ID NO: 2397388
ugauggguaaguauuccac

SEQ ID NO: 2397390 - RNA, 19 nt, Artificial Sequence
  Description of Artificial Sequence: Synthetic oligonucleotide
  Sense strand starting at position 643 of SEQ ID NO: 1886259
ggcccauaugccugaugcu

SEQ ID NO: 2397391 - RNA, 19 nt, Artificial Sequence
  Description of Artificial Sequence: Synthetic oligonucleotide
  Antisense strand to SEQ ID NO: 2397390
agcaucaggcauaugggcc

SEQ ID NO: 2397392 - RNA, 19 nt, Artificial Sequence
  Description of Artificial Sequence: Synthetic oligonucleotide
  Sense strand starting at position 719 of SEQ ID NO: 1886259
ugcuguaucugggcacaua

SEQ ID NO: 2397393 - RNA, 19 nt, Artificial Sequence
  Description of Artificial Sequence: Synthetic oligonucleotide
  Antisense strand to SEQ ID NO: 2397392
uaugugcccagauacagca

SEQ ID NO: 2397394 - RNA, 19 nt, Artificial Sequence
  Description of Artificial Sequence: Synthetic oligonucleotide
  Sense strand starting at position 771 of SEQ ID NO: 1886259
ugcuuucucuggugaguuu

SEQ ID NO: 2397395 - RNA, 19 nt, Artificial Sequence
  Description of Artificial Sequence: Synthetic oligonucleotide
  Antisense strand to SEQ ID NO: 2397394
aaacucaccagagaaagca

SEQ ID NO: 2397396 - RNA, 19 nt, Artificial Sequence
  Description of Artificial Sequence: Synthetic oligonucleotide
  Sense strand starting at position 1228 of SEQ ID NO: 1886259
gaccaugugucaggugcaa

SEQ ID NO: 2397397 - RNA, 19 nt, Artificial Sequence
  Description of Artificial Sequence: Synthetic oligonucleotide
  Antisense strand to SEQ ID NO: 2397396
uugcaccugacacaugguc

SEQ ID NO: 2397398 - RNA, 19 nt, Artificial Sequence
  Description of Artificial Sequence: Synthetic oligonucleotide
  Sense strand starting at position 1230 of SEQ ID NO: 1886259
ccaugugucaggugcaauc

SEQ ID NO: 2397399 - RNA, 19 nt, Artificial Sequence
  Description of Artificial Sequence: Synthetic oligonucleotide
  Antisense strand to SEQ ID NO: 2397398
gauugcaccugacacaugg

SEQ ID NO: 2397400 - RNA, 19 nt, Artificial Sequence
  Description of Artificial Sequence: Synthetic oligonucleotide
  Sense strand starting at position 1239 of SEQ ID NO: 1886259
aggugcaauccuugaaucu

SEQ ID NO: 2397401 - RNA, 19 nt, Artificial Sequence
  Description of Artificial Sequence: Synthetic oligonucleotide
  Antisense strand to SEQ ID NO: 2397400
agauucaaggauugcaccu

SEQ ID NO: 2397402 - RNA, 19 nt, Artificial Sequence
  Description of Artificial Sequence: Synthetic oligonucleotide
  Sense strand starting at position 1240 of SEQ ID NO: 1886259
ggugcaauccuugaaucuc

SEQ ID NO: 2397403 - RNA, 19 nt, Artificial Sequence
  Description of Artificial Sequence: Synthetic oligonucleotide
  Antisense strand to SEQ ID NO: 2397402
gagauucaaggauugcacc

SEQ ID NO: 2397404 - RNA, 19 nt, Artificial Sequence
  Description of Artificial Sequence: Synthetic oligonucleotide
  Sense strand starting at position 1289 of SEQ ID NO: 1886259
accuuucuccagggacaaa

SEQ ID NO: 2397405 - RNA, 19 nt, Artificial Sequence
  Description of Artificial Sequence: Synthetic oligonucleotide
  Antisense strand to SEQ ID NO: 2397404
uuugucccuggagaaaggu

SEQ ID NO: 2397406 - RNA, 19 nt, Artificial Sequence
  Description of Artificial Sequence: Synthetic oligonucleotide
  Sense strand starting at position 1485 of SEQ ID NO: 1886259
gguuccuguuucccaggaa

SEQ ID NO: 2397407 - RNA, 19 nt, Artificial Sequence
  Description of Artificial Sequence: Synthetic oligonucleotide
  Antisense strand to SEQ ID NO: 2397406
uuccugggaaacaggaacc

SEQ ID NO: 2397408 - RNA, 19 nt, Artificial Sequence
  Description of Artificial Sequence: Synthetic oligonucleotide
  Sense strand starting at position 1544 of SEQ ID NO: 1886259
caguuuggcucccugagga

SEQ ID NO: 2397409 - RNA, 19 nt, Artificial Sequence
  Description of Artificial Sequence: Synthetic oligonucleotide
  Antisense strand to SEQ ID NO: 2397408
uccucagggagccaaacug

SEQ ID NO: 2397410 - RNA, 19 nt, Artificial Sequence
  Description of Artificial Sequence: Synthetic oligonucleotide
  Sense strand starting at position 2069 of SEQ ID NO: 1886259
ggaagagaccaguguugag

SEQ ID NO: 2397411 - RNA, 19 nt, Artificial Sequence
  Description of Artificial Sequence: Synthetic oligonucleotide
  Antisense strand to SEQ ID NO: 2397410
cucaacacuggucucuucc

SEQ ID NO: 2397412 - RNA, 19 nt, Artificial Sequence
  Description of Artificial Sequence: Synthetic oligonucleotide
  Sense strand starting at position 2274 of SEQ ID NO: 1886259
ugugaugauugcguucacu

SEQ ID NO: 2397413 - RNA, 19 nt, Artificial Sequence
  Description of Artificial Sequence: Synthetic oligonucleotide
  Antisense strand to SEQ ID NO: 2397412
agugaacgcaaucaucaca

SEQ ID NO: 2397414 - RNA, 19 nt, Artificial Sequence
  Description of Artificial Sequence: Synthetic oligonucleotide
  Sense strand starting at position 3015 of SEQ ID NO: 1886259
aaggaccuacguugaauua

SEQ ID NO: 2397415 - RNA, 19 nt, Artificial Sequence
  Description of Artificial Sequence: Synthetic oligonucleotide
  Antisense strand to SEQ ID NO: 2397414
uaauucaacguagguccuu

SEQ ID NO: 2397416 - RNA, 19 nt, Artificial Sequence
  Description of Artificial Sequence: Synthetic oligonucleotide
  Sense strand starting at position 3016 of SEQ ID NO: 1886259
aggaccuacguugaauuau

SEQ ID NO: 2397417 - RNA, 19 nt, Artificial Sequence
  Description of Artificial Sequence: Synthetic oligonucleotide
  Antisense strand to SEQ ID NO: 2397416
auaauucaacguagguccu

SEQ ID NO: 2397418 - RNA, 19 nt, Artificial Sequence
  Description of Artificial Sequence: Synthetic oligonucleotide
  Sense strand starting at position 3285 of SEQ ID NO: 1886259
augugaaacagugauaguc

SEQ ID NO: 2397419 - RNA, 19 nt, Artificial Sequence
  Description of Artificial Sequence: Synthetic oligonucleotide
  Antisense strand to SEQ ID NO: 2397418
gacuaucacuguuucacau

SEQ ID NO: 2397420 - RNA, 19 nt, Artificial Sequence
  Description of Artificial Sequence: Synthetic oligonucleotide
  Sense strand starting at position 3287 of SEQ ID NO: 1886259
gugaaacagugauagucau

SEQ ID NO: 2397421 - RNA, 19 nt, Artificial Sequence
  Description of Artificial Sequence: Synthetic oligonucleotide
  Antisense strand to SEQ ID NO: 2397420
augacuaucacuguuucac

SEQ ID NO: 2397422 - RNA, 19 nt, Artificial Sequence
  Description of Artificial Sequence: Synthetic oligonucleotide
  Sense strand starting at position 3293 of SEQ ID NO: 1886259
cagugauagucauggacgu

SEQ ID NO: 2397423 - RNA, 19 nt, Artificial Sequence
  Description of Artificial Sequence: Synthetic oligonucleotide
  Antisense strand to SEQ ID NO: 2397422
acguccaugacuaucacug

SEQ ID NO: 2397424 - RNA, 19 nt, Artificial Sequence
  Description of Artificial Sequence: Synthetic oligonucleotide
  Sense strand starting at position 3604 of SEQ ID NO: 1886259
ccaagcaugcacuggaaau

SEQ ID NO: 2397425 - RNA, 19 nt, Artificial Sequence
  Description of Artificial Sequence: Synthetic oligonucleotide
  Antisense strand to SEQ ID NO: 2397424
auuuccagugcaugcuugg

SEQ ID NO: 2397426 - RNA, 19 nt, Artificial Sequence
  Description of Artificial Sequence: Synthetic oligonucleotide
  Sense strand starting at position 3799 of SEQ ID NO: 1886259
ggugguucuccuggagaac

SEQ ID NO: 2397427 - RNA, 19 nt, Artificial Sequence
  Description of Artificial Sequence: Synthetic oligonucleotide
  Antisense strand to SEQ ID NO: 2397426
guucuccaggagaaccacc

SEQ ID NO: 2397428 - RNA, 19 nt, Artificial Sequence
  Description of Artificial Sequence: Synthetic oligonucleotide
  Sense strand starting at position 3919 of SEQ ID NO: 1886259
gcaggauccgcucaccuau

SEQ ID NO: 2397429 - RNA, 19 nt, Artificial Sequence
  Description of Artificial Sequence: Synthetic oligonucleotide
  Antisense strand to SEQ ID NO: 2397428
auaggugagcggauccugc

SEQ ID NO: 2397430 - RNA, 19 nt, Artificial Sequence
  Description of Artificial Sequence: Synthetic oligonucleotide
  Sense strand starting at position 220 of SEQ ID NO: 1886260
ugccuagcugacugacauu

SEQ ID NO: 2397431 - RNA, 19 nt, Artificial Sequence
  Description of Artificial Sequence: Synthetic oligonucleotide
  Antisense strand to SEQ ID NO: 2397430
aaugucagucagcuaggca

SEQ ID NO: 2397432 - RNA, 19 nt, Artificial Sequence
  Description of Artificial Sequence: Synthetic oligonucleotide
  Sense strand starting at position 231 of SEQ ID NO: 1886260
cugacauuggcccagggau

SEQ ID NO: 2397433 - RNA, 19 nt, Artificial Sequence
  Description of Artificial Sequence: Synthetic oligonucleotide
  Antisense strand to SEQ ID NO: 2397432
aucccugggccaaugucag

SEQ ID NO: 2397434 - RNA, 19 nt, Artificial Sequence
  Description of Artificial Sequence: Synthetic oligonucleotide
  Sense strand starting at position 400 of SEQ ID NO: 1886260
gugaaauacugacuuguua

SEQ ID NO: 2397435 - RNA, 19 nt, Artificial Sequence
  Description of Artificial Sequence: Synthetic oligonucleotide
  Antisense strand to SEQ ID NO: 2397434
uaacaagucaguauuucac

SEQ ID NO: 2397436 - RNA, 19 nt, Artificial Sequence
  Description of Artificial Sequence: Synthetic oligonucleotide
  Sense strand starting at position 582 of SEQ ID NO: 1886260
gggacuguugggcacagau

SEQ ID NO: 2397437 - RNA, 19 nt, Artificial Sequence
  Description of Artificial Sequence: Synthetic oligonucleotide
  Antisense strand to SEQ ID NO: 2397436
aucugugcccaacaguccc

SEQ ID NO: 2397438 - RNA, 19 nt, Artificial Sequence
  Description of Artificial Sequence: Synthetic oligonucleotide
  Sense strand starting at position 633 of SEQ ID NO: 1886260
gaggcuagcccagauguca

SEQ ID NO: 2397439 - RNA, 19 nt, Artificial Sequence
  Description of Artificial Sequence: Synthetic oligonucleotide
  Antisense strand to SEQ ID NO: 2397438
ugacaucugggcuagccuc

SEQ ID NO: 2397440 - RNA, 19 nt, Artificial Sequence
  Description of Artificial Sequence: Synthetic oligonucleotide
  Sense strand starting at position 681 of SEQ ID NO: 1886260
gucugucacugggcaugaa

SEQ ID NO: 2397441 - RNA, 19 nt, Artificial Sequence
  Description of Artificial Sequence: Synthetic oligonucleotide
  Antisense strand to SEQ ID NO: 2397440
uucaugcccagugacagac

SEQ ID NO: 2397442 - RNA, 19 nt, Artificial Sequence
  Description of Artificial Sequence: Synthetic oligonucleotide
  Sense strand starting at position 723 of SEQ ID NO: 1886260
ccaagugugcaacagaaau

SEQ ID NO: 2397443 - RNA, 19 nt, Artificial Sequence
  Description of Artificial Sequence: Synthetic oligonucleotide
  Antisense strand to SEQ ID NO: 2397442
auuucuguugcacacuugg

SEQ ID NO: 2397444 - RNA, 19 nt, Artificial Sequence
  Description of Artificial Sequence: Synthetic oligonucleotide
  Sense strand starting at position 910 of SEQ ID NO: 1886260
gaagaaacuugagcgacaa

SEQ ID NO: 2397445 - RNA, 19 nt, Artificial Sequence
  Description of Artificial Sequence: Synthetic oligonucleotide
  Antisense strand to SEQ ID NO: 2397444
uugucgcucaaguuucuuc

SEQ ID NO: 2397446 - RNA, 19 nt, Artificial Sequence
  Description of Artificial Sequence: Synthetic oligonucleotide
  Sense strand starting at position 911 of SEQ ID NO: 1886260
aagaaacuugagcgacaaa

SEQ ID NO: 2397447 - RNA, 19 nt, Artificial Sequence
  Description of Artificial Sequence: Synthetic oligonucleotide
  Antisense strand to SEQ ID NO: 2397446
uuugucgcucaaguuucuu

SEQ ID NO: 2397448 - RNA, 19 nt, Artificial Sequence
  Description of Artificial Sequence: Synthetic oligonucleotide
  Sense strand starting at position 1172 of SEQ ID NO: 1886260
auggcccauugcucaauaa

SEQ ID NO: 2397449 - RNA, 19 nt, Artificial Sequence
  Description of Artificial Sequence: Synthetic oligonucleotide
  Antisense strand to SEQ ID NO: 2397448
uuauugagcaaugggccau

SEQ ID NO: 2397450 - RNA, 19 nt, Artificial Sequence
  Description of Artificial Sequence: Synthetic oligonucleotide
  Sense strand starting at position 1176 of SEQ ID NO: 1886260
cccauugcucaauaaggau

SEQ ID NO: 2397451 - RNA, 19 nt, Artificial Sequence
  Description of Artificial Sequence: Synthetic oligonucleotide
  Antisense strand to SEQ ID NO: 2397450
auccuuauugagcaauggg

SEQ ID NO: 2397452 - RNA, 19 nt, Artificial Sequence
  Description of Artificial Sequence: Synthetic oligonucleotide
  Sense strand starting at position 1185 of SEQ ID NO: 1886260
caauaaggaugguccuauu

SEQ ID NO: 2397453 - RNA, 19 nt, Artificial Sequence
  Description of Artificial Sequence: Synthetic oligonucleotide
  Antisense strand to SEQ ID NO: 2397452
aauaggaccauccuuauug

SEQ ID NO: 2397454 - RNA, 19 nt, Artificial Sequence
  Description of Artificial Sequence: Synthetic oligonucleotide
  Sense strand starting at position 1213 of SEQ ID NO: 1886260
gguggugcgcgauccuuua

SEQ ID NO: 2397455 - RNA, 19 nt, Artificial Sequence
  Description of Artificial Sequence: Synthetic oligonucleotide
  Antisense strand to SEQ ID NO: 2397454
uaaaggaucgcgcaccacc

SEQ ID NO: 2397456 - RNA, 19 nt, Artificial Sequence
  Description of Artificial Sequence: Synthetic oligonucleotide
  Sense strand starting at position 1215 of SEQ ID NO: 1886260
uggugcgcgauccuuuaau

SEQ ID NO: 2397457 - RNA, 19 nt, Artificial Sequence
  Description of Artificial Sequence: Synthetic oligonucleotide
  Antisense strand to SEQ ID NO: 2397456
auuaaaggaucgcgcacca

SEQ ID NO: 2397458 - RNA, 19 nt, Artificial Sequence
  Description of Artificial Sequence: Synthetic oligonucleotide
  Sense strand starting at position 1217 of SEQ ID NO: 1886260
gugcgcgauccuuuaaucu

SEQ ID NO: 2397459 - RNA, 19 nt, Artificial Sequence
  Description of Artificial Sequence: Synthetic oligonucleotide
  Antisense strand to SEQ ID NO: 2397458
agauuaaaggaucgcgcac

SEQ ID NO: 2397460 - RNA, 19 nt, Artificial Sequence
  Description of Artificial Sequence: Synthetic oligonucleotide
  Sense strand starting at position 1330 of SEQ ID NO: 1886260
ccucauguggccugggaaa

SEQ ID NO: 2397461 - RNA, 19 nt, Artificial Sequence
  Description of Artificial Sequence: Synthetic oligonucleotide
  Antisense strand to SEQ ID NO: 2397460
uuucccaggccacaugagg

SEQ ID NO: 2397462 - RNA, 19 nt, Artificial Sequence
  Description of Artificial Sequence: Synthetic oligonucleotide
  Sense strand starting at position 1332 of SEQ ID NO: 1886260
ucauguggccugggaaauc

SEQ ID NO: 2397463 - RNA, 19 nt, Artificial Sequence
  Description of Artificial Sequence: Synthetic oligonucleotide
  Antisense strand to SEQ ID NO: 2397462
gauuucccaggccacauga

SEQ ID NO: 2397464 - RNA, 19 nt, Artificial Sequence
  Description of Artificial Sequence: Synthetic oligonucleotide
  Sense strand starting at position 1342 of SEQ ID NO: 1886260
ugggaaauccuugaggccu

SEQ ID NO: 2397465 - RNA, 19 nt, Artificial Sequence
  Description of Artificial Sequence: Synthetic oligonucleotide
  Antisense strand to SEQ ID NO: 2397464
aggccucaaggauuuccca

SEQ ID NO: 2397466 - RNA, 19 nt, Artificial Sequence
  Description of Artificial Sequence: Synthetic oligonucleotide
  Sense strand starting at position 1530 of SEQ ID NO: 1886260
caggucgguucccugagaa

SEQ ID NO: 2397467 - RNA, 19 nt, Artificial Sequence
  Description of Artificial Sequence: Synthetic oligonucleotide
  Antisense strand to SEQ ID NO: 2397466
uucucagggaaccgaccug

SEQ ID NO: 2397468 - RNA, 19 nt, Artificial Sequence
  Description of Artificial Sequence: Synthetic oligonucleotide
  Sense strand starting at position 2046 of SEQ ID NO: 1886260
ggauauacucaccacagcu

SEQ ID NO: 2397469 - RNA, 19 nt, Artificial Sequence
  Description of Artificial Sequence: Synthetic oligonucleotide
  Antisense strand to SEQ ID NO: 2397468
agcuguggugaguauaucc

SEQ ID NO: 2397470 - RNA, 19 nt, Artificial Sequence
  Description of Artificial Sequence: Synthetic oligonucleotide
  Sense strand starting at position 2252 of SEQ ID NO: 1886260
guaagagauacccacguaa

SEQ ID NO: 2397471 - RNA, 19 nt, Artificial Sequence
  Description of Artificial Sequence: Synthetic oligonucleotide
  Antisense strand to SEQ ID NO: 2397470
uuacguggguaucucuuac

SEQ ID NO: 2397472 - RNA, 19 nt, Artificial Sequence
  Description of Artificial Sequence: Synthetic oligonucleotide
  Sense strand starting at position 2254 of SEQ ID NO: 1886260
aagagauacccacguaaug

SEQ ID NO: 2397473 - RNA, 19 nt, Artificial Sequence
  Description of Artificial Sequence: Synthetic oligonucleotide
  Antisense strand to SEQ ID NO: 2397472
cauuacguggguaucucuu

SEQ ID NO: 2397474 - RNA, 19 nt, Artificial Sequence
  Description of Artificial Sequence: Synthetic oligonucleotide
  Sense strand starting at position 2290 of SEQ ID NO: 1886260
cgacucaucauggaugcuu

SEQ ID NO: 2397475 - RNA, 19 nt, Artificial Sequence
  Description of Artificial Sequence: Synthetic oligonucleotide
  Antisense strand to SEQ ID NO: 2397474
aagcauccaugaugagucg

SEQ ID NO: 2397476 - RNA, 19 nt, Artificial Sequence
  Description of Artificial Sequence: Synthetic oligonucleotide
  Sense strand starting at position 2670 of SEQ ID NO: 1886260
ggugaccacuugucucaga

SEQ ID NO: 2397477 - RNA, 19 nt, Artificial Sequence
  Description of Artificial Sequence: Synthetic oligonucleotide
  Antisense strand to SEQ ID NO: 2397476
ucugagacaaguggucacc

SEQ ID NO: 2397478 - RNA, 19 nt, Artificial Sequence
  Description of Artificial Sequence: Synthetic oligonucleotide
  Sense strand starting at position 2671 of SEQ ID NO: 1886260
gugaccacuugucucagaa

SEQ ID NO: 2397479 - RNA, 19 nt, Artificial Sequence
  Description of Artificial Sequence: Synthetic oligonucleotide
  Antisense strand to SEQ ID NO: 2397478
uucugagacaaguggucac

SEQ ID NO: 2397480 - RNA, 19 nt, Artificial Sequence
  Description of Artificial Sequence: Synthetic oligonucleotide
  Sense strand starting at position 2702 of SEQ ID NO: 1886260
gcaaauucccaguauagga

SEQ ID NO: 2397481 - RNA, 19 nt, Artificial Sequence
  Description of Artificial Sequence: Synthetic oligonucleotide
  Antisense strand to SEQ ID NO: 2397480
uccuauacugggaauuugc

SEQ ID NO: 2397482 - RNA, 19 nt, Artificial Sequence
  Description of Artificial Sequence: Synthetic oligonucleotide
  Sense strand starting at position 2745 of SEQ ID NO: 1886260
ucagaaugccacuguuaac

SEQ ID NO: 2397483 - RNA, 19 nt, Artificial Sequence
  Description of Artificial Sequence: Synthetic oligonucleotide
  Antisense strand to SEQ ID NO: 2397482
guuaacaguggcauucuga

SEQ ID NO: 2397484 - RNA, 19 nt, Artificial Sequence
  Description of Artificial Sequence: Synthetic oligonucleotide
  Sense strand starting at position 2755 of SEQ ID NO: 1886260
acuguuaaccguuacucaa

SEQ ID NO: 2397485 - RNA, 19 nt, Artificial Sequence
  Description of Artificial Sequence: Synthetic oligonucleotide
  Antisense strand to SEQ ID NO: 2397484
uugaguaacgguuaacagu

SEQ ID NO: 2397486 - RNA, 19 nt, Artificial Sequence
  Description of Artificial Sequence: Synthetic oligonucleotide
  Sense strand starting at position 2765 of SEQ ID NO: 1886260
guuacucaaacucggagaa

SEQ ID NO: 2397487 - RNA, 19 nt, Artificial Sequence
  Description of Artificial Sequence: Synthetic oligonucleotide
  Antisense strand to SEQ ID NO: 2397486
uucuccgaguuugaguaac

SEQ ID NO: 2397488 - RNA, 19 nt, Artificial Sequence
  Description of Artificial Sequence: Synthetic oligonucleotide
  Sense strand starting at position 2766 of SEQ ID NO: 1886260
uuacucaaacucggagaau

SEQ ID NO: 2397489 - RNA, 19 nt, Artificial Sequence
  Description of Artificial Sequence: Synthetic oligonucleotide
  Antisense strand to SEQ ID NO: 2397488
auucuccgaguuugaguaa

SEQ ID NO: 2397490 - RNA, 19 nt, Artificial Sequence
  Description of Artificial Sequence: Synthetic oligonucleotide
  Sense strand starting at position 2767 of SEQ ID NO: 1886260
uacucaaacucggagaaug

SEQ ID NO: 2397491 - RNA, 19 nt, Artificial Sequence
  Description of Artificial Sequence: Synthetic oligonucleotide
  Antisense strand to SEQ ID NO: 2397490
cauucuccgaguuugagua

SEQ ID NO: 2397492 - RNA, 19 nt, Artificial Sequence
  Description of Artificial Sequence: Synthetic oligonucleotide
  Sense strand starting at position 2779 of SEQ ID NO: 1886260
gagaauggguuacccucaa

SEQ ID NO: 2397493 - RNA, 19 nt, Artificial Sequence
  Description of Artificial Sequence: Synthetic oligonucleotide
  Antisense strand to SEQ ID NO: 2397492
uugaggguaacccauucuc

SEQ ID NO: 2397494 - RNA, 19 nt, Artificial Sequence
  Description of Artificial Sequence: Synthetic oligonucleotide
  Sense strand starting at position 2873 of SEQ ID NO: 1886260
ggaucucagccuugacuca

SEQ ID NO: 2397495 - RNA, 19 nt, Artificial Sequence
  Description of Artificial Sequence: Synthetic oligonucleotide
  Antisense strand to SEQ ID NO: 2397494
ugagucaaggcugagaucc

SEQ ID NO: 2397496 - RNA, 19 nt, Artificial Sequence
  Description of Artificial Sequence: Synthetic oligonucleotide
  Sense strand starting at position 2978 of SEQ ID NO: 1886260
ggucacaggugggaugaaa

SEQ ID NO: 2397497 - RNA, 19 nt, Artificial Sequence
  Description of Artificial Sequence: Synthetic oligonucleotide
  Antisense strand to SEQ ID NO: 2397496
uuucaucccaccugugacc

SEQ ID NO: 2397498 - RNA, 19 nt, Artificial Sequence
  Description of Artificial Sequence: Synthetic oligonucleotide
  Sense strand starting at position 3229 of SEQ ID NO: 1886260
aagacauccuccuugggua

SEQ ID NO: 2397499 - RNA, 19 nt, Artificial Sequence
  Description of Artificial Sequence: Synthetic oligonucleotide
  Antisense strand to SEQ ID NO: 2397498
uacccaaggaggaugucuu

SEQ ID NO: 2397500 - RNA, 19 nt, Artificial Sequence
  Description of Artificial Sequence: Synthetic oligonucleotide
  Sense strand starting at position 3230 of SEQ ID NO: 1886260
agacauccuccuuggguaa

SEQ ID NO: 2397501 - RNA, 19 nt, Artificial Sequence
  Description of Artificial Sequence: Synthetic oligonucleotide
  Antisense strand to SEQ ID NO: 2397500
uuacccaaggaggaugucu

SEQ ID NO: 2397502 - RNA, 19 nt, Artificial Sequence
  Description of Artificial Sequence: Synthetic oligonucleotide
  Sense strand starting at position 3233 of SEQ ID NO: 1886260
cauccuccuuggguaagau

SEQ ID NO: 2397503 - RNA, 19 nt, Artificial Sequence
  Description of Artificial Sequence: Synthetic oligonucleotide
  Antisense strand to SEQ ID NO: 2397502
aucuuacccaaggaggaug

SEQ ID NO: 2397504 - RNA, 19 nt, Artificial Sequence
  Description of Artificial Sequence: Synthetic oligonucleotide
  Sense strand starting at position 3234 of SEQ ID NO: 1886260
auccuccuuggguaagauu

SEQ ID NO: 2397505 - RNA, 19 nt, Artificial Sequence
  Description of Artificial Sequence: Synthetic oligonucleotide
  Antisense strand to SEQ ID NO: 2397504
aaucuuacccaaggaggau

SEQ ID NO: 2397506 - RNA, 19 nt, Artificial Sequence
  Description of Artificial Sequence: Synthetic oligonucleotide
  Sense strand starting at position 3243 of SEQ ID NO: 1886260
ggguaagauucccaaggaa

SEQ ID NO: 2397507 - RNA, 19 nt, Artificial Sequence
  Description of Artificial Sequence: Synthetic oligonucleotide
  Antisense strand to SEQ ID NO: 2397506
uuccuugggaaucuuaccc

SEQ ID NO: 2397508 - RNA, 19 nt, Artificial Sequence
  Description of Artificial Sequence: Synthetic oligonucleotide
  Sense strand starting at position 3466 of SEQ ID NO: 1886260
cagucacauggugggaauu

SEQ ID NO: 2397509 - RNA, 19 nt, Artificial Sequence
  Description of Artificial Sequence: Synthetic oligonucleotide
  Antisense strand to SEQ ID NO: 2397508
aauucccaccaugugacug

SEQ ID NO: 2397510 - RNA, 19 nt, Artificial Sequence
  Description of Artificial Sequence: Synthetic oligonucleotide
  Sense strand starting at position 238 of SEQ ID NO: 1886261
agaguuucagcgcaccaga

SEQ ID NO: 2397511 - RNA, 19 nt, Artificial Sequence
  Description of Artificial Sequence: Synthetic oligonucleotide
  Antisense strand to SEQ ID NO: 2397510
ucuggugcgcugaaacucu

SEQ ID NO: 2397512 - RNA, 19 nt, Artificial Sequence
  Description of Artificial Sequence: Synthetic oligonucleotide
  Sense strand starting at position 346 of SEQ ID NO: 1886261
gaggaaaugugucuaacca

SEQ ID NO: 2397513 - RNA, 19 nt, Artificial Sequence
  Description of Artificial Sequence: Synthetic oligonucleotide
  Antisense strand to SEQ ID NO: 2397512
ugguuagacacauuuccuc

SEQ ID NO: 2397514 - RNA, 19 nt, Artificial Sequence
  Description of Artificial Sequence: Synthetic oligonucleotide
  Sense strand starting at position 366 of SEQ ID NO: 1886261
ggccucacacaucaaugua

SEQ ID NO: 2397515 - RNA, 19 nt, Artificial Sequence
  Description of Artificial Sequence: Synthetic oligonucleotide
  Antisense strand to SEQ ID NO: 2397514
uacauugaugugugaggcc

SEQ ID NO: 2397516 - RNA, 19 nt, Artificial Sequence
  Description of Artificial Sequence: Synthetic oligonucleotide
  Sense strand starting at position 396 of SEQ ID NO: 1886261
aagggauacucaugugaug

SEQ ID NO: 2397517 - RNA, 19 nt, Artificial Sequence
  Description of Artificial Sequence: Synthetic oligonucleotide
  Antisense strand to SEQ ID NO: 2397516
caucacaugaguaucccuu

SEQ ID NO: 2397518 - RNA, 19 nt, Artificial Sequence
  Description of Artificial Sequence: Synthetic oligonucleotide
  Sense strand starting at position 399 of SEQ ID NO: 1886261
ggauacucaugugauggga

SEQ ID NO: 2397519 - RNA, 19 nt, Artificial Sequence
  Description of Artificial Sequence: Synthetic oligonucleotide
  Antisense strand to SEQ ID NO: 2397518
ucccaucacaugaguaucc

SEQ ID NO: 2397520 - RNA, 19 nt, Artificial Sequence
  Description of Artificial Sequence: Synthetic oligonucleotide
  Sense strand starting at position 423 of SEQ ID NO: 1886261
gcugaauacugaucccuca

SEQ ID NO: 2397521 - RNA, 19 nt, Artificial Sequence
  Description of Artificial Sequence: Synthetic oligonucleotide
  Antisense strand to SEQ ID NO: 2397520
ugagggaucaguauucagc

SEQ ID NO: 2397522 - RNA, 19 nt, Artificial Sequence
  Description of Artificial Sequence: Synthetic oligonucleotide
  Sense strand starting at position 692 of SEQ ID NO: 1886261
ggaaguccgagagaucgua

SEQ ID NO: 2397523 - RNA, 19 nt, Artificial Sequence
  Description of Artificial Sequence: Synthetic oligonucleotide
  Antisense strand to SEQ ID NO: 2397522
uacgaucucucggacuucc

SEQ ID NO: 2397524 - RNA, 19 nt, Artificial Sequence
  Description of Artificial Sequence: Synthetic oligonucleotide
  Sense strand starting at position 764 of SEQ ID NO: 1886261
aggaucacaugcuuucuau

SEQ ID NO: 2397525 - RNA, 19 nt, Artificial Sequence
  Description of Artificial Sequence: Synthetic oligonucleotide
  Antisense strand to SEQ ID NO: 2397524
auagaaagcaugugauccu

SEQ ID NO: 2397526 - RNA, 19 nt, Artificial Sequence
  Description of Artificial Sequence: Synthetic oligonucleotide
  Sense strand starting at position 848 of SEQ ID NO: 1886261
ggaaccacaucgugucuuu

SEQ ID NO: 2397527 - RNA, 19 nt, Artificial Sequence
  Description of Artificial Sequence: Synthetic oligonucleotide
  Antisense strand to SEQ ID NO: 2397526
aaagacacgaugugguucc

SEQ ID NO: 2397528 - RNA, 19 nt, Artificial Sequence
  Description of Artificial Sequence: Synthetic oligonucleotide
  Sense strand starting at position 931 of SEQ ID NO: 1886261
gcagcaaauuccuagaaca

SEQ ID NO: 2397529 - RNA, 19 nt, Artificial Sequence
  Description of Artificial Sequence: Synthetic oligonucleotide
  Antisense strand to SEQ ID NO: 2397528
uguucuaggaauuugcugc

SEQ ID NO: 2397530 - RNA, 19 nt, Artificial Sequence
  Description of Artificial Sequence: Synthetic oligonucleotide
  Sense strand starting at position 1214 of SEQ ID NO: 1886261
uguggagcaugccuugaau

SEQ ID NO: 2397531 - RNA, 19 nt, Artificial Sequence
  Description of Artificial Sequence: Synthetic oligonucleotide
  Antisense strand to SEQ ID NO: 2397530
auucaaggcaugcuccaca

SEQ ID NO: 2397532 - RNA, 19 nt, Artificial Sequence
  Description of Artificial Sequence: Synthetic oligonucleotide
  Sense strand starting at position 1216 of SEQ ID NO: 1886261
uggagcaugccuugaaucu

SEQ ID NO: 2397533 - RNA, 19 nt, Artificial Sequence
  Description of Artificial Sequence: Synthetic oligonucleotide
  Antisense strand to SEQ ID NO: 2397532
agauucaaggcaugcucca

SEQ ID NO: 2397534 - RNA, 19 nt, Artificial Sequence
  Description of Artificial Sequence: Synthetic oligonucleotide
  Sense strand starting at position 1217 of SEQ ID NO: 1886261
ggagcaugccuugaaucuc

SEQ ID NO: 2397535 - RNA, 19 nt, Artificial Sequence
  Description of Artificial Sequence: Synthetic oligonucleotide
  Antisense strand to SEQ ID NO: 2397534
gagauucaaggcaugcucc

SEQ ID NO: 2397536 - RNA, 19 nt, Artificial Sequence
  Description of Artificial Sequence: Synthetic oligonucleotide
  Sense strand starting at position 1283 of SEQ ID NO: 1886261
ggagaacuccagugugacc

SEQ ID NO: 2397537 - RNA, 19 nt, Artificial Sequence
  Description of Artificial Sequence: Synthetic oligonucleotide
  Antisense strand to SEQ ID NO: 2397536
ggucacacuggaguucucc

SEQ ID NO: 2397538 - RNA, 19 nt, Artificial Sequence
  Description of Artificial Sequence: Synthetic oligonucleotide
  Sense strand starting at position 1337 of SEQ ID NO: 1886261
ccaugugccuugggcaaua

SEQ ID NO: 2397539 - RNA, 19 nt, Artificial Sequence
  Description of Artificial Sequence: Synthetic oligonucleotide
  Antisense strand to SEQ ID NO: 2397538
uauugcccaaggcacaugg

SEQ ID NO: 2397540 - RNA, 19 nt, Artificial Sequence
  Description of Artificial Sequence: Synthetic oligonucleotide
  Sense strand starting at position 1349 of SEQ ID NO: 1886261
ggcaauacucgaggccuga

SEQ ID NO: 2397541 - RNA, 19 nt, Artificial Sequence
  Description of Artificial Sequence: Synthetic oligonucleotide
  Antisense strand to SEQ ID NO: 2397540
ucaggccucgaguauugcc

SEQ ID NO: 2397542 - RNA, 19 nt, Artificial Sequence
  Description of Artificial Sequence: Synthetic oligonucleotide
  Sense strand starting at position 1655 of SEQ ID NO: 1886261
gggucacuugugcagaaga

SEQ ID NO: 2397543 - RNA, 19 nt, Artificial Sequence
  Description of Artificial Sequence: Synthetic oligonucleotide
  Antisense strand to SEQ ID NO: 2397542
ucuucugcacaagugaccc

SEQ ID NO: 2397544 - RNA, 19 nt, Artificial Sequence
  Description of Artificial Sequence: Synthetic oligonucleotide
  Sense strand starting at position 2088 of SEQ ID NO: 1886261
cuaggaagguccugagcuu

SEQ ID NO: 2397545 - RNA, 19 nt, Artificial Sequence
  Description of Artificial Sequence: Synthetic oligonucleotide
  Antisense strand to SEQ ID NO: 2397544
aagcucaggaccuuccuag

SEQ ID NO: 2397546 - RNA, 19 nt, Artificial Sequence
  Description of Artificial Sequence: Synthetic oligonucleotide
  Sense strand starting at position 2126 of SEQ ID NO: 1886261
ugccuagcugacugacauu

SEQ ID NO: 2397547 - RNA, 19 nt, Artificial Sequence
  Description of Artificial Sequence: Synthetic oligonucleotide
  Antisense strand to SEQ ID NO: 2397546
aaugucagucagcuaggca

SEQ ID NO: 2397548 - RNA, 19 nt, Artificial Sequence
  Description of Artificial Sequence: Synthetic oligonucleotide
  Sense strand starting at position 2137 of SEQ ID NO: 1886261
cugacauuggcccagggau

SEQ ID NO: 2397549 - RNA, 19 nt, Artificial Sequence
  Description of Artificial Sequence: Synthetic oligonucleotide
  Antisense strand to SEQ ID NO: 2397548
aucccugggccaaugucag

SEQ ID NO: 2397550 - RNA, 19 nt, Artificial Sequence
  Description of Artificial Sequence: Synthetic oligonucleotide
  Sense strand starting at position 2306 of SEQ ID NO: 1886261
gugaaauacugacuuguua

SEQ ID NO: 2397551 - RNA, 19 nt, Artificial Sequence
  Description of Artificial Sequence: Synthetic oligonucleotide
  Antisense strand to SEQ ID NO: 2397550
uaacaagucaguauuucac

SEQ ID NO: 2397552 - RNA, 19 nt, Artificial Sequence
  Description of Artificial Sequence: Synthetic oligonucleotide
  Sense strand starting at position 2488 of SEQ ID NO: 1886261
gggacuguugggcacagau

SEQ ID NO: 2397553 - RNA, 19 nt, Artificial Sequence
  Description of Artificial Sequence: Synthetic oligonucleotide
  Antisense strand to SEQ ID NO: 2397552
aucugugcccaacaguccc

SEQ ID NO: 2397554 - RNA, 19 nt, Artificial Sequence
  Description of Artificial Sequence: Synthetic oligonucleotide
  Sense strand starting at position 2539 of SEQ ID NO: 1886261
gaggcuagcccagauguca

SEQ ID NO: 2397555 - RNA, 19 nt, Artificial Sequence
  Description of Artificial Sequence: Synthetic oligonucleotide
  Antisense strand to SEQ ID NO: 2397554
ugacaucugggcuagccuc

SEQ ID NO: 2397556 - RNA, 19 nt, Artificial Sequence
  Description of Artificial Sequence: Synthetic oligonucleotide
  Sense strand starting at position 2587 of SEQ ID NO: 1886261
gucugucacugggcaugaa

SEQ ID NO: 2397557 - RNA, 19 nt, Artificial Sequence
  Description of Artificial Sequence: Synthetic oligonucleotide
  Antisense strand to SEQ ID NO: 2397556
uucaugcccagugacagac

SEQ ID NO: 2397558 - RNA, 19 nt, Artificial Sequence
  Description of Artificial Sequence: Synthetic oligonucleotide
  Sense strand starting at position 2629 of SEQ ID NO: 1886261
ccaagugugcaacagaaau

SEQ ID NO: 2397559 - RNA, 19 nt, Artificial Sequence
  Description of Artificial Sequence: Synthetic oligonucleotide
  Antisense strand to SEQ ID NO: 2397558
auuucuguugcacacuugg

SEQ ID NO: 2397560 - RNA, 19 nt, Artificial Sequence
  Description of Artificial Sequence: Synthetic oligonucleotide
  Sense strand starting at position 2816 of SEQ ID NO: 1886261
gaagaaacuugagcgacaa

SEQ ID NO: 2397561 - RNA, 19 nt, Artificial Sequence
  Description of Artificial Sequence: Synthetic oligonucleotide
  Antisense strand to SEQ ID NO: 2397560
uugucgcucaaguuucuuc

SEQ ID NO: 2397562 - RNA, 19 nt, Artificial Sequence
  Description of Artificial Sequence: Synthetic oligonucleotide
  Sense strand starting at position 2817 of SEQ ID NO: 1886261
aagaaacuugagcgacaaa

SEQ ID NO: 2397563 - RNA, 19 nt, Artificial Sequence
  Description of Artificial Sequence: Synthetic oligonucleotide
  Antisense strand to SEQ ID NO: 2397562
uuugucgcucaaguuucuu

SEQ ID NO: 2397564 - RNA, 19 nt, Artificial Sequence
  Description of Artificial Sequence: Synthetic oligonucleotide
  Sense strand starting at position 2828 of SEQ ID NO: 1886261
gcgacaaacuccugggaca

SEQ ID NO: 2397565 - RNA, 19 nt, Artificial Sequence
  Description of Artificial Sequence: Synthetic oligonucleotide
  Antisense strand to SEQ ID NO: 2397564
ugucccaggaguuugucgc

SEQ ID NO: 2397566 - RNA, 19 nt, Artificial Sequence
  Description of Artificial Sequence: Synthetic oligonucleotide
  Sense strand starting at position 3078 of SEQ ID NO: 1886261
auggcccauugcucaauaa

SEQ ID NO: 2397567 - RNA, 19 nt, Artificial Sequence
  Description of Artificial Sequence: Synthetic oligonucleotide
  Antisense strand to SEQ ID NO: 2397566
uuauugagcaaugggccau

SEQ ID NO: 2397568 - RNA, 19 nt, Artificial Sequence
  Description of Artificial Sequence: Synthetic oligonucleotide
  Sense strand starting at position 3082 of SEQ ID NO: 1886261
cccauugcucaauaaggau

SEQ ID NO: 2397569 - RNA, 19 nt, Artificial Sequence
  Description of Artificial Sequence: Synthetic oligonucleotide
  Antisense strand to SEQ ID NO: 2397568
auccuuauugagcaauggg

SEQ ID NO: 2397570 - RNA, 19 nt, Artificial Sequence
  Description of Artificial Sequence: Synthetic oligonucleotide
  Sense strand starting at position 3091 of SEQ ID NO: 1886261
caauaaggaugguccuauu

SEQ ID NO: 2397571 - RNA, 19 nt, Artificial Sequence
  Description of Artificial Sequence: Synthetic oligonucleotide
  Antisense strand to SEQ ID NO: 2397570
aauaggaccauccuuauug

SEQ ID NO: 2397572 - RNA, 19 nt, Artificial Sequence
  Description of Artificial Sequence: Synthetic oligonucleotide
  Sense strand starting at position 3119 of SEQ ID NO: 1886261
gguggugcgcgauccuuua

SEQ ID NO: 2397573 - RNA, 19 nt, Artificial Sequence
  Description of Artificial Sequence: Synthetic oligonucleotide
  Antisense strand to SEQ ID NO: 2397572
uaaaggaucgcgcaccacc

SEQ ID NO: 2397574 - RNA, 19 nt, Artificial Sequence
  Description of Artificial Sequence: Synthetic oligonucleotide
  Sense strand starting at position 3121 of SEQ ID NO: 1886261
uggugcgcgauccuuuaau

SEQ ID NO: 2397575 - RNA, 19 nt, Artificial Sequence
  Description of Artificial Sequence: Synthetic oligonucleotide
  Antisense strand to SEQ ID NO: 2397574
auuaaaggaucgcgcacca

SEQ ID NO: 2397576 - RNA, 19 nt, Artificial Sequence
  Description of Artificial Sequence: Synthetic oligonucleotide
  Sense strand starting at position 3123 of SEQ ID NO: 1886261
gugcgcgauccuuuaaucu

SEQ ID NO: 2397577 - RNA, 19 nt, Artificial Sequence
  Description of Artificial Sequence: Synthetic oligonucleotide
  Antisense strand to SEQ ID NO: 2397576
agauuaaaggaucgcgcac

SEQ ID NO: 2397578 - RNA, 19 nt, Artificial Sequence
  Description of Artificial Sequence: Synthetic oligonucleotide
  Sense strand starting at position 3236 of SEQ ID NO: 1886261
ccucauguggccugggaaa

SEQ ID NO: 2397579 - RNA, 19 nt, Artificial Sequence
  Description of Artificial Sequence: Synthetic oligonucleotide
  Antisense strand to SEQ ID NO: 2397578
uuucccaggccacaugagg

SEQ ID NO: 2397580 - RNA, 19 nt, Artificial Sequence
  Description of Artificial Sequence: Synthetic oligonucleotide
  Sense strand starting at position 3238 of SEQ ID NO: 1886261
ucauguggccugggaaauc

SEQ ID NO: 2397581 - RNA, 19 nt, Artificial Sequence
  Description of Artificial Sequence: Synthetic oligonucleotide
  Antisense strand to SEQ ID NO: 2397580
gauuucccaggccacauga

SEQ ID NO: 2397582 - RNA, 19 nt, Artificial Sequence
  Description of Artificial Sequence: Synthetic oligonucleotide
  Sense strand starting at position 3248 of SEQ ID NO: 1886261
ugggaaauccuugaggccu

SEQ ID NO: 2397583 - RNA, 19 nt, Artificial Sequence
  Description of Artificial Sequence: Synthetic oligonucleotide
  Antisense strand to SEQ ID NO: 2397582
aggccucaaggauuuccca

SEQ ID NO: 2397584 - RNA, 19 nt, Artificial Sequence
  Description of Artificial Sequence: Synthetic oligonucleotide
  Sense strand starting at position 3436 of SEQ ID NO: 1886261
caggucgguucccugagaa

SEQ ID NO: 2397585 - RNA, 19 nt, Artificial Sequence
  Description of Artificial Sequence: Synthetic oligonucleotide
  Antisense strand to SEQ ID NO: 2397584
uucucagggaaccgaccug

SEQ ID NO: 2397586 - RNA, 19 nt, Artificial Sequence
  Description of Artificial Sequence: Synthetic oligonucleotide
  Sense strand starting at position 3952 of SEQ ID NO: 1886261
ggauauacucaccacagcu

SEQ ID NO: 2397587 - RNA, 19 nt, Artificial Sequence
  Description of Artificial Sequence: Synthetic oligonucleotide
  Antisense strand to SEQ ID NO: 2397586
agcuguggugaguauaucc

SEQ ID NO: 2397588 - RNA, 19 nt, Artificial Sequence
  Description of Artificial Sequence: Synthetic oligonucleotide
  Sense strand starting at position 383 of SEQ ID NO: 1886262
auggacacaugugaugaua

SEQ ID NO: 2397589 - RNA, 19 nt, Artificial Sequence
  Description of Artificial Sequence: Synthetic oligonucleotide
  Antisense strand to SEQ ID NO: 2397588
uaucaucacauguguccau

SEQ ID NO: 2397590 - RNA, 19 nt, Artificial Sequence
  Description of Artificial Sequence: Synthetic oligonucleotide
  Sense strand starting at position 385 of SEQ ID NO: 1886262
ggacacaugugaugauauc

SEQ ID NO: 2397591 - RNA, 19 nt, Artificial Sequence
  Description of Artificial Sequence: Synthetic oligonucleotide
  Antisense strand to SEQ ID NO: 2397590
gauaucaucacaugugucc

SEQ ID NO: 2397592 - RNA, 19 nt, Artificial Sequence
  Description of Artificial Sequence: Synthetic oligonucleotide
  Sense strand starting at position 392 of SEQ ID NO: 1886262
ugugaugauauccauguga

SEQ ID NO: 2397593 - RNA, 19 nt, Artificial Sequence
  Description of Artificial Sequence: Synthetic oligonucleotide
  Antisense strand to SEQ ID NO: 2397592
ucacauggauaucaucaca

SEQ ID NO: 2397594 - RNA, 19 nt, Artificial Sequence
  Description of Artificial Sequence: Synthetic oligonucleotide
  Sense strand starting at position 394 of SEQ ID NO: 1886262
ugaugauauccaugugaaa

SEQ ID NO: 2397595 - RNA, 19 nt, Artificial Sequence
  Description of Artificial Sequence: Synthetic oligonucleotide
  Antisense strand to SEQ ID NO: 2397594
uuucacauggauaucauca

SEQ ID NO: 2397596 - RNA, 19 nt, Artificial Sequence
  Description of Artificial Sequence: Synthetic oligonucleotide
  Sense strand starting at position 397 of SEQ ID NO: 1886262
ugauauccaugugaaauac

SEQ ID NO: 2397597 - RNA, 19 nt, Artificial Sequence
  Description of Artificial Sequence: Synthetic oligonucleotide
  Antisense strand to SEQ ID NO: 2397596
guauuucacauggauauca

SEQ ID NO: 2397598 - RNA, 19 nt, Artificial Sequence
  Description of Artificial Sequence: Synthetic oligonucleotide
  Sense strand starting at position 669 of SEQ ID NO: 1886262
cagaccugauaguggcaua

SEQ ID NO: 2397599 - RNA, 19 nt, Artificial Sequence
  Description of Artificial Sequence: Synthetic oligonucleotide
  Antisense strand to SEQ ID NO: 2397598
uaugccacuaucaggucug

SEQ ID NO: 2397600 - RNA, 19 nt, Artificial Sequence
  Description of Artificial Sequence: Synthetic oligonucleotide
  Sense strand starting at position 701 of SEQ ID NO: 1886262
ccugguacuuggguguaaa

SEQ ID NO: 2397601 - RNA, 19 nt, Artificial Sequence
  Description of Artificial Sequence: Synthetic oligonucleotide
  Antisense strand to SEQ ID NO: 2397600
uuuacacccaaguaccagg

SEQ ID NO: 2397602 - RNA, 19 nt, Artificial Sequence
  Description of Artificial Sequence: Synthetic oligonucleotide
  Sense strand starting at position 702 of SEQ ID NO: 1886262
cugguacuuggguguaaag

SEQ ID NO: 2397603 - RNA, 19 nt, Artificial Sequence
  Description of Artificial Sequence: Synthetic oligonucleotide
  Antisense strand to SEQ ID NO: 2397602
cuuuacacccaaguaccag

SEQ ID NO: 2397604 - RNA, 19 nt, Artificial Sequence
  Description of Artificial Sequence: Synthetic oligonucleotide
  Sense strand starting at position 730 of SEQ ID NO: 1886262
ccaagugugcaccggaaau

SEQ ID NO: 2397605 - RNA, 19 nt, Artificial Sequence
  Description of Artificial Sequence: Synthetic oligonucleotide
  Antisense strand to SEQ ID NO: 2397604
auuuccggugcacacuugg

SEQ ID NO: 2397606 - RNA, 19 nt, Artificial Sequence
  Description of Artificial Sequence: Synthetic oligonucleotide
  Sense strand starting at position 732 of SEQ ID NO: 1886262
aagugugcaccggaaauca

SEQ ID NO: 2397607 - RNA, 19 nt, Artificial Sequence
  Description of Artificial Sequence: Synthetic oligonucleotide
  Antisense strand to SEQ ID NO: 2397606
ugauuuccggugcacacuu

SEQ ID NO: 2397608 - RNA, 19 nt, Artificial Sequence
  Description of Artificial Sequence: Synthetic oligonucleotide
  Sense strand starting at position 774 of SEQ ID NO: 1886262
ugcuuucucuaugaauggu

SEQ ID NO: 2397609 - RNA, 19 nt, Artificial Sequence
  Description of Artificial Sequence: Synthetic oligonucleotide
  Antisense strand to SEQ ID NO: 2397608
accauucauagagaaagca

SEQ ID NO: 2397610 - RNA, 19 nt, Artificial Sequence
  Description of Artificial Sequence: Synthetic oligonucleotide
  Sense strand starting at position 1223 of SEQ ID NO: 1886262
uggugcaauccuuaaaucu

SEQ ID NO: 2397611 - RNA, 19 nt, Artificial Sequence
  Description of Artificial Sequence: Synthetic oligonucleotide
  Antisense strand to SEQ ID NO: 2397610
agauuuaaggauugcacca

SEQ ID NO: 2397612 - RNA, 19 nt, Artificial Sequence
  Description of Artificial Sequence: Synthetic oligonucleotide
  Sense strand starting at position 1339 of SEQ ID NO: 1886262
uuaugugaccugggcaguu

SEQ ID NO: 2397613 - RNA, 19 nt, Artificial Sequence
  Description of Artificial Sequence: Synthetic oligonucleotide
  Antisense strand to SEQ ID NO: 2397612
aacugcccaggucacauaa

SEQ ID NO: 2397614 - RNA, 19 nt, Artificial Sequence
  Description of Artificial Sequence: Synthetic oligonucleotide
  Sense strand starting at position 1630 of SEQ ID NO: 1886262
ucaccuaugucagucaaug

SEQ ID NO: 2397615 - RNA, 19 nt, Artificial Sequence
  Description of Artificial Sequence: Synthetic oligonucleotide
  Antisense strand to SEQ ID NO: 2397614
cauugacugacauagguga

SEQ ID NO: 2397616 - RNA, 19 nt, Artificial Sequence
  Description of Artificial Sequence: Synthetic oligonucleotide
  Sense strand starting at position 2096 of SEQ ID NO: 1886262
agaguuucagcgcaccaga

SEQ ID NO: 2397617 - RNA, 19 nt, Artificial Sequence
  Description of Artificial Sequence: Synthetic oligonucleotide
  Antisense strand to SEQ ID NO: 2397616
ucuggugcgcugaaacucu

SEQ ID NO: 2397618 - RNA, 19 nt, Artificial Sequence
  Description of Artificial Sequence: Synthetic oligonucleotide
  Sense strand starting at position 2204 of SEQ ID NO: 1886262
gaggaaaugugucuaacca

SEQ ID NO: 2397619 - RNA, 19 nt, Artificial Sequence
  Description of Artificial Sequence: Synthetic oligonucleotide
  Antisense strand to SEQ ID NO: 2397618
ugguuagacacauuuccuc

SEQ ID NO: 2397620 - RNA, 19 nt, Artificial Sequence
  Description of Artificial Sequence: Synthetic oligonucleotide
  Sense strand starting at position 2224 of SEQ ID NO: 1886262
ggccucacacaucaaugua

SEQ ID NO: 2397621 - RNA, 19 nt, Artificial Sequence
  Description of Artificial Sequence: Synthetic oligonucleotide
  Antisense strand to SEQ ID NO: 2397620
uacauugaugugugaggcc

SEQ ID NO: 2397622 - RNA, 19 nt, Artificial Sequence
  Description of Artificial Sequence: Synthetic oligonucleotide
  Sense strand starting at position 2254 of SEQ ID NO: 1886262
aagggauacucaugugaug

SEQ ID NO: 2397623 - RNA, 19 nt, Artificial Sequence
  Description of Artificial Sequence: Synthetic oligonucleotide
  Antisense strand to SEQ ID NO: 2397622
caucacaugaguaucccuu

SEQ ID NO: 2397624 - RNA, 19 nt, Artificial Sequence
  Description of Artificial Sequence: Synthetic oligonucleotide
  Sense strand starting at position 2257 of SEQ ID NO: 1886262
ggauacucaugugauggga

SEQ ID NO: 2397625 - RNA, 19 nt, Artificial Sequence
  Description of Artificial Sequence: Synthetic oligonucleotide
  Antisense strand to SEQ ID NO: 2397624
ucccaucacaugaguaucc

SEQ ID NO: 2397626 - RNA, 19 nt, Artificial Sequence
  Description of Artificial Sequence: Synthetic oligonucleotide
  Sense strand starting at position 2281 of SEQ ID NO: 1886262
gcugaauacugaucccuca

SEQ ID NO: 2397627 - RNA, 19 nt, Artificial Sequence
  Description of Artificial Sequence: Synthetic oligonucleotide
  Antisense strand to SEQ ID NO: 2397626
ugagggaucaguauucagc

SEQ ID NO: 2397628 - RNA, 19 nt, Artificial Sequence
  Description of Artificial Sequence: Synthetic oligonucleotide
  Sense strand starting at position 2550 of SEQ ID NO: 1886262
ggaaguccgagagaucgua

SEQ ID NO: 2397629 - RNA, 19 nt, Artificial Sequence
  Description of Artificial Sequence: Synthetic oligonucleotide
  Antisense strand to SEQ ID NO: 2397628
uacgaucucucggacuucc

SEQ ID NO: 2397630 - RNA, 19 nt, Artificial Sequence
  Description of Artificial Sequence: Synthetic oligonucleotide
  Sense strand starting at position 2622 of SEQ ID NO: 1886262
aggaucacaugcuuucuau

SEQ ID NO: 2397631 - RNA, 19 nt, Artificial Sequence
  Description of Artificial Sequence: Synthetic oligonucleotide
  Antisense strand to SEQ ID NO: 2397630
auagaaagcaugugauccu

SEQ ID NO: 2397632 - RNA, 19 nt, Artificial Sequence
  Description of Artificial Sequence: Synthetic oligonucleotide
  Sense strand starting at position 2706 of SEQ ID NO: 1886262
ggaaccacaucgugucuuu

SEQ ID NO: 2397633 - RNA, 19 nt, Artificial Sequence
  Description of Artificial Sequence: Synthetic oligonucleotide
  Antisense strand to SEQ ID NO: 2397632
aaagacacgaugugguucc

SEQ ID NO: 2397634 - RNA, 19 nt, Artificial Sequence
  Description of Artificial Sequence: Synthetic oligonucleotide
  Sense strand starting at position 2789 of SEQ ID NO: 1886262
gcagcaaauuccuagaaca

SEQ ID NO: 2397635 - RNA, 19 nt, Artificial Sequence
  Description of Artificial Sequence: Synthetic oligonucleotide
  Antisense strand to SEQ ID NO: 2397634
uguucuaggaauuugcugc

SEQ ID NO: 2397636 - RNA, 19 nt, Artificial Sequence
  Description of Artificial Sequence: Synthetic oligonucleotide
  Sense strand starting at position 3072 of SEQ ID NO: 1886262
uguggagcaugccuugaau

SEQ ID NO: 2397637 - RNA, 19 nt, Artificial Sequence
  Description of Artificial Sequence: Synthetic oligonucleotide
  Antisense strand to SEQ ID NO: 2397636
auucaaggcaugcuccaca

SEQ ID NO: 2397638 - RNA, 19 nt, Artificial Sequence
  Description of Artificial Sequence: Synthetic oligonucleotide
  Sense strand starting at position 3074 of SEQ ID NO: 1886262
uggagcaugccuugaaucu

SEQ ID NO: 2397639 - RNA, 19 nt, Artificial Sequence
  Description of Artificial Sequence: Synthetic oligonucleotide
  Antisense strand to SEQ ID NO: 2397638
agauucaaggcaugcucca

SEQ ID NO: 2397640 - RNA, 19 nt, Artificial Sequence
  Description of Artificial Sequence: Synthetic oligonucleotide
  Sense strand starting at position 3075 of SEQ ID NO: 1886262
ggagcaugccuugaaucuc

SEQ ID NO: 2397641 - RNA, 19 nt, Artificial Sequence
  Description of Artificial Sequence: Synthetic oligonucleotide
  Antisense strand to SEQ ID NO: 2397640
gagauucaaggcaugcucc

SEQ ID NO: 2397642 - RNA, 19 nt, Artificial Sequence
  Description of Artificial Sequence: Synthetic oligonucleotide
  Sense strand starting at position 3141 of SEQ ID NO: 1886262
ggagaacuccagugugacc

SEQ ID NO: 2397643 - RNA, 19 nt, Artificial Sequence
  Description of Artificial Sequence: Synthetic oligonucleotide
  Antisense strand to SEQ ID NO: 2397642
ggucacacuggaguucucc

SEQ ID NO: 2397644 - RNA, 19 nt, Artificial Sequence
  Description of Artificial Sequence: Synthetic oligonucleotide
  Sense strand starting at position 3195 of SEQ ID NO: 1886262
ccaugugccuugggcaaua

SEQ ID NO: 2397645 - RNA, 19 nt, Artificial Sequence
  Description of Artificial Sequence: Synthetic oligonucleotide
  Antisense strand to SEQ ID NO: 2397644
uauugcccaaggcacaugg

SEQ ID NO: 2397646 - RNA, 19 nt, Artificial Sequence
  Description of Artificial Sequence: Synthetic oligonucleotide
  Sense strand starting at position 3207 of SEQ ID NO: 1886262
ggcaauacucgaggccuga

SEQ ID NO: 2397647 - RNA, 19 nt, Artificial Sequence
  Description of Artificial Sequence: Synthetic oligonucleotide
  Antisense strand to SEQ ID NO: 2397646
ucaggccucgaguauugcc

SEQ ID NO: 2397648 - RNA, 19 nt, Artificial Sequence
  Description of Artificial Sequence: Synthetic oligonucleotide
  Sense strand starting at position 3513 of SEQ ID NO: 1886262
gggucacuugugcagaaga

SEQ ID NO: 2397649 - RNA, 19 nt, Artificial Sequence
  Description of Artificial Sequence: Synthetic oligonucleotide
  Antisense strand to SEQ ID NO: 2397648
ucuucugcacaagugaccc

SEQ ID NO: 2397650 - RNA, 19 nt, Artificial Sequence
  Description of Artificial Sequence: Synthetic oligonucleotide
  Sense strand starting at position 3946 of SEQ ID NO: 1886262
cuaggaagguccugagcuu

SEQ ID NO: 2397651 - RNA, 19 nt, Artificial Sequence
  Description of Artificial Sequence: Synthetic oligonucleotide
  Antisense strand to SEQ ID NO: 2397650
aagcucaggaccuuccuag

SEQ ID NO: 2397652 - RNA, 19 nt, Artificial Sequence
  Description of Artificial Sequence: Synthetic oligonucleotide
  Sense strand starting at position 49 of SEQ ID NO: 1886263
acucauggcccaugaucaa

SEQ ID NO: 2397653 - RNA, 19 nt, Artificial Sequence
  Description of Artificial Sequence: Synthetic oligonucleotide
  Antisense strand to SEQ ID NO: 2397652
uugaucaugggccaugagu

SEQ ID NO: 2397654 - RNA, 19 nt, Artificial Sequence
  Description of Artificial Sequence: Synthetic oligonucleotide
  Sense strand starting at position 115 of SEQ ID NO: 1886263
ggccgaagagcucacugaa

SEQ ID NO: 2397655 - RNA, 19 nt, Artificial Sequence
  Description of Artificial Sequence: Synthetic oligonucleotide
  Antisense strand to SEQ ID NO: 2397654
uucagugagcucuucggcc

SEQ ID NO: 2397656 - RNA, 19 nt, Artificial Sequence
  Description of Artificial Sequence: Synthetic oligonucleotide
  Sense strand starting at position 118 of SEQ ID NO: 1886263
cgaagagcucacugaaaga

SEQ ID NO: 2397657 - RNA, 19 nt, Artificial Sequence
  Description of Artificial Sequence: Synthetic oligonucleotide
  Antisense strand to SEQ ID NO: 2397656
ucuuucagugagcucuucg

SEQ ID NO: 2397658 - RNA, 19 nt, Artificial Sequence
  Description of Artificial Sequence: Synthetic oligonucleotide
  Sense strand starting at position 256 of SEQ ID NO: 1886263
uagaguuggguccaccaga

SEQ ID NO: 2397659 - RNA, 19 nt, Artificial Sequence
  Description of Artificial Sequence: Synthetic oligonucleotide
  Antisense strand to SEQ ID NO: 2397658
ucugguggacccaacucua

SEQ ID NO: 2397660 - RNA, 19 nt, Artificial Sequence
  Description of Artificial Sequence: Synthetic oligonucleotide
  Sense strand starting at position 493 of SEQ ID NO: 1886263
ccaggauaugcucaccaca

SEQ ID NO: 2397661 - RNA, 19 nt, Artificial Sequence
  Description of Artificial Sequence: Synthetic oligonucleotide
  Antisense strand to SEQ ID NO: 2397660
uguggugagcauauccugg

SEQ ID NO: 2397662 - RNA, 19 nt, Artificial Sequence
  Description of Artificial Sequence: Synthetic oligonucleotide
  Sense strand starting at position 655 of SEQ ID NO: 1886263
gaggacauguguccaaaua

SEQ ID NO: 2397663 - RNA, 19 nt, Artificial Sequence
  Description of Artificial Sequence: Synthetic oligonucleotide
  Antisense strand to SEQ ID NO: 2397662
uauuuggacacauguccuc

SEQ ID NO: 2397664 - RNA, 19 nt, Artificial Sequence
  Description of Artificial Sequence: Synthetic oligonucleotide
  Sense strand starting at position 678 of SEQ ID NO: 1886263
cucacaucuccauauguag

SEQ ID NO: 2397665 - RNA, 19 nt, Artificial Sequence
  Description of Artificial Sequence: Synthetic oligonucleotide
  Antisense strand to SEQ ID NO: 2397664
cuacauauggagaugugag

SEQ ID NO: 2397666 - RNA, 19 nt, Artificial Sequence
  Description of Artificial Sequence: Synthetic oligonucleotide
  Sense strand starting at position 1159 of SEQ ID NO: 1886263
guggcaaauucccaguaca

SEQ ID NO: 2397667 - RNA, 19 nt, Artificial Sequence
  Description of Artificial Sequence: Synthetic oligonucleotide
  Antisense strand to SEQ ID NO: 2397666
uguacugggaauuugccac

SEQ ID NO: 2397668 - RNA, 19 nt, Artificial Sequence
  Description of Artificial Sequence: Synthetic oligonucleotide
  Sense strand starting at position 1162 of SEQ ID NO: 1886263
gcaaauucccaguacagga

SEQ ID NO: 2397669 - RNA, 19 nt, Artificial Sequence
  Description of Artificial Sequence: Synthetic oligonucleotide
  Antisense strand to SEQ ID NO: 2397668
uccuguacugggaauuugc

SEQ ID NO: 2397670 - RNA, 19 nt, Artificial Sequence
  Description of Artificial Sequence: Synthetic oligonucleotide
  Sense strand starting at position 1310 of SEQ ID NO: 1886263
agccauaucucagccuuga

SEQ ID NO: 2397671 - RNA, 19 nt, Artificial Sequence
  Description of Artificial Sequence: Synthetic oligonucleotide
  Antisense strand to SEQ ID NO: 2397670
ucaaggcugagauauggcu

SEQ ID NO: 2397672 - RNA, 19 nt, Artificial Sequence
  Description of Artificial Sequence: Synthetic oligonucleotide
  Sense strand starting at position 1469 of SEQ ID NO: 1886263
gucacagauucccaaggaa

SEQ ID NO: 2397673 - RNA, 19 nt, Artificial Sequence
  Description of Artificial Sequence: Synthetic oligonucleotide
  Antisense strand to SEQ ID NO: 2397672
uuccuugggaaucugugac

SEQ ID NO: 2397674 - RNA, 19 nt, Artificial Sequence
  Description of Artificial Sequence: Synthetic oligonucleotide
  Sense strand starting at position 1487 of SEQ ID NO: 1886263
agcugaccuccuggagaaa

SEQ ID NO: 2397675 - RNA, 19 nt, Artificial Sequence
  Description of Artificial Sequence: Synthetic oligonucleotide
  Antisense strand to SEQ ID NO: 2397674
uuucuccaggaggucagcu

SEQ ID NO: 2397676 - RNA, 19 nt, Artificial Sequence
  Description of Artificial Sequence: Synthetic oligonucleotide
  Sense strand starting at position 1508 of SEQ ID NO: 1886263
augccucccucaugggaau

SEQ ID NO: 2397677 - RNA, 19 nt, Artificial Sequence
  Description of Artificial Sequence: Synthetic oligonucleotide
  Antisense strand to SEQ ID NO: 2397676
auucccaugagggaggcau

SEQ ID NO: 2397678 - RNA, 19 nt, Artificial Sequence
  Description of Artificial Sequence: Synthetic oligonucleotide
  Sense strand starting at position 2254 of SEQ ID NO: 1886263
auggacacaugugaugaua

SEQ ID NO: 2397679 - RNA, 19 nt, Artificial Sequence
  Description of Artificial Sequence: Synthetic oligonucleotide
  Antisense strand to SEQ ID NO: 2397678
uaucaucacauguguccau

SEQ ID NO: 2397680 - RNA, 19 nt, Artificial Sequence
  Description of Artificial Sequence: Synthetic oligonucleotide
  Sense strand starting at position 2256 of SEQ ID NO: 1886263
ggacacaugugaugauauc

SEQ ID NO: 2397681 - RNA, 19 nt, Artificial Sequence
  Description of Artificial Sequence: Synthetic oligonucleotide
  Antisense strand to SEQ ID NO: 2397680
gauaucaucacaugugucc

SEQ ID NO: 2397682 - RNA, 19 nt, Artificial Sequence
  Description of Artificial Sequence: Synthetic oligonucleotide
  Sense strand starting at position 2263 of SEQ ID NO: 1886263
ugugaugauauccauguga

SEQ ID NO: 2397683 - RNA, 19 nt, Artificial Sequence
  Description of Artificial Sequence: Synthetic oligonucleotide
  Antisense strand to SEQ ID NO: 2397682
ucacauggauaucaucaca

SEQ ID NO: 2397684 - RNA, 19 nt, Artificial Sequence
  Description of Artificial Sequence: Synthetic oligonucleotide
  Sense strand starting at position 2265 of SEQ ID NO: 1886263
ugaugauauccaugugaaa

SEQ ID NO: 2397685 - RNA, 19 nt, Artificial Sequence
  Description of Artificial Sequence: Synthetic oligonucleotide
  Antisense strand to SEQ ID NO: 2397684
uuucacauggauaucauca

SEQ ID NO: 2397686 - RNA, 19 nt, Artificial Sequence
  Description of Artificial Sequence: Synthetic oligonucleotide
  Sense strand starting at position 2268 of SEQ ID NO: 1886263
ugauauccaugugaaauac

SEQ ID NO: 2397687 - RNA, 19 nt, Artificial Sequence
  Description of Artificial Sequence: Synthetic oligonucleotide
  Antisense strand to SEQ ID NO: 2397686
guauuucacauggauauca

SEQ ID NO: 2397688 - RNA, 19 nt, Artificial Sequence
  Description of Artificial Sequence: Synthetic oligonucleotide
  Sense strand starting at position 2540 of SEQ ID NO: 1886263
cagaccugauaguggcaua

SEQ ID NO: 2397689 - RNA, 19 nt, Artificial Sequence
  Description of Artificial Sequence: Synthetic oligonucleotide
  Antisense strand to SEQ ID NO: 2397688
uaugccacuaucaggucug

SEQ ID NO: 2397690 - RNA, 19 nt, Artificial Sequence
  Description of Artificial Sequence: Synthetic oligonucleotide
  Sense strand starting at position 2572 of SEQ ID NO: 1886263
ccugguacuuggguguaaa

SEQ ID NO: 2397691 - RNA, 19 nt, Artificial Sequence
  Description of Artificial Sequence: Synthetic oligonucleotide
  Antisense strand to SEQ ID NO: 2397690
uuuacacccaaguaccagg

SEQ ID NO: 2397692 - RNA, 19 nt, Artificial Sequence
  Description of Artificial Sequence: Synthetic oligonucleotide
  Sense strand starting at position 2573 of SEQ ID NO: 1886263
cugguacuuggguguaaag

SEQ ID NO: 2397693 - RNA, 19 nt, Artificial Sequence
  Description of Artificial Sequence: Synthetic oligonucleotide
  Antisense strand to SEQ ID NO: 2397692
cuuuacacccaaguaccag

SEQ ID NO: 2397694 - RNA, 19 nt, Artificial Sequence
  Description of Artificial Sequence: Synthetic oligonucleotide
  Sense strand starting at position 2601 of SEQ ID NO: 1886263
ccaagugugcaccggaaau

SEQ ID NO: 2397695 - RNA, 19 nt, Artificial Sequence
  Description of Artificial Sequence: Synthetic oligonucleotide
  Antisense strand to SEQ ID NO: 2397694
auuuccggugcacacuugg

SEQ ID NO: 2397696 - RNA, 19 nt, Artificial Sequence
  Description of Artificial Sequence: Synthetic oligonucleotide
  Sense strand starting at position 2603 of SEQ ID NO: 1886263
aagugugcaccggaaauca

SEQ ID NO: 2397697 - RNA, 19 nt, Artificial Sequence
  Description of Artificial Sequence: Synthetic oligonucleotide
  Antisense strand to SEQ ID NO: 2397696
ugauuuccggugcacacuu

SEQ ID NO: 2397698 - RNA, 19 nt, Artificial Sequence
  Description of Artificial Sequence: Synthetic oligonucleotide
  Sense strand starting at position 2645 of SEQ ID NO: 1886263
ugcuuucucuaugaauggu

SEQ ID NO: 2397699 - RNA, 19 nt, Artificial Sequence
  Description of Artificial Sequence: Synthetic oligonucleotide
  Antisense strand to SEQ ID NO: 2397698
accauucauagagaaagca

SEQ ID NO: 2397700 - RNA, 19 nt, Artificial Sequence
  Description of Artificial Sequence: Synthetic oligonucleotide
  Sense strand starting at position 3094 of SEQ ID NO: 1886263
uggugcaauccuuaaaucu

SEQ ID NO: 2397701 - RNA, 19 nt, Artificial Sequence
  Description of Artificial Sequence: Synthetic oligonucleotide
  Antisense strand to SEQ ID NO: 2397700
agauuuaaggauugcacca

SEQ ID NO: 2397702 - RNA, 19 nt, Artificial Sequence
  Description of Artificial Sequence: Synthetic oligonucleotide
  Sense strand starting at position 3210 of SEQ ID NO: 1886263
uuaugugaccugggcaguu

SEQ ID NO: 2397703 - RNA, 19 nt, Artificial Sequence
  Description of Artificial Sequence: Synthetic oligonucleotide
  Antisense strand to SEQ ID NO: 2397702
aacugcccaggucacauaa

SEQ ID NO: 2397704 - RNA, 19 nt, Artificial Sequence
  Description of Artificial Sequence: Synthetic oligonucleotide
  Sense strand starting at position 3501 of SEQ ID NO: 1886263
ucaccuaugucagucaaug

SEQ ID NO: 2397705 - RNA, 19 nt, Artificial Sequence
  Description of Artificial Sequence: Synthetic oligonucleotide
  Antisense strand to SEQ ID NO: 2397704
cauugacugacauagguga

SEQ ID NO: 2397706 - RNA, 19 nt, Artificial Sequence
  Description of Artificial Sequence: Synthetic oligonucleotide
  Sense strand starting at position 3967 of SEQ ID NO: 1886263
agaguuucagcgcaccaga

SEQ ID NO: 2397707 - RNA, 19 nt, Artificial Sequence
  Description of Artificial Sequence: Synthetic oligonucleotide
  Antisense strand to SEQ ID NO: 2397706
ucuggugcgcugaaacucu

SEQ ID NO: 2397708 - RNA, 19 nt, Artificial Sequence
  Description of Artificial Sequence: Synthetic oligonucleotide
  Sense strand starting at position 187 of SEQ ID NO: 1886264
ggauauggucaucacagcu

SEQ ID NO: 2397709 - RNA, 19 nt, Artificial Sequence
  Description of Artificial Sequence: Synthetic oligonucleotide
  Antisense strand to SEQ ID NO: 2397708
agcugugaugaccauaucc

SEQ ID NO: 2397710 - RNA, 19 nt, Artificial Sequence
  Description of Artificial Sequence: Synthetic oligonucleotide
  Sense strand starting at position 387 of SEQ ID NO: 1886264
ggagcuaagugauacucau

SEQ ID NO: 2397711 - RNA, 19 nt, Artificial Sequence
  Description of Artificial Sequence: Synthetic oligonucleotide
  Antisense strand to SEQ ID NO: 2397710
augaguaucacuuagcucc

SEQ ID NO: 2397712 - RNA, 19 nt, Artificial Sequence
  Description of Artificial Sequence: Synthetic oligonucleotide
  Sense strand starting at position 393 of SEQ ID NO: 1886264
aagugauacucaugcaaug

SEQ ID NO: 2397713 - RNA, 19 nt, Artificial Sequence
  Description of Artificial Sequence: Synthetic oligonucleotide
  Antisense strand to SEQ ID NO: 2397712
cauugcaugaguaucacuu

SEQ ID NO: 2397714 - RNA, 19 nt, Artificial Sequence
  Description of Artificial Sequence: Synthetic oligonucleotide
  Sense strand starting at position 513 of SEQ ID NO: 1886264
gcaagaugccugggaugca

SEQ ID NO: 2397715 - RNA, 19 nt, Artificial Sequence
  Description of Artificial Sequence: Synthetic oligonucleotide
  Antisense strand to SEQ ID NO: 2397714
ugcaucccaggcaucuugc

SEQ ID NO: 2397716 - RNA, 19 nt, Artificial Sequence
  Description of Artificial Sequence: Synthetic oligonucleotide
  Sense strand starting at position 1173 of SEQ ID NO: 1886264
cccauugcucaauaggguu

SEQ ID NO: 2397717 - RNA, 19 nt, Artificial Sequence
  Description of Artificial Sequence: Synthetic oligonucleotide
  Antisense strand to SEQ ID NO: 2397716
aacccuauugagcaauggg

SEQ ID NO: 2397718 - RNA, 19 nt, Artificial Sequence
  Description of Artificial Sequence: Synthetic oligonucleotide
  Sense strand starting at position 1216 of SEQ ID NO: 1886264
ggagcauuccuugaaucuc

SEQ ID NO: 2397719 - RNA, 19 nt, Artificial Sequence
  Description of Artificial Sequence: Synthetic oligonucleotide
  Antisense strand to SEQ ID NO: 2397718
gagauucaaggaaugcucc

SEQ ID NO: 2397720 - RNA, 19 nt, Artificial Sequence
  Description of Artificial Sequence: Synthetic oligonucleotide
  Sense strand starting at position 1360 of SEQ ID NO: 1886264
gccugaucuguccaccaag

SEQ ID NO: 2397721 - RNA, 19 nt, Artificial Sequence
  Description of Artificial Sequence: Synthetic oligonucleotide
  Antisense strand to SEQ ID NO: 2397720
cuugguggacagaucaggc

SEQ ID NO: 2397722 - RNA, 19 nt, Artificial Sequence
  Description of Artificial Sequence: Synthetic oligonucleotide
  Sense strand starting at position 1363 of SEQ ID NO: 1886264
ugaucuguccaccaaguuu

SEQ ID NO: 2397723 - RNA, 19 nt, Artificial Sequence
  Description of Artificial Sequence: Synthetic oligonucleotide
  Antisense strand to SEQ ID NO: 2397722
aaacuugguggacagauca

SEQ ID NO: 2397724 - RNA, 19 nt, Artificial Sequence
  Description of Artificial Sequence: Synthetic oligonucleotide
  Sense strand starting at position 1464 of SEQ ID NO: 1886264
gcgugcuccaugggucaga

SEQ ID NO: 2397725 - RNA, 19 nt, Artificial Sequence
  Description of Artificial Sequence: Synthetic oligonucleotide
  Antisense strand to SEQ ID NO: 2397724
ucugacccauggagcacgc

SEQ ID NO: 2397726 - RNA, 19 nt, Artificial Sequence
  Description of Artificial Sequence: Synthetic oligonucleotide
  Sense strand starting at position 1475 of SEQ ID NO: 1886264
gggucagauuccgaaggaa

SEQ ID NO: 2397727 - RNA, 19 nt, Artificial Sequence
  Description of Artificial Sequence: Synthetic oligonucleotide
  Antisense strand to SEQ ID NO: 2397726
uuccuucggaaucugaccc

SEQ ID NO: 2397728 - RNA, 19 nt, Artificial Sequence
  Description of Artificial Sequence: Synthetic oligonucleotide
  Sense strand starting at position 1533 of SEQ ID NO: 1886264
agguuugcagccugagaaa

SEQ ID NO: 2397729 - RNA, 19 nt, Artificial Sequence
  Description of Artificial Sequence: Synthetic oligonucleotide
  Antisense strand to SEQ ID NO: 2397728
uuucucaggcugcaaaccu

SEQ ID NO: 2397730 - RNA, 19 nt, Artificial Sequence
  Description of Artificial Sequence: Synthetic oligonucleotide
  Sense strand starting at position 1598 of SEQ ID NO: 1886264
acucauggcccaugaucaa

SEQ ID NO: 2397731 - RNA, 19 nt, Artificial Sequence
  Description of Artificial Sequence: Synthetic oligonucleotide
  Antisense strand to SEQ ID NO: 2397730
uugaucaugggccaugagu

SEQ ID NO: 2397732 - RNA, 19 nt, Artificial Sequence
  Description of Artificial Sequence: Synthetic oligonucleotide
  Sense strand starting at position 1664 of SEQ ID NO: 1886264
ggccgaagagcucacugaa

SEQ ID NO: 2397733 - RNA, 19 nt, Artificial Sequence
  Description of Artificial Sequence: Synthetic oligonucleotide
  Antisense strand to SEQ ID NO: 2397732
uucagugagcucuucggcc

SEQ ID NO: 2397734 - RNA, 19 nt, Artificial Sequence
  Description of Artificial Sequence: Synthetic oligonucleotide
  Sense strand starting at position 1667 of SEQ ID NO: 1886264
cgaagagcucacugaaaga

SEQ ID NO: 2397735 - RNA, 19 nt, Artificial Sequence
  Description of Artificial Sequence: Synthetic oligonucleotide
  Antisense strand to SEQ ID NO: 2397734
ucuuucagugagcucuucg

SEQ ID NO: 2397736 - RNA, 19 nt, Artificial Sequence
  Description of Artificial Sequence: Synthetic oligonucleotide
  Sense strand starting at position 1805 of SEQ ID NO: 1886264
uagaguuggguccaccaga

SEQ ID NO: 2397737 - RNA, 19 nt, Artificial Sequence
  Description of Artificial Sequence: Synthetic oligonucleotide
  Antisense strand to SEQ ID NO: 2397736
ucugguggacccaacucua

SEQ ID NO: 2397738 - RNA, 19 nt, Artificial Sequence
  Description of Artificial Sequence: Synthetic oligonucleotide
  Sense strand starting at position 2042 of SEQ ID NO: 1886264
ccaggauaugcucaccaca

SEQ ID NO: 2397739 - RNA, 19 nt, Artificial Sequence
  Description of Artificial Sequence: Synthetic oligonucleotide
  Antisense strand to SEQ ID NO: 2397738
uguggugagcauauccugg

SEQ ID NO: 2397740 - RNA, 19 nt, Artificial Sequence
  Description of Artificial Sequence: Synthetic oligonucleotide
  Sense strand starting at position 2204 of SEQ ID NO: 1886264
gaggacauguguccaaaua

SEQ ID NO: 2397741 - RNA, 19 nt, Artificial Sequence
  Description of Artificial Sequence: Synthetic oligonucleotide
  Antisense strand to SEQ ID NO: 2397740
uauuuggacacauguccuc

SEQ ID NO: 2397742 - RNA, 19 nt, Artificial Sequence
  Description of Artificial Sequence: Synthetic oligonucleotide
  Sense strand starting at position 2227 of SEQ ID NO: 1886264
cucacaucuccauauguag

SEQ ID NO: 2397743 - RNA, 19 nt, Artificial Sequence
  Description of Artificial Sequence: Synthetic oligonucleotide
  Antisense strand to SEQ ID NO: 2397742
cuacauauggagaugugag

SEQ ID NO: 2397744 - RNA, 19 nt, Artificial Sequence
  Description of Artificial Sequence: Synthetic oligonucleotide
  Sense strand starting at position 2708 of SEQ ID NO: 1886264
guggcaaauucccaguaca

SEQ ID NO: 2397745 - RNA, 19 nt, Artificial Sequence
  Description of Artificial Sequence: Synthetic oligonucleotide
  Antisense strand to SEQ ID NO: 2397744
uguacugggaauuugccac

SEQ ID NO: 2397746 - RNA, 19 nt, Artificial Sequence
  Description of Artificial Sequence: Synthetic oligonucleotide
  Sense strand starting at position 2711 of SEQ ID NO: 1886264
gcaaauucccaguacagga

SEQ ID NO: 2397747 - RNA, 19 nt, Artificial Sequence
  Description of Artificial Sequence: Synthetic oligonucleotide
  Antisense strand to SEQ ID NO: 2397746
uccuguacugggaauuugc

SEQ ID NO: 2397748 - RNA, 19 nt, Artificial Sequence
  Description of Artificial Sequence: Synthetic oligonucleotide
  Sense strand starting at position 2859 of SEQ ID NO: 1886264
agccauaucucagccuuga

SEQ ID NO: 2397749 - RNA, 19 nt, Artificial Sequence
  Description of Artificial Sequence: Synthetic oligonucleotide
  Antisense strand to SEQ ID NO: 2397748
ucaaggcugagauauggcu

SEQ ID NO: 2397750 - RNA, 19 nt, Artificial Sequence
  Description of Artificial Sequence: Synthetic oligonucleotide
  Sense strand starting at position 3018 of SEQ ID NO: 1886264
gucacagauucccaaggaa

SEQ ID NO: 2397751 - RNA, 19 nt, Artificial Sequence
  Description of Artificial Sequence: Synthetic oligonucleotide
  Antisense strand to SEQ ID NO: 2397750
uuccuugggaaucugugac

SEQ ID NO: 2397752 - RNA, 19 nt, Artificial Sequence
  Description of Artificial Sequence: Synthetic oligonucleotide
  Sense strand starting at position 3036 of SEQ ID NO: 1886264
agcugaccuccuggagaaa

SEQ ID NO: 2397753 - RNA, 19 nt, Artificial Sequence
  Description of Artificial Sequence: Synthetic oligonucleotide
  Antisense strand to SEQ ID NO: 2397752
uuucuccaggaggucagcu

SEQ ID NO: 2397754 - RNA, 19 nt, Artificial Sequence
  Description of Artificial Sequence: Synthetic oligonucleotide
  Sense strand starting at position 3057 of SEQ ID NO: 1886264
augccucccucaugggaau

SEQ ID NO: 2397755 - RNA, 19 nt, Artificial Sequence
  Description of Artificial Sequence: Synthetic oligonucleotide
  Antisense strand to SEQ ID NO: 2397754
auucccaugagggaggcau

SEQ ID NO: 2397756 - RNA, 19 nt, Artificial Sequence
  Description of Artificial Sequence: Synthetic oligonucleotide
  Sense strand starting at position 3803 of SEQ ID NO: 1886264
auggacacaugugaugaua

SEQ ID NO: 2397757 - RNA, 19 nt, Artificial Sequence
  Description of Artificial Sequence: Synthetic oligonucleotide
  Antisense strand to SEQ ID NO: 2397756
uaucaucacauguguccau

SEQ ID NO: 2397758 - RNA, 19 nt, Artificial Sequence
  Description of Artificial Sequence: Synthetic oligonucleotide
  Sense strand starting at position 3805 of SEQ ID NO: 1886264
ggacacaugugaugauauc

SEQ ID NO: 2397759 - RNA, 19 nt, Artificial Sequence
  Description of Artificial Sequence: Synthetic oligonucleotide
  Antisense strand to SEQ ID NO: 2397758
gauaucaucacaugugucc

SEQ ID NO: 2397760 - RNA, 19 nt, Artificial Sequence
  Description of Artificial Sequence: Synthetic oligonucleotide
  Sense strand starting at position 3812 of SEQ ID NO: 1886264
ugugaugauauccauguga

SEQ ID NO: 2397761 - RNA, 19 nt, Artificial Sequence
  Description of Artificial Sequence: Synthetic oligonucleotide
  Antisense strand to SEQ ID NO: 2397760
ucacauggauaucaucaca

SEQ ID NO: 2397762 - RNA, 19 nt, Artificial Sequence
  Description of Artificial Sequence: Synthetic oligonucleotide
  Sense strand starting at position 3814 of SEQ ID NO: 1886264
ugaugauauccaugugaaa

SEQ ID NO: 2397763 - RNA, 19 nt, Artificial Sequence
  Description of Artificial Sequence: Synthetic oligonucleotide
  Antisense strand to SEQ ID NO: 2397762
uuucacauggauaucauca

SEQ ID NO: 2397764 - RNA, 19 nt, Artificial Sequence
  Description of Artificial Sequence: Synthetic oligonucleotide
  Sense strand starting at position 3817 of SEQ ID NO: 1886264
ugauauccaugugaaauac

SEQ ID NO: 2397765 - RNA, 19 nt, Artificial Sequence
  Description of Artificial Sequence: Synthetic oligonucleotide
  Antisense strand to SEQ ID NO: 2397764
guauuucacauggauauca

SEQ ID NO: 2397766 - RNA, 19 nt, Artificial Sequence
  Description of Artificial Sequence: Synthetic oligonucleotide
  Sense strand starting at position 207 of SEQ ID NO: 1886265
gccagaugugcucagcaca

SEQ ID NO: 2397767 - RNA, 19 nt, Artificial Sequence
  Description of Artificial Sequence: Synthetic oligonucleotide
  Antisense strand to SEQ ID NO: 2397766
ugugcugagcacaucuggc

SEQ ID NO: 2397768 - RNA, 19 nt, Artificial Sequence
  Description of Artificial Sequence: Synthetic oligonucleotide
  Sense strand starting at position 298 of SEQ ID NO: 1886265
uggacacugucccaugaaa

SEQ ID NO: 2397769 - RNA, 19 nt, Artificial Sequence
  Description of Artificial Sequence: Synthetic oligonucleotide
  Antisense strand to SEQ ID NO: 2397768
uuucaugggacagugucca

SEQ ID NO: 2397770 - RNA, 19 nt, Artificial Sequence
  Description of Artificial Sequence: Synthetic oligonucleotide
  Sense strand starting at position 443 of SEQ ID NO: 1886265
cgugaugagauccaugcaa

SEQ ID NO: 2397771 - RNA, 19 nt, Artificial Sequence
  Description of Artificial Sequence: Synthetic oligonucleotide
  Antisense strand to SEQ ID NO: 2397770
uugcauggaucucaucacg

SEQ ID NO: 2397772 - RNA, 19 nt, Artificial Sequence
  Description of Artificial Sequence: Synthetic oligonucleotide
  Sense strand starting at position 465 of SEQ ID NO: 1886265
auugacuugucaccaaugu

SEQ ID NO: 2397773 - RNA, 19 nt, Artificial Sequence
  Description of Artificial Sequence: Synthetic oligonucleotide
  Antisense strand to SEQ ID NO: 2397772
acauuggugacaagucaau

SEQ ID NO: 2397774 - RNA, 19 nt, Artificial Sequence
  Description of Artificial Sequence: Synthetic oligonucleotide
  Sense strand starting at position 466 of SEQ ID NO: 1886265
uugacuugucaccaaugua

SEQ ID NO: 2397775 - RNA, 19 nt, Artificial Sequence
  Description of Artificial Sequence: Synthetic oligonucleotide
  Antisense strand to SEQ ID NO: 2397774
uacauuggugacaagucaa

SEQ ID NO: 2397776 - RNA, 19 nt, Artificial Sequence
  Description of Artificial Sequence: Synthetic oligonucleotide
  Sense strand starting at position 914 of SEQ ID NO: 1886265
uuugcuuggucccaagauc

SEQ ID NO: 2397777 - RNA, 19 nt, Artificial Sequence
  Description of Artificial Sequence: Synthetic oligonucleotide
  Antisense strand to SEQ ID NO: 2397776
gaucuugggaccaagcaaa

SEQ ID NO: 2397778 - RNA, 19 nt, Artificial Sequence
  Description of Artificial Sequence: Synthetic oligonucleotide
  Sense strand starting at position 978 of SEQ ID NO: 1886265
acaaauucucaguacaggu

SEQ ID NO: 2397779 - RNA, 19 nt, Artificial Sequence
  Description of Artificial Sequence: Synthetic oligonucleotide
  Antisense strand to SEQ ID NO: 2397778
accuguacugagaauuugu

SEQ ID NO: 2397780 - RNA, 19 nt, Artificial Sequence
  Description of Artificial Sequence: Synthetic oligonucleotide
  Sense strand starting at position 1232 of SEQ ID NO: 1886265
ggugcagcauccuugaauc

SEQ ID NO: 2397781 - RNA, 19 nt, Artificial Sequence
  Description of Artificial Sequence: Synthetic oligonucleotide
  Antisense strand to SEQ ID NO: 2397780
gauucaaggaugcugcacc

SEQ ID NO: 2397782 - RNA, 19 nt, Artificial Sequence
  Description of Artificial Sequence: Synthetic oligonucleotide
  Sense strand starting at position 1243 of SEQ ID NO: 1886265
cuugaaucucugcgacuca

SEQ ID NO: 2397783 - RNA, 19 nt, Artificial Sequence
  Description of Artificial Sequence: Synthetic oligonucleotide
  Antisense strand to SEQ ID NO: 2397782
ugagucgcagagauucaag

SEQ ID NO: 2397784 - RNA, 19 nt, Artificial Sequence
  Description of Artificial Sequence: Synthetic oligonucleotide
  Sense strand starting at position 1244 of SEQ ID NO: 1886265
uugaaucucugcgacucaa

SEQ ID NO: 2397785 - RNA, 19 nt, Artificial Sequence
  Description of Artificial Sequence: Synthetic oligonucleotide
  Antisense strand to SEQ ID NO: 2397784
uugagucgcagagauucaa

SEQ ID NO: 2397786 - RNA, 19 nt, Artificial Sequence
  Description of Artificial Sequence: Synthetic oligonucleotide
  Sense strand starting at position 1532 of SEQ ID NO: 1886265
uuggcugucugagacaacu

SEQ ID NO: 2397787 - RNA, 19 nt, Artificial Sequence
  Description of Artificial Sequence: Synthetic oligonucleotide
  Antisense strand to SEQ ID NO: 2397786
aguugucucagacagccaa

SEQ ID NO: 2397788 - RNA, 19 nt, Artificial Sequence
  Description of Artificial Sequence: Synthetic oligonucleotide
  Sense strand starting at position 2047 of SEQ ID NO: 1886265
ggauauggucaucacagcu

SEQ ID NO: 2397789 - RNA, 19 nt, Artificial Sequence
  Description of Artificial Sequence: Synthetic oligonucleotide
  Antisense strand to SEQ ID NO: 2397788
agcugugaugaccauaucc

SEQ ID NO: 2397790 - RNA, 19 nt, Artificial Sequence
  Description of Artificial Sequence: Synthetic oligonucleotide
  Sense strand starting at position 2247 of SEQ ID NO: 1886265
ggagcuaagugauacucau

SEQ ID NO: 2397791 - RNA, 19 nt, Artificial Sequence
  Description of Artificial Sequence: Synthetic oligonucleotide
  Antisense strand to SEQ ID NO: 2397790
augaguaucacuuagcucc

SEQ ID NO: 2397792 - RNA, 19 nt, Artificial Sequence
  Description of Artificial Sequence: Synthetic oligonucleotide
  Sense strand starting at position 2253 of SEQ ID NO: 1886265
aagugauacucaugcaaug

SEQ ID NO: 2397793 - RNA, 19 nt, Artificial Sequence
  Description of Artificial Sequence: Synthetic oligonucleotide
  Antisense strand to SEQ ID NO: 2397792
cauugcaugaguaucacuu

SEQ ID NO: 2397794 - RNA, 19 nt, Artificial Sequence
  Description of Artificial Sequence: Synthetic oligonucleotide
  Sense strand starting at position 2373 of SEQ ID NO: 1886265
gcaagaugccugggaugca

SEQ ID NO: 2397795 - RNA, 19 nt, Artificial Sequence
  Description of Artificial Sequence: Synthetic oligonucleotide
  Antisense strand to SEQ ID NO: 2397794
ugcaucccaggcaucuugc

SEQ ID NO: 2397796 - RNA, 19 nt, Artificial Sequence
  Description of Artificial Sequence: Synthetic oligonucleotide
  Sense strand starting at position 3033 of SEQ ID NO: 1886265
cccauugcucaauaggguu

SEQ ID NO: 2397797 - RNA, 19 nt, Artificial Sequence
  Description of Artificial Sequence: Synthetic oligonucleotide
  Antisense strand to SEQ ID NO: 2397796
aacccuauugagcaauggg

SEQ ID NO: 2397798 - RNA, 19 nt, Artificial Sequence
  Description of Artificial Sequence: Synthetic oligonucleotide
  Sense strand starting at position 3076 of SEQ ID NO: 1886265
ggagcauuccuugaaucuc

SEQ ID NO: 2397799 - RNA, 19 nt, Artificial Sequence
  Description of Artificial Sequence: Synthetic oligonucleotide
  Antisense strand to SEQ ID NO: 2397798
gagauucaaggaaugcucc

SEQ ID NO: 2397800 - RNA, 19 nt, Artificial Sequence
  Description of Artificial Sequence: Synthetic oligonucleotide
  Sense strand starting at position 3220 of SEQ ID NO: 1886265
gccugaucuguccaccaag

SEQ ID NO: 2397801 - RNA, 19 nt, Artificial Sequence
  Description of Artificial Sequence: Synthetic oligonucleotide
  Antisense strand to SEQ ID NO: 2397800
cuugguggacagaucaggc

SEQ ID NO: 2397802 - RNA, 19 nt, Artificial Sequence
  Description of Artificial Sequence: Synthetic oligonucleotide
  Sense strand starting at position 3223 of SEQ ID NO: 1886265
ugaucuguccaccaaguuu

SEQ ID NO: 2397803 - RNA, 19 nt, Artificial Sequence
  Description of Artificial Sequence: Synthetic oligonucleotide
  Antisense strand to SEQ ID NO: 2397802
aaacuugguggacagauca

SEQ ID NO: 2397804 - RNA, 19 nt, Artificial Sequence
  Description of Artificial Sequence: Synthetic oligonucleotide
  Sense strand starting at position 3324 of SEQ ID NO: 1886265
gcgugcuccaugggucaga

SEQ ID NO: 2397805 - RNA, 19 nt, Artificial Sequence
  Description of Artificial Sequence: Synthetic oligonucleotide
  Antisense strand to SEQ ID NO: 2397804
ucugacccauggagcacgc

SEQ ID NO: 2397806 - RNA, 19 nt, Artificial Sequence
  Description of Artificial Sequence: Synthetic oligonucleotide
  Sense strand starting at position 3335 of SEQ ID NO: 1886265
gggucagauuccgaaggaa

SEQ ID NO: 2397807 - RNA, 19 nt, Artificial Sequence
  Description of Artificial Sequence: Synthetic oligonucleotide
  Antisense strand to SEQ ID NO: 2397806
uuccuucggaaucugaccc

SEQ ID NO: 2397808 - RNA, 19 nt, Artificial Sequence
  Description of Artificial Sequence: Synthetic oligonucleotide
  Sense strand starting at position 3393 of SEQ ID NO: 1886265
agguuugcagccugagaaa

SEQ ID NO: 2397809 - RNA, 19 nt, Artificial Sequence
  Description of Artificial Sequence: Synthetic oligonucleotide
  Antisense strand to SEQ ID NO: 2397808
uuucucaggcugcaaaccu

SEQ ID NO: 2397810 - RNA, 19 nt, Artificial Sequence
  Description of Artificial Sequence: Synthetic oligonucleotide
  Sense strand starting at position 3458 of SEQ ID NO: 1886265
acucauggcccaugaucaa

SEQ ID NO: 2397811 - RNA, 19 nt, Artificial Sequence
  Description of Artificial Sequence: Synthetic oligonucleotide
  Antisense strand to SEQ ID NO: 2397810
uugaucaugggccaugagu

SEQ ID NO: 2397812 - RNA, 19 nt, Artificial Sequence
  Description of Artificial Sequence: Synthetic oligonucleotide
  Sense strand starting at position 3524 of SEQ ID NO: 1886265
ggccgaagagcucacugaa

SEQ ID NO: 2397813 - RNA, 19 nt, Artificial Sequence
  Description of Artificial Sequence: Synthetic oligonucleotide
  Antisense strand to SEQ ID NO: 2397812
uucagugagcucuucggcc

SEQ ID NO: 2397814 - RNA, 19 nt, Artificial Sequence
  Description of Artificial Sequence: Synthetic oligonucleotide
  Sense strand starting at position 3527 of SEQ ID NO: 1886265
cgaagagcucacugaaaga

SEQ ID NO: 2397815 - RNA, 19 nt, Artificial Sequence
  Description of Artificial Sequence: Synthetic oligonucleotide
  Antisense strand to SEQ ID NO: 2397814
ucuuucagugagcucuucg

SEQ ID NO: 2397816 - RNA, 19 nt, Artificial Sequence
  Description of Artificial Sequence: Synthetic oligonucleotide
  Sense strand starting at position 3665 of SEQ ID NO: 1886265
uagaguuggguccaccaga

SEQ ID NO: 2397817 - RNA, 19 nt, Artificial Sequence
  Description of Artificial Sequence: Synthetic oligonucleotide
  Antisense strand to SEQ ID NO: 2397816
ucugguggacccaacucua

SEQ ID NO: 2397818 - RNA, 19 nt, Artificial Sequence
  Description of Artificial Sequence: Synthetic oligonucleotide
  Sense strand starting at position 3902 of SEQ ID NO: 1886265
ccaggauaugcucaccaca

SEQ ID NO: 2397819 - RNA, 19 nt, Artificial Sequence
  Description of Artificial Sequence: Synthetic oligonucleotide
  Antisense strand to SEQ ID NO: 2397818
uguggugagcauauccugg

SEQ ID NO: 2397820 - RNA, 19 nt, Artificial Sequence
  Description of Artificial Sequence: Synthetic oligonucleotide
  Sense strand starting at position 305 of SEQ ID NO: 1886266
uggucauuuacgcgaggaa

SEQ ID NO: 2397821 - RNA, 19 nt, Artificial Sequence
  Description of Artificial Sequence: Synthetic oligonucleotide
  Antisense strand to SEQ ID NO: 2397820
uuccucgcguaaaugacca

SEQ ID NO: 2397822 - RNA, 19 nt, Artificial Sequence
  Description of Artificial Sequence: Synthetic oligonucleotide
  Sense strand starting at position 362 of SEQ ID NO: 1886266
gucacaggguucgagcaaa

SEQ ID NO: 2397823 - RNA, 19 nt, Artificial Sequence
  Description of Artificial Sequence: Synthetic oligonucleotide
  Antisense strand to SEQ ID NO: 2397822
uuugcucgaacccugugac

SEQ ID NO: 2397824 - RNA, 19 nt, Artificial Sequence
  Description of Artificial Sequence: Synthetic oligonucleotide
  Sense strand starting at position 444 of SEQ ID NO: 1886266
gcucgaaucugggcugcau

SEQ ID NO: 2397825 - RNA, 19 nt, Artificial Sequence
  Description of Artificial Sequence: Synthetic oligonucleotide
  Antisense strand to SEQ ID NO: 2397824
augcagcccagauucgagc

SEQ ID NO: 2397826 - RNA, 19 nt, Artificial Sequence
  Description of Artificial Sequence: Synthetic oligonucleotide
  Sense strand starting at position 791 of SEQ ID NO: 1886266
ucagaaguagccugggcau

SEQ ID NO: 2397827 - RNA, 19 nt, Artificial Sequence
  Description of Artificial Sequence: Synthetic oligonucleotide
  Antisense strand to SEQ ID NO: 2397826
augcccaggcuacuucuga

SEQ ID NO: 2397828 - RNA, 19 nt, Artificial Sequence
  Description of Artificial Sequence: Synthetic oligonucleotide
  Sense strand starting at position 806 of SEQ ID NO: 1886266
gcaucaaauugccaggaca

SEQ ID NO: 2397829 - RNA, 19 nt, Artificial Sequence
  Description of Artificial Sequence: Synthetic oligonucleotide
  Antisense strand to SEQ ID NO: 2397828
uguccuggcaauuugaugc

SEQ ID NO: 2397830 - RNA, 19 nt, Artificial Sequence
  Description of Artificial Sequence: Synthetic oligonucleotide
  Sense strand starting at position 874 of SEQ ID NO: 1886266
cuccacuuccgguagggau

SEQ ID NO: 2397831 - RNA, 19 nt, Artificial Sequence
  Description of Artificial Sequence: Synthetic oligonucleotide
  Antisense strand to SEQ ID NO: 2397830
aucccuaccggaaguggag

SEQ ID NO: 2397832 - RNA, 19 nt, Artificial Sequence
  Description of Artificial Sequence: Synthetic oligonucleotide
  Sense strand starting at position 933 of SEQ ID NO: 1886266
ccacgauucccagggccaa

SEQ ID NO: 2397833 - RNA, 19 nt, Artificial Sequence
  Description of Artificial Sequence: Synthetic oligonucleotide
  Antisense strand to SEQ ID NO: 2397832
uuggcccugggaaucgugg

SEQ ID NO: 2397834 - RNA, 19 nt, Artificial Sequence
  Description of Artificial Sequence: Synthetic oligonucleotide
  Sense strand starting at position 934 of SEQ ID NO: 1886266
cacgauucccagggccaaa

SEQ ID NO: 2397835 - RNA, 19 nt, Artificial Sequence
  Description of Artificial Sequence: Synthetic oligonucleotide
  Antisense strand to SEQ ID NO: 2397834
uuuggcccugggaaucgug

SEQ ID NO: 2397836 - RNA, 19 nt, Artificial Sequence
  Description of Artificial Sequence: Synthetic oligonucleotide
  Sense strand starting at position 1035 of SEQ ID NO: 1886266
gggauagcccauugcucaa

SEQ ID NO: 2397837 - RNA, 19 nt, Artificial Sequence
  Description of Artificial Sequence: Synthetic oligonucleotide
  Antisense strand to SEQ ID NO: 2397836
uugagcaaugggcuauccc

SEQ ID NO: 2397838 - RNA, 19 nt, Artificial Sequence
  Description of Artificial Sequence: Synthetic oligonucleotide
  Sense strand starting at position 1289 of SEQ ID NO: 1886266
gucaauaaguccugugcga

SEQ ID NO: 2397839 - RNA, 19 nt, Artificial Sequence
  Description of Artificial Sequence: Synthetic oligonucleotide
  Antisense strand to SEQ ID NO: 2397838
ucgcacaggacuuauugac

SEQ ID NO: 2397840 - RNA, 19 nt, Artificial Sequence
  Description of Artificial Sequence: Synthetic oligonucleotide
  Sense strand starting at position 1291 of SEQ ID NO: 1886266
caauaaguccugugcgauc

SEQ ID NO: 2397841 - RNA, 19 nt, Artificial Sequence
  Description of Artificial Sequence: Synthetic oligonucleotide
  Antisense strand to SEQ ID NO: 2397840
gaucgcacaggacuuauug

SEQ ID NO: 2397842 - RNA, 19 nt, Artificial Sequence
  Description of Artificial Sequence: Synthetic oligonucleotide
  Sense strand starting at position 1300 of SEQ ID NO: 1886266
cugugcgauccuuaaaucu

SEQ ID NO: 2397843 - RNA, 19 nt, Artificial Sequence
  Description of Artificial Sequence: Synthetic oligonucleotide
  Antisense strand to SEQ ID NO: 2397842
agauuuaaggaucgcacag

SEQ ID NO: 2397844 - RNA, 19 nt, Artificial Sequence
  Description of Artificial Sequence: Synthetic oligonucleotide
  Sense strand starting at position 1393 of SEQ ID NO: 1886266
acuguauuggguugaagga

SEQ ID NO: 2397845 - RNA, 19 nt, Artificial Sequence
  Description of Artificial Sequence: Synthetic oligonucleotide
  Antisense strand to SEQ ID NO: 2397844
uccuucaacccaauacagu

SEQ ID NO: 2397846 - RNA, 19 nt, Artificial Sequence
  Description of Artificial Sequence: Synthetic oligonucleotide
  Sense strand starting at position 1460 of SEQ ID NO: 1886266
gcguccuucuugggaucaa

SEQ ID NO: 2397847 - RNA, 19 nt, Artificial Sequence
  Description of Artificial Sequence: Synthetic oligonucleotide
  Antisense strand to SEQ ID NO: 2397846
uugaucccaagaaggacgc

SEQ ID NO: 2397848 - RNA, 19 nt, Artificial Sequence
  Description of Artificial Sequence: Synthetic oligonucleotide
  Sense strand starting at position 1461 of SEQ ID NO: 1886266
cguccuucuugggaucaau

SEQ ID NO: 2397849 - RNA, 19 nt, Artificial Sequence
  Description of Artificial Sequence: Synthetic oligonucleotide
  Antisense strand to SEQ ID NO: 2397848
auugaucccaagaaggacg

SEQ ID NO: 2397850 - RNA, 19 nt, Artificial Sequence
  Description of Artificial Sequence: Synthetic oligonucleotide
  Sense strand starting at position 1471 of SEQ ID NO: 1886266
gggaucaauuaacaaggaa

SEQ ID NO: 2397851 - RNA, 19 nt, Artificial Sequence
  Description of Artificial Sequence: Synthetic oligonucleotide
  Antisense strand to SEQ ID NO: 2397850
uuccuuguuaauugauccc

SEQ ID NO: 2397852 - RNA, 19 nt, Artificial Sequence
  Description of Artificial Sequence: Synthetic oligonucleotide
  Sense strand starting at position 1531 of SEQ ID NO: 1886266
aggucagcucccuaaggaa

SEQ ID NO: 2397853 - RNA, 19 nt, Artificial Sequence
  Description of Artificial Sequence: Synthetic oligonucleotide
  Antisense strand to SEQ ID NO: 2397852
uuccuuagggagcugaccu

SEQ ID NO: 2397854 - RNA, 19 nt, Artificial Sequence
  Description of Artificial Sequence: Synthetic oligonucleotide
  Sense strand starting at position 2207 of SEQ ID NO: 1886266
guggacauguguccaaaug

SEQ ID NO: 2397855 - RNA, 19 nt, Artificial Sequence
  Description of Artificial Sequence: Synthetic oligonucleotide
  Antisense strand to SEQ ID NO: 2397854
cauuuggacacauguccac

SEQ ID NO: 2397856 - RNA, 19 nt, Artificial Sequence
  Description of Artificial Sequence: Synthetic oligonucleotide
  Sense strand starting at position 2312 of SEQ ID NO: 1886266
gugaaacacugauguguca

SEQ ID NO: 2397857 - RNA, 19 nt, Artificial Sequence
  Description of Artificial Sequence: Synthetic oligonucleotide
  Antisense strand to SEQ ID NO: 2397856
ugacacaucaguguuucac

SEQ ID NO: 2397858 - RNA, 19 nt, Artificial Sequence
  Description of Artificial Sequence: Synthetic oligonucleotide
  Sense strand starting at position 2319 of SEQ ID NO: 1886266
acugaugugucauggacac

SEQ ID NO: 2397859 - RNA, 19 nt, Artificial Sequence
  Description of Artificial Sequence: Synthetic oligonucleotide
  Antisense strand to SEQ ID NO: 2397858
guguccaugacacaucagu

SEQ ID NO: 2397860 - RNA, 19 nt, Artificial Sequence
  Description of Artificial Sequence: Synthetic oligonucleotide
  Sense strand starting at position 2321 of SEQ ID NO: 1886266
ugaugugucauggacacag

SEQ ID NO: 2397861 - RNA, 19 nt, Artificial Sequence
  Description of Artificial Sequence: Synthetic oligonucleotide
  Antisense strand to SEQ ID NO: 2397860
cuguguccaugacacauca

SEQ ID NO: 2397862 - RNA, 19 nt, Artificial Sequence
  Description of Artificial Sequence: Synthetic oligonucleotide
  Sense strand starting at position 2670 of SEQ ID NO: 1886266
ccucguguguucucugaua

SEQ ID NO: 2397863 - RNA, 19 nt, Artificial Sequence
  Description of Artificial Sequence: Synthetic oligonucleotide
  Antisense strand to SEQ ID NO: 2397862
uaucagagaacacacgagg

SEQ ID NO: 2397864 - RNA, 19 nt, Artificial Sequence
  Description of Artificial Sequence: Synthetic oligonucleotide
  Sense strand starting at position 2672 of SEQ ID NO: 1886266
ucguguguucucugauaug

SEQ ID NO: 2397865 - RNA, 19 nt, Artificial Sequence
  Description of Artificial Sequence: Synthetic oligonucleotide
  Antisense strand to SEQ ID NO: 2397864
cauaucagagaacacacga

SEQ ID NO: 2397866 - RNA, 19 nt, Artificial Sequence
  Description of Artificial Sequence: Synthetic oligonucleotide
  Sense strand starting at position 3051 of SEQ ID NO: 1886266
ugggauggcccauagcuua

SEQ ID NO: 2397867 - RNA, 19 nt, Artificial Sequence
  Description of Artificial Sequence: Synthetic oligonucleotide
  Antisense strand to SEQ ID NO: 2397866
uaagcuaugggccauccca

SEQ ID NO: 2397868 - RNA, 19 nt, Artificial Sequence
  Description of Artificial Sequence: Synthetic oligonucleotide
  Sense strand starting at position 3233 of SEQ ID NO: 1886266
auccuagaggccugacuua

SEQ ID NO: 2397869 - RNA, 19 nt, Artificial Sequence
  Description of Artificial Sequence: Synthetic oligonucleotide
  Antisense strand to SEQ ID NO: 2397868
uaagucaggccucuaggau

SEQ ID NO: 2397870 - RNA, 19 nt, Artificial Sequence
  Description of Artificial Sequence: Synthetic oligonucleotide
  Sense strand starting at position 3245 of SEQ ID NO: 1886266
ugacuuaagcaccgaguuu

SEQ ID NO: 2397871 - RNA, 19 nt, Artificial Sequence
  Description of Artificial Sequence: Synthetic oligonucleotide
  Antisense strand to SEQ ID NO: 2397870
aaacucggugcuuaaguca

SEQ ID NO: 2397872 - RNA, 19 nt, Artificial Sequence
  Description of Artificial Sequence: Synthetic oligonucleotide
  Sense strand starting at position 3356 of SEQ ID NO: 1886266
ggguccgauuccuaaggaa

SEQ ID NO: 2397873 - RNA, 19 nt, Artificial Sequence
  Description of Artificial Sequence: Synthetic oligonucleotide
  Antisense strand to SEQ ID NO: 2397872
uuccuuaggaaucggaccc

SEQ ID NO: 2397874 - RNA, 19 nt, Artificial Sequence
  Description of Artificial Sequence: Synthetic oligonucleotide
  Sense strand starting at position 3411 of SEQ ID NO: 1886266
cgggucaguuccugaggaa

SEQ ID NO: 2397875 - RNA, 19 nt, Artificial Sequence
  Description of Artificial Sequence: Synthetic oligonucleotide
  Antisense strand to SEQ ID NO: 2397874
uuccucaggaacugacccg

SEQ ID NO: 2397876 - RNA, 19 nt, Artificial Sequence
  Description of Artificial Sequence: Synthetic oligonucleotide
  Sense strand starting at position 89 of SEQ ID NO: 1886267
ggauauacucaccacagcu

SEQ ID NO: 2397877 - RNA, 19 nt, Artificial Sequence
  Description of Artificial Sequence: Synthetic oligonucleotide
  Antisense strand to SEQ ID NO: 2397876
agcuguggugaguauaucc

SEQ ID NO: 2397878 - RNA, 19 nt, Artificial Sequence
  Description of Artificial Sequence: Synthetic oligonucleotide
  Sense strand starting at position 295 of SEQ ID NO: 1886267
guaagagauacccacguaa

SEQ ID NO: 2397879 - RNA, 19 nt, Artificial Sequence
  Description of Artificial Sequence: Synthetic oligonucleotide
  Antisense strand to SEQ ID NO: 2397878
uuacguggguaucucuuac

SEQ ID NO: 2397880 - RNA, 19 nt, Artificial Sequence
  Description of Artificial Sequence: Synthetic oligonucleotide
  Sense strand starting at position 297 of SEQ ID NO: 1886267
aagagauacccacguaaug

SEQ ID NO: 2397881 - RNA, 19 nt, Artificial Sequence
  Description of Artificial Sequence: Synthetic oligonucleotide
  Antisense strand to SEQ ID NO: 2397880
cauuacguggguaucucuu

SEQ ID NO: 2397882 - RNA, 19 nt, Artificial Sequence
  Description of Artificial Sequence: Synthetic oligonucleotide
  Sense strand starting at position 333 of SEQ ID NO: 1886267
cgacucaucauggaugcuu

SEQ ID NO: 2397883 - RNA, 19 nt, Artificial Sequence
  Description of Artificial Sequence: Synthetic oligonucleotide
  Antisense strand to SEQ ID NO: 2397882
aagcauccaugaugagucg

SEQ ID NO: 2397884 - RNA, 19 nt, Artificial Sequence
  Description of Artificial Sequence: Synthetic oligonucleotide
  Sense strand starting at position 713 of SEQ ID NO: 1886267
ggugaccacuugucucaga

SEQ ID NO: 2397885 - RNA, 19 nt, Artificial Sequence
  Description of Artificial Sequence: Synthetic oligonucleotide
  Antisense strand to SEQ ID NO: 2397884
ucugagacaaguggucacc

SEQ ID NO: 2397886 - RNA, 19 nt, Artificial Sequence
  Description of Artificial Sequence: Synthetic oligonucleotide
  Sense strand starting at position 714 of SEQ ID NO: 1886267
gugaccacuugucucagaa

SEQ ID NO: 2397887 - RNA, 19 nt, Artificial Sequence
  Description of Artificial Sequence: Synthetic oligonucleotide
  Antisense strand to SEQ ID NO: 2397886
uucugagacaaguggucac

SEQ ID NO: 2397888 - RNA, 19 nt, Artificial Sequence
  Description of Artificial Sequence: Synthetic oligonucleotide
  Sense strand starting at position 716 of SEQ ID NO: 1886267
gaccacuugucucagaaga

SEQ ID NO: 2397889 - RNA, 19 nt, Artificial Sequence
  Description of Artificial Sequence: Synthetic oligonucleotide
  Antisense strand to SEQ ID NO: 2397888
ucuucugagacaagugguc

SEQ ID NO: 2397890 - RNA, 19 nt, Artificial Sequence
  Description of Artificial Sequence: Synthetic oligonucleotide
  Sense strand starting at position 718 of SEQ ID NO: 1886267
ccacuugucucagaagaac

SEQ ID NO: 2397891 - RNA, 19 nt, Artificial Sequence
  Description of Artificial Sequence: Synthetic oligonucleotide
  Antisense strand to SEQ ID NO: 2397890
guucuucugagacaagugg

SEQ ID NO: 2397892 - RNA, 19 nt, Artificial Sequence
  Description of Artificial Sequence: Synthetic oligonucleotide
  Sense strand starting at position 745 of SEQ ID NO: 1886267
gcaaauucccaguauagga

SEQ ID NO: 2397893 - RNA, 19 nt, Artificial Sequence
  Description of Artificial Sequence: Synthetic oligonucleotide
  Antisense strand to SEQ ID NO: 2397892
uccuauacugggaauuugc

SEQ ID NO: 2397894 - RNA, 19 nt, Artificial Sequence
  Description of Artificial Sequence: Synthetic oligonucleotide
  Sense strand starting at position 788 of SEQ ID NO: 1886267
ucagaaugccacuguuaac

SEQ ID NO: 2397895 - RNA, 19 nt, Artificial Sequence
  Description of Artificial Sequence: Synthetic oligonucleotide
  Antisense strand to SEQ ID NO: 2397894
guuaacaguggcauucuga

SEQ ID NO: 2397896 - RNA, 19 nt, Artificial Sequence
  Description of Artificial Sequence: Synthetic oligonucleotide
  Sense strand starting at position 798 of SEQ ID NO: 1886267
acuguuaaccguuacucaa

SEQ ID NO: 2397897 - RNA, 19 nt, Artificial Sequence
  Description of Artificial Sequence: Synthetic oligonucleotide
  Antisense strand to SEQ ID NO: 2397896
uugaguaacgguuaacagu

SEQ ID NO: 2397898 - RNA, 19 nt, Artificial Sequence
  Description of Artificial Sequence: Synthetic oligonucleotide
  Sense strand starting at position 808 of SEQ ID NO: 1886267
guuacucaaacucggagaa

SEQ ID NO: 2397899 - RNA, 19 nt, Artificial Sequence
  Description of Artificial Sequence: Synthetic oligonucleotide
  Antisense strand to SEQ ID NO: 2397898
uucuccgaguuugaguaac

SEQ ID NO: 2397900 - RNA, 19 nt, Artificial Sequence
  Description of Artificial Sequence: Synthetic oligonucleotide
  Sense strand starting at position 809 of SEQ ID NO: 1886267
uuacucaaacucggagaau

SEQ ID NO: 2397901 - RNA, 19 nt, Artificial Sequence
  Description of Artificial Sequence: Synthetic oligonucleotide
  Antisense strand to SEQ ID NO: 2397900
auucuccgaguuugaguaa

SEQ ID NO: 2397902 - RNA, 19 nt, Artificial Sequence
  Description of Artificial Sequence: Synthetic oligonucleotide
  Sense strand starting at position 810 of SEQ ID NO: 1886267
uacucaaacucggagaaug

SEQ ID NO: 2397903 - RNA, 19 nt, Artificial Sequence
  Description of Artificial Sequence: Synthetic oligonucleotide
  Antisense strand to SEQ ID NO: 2397902
cauucuccgaguuugagua

SEQ ID NO: 2397904 - RNA, 19 nt, Artificial Sequence
  Description of Artificial Sequence: Synthetic oligonucleotide
  Sense strand starting at position 822 of SEQ ID NO: 1886267
gagaauggguuacccucaa

SEQ ID NO: 2397905 - RNA, 19 nt, Artificial Sequence
  Description of Artificial Sequence: Synthetic oligonucleotide
  Antisense strand to SEQ ID NO: 2397904
uugaggguaacccauucuc

SEQ ID NO: 2397906 - RNA, 19 nt, Artificial Sequence
  Description of Artificial Sequence: Synthetic oligonucleotide
  Sense strand starting at position 916 of SEQ ID NO: 1886267
ggaucucagccuugacuca

SEQ ID NO: 2397907 - RNA, 19 nt, Artificial Sequence
  Description of Artificial Sequence: Synthetic oligonucleotide
  Antisense strand to SEQ ID NO: 2397906
ugagucaaggcugagaucc

SEQ ID NO: 2397908 - RNA, 19 nt, Artificial Sequence
  Description of Artificial Sequence: Synthetic oligonucleotide
  Sense strand starting at position 1021 of SEQ ID NO: 1886267
ggucacaggugggaugaaa

SEQ ID NO: 2397909 - RNA, 19 nt, Artificial Sequence
  Description of Artificial Sequence: Synthetic oligonucleotide
  Antisense strand to SEQ ID NO: 2397908
uuucaucccaccugugacc

SEQ ID NO: 2397910 - RNA, 19 nt, Artificial Sequence
  Description of Artificial Sequence: Synthetic oligonucleotide
  Sense strand starting at position 1272 of SEQ ID NO: 1886267
aagacauccuccuugggua

SEQ ID NO: 2397911 - RNA, 19 nt, Artificial Sequence
  Description of Artificial Sequence: Synthetic oligonucleotide
  Antisense strand to SEQ ID NO: 2397910
uacccaaggaggaugucuu

SEQ ID NO: 2397912 - RNA, 19 nt, Artificial Sequence
  Description of Artificial Sequence: Synthetic oligonucleotide
  Sense strand starting at position 1273 of SEQ ID NO: 1886267
agacauccuccuuggguaa

SEQ ID NO: 2397913 - RNA, 19 nt, Artificial Sequence
  Description of Artificial Sequence: Synthetic oligonucleotide
  Antisense strand to SEQ ID NO: 2397912
uuacccaaggaggaugucu

SEQ ID NO: 2397914 - RNA, 19 nt, Artificial Sequence
  Description of Artificial Sequence: Synthetic oligonucleotide
  Sense strand starting at position 1275 of SEQ ID NO: 1886267
acauccuccuuggguaaga

SEQ ID NO: 2397915 - RNA, 19 nt, Artificial Sequence
  Description of Artificial Sequence: Synthetic oligonucleotide
  Antisense strand to SEQ ID NO: 2397914
ucuuacccaaggaggaugu

SEQ ID NO: 2397916 - RNA, 19 nt, Artificial Sequence
  Description of Artificial Sequence: Synthetic oligonucleotide
  Sense strand starting at position 1276 of SEQ ID NO: 1886267
cauccuccuuggguaagau

SEQ ID NO: 2397917 - RNA, 19 nt, Artificial Sequence
  Description of Artificial Sequence: Synthetic oligonucleotide
  Antisense strand to SEQ ID NO: 2397916
aucuuacccaaggaggaug

SEQ ID NO: 2397918 - RNA, 19 nt, Artificial Sequence
  Description of Artificial Sequence: Synthetic oligonucleotide
  Sense strand starting at position 1277 of SEQ ID NO: 1886267
auccuccuuggguaagauu

SEQ ID NO: 2397919 - RNA, 19 nt, Artificial Sequence
  Description of Artificial Sequence: Synthetic oligonucleotide
  Antisense strand to SEQ ID NO: 2397918
aaucuuacccaaggaggau

SEQ ID NO: 2397920 - RNA, 19 nt, Artificial Sequence
  Description of Artificial Sequence: Synthetic oligonucleotide
  Sense strand starting at position 1286 of SEQ ID NO: 1886267
ggguaagauucccaaggaa

SEQ ID NO: 2397921 - RNA, 19 nt, Artificial Sequence
  Description of Artificial Sequence: Synthetic oligonucleotide
  Antisense strand to SEQ ID NO: 2397920
uuccuugggaaucuuaccc

SEQ ID NO: 2397922 - RNA, 19 nt, Artificial Sequence
  Description of Artificial Sequence: Synthetic oligonucleotide
  Sense strand starting at position 1483 of SEQ ID NO: 1886267
gaagcuaugcacuguugca

SEQ ID NO: 2397923 - RNA, 19 nt, Artificial Sequence
  Description of Artificial Sequence: Synthetic oligonucleotide
  Antisense strand to SEQ ID NO: 2397922
ugcaacagugcauagcuuc

SEQ ID NO: 2397924 - RNA, 19 nt, Artificial Sequence
  Description of Artificial Sequence: Synthetic oligonucleotide
  Sense strand starting at position 1509 of SEQ ID NO: 1886267
cagucacauggugggaauu

SEQ ID NO: 2397925 - RNA, 19 nt, Artificial Sequence
  Description of Artificial Sequence: Synthetic oligonucleotide
  Antisense strand to SEQ ID NO: 2397924
aauucccaccaugugacug

SEQ ID NO: 2397926 - RNA, 19 nt, Artificial Sequence
  Description of Artificial Sequence: Synthetic oligonucleotide
  Sense strand starting at position 1511 of SEQ ID NO: 1886267
gucacauggugggaauuga

SEQ ID NO: 2397927 - RNA, 19 nt, Artificial Sequence
  Description of Artificial Sequence: Synthetic oligonucleotide
  Antisense strand to SEQ ID NO: 2397926
ucaauucccaccaugugac

SEQ ID NO: 2397928 - RNA, 19 nt, Artificial Sequence
  Description of Artificial Sequence: Synthetic oligonucleotide
  Sense strand starting at position 1886 of SEQ ID NO: 1886267
cccggcauccucugccaaa

SEQ ID NO: 2397929 - RNA, 19 nt, Artificial Sequence
  Description of Artificial Sequence: Synthetic oligonucleotide
  Antisense strand to SEQ ID NO: 2397928
uuuggcagaggaugccggg

SEQ ID NO: 2397930 - RNA, 19 nt, Artificial Sequence
  Description of Artificial Sequence: Synthetic oligonucleotide
  Sense strand starting at position 2162 of SEQ ID NO: 1886267
guggaagucuuccucaagu

SEQ ID NO: 2397931 - RNA, 19 nt, Artificial Sequence
  Description of Artificial Sequence: Synthetic oligonucleotide
  Antisense strand to SEQ ID NO: 2397930
acuugaggaagacuuccac

SEQ ID NO: 2397932 - RNA, 19 nt, Artificial Sequence
  Description of Artificial Sequence: Synthetic oligonucleotide
  Sense strand starting at position 2164 of SEQ ID NO: 1886267
ggaagucuuccucaagucu

SEQ ID NO: 2397933 - RNA, 19 nt, Artificial Sequence
  Description of Artificial Sequence: Synthetic oligonucleotide
  Antisense strand to SEQ ID NO: 2397932
agacuugaggaagacuucc

SEQ ID NO: 2397934 - RNA, 19 nt, Artificial Sequence
  Description of Artificial Sequence: Synthetic oligonucleotide
  Sense strand starting at position 2373 of SEQ ID NO: 1886267
ggucacuggucucagguaa

SEQ ID NO: 2397935 - RNA, 19 nt, Artificial Sequence
  Description of Artificial Sequence: Synthetic oligonucleotide
  Antisense strand to SEQ ID NO: 2397934
uuaccugagaccagugacc

SEQ ID NO: 2397936 - RNA, 19 nt, Artificial Sequence
  Description of Artificial Sequence: Synthetic oligonucleotide
  Sense strand starting at position 2760 of SEQ ID NO: 1886267
guggcucugccagggauaa

SEQ ID NO: 2397937 - RNA, 19 nt, Artificial Sequence
  Description of Artificial Sequence: Synthetic oligonucleotide
  Antisense strand to SEQ ID NO: 2397936
uuaucccuggcagagccac

SEQ ID NO: 2397938 - RNA, 19 nt, Artificial Sequence
  Description of Artificial Sequence: Synthetic oligonucleotide
  Sense strand starting at position 2761 of SEQ ID NO: 1886267
uggcucugccagggauaau

SEQ ID NO: 2397939 - RNA, 19 nt, Artificial Sequence
  Description of Artificial Sequence: Synthetic oligonucleotide
  Antisense strand to SEQ ID NO: 2397938
auuaucccuggcagagcca

SEQ ID NO: 2397940 - RNA, 19 nt, Artificial Sequence
  Description of Artificial Sequence: Synthetic oligonucleotide
  Sense strand starting at position 2762 of SEQ ID NO: 1886267
ggcucugccagggauaaua

SEQ ID NO: 2397941 - RNA, 19 nt, Artificial Sequence
  Description of Artificial Sequence: Synthetic oligonucleotide
  Antisense strand to SEQ ID NO: 2397940
uauuaucccuggcagagcc

SEQ ID NO: 2397942 - RNA, 19 nt, Artificial Sequence
  Description of Artificial Sequence: Synthetic oligonucleotide
  Sense strand starting at position 2812 of SEQ ID NO: 1886267
cuagguucggccuaagugu

SEQ ID NO: 2397943 - RNA, 19 nt, Artificial Sequence
  Description of Artificial Sequence: Synthetic oligonucleotide
  Antisense strand to SEQ ID NO: 2397942
acacuuaggccgaaccuag

SEQ ID NO: 2397944 - RNA, 19 nt, Artificial Sequence
  Description of Artificial Sequence: Synthetic oligonucleotide
  Sense strand starting at position 2955 of SEQ ID NO: 1886267
accagagcucagugcaaga

SEQ ID NO: 2397945 - RNA, 19 nt, Artificial Sequence
  Description of Artificial Sequence: Synthetic oligonucleotide
  Antisense strand to SEQ ID NO: 2397944
ucuugcacugagcucuggu

SEQ ID NO: 2397946 - RNA, 19 nt, Artificial Sequence
  Description of Artificial Sequence: Synthetic oligonucleotide
  Sense strand starting at position 3117 of SEQ ID NO: 1886267
caaccagggccucauguau

SEQ ID NO: 2397947 - RNA, 19 nt, Artificial Sequence
  Description of Artificial Sequence: Synthetic oligonucleotide
  Antisense strand to SEQ ID NO: 2397946
auacaugaggcccugguug

SEQ ID NO: 2397948 - RNA, 19 nt, Artificial Sequence
  Description of Artificial Sequence: Synthetic oligonucleotide
  Sense strand starting at position 3157 of SEQ ID NO: 1886267
gggauacccuuguaaugga

SEQ ID NO: 2397949 - RNA, 19 nt, Artificial Sequence
  Description of Artificial Sequence: Synthetic oligonucleotide
  Antisense strand to SEQ ID NO: 2397948
uccauuacaaggguauccc

SEQ ID NO: 2397950 - RNA, 19 nt, Artificial Sequence
  Description of Artificial Sequence: Synthetic oligonucleotide
  Sense strand starting at position 3171 of SEQ ID NO: 1886267
auggaauccuuacagaaca

SEQ ID NO: 2397951 - RNA, 19 nt, Artificial Sequence
  Description of Artificial Sequence: Synthetic oligonucleotide
  Antisense strand to SEQ ID NO: 2397950
uguucuguaaggauuccau

SEQ ID NO: 2397952 - RNA, 19 nt, Artificial Sequence
  Description of Artificial Sequence: Synthetic oligonucleotide
  Sense strand starting at position 3551 of SEQ ID NO: 1886267
acauucuuucucugaugag

SEQ ID NO: 2397953 - RNA, 19 nt, Artificial Sequence
  Description of Artificial Sequence: Synthetic oligonucleotide
  Antisense strand to SEQ ID NO: 2397952
cucaucagagaaagaaugu

SEQ ID NO: 2397954 - RNA, 19 nt, Artificial Sequence
  Description of Artificial Sequence: Synthetic oligonucleotide
  Sense strand starting at position 3971 of SEQ ID NO: 1886267
gguggcauuccuugaaucu

SEQ ID NO: 2397955 - RNA, 19 nt, Artificial Sequence
  Description of Artificial Sequence: Synthetic oligonucleotide
  Antisense strand to SEQ ID NO: 2397954
agauucaaggaaugccacc

SEQ ID NO: 2397956 - RNA, 19 nt, Artificial Sequence
  Description of Artificial Sequence: Synthetic oligonucleotide
  Sense strand starting at position 259 of SEQ ID NO: 1886268
augcaagucuuccuccagu

SEQ ID NO: 2397957 - RNA, 19 nt, Artificial Sequence
  Description of Artificial Sequence: Synthetic oligonucleotide
  Antisense strand to SEQ ID NO: 2397956
acuggaggaagacuugcau

SEQ ID NO: 2397958 - RNA, 19 nt, Artificial Sequence
  Description of Artificial Sequence: Synthetic oligonucleotide
  Sense strand starting at position 384 of SEQ ID NO: 1886268
ugugaugugauccauguga

SEQ ID NO: 2397959 - RNA, 19 nt, Artificial Sequence
  Description of Artificial Sequence: Synthetic oligonucleotide
  Antisense strand to SEQ ID NO: 2397958
ucacauggaucacaucaca

SEQ ID NO: 2397960 - RNA, 19 nt, Artificial Sequence
  Description of Artificial Sequence: Synthetic oligonucleotide
  Sense strand starting at position 386 of SEQ ID NO: 1886268
ugaugugauccaugugaau

SEQ ID NO: 2397961 - RNA, 19 nt, Artificial Sequence
  Description of Artificial Sequence: Synthetic oligonucleotide
  Antisense strand to SEQ ID NO: 2397960
auucacauggaucacauca

SEQ ID NO: 2397962 - RNA, 19 nt, Artificial Sequence
  Description of Artificial Sequence: Synthetic oligonucleotide
  Sense strand starting at position 397 of SEQ ID NO: 1886268
augugaauuacugagucgu

SEQ ID NO: 2397963 - RNA, 19 nt, Artificial Sequence
  Description of Artificial Sequence: Synthetic oligonucleotide
  Antisense strand to SEQ ID NO: 2397962
acgacucaguaauucacau

SEQ ID NO: 2397964 - RNA, 19 nt, Artificial Sequence
  Description of Artificial Sequence: Synthetic oligonucleotide
  Sense strand starting at position 399 of SEQ ID NO: 1886268
gugaauuacugagucguca

SEQ ID NO: 2397965 - RNA, 19 nt, Artificial Sequence
  Description of Artificial Sequence: Synthetic oligonucleotide
  Antisense strand to SEQ ID NO: 2397964
ugacgacucaguaauucac

SEQ ID NO: 2397966 - RNA, 19 nt, Artificial Sequence
  Description of Artificial Sequence: Synthetic oligonucleotide
  Sense strand starting at position 403 of SEQ ID NO: 1886268
auuacugagucgucacgga

SEQ ID NO: 2397967 - RNA, 19 nt, Artificial Sequence
  Description of Artificial Sequence: Synthetic oligonucleotide
  Antisense strand to SEQ ID NO: 2397966
uccgugacgacucaguaau

SEQ ID NO: 2397968 - RNA, 19 nt, Artificial Sequence
  Description of Artificial Sequence: Synthetic oligonucleotide
  Sense strand starting at position 728 of SEQ ID NO: 1886268
ccaagugugcauuggaaau

SEQ ID NO: 2397969 - RNA, 19 nt, Artificial Sequence
  Description of Artificial Sequence: Synthetic oligonucleotide
  Antisense strand to SEQ ID NO: 2397968
auuuccaaugcacacuugg

SEQ ID NO: 2397970 - RNA, 19 nt, Artificial Sequence
  Description of Artificial Sequence: Synthetic oligonucleotide
  Sense strand starting at position 730 of SEQ ID NO: 1886268
aagugugcauuggaaauca

SEQ ID NO: 2397971 - RNA, 19 nt, Artificial Sequence
  Description of Artificial Sequence: Synthetic oligonucleotide
  Antisense strand to SEQ ID NO: 2397970
ugauuuccaaugcacacuu

SEQ ID NO: 2397972 - RNA, 19 nt, Artificial Sequence
  Description of Artificial Sequence: Synthetic oligonucleotide
  Sense strand starting at position 1365 of SEQ ID NO: 1886268
accagaucaccgcaucuua

SEQ ID NO: 2397973 - RNA, 19 nt, Artificial Sequence
  Description of Artificial Sequence: Synthetic oligonucleotide
  Antisense strand to SEQ ID NO: 2397972
uaagaugcggugaucuggu

SEQ ID NO: 2397974 - RNA, 19 nt, Artificial Sequence
  Description of Artificial Sequence: Synthetic oligonucleotide
  Sense strand starting at position 1461 of SEQ ID NO: 1886268
auggguccuccuuggguua

SEQ ID NO: 2397975 - RNA, 19 nt, Artificial Sequence
  Description of Artificial Sequence: Synthetic oligonucleotide
  Antisense strand to SEQ ID NO: 2397974
uaacccaaggaggacccau

SEQ ID NO: 2397976 - RNA, 19 nt, Artificial Sequence
  Description of Artificial Sequence: Synthetic oligonucleotide
  Sense strand starting at position 1513 of SEQ ID NO: 1886268
uucccucccgggugaaauu

SEQ ID NO: 2397977 - RNA, 19 nt, Artificial Sequence
  Description of Artificial Sequence: Synthetic oligonucleotide
  Antisense strand to SEQ ID NO: 2397976
aauuucacccgggagggaa

SEQ ID NO: 2397978 - RNA, 19 nt, Artificial Sequence
  Description of Artificial Sequence: Synthetic oligonucleotide
  Sense strand starting at position 1591 of SEQ ID NO: 1886268
uggucuggcucaugaccaa

SEQ ID NO: 2397979 - RNA, 19 nt, Artificial Sequence
  Description of Artificial Sequence: Synthetic oligonucleotide
  Antisense strand to SEQ ID NO: 2397978
uuggucaugagccagacca

SEQ ID NO: 2397980 - RNA, 19 nt, Artificial Sequence
  Description of Artificial Sequence: Synthetic oligonucleotide
  Sense strand starting at position 1667 of SEQ ID NO: 1886268
ggcagagcucacugaaaga

SEQ ID NO: 2397981 - RNA, 19 nt, Artificial Sequence
  Description of Artificial Sequence: Synthetic oligonucleotide
  Antisense strand to SEQ ID NO: 2397980
ucuuucagugagcucugcc

SEQ ID NO: 2397982 - RNA, 19 nt, Artificial Sequence
  Description of Artificial Sequence: Synthetic oligonucleotide
  Sense strand starting at position 2045 of SEQ ID NO: 1886268
gccagaugugcucagcaca

SEQ ID NO: 2397983 - RNA, 19 nt, Artificial Sequence
  Description of Artificial Sequence: Synthetic oligonucleotide
  Antisense strand to SEQ ID NO: 2397982
ugugcugagcacaucuggc

SEQ ID NO: 2397984 - RNA, 19 nt, Artificial Sequence
  Description of Artificial Sequence: Synthetic oligonucleotide
  Sense strand starting at position 2136 of SEQ ID NO: 1886268
uggacacugucccaugaaa

SEQ ID NO: 2397985 - RNA, 19 nt, Artificial Sequence
  Description of Artificial Sequence: Synthetic oligonucleotide
  Antisense strand to SEQ ID NO: 2397984
uuucaugggacagugucca

SEQ ID NO: 2397986 - RNA, 19 nt, Artificial Sequence
  Description of Artificial Sequence: Synthetic oligonucleotide
  Sense strand starting at position 2281 of SEQ ID NO: 1886268
cgugaugagauccaugcaa

SEQ ID NO: 2397987 - RNA, 19 nt, Artificial Sequence
  Description of Artificial Sequence: Synthetic oligonucleotide
  Antisense strand to SEQ ID NO: 2397986
uugcauggaucucaucacg

SEQ ID NO: 2397988 - RNA, 19 nt, Artificial Sequence
  Description of Artificial Sequence: Synthetic oligonucleotide
  Sense strand starting at position 2303 of SEQ ID NO: 1886268
auugacuugucaccaaugu

SEQ ID NO: 2397989 - RNA, 19 nt, Artificial Sequence
  Description of Artificial Sequence: Synthetic oligonucleotide
  Antisense strand to SEQ ID NO: 2397988
acauuggugacaagucaau

SEQ ID NO: 2397990 - RNA, 19 nt, Artificial Sequence
  Description of Artificial Sequence: Synthetic oligonucleotide
  Sense strand starting at position 2304 of SEQ ID NO: 1886268
uugacuugucaccaaugua

SEQ ID NO: 2397991 - RNA, 19 nt, Artificial Sequence
  Description of Artificial Sequence: Synthetic oligonucleotide
  Antisense strand to SEQ ID NO: 2397990
uacauuggugacaagucaa

SEQ ID NO: 2397992 - RNA, 19 nt, Artificial Sequence
  Description of Artificial Sequence: Synthetic oligonucleotide
  Sense strand starting at position 2752 of SEQ ID NO: 1886268
uuugcuuggucccaagauc

SEQ ID NO: 2397993 - RNA, 19 nt, Artificial Sequence
  Description of Artificial Sequence: Synthetic oligonucleotide
  Antisense strand to SEQ ID NO: 2397992
gaucuugggaccaagcaaa

SEQ ID NO: 2397994 - RNA, 19 nt, Artificial Sequence
  Description of Artificial Sequence: Synthetic oligonucleotide
  Sense strand starting at position 2816 of SEQ ID NO: 1886268
acaaauucucaguacaggu

SEQ ID NO: 2397995 - RNA, 19 nt, Artificial Sequence
  Description of Artificial Sequence: Synthetic oligonucleotide
  Antisense strand to SEQ ID NO: 2397994
accuguacugagaauuugu

SEQ ID NO: 2397996 - RNA, 19 nt, Artificial Sequence
  Description of Artificial Sequence: Synthetic oligonucleotide
  Sense strand starting at position 3070 of SEQ ID NO: 1886268
ggugcagcauccuugaauc

SEQ ID NO: 2397997 - RNA, 19 nt, Artificial Sequence
  Description of Artificial Sequence: Synthetic oligonucleotide
  Antisense strand to SEQ ID NO: 2397996
gauucaaggaugcugcacc

SEQ ID NO: 2397998 - RNA, 19 nt, Artificial Sequence
  Description of Artificial Sequence: Synthetic oligonucleotide
  Sense strand starting at position 3081 of SEQ ID NO: 1886268
cuugaaucucugcgacuca

SEQ ID NO: 2397999 - RNA, 19 nt, Artificial Sequence
  Description of Artificial Sequence: Synthetic oligonucleotide
  Antisense strand to SEQ ID NO: 2397998
ugagucgcagagauucaag

SEQ ID NO: 2398000 - RNA, 19 nt, Artificial Sequence
  Description of Artificial Sequence: Synthetic oligonucleotide
  Sense strand starting at position 3082 of SEQ ID NO: 1886268
uugaaucucugcgacucaa

SEQ ID NO: 2398001 - RNA, 19 nt, Artificial Sequence
  Description of Artificial Sequence: Synthetic oligonucleotide
  Antisense strand to SEQ ID NO: 2398000
uugagucgcagagauucaa

SEQ ID NO: 2398002 - RNA, 19 nt, Artificial Sequence
  Description of Artificial Sequence: Synthetic oligonucleotide
  Sense strand starting at position 3370 of SEQ ID NO: 1886268
uuggcugucugagacaacu

SEQ ID NO: 2398003 - RNA, 19 nt, Artificial Sequence
  Description of Artificial Sequence: Synthetic oligonucleotide
  Antisense strand to SEQ ID NO: 2398002
aguugucucagacagccaa

SEQ ID NO: 2398004 - RNA, 19 nt, Artificial Sequence
  Description of Artificial Sequence: Synthetic oligonucleotide
  Sense strand starting at position 3885 of SEQ ID NO: 1886268
ggauauggucaucacagcu

SEQ ID NO: 2398005 - RNA, 19 nt, Artificial Sequence
  Description of Artificial Sequence: Synthetic oligonucleotide
  Antisense strand to SEQ ID NO: 2398004
agcugugaugaccauaucc

SEQ ID NO: 2398006 - RNA, 19 nt, Artificial Sequence
  Description of Artificial Sequence: Synthetic oligonucleotide
  Sense strand starting at position 1171 of SEQ ID NO: 1886269
ccauuaagauggcccauua

SEQ ID NO: 2398007 - RNA, 19 nt, Artificial Sequence
  Description of Artificial Sequence: Synthetic oligonucleotide
  Antisense strand to SEQ ID NO: 2398006
uaaugggccaucuuaaugg

SEQ ID NO: 2398008 - RNA, 19 nt, Artificial Sequence
  Description of Artificial Sequence: Synthetic oligonucleotide
  Sense strand starting at position 1288 of SEQ ID NO: 1886269
ggagaacuccagugugagc

SEQ ID NO: 2398009 - RNA, 19 nt, Artificial Sequence
  Description of Artificial Sequence: Synthetic oligonucleotide
  Antisense strand to SEQ ID NO: 2398008
gcucacacuggaguucucc

SEQ ID NO: 2398010 - RNA, 19 nt, Artificial Sequence
  Description of Artificial Sequence: Synthetic oligonucleotide
  Sense strand starting at position 1397 of SEQ ID NO: 1886269
ugcuguauguugggcugaa

SEQ ID NO: 2398011 - RNA, 19 nt, Artificial Sequence
  Description of Artificial Sequence: Synthetic oligonucleotide
  Antisense strand to SEQ ID NO: 2398010
uucagcccaacauacagca

SEQ ID NO: 2398012 - RNA, 19 nt, Artificial Sequence
  Description of Artificial Sequence: Synthetic oligonucleotide
  Sense strand starting at position 1398 of SEQ ID NO: 1886269
gcuguauguugggcugaag

SEQ ID NO: 2398013 - RNA, 19 nt, Artificial Sequence
  Description of Artificial Sequence: Synthetic oligonucleotide
  Antisense strand to SEQ ID NO: 2398012
cuucagcccaacauacagc

SEQ ID NO: 2398014 - RNA, 19 nt, Artificial Sequence
  Description of Artificial Sequence: Synthetic oligonucleotide
  Sense strand starting at position 1401 of SEQ ID NO: 1886269
guauguugggcugaaggaa

SEQ ID NO: 2398015 - RNA, 19 nt, Artificial Sequence
  Description of Artificial Sequence: Synthetic oligonucleotide
  Antisense strand to SEQ ID NO: 2398014
uuccuucagcccaacauac

SEQ ID NO: 2398016 - RNA, 19 nt, Artificial Sequence
  Description of Artificial Sequence: Synthetic oligonucleotide
  Sense strand starting at position 1467 of SEQ ID NO: 1886269
gcgugcuccuagggucaga

SEQ ID NO: 2398017 - RNA, 19 nt, Artificial Sequence
  Description of Artificial Sequence: Synthetic oligonucleotide
  Antisense strand to SEQ ID NO: 2398016
ucugacccuaggagcacgc

SEQ ID NO: 2398018 - RNA, 19 nt, Artificial Sequence
  Description of Artificial Sequence: Synthetic oligonucleotide
  Sense strand starting at position 2257 of SEQ ID NO: 1886269
gggauacccaugugaugga

SEQ ID NO: 2398019 - RNA, 19 nt, Artificial Sequence
  Description of Artificial Sequence: Synthetic oligonucleotide
  Antisense strand to SEQ ID NO: 2398018
uccaucacauggguauccc

SEQ ID NO: 2398020 - RNA, 19 nt, Artificial Sequence
  Description of Artificial Sequence: Synthetic oligonucleotide
  Sense strand starting at position 2691 of SEQ ID NO: 1886269
ggucccacuuggucaauaa

SEQ ID NO: 2398021 - RNA, 19 nt, Artificial Sequence
  Description of Artificial Sequence: Synthetic oligonucleotide
  Antisense strand to SEQ ID NO: 2398020
uuauugaccaagugggacc

SEQ ID NO: 2398022 - RNA, 19 nt, Artificial Sequence
  Description of Artificial Sequence: Synthetic oligonucleotide
  Sense strand starting at position 3234 of SEQ ID NO: 1886269
cgcugaguuucagcuggga

SEQ ID NO: 2398023 - RNA, 19 nt, Artificial Sequence
  Description of Artificial Sequence: Synthetic oligonucleotide
  Antisense strand to SEQ ID NO: 2398022
ucccagcugaaacucagcg

SEQ ID NO: 2398024 - RNA, 19 nt, Artificial Sequence
  Description of Artificial Sequence: Synthetic oligonucleotide
  Sense strand starting at position 3255 of SEQ ID NO: 1886269
ugcucuauguugggcugaa

SEQ ID NO: 2398025 - RNA, 19 nt, Artificial Sequence
  Description of Artificial Sequence: Synthetic oligonucleotide
  Antisense strand to SEQ ID NO: 2398024
uucagcccaacauagagca

SEQ ID NO: 2398026 - RNA, 19 nt, Artificial Sequence
  Description of Artificial Sequence: Synthetic oligonucleotide
  Sense strand starting at position 3256 of SEQ ID NO: 1886269
gcucuauguugggcugaag

SEQ ID NO: 2398027 - RNA, 19 nt, Artificial Sequence
  Description of Artificial Sequence: Synthetic oligonucleotide
  Antisense strand to SEQ ID NO: 2398026
cuucagcccaacauagagc

SEQ ID NO: 2398028 - RNA, 19 nt, Artificial Sequence
  Description of Artificial Sequence: Synthetic oligonucleotide
  Sense strand starting at position 3325 of SEQ ID NO: 1886269
gcaugcuccuagggucaga

SEQ ID NO: 2398029 - RNA, 19 nt, Artificial Sequence
  Description of Artificial Sequence: Synthetic oligonucleotide
  Antisense strand to SEQ ID NO: 2398028
ucugacccuaggagcaugc

SEQ ID NO: 2398030 - RNA, 19 nt, Artificial Sequence
  Description of Artificial Sequence: Synthetic oligonucleotide
  Sense strand starting at position 3864 of SEQ ID NO: 1886269
gaucaaucaccucgugcau

SEQ ID NO: 2398031 - RNA, 19 nt, Artificial Sequence
  Description of Artificial Sequence: Synthetic oligonucleotide
  Antisense strand to SEQ ID NO: 2398030
augcacgaggugauugauc

SEQ ID NO: 2398032 - RNA, 19 nt, Artificial Sequence
  Description of Artificial Sequence: Synthetic oligonucleotide
  Sense strand starting at position 791 of SEQ ID NO: 1886270
gccacaugcuuucucugau

SEQ ID NO: 2398033 - RNA, 19 nt, Artificial Sequence
  Description of Artificial Sequence: Synthetic oligonucleotide
  Antisense strand to SEQ ID NO: 2398032
aucagagaaagcauguggc

SEQ ID NO: 2398034 - RNA, 19 nt, Artificial Sequence
  Description of Artificial Sequence: Synthetic oligonucleotide
  Sense strand starting at position 952 of SEQ ID NO: 1886270
ggcaaauucccaggacaag

SEQ ID NO: 2398035 - RNA, 19 nt, Artificial Sequence
  Description of Artificial Sequence: Synthetic oligonucleotide
  Antisense strand to SEQ ID NO: 2398034
cuuguccugggaauuugcc

SEQ ID NO: 2398036 - RNA, 19 nt, Artificial Sequence
  Description of Artificial Sequence: Synthetic oligonucleotide
  Sense strand starting at position 953 of SEQ ID NO: 1886270
gcaaauucccaggacaagu

SEQ ID NO: 2398037 - RNA, 19 nt, Artificial Sequence
  Description of Artificial Sequence: Synthetic oligonucleotide
  Antisense strand to SEQ ID NO: 2398036
acuuguccugggaauuugc

SEQ ID NO: 2398038 - RNA, 19 nt, Artificial Sequence
  Description of Artificial Sequence: Synthetic oligonucleotide
  Sense strand starting at position 962 of SEQ ID NO: 1886270
caggacaagucccuugaca

SEQ ID NO: 2398039 - RNA, 19 nt, Artificial Sequence
  Description of Artificial Sequence: Synthetic oligonucleotide
  Antisense strand to SEQ ID NO: 2398038
ugucaagggacuuguccug

SEQ ID NO: 2398040 - RNA, 19 nt, Artificial Sequence
  Description of Artificial Sequence: Synthetic oligonucleotide
  Sense strand starting at position 1219 of SEQ ID NO: 1886270
uggguagcauuccuugaau

SEQ ID NO: 2398041 - RNA, 19 nt, Artificial Sequence
  Description of Artificial Sequence: Synthetic oligonucleotide
  Antisense strand to SEQ ID NO: 2398040
auucaaggaaugcuaccca

SEQ ID NO: 2398042 - RNA, 19 nt, Artificial Sequence
  Description of Artificial Sequence: Synthetic oligonucleotide
  Sense strand starting at position 1221 of SEQ ID NO: 1886270
gguagcauuccuugaaucu

SEQ ID NO: 2398043 - RNA, 19 nt, Artificial Sequence
  Description of Artificial Sequence: Synthetic oligonucleotide
  Antisense strand to SEQ ID NO: 2398042
agauucaaggaaugcuacc

SEQ ID NO: 2398044 - RNA, 19 nt, Artificial Sequence
  Description of Artificial Sequence: Synthetic oligonucleotide
  Sense strand starting at position 1222 of SEQ ID NO: 1886270
guagcauuccuugaaucuc

SEQ ID NO: 2398045 - RNA, 19 nt, Artificial Sequence
  Description of Artificial Sequence: Synthetic oligonucleotide
  Antisense strand to SEQ ID NO: 2398044
gagauucaaggaaugcuac

SEQ ID NO: 2398046 - RNA, 19 nt, Artificial Sequence
  Description of Artificial Sequence: Synthetic oligonucleotide
  Sense strand starting at position 1373 of SEQ ID NO: 1886270
cgaguuucagcugggaacu

SEQ ID NO: 2398047 - RNA, 19 nt, Artificial Sequence
  Description of Artificial Sequence: Synthetic oligonucleotide
  Antisense strand to SEQ ID NO: 2398046
aguucccagcugaaacucg

SEQ ID NO: 2398048 - RNA, 19 nt, Artificial Sequence
  Description of Artificial Sequence: Synthetic oligonucleotide
  Sense strand starting at position 1391 of SEQ ID NO: 1886270
ugcauuauguugggcugaa

SEQ ID NO: 2398049 - RNA, 19 nt, Artificial Sequence
  Description of Artificial Sequence: Synthetic oligonucleotide
  Antisense strand to SEQ ID NO: 2398048
uucagcccaacauaaugca

SEQ ID NO: 2398050 - RNA, 19 nt, Artificial Sequence
  Description of Artificial Sequence: Synthetic oligonucleotide
  Sense strand starting at position 1392 of SEQ ID NO: 1886270
gcauuauguugggcugaag

SEQ ID NO: 2398051 - RNA, 19 nt, Artificial Sequence
  Description of Artificial Sequence: Synthetic oligonucleotide
  Antisense strand to SEQ ID NO: 2398050
cuucagcccaacauaaugc

SEQ ID NO: 2398052 - RNA, 19 nt, Artificial Sequence
  Description of Artificial Sequence: Synthetic oligonucleotide
  Sense strand starting at position 1395 of SEQ ID NO: 1886270
uuauguugggcugaaggaa

SEQ ID NO: 2398053 - RNA, 19 nt, Artificial Sequence
  Description of Artificial Sequence: Synthetic oligonucleotide
  Antisense strand to SEQ ID NO: 2398052
uuccuucagcccaacauaa

SEQ ID NO: 2398054 - RNA, 19 nt, Artificial Sequence
  Description of Artificial Sequence: Synthetic oligonucleotide
  Sense strand starting at position 1454 of SEQ ID NO: 1886270
ggaaaugcaugcuccuaga

SEQ ID NO: 2398055 - RNA, 19 nt, Artificial Sequence
  Description of Artificial Sequence: Synthetic oligonucleotide
  Antisense strand to SEQ ID NO: 2398054
ucuaggagcaugcauuucc

SEQ ID NO: 2398056 - RNA, 19 nt, Artificial Sequence
  Description of Artificial Sequence: Synthetic oligonucleotide
  Sense strand starting at position 1509 of SEQ ID NO: 1886270
caucccuccugauggguaa

SEQ ID NO: 2398057 - RNA, 19 nt, Artificial Sequence
  Description of Artificial Sequence: Synthetic oligonucleotide
  Antisense strand to SEQ ID NO: 2398056
uuacccaucaggagggaug

SEQ ID NO: 2398058 - RNA, 19 nt, Artificial Sequence
  Description of Artificial Sequence: Synthetic oligonucleotide
  Sense strand starting at position 1528 of SEQ ID NO: 1886270
ccuguuggcucccugagaa

SEQ ID NO: 2398059 - RNA, 19 nt, Artificial Sequence
  Description of Artificial Sequence: Synthetic oligonucleotide
  Antisense strand to SEQ ID NO: 2398058
uucucagggagccaacagg

SEQ ID NO: 2398060 - RNA, 19 nt, Artificial Sequence
  Description of Artificial Sequence: Synthetic oligonucleotide
  Sense strand starting at position 1614 of SEQ ID NO: 1886270
acaggaugcucugacccau

SEQ ID NO: 2398061 - RNA, 19 nt, Artificial Sequence
  Description of Artificial Sequence: Synthetic oligonucleotide
  Antisense strand to SEQ ID NO: 2398060
augggucagagcauccugu

SEQ ID NO: 2398062 - RNA, 19 nt, Artificial Sequence
  Description of Artificial Sequence: Synthetic oligonucleotide
  Sense strand starting at position 1663 of SEQ ID NO: 1886270
agaagaacuuacugaaaga

SEQ ID NO: 2398063 - RNA, 19 nt, Artificial Sequence
  Description of Artificial Sequence: Synthetic oligonucleotide
  Antisense strand to SEQ ID NO: 2398062
ucuuucaguaaguucuucu

SEQ ID NO: 2398064 - RNA, 19 nt, Artificial Sequence
  Description of Artificial Sequence: Synthetic oligonucleotide
  Sense strand starting at position 2160 of SEQ ID NO: 1886270
augcaagucuuccuccagu

SEQ ID NO: 2398065 - RNA, 19 nt, Artificial Sequence
  Description of Artificial Sequence: Synthetic oligonucleotide
  Antisense strand to SEQ ID NO: 2398064
acuggaggaagacuugcau

SEQ ID NO: 2398066 - RNA, 19 nt, Artificial Sequence
  Description of Artificial Sequence: Synthetic oligonucleotide
  Sense strand starting at position 2285 of SEQ ID NO: 1886270
ugugaugugauccauguga

SEQ ID NO: 2398067 - RNA, 19 nt, Artificial Sequence
  Description of Artificial Sequence: Synthetic oligonucleotide
  Antisense strand to SEQ ID NO: 2398066
ucacauggaucacaucaca

SEQ ID NO: 2398068 - RNA, 19 nt, Artificial Sequence
  Description of Artificial Sequence: Synthetic oligonucleotide
  Sense strand starting at position 2287 of SEQ ID NO: 1886270
ugaugugauccaugugaau

SEQ ID NO: 2398069 - RNA, 19 nt, Artificial Sequence
  Description of Artificial Sequence: Synthetic oligonucleotide
  Antisense strand to SEQ ID NO: 2398068
auucacauggaucacauca

SEQ ID NO: 2398070 - RNA, 19 nt, Artificial Sequence
  Description of Artificial Sequence: Synthetic oligonucleotide
  Sense strand starting at position 2298 of SEQ ID NO: 1886270
augugaauuacugagucgu

SEQ ID NO: 2398071 - RNA, 19 nt, Artificial Sequence
  Description of Artificial Sequence: Synthetic oligonucleotide
  Antisense strand to SEQ ID NO: 2398070
acgacucaguaauucacau

SEQ ID NO: 2398072 - RNA, 19 nt, Artificial Sequence
  Description of Artificial Sequence: Synthetic oligonucleotide
  Sense strand starting at position 2300 of SEQ ID NO: 1886270
gugaauuacugagucguca

SEQ ID NO: 2398073 - RNA, 19 nt, Artificial Sequence
  Description of Artificial Sequence: Synthetic oligonucleotide
  Antisense strand to SEQ ID NO: 2398072
ugacgacucaguaauucac

SEQ ID NO: 2398074 - RNA, 19 nt, Artificial Sequence
  Description of Artificial Sequence: Synthetic oligonucleotide
  Sense strand starting at position 2304 of SEQ ID NO: 1886270
auuacugagucgucacgga

SEQ ID NO: 2398075 - RNA, 19 nt, Artificial Sequence
  Description of Artificial Sequence: Synthetic oligonucleotide
  Antisense strand to SEQ ID NO: 2398074
uccgugacgacucaguaau

SEQ ID NO: 2398076 - RNA, 19 nt, Artificial Sequence
  Description of Artificial Sequence: Synthetic oligonucleotide
  Sense strand starting at position 2629 of SEQ ID NO: 1886270
ccaagugugcauuggaaau

SEQ ID NO: 2398077 - RNA, 19 nt, Artificial Sequence
  Description of Artificial Sequence: Synthetic oligonucleotide
  Antisense strand to SEQ ID NO: 2398076
auuuccaaugcacacuugg

SEQ ID NO: 2398078 - RNA, 19 nt, Artificial Sequence
  Description of Artificial Sequence: Synthetic oligonucleotide
  Sense strand starting at position 2631 of SEQ ID NO: 1886270
aagugugcauuggaaauca

SEQ ID NO: 2398079 - RNA, 19 nt, Artificial Sequence
  Description of Artificial Sequence: Synthetic oligonucleotide
  Antisense strand to SEQ ID NO: 2398078
ugauuuccaaugcacacuu

SEQ ID NO: 2398080 - RNA, 19 nt, Artificial Sequence
  Description of Artificial Sequence: Synthetic oligonucleotide
  Sense strand starting at position 3266 of SEQ ID NO: 1886270
accagaucaccgcaucuua

SEQ ID NO: 2398081 - RNA, 19 nt, Artificial Sequence
  Description of Artificial Sequence: Synthetic oligonucleotide
  Antisense strand to SEQ ID NO: 2398080
uaagaugcggugaucuggu

SEQ ID NO: 2398082 - RNA, 19 nt, Artificial Sequence
  Description of Artificial Sequence: Synthetic oligonucleotide
  Sense strand starting at position 3362 of SEQ ID NO: 1886270
auggguccuccuuggguua

SEQ ID NO: 2398083 - RNA, 19 nt, Artificial Sequence
  Description of Artificial Sequence: Synthetic oligonucleotide
  Antisense strand to SEQ ID NO: 2398082
uaacccaaggaggacccau

SEQ ID NO: 2398084 - RNA, 19 nt, Artificial Sequence
  Description of Artificial Sequence: Synthetic oligonucleotide
  Sense strand starting at position 3414 of SEQ ID NO: 1886270
uucccucccgggugaaauu

SEQ ID NO: 2398085 - RNA, 19 nt, Artificial Sequence
  Description of Artificial Sequence: Synthetic oligonucleotide
  Antisense strand to SEQ ID NO: 2398084
aauuucacccgggagggaa

SEQ ID NO: 2398086 - RNA, 19 nt, Artificial Sequence
  Description of Artificial Sequence: Synthetic oligonucleotide
  Sense strand starting at position 3492 of SEQ ID NO: 1886270
uggucuggcucaugaccaa

SEQ ID NO: 2398087 - RNA, 19 nt, Artificial Sequence
  Description of Artificial Sequence: Synthetic oligonucleotide
  Antisense strand to SEQ ID NO: 2398086
uuggucaugagccagacca

SEQ ID NO: 2398088 - RNA, 19 nt, Artificial Sequence
  Description of Artificial Sequence: Synthetic oligonucleotide
  Sense strand starting at position 3568 of SEQ ID NO: 1886270
ggcagagcucacugaaaga

SEQ ID NO: 2398089 - RNA, 19 nt, Artificial Sequence
  Description of Artificial Sequence: Synthetic oligonucleotide
  Antisense strand to SEQ ID NO: 2398088
ucuuucagugagcucugcc

SEQ ID NO: 2398090 - RNA, 19 nt, Artificial Sequence
  Description of Artificial Sequence: Synthetic oligonucleotide
  Sense strand starting at position 3946 of SEQ ID NO: 1886270
gccagaugugcucagcaca

SEQ ID NO: 2398091 - RNA, 19 nt, Artificial Sequence
  Description of Artificial Sequence: Synthetic oligonucleotide
  Antisense strand to SEQ ID NO: 2398090
ugugcugagcacaucuggc

SEQ ID NO: 2398092 - RNA, 19 nt, Artificial Sequence
  Description of Artificial Sequence: Synthetic oligonucleotide
  Sense strand starting at position 151 of SEQ ID NO: 1886271
cagcuuagugcagaagacu

SEQ ID NO: 2398093 - RNA, 19 nt, Artificial Sequence
  Description of Artificial Sequence: Synthetic oligonucleotide
  Antisense strand to SEQ ID NO: 2398092
agucuucugcacuaagcug

SEQ ID NO: 2398094 - RNA, 19 nt, Artificial Sequence
  Description of Artificial Sequence: Synthetic oligonucleotide
  Sense strand starting at position 360 of SEQ ID NO: 1886271
ccuucauggucacguguga

SEQ ID NO: 2398095 - RNA, 19 nt, Artificial Sequence
  Description of Artificial Sequence: Synthetic oligonucleotide
  Antisense strand to SEQ ID NO: 2398094
ucacacgugaccaugaagg

SEQ ID NO: 2398096 - RNA, 19 nt, Artificial Sequence
  Description of Artificial Sequence: Synthetic oligonucleotide
  Sense strand starting at position 365 of SEQ ID NO: 1886271
auggucacgugugaugaga

SEQ ID NO: 2398097 - RNA, 19 nt, Artificial Sequence
  Description of Artificial Sequence: Synthetic oligonucleotide
  Antisense strand to SEQ ID NO: 2398096
ucucaucacacgugaccau

SEQ ID NO: 2398098 - RNA, 19 nt, Artificial Sequence
  Description of Artificial Sequence: Synthetic oligonucleotide
  Sense strand starting at position 367 of SEQ ID NO: 1886271
ggucacgugugaugagauc

SEQ ID NO: 2398099 - RNA, 19 nt, Artificial Sequence
  Description of Artificial Sequence: Synthetic oligonucleotide
  Antisense strand to SEQ ID NO: 2398098
gaucucaucacacgugacc

SEQ ID NO: 2398100 - RNA, 19 nt, Artificial Sequence
  Description of Artificial Sequence: Synthetic oligonucleotide
  Sense strand starting at position 374 of SEQ ID NO: 1886271
ugugaugagauccaugcaa

SEQ ID NO: 2398101 - RNA, 19 nt, Artificial Sequence
  Description of Artificial Sequence: Synthetic oligonucleotide
  Antisense strand to SEQ ID NO: 2398100
uugcauggaucucaucaca

SEQ ID NO: 2398102 - RNA, 19 nt, Artificial Sequence
  Description of Artificial Sequence: Synthetic oligonucleotide
  Sense strand starting at position 852 of SEQ ID NO: 1886271
uuugcuuagucccaagauc

SEQ ID NO: 2398103 - RNA, 19 nt, Artificial Sequence
  Description of Artificial Sequence: Synthetic oligonucleotide
  Antisense strand to SEQ ID NO: 2398102
gaucuugggacuaagcaaa

SEQ ID NO: 2398104 - RNA, 19 nt, Artificial Sequence
  Description of Artificial Sequence: Synthetic oligonucleotide
  Sense strand starting at position 912 of SEQ ID NO: 1886271
aggaacaauuccuagucua

SEQ ID NO: 2398105 - RNA, 19 nt, Artificial Sequence
  Description of Artificial Sequence: Synthetic oligonucleotide
  Antisense strand to SEQ ID NO: 2398104
uagacuaggaauuguuccu

SEQ ID NO: 2398106 - RNA, 19 nt, Artificial Sequence
  Description of Artificial Sequence: Synthetic oligonucleotide
  Sense strand starting at position 977 of SEQ ID NO: 1886271
gacacucaaccucggagaa

SEQ ID NO: 2398107 - RNA, 19 nt, Artificial Sequence
  Description of Artificial Sequence: Synthetic oligonucleotide
  Antisense strand to SEQ ID NO: 2398106
uucuccgagguugaguguc

SEQ ID NO: 2398108 - RNA, 19 nt, Artificial Sequence
  Description of Artificial Sequence: Synthetic oligonucleotide
  Sense strand starting at position 1158 of SEQ ID NO: 1886271
cccauugcucaacagggau

SEQ ID NO: 2398109 - RNA, 19 nt, Artificial Sequence
  Description of Artificial Sequence: Synthetic oligonucleotide
  Antisense strand to SEQ ID NO: 2398108
aucccuguugagcaauggg

SEQ ID NO: 2398110 - RNA, 19 nt, Artificial Sequence
  Description of Artificial Sequence: Synthetic oligonucleotide
  Sense strand starting at position 1200 of SEQ ID NO: 1886271
agaugcaauccuugaaucu

SEQ ID NO: 2398111 - RNA, 19 nt, Artificial Sequence
  Description of Artificial Sequence: Synthetic oligonucleotide
  Antisense strand to SEQ ID NO: 2398110
agauucaaggauugcaucu

SEQ ID NO: 2398112 - RNA, 19 nt, Artificial Sequence
  Description of Artificial Sequence: Synthetic oligonucleotide
  Sense strand starting at position 1210 of SEQ ID NO: 1886271
cuugaaucuccgugaccca

SEQ ID NO: 2398113 - RNA, 19 nt, Artificial Sequence
  Description of Artificial Sequence: Synthetic oligonucleotide
  Antisense strand to SEQ ID NO: 2398112
ugggucacggagauucaag

SEQ ID NO: 2398114 - RNA, 19 nt, Artificial Sequence
  Description of Artificial Sequence: Synthetic oligonucleotide
  Sense strand starting at position 1211 of SEQ ID NO: 1886271
uugaaucuccgugacccaa

SEQ ID NO: 2398115 - RNA, 19 nt, Artificial Sequence
  Description of Artificial Sequence: Synthetic oligonucleotide
  Antisense strand to SEQ ID NO: 2398114
uugggucacggagauucaa

SEQ ID NO: 2398116 - RNA, 19 nt, Artificial Sequence
  Description of Artificial Sequence: Synthetic oligonucleotide
  Sense strand starting at position 1391 of SEQ ID NO: 1886271
ucgaguugggcagaaggaa

SEQ ID NO: 2398117 - RNA, 19 nt, Artificial Sequence
  Description of Artificial Sequence: Synthetic oligonucleotide
  Antisense strand to SEQ ID NO: 2398116
uuccuucugcccaacucga

SEQ ID NO: 2398118 - RNA, 19 nt, Artificial Sequence
  Description of Artificial Sequence: Synthetic oligonucleotide
  Sense strand starting at position 1484 of SEQ ID NO: 1886271
aaagcugccuccuggagaa

SEQ ID NO: 2398119 - RNA, 19 nt, Artificial Sequence
  Description of Artificial Sequence: Synthetic oligonucleotide
  Antisense strand to SEQ ID NO: 2398118
uucuccaggaggcagcuuu

SEQ ID NO: 2398120 - RNA, 19 nt, Artificial Sequence
  Description of Artificial Sequence: Synthetic oligonucleotide
  Sense strand starting at position 1526 of SEQ ID NO: 1886271
cagguuggcugccugagaa

SEQ ID NO: 2398121 - RNA, 19 nt, Artificial Sequence
  Description of Artificial Sequence: Synthetic oligonucleotide
  Antisense strand to SEQ ID NO: 2398120
uucucaggcagccaaccug

SEQ ID NO: 2398122 - RNA, 19 nt, Artificial Sequence
  Description of Artificial Sequence: Synthetic oligonucleotide
  Sense strand starting at position 1622 of SEQ ID NO: 1886271
cucaccuaugucggucaau

SEQ ID NO: 2398123 - RNA, 19 nt, Artificial Sequence
  Description of Artificial Sequence: Synthetic oligonucleotide
  Antisense strand to SEQ ID NO: 2398122
auugaccgacauaggugag

SEQ ID NO: 2398124 - RNA, 19 nt, Artificial Sequence
  Description of Artificial Sequence: Synthetic oligonucleotide
  Sense strand starting at position 2643 of SEQ ID NO: 1886271
gccacaugcuuucucugau

SEQ ID NO: 2398125 - RNA, 19 nt, Artificial Sequence
  Description of Artificial Sequence: Synthetic oligonucleotide
  Antisense strand to SEQ ID NO: 2398124
aucagagaaagcauguggc

SEQ ID NO: 2398126 - RNA, 19 nt, Artificial Sequence
  Description of Artificial Sequence: Synthetic oligonucleotide
  Sense strand starting at position 2804 of SEQ ID NO: 1886271
ggcaaauucccaggacaag

SEQ ID NO: 2398127 - RNA, 19 nt, Artificial Sequence
  Description of Artificial Sequence: Synthetic oligonucleotide
  Antisense strand to SEQ ID NO: 2398126
cuuguccugggaauuugcc

SEQ ID NO: 2398128 - RNA, 19 nt, Artificial Sequence
  Description of Artificial Sequence: Synthetic oligonucleotide
  Sense strand starting at position 2805 of SEQ ID NO: 1886271
gcaaauucccaggacaagu

SEQ ID NO: 2398129 - RNA, 19 nt, Artificial Sequence
  Description of Artificial Sequence: Synthetic oligonucleotide
  Antisense strand to SEQ ID NO: 2398128
acuuguccugggaauuugc

SEQ ID NO: 2398130 - RNA, 19 nt, Artificial Sequence
  Description of Artificial Sequence: Synthetic oligonucleotide
  Sense strand starting at position 2814 of SEQ ID NO: 1886271
caggacaagucccuugaca

SEQ ID NO: 2398131 - RNA, 19 nt, Artificial Sequence
  Description of Artificial Sequence: Synthetic oligonucleotide
  Antisense strand to SEQ ID NO: 2398130
ugucaagggacuuguccug

SEQ ID NO: 2398132 - RNA, 19 nt, Artificial Sequence
  Description of Artificial Sequence: Synthetic oligonucleotide
  Sense strand starting at position 3071 of SEQ ID NO: 1886271
uggguagcauuccuugaau

SEQ ID NO: 2398133 - RNA, 19 nt, Artificial Sequence
  Description of Artificial Sequence: Synthetic oligonucleotide
  Antisense strand to SEQ ID NO: 2398132
auucaaggaaugcuaccca

SEQ ID NO: 2398134 - RNA, 19 nt, Artificial Sequence
  Description of Artificial Sequence: Synthetic oligonucleotide
  Sense strand starting at position 3073 of SEQ ID NO: 1886271
gguagcauuccuugaaucu

SEQ ID NO: 2398135 - RNA, 19 nt, Artificial Sequence
  Description of Artificial Sequence: Synthetic oligonucleotide
  Antisense strand to SEQ ID NO: 2398134
agauucaaggaaugcuacc

SEQ ID NO: 2398136 - RNA, 19 nt, Artificial Sequence
  Description of Artificial Sequence: Synthetic oligonucleotide
  Sense strand starting at position 3074 of SEQ ID NO: 1886271
guagcauuccuugaaucuc

SEQ ID NO: 2398137 - RNA, 19 nt, Artificial Sequence
  Description of Artificial Sequence: Synthetic oligonucleotide
  Antisense strand to SEQ ID NO: 2398136
gagauucaaggaaugcuac

SEQ ID NO: 2398138 - RNA, 19 nt, Artificial Sequence
  Description of Artificial Sequence: Synthetic oligonucleotide
  Sense strand starting at position 3225 of SEQ ID NO: 1886271
cgaguuucagcugggaacu

SEQ ID NO: 2398139 - RNA, 19 nt, Artificial Sequence
  Description of Artificial Sequence: Synthetic oligonucleotide
  Antisense strand to SEQ ID NO: 2398138
aguucccagcugaaacucg

SEQ ID NO: 2398140 - RNA, 19 nt, Artificial Sequence
  Description of Artificial Sequence: Synthetic oligonucleotide
  Sense strand starting at position 3243 of SEQ ID NO: 1886271
ugcauuauguugggcugaa

SEQ ID NO: 2398141 - RNA, 19 nt, Artificial Sequence
  Description of Artificial Sequence: Synthetic oligonucleotide
  Antisense strand to SEQ ID NO: 2398140
uucagcccaacauaaugca

SEQ ID NO: 2398142 - RNA, 19 nt, Artificial Sequence
  Description of Artificial Sequence: Synthetic oligonucleotide
  Sense strand starting at position 3244 of SEQ ID NO: 1886271
gcauuauguugggcugaag

SEQ ID NO: 2398143 - RNA, 19 nt, Artificial Sequence
  Description of Artificial Sequence: Synthetic oligonucleotide
  Antisense strand to SEQ ID NO: 2398142
cuucagcccaacauaaugc

SEQ ID NO: 2398144 - RNA, 19 nt, Artificial Sequence
  Description of Artificial Sequence: Synthetic oligonucleotide
  Sense strand starting at position 3247 of SEQ ID NO: 1886271
uuauguugggcugaaggaa

SEQ ID NO: 2398145 - RNA, 19 nt, Artificial Sequence
  Description of Artificial Sequence: Synthetic oligonucleotide
  Antisense strand to SEQ ID NO: 2398144
uuccuucagcccaacauaa

SEQ ID NO: 2398146 - RNA, 19 nt, Artificial Sequence
  Description of Artificial Sequence: Synthetic oligonucleotide
  Sense strand starting at position 3306 of SEQ ID NO: 1886271
ggaaaugcaugcuccuaga

SEQ ID NO: 2398147 - RNA, 19 nt, Artificial Sequence
  Description of Artificial Sequence: Synthetic oligonucleotide
  Antisense strand to SEQ ID NO: 2398146
ucuaggagcaugcauuucc

SEQ ID NO: 2398148 - RNA, 19 nt, Artificial Sequence
  Description of Artificial Sequence: Synthetic oligonucleotide
  Sense strand starting at position 3361 of SEQ ID NO: 1886271
caucccuccugauggguaa

SEQ ID NO: 2398149 - RNA, 19 nt, Artificial Sequence
  Description of Artificial Sequence: Synthetic oligonucleotide
  Antisense strand to SEQ ID NO: 2398148
uuacccaucaggagggaug

SEQ ID NO: 2398150 - RNA, 19 nt, Artificial Sequence
  Description of Artificial Sequence: Synthetic oligonucleotide
  Sense strand starting at position 3380 of SEQ ID NO: 1886271
ccuguuggcucccugagaa

SEQ ID NO: 2398151 - RNA, 19 nt, Artificial Sequence
  Description of Artificial Sequence: Synthetic oligonucleotide
  Antisense strand to SEQ ID NO: 2398150
uucucagggagccaacagg

SEQ ID NO: 2398152 - RNA, 19 nt, Artificial Sequence
  Description of Artificial Sequence: Synthetic oligonucleotide
  Sense strand starting at position 3466 of SEQ ID NO: 1886271
acaggaugcucugacccau

SEQ ID NO: 2398153 - RNA, 19 nt, Artificial Sequence
  Description of Artificial Sequence: Synthetic oligonucleotide
  Antisense strand to SEQ ID NO: 2398152
augggucagagcauccugu

SEQ ID NO: 2398154 - RNA, 19 nt, Artificial Sequence
  Description of Artificial Sequence: Synthetic oligonucleotide
  Sense strand starting at position 3515 of SEQ ID NO: 1886271
agaagaacuuacugaaaga

SEQ ID NO: 2398155 - RNA, 19 nt, Artificial Sequence
  Description of Artificial Sequence: Synthetic oligonucleotide
  Antisense strand to SEQ ID NO: 2398154
ucuuucaguaaguucuucu

SEQ ID NO: 2398156 - RNA, 19 nt, Artificial Sequence
  Description of Artificial Sequence: Synthetic oligonucleotide
  Sense strand starting at position 423 of SEQ ID NO: 1886272
ugagauccaugugaaauac

SEQ ID NO: 2398157 - RNA, 19 nt, Artificial Sequence
  Description of Artificial Sequence: Synthetic oligonucleotide
  Antisense strand to SEQ ID NO: 2398156
guauuucacauggaucuca

SEQ ID NO: 2398158 - RNA, 19 nt, Artificial Sequence
  Description of Artificial Sequence: Synthetic oligonucleotide
  Sense strand starting at position 440 of SEQ ID NO: 1886272
acugacuugucacugacau

SEQ ID NO: 2398159 - RNA, 19 nt, Artificial Sequence
  Description of Artificial Sequence: Synthetic oligonucleotide
  Antisense strand to SEQ ID NO: 2398158
augucagugacaagucagu

SEQ ID NO: 2398160 - RNA, 19 nt, Artificial Sequence
  Description of Artificial Sequence: Synthetic oligonucleotide
  Sense strand starting at position 441 of SEQ ID NO: 1886272
cugacuugucacugacaug

SEQ ID NO: 2398161 - RNA, 19 nt, Artificial Sequence
  Description of Artificial Sequence: Synthetic oligonucleotide
  Antisense strand to SEQ ID NO: 2398160
caugucagugacaagucag

SEQ ID NO: 2398162 - RNA, 19 nt, Artificial Sequence
  Description of Artificial Sequence: Synthetic oligonucleotide
  Sense strand starting at position 737 of SEQ ID NO: 1886272
cuaagcauguacuggaaau

SEQ ID NO: 2398163 - RNA, 19 nt, Artificial Sequence
  Description of Artificial Sequence: Synthetic oligonucleotide
  Antisense strand to SEQ ID NO: 2398162
auuuccaguacaugcuuag

SEQ ID NO: 2398164 - RNA, 19 nt, Artificial Sequence
  Description of Artificial Sequence: Synthetic oligonucleotide
  Sense strand starting at position 910 of SEQ ID NO: 1886272
gugauaccauggcucagaa

SEQ ID NO: 2398165 - RNA, 19 nt, Artificial Sequence
  Description of Artificial Sequence: Synthetic oligonucleotide
  Antisense strand to SEQ ID NO: 2398164
uucugagccaugguaucac

SEQ ID NO: 2398166 - RNA, 19 nt, Artificial Sequence
  Description of Artificial Sequence: Synthetic oligonucleotide
  Sense strand starting at position 990 of SEQ ID NO: 1886272
ggccacccuucgugacauu

SEQ ID NO: 2398167 - RNA, 19 nt, Artificial Sequence
  Description of Artificial Sequence: Synthetic oligonucleotide
  Antisense strand to SEQ ID NO: 2398166
aaugucacgaaggguggcc

SEQ ID NO: 2398168 - RNA, 19 nt, Artificial Sequence
  Description of Artificial Sequence: Synthetic oligonucleotide
  Sense strand starting at position 1181 of SEQ ID NO: 1886272
cccauugcucaauagggau

SEQ ID NO: 2398169 - RNA, 19 nt, Artificial Sequence
  Description of Artificial Sequence: Synthetic oligonucleotide
  Antisense strand to SEQ ID NO: 2398168
aucccuauugagcaauggg

SEQ ID NO: 2398170 - RNA, 19 nt, Artificial Sequence
  Description of Artificial Sequence: Synthetic oligonucleotide
  Sense strand starting at position 1232 of SEQ ID NO: 1886272
ccuugaaucuccgugacca

SEQ ID NO: 2398171 - RNA, 19 nt, Artificial Sequence
  Description of Artificial Sequence: Synthetic oligonucleotide
  Antisense strand to SEQ ID NO: 2398170
uggucacggagauucaagg

SEQ ID NO: 2398172 - RNA, 19 nt, Artificial Sequence
  Description of Artificial Sequence: Synthetic oligonucleotide
  Sense strand starting at position 1233 of SEQ ID NO: 1886272
cuugaaucuccgugaccaa

SEQ ID NO: 2398173 - RNA, 19 nt, Artificial Sequence
  Description of Artificial Sequence: Synthetic oligonucleotide
  Antisense strand to SEQ ID NO: 2398172
uuggucacggagauucaag

SEQ ID NO: 2398174 - RNA, 19 nt, Artificial Sequence
  Description of Artificial Sequence: Synthetic oligonucleotide
  Sense strand starting at position 1234 of SEQ ID NO: 1886272
uugaaucuccgugaccaaa

SEQ ID NO: 2398175 - RNA, 19 nt, Artificial Sequence
  Description of Artificial Sequence: Synthetic oligonucleotide
  Antisense strand to SEQ ID NO: 2398174
uuuggucacggagauucaa

SEQ ID NO: 2398176 - RNA, 19 nt, Artificial Sequence
  Description of Artificial Sequence: Synthetic oligonucleotide
  Sense strand starting at position 1344 of SEQ ID NO: 1886272
ggcaguccuggagaccuua

SEQ ID NO: 2398177 - RNA, 19 nt, Artificial Sequence
  Description of Artificial Sequence: Synthetic oligonucleotide
  Antisense strand to SEQ ID NO: 2398176
uaaggucuccaggacugcc

SEQ ID NO: 2398178 - RNA, 19 nt, Artificial Sequence
  Description of Artificial Sequence: Synthetic oligonucleotide
  Sense strand starting at position 1589 of SEQ ID NO: 1886272
cggucuagcucaugaccaa

SEQ ID NO: 2398179 - RNA, 19 nt, Artificial Sequence
  Description of Artificial Sequence: Synthetic oligonucleotide
  Antisense strand to SEQ ID NO: 2398178
uuggucaugagcuagaccg

SEQ ID NO: 2398180 - RNA, 19 nt, Artificial Sequence
  Description of Artificial Sequence: Synthetic oligonucleotide
  Sense strand starting at position 1590 of SEQ ID NO: 1886272
ggucuagcucaugaccaau

SEQ ID NO: 2398181 - RNA, 19 nt, Artificial Sequence
  Description of Artificial Sequence: Synthetic oligonucleotide
  Antisense strand to SEQ ID NO: 2398180
auuggucaugagcuagacc

SEQ ID NO: 2398182 - RNA, 19 nt, Artificial Sequence
  Description of Artificial Sequence: Synthetic oligonucleotide
  Sense strand starting at position 2059 of SEQ ID NO: 1886272
cagcuuagugcagaagacu

SEQ ID NO: 2398183 - RNA, 19 nt, Artificial Sequence
  Description of Artificial Sequence: Synthetic oligonucleotide
  Antisense strand to SEQ ID NO: 2398182
agucuucugcacuaagcug

SEQ ID NO: 2398184 - RNA, 19 nt, Artificial Sequence
  Description of Artificial Sequence: Synthetic oligonucleotide
  Sense strand starting at position 2268 of SEQ ID NO: 1886272
ccuucauggucacguguga

SEQ ID NO: 2398185 - RNA, 19 nt, Artificial Sequence
  Description of Artificial Sequence: Synthetic oligonucleotide
  Antisense strand to SEQ ID NO: 2398184
ucacacgugaccaugaagg

SEQ ID NO: 2398186 - RNA, 19 nt, Artificial Sequence
  Description of Artificial Sequence: Synthetic oligonucleotide
  Sense strand starting at position 2273 of SEQ ID NO: 1886272
auggucacgugugaugaga

SEQ ID NO: 2398187 - RNA, 19 nt, Artificial Sequence
  Description of Artificial Sequence: Synthetic oligonucleotide
  Antisense strand to SEQ ID NO: 2398186
ucucaucacacgugaccau

SEQ ID NO: 2398188 - RNA, 19 nt, Artificial Sequence
  Description of Artificial Sequence: Synthetic oligonucleotide
  Sense strand starting at position 2275 of SEQ ID NO: 1886272
ggucacgugugaugagauc

SEQ ID NO: 2398189 - RNA, 19 nt, Artificial Sequence
  Description of Artificial Sequence: Synthetic oligonucleotide
  Antisense strand to SEQ ID NO: 2398188
gaucucaucacacgugacc

SEQ ID NO: 2398190 - RNA, 19 nt, Artificial Sequence
  Description of Artificial Sequence: Synthetic oligonucleotide
  Sense strand starting at position 2282 of SEQ ID NO: 1886272
ugugaugagauccaugcaa

SEQ ID NO: 2398191 - RNA, 19 nt, Artificial Sequence
  Description of Artificial Sequence: Synthetic oligonucleotide
  Antisense strand to SEQ ID NO: 2398190
uugcauggaucucaucaca

SEQ ID NO: 2398192 - RNA, 19 nt, Artificial Sequence
  Description of Artificial Sequence: Synthetic oligonucleotide
  Sense strand starting at position 2760 of SEQ ID NO: 1886272
uuugcuuagucccaagauc

SEQ ID NO: 2398193 - RNA, 19 nt, Artificial Sequence
  Description of Artificial Sequence: Synthetic oligonucleotide
  Antisense strand to SEQ ID NO: 2398192
gaucuugggacuaagcaaa

SEQ ID NO: 2398194 - RNA, 19 nt, Artificial Sequence
  Description of Artificial Sequence: Synthetic oligonucleotide
  Sense strand starting at position 2820 of SEQ ID NO: 1886272
aggaacaauuccuagucua

SEQ ID NO: 2398195 - RNA, 19 nt, Artificial Sequence
  Description of Artificial Sequence: Synthetic oligonucleotide
  Antisense strand to SEQ ID NO: 2398194
uagacuaggaauuguuccu

SEQ ID NO: 2398196 - RNA, 19 nt, Artificial Sequence
  Description of Artificial Sequence: Synthetic oligonucleotide
  Sense strand starting at position 2885 of SEQ ID NO: 1886272
gacacucaaccucggagaa

SEQ ID NO: 2398197 - RNA, 19 nt, Artificial Sequence
  Description of Artificial Sequence: Synthetic oligonucleotide
  Antisense strand to SEQ ID NO: 2398196
uucuccgagguugaguguc

SEQ ID NO: 2398198 - RNA, 19 nt, Artificial Sequence
  Description of Artificial Sequence: Synthetic oligonucleotide
  Sense strand starting at position 3066 of SEQ ID NO: 1886272
cccauugcucaacagggau

SEQ ID NO: 2398199 - RNA, 19 nt, Artificial Sequence
  Description of Artificial Sequence: Synthetic oligonucleotide
  Antisense strand to SEQ ID NO: 2398198
aucccuguugagcaauggg
